United States Patent Application Publication US 2022/0096574 A1 - sequence listing, part 2

SEQ ID NO: 1796 - DNA, 1397 bp, Legionella gratiana
aaacatgcaagtcgaacggagcacggtctagcttgctagatgggtggcgagtggcgaacgggtgagtaacgcgtaggaatatgccttgaagagggggataacttggggaaactcaagctaataccgcataatgtctaaggacgaaagctggggacctttgggcctggcgctttaagattagcctgcgtccgattagctagttggtggggtaagggcctaccaagccgacgatcggtagctggtctgagaggatgaccagccacactggaactgagacacggtccagactcctacgggaggcagcagtggggaatattggacaatggggggaaccctgatccagcaatgccgcgtgtgtgaagaaggcctgagggttgtaaagcactttcagtggggaggaggattgataggttaagagctaattgattggacgtcacccacagaagaagcaccggctaactccgtgccagcagccgcggtaatacggagggtgcgagcgttaatcggaattactgggcgtaaagcgtgcgtaggtggttgattaagttatctgtgaaatccctgggctcaacctgggcaggtcagatgatactggttgactcgagtatgggagagggtagtggaatttccggtgtagcggtgaaatgcgtagagatcggaaggaacaccagtggcgaaggcggctacctggcctaatactgacactgaggcacgaaagcgtggggagcaaacaggattagataccctggtagtccacgctgtaaacgatgtcaactagctgttggatatatgaagataattagtggcgcaccaaacgcgataagttgaccgcctcgggagtacggtcgcaagattaaaactcaaaggaattgacgggggcccgcacaagcggtggagcatgtggtttaattcgatgcaacgcgaagaaccttacctacccttgacatacagtgtattttgcagagatgcattagtgccttcaggagcactgatacaggtgctgcatggctgtcgtcagctcgtgtcgtgagatgttgggttaagtcccgtaacgagcgcaacccttatccttagttgccagccgtaggtgggaactctaaggagactgccggtgacaaaccggaggaaggcggggatgacgtcaagtcatcatggcccttacgggtagggctacacacgtgctacaatggacgatacagagggaagcgaaggggtgacctggagccaatcttagaaagtcgctcgtagtccggattggagtctgcaactcgactccatgaagtcggaatcgctagtaatcgcgaatcagcatgtcgcggtgaatacgttcccgggccttgtacacaccgcccgtcacaccatgggagtgggctgcaccagaagtagatagtctaacc

SEQ ID NO: 1797 - DNA, 1467 bp, Legionella hackeliae
attgaacgctggcggcatgcttaacacatgcaagtcgaacggcagcattttctagcttgctaggaagatggcgagtggcgaacgggtgagtaacgcgtaggaatatgccttaaagagggggacaacctggggaaactcaggctaataccgcataatttctgaggaaaaaagctggggaccgcaaggcctggcgctttaagattagcctgcgtccgattagctagttggtggggtaagggcctaccaaggcgacgatcggtagctggtctgagaggatgatcagccacactgggactgagacacggcccagactcctacgggaggcagcagtggggaatattggacaatggggggaaccctgatccagcaatgccgcgtgtgtgaagaaggcctgagggttgtaaagcactttcagtggggaggagattaggttaggttaagagctagacttaaggacgttacccacagaagaagcaccggctaactccgtgccagcagccgcggtaatacggagggtgcaagcgttaatcggaattactgggcgtaaagggtgcgtaggtggtttaataagttagttgtgaaatccctgggcttaacctgggaattgcacctaagactgttagactggagtataggagagggtagtggaatttccggtgtagcggtgaaatgcgtagagatcggaaggaacaccagtggcgaaggcggctacctggcctaatactgacactgaggcacgaaagcgtggggagcaaacaggattagataccctggtagtccacgctgtaaacgatgtcaactagctgttggtcttataaatgagattagtggcgcagcaaacgcgataagttgaccgcctggggagtacggtcgcaagattaaaactcaaaggaattgacgggggcccgcacaagcggtggagcatgtggtttaattcgatgcaacgcgaagaaccttacctacccttgacatacagtgaattttgcagagatgcattagtgccttcgggaacactgatacaggtgctgcatggctgtcgtcagctcgtgtcgtgagatgttgggttaagtcccgtaacgagcgcaacccttgtccttagttgccagcatgtaatggtggggactctaaggagactgccggtgacaaaccggaggaaggcggggatgacgtcaagtcatcatggcccttacgggtagggctacacacgtgctacaatggccggtacagagggaagcgaaggggcgacctggagcaaatccttaaaagctggtcgtagtccggattggagtctgcaactcgactccatgaagtcggaatcgctagtaatcgcgaatcagcatgtcgcggtgaatacgttcccgggccttgtacacaccgcccgtcacaccatgggagtgggttgcaccagaagtagatagtctaaccttcggggggacgtttaccacggtgtgattcatgactggggtg

SEQ ID NO: 1798 - DNA, 1466 bp, Legionella israelensis
attgaacgctggcggcatgcctaacacatgcaagtcgaacggcagcatggtccagcttgctggactgatggcgagtggcgaacgggtgagtaatgcgtaggaatatgccttagagagggggataacccggggaaactcgggctaataccgcatatgctctttggagtaaagctggggaccttatggcctggcgctttaagattagcctacgtccgattagctagttggtgaggtaagggcttaccaaggctatgatcggtagctggtctgagaggatggacagccacactgggactgagacacggcccagactcctacgggaggcagcagtggggaatattggacaatggggggaaccctgatccagcaatgccgcgtgtgtgaagaaggcctgagggttgtaaagcactatcggtggggaggaagttcagttggttaagagctgactggattgacgttacccacagaagaagcaccggctaactccgtgccagcagccgcggtaatacggagggtgcgagcgttaatcggaattactgggcgtaaagggtgcgtaggtggtttggtaagttatctgtgaaattcctgggcttaacctaggctggtcagataagactgctggactggagtataggagagggcagtggaatttccggtgtagcggtgaaatgcgtagagatcggaaggaacaccagtggcgaaggcggctgcctggcctaatactgacactgaggcacgaaagcgtgggtagcgaacaggattagataccctggtagtccacgctgtaaacgatgtcaactagctgttggctttatagagaaagttagtggcgcagcaaacgcgataagttgaccgcctggggagtacggtcgcaagattaaaactcaaaggaattgacgggggcccgcacaagcggtggagcatgtggtttaattcgatgcaacgcgaagaaccttacctacccttgacatacagtggagcttgcagagatgcgagtgtgccttcgggaacactggtacaggtgctgcatggctgtcgtcagctcgtgtcgtgagatgttgggttaagtcccgtaacgagcgcaacccttattcttagttaccagcacgttatggtggggactctaaggagactgccggtgacaaaccggaggaaggcggggacgacgtcaagtcatcatggcccttacgggtagggctacacacgtgctacaatggacggtacagagggaagcgaaggggcgacctggagcgaatccttaaaagctgttcgtagtccggattggagtctggaactcgactccatgaagtcggaatcgctagtaatcgcgaatcagcatgtcgcggtgaatacgttcccgggccttgtacacaccgcccgtcacaccatgggagtgggctgcaccagaagtagatagtctaaccttcggggggacgtttaccacggtgtggttcatgactggggtg

SEQ ID NO: 1799 - DNA, 1468 bp, Legionella jordanis
attgaacgctggcggcatgcttaacacatgcaagtcgaacggcagcatgacctagcttgctaggttgatggcgagtggcgaacgggtgagtaacgcgtaggaatatgccttaaagagggggataacctggggaaactcaggctaataccgcgtaatttctttggaaaaaagctggggaccgtaaggcctggcgctttaagattagcctgcgtccgattagctagttggtggggtaagggcctaccaaggcgacgatcggtagctggtctgagaggatgatcagccacactgggactgagacacggcccagactcctacgggaggcagcagtggggaatattggacaatgggggcaaccctgatccagcaatgccgcgtgtgtgaagaaggcctgagggttgtaaagcactttcagtggggaggagtggttagaaggttaagagccatttgactggacgttacccacagaagaagcaccggctaactccgtgccagcagccgcggtaatacggagggtgcgagcgttaatcggaattactgggcgtaaagggtgcgtaggtggtttggtaagttagttgtgaaatccctgggctcaacctgggaatggcgactaagactgccaggcttagagtataggagagggtagtggaatttccggtgtagcggtgaaatgcgtagagatcggaaggaacaccagtggcgaaggcggctacctggcctaatactgacactgaggcacgaaagcgtggggagcaaacaggattagataccctggtagtccacgctgtaaacgatgtcaactagctgttggtcttataaatgagattagtggcgcagcaaacgcgataagttgaccgcctggggagtacggtcgcaagattaaaactcaaaggaattgacgggggcccgcacaagcggtggagcatgtggtttaattcgatgcaacgcgaagaaccttacctacccttgacatacagtgaattttgcagagatgcattagtgccttcgggaacactgatacaggtgctgcatggctgtcgtcagctcgtgtcgtgagatgttgggttaagtcccgtaacgagcgcaacccttgtccttagttgccatcaagtgaagttggggactctaaggagactgccggtgacaaaccggaggaaggcggggatgacgtcaagtcatcatggcccttacgggtagggctacacacgtgctacaatggctggtacagaaggaagcgaaggggcgacctggagcaaatcctagaaagctggtcgtagtccggattggagtctgcaactcgactccatgaagtcggaatcgctagtaatcgcgaatcagcatgtcgcggtgaatacgttcccgggccttgtacacaccgcccgtcacaccatgggagtgggttgcaccagaagtagatagtctaaccttaggggggacgtttaccacggtgtgattcatgactggggtg

SEQ ID NO: 1800 - DNA, 1468 bp, Legionella lansingensis
attgaacgctggcggcatgcttaacacatgcaagtcgaacggcagcatggtctagcttgctagactgatggcgagtggcgaacgggtgagtaatgcgtaggaatataccttaaagagggggataacttggggaaactcaggctaataccgcgtaatctctgaggagagaagctggggaccttcgggcctggcgctttaagaatagcctgcgtccgattagctagttggtggggtaagggcttaccaaggcgacgatcggtagctggtctgagaggatggccagccacactgggactgagacacggcccagactcctacgggaggcagcagtggggaatattggacaatggggggaaccctgatccagcaatgccgcgtgtgtgaagaaggcctgagggttgtaaagcactttcagtggggaggagattttggttggttaagagctgactaggaggacgttacccacagaagaagcaccggctaactccgtgccagcagccgcggtaatacggagggtgcgagcgttaatcggaattactgggcgtaaagggtgcgtaggtggtttaataagttagctgtgaaattcctgggctcaacctggggcggtcagctaagactgttagactttgagtatgggagagggtagtggaatttccggtgtagcggtgaaatgcgtagagatcggaaggaacaccagtggcgaaggcggctacctggcctaatactgacactgaggcacgaaagcgtggggagcaaacaggattagataccctggtagtccacgctgtaaacgatgtcaactagctgttggtcttatgaatgagattagtggcgcagcaaacgcgataagttgaccgcctggggagtacggtcgcaagattaaaactcaaaggaattgacgggggcccgcacaagcggtggagcatgtggtttaattcgatgcaacgcgaagaaccttacctacccttgacatacagtggagcttgcagagatgtgagtgtgcctttgggaacactgatacaggtgctgcatggctgtcgtcagctcgtgtcgtgagatgttgggttaagtcccgtaacgagcgcaacccttgttcttagttgccagcgcgtagaggcggggactctaaggagactgccggtgacaaaccggaggaaggcggggatgacgtcaagtcatcatggcccttacgggtagggctacacacgtgctacaatggctagtacagaggggagcgaaggggtgacctggagcgaatccttaaaagttagtcgtagtccggattggagtctgcaactcgactccatgaagtcggaatcgctagtaatcgcgaatcagcatgtcgcggtgaatacgttcccgggccttgtacacaccgcccgtcacaccatgggagtgggttgcaccagaagtagatagtctaaccttcggggagacgtttaccacggtgtgattcatgactggggtg

SEQ ID NO: 1801 - DNA, 1467 bp, Legionella londiniensis
attgaacgctggcggcatgcttaacacatgcaagtcgaacggcagcatggtccagcttgctggactgatggcgagtggcgaacgggtgagtaacgcgtaggaatatgccttaaagagggggataacctggggaaactcaggctaataccgcataagctctgaggagtgaagctggggaccgtaaggcctggcgctttgagattagcctgcgtctgattagctagttggtggggtaagggcctaccaaggcgacgatcggtagctggtctgagaggatgatcagccacactgggactgagacacggcccagactcctacgggaggcagcagtggggaatattggacaatggggggaaccctgatccagcaatgccgcgtgtgtgaagaaggcctgagggttgtaaagcactttcggtggggaggatggaatggttggttaagagctgactgttctgacgttacccagagaagaagcaccggctaactccgtgccagcagccgcggtaatacggagggtgcgagcgttaatcggaattactgggcgtaaagggtgcgtaggtggtttagtaagttatctgtgaaattcctgggcttaacctgggttggtcagataagactgctgaactggagtataggagagggtagtggaatttccggtgtagcggtgaaatgcgtagagatcggaaggaacaccagtggcgaaggcggctacctggcctaatactgacactgaggcacgaaagcgtggggagcgaacaggattagataccctggtagtccacgctgtaaacgatgtcaactagctgttggccatatagagatggttagtggcgtagcaaacgcgctaagttgaccgcctggggagtacggtcgcaagattaaaactcaaaggaattgacgggggcccgcacaagcggtggagcatgtggtttaattcgatgcaacgcgaagaaccttacctacccttgacatacagtgaacctggcagagatgctggggtgccttcgggagcactgatacaggtgctgcatggctgtcgtcagctcgtgtcgtgagatgttgggttaagtcccgtaacgagcgcaacccttattcttagttgccagcgcgtgaaggcggggactctaaggagactgccggtgacaaaccggaggaaggcggggatgacgtcaagtcatcatggcccttacgggtagggctacacacgtgctacaatggccggtacagagggcggcgaagcggcgacgcggagcaaatcctttaaagctggtcgtagtccggattggagtctgcaactcgactccatgaagtcggaatcgctagtaatcgcgaatcagcatgtcgcggtgaatacgttcccgggccttgtacacaccgcccgtcacaccatgggagtgggctgcaccagaagcagatagtctaaccttttgggggacgtttgccacggtgtggttcatgactggggtg

SEQ ID NO: 1802 - DNA, 1456 bp, Legionella longbeachae
ggcggcatgcttaacacatgcaagtcgaacggcagcatgacctagcttgctaggttgatggcgagtggcgaacgggtgagtaacgcgtaggaatatgccttgaagactgggataacttggggaaactcaagctaataccggatgatgtctgaggacgaaagctggggaccttcgggcctggcgctttaagattagcctgcgtccgattagctagttggtggggtaagggcctaccaaggcgacgatcggtagctggtctgagaggatgaccagccacactggaactgagacacggtccagactcctacgggaggcagcagtggggaatattggacaatgggggcaaccctgatccagcaatgccgcgtgtgtgaagaaggcctgagggttgtaaagcactttcagtggggaggagggttgataggttaagagctaattgattggacgttacccacagaagaagcaccggctaactccgtgccagcagccgcggtaatacggagggtgcaagcgttaatcggaattactgggcgtaaagcgtgcgtaggtggttgattaagttatctgtgaaatccctgggcttaacctgggcaggtcagatgatactggttgactcgagtatgggagagggtagtggaatttccggtgtagcggtgaaatgcgtagagatcggaaggaacaccagtggcgaaggcggctacctggcctaatactgacactgaggcacgaaagcgtggggagcaaacaggattagataccctggtagtccacgccgtaaacgatgtcaactagctgttggatatatgaatatatttagtggcgcagcaaacgcgataagttgaccgcctggggagtacggtcgcaagattaaaactcaaaggaattgacgggggcccgcacaagcggtggagcatgtggtttaattcgatgcaacgcgaagaaccttacctacccttgacatacagtgaattttgcagagatgcattagtgccttcgggaacactgatacaggtgctgcatggctgtcgtcagctcgtgtcgtgagatgttgggttaagtcccgtaacgagcgcaacccttgtccttagttgccagcacgtaaaggtgggaactctaaggagactgccggtgacaaaccggaggaaggcggggatgacgtcaagtcatcatggcccttacgggtagggctacacacgtgctacaatggacgatacagagggaagcgaaggggtgacctggagccaatcttagaaagtcgttcgtagtccggattggagtctgcaactcgactccatgaagtcggaatcgctagtaatcgcgaatcagcatgtcgcggtgaatacgttcccgggccttgtacacaccgcccgtcacaccatgggagtgggctgcaccagaagtagatagtctaaccttcggggggacgtttaccacggtgtggttcatgactggggtg

SEQ ID NO: 1803 - DNA, 1469 bp, Legionella maceachernii
attgaacgctggcggcatgcttaacacatgcaagtcgaacggcagcacggtctagtttactagatgggtggcgagtggcgaacgggtgagtaacgcgtaggaatatgccttaaagtttgggataacatggggaaactcatgctaataccggatgagctcttaggaggaaagctggggaccatttatggcctggcgctttaagattagcctgcgtccgattagctagttggtggggtaagggcctaccaaggcgacgatcggtagctggtctgagaggatgatcagccacactgggactgagacacggcccagactcctacgggaggcagcagtggggaatattggacaatggggggaaccctgatccagcaatgccgcgtgtgtgaagaaggcctgagggttgtaaagcactttcagtggggaggagggatgataggttaagagctaattatctggacgttacccacagaagaagcaccggctaactccgtgccagcagccgcggtaatacggagggtgcgagcgttaatcggaattactgggcgtaaagggtgcgtaggtggtttagtaagttatctgtgaaattcctgggctcaacctagggtggtcagataagactgctggactaagagtataggagagggtagtggaatttccggtgtagcggtgaaatgcgtagagatcggaaggaacaccagtggcgaaggcggctacctggcctaatactgacactgaggcacgaaagcgtggggagcaaacaggattagataccctggtagtccacgctgtaaacgatgtcaactagttgttggccttatgaatgaggttagtgacgaagcaaacgcgataagttgaccgcctggggagtacggtcgcaagattaaaactcaaaggaattgacgggggcccgcacaagcggtggagcatgtggtttaattcgatgcaacgcgaagaaccttacctacccttgacatacagtgaattctgcagagatgcggaagtgccgcgaggagcactgctacaggtgctgcatggctgtcgtcagctcgtgtcgtgagatgttgggttaagtcccgtaacgagcgcaacccttattcttagttaccatcgcgtagaggcggggactctaaggagactgccggtgacaaaccggaggaaggcggggatgacgtcaagtcatcatggcccttacgggtagggctacacacgtgctacaatggccggtacagagggcggcgaaggggtgacctggagcaaatctttgaaagctggtcgtagtccggattggagtctgcaactcgactccatgaagtcggaatcgctagtaatcgcgaatcagcatgtcgcggtgaatacgttcccgggccttgtacacaccgcccgtcacaccatgggagtgggttgcaccagaagtagatagtctaaccttaggggggacgtttaccacggtgtgattcatgactggggtg

SEQ ID NO: 1804 - DNA, 1466 bp, Legionella massiliensis
attgaacgctggcggcatgcttaacacatgcaagtcgaacggcagcatgatctagcttgctagattgatggcgagtggcgaacgggtgagtaacgcgtaggaatataccttagagagggggataacatggggaaactcatgctaataccgcatacgttcttcggaataaagctggggaccttcgggcctggcgctttaagaatagcctgcgtccgattagctagttggtagggtaagggcctaccaaggcgacgatcggtagctggtctgagaggatggccagccacactgggactgagacacggcccagactcctacgggaggcagcagtggggaatattggacaatggggggaaccctgatccagcaatgccgcgtgtgtgaagaaggcctgagggttgtaaagcactttcagtggggaggagggttgataggttaagagctaattaactggacgttacccacagaagaagcaccggctaactccgtgccagcagccgcggtaatacggagggtgcaagcgttaatcggaattactgggcgtaaagggtgcgtaggtggttatgtaagttatctgtgaaatccccgggctcaacctgggcaggtcagataagactgcgtaactcgagtatgggagagggtagtggaatttccggtgtagcggtgaaatgcgtagagatcggaaggaacaccagtggcgaaggcggctacctggcccaatactgacactgaggcacgaaagcgtggggagcaaacaggattagataccctggtagtccacgccgtaaacgatgtcaactagctgttggccttatgaatgaggttagtggcgcagcaaacgcgataagttgaccgcctggggagtacggtcgcaagattaaaactcaaaggaattgacgggggcccgcacaagcggtggagcatgtggtttaattcgatgcaacgcgaagaaccttacctacccttgacatacagtgaattttgcagagatgtggaagtgccttcgggaacactgatacaggtgctgcatggctgtcgtcagctcgtgtcgtgagatgttgggttaagtcccgtaacgagcgcaacccttatccttagttaccagcacgttgaggtggggactctaaggagactgccggtgacaaaccggaggaaggcggggatgacgtcaagtcatcatggcccttacgggtagggctacacacgtgctacaatggccggtacagagggcagcgaaggggcgacctggagcaaatcttttaaagctggtcgtagtccggattggagtctgcaactcgactccatgaagtcggaatcgctagtaatcgcgaatcagcatgtcgcggtgaatacgttcccgggccttgtacacaccgcccgtcacaccatgggagtgggttgcaccagaagtagatagtctaaccttcgggaggacgtttaccacggtgtgattcatgactggggtg

SEQ ID NO: 1805 - DNA, 1466 bp, Legionella moravica
attgaacgctggcggcatgcttaacacatgcaagtcgaacggcagcatgacctagcttgctaggttgatggcgagtggcgaacgggtgagtaacgcgtaggaatataccttaaagagggggacaacttggggaaactcaagctaataccgcataatttccttggaaaaaagctggggaccttcgggcctggcgctttaagattagcctgcgtacgattagctagttggtagggtaaaggcctaccaaggcgacgatcgttagctggtctgagaggatgaccagccacactggaactgagacacggtccagactcctacgggaggcagcagtggggaatattggacaatgggggcaaccctgatccagcaatgccgcgtgtgtgaagaaggcctgagggttgtaaagcactttcagtggggaggagggttgacaggttaagagctagttaactggacgttacccacagaagaagcaccggctaactccgtgccagcagccgcggtaatacggagggtgcaagcgttaatcggaattactgggcgtaaagggtgcgtaggtggttaattaagttatctgtgaaatccccgggctcaacctgggcaggtcagataatactggttaactcgagtatgggagagggtagtggaatttccggtgtagcggtgaaatgcgtagagatcggaaggaacaccagtggcgaaggcggctacctggcctaatactgacactgaggcacgaaagcgtggggagcaaacaggattagataccctggtagtccacgctgtaaacgatgtcaactagctgttggatatatgaatatatttagtggcgaagcaaacgcgataagttgaccgcctggggagtacggtcgcaagattaaaactcaaaggaattgacgggggcccgcacaagcggtggagcatgtggtttaattcgatgcaacgcgaagaaccttacctacccttgacatacagtggattttgcagagatgcattagtgccttcgggaacactgatacaggtgctgcatggctgtcgtcagctcgtgtcgtgagatgttgggttaagtcccgtaacgagcgcaacccttatccttagttgccagcacgtaatggtgggaactctaaggagactgccggtgacaaaccggaggaaggcggggatgacgtcaagtcatcatggcccttacgggtagggctacacacgtgctacaatggccgatacagagggcagcgaaggggcgacctggagcaaatcttttaaagtcggtcgtagtccggattggagtctgcaactcgactccatgaagtcggaatcgctagtaatcgcgaatcagcatgtcgcggtgaatacgttcccgggccttgtacacaccgcccgtcacaccatgggagtgggctgcaccagaagtagatagtctaaccgcaagggggacgtttaccacggtgtggttcatgactggggtg

SEQ ID NO: 1806 - DNA, 1466 bp, Legionella nautarum
attgaacgctggcggcatgcttaacacatgcaagtcgaacggcagcacggtctagcttgctagatgggtggcgagtggcgaacgggtgagtaacgcgtaggaatatgccttgaagtttgggataacatggggaaactcatgctaataccggatgagctcgagagaggaaagctggggaccttttggcctggcgctttaagattagcctgcgtccgattagctagttggtggggtaagggcctaccaaggcgacgatcggtagctggtctgagaggatggccagccacactgggactgagacacggcccagactcctacgggaggcagcagtggggaatattggacaatggggggaaccctgatccagcaatgccgcgtgtgtgaagaaggcctgagggttgtaaagcactttcagtggggaggaggattgattggttaagagctgattgattggacgttacccacagaagaagcaccggctaactccgtgccagcagccgcggtaatacggagggtgcgagcgttaatcggaattactgggcgtaaagggtgcgtaggtggttgtataagttagctgtgaaatccctgggctcaacctgggcaggtcagctaagactgtatgactcgagtataggagagggtagtggaatttccggtgtagcggtgaaatgcgtagagatcggaaggaacaccagtggcgaaggcggctacctggcctaatactgacactgaggcacgaaagcgtggggagcaaacaggattagataccctggtagtccacgctgtaaacgatgtcaactagttgttggccttatgaatgaggttagtgacgcagcaaacgcgataagttgaccgcctggggagtacggtcgcaagattaaaactcaaaggaattgacgggggcccgcacaagcggtggagcatgtggtttaattcgatgcaacgcgaagaaccttacctacccttgacatacagtgaacattgcagagatgcattggtgccttcgggagcactgatacaggtgctgcatggctgtcgtcagctcgtgtcgtgagatgttgggttaagtcccgtaacgagcgcaacccttatccttagttgccagcatgtgatggtggggactctaaggagactgccggtgacaaaccggaggaaggcggggatgacgtcaagtcatcatggcccttacgggtagggctacacacgtgctacaatggccggtacagagggcagcgaaggggcgacctggagcaaatcttgtaaagctggtcgtagtccggattggagtctgcaactcgactccatgaagtcggaatcgctagtaatcgcgaatcagcatgtcgcggtgaatacgttcccgggccttgtacacaccgcccgtcacaccatgggagtgggttgcaccagaagtagatagtctaaccttaggggggacgtttaccacggtgtgattcatgactggggtg

SEQ ID NO: 1807 - DNA, 1466 bp, Legionella oakridgensis
attgaacgctggcggcatgcttaacacatgcaagtcgaacggcagcacggactagtttactagttgggtggcgagtggcggacgggtgagtaacgcgtaggaatatgccttaaagagtgggacaacctggggaaactcaggctaataccgcatgaactctgaggaggaaagctggggaccgtaaggcctggcgctttaagagtagcctgcgtccgattagctagttggtggggtaagggcctaccaaggcgacgatcggtagctggtctgagaggatgatcagccacactgggactgagacacggcccagactcctacgggaggcagcagtggggaatattggacaatggggggaaccctgatccagcaatgccgcgtgtgtgaagaaggcctgagggttgtaaagcacttttgttggggaggagtcttgttaggttaagagctagatgagaggacgttacccaaagaaaaagcaccggctaactccgtgccagcagccgcggtaatacggagggtgcgagcgttaatcggaattactgggcgtaaagggtgcgtaggttgctgattaagttatctgtgaaattcctgggctcaacctggggtggtcagataagactggttagctggagtataggagagggtagtggaatttccggtgtagcggtgaaatgcgtagagatcggaaggaacaccagtggcgaaggcggctacctggcctaatactgacactgaggcacgaaagcgtggggagcgaacaggattagataccctggtagtccacgctgtaaacgatgtcaactagctgttggtcatataaatgtgattagtggcgtagcaaacgcgctaagttgaccgcctggggagtacggtcgcaagattaaaactcaaaggaattgacgggggcccgcacaagcggtggagcatgtggtttaattcgatgcaacgcgaagaaccttacctacccttgacatacagtggagcttgcagagatgtgggtgtgccttcgggaacactgctacaggtgctgcatggctgtcgtcagctcgtgtcgtgagatgttgggttaagtcccgtaacgagcgcaacccttattcttagttgccagcgcgtgaaggcgggaactctaaggagactgccggtgacaaaccggaggaaggcggggatgacgtcaagtcatcatggcccttacgggtagggctacacacgtgctacaatggccggtacagagggcggcgaaggggtgacctggagcaaatccttgaaagctggtcgtagtccggattggagtctgcaactcgactccatgaagtcggaatcgctagtaatcgcgaatcagcatgtcgcggtgaatacgttcccgggccttgtacacaccgcccgtcacaccatgggagtgggctgcaccagaagcggatagtctaaccttcggggggacgtttgccacggtgtggttcatgactggggtg

SEQ ID NO: 1808 - DNA, 1466 bp, Legionella parisiensis
attgaacgctggcggcatgcttaacacatgcaagtcgaacggcagcatagtctagcttgctagactgatggcgagtggcgaacgggtgagtaacgcgtaggaatatgccttgaagtgggggacaacttggggaaactcaagctaataccgcataatgtctaaggacgaaagctggggaccttcgggcctggcgctttaagattagcctgcgtccgattagctagttggtggggtaagggcctaccaaggcgacgatcggtagctggtctgagaggatggccagccacactggaactgagacacggtccagactcctacgggaggcagcagtggggaatattggacaatggggggaaccctgatccagcaatgccgcgtgtgtgaagaaggcctgagggttgtaaagcactttcagtggggaggagggttgataggttaagagctaattaactggacgttacccacagaagaagcaccggctaactccgtgccagcagccgcggtaatacggagggtgcaagcgttaatcggaattactgggcgtaaagcgtgcgtaggtggttgattaagttatctgtgaaatccctgggcttaacctgggcaggtcagatgatactggttgactcgagtatgggagagggtagtggaatttccggtgtagcggtgaaatgcgtagagatcggaaggaacaccagtggcgaaggcggctacctggcctaatactgacactgaggcacgaaagcgtggggagcaaacaggattagataccctggtagtccacgccgtaaacgatgtcaactagctgttggttatatgaaaataattagtggcgcagcaaacgcgataagttgaccgcctggggagtacggtcgcaagattaaaactcaaaggaattgacgggggcccgcacaagcggtggagcatgtggtttaattcgatgcaacgcgaagaaccttacctacccttgacatacagtgaattttgcagagatgcattagtgccttcgggaacactgatacaggtgctgcatggctgtcgtcagctcgtgtcgtgagatgttgggttaagtcccgtaacgagcgcaacccttgtccttagttgccagcgcgtaaaggcgggaactctaaggagactgccggtgacaaaccggaggaaggcggggacgacgtcaagtcatcatggcccttacgggtagggctacacacgtgctacaatgggcgatacagagggaagcgaaggggtgacctggagctaatcttagaaagttgctcgtagtccggattggagtctgcaactcgactccatgaagtcggaatcgctagtaatcgcgaatcagcatgtcgcggtgaatacgttcccgggccttgtacacaccgcccgtcacaccatgggagtgggctgcaccagaagtagatagtctaaccttcgggaggacgtttaccacggtgtggttcatgactggggtg

SEQ ID NO: 1809 - DNA, 1466 bp, Legionella pneumophila
attgaacgctggcggcatgcttaacacatgcaagtcgaacggcagcattgtctagcttgctagacagatggcgagtggcgaacgggtgagtaacgcgtaggaatatgccttgaagagggggacaacttggggaaactcaagctaataccgcataatatctttggatgaaagctggggaccttcgggcctggcgctttaagattagcctgcgtccgattagctagttggtggggtaagggcctaccaaggcgacgatcggtagctggtctgagaggatggccagccacactggaactgagacacggtccagactcctacgggaggcagcagtggggaatattggacaatgggggcaaccctgatccagcaatgccgcgtgtgtgaagaaggcctgagggttgtaaagcactttcagtggggaggaggattgataggttaagagctgattgattggacgttacccacagaagaagcaccggctaactccgtgccagcagccgcggtaatacggagggtgcgagcgttaatcggaattactgggcgtaaagggtgcgtaggtggttgattaagttatctgtgaaattcctgggcttaacctgggacggtcagataatactggttgactcgagtatgggagagggtagtggaatttccggtgtagcggtgaaatgcgtagagatcggaaggaacaccagtggcgaaggcggctacctggcctaatactgacactgaggcacgaaagcgtggggagcaaacaggattagataccctggtagtccacgctgtaaacgatgtcaactagctgttggttatatgaaaataattagtggcgcagcaaacgcgataagttgaccgcctggggagtacggtcgcaagattaaaactcaaaggaattgacgggggcccgcacaagcggtggagcatgtggtttaattcgatgcaacgcgaagaaccttacctacccttgacatacagtggattttgcagagatgcattagtgccttcgggaacactgatacaggtgctgcatggctgtcgtcagctcgtgtcgtgagatgttgggttaagtcccgtaacgagcgcaacccttatccttagttgccagcatgtgatggtggggactctaaggagactgccggtgacaaaccggaggaaggcggggatgacgtcaagtcatcatggcccttacgggtagggctacacacgtgctacaatggccgatacagagggcggcgaaggggcgacctggagcaaatccttaaaagtcggtcgtagtccggattggagtctgcaactcgactccatgaagtcggaatcgctagtaatcgcgaatcagcatgtcgcggtgaatacgttcccgggccttgtacacaccgcccgtcacaccatgggagtgggttgcaccagaagtagatagtctaacctttggggggacgtttaccacggtgtggttcatgactggggtg

SEQ ID NO: 1810 - DNA, 1466 bp, Legionella quateirensis
attgaacgctggcggcatgcttaacacatgcaagtcgaacggcagcatgacctagcttgctaggttgatggcgagtggcgaacgggtgagtaacgcgtaggaatataccttaaagagggggacaacttggggaaactcaagctaataccgcataatttccttggaaaaaagctggggaccttcgggcctggcgctttaagattagcctgcgtacgattagctagttggtagggtaaaggcctaccaaggcgacgatcgttagctggtctgagaggatgaccagccacactggaactgagacacggtccagactcctacgggaggcagcagtggggaatattggacaatgggggcaaccctgatccagcaatgccgcgtgtgtgaagaaggcctgagggttgtaaagcactttcagtggggaggagggttgacaggttaagagctagttaactggacgttacccacagaagaagcaccggctaactccgtgccagcagccgcggtaatacggagggtgcaagcgttaatcggaattactgggcgtaaagggtgcgtaggtggttaattaagttatctgtgaaatccccgggctcaacctgggcaggtcagataatactggttaactcgagtatgggagagggtagtggaatttccggtgtagcggtgaaatgcgtagagatcggaaggaacaccagtggcgaaggcggctacctggcccaatactgacactgaggcacgaaagcgtggggagcaaacaggattagataccctggtagtccacgccgtaaacgatgtcaactagctgttggatatatgaatatatttagtggcgaagcaaacgcgataagttgaccgcctggggagtacggtcgcaagattaaaactcaaaggaattgacgggggcccgcacaagcggtggagcatgtggtttaattcgatgcaacgcgaagaaccttacctacccttgacatacagtggattttgcagagatgcattagtgccttcgggaacactgatacaggtgctgcatggctgtcgtcagctcgtgtcgtgagatgttgggttaagtcccgtaacgagcgcaacccttatccttagttgccagcacgtaatggtgggaactctaaggagactgccggtgacaaaccggaggaaggcggggatgacgtcaagtcatcatggcccttacgggtagggctacacacgtgctacaatggccgatacagagggcagcgaaggggcgacctggagcaaatcttttaaagtcggtcgtagtccggattggagtctgcaactcgactccatgaagtcggaatcgctagtaatcgcgaatcagcatgtcgcggtgaatacgttcccgggccttgtacacaccgcccgtcacaccatgggagtgggctgcaccagaagtagatagtctaaccgcaaggaggacgtttaccacggtgtggttcatgactggggtg

SEQ ID NO: 1811 - DNA, 1466 bp, Legionella quinlivanii
attgaacgctggcggcatgcttaacacatgcaagtcgaacggcagcacgacctagcttgctaggtgggtggcgagtggcgaacgggtgagtaacgcgtaggaatataccttagagagggggataacctggggaaactcaggctaataccgcgtacgttcttcggaataaagctggggaccttcgggcctggcgctttaagaatagcctgcgtccgattagctagttggtggggtaagggcctaccaaggcgacgatcggtagctggtctgagaggatgatcagccacactgggactgagacacggcccagactcctacgggaggcagcagtggggaatattggacaatgggggcaaccctgatccagcaatgccgcgtgtgtgaagaaggcctgagggttgtaaagcactttcagtggggaggagggttgacaggttaagagctagttaactggacgttacccacagaagaagcaccggctaactccgtgccagcagccgcggtaatacggagggtgcgagcgttaatcggaattactgggcgtaaagggtgcgtaggtggtttgataagttaactgtgaaagccccgggcttaacctgggagggtcagttaagactgttggactagagtatgggagagggtagtggaatttccggtgtagcggtgaaatgcgtagagatcggaaggaacaccagtggcgaaggcggctacctggcctaatactgacactgaggcacgaaagcgtggggagcaaacaggattagataccctggtagtccacgctgtaaacgatgtcaactagctgttggtcttatgaatgagattagtggcgcagcaaacgcgataagttgaccgcctggggagtacggtcgcaagattaaaactcaaaggaattgacgggggcccgcacaagcggtggagcatgtggtttaattcgatgcaacgcgaagaaccttacctacccttgacatacagtggagcttgcagagatgtgagtgtgccttcgggaacactgctacaggtgctgcatggctgtcgtcagctcgtgtcgtgagatgttgggttaagtcccgtaacgagcgcaacccttattcttagttgccagcgcgtagaggcgggaactctaaggagactgccggtgacaaaccggaggaaggcggggacgacgtcaagtcatcatggcccttacgggtagggctacacacgtgctacaatggccggtacagagggcagcgaaggggcgacctggagcaaatccttaaaagctggtcgtagtccggattggagtctgcaactcgactccatgaagtcggaatcgctagtaatcgcgaatcagcatgtcgcggtgaatacgttcccgggccttgtacacaccgcccgtcacaccatgggagtgggttgcaccagaagtagatagtctaaccttcggggggacgtttaccacggtgtgattcatgactggggtg

SEQ ID NO: 1812 - DNA, 1461 bp, Legionella rubrilucens
attgaacgctggcggcatgcttaacacatgcaagtcgaacggcagcacggtctagcttgctagatgggtggcgagtggcgaacgggtgagtaacgcgtaggaatataccttaaagtgggggacaacttggggaaactcaagctaataccgcatagatctctgaggagagaagctggggaccttcgggcctggcgctttaagattagcctgcgtccgattagctagttggtggggtaagggcctaccaaggcgacgatcggtagctggtctgagaggatgaccagccacactggaactgagacacggtccagactcctacgggaggcagcagtggggaatattggacaatggggggaaccctgatccagcaatgccgcgtgtgtgaagaaggcctgagggttgtaaagcactttcagtggggaggagggttgacaggttaagagctggttgactggacgttacccacagaagaagcaccggctaactccgtgccagcagccgcggtaatacggagggtgcgagcgttaatcggaattactgggcgtaaagggtgcgtaggtggtttgataagttatctgtgaaagccctgggctcaacctgggaactgcagataagactgttgaactcgagtataggagagggtagtggaatttccggtgtagcggtgaaatgcgtagagatcggaaggaacaccagtggcgaaggcggctacctggcctaatactgacactgaggcacgaaagcgtggggagcaaacaggattagataccctggtagtccacgctgtaaacgatgtcaactagctgttggtcttatgaatgagattagtggcgcagcaaacgcgataagttgaccgcctggggagtacggtcgcaagattaaaactcaaaggaattgacgggggcccgcacaagcggtggagcatgtggtttaattcgatgcaacgcgaagaaccttacctacccttgacatacagtgaacctttcagagatgagagggtgccttcgggagcactgatacaggtgctgcatggctgtcgtcagctcgtgtcgtgagatgttgggttaagtcccgtaacgagcgcaacccttatccttagttgccaacgcgtagaggcgggaactctagggagactgccggtgacaaaccggaggaaggcggggatgacgtcaagtcatcatggcccttacgggtagggctacacacgtgctacaatggccggtacagagggaagcgaaggggcgacctggagccaatctttaaaagccggtcgtagtccggattggagtctgcaactcgactccatgaagtcggaatcgctagtaatcgcgaatcagcatgtcgcggtgaatacgttcccgggccttgtacacaccgcccgtcacaccatgggagtgggttgcaccagaagtagatagtctaaccttcggggggacgtttaccacggtgtgattcatgact

SEQ ID NO: 1813 - DNA, 1466 bp, Legionella sainthelensi
attgaacgctggcggcatgcttaacacatgcaagtcgaacggcagcatgacctagcttgctaggttgatggcgagtggcgaacgggtgagtaacgcgtaggaatatgccttgaagactgggataacttggggaaactcaagctaataccggatgatgtcttaggacgaaagctggggaccttcgggcctggcgctttaagattagcctgcgtccgattagctagttggtggggtaagggcctaccaaggcgacgatcggtagctggtctgagaggatggccagccacactggaactgagacacggtccagactcctacgggaggcagcagtggggaatattggacaatgggggcaaccctgatccagcaatgccgcgtgtgtgaagaaggcctgagggttgtaaagcactttcagtggggaggagggttgataggttaagagctaattgattggacgttacccacagaagaagcaccggctaactccgtgccagcagccgcggtaatacggagggtgcaagcgttaatcggaattactgggcgtaaagcgtgcgtaggtggttaattaagttatctgtgaaatccctgggcttaacctgggcaggtcagatgatactggttaactcgagtatgggagagggtagtggaatttccggtgtagcggtgaaatgcgtagagatcggaaggaacaccagtggcgaaggcggctacctggcctaatactgacactgaggcacgaaagcgtggggagcaaacaggattagataccctggtagtccacgccgtaaacgatgtcaactagctgttggatatatgaatatatttagtggcgcagcaaacgcgataagttgaccgcctggggagtacggtcgcaagattaaaactcaaaggaattgacgggggcccgcacaagcggtggagcatgtggtttaattcgatgcaacgcgaagaaccttacctacccttgacatacagtgaattttgcagagatgcattagtgccttcgggaacactgatacaggtgctgcatggctgtcgtcagctcgtgtcgtgagatgttgggttaagtcccgtaacgagcgcaacccttgtccttagttgccagcacgtaaaggtgggaactctaaggagactgccggtgacaaaccggaggaaggcggggacgacgtcaagtcatcatggcccttacgggtagggctacacacgtgctacaatggacgatacagagggaagcgaaggggtgacctggagccaatcttagaaagtcgttcgtagtccggattggagtctgcaactcgactccatgaagtcggaatcgctagtaatcgcgaatcagcatgtcgcggtgaatacgttcccgggccttgtacacaccgcccgtcacaccatgggagtgggctgcaccagaagtagatagtctaaccttcggggggacgtttaccacggtgtggttcatgactggggtg

SEQ ID NO: 1814 - DNA, 1466 bp, Legionella santicrucis
attgaacgctggcggcatgcttaacacatgcaagtcgaacggcagcatgacctagcttgctaggttgatggcgagtggcgaacgggtgagtaacgcgtaggaatatgccttgaagactgggataacttggggaaactcaagctaataccggatgatgtctgaggacgaaagctggggaccttcgggcctggcgctttaagattagcctgcgtccgattagctagttggtggggtaagggcctaccaaggcgacgatcggtagctggtctgagaggatgaccagccacactggaactgagacacggtccagactcctacgggaggcagcagtggggaatattggacaatggggggaaccctgatccagcaatgccgcgtgtgtgaagaaggcctgagggttgtaaagcactttcagtggggaggaggattgataggttaagagctaattgattggacgttacccacagaagaagcaccggctaactccgtgccagcagccgcggtaatacggagggtgcaagcgttaatcggaattactgggcgtaaagcgtgcgtaggtggttgattaagttatctgtgaaatccctgggcttaacctgggcaggtcagatgatactggttgactcgagtatgggagagggtagtggaatttccggtgtagcggtgaaatgcgtagagatcggaaggaacaccagtggcgaaggcggctacctggcctaatactgacactgaggcacgaaagcgtggggagcaaacaggattagataccctggtagtccacgccgtaaacgatgtcaactagctgttggatatatgaatatatttagtggcgtagcaaacgcgataagttgaccgcctggggagtacggtcgcaagattaaaactcaaaggaattgacgggggcccgcacaagcggtggagcatgtggtttaattcgatgcaacgcgaagaaccttacctacccttgacatacagtggaacttgcagagatgtgagtgtgccttcgggaacactgatacaggtgctgcatggctgtcgtcagctcgtgtcgtgagatgttgggttaagtcccgtaacgagcgcaacccttgtccttagttgccagcacgtaaaggtgggaactctaaggagactgccggtgacaaaccggaggaaggcggggacgacgtcaagtcatcatggcccttacgggtagggctacacacgtgctacaatggacgatacagagggaagcgaaggggtgacctggagccaatcttagaaagtcgttcgtagtccggattggagtctgcaactcgactccatgaagtcggaatcgctagtaatcgcgaatcagcatgtcgcggtgaatacgttcccgggccttgtacacaccgcccgtcacaccatgggagtgggctgcaccagaagtagatagtctaaccttcggggggacgtttaccacggtgtggttcatgactggggtg

SEQ ID NO: 1815 - DNA, 1466 bp, Legionella shakespearei
attgaacgctggcggtatgcttaacacatgcaagtcgaacggcagcattatctagcttgctagatagatggcgagtggcgaacgggtgagtaacgcgtaggaatataccttaaagagggggacaacttggggaaactcaagctaataccgcataatttccatggaaaaaagctggggaccttcgggcctggcgctttaagattagcctgcgtacgattagctagttggtagggtaagggcctaccaaggcgacgatcgttagctggtctgagaggatgaccagccacactggaactgagacacggtccagactcctacgggaggcagcagtggggaatattggacaatggggggaaccctgatccagcaataccgcgtgtgtgaagaaggcctgagggttgtaaagcactttcagtggggaggagggtatttatgttaagagctagaatactggacgttacccacagaagaagcaccggctaactccgtgccagcagccgcggtaatacggagggtgcaagcgttaatcggaattactgggcgtaaagggtgcgtaggtggttgtgtaagttatctgtgaaatccccgggctcaacctgggcaggtcagataatactgcatgactcgagtatgggagagggtagtggaatttccggtgtagcggtgaaatgcgtagagatcggaaggaacaccagtggcgaaggcggctacctggcccaatactgacactgaggcacgaaagcgtggggagcaaacaggattagataccctggtagtccacgctgtaaacgatgtcaactagctgttggatatatgaatatatttagtggcgcagcaaacgcgataagttgaccgcctggggagtacggtcgcaagattaaaactcaaaggaattgacgggggcccgcacaagcggtggagcatgtggtttaattcgatgcaacgcgaagaaccttacctacccttgacatacagtggaacttgcagagatgtgagtgtgccttcgggaacactgctacaggtgctgcatggctgtcgtcagctcgtgtcgtgagatgttgggttaagtcccgtaacgagcgcaacccttatccttagttgccagcgcgtaaaggtgggaactctaaggagactgccggtgacaaaccggaggaaggcggggatgacgtcaagtcatcatggcccttacgggtagggctacacacgtgctacaatggttgatacagagggcagcgaaggggcgacctggagcaaatcttttaaagtcaatcgtagtccggattggagtctgcaactcgactccatgaagtcggaatcgctagtaatcgcgaatcagcatgtcgcggtgaatacgttcccgggccttgtacacaccgcccgtcacaccatgggagtgggctgcaccagaagtagatagtctaaccgcaagggggacgtttaccacggtgtggttcatgactggggtg

SEQ ID NO: 1816 - DNA, 1466 bp, Legionella spiritensis
attgaacgctggcggcatgcttaacacatgcaagtcgaacggcagcatggtccagcttgctggactgatggcgagtggcgaacgggtgagtaacgcgtaggaatatgccttaaagagggggacaacttggggaaacccaagctaataccgcataatctctgaggagagaagctggggaccttcgggcctggcgctttaagattagcctgcgtccgattagctagttggtgaggtaagggctcaccaaggcgacgatcggtagctggtctgagaggatgaccagccacactgggactgagacacggcccagactcctacgggaggcagcagtggggaatattggacaatgggggaaaccctgatccagcaatgccgcgtgtgtgaagaaggcctgagggttgtaaagcactttcagtggggaggagagttgagtggttaagagctgtttgactggacgttacccacagaagaagcaccggctaactccgtgccagcagccgcggtaatacggagggtgcaagcgttaatcggaattactgggcgtaaagggtgcgtaggtggtttggtaagttaactgtgaaagccctgggcttaacctgggaattgcagttaagactgtcgaactcgagtatgggagagggtagtggaatttccggtgtagcggtgaaatgcgtagagatcggaaggaacaccagtggcgaaggcggctacctggcctaatactgacactgaggcacgaaagcgtggggagcaaacaggattagataccctggtagtccacgctgtaaacgatgtcaactagctgttggccttataaatgaggttagtggcgcagcaaacgcgataagttgaccgcctggggagtacggtcgcaagattaaaactcaaaggaattgacgggggcccgcacaagcggtggagcatgtggtttaattcgatgcaacgcgaagaaccttacctacccttgacatacagtgaatgatgcagagatgcgtcagtgccttcgggaatactgatacaggtgctgcatggctgtcgtcagctcgtgtcgtgagatgttgggttaagtcccgtaacgagcgcaacccttgtccttagttgccagcacgtaaaggtgggaactctagggagactgccggtgacaaaccggaggaaggcggggacgacgtcaagtcatcatggcccttacgggtagggctacacacgtgctacaatggccggtacagagggcagcgaaggggcgacctgtagcaaatccttaaaagctggtcgtagtccggattggagtctgcaactcgactccatgaagtcggaatcgctagtaatcgcgaatcagcatgtcgcggtgaatacgttcccgggccttgtacacaccgcccgtcacaccatgggagtgggttgcaccagaagtagatagtctaaccttcggggggacgtttaccacggtgtgattcatgactggggtg

SEQ ID NO: 1817 - DNA, 1466 bp, Legionella steelei
attgaacgctggcggcatgcttaacacatgcaagtcgaacggcagcatgatctagcttgctagattgatggcgagtggcgaacgggtgagtaacgcgtaggaatatgccttgaagtgggggacaacttggggaaactcaagctaataccgcataatgtctaaggacgaaagctggggaccttagggcctggcgctttaagattagcctgcgtccgattagctagttggtggggtaagggcctaccaaggcgacgatcggtagctggtctgagaggatgaccagccacactggaactgagacacggtccagactcctacgggaggcagcagtggggaatattggacaatgggggcaaccctgatccagcaatgccgcgtgtgtgaagaaggcctgagggttgtaaagcactttcagtagggaggaggattgctaggttaagagctaagtgattggacgttacctacagaagaagcaccggctaactccgtgccagcagccgcggtaatacggagggtgcaagcgttaatcggaattactgggcgtaaagcgtgcgtaggtggttaattaagttatctgtgaaatccctgggcttaacctgggcaggtcagatgatactggttgactcgagtatgggagagggtagtggaatttccggtgtagcggtgaaatgcgtagagatcggaaggaacaccagtggcgaaggcggctacctggcctaatactgacactgaggcacgaaagcgtggggagcaaacaggattagataccctggtagtccacgccgtaaacgatgtcaactagctgttggttatatgaaaataattagtggcgcagcaaacgcgataagttgaccgcctggggagtacggtcgcaagattaaaactcaaaggaattgacgggggcccgcacaagcggtggagcatgtggtttaattcgatgcaacgcgaagaaccttacctacccttgacatacagtgaattttgcagagatgcattagtgccttcgggaacactgatacaggtgctgcatggctgtcgtcagctcgtgtcgtgagatgttgggttaagtcccgtaacgagcgcaacccttgtccttagttgccagcacgtaatggtgggaactctaaggagactgccggtgacaaaccggaggaaggcggggacgacgtcaagtcatcatggcccttacgggtagggctacacacgtgctacaatgggtgatacagagggaagcgaaggggtgacctggagctaatcttagaaagtcgctcgtagtccggattggagtctgcaactcgactccatgaagtcggaatcgctagtaatcgcgaatcagcatgtcgcggtgaatacgttcccgggccttgtacacaccgcccgtcacaccatgggagtgggctgcaccagaagtagatagtctaaccttcgggaggacgtttaccacggtgtggttcatgactggggtg

SEQ ID NO: 1818 - DNA, 1466 bp, Legionella steigerwaltii
attgaacgctggcggcatgcttaacacatgcaagtcgaacggcagcatagtctagcttgctagatgggtggcgagtggcgaacgggtgagtaacgcgtaggaatatgccttgaagagggggacaacttggggaaactcaagctaataccgcataatgtctaaggacgaaagctggggaccgcaaggcctggcgctttaagattagcctgcgtccgattagctagttggtggggtaagggcctaccaaggcgacgatcggtagctggtctgagaggatgaccagccacactggaactgagacacggtccagactcctacgggaggcagcagtggggaatattggacaatgggggcaaccctgatccagcaatgccgcgtgtgtgaagaaggcctgagggttgtaaagcactttcagtagggaggagggttgataggttaagagctaattaactggacgttacctacagaagaagcaccggctaactccgtgccagcagccgcggtaatacggagggtgcaagcgttaatcggaattactgggcgtaaagcgtgcgtaggtggttgactaagttatctgtgaaatccccgggcttaacctgggcaggtcagatgatactggttgactcgagtatgggagagggtagtggaatttccggtgtagcggtgaaatgcgtagagatcggaaggaacaccagtggcgaaggcggctacctggcctaatactgacactgaggcacgaaagcgtggggagcaaacaggattagataccctggtagtccacgctgtaaacgatgtcaactagctgttggttatatgaaaataattagtggcgcagcaaacgcgataagttgaccgcctggggagtacggtcgcaagattaaaactcaaaggaattgacgggggcccgcacaagcggtggagcatgtggtttaattcgatgcaacgcgaagaaccttacctacccttgacatacagtgaattttgcagagatgcattagtgccttcgggaacactgatacaggtgctgcatggctgtcgtcagctcgtgtcgtgagatgttgggttaagtcccgtaacgagcgcaacccttgtccttagttgccagcacgtaatggtgggaactctaaggagactgccggtgacaaaccggaggaaggcggggatgacgtcaagtcatcatggcccttacgggtagggctacacacgtgctacaatgggcgatacagagggaagcgaaggggtgacctggagctaatcttagaaagtcgctcgtagtccggattggagtctgcaactcgactccatgaagtcggaatcgctagtaatcgcgaatcagcatgtcgcggtgaatacgttcccgggccttgtacacaccgcccgtcacaccatgggagtgggctgcaccagaagtagatagtctaaccttcggggggacgtttaccacggtgtggttcatgactggggtg

SEQ ID NO: 1819 - DNA, 1340 bp, Legionella taurinensis
  misc_feature (660)..(660): n is a, c, g, or t
  misc_feature (1045)..(1045): n is a, c, g, or t
  misc_feature (1101)..(1101): n is a, c, g, or t
  misc_feature (1104)..(1104): n is a, c, g, or t
  misc_feature (1155)..(1155): n is a, c, g, or t
  misc_feature (1229)..(1229): n is a, c, g, or t
  misc_feature (1290)..(1290): n is a, c, g, or t
attgaacgctggcggcatgcttaacacatgcaagtcgaacggcagcacgttctagcttgctagatgggtggcgagtggcgaacgggtgagtaacgcgtaggaatatgccttaaagtgggggacaacttggggaaactcaagctaataccgcatagtctctgaggagagaagctggggaccttcgggcctggcgctttaagattggcctgcgtccgattagctagttggtggggtaagggcctaccaaggcgacgatcggtagctggtctgagaggatgaccagccacactggaactgagacacggtccagactcctacgggaggcagcagtggggaatattggacaatggggggaaccctgatccagcaatgccgcgtgtgtgaagaaggcctgagggttgtaaagcactttcagtggggaggagggttgacaggttaagagctggttgactggacgttacccacagaagaagcaccggctaactccgtgccagcagccgcggtaatacggagggtgcgagcgttaatcggaattactgggcgtaaagggtgcgtaggtggtttgataagttatctgtgaaagccctgggctcaacctgggaactgcagataagactgttggactcgagtataggagagggtagtggaatttccggtgtngcggtgaaatgcgtagagatcggaaggaacaccagtggcgaaggcggctacctggcctaatactgacactgaggcacgaaagcgtggggagcaaacaggattagataccctggtagtccacgctgtaaacgatgtcaactagctgttggtcttatgaatgagattagtggcgcagcaaacgcgataagttgaccgcctggggagtacggtcgcaagattaaaactcaaaggaattgacgggggcccgcacaagcggtggagcatgtggtttaattcgatgcaacgcgaagaaccttacctacccttgacatacagtgaacctttcagagatgagagggtgccttcgggagcactgatacaggtgctgcatggctgtcgtcagctngtgtcgtgagatgttgggttaagtcccgtaacgagcgcaacccttatccttagttnccngcgcgtagaggcggggactctagggagactgccggtgacaaaccggagganggcggggacgacgtcaagtcatcatggcccttacgggtagggctacacacgtgctacaatggccggtacagagngaagcgaaggggcgacctggagccaatctttaaaagccggtcgtagtccggattagagtcngcaactcgactccatgaagtcggaatcgatagtaatcgcgaatcagcatg

SEQ ID NO: 1820 - DNA, 1466 bp, Legionella tucsonensis
attgaacgctggcggcatgcttaacacatgcaagtcgaacggcagcatagtctagcttgctagatgggtggcgagtggcgaacgggtgagtaacgcgtaggaatatgccttgaagagggggacaacttggggaaactcaagctaataccgcataatgtctaaggacgaaagctggggaccgcaaggcctggcgctttaagattagcctgcgtccgattagctagttggtggggtaagggcctaccaaggcgacgatcggtagctggtctgagaggatgaccagccacactggaactgagacacggtccagactcctacgggaggcagcagtggggaatattggacaatggggggaaccctgatccagcaatgccgcgtgtgtgaagaaggcctgagggttgtaaagcactttcagtggggaggagggttgccaggttaagagctaggtgattggacgttacccacagaagaagcaccggctaactccgtgccagcagccgcggtaatacggagggtgcgagcgttaatcggaattactgggcgtaaagagtgcgtaggtggttgaataagttatctgtgaaatccctgggcttaacctgggcaggtcagatgatactgtttgactcgagtatgggagagggtagtggaatttccggtgtagcggtgaaatgcgtagagatcggaaggaacaccagtggcgaaggcggctacctggcctaatactgacactgaggcacgaaagcgtggggagcaaacaggattagataccctggtagtccacgccgtaaacgatgtcaactagctgttggttatatgaaaataattagtggcgcagcaaacgcgataagttgaccgcctggggagtacggtcgcaagattaaaactcaaaggaattgacgggggcccgcacaagcggtggagcatgtggtttaattcgatgcaacgcgaagaaccttacctacccttgacatacagtggattttgcagagatgcattagtgccttcgggaacactgatacaggtgctgcatggctgtcgtcagctcgtgtcgtgagatgttgggttaagtcccgtaacgagcgcaacccttgtccttagttaccagcacgtgatggtggggactctaaggagactgccggtgacaaaccggaggaaggcggggacgacgtcaagtcatcatggcccttacgggtagggctacacacgtgctacaatgggcgatacagagggaagcgaaggggtgacctggagctaatcttagaaagttgctcgtagtccggattggagtctgcaactcgactccatgaagtcggaatcgctagtaatcgcgaatcagcatgtcgcggtgaatacgttcccgggccttgtacacaccgcccgtcacaccatgggagtgggctgcaccagaagtagatagtctaaccttcggggggacgtttaccacggtgtggttcatgactggggtg

SEQ ID NO: 1821 - DNA, 1457 bp, Legionella wadsworthii
gcgctggcggcatgcttaacacatgcaagtcgaacggcagcatggtctagcttgctagactgatggcgagtggcgaacgggtgagtaacgcgtaggaatatgccttgaagtgggggacaacttggggaaactcaagctaataccgcataatatctttggatgaaagctggggaccttcgggcctggcgctttaagattagcctgcgtccgattagctagttggtggggtaagggcctaccaaggcgacgatcggtagctggtctgagaggatggccagccacactggaactgagacacggtccagactcctacgggaggcagcagtggggaatattggacaatggggggaaccctgatccagcaatgccgcgtgtgtgaagaaggcctgagggttgtaaagcactttcagtggggaggagggtttataggttaagagctaataagttggacgtcacccacagaagaagcaccggctaactccgtgccagcagccgcggtaatacggagggtgcaagcgttaatcggaattactgggcgtaaagcgtgcgtaggtggttgattaagttatctgtgaaatccccgggcttaacctgggcaggtcagataatactggttgactcgagtatgggagagggtagtggaatttccggtgtagcggtgaaatgcgtagagatcggaaggaacaccagtggcgaaggcggctacctggcctaatactgacactgaggcacgaaagcgtggggagcaaacaggattagataccctggtagtccacgctgtaaacgatgtcaactagctgttggttatatgaaaataattagtggcgcagcaaacgcgataagttgaccgcctggggagtacggtcgcaagattaaaactcaaaggaattgacgggggcccgcacaagcggtggagcatgtggtttaattcgatgcaacgcgaagaaccttacctacccttgacatacagtgtagcttgcagagatgcattagtgccttcgggaacactgatacaggtgctgcatggctgtcgtcagctcgtgtcgtgagatgttgggttaagtcccgtaacgagcgcaacccttatcttagttgccagcccgtaggtgggaactctagggagactgccggtgacaaaccggaggaaggcggggatgacgtcaagtcatcatggcccttacgggtagggctacacacgtgctacaatggtggtacagagggaagcgaaggggtgacctggagctaatcttagaaagtcgctcgtagtccggattggagtctgcaactcgactccatgaagtcggaatcgctagtaatcgcgaatcagcatgtcgcggtgaatacgttcccgggccttgtacacaccgcccgtcacaccatgggagtgggctgcaccagaagtagatagtctaaccttcgggaggacgtttaccacggtgtggttcatgactggggtg

SEQ ID NO: 1822 - DNA, 1434 bp, Legionella waltersii
attgaacgctggcggcatgcttaacacatgcaagtcgaacggcagcacgttctagcttgctagactggtggcgagtggcgaacgggtgagtaacgcgtaggaatatgccttgaagtgggggacaacttggggaaactcaagctaataccgcataatatctaaggatgaaagctggggaccttcgggcctggcgctttaagattagcctgcgtacgattagctagttggtggggtaagggcctaccaaggcgacgatcgttagctggtctgagaggatgaccagccacactggaactgagacacggtccagactcctacgggaggcagcagtggggaatattggacaatgggggaaaccctgatccagcaatgccgcgtgtgtgaagaaggcctgagggttgtaaagcactttcagtggggaggaggattgataggttaagagctaattaattggacgttacccacagaagaagcaccggctaactccgtgccagcagccgcggtaatacggagggtgcgagcgttaatcggaattactgggcgtaaagggtgcgtaggtggtttggtaagttatctgtgaaattcctgggcttaacctgggacggtcagatgatactgctgaactcgagtatgggagagggtagtggaatttccggtgtagcggtgaaatgcgtagagatcggaaggaacaccagtggcgaaggcggctacctggcccaatactgacactgaggcacgaaagcgtggggagcaaacaggattagataccctggtagtccacgccgtaaacgatgtcaactagctgttggttatatgaatataattagtggcgcagcaaacgcgataagttgaccgcctggggagtacggtcgcaagattaaaactcaaaggaattgacgggggcccgcacaagcggtggagcatgtggtttaattcgatgcaacgcgaagaaccttacctacccttgacatacagtgaattttgcagagatgcattagtgccttcgggaacactgatacaggtgctgcatggctgtcgtcagctcgtgtcgtgagatgttgggttaagtcccgtaacgagcgcaacccttattcctagttgccagcacgtaaaggtgggaactctagggagactgccggtgacaaaccggaggaaggcggggatgacgtcaagtcatcatggcccttacgggtagggctacacacgtgctacaatggccgatacagagggcggcgaaggggtgacctggagcaaatcctagaaagtcggtcgtagtccggattggagtctgcaactcgactccatgaagtcggaatcgctagtaatcgcgaatcagcatgtcgcggtgaatacgttcccgggccttgtacacaccgcccgtcacaccatgggagtgggctgcaccagaagtagatagtctaaccttcgggagga

SEQ ID NO: 1823 - DNA, 1466 bp, Legionella worsleiensis
attgaacgctggcggcatgcttaacacatgcaagtcgaacggcagcatgacctagcttgctaggttgatggcgagtggcgaacgggtgagtaacgcgtaggaatataccttaaagagggggacaacttggggaaactcaagctaataccgcataatttctttggaaaaaagctggggaccttcgggcctggcgctttaagattagcctgcgtacgattagctagttggtagggtaaaggcctaccaaggcgacgatcgttagctggtctgagaggatgaccagccacactggaactgagacacggtccagactcctacgggaggcagcagtggggaatattggacaatgggggcaaccctgatccagcaatgccgcgtgtgtgaagaaggcctgagggttgtaaagcactttcagtggggaggagggttgattggttaagagctgattgattggacgttacccacagaagaagcaccggctaactccgtgccagcagccgcggtaatacggagggtgcaagcgttaatcggaattactgggcgtaaagggtgcgtaggtggttaattaagttatctgtgaaatccctgggctcaacctgggcaggtcagataatactggttaactcgagtatgggagagggtagtggaatttccggtgtagcggtgaaatgcgtagagatcggaaggaacaccagtggcgaaggcggctacctggcctaatactgacactgaggcacgaaagcgtggggagcaaacaggattagataccctggtagtccacgctgtaaacgatgtcaactagctgttggatatatgaatatatttagtggcgcagcaaacgcgataagttgaccgcctggggagtacggtcgcaagattaaaactcaaaggaattgacgggggcccgcacaagcggtggagcatgtggtttaattcgatgcaacgcgaagaaccttacctacccttgacatacagtggattttgcagagatgcattagtgccttcgggaacactgatacaggtgctgcatggctgtcgtcagctcgtgtcgtgagatgttgggttaagtcccgtaacgagcgcaacccttatccttagttgccagcacgtaatggtgggaactctaaggagactgccggtgacaaaccggaggaaggcggggatgacgtcaagtcatcatggcccttacgggtagggctacacacgtgctacaatggccgatacagagggcagcgaaggggcgacctggagcaaatcttagaaagtcggtcgtagtccggattggagtctgcaactcgactccatgaagtcggaatcgctagtaatcgcgaatcagcatgtcgcggtgaatacgttcccgggccttgtacacaccgcccgtcacaccatgggagtgggctgcaccagaagtagatagtctaaccgcaagggggacgtttaccacggtgtggttcatgactggggtg

SEQ ID NO: 1824 - DNA, 1386 bp, Leisingera aquaemixtae
aacgaacgctggcggcaggcctaacacatgcaagtcgagcgcgcccttcggggtgagcggcggacgggttagtaacgcgtgggaacgtgcccttctctaaggaatagccactggaaacggtgagtaataccttatacgcccttcgggggaaagatttatcggagaaggatcggcccgcgttagattaggtagttggtggggtaatggcctaccaagcctacgatctatagctggttttagaggatgatcagcaacactgggactgagacacggcccagactcctacgggaggcagcagtggggaatcttggacaatgggcgcaagcctgatccagccatgccgcgtgagtgatgaaggccttagggtcgtaaagctctttcgcctgtgatgataatgacagtagcaggtaaagaaaccccggctaactccgtgccagcagccgcggtaatacggagggggttagcgttgttcggaattactgggcgtaaagcgcgcgtaggcggactggaaagttgggggtgaaatcccagggctcaaccctggaactgcctccaaaactcccagtcttgagttcgagagaggtgagtggaattccgagtgtagaggtgaaattcgtagatattcggaggaacaccagtggcgaaggcggctcactggctcgatactgacgctgaggtgcgaaagtgtggggagcaaacaggattagataccctggtagtccacaccgtaaacgatgaatgccagacgtcggctagcatgctagtcggtgtcacacctaacggattaagcattccgcctggggagtacggccgcaaggttaaaactcaaaggaattgacgggggcccgcacaagcggtggagcatgtggtttaattcgaagcaacgcgcagaaccttaccaacccttgacatcctcggaccgccagagagatctggttttcacttcggtgaccgagtgacaggtgctgcatggctgtcgtcagctcgtgtcgtgagatgttcggttaagtccggcaacgagcgcaacccacatccttagttgccagcagttcggctgggcactctaaggaaactgcccgtgataagcgggaggaaggtgtggatgacgtcaagtcctcatggcccttacgggttgggctacacacgtgctacaatggcagtgacaatgggttaatcccaaaaaactgtctcagttcggattgtcgtctgcaactcggcggcatgaagtcggaatcgctagtaatcgcgtaacagcatgacgcggtgaatacgttcccgggccttgtacacaccgcccgtcacaccatgggagttgggtttacccgaaggccgtgcgccaacctttcgaggaggcagcggaccacggtgagctcagcgactggggtg

SEQ ID NO: 1825 - DNA, 1390 bp, Leisingera methylohalidivorans
aacgaacgctggcggcaggcctaacacatgcaagtcgagcgctctccttcgggagggagcggcggacgggttagtaacgcgtgggaacgtgcccttctctaaggaatagccactggaaacggtgagtaataccttatacgcccttcgggggaaagatttatcggagaaggatcggcccgcgttagattagatagttggtggggtaacggcctaccaagtctacgatctatagctggttttagaggatgatcagcaacactgggactgagacacggcccagactcctacgggaggcagcagtggggaatcttggacaatgggcgcaagcctgatccagccatgccgcgtgagtgatgaaggccttagggtcgtaaagctctttcgccagagatgataatgacagtatctggtaaagaaaccccggctaactccgtgccagcagccgcggtaatacggagggggttagcgttgttcggaattactgggcgtaaagcgcgcgtaggcggaccagaaagtaaggggtgaaatcccagggctcaaccctggaactgcctcttaaactcctggtcttgagttcgagagaggtgagtggaattccgagtgtagaggtgaaattcgtagatattcggaggaacaccagtggcgaaggcggctcactggctcgatactgacgctgaggtgcgaaagtgtggggagcaaacaggattagataccctggtagtccacaccgtaaacgatgaatgccagtcgtcgggtagcatgctattcggtgacacacctaacggattaagcattccgcctggggagtacggtcgcaagattaaaactcaaaggaattgacgggggcccgcacaagcggtggagcatgtggtttaattcgaagcaacgcgcagaaccttaccaacccttgacatcctcggaccgccagagagatctggttttcacttcggtgaccgagtgacaggtgctgcatggctgtcgtcagctcgtgtcgtgagatgttcggttaagtccggcaacgagcgcaacccacatccttagttgccagcagttcggctgggcactctagggaaactgcccgtgataagcgggaggaaggtgtggatgacgtcaagtcctcatggcccttacgggttgggctacacacgtgctacaatggcagtgacaatgggttaatcccaaaaaactgtctcagttcggattgtcgtctgcaactcggcggcatgaagtcggaatcgctagtaatcgcgtaacagcatgacgcggtgaatacgttcccgggccttgtacacaccgcccgtcacaccatgggagttgggtttacccgaaggccgtgcgccaaccacttcggtgggggcagcggaccacggtgagctcagcgactggggtg

SEQ ID NO: 1826 - DNA, 1465 bp, Lelliottia nimipressuralis
  misc_feature (677)..(677): n is a, c, g, or t
  misc_feature (1012)..(1012): n is a, c, g, or t
  misc_feature (1330)..(1330): n is a, c, g, or t
attgaacgctggcggcaggcctaacacatgcaagtcgagcggtagcacagagagcttgcttcttcagggtgacgagcggcggacgggtgagtaatgtctgggaaactgcctgatggagggggataactactggaaacggtagctaataccgcataacgtcgcaagaccaaagagggggaccttgcggcctcttgccatcagatgtgcccagatgggattagctagtaggtggggtaacggctcacctaggcgacgatccctagctggtctgagaggatgaccagccacactggaactgagacacggtccagactcctacgggaggcagcagtggggaatattgcacaatgggcgcaagcctgatgcagccatgccgcgtgtatgaagaaggccttcgggttgtaaagtactttcagcgaggaggaaggcattgtggttaataaccacagtgattgacgttactcgcagaagaagcaccggctaactccgtgccagcagccgcggtaatacggagggtgcaagcgttaatcggaattactgggcgtaaagcgcacgcaggcggtctgtcaagtcggatgtgaaatccccgggctcaacctgggaactgcattcgaaactggcaggctagagtcttgtagaggggggtagaattccaggtgtagcggtgaaatgcgtanagatctggaggaataccggtggcgaaggcggccccctggacaaagactgacgctcaggtgcgaaagcgtggggagcaaacaggattagataccctggtagtccacgccgtaaacgatgtcgacttggaggttgttcccttgaggagtggcttccggagctaacgcgttaagtcgaccgcctggggagtacggccgcaaggttaaaactcaaatgaattgacgggggcccgcacaagcggtggagcatgtggtttaattcgatgcaacgcgaagaaccttacctactcttgacatccacagaatttagcagagatgctttagtgccttcgggaacngtgagacaggtgctgcatggctgtcgtcagctcgtgttgtgaaatgttgggttaagtcccgcaacgagcgcaacccttatcctttgttgccagcggtccggccgggaactcaaaggagactgccagtgataaactggaggaaggtggggatgacgtcaagtcatcatggcccttacgagtagggctacacacgtgctacaatggcgtatacaaagagaagcgacctcgcgagagcaagcggacctcataaagtacgtcgtagtccggattggagtctgcaactcgactccatgaagtcggaatcgctagtaatcgtanatcagaatgctacggtgaatacgttcccgggccttgtacacaccgcccgtcacaccatgggagtgggttgcaaaagaagtaggtagcttaaccttcgggagggcgcttaccactttgtgattcatgactggggtg

SEQ ID NO: 1827 - DNA, 1437 bp, Lentisphaera araneosa
aatgaatgctggcggcatggattaggcatgcaagttgaacgagaaattcacttcggtgaatggaaagtggcgaaagggtgagtaacgcgtgaataatctgcccctaagtttggaacaacagttggaaacgactgctaataccggatgtgactatcaagacgcatgttttgatatttaaaggttacgcttagggatgagttcgcgtgccattatgctagttggtaaggtaacggcttaccaaggctatgacggctaggtggtctgagaggacgatcacccacactgggactgagacactgcccagactcctgcgggaggctgcagtcgagaatcttccgcaatgcgcgaaagcgtgacggagcaatgccgcgtgatcgaagacggccttcgggttgtaaagatctgtcaggggggaaaaacgatgatggtacccccagaggaagccacggctaactacgtgccagcagccgcggtaatacgtaggtggcgagcattattcggaattactgggcgtaaagggtccgcaggtggtttactaagtcagatgtgaaatttcagtgcttaacactgaacctgcatttgaaactggtagactagagtatgtgagaggtaagcggaatttgtggtgtagcggtggaatgcgtagatatcacaaggaagaccaaaggcgaaggcagcttactggcacaatactgacactcatggacgaaggctaaggtagcgaaaaggattagatacccttgtagtcttagcagtaaacgttgtacactcgatgttggtctggttagtcggatcagtgtctaagctaacgcgataagtgtaccgcctgggaagtacggtcgcaagactaaaactcaaaggaattgacgggggcccgcacaagcggtggagcatgtggcttaattcgaggcaacgcgaagaaccttacccgggtttgacattgagcgacgttcggtgaaagtcgaattcccttcggggcgcaaaacaggtgctgcatggctgtcgtcagctcgtgctgtgaagtgttcggttaagtccggcaacgagcgcaacccatatccttacttgctaacaggtaatgctgagaaccttaaggagactgcccgtgttaagcgggaggaaggtgtggacgacgtcaagtcagtatggcccttacacccggggctgcacacgtgctacaatggccggtacaaagggcagcgacatagtgatatggagcgaatccccaaaaccggtctcagtacggattggagtctgcaactcgactccatgaagatggaatcgctagtaaatgggcatcagctacggctcattgaatacgttcccgggccttgtacacaccgcccgtcacatcatgggagctgagttcacccgaagtcgttgcgccaacctgcttgcaggaggcagacgccgaaggtgggcttagtgactgggatg

SEQ ID NO: 1828 - DNA, 1392 bp, Leptolyngbya boryana
  misc_feature (216)..(216): n is a, c, g, or t
  misc_feature (272)..(272): n is a, c, g, or t
  misc_feature (277)..(277): n is a, c, g, or t
  misc_feature (309)..(310): n is a, c, g, or t
  misc_feature (342)..(342): n is a, c, g, or t
  misc_feature (430)..(430): n is a, c, g, or t
  misc_feature (466)..(466): n is a, c, g, or t
  misc_feature (632)..(632): n is a, c, g, or t
  misc_feature (709)..(709): n is a, c, g, or t
  misc_feature (1141)..(1141): n is a, c, g, or t
tatgcttaacacatgcaagtcgaacggtctcttcggagatagtggcggacgggtgagtaacgcgtgagaacatgcctttagattggggacaacagttggaaacgactgctaataccgaatgtgccttagggtgaaagatttattgtctagagattggctcgcgtcagattagctagttggagtggtaacgcacaccaaggcgacgatctgtacttngtctgagaggatgaccaggcacactggaactgagacacggtccagactcctacggnaggcngcagtggggaattttaagcaatgggcgaaagnntgacggagcaataccgcgtgagggaggacggnttttgggttgtaaacctcttttatcagggaagaatcgatgacggtacctgatgaatcagcatcggctaactccgtgccagcagccgcngtaatacggaggatgcaagcgttatccggaattatngggcgtaaagcgtccgtaggtggtttatcaagtctgctgtcaaagcgtgcggcttaaccgcataagggcagtggaaactgatgaactagagtgcgataggggtaacaggaattcccagtgtagcggtgaaatgcgtagatattgggaagaacaccagcggcgaaangtgttactgggtctgcactgacactgagggacgaaagctaggggagcgaaagggattagatacccctgtagtcctanccgtaaacgatgacaactaggcgtggttcgtatcgacccgagccgtgccgtagccaacgcgttaagttgtccgcctggggagtacgcacgcaagtgtgaaactcaaaggaattgacgggggcccgcacaagcgtggagtatgtggtttaattcgatgcaacgcgaagaaccttaccaaggcttgacatcctcggaaccctgatgaaagttaggggtgccttcgggagccgagagacaggtggtgcatggctgtcgtcagctcgtgtcgtgagatgttgggttaagtcccgcaacgagcgcaacccacgtttttagttgccagcattcagttgggcactctagagagactgccggtgacaaaccggaggaaggtgtggatgacgtcaagtcagcatgccccatacgccttgggctacacacgtactacaatgngtcggacaaagagcagccagccagcgatggtgagccaatctcataaaccggcgctcagttcagattgcaggctgcaactcgcctgcatgaaggcggaatcgctagtaatcgcaggtcagcatactgcggtgaatacgttcccgggccttgtacacaccgcccgtcacaccatgggagttggtcacgcccgaagtcgttactctaactgcttgcagaggaggacgccgaaggtggggctgatgactggggtg

SEQ ID NO: 1829 - DNA, 1410 bp, Leptolyngbya foveolarum
gatgaacgctggcggtatgcttaacacatgcaagtcgaacggtctcttcggagatagtggcggacgggtgagtaacgcgtgagaacatgcctttagattggggacaacagttggaaacgactgctaataccgaatgtgccttagggtgaaagatttattgtctaaagattggctcgcgtcagattagctagttggagtggtaacggcacaccaaggcgacgatctgtacttggtctgagaggatgaccaggcacactggaactgagacacggtccagactcctacgggaggcagcagtggggaattttccgcaatgggcgaaagcctgacggagcaataccgcgtgagggaggacggcttttgggttgtaaacctcttttatcagggaagaatcgatgacggtacctgatgaatcagcatcggctaactccgtgccagcagccgcggtaatacggaggatgcaagcgttatccggaattattgggcgtaaagcgtccgtaggtggtttatcaagtctgctgtcaaagcgtgcggcttaaccgcataagggcagtggaaactgatgaactagagtgcgataggggtaacaggaattcccagtgtagcggtgaaatgcgtagatattgggaagaacaccagcggcgaaagcgtgttactgggtctgcactgacactgagggacgaaagctaggggagcgaaagggattagatacccctgtagtcctagccgtaaacgatgacaactaggcgtggttcgtatcgacccgagccgtgccgtagccaacgcgttaagttgtccgcctggggagtacgcacgcaagtgtgaaactcaaaggaattgacgggggcccgcacaagcggtggagtatgtggtttaattcgatgcaacgcgaagaaccttaccaaggcttgacatcctcggaaccctgatgaaagttaggggtgccttcgggagccgagagacaggtggtgcatggctgtcgtcagctcgtgtcgtgagatgttgggttaagtcccgcaacgagcgcaacccacgtttttagttgccagcatttagttgggcactctagagagactgccggtgacaaaccggaggaaggtgtggatgacgtcaagtcagcatgccccatacgccttgggctacacacgtactacaatgcgtcggacaaagagcagccagccagcgatggtgagccaatctcataaaccggcgctcagttcagattgcaggctgcaactcgcctgcatgaaggcggaatcgctagtaatcgcaggtcagcatactgcggtgaatacgttcccgggccttgtacacaccgcccgtcacaccatgggagttggtcacgcccgaagtcgttactctaactgcttgcagaggaggacgccgaaggtggggctgatgactggggtg

SEQ ID NO: 1830 - DNA, 1413 bp, Leptolyngbya frigida
gatgaacgctggcggtctgcttaacacatgcaagtcgaacgggactcttcggagtttagtggcggacgggtgagtaacgcgtgagaatctgcccttaggttggggacaacagttggaaacgactgctaatacccaatgtgccgagaggtgaaaggttaactgcctggggatgagctcgcgtctgattagctagttggagtggtaacggcacaccaaggcgacgatcagtagctggtctgagaggatgatcagccacactgggactgagacacggcccagactcctacgggaggcagcagtggggaattttccgcaatgggcgaaagcctgacggagcaagaccgcgtgagggaggaaggcctattggttgtaaacctcttttgatagggaagaacacaatgacggtacctatcgaatcagcatcggctaactccgtgccagcagccgcggtaatacggaggatgcaagcgttatccggatttattgggcgtaaagcgtccgtaggtggcaaaccaagtcagttgttaaagcgtagagcttaactctataagggcaattgaaactggttagctagagtgcgataggggcaaggggaattcccagtgtagcggtgaaatgcgtagatattgggaagaacatcggtggcgaaggcgccttgctgggtctgcactgacactgagggacgaaagctaggggagcgaaagggattagatacccctgtagtcctagccgtaaacgatggatactaggcgttgtccgtatcgacccgggcagtgccgtagctaacgcgttaagtatcccgcctggggagtacgctcgcaagagtgaaactcaaaggaattgacgggggcccgcacaagcggtggagtatgtggtttaattcgatgcaacgcgaagaaccttaccaaggcttgacatgtctagaattcccttgaaagggggaagtgccttcgggagctagaacacaggtggtgcatggctgtcgtcagctcgtgtcgtgagatgttgggttaagtcccgcaacgagcgcaaccctcgtttttagttgccatcattcagttgggcactctgaagagactgccggtgacaaaccggaggaaggtggggatgacgtcaagtcagcatgccccttacgtcttgggctacacacgtactacaatgctacggacaaagggcagcaagttagcaatgacaagcaaatcccataaaccgtggctcagttcagattgcaggctgcaactcgcctgcatgaaggaggaatcgctagtaatcgcaggtcagcatactgcggtgaatacgttcccgggccttgtacacaccgcccgtcacaccatggaagttggccacgcccgaagtcgttactccaaccgttcgcggaggaggacgccgaaggcagggctgatgactggggtg

SEQ ID NO: 1831 - DNA, 1428 bp, Leptonema illini
aactaacgctggcggcgcgtcttaaacatgcaagtcgagcggcagcacttcgggtggcgagcggcgaacgggtgagtaacacgtaggtaatttgcccacggatgggggataacctttcgaaaggaaggctaataccgcataacaccatggttaccacggtaattatggtcaaagcagcaatgcgtctgtggagaagcctgcgtccgattaggtagttggtgaggtaacggctcaccaagccggcgatcggtagccggcctgagagggtgaacggccacactggaactgggacacggtccagactcctacgggaggcagcagttaagaatcttgcgcaatggaggcaactctgacgcagcgacgccgcgtgtgcgatgaaggccctcgggttgtaaagcacaacaaacagggaagaagaaagtgacggtacctgtctgaagcaccggctaactacgtgccagcagccgcggtaatacgtatggtgcaagcgttgttcggaatcactgggcgtaaagggtgcgcaggcggactgttaagtcgggagtgaaaactgagggctcaaccctcagcctgctttcgaaactggcagtctggagtcccggagaggcaggcggaattcccggtgtagcggtgaaatgcacagatatcgggaggaacaccaatggcgaaggcagcctgctggacggagactgacgctcatgcacgaaagcgtggggatcaaacaggattagataccctggtagtccacgccctaaacgttgtagaccagacgttggaggcatcaaccccttcagtgtcaaaccaaacggattaagtctaccgcctggggactatgctcgcaagagtgaaactcaaaggaattgacgggggcccgcacaagcggtggagcatgtggtttaattcgatgatacgcgaaaaaccttacccgggcttgacatgcatcagacaggcgtagagatacgccctccgcgaggctggtgcacaggtgctgcatggttgtcgtcagctcgtgtcgtgagatgttgggttaagtcccgcaacgagcgcaacccctaccgtgtgttaccatcattaagttggggactcgcacggaactgccggtgataaaccggaggaaggtggggatgacgtcaaatcctcatggcctttatgtccggggctacacacgtgctacaatggtcggtacagaaggaagcgaagtcgtgagatggagcagatccgagaaagccgatctcagttcggattggagtctgcaactcgactccatgaagtcggaatcgctagtaatcgcggatcagcatgccgcggtgaatacgttcccgggccttgtacacaccgcccgtcacaccacccgagttggtagtgcccgaagtggtccggctaaccgcaaggaggcagattatcaaggcaagatcggtgaggggggtg

SEQ ID NO: 1832 - DNA, 1432 bp, Leptospira alexanderi
aactaacgctggcggcgcgtcttaaacatgcaagtcaagcggagtagcaatacttaagcggcgaacgggtgagtaacacgtgggtaatcttcctccgagtctgggataactttccgaaaggggagctaatactggatagtcccgagaggtcatatgatttttcgggtaaagatttattgctcggagatgagcccgcgcccgattagctagttggtgaggtaaaggctcaccaaggcgacgatcggtagccggcctgagagggtgttcggccacaatggaactgagacacggtccatactcctacgggaggcagcagttaagaatcttgctcaatggggggaaccctgaagcagcgacgccgcgtgaacgatgaaggtcttcggattgtaaagttcaataagcagggaaaaataagcagtaatgtgatgatggtacctgcctaaagcaccggctaactacgtgccagcagccgcggtaatacgtatggtgcaagcgttgttcggaatcattgggcgtaaagggtgcgtaggcggacatgtaagtcaggtgtgaaaactgtgggctcaactcgcagcctgcacttgaaactatgtgtctggagtttgggagaggcaagtggaattccaggtgtagcggtgaaatgcgtagatatctggaggaacaccagtggcgaaggcgacttgctggcctaaaactgacgctgaggcacgaaagcgtgggtagtgaacgggattagataccccggtaatccacgccctaaacgttgtctaccagttgttgggggttttaaccctcagtaacgaacctaacggattaagtagaccgcctggggactatgctcgcaagagtgaaactcaaaggaattgacgggggtccgcacaagcggtggagcatgtggtttaattcgatgatacgcgaaaaacctcacctaggcttgacatggagtggaatcatgtagagatacatgagccttcgggccgcttcacaggtgctgcatggttgtcgtcagctcgtgtcgtgagatgttgggttaagtcccgcaacgagcgcaaccctcaccttatgttgccatcattcagttgggcactcgtaaggaactgccggtgacaaaccggaggaaggcggggatgacgtcaaatcctcatggcctttatgtctagggcaacacacgtgctacaatggccggtacaaagggtagccaactcgcgagggggagctaatctcaaaaagccggtcccagttcggattggagtctgcaactcgactccatgaagtcggaatcgctagtaatcgcggatcagcatgccgcggtgaatacgttcccggaccttgtacacaccgcccgtcacaccacctgagtggggagcacccgaagtggtctttgccaaccgcaaggaagcagactactaaggtgaaactcgtaaagggggtg

SEQ ID NO: 1833 - DNA, 1431 bp, Leptospira alstoni
aactaacgctggcggcgcgtcttaaacatgcaagtcaagcggagtagcaatactcagcggcgaacgggtgagtaacacgtgggtaatcttcctccgagtctgggataacttttcgaaagggaagctaatactggatagtcccgagagatcacaagatttttcgggtaaagatttattgctcggagatgagcccgcgtccgattagctagttggtgaggtaaaggctcaccaaggcgacgatcggtagccggcctgagagggtgttcggccacaatggaactgagacacggtccatactcctacgggaggcagcagttaagaatcttgctcaatggggggaaccctgaagcagcgacgccgcgtgaacgatgaaggtcttcggattgtaaagttcaataagcagggaaaaataagcagcaatgtgatgatggtacctgcctaaagcaccggctaactacgtgccagcagccgcggtaatacgtatggtgcaagcgttgttcggaatcattgggcgtaaagggtgcgtaggcggacatgtaagtcagatgtgaaaactgggggctcaactcccagcctgcatttgaaactatatgtctggagtttgggagaggcaagtggaattccaggtgtagcggtgaaatgcgtagatatctggaggaacaccagtggcgaaggcgacttgctggcctaaaactgacgctgaggcacgaaagcgtgggtagtgaacgggattagataccccggtaatccacgccctaaacgttgtctaccagttgttgggggttttaaccctcagtaacgaacctaacggattaagtagaccgcctggggactatgctcgcaagagtgaaactcaaaggaattgacgggggtccgcacaagcggtggagcatgtggtttaattcgatgatacgcgaaaaacctcacctaggcttgacatggagtggaattatgtagagatacatgagccttcgggccgcttcacaggtgctgcatggttgtcgtcagctcgtgtcgtgagatgttgggttaagtcccgcaacgagcgcaaccctcaccttatgttgccatcattcagttgggcactcgtaaggaactgccggtgacaaaccggaggaaggcggggatgacgtcaaatcctcatggcctttatgtctagggcaacacacgtgctacaatggccggtacaaagggtagccaactcgcgagggggagctaatctcaaaaagccggtcccagttcggattggagtctgcaactcgactccatgaagtcggaatcgctagtaatcgcggatcagcatgccgcggtgaatacgttcccggaccttgtacacaccgcccgtcacaccacctgagtggggagcacccgaagtggtctttgccaaccgtaaggaagcagactactaaggtgaaactcgtgaagggggtg

SEQ ID NO: 1834 - DNA, 1431 bp, Leptospira alstonii; identical to SEQ ID NO: 1833

SEQ ID NO: 1835 - DNA, 1422 bp, Leptospira biflexa
aactaacgctggcggcgcgtcttaaacatgcaagtcaaacgggtagtaataccagtggcgaacgggtgagtaatacatggataacctacctagaagttggggataacacagagaaatttgtgctaataccgaatgtgacggttcctggtagcagggattggttaaagcagcaatgcgcttttagatgggtccatggctgattagctagttggtggggtaaaggctcaccaaggcgacgatcagtagccggcctgagagggtgaacggccacaatggaactgagacacggtccatactcctacgggaggcagcagttaagaatcttgctcaatgggcgaaagcctgaagcagcgacgccgcgtgaacgatgaaggtcttcggattgtaaagttcagtaagtagggacgaaaaaaatgacggtacctacctaaagcaccggctaactacgtgccagcagccgcggtaatacgtatggtgcaagcgttgttcggaatcattgggcgtaaagggtgtgtaggcggactaacaagtcaggtgtgaaatcttcgggctcaactcgaaacctgcatttgaaactgttagtctggaatctgggagaggcaagtggaatttctggtgtagcggtgaaatgcgtagatatcagaaggaacaccgatggcgaaggcaacttgctggcctaagattgacgctgaaacacgaaagcgtgggtagtgaacgggattagataccccggtaatccacgccctaaacgttgtctaccagttgttagaggtattaactcctctagtaacgaacctaacggattaagtagaccgcctggggactacgctcgcaagagtgaaactcaaaggaattgacgggggtccgcacaagcggtggagcatgtggtttaattcgatgatacgcgaaaaaccttacctaggcttgacatgcacgtgaactatgtagagatacatgggccttcgggcgcgtgcacaggtgctgcatggctgtcgtcagctcgtgtcgtgagatgttgggttaagtcccgcaacgagcgcaacccttactttctgttgccatcattcagttgggcactcggaaagaactgccggtgacaaaccggaggaaggcggggatgacgtcaagtcctcatggcctttatgtctagggcaacacacgtgctacaatggccggtacagagggtcgccaaactgcaaagtggagctaatctcttaaaaccggtcccagttcagattggagtctgcaactcgactccatgaagtcggaatcgctagtaatcgcggatcagcatgccgcggtgaatacgttcccggaccttgtacacaccgcccgtcacaccatctgagtggggagcacccgaagaggttgtccttaaccgcaaggagaggcacttctaaggtgaaactcgtgaagagggtg

SEQ ID NO: 1836 - DNA, 1425 bp, Leptospira borgpetersenii
  misc_feature (1)..(1): n is a, c, g, or t
  misc_feature (4)..(4): n is a, c, g, or t
ntancgctggcggcgcgtcttaaacatccaatccaaagcggagtagcaatactcagcggcgaacgggtgagtaacacgtgggtaatcttcctccgagtctgggataactttccgaaaggggagctaatactggatagtcccgagaggtcataggatttttcgggtaaagatttattgctcggagatgagcccgcgcccgattagctagttggtgaggtaatggctcaccaaggcgacgatcggtagccggcctgagagggtgttcggccacaatggaactgagacacggtccatactcctacgggaggcagcagttaagaatcttgctcaatggggggaaccctgaagcagcgacgccgcgtgaacgatgaaggtcttcggattgtaaagttcaataagcagggaaaaataagcagcgatgtgatgatggtacctgcctaaagcaccggctaactacgtgccagcagccgcggtaatacgtatggtgcaagcgttgttcggaatcattgggcgtaaagggtgcgtaggcggacatgtaagtcaggtgtgaaaactgcgggctcaactcgcagcctgcacttgaaactatgtgtctggagtttgggagaggcaagtggaattccaggtgtagcggtgaaatgcgtagatatctggaggaacaccagtggcgaaggcgacttgctggcctaaaactgacgctgaggcacgaaagcgtgggtagtgaacgggattagataccccggtaatccacgccctaaacgttgtctaccagttgttgggggttttaaccctcagtaacgaacctaacggattaagtagaccgcctggggactatgctcgcaagagtgaaactcaaaggaattgacgggggtccgcacaagcggtggagcatgtggtttaattcgatgatacgcgaaaaacctcacctaggcttgacatggagtggaatcatgtagagatacatgagccttcgggccgcttcacaggtgctgcatggttgtcgtcagctcgtgtcgtgagatgttgggttaagtcccgcaacgagcgcaaccctcaccttatgttgccatcattcagttgggcactcgtaaggaactgccggtgacaaaccggaggaaggcggggatgacgtcaaatcctcatggcctttatgtctagggcaacacacgtgctacaatggccggtacaaagggtagccaactcgcgagggggagctaatctcaaaaagccggtcccagttcggattggagtctgcaactcgactccatgaagtcggaatcgctagtaatcgcggatcagcatgccgcggtgaatacgttcccggaccttgtacacaccgcccgtcacaccacctgagtggggagcacccgaagtggtctttgccaaccgcaaggaagcagactactaaggtgaaactcgtgaagg

SEQ ID NO: 1837 - DNA, 1431 bp, Leptospira broomii
aactaacgctggcggcgcgtcttaaacatgcaagtcgagcggggtagcaatacctagcggcgaacgggtgagtaacacgtgggtaatcttcctccgagtctgggataactttccgaaaggaaagctaataccggatagtcctactggatcacaggatctgataggtaaagatttattgcttggagatgagcccgcggccgattagctagttggtgaggtaatggctcaccaaggcgacgatcggtagccggcctgagagggtgtccggccacaatggaactgagacacggtccatactcctacgggaggcagcagttaagaatcttgctcaatgggggaaaccctgaagcagcgacgccgcgtgaacgaagaaggtcttcggattgtaaagttcattaagcagggaaaaataagcagcaatgtgatgatggtacctgcctaaagcaccggctaactacgtgccagcagccgcggtaatacgtatggtgcaagcgttgttcggaatcattgggcgtaaagggtgcgtaggcggatttgtaagtcaggtgtgaaaactgcgggctcaacccgtggcctgcacttgaaactacaagtctggagtttgggagaggcaagtggaattccaggtgtagcggtgaaatgcgtagatatctggaggaacaccagtggcgaaggcgacttgctggctcaaaactgacgctgaggcacgaaagcgtgggtagtaaacgggattagataccccggtaatccacgccctaaacgttgtctaccagttgttgggggttttaaccctcagtaacgaacctaacggattaagtagaccgcctggggactatgctcgcaagagtgaaactcaaaggaattgacgggggtccgcacaagcggtggagcatgtggtttaattcgatgatacgcgaaaaacctcacctgggcttgacatggatctgaatcatgtagagatatatgagccttcgggcagattcacaggtgctgcatggttgtcgtcagctcgtgtcgtgagatgttgggttaagtcccgcaacgagcgcaacccctatcgtatgttgctaccattaagttgggcactcgtacgaaactgccggtgacaaaccggaggaaggcggggatgacgtcaaatcctcatggcctttatgtccagggccacacacgtgctacaatggccgatacagagggtcgccaactcgcaagagggagctaatctctaaaagtcggtcccagttcggattggggtctgcaactcgaccccatgaagtcggaatcgctagtaatcgcggatcagcatgccgcggtgaatacgttcccggaccttgtacacaccgcccgtcacaccacctgagtggggagcacccgaagtggtctttgttaaccgtaaggagacagactactaaggtgaaactcgtaaagggggtg

SEQ ID NO: 1838 - DNA, 1431 bp, Leptospira fainei
aactaacgctggcggcgcgtcttaaacatgcaagtcgagcggggtagcaatacctagcggcgaacgggtgagtaactcgtgggtaatcttcctccgagtctgggataactttccgaaaggaaagctaataccggatagtcctgttggatcacaagatttgataggtaaagatttattgcttggagatgagcccgcggccgattagctagttggtgaggtaatggctcaccaaggcgacgatcggtagccggcctgagagggtgtccggccacaatggaactgagacacggtccatactcctacgggaggcagcagttaagaatcttgctcaatgggggaaaccctgaagcagcgacgccgcgtgaacgaagaaggtcttcggattgtaaagttcattaagcagggaaaaataagcagcaatgtgatgatggtacctgcctaaagcaccggctaactacgtgccagcagccgcggtaatacgtatggtgcaagcgttgttcggaatcattgggcgtaaagggtgcgtaggcggatttgtaagtcaggtgtgaaaactgcgggctcaacccgtggcctgcacttgaaactacaagtctggagtttgggagaggcaagtggaattccaggtgtagcggtgaaatgcgtagatatctggaggaacaccagtggcgaaggcgacttgctggctcaaaactgacgctgaggcacgaaagcgtgggtagtaaacgggattagataccccggtaatccacgccctaaacgttgtctaccagttgttgggggttttaaccctcagtaacgaacctaacggattaagtagaccgcctggggactatgctcgcaagagtgaaactcaaaggaattgacgggggtccgcacaagcggtggagcatgtggtttaattcgatgatacgcgaaaaacctcacctgggcttgacatggatctgaatcatgtagagatatatgagccttcgggcagattcacaggtgctgcatggttgtcgtcagctcgtgtcgtgagatgttgggttaagtcccgcaacgagcgcaacccctatcgtatgttgctaccattaagttgggcactcgtacgaaactgccggtgacaaaccggaggaaggcggggatgacgtcaaatcctcatggcctttatgtccagggccacacacgtgctacaatggccgatacagagggtcgccaactcgcaagagggagctaatctctaaaagtcggtcccagttcggattggggtctgcaactcgaccccatgaagtcggaatcgctagtaatcgcggatcagcatgccgcggtgaatacgttcccggaccttgtacacaccgcccgtcacaccacctgagtggggagcacccgaagtggtctttgttaaccgtaaggagacagactactaaggtgaaactcgtaaagggggtg

SEQ ID NO: 1839 - DNA, 1421 bp, Leptospira idonii
aactaacgctggcggcgcgtcttaaacatgcaagtcaaacgggtagcaataccagtggcgaacgggtgagtaatacatggataacctacctttaagttggggataacacagagaaatttgtgctaataccgaatgtgacggttcagcaaaggctggattggttaaagcagcaatgcgcttagagatggtccatggctgattagctagttggtggggtaaaggcccaccaaggcgacgatcagtagccggcctgagagggtgaacggccacaatggaactgagacacggtccatactcctacgggaggcagcagttaagaatcttgctcaatgggcgaaagcctgaagcagcgacgccgcgtgaacgatgaaggtcttcggattgtaaagttcagtaagtagggacgaaaaaaatgacggtacctacctaaagcaccggctaactacgtgccagcagccgcggtaatacgtatggtgcaagcgttgttcggaatcattgggcgtaaagggtgtgtaggcggattaacaagtcaggtgtgaaaccttcgggctcaactcgaagcctgcacttgaaactgttaatctggaatctgggagaggcaagtggaatttctggtgtagcggtgaaatgcgtagatatcagaaggaacaccgatggcgaaggcaacttgctggcctaagattgacgctgaaacacgaaagcgtgggtagtgaacgggattagataccccggtaatccacgccctaaacgttgtctaccagttgttagaggtattaactcctctagtaacgaacctaacggattaagtagaccgcctggggactacgctcgcaagagtgaaactcaaaggaattgacgggggtccgcacaagcggtggagcatgtggtttaattcgatgatacgcgaaaaaccttacctgggcttgacatgcataggaagtatgtagagatacatgcgccttcgggcctatgcacaggtgctgcatggctgtcgtcagctcgtgtcgtgagatgttgggttaagtcccgcaacgagcgcaacccttactttctgttgccatcattcagttgagcactcggaaagaactgccggtgacaaaccggaggaaggcggggatgacgtcaagtcctcatggcctttatgtccagggcaacacacgtgctacaatggccggtacagagggtcgccaatccgtgaggtggagctaatctcttaaaaccggtcccagttcagattggagtctgcaactcgactccatgaagtcggaatcgctagtaatcgcggatcagcatgccgcggtgaatacgttcccggaccttgtacacaccgcccgtcacaccacctgagtggggagcacccgaagaggttgtccttaaccgtaaggagaggcacttctaaggtgaaactcgtgaagggggtg

SEQ ID NO: 1840 - DNA, 1431 bp, Leptospira inadai
aactaacgctggcggcgcgtcttaaacatgcaagtcgagcggggtagcaatacctagcggcgaacgggtgagtaacacgtgggtaatcttcctccgagtctgggataactttccgaaaggaaagctaataccggatagtcctactggatcacaggatctgataggtaaagatttattgcttggagatgagcccgcggccgattagctagttggtgaggtaaaggctcaccaaggcgacgatcggtagccggcctgagagggtgtccggccacaatggaactgagacacggtccatactcctacgggaggcagcagttaagaatcttgctcaatgggggaaaccctgaagcagcgacgccgcgtgaacgaagaaggtcttcggattgtaaagttcattaagcagggaaaaataagcagcaatgtgatgatggtacctgcctaaagcaccggctaactacgtgccagcagccgcggtaatacgtatggtgcaagcgttgttcggaatcattgggcgtaaagggtgcgtaggcggatttgtaagtcaggtgtgaaaactgcgggctcaacccgtggcctgcacttgaaactacaagtctggagtttgggagaggcaagtggaattccaggtgtagcggtgaaatgcgtagatatctggaggaacaccagtggcgaaggcgacttgctggctcaaaactgacgctgaggcacgaaagcgtgggtagtaaacgggattagataccccggtaatccacgccctaaacgttgtctaccagttgttgggggttttaaccctcagtaacgaacctaacggattaagtagaccgcctggggactatgctcgcaagagtgaaactcaaaggaattgacgggggtccgcacaagcggtggagcatgtggtttaattcgatgatacgcgaaaaacctcacctgggcttgacatggatctgaatcatgtagagatatatgagccttcgggcagattcacaggtgctgcatggttgtcgtcagctcgtgtcgtgagatgttgggttaagtcccgcaacgagcgcaacccctatcgtatgttgctaccattcagttgggcactcgtacgaaactgccggtgacaaaccggaggaaggcggggatgacgtcaaatcctcatggcctttatgtccagggcaacacacgtgctacaatggccgatacagagggtcgccaactcgcaagagggagctaatctctaaaagtcggtcccagttcggattggggtctgcaactcgaccccatgaagtcggaatcgctagtaatcgcggatcagcatgccgcggtgaatacgttcccggaccttgtacacaccgcccgtcacaccacctgagtggggagcacccgaagtggtctttgttaaccgtaaggagacagactactaaggtgaaactcgtaaagggggtg

SEQ ID NO: 1841 - DNA, 1431 bp, Leptospira interrogans
aactaacgctggcggcgcgtcttaaacatgcaagtcaagcggagtagcaatactcagcggcgaacgggtgagtaacacgtgggtaatcttcctctgagtctgggataactttccgaaagggaagctaatactggatggtcccgagagatcataagatttttcgggtaaagatttattgctcggagatgagcccgcgtccgattagctagttggtgaggtaaaggctcaccaaggcgacgatcggtagccggcctgagagggtgttcggccacaatggaactgagacacggtccatactcctacgggaggcagcagttaagaatcttgctcaatggggggaaccctgaagcagcgacgccgcgtgaacgatgaaggtcttcggattgtaaagttcagtaagcagggaaaaataagcagcaatgtgatgatggtacctgcctaaagcaccggctaactacgtgccagcagccgcggtaatacgtatggtgcaagcgttgttcggaatcattgggcgtaaagggtgcgtaggcggacatgtaagtcaggtgtgaaaactgcgggctcaactcgcagcctgcacttgaaactatgtgtctggagtttgggagaggcaagtggaattccaggtgtagcggtgaaatgcgtagatatctggaggaacaccagtggcgaaggcgacttgctggcctaaaactgacgctgaggcacgaaagcgtgggtagtgaacgggattagataccccggtaatccacgccctaaacgttgtctaccagttgttgggggttttaaccctcagtaacgaacctaacggattaagtagaccgcctggggactatgctcgcaagagtgaaactcaaaggaattgacgggggtccgcacaagcggtggagcatgtggtttaattcgatgatacgcgaaaaacctcacctaggcttgacatggagtggaatcatgtagagatacatgagccttcgggccgcttcacaggtgctgcatggttgtcgtcagctcgtgtcgtgagatgttgggttaagtcccgcaacgagcgcaaccctcaccttatgttgccatcattcagttgggcactcgtaaggaactgccggtgacaaaccggaggaaggcggggatgacgtcaaatcctcatggcctttatgtctagggcaacacacgtgctacaatggccggtacaaagggtagccaactcgcgagggggagctaatctcaaaaatccggtcccagttcggattggagtctgcaactcgactccatgaagtcggaatcgctagtaatcgcggatcagcatgccgcggtgaatacgttcccggaccttgtacacaccgcccgtcacaccacctgagtggggagcacccgaagtggtctttgccaaccgcaaggaagcagactactaaggtgaaactcgtgaagggggtg

SEQ ID NO: 1842 - DNA, 1431 bp, Leptospira kirschneri
aactaacgctggcggcgcgtcttaaacatgcaagtcaagcggagtagcaatactcagcggcgaacgggtgagtaacacgtgggtaatcttcctccgagtctgggataactttccgaaagggaagctaatactggatggtcccgagagatcataagatttttcgggtaaagatttattgctcggagatgagcccgcgtccgattagctagttggtgaggtaaaggctcaccaaggcgacgatcggtagccggcctgagagggtgttcggccacaatggaactgagacacggtccatactcctacgggaggcagcagttaagaatcttgctcaatggggggaaccctgaagcagcgacgccgcgtgaacgatgaaggtcttcggattgtaaagttcagtaagcagggaaaaataagcagcaatgtgatgatggtacctgcctaaagcaccggctaactacgtgccagcagccgcggtaatacgtatggtgcaagcgttgttcggaatcattgggcgtaaagggtgcgtaggcggacatgtaagtcaggtgtgaaaactgcgggctcaactcgcagcctgcacttgaaactatgtgtctggagtttgggagaggcaagtggaattccaggtgtagcggtgaaatgcgtagatatctggaggaacaccagtggcgaaggcgacttgctggcctaaaactgacgctgaggcacgaaagcgtgggtagtgaacgggattagataccccggtaatccacgccctaaacgttgtctaccagttgttgggggttttaaccctcagtaacgaacctaacggattaagtagaccgcctggggactatgctcgcaagagtgaaactcaaaggaattgacgggggtccgcacaagcggtggagcatgtggtttaattcgatgatacgcgaaaaacctcacctaggcttgacatggagtggaatcatgtagagatacatgagccttcgggccgcttcacaggtgctgcatggttgtcgtcagctcgtgtcgtgagatgttgggttaagtcccgcaacgagcgcaaccctcaccttatgttgccatcattcagttgggcactcgtaaggaactgccggtgacaaaccggaggaaggcggggatgacgtcaaatcctcatggcctttatgtctagggcaacacacgtgctacaatggccggtacaaagggtagccaactcgcgagggggagctaatctcaaaaatccggtcccagttcggattggagtctgcaactcgactccatgaagtcggaatcgctagtaatcgcggatcagcatgccgcggtgaatacgttcccggaccttgtacacaccgcccgtcacaccacctgagtggggagcacccgaagtggtctttgccaaccgcaaggaagcagactactaaggtgaaactcgtgaagggggtg

SEQ ID NO: 1843 - DNA, 1431 bp, Leptospira kmetyi
aactaacgctggcggcgcgtcttaaacatgcaagtcaagcggagtagcaatactcagcggcgaacgggtgagtaacacgtgggtaatcttcctccgagtctgggataacttttcgaaaggaaagctaatactggatagtcccgagagatcacaaggtttttcgggtaaagatttattgctcggagatgagcccgcgtccgattagctagttggtgaggtaatggctcaccaaggcgacgatcggtagccggcctgagagggtgttcggccacaatggaactgagacacggtccatactcctacgggaggcagcagttaagaatcttgctcaatggggggaaccctgaagcagcgacgccgcgtgaacgatgaaggtcttcggattgtaaagttcaataagcagggaaaaataagcagcaatgtgatgatggtacctgcctaaagcaccggctaactacgtgccagcagccgcggtaatacgtatggtgcaagcgttgttcggaatcattgggcgtaaagggtgcgtaggcggacatgtaagtcaggtgtgaaaactgggggctcaactcccagcctgcacttgaaactatatgtctggagtttgggagaggcaagtggaattccaggtgtagcggtgaaatgcgtagatatctggaggaacaccagtggcgaaggcgacttgctggcctaaaactgacgctgaggcacgaaagcgtgggtagtgaacgggattagataccccggtaatccacgccctaaacgttgtctaccagttgttgggggttttaaccctcagtaacgaacctaacggattaagtagaccgcctggggactatgctcgcaagagtgaaactcaaaggaattgacgggggtccgcacaagcggtggagcatgtggtttaattcgatgatacgcgaaaaacctcacctaggcttgacatggagtggaatcatgtagagatacatgagccttcgggccgcttcacaggtgctgcatggttgtcgtcagctcgtgtcgtgagatgttgggttaagtcccgcaacgagcgcaaccctcaccttatgttgccatcatttagttgggcactcgtaaggaactgccggtgacaaaccggaggaaggcggggatgacgtcaaatcctcatggcctttatgtctagggcaacacacgtgctacaatggccggtacaaagggtagccaactcgcgagggggagctaatctcaaaaagccggtcccagttcggattggagtctgcaactcgactccatgaagtcggaatcgctagtaatcgcggatcagcatgccgcggtgaatacgttcccggaccttgtacacaccgcccgtcacaccacctgagtggggagcacccgaagtggtctttgccaaccgtaaggaagcagactactaaggtgaaactcgtgaagggggtg

SEQ ID NO: 1844 - DNA, 1431 bp, Leptospira licerasiae
aactaacgctggcggcgcgtcttaaacatgcaagtcgagcggagtagcaatacttagcggcgaacgggtgagtaacacgtgggtaatcttcctccgaatctgggataactttccgaaaggaaagctaataccggatagttctattggatcacaggatttgatagataaaggtttactgttcggagatgagcccgcggccgattagctagttggtgaggtaatggctcaccaaggcgacgatcggtagccggcctgagagggtgtccggccacaatggaactgagacacggtccatactcctacgggaggcagcagttaagaatcttgctcaatgggcgcaagcctgaagcagcgacgccgcgtgaacgaagaaggtcttcggattgtaaagttcagtaagcagggaaaaataagcagcaatgtgatgatggtacctgcctaaagcaccggctaactacgtgccagcagccgcggtaatacgtatggtgcaagcgttgttcggaatcattgggcgtaaagggtgcgtaggcggacatgtaagtcaggtgtgaaaactgggggctcaaccctcagcctgcacttgaaactatgtgtctggagtttgggagaggcaagtggaattccaggtgtagcggtgaaatgcgtagatatctggaggaacaccagtggcgaaggcgacttgctggctcaaaactgacgctgaggcacgaaagcgtgggtagtaaacgggattagataccccggtaatccacgccctaaacgttgtctaccagttgttgggggttttaaccctcagtaacgaacctaacggattaagtagaccgcctggggactatgctcgcaagagtgaaactcaaaggaattgacgggggtccgcacaagcggtggagcatgtggtttaattcgatgatacgcgaaaaacctcacctgggcttgacatggagtggaatcatatagagatatatgagccttcgggccgcttcacaggtgctgcatggttgtcgtcagctcgtgtcgtgagatgttgggttaagtcccgcaacgagcgcaacccctatcgtatgttgctaccatttagttgggcactcgtacgaaactgccggtgacaaaccggaggaaggcggggatgacgtcaaatcctcatggcctttatgtccagggccacacacgtgctacaatggccgatacagagggttgccaactcgcaagagggagctaatctctaaaagtcggtcccagttcggattggagtctgcaactcgactccatgaagtcggaatcgctagtaatcgcggatcagcatgccgcggtgaatacgttcccggaccttgtacacaccgcccgtcacaccacctgagtggggagcacccgaagtggtctttgttaaccgtaaggagacagactactaaggtgaaactcgtgaagggggtg

SEQ ID NO: 1845 - DNA, 1431 bp, Leptospira mayottensis
aactaacgctggcggcgcgtcttaaacatgcaagtcaagcggagtagcaatactcagcggcgaacgggtgagtaacacgtgggtaatcttcctccgagtctgggataacttttcgaaagggaagctaatactggatagtcccgagagatcacaagatttttcgggtaaagattcattgctcggagatgagcccgcgcccgattagctagttggtgaggtaatggctcaccaaggcgacgatcggtagccggcctgagagggtgttcggccacaatggaactgagacacggtccatactcctacgggaggcagcagttaagaatcttgctcaatggggggaaccctgaagcagcgacgccgcgtgaacgatgaaggtcttcggattgtaaagttcaataagcagggaaaaataagcagcaatgtgatgatggtacctgcctaaagcaccggctaactacgtgccagcagccgcggtaatacgtatggtgcaagcgttgttcggaatcattgggcgtaaagggtgcgtaggcggacatgtaagtcaggtgtgaaaactgggggctcaactcccagcctgcacttgaaactatgtgtctggagtttgggagaggcaagtggaattccaggtgtagcggtgaaatgcgtagatatctggaggaacaccagtggcgaaggcgacttgctggcctaaaactgacgctgaggcacgaaagcgtgggtagtgaacgggattagataccccggtaatccacgccctaaacgttgtctaccagttgttgggggttttaaccctcagtaacgaacctaacggattaagtagaccgcctggggactatgctcgcaagagtgaaactcaaaggaattgacgggggtccgcacaagcggtggagcatgtggtttaattcgatgatacgcgaaaaacctcacctaggcttgacatggagtggaatcatgtagagatacatgagccttcgggccgcttcacaggtgctgcatggttgtcgtcagctcgtgtcgtgagatgttgggttaagtcccgcaacgagcgcaaccctcaccttatgttgccatcatttagttgggcactcgtaaggaactgccggtgacaaaccggaggaaggcggggatgacgtcaaatcctcatggcctttatgtctagggcaacacacgtgctacaatggccggtacaaagggtagccaactcgcgagggggagctaatctcaaaaagccggtcccagttcggattggagtctgcaactcgactccatgaagtcggaatcgctagtaatcgcggatcagcatgccgcggtgaatacgttcccggaccttgtacacaccgcccgtcacaccacctgagtggggagcacccgaagtggtctttgccaaccgtaaggaagcagactactaaggtgaaactcgtgaagggggtg

SEQ ID NO: 1846 - DNA, 1418 bp, Leptospira meyeri
  misc_feature (1)..(1): n is a, c, g, or t
  misc_feature (4)..(4): n is a, c, g, or t
ntancgctggcggcgcgtcttaaacatccaatcaagcggagtagcaatactcagcggcgaacgggtgagtaacacgtgggtaatcttcctccgagtctgggataacttttcgaaagggaagctaatactggatagtcccgagagatcataagatttttcgggtaaagattcattgcttggagatgagcccgcgtccgattagctagttggtgaggtaatggctcaccaaggcgacgatcggtagccggcctgagagggtgttcggccacaatggaactgagacacggtccatactcctacgggaggcagcagttaagaatcttgctcaatggggggaaccctgaagcagcgacgccgcgtgaacgatgaaggtcttcggattgtaaagttcaataagcagggaaaaataagcagcaatgtgatgatggtacctgcctaaagcaccggctaactacgtgccagcagccgcggtaatacgtatggtgcaagcgttgttcggaatcattgggcgtaaagggtgcgtaggcggacatgtaagtcaggtgtgaaaactgggggctcaactcccagcctgcacttgaaactatgtgtctggagtttgggagaggcaagtggaattccaggtgtagcggtgaaatgcgtagatatctggaggaacaccagtggcgaaggcgacttgctggcctaaaactgacgctgaggcacgaaagcgtgggtagtgaacgggattagataccccggtaatccacgccctaaacgttgtctaccagttgttgggggttttaaccctcagtaacgaacctaacggattaagtagaccgcctggggactatgctcgcaagagtgaaactcaaaggaattgacgggggtccgcacaagcggtggagcatgtggtttaattcgatgatacgcgaaaaacctcacctaggcttgacatggagtggaatcatgtagagatacatgagccttcgggccgcttcacaggtgctgcatggttgtaatcagctcgtgtcgtgagatgttgggttaagtcccgcaacgagcgcaaccctcaccttatgttgccatcattcagttgggcactcgtaaggaactgccggtgacaaaccggaggaaggcggggatgacgtcaaatcctcatggcctttatgtctagggcaacacacgtgctacaatggccggtacaaagggtagccaactcgcgagggggagctaatctcaaaaacccggtcccagttcggattggagtctgcaactcgactccatgaagtcggaatcgctagtaatcgcggatcagcatgccgcggtgaatacgttcccggaccttgtacacacccccgtcacaccacctgagtggggagcacccgaagtggtctttgccaaccgcaaggaagcagactactaaggtgaaactcgtg

SEQ ID NO: 1847 - DNA, 1432 bp, Leptospira noguchii
aactaacgctggcggcgcgtcttaaacatgcaagtcaagcggagtagcaatactcagcggcgaacgggtgagtaacacgtgggtaatcttcctccgagtctgggataactttccgaaagggaagctaatactggatagtcccgagagatcataagatttttcgggtaaagattcattgctcggagatgagcccgcgtccgattagctagttggtgaggtaatggctcaccaaggcgacgatcggtagccggcctgagagggtgttcggccacaatggaactgagacacggtccatactcctacgggaggcagcagttaagaatcttgctcaatggggggaaccctgaagcagcgacgccgcgtgaacgatgaaggtcttcggattgtaaagttcagtaagcagggaaaaataagcagcaatgtgatgatggtacctgcctaaagcaccggctaactacgtgccagcagccgcggtaatacgtatggtgcaagcgttgttcggaatcattgggcgtaaagggtgcgtaggcggacatgtaagtcaggtgtgaaaactgcgggctcaactcgcagcctgcacttgaaactatgtgtctggagtttgggagaggcaagtggaattccaggtgtagcggtgaaatgcgtagatatctggaggaacaccagtggcgaaggcgacttgctggcctaaaactgacgctgaggcacgaaagcgtgggtagtgaacgggattagataccccggtaatccacgccctaaacgttgtctaccagttgttgggggttttaaccctcagtaacgaacctaacggattaagtagaccgcctggggactatgctcgcaagagtgaaactcaaaggaattgacgggggtccgcacaagcggtggagcatgtggtttaattcgatgatacgcgaaaaacctcacctaggcttgacatggagtggaattatgtagagatacatgagccttcgggccgcttcacaggtgctgcatggttgtcgtcagctcgtgtcgtgagatgttgggttaagtcccgcaacgagcgcaaccctcaccttatgttgccatcatttagctgggcactcgtaaggaactgccggtgacaaaccgtaggaaggcggggatgacgtcaaatcctcatggcctttatgtctagggcaacacacgtgctacaatggccggtacaaagggtagccaactcgcgagggggagctaatctcaaaaagccggtcccactccaatattggagtctgcaactcgactccatgaagtcggaatcgctagtaatcgcggatcagcatgccgcggtgaatacgttcccggaccttgtacacaccgcccgtcacaccacctgagtggggagcacccgaagtggtctttgccaaccgcaaggaagcagactactaaggtgaaactcgtgaagggggtg

SEQ ID NO: 1848 - DNA, 1431 bp, Leptospira santarosai
aactaacgctggcggcgcgtcttaaacatgcaagtcaagcggagtagcaatactcagcggcgaacgggtgagtaacacgtgggtaatcttccttcgagtctgggataactttccgaaaggggagctaatactggatagtcccgatagatcataggatgtatcgggtaaagattcattgctcggagatgagcccgcgtccgattagctagttggtgaggtaaaggctcaccaaggcgacgatcggtagccggcctgagagggtgttcggccacaatggaactgagacacggtccatactcctacgggaggcagcagttaagaatcttgctcaatggggggaaccctgaagcagcgacgccgcgtgaacgatgaaggtcttcggattgtaaagttcaataagcagggaaaaataagcagcgatgtgatgatggtacctgcctaaagcaccggctaactacgtgccagcagccgcggtaatacgtatggtgcaagcgttgttcggaatcattgggcgtaaagggtgcgtaggcggacatgtaagtcaggtgtgaaacctgcgggctcaactcgcagcctgcacttgaaactatgtgtctggagtttgggagaggcaagtggaattccaggtgtagcggtgaaatgcgtagatatctggaggaacaccagtggcgaaggcgacttgctggcctaaaactgacgctgaggcacgaaagcgtgggtagtgaacgggattagataccccggtaatccacgccctaaacgttgtctaccagttgttgggggttttaaccctcagtaacgaacctaacggattaagtagaccgcctggggactatgctcgcaagagtgaaactcaaaggaattgacgggggtccgcacaagcggtggagcatgtggtttaattcgatgatacgcgaaaaacctcacctaggcttgacatggagtggaatcatgtagagatacatgagccttcgggccgcttcacaggtgctgcatggttgtcgtcagctcgtgtcgtgagatgttgggttaagtcccgcaacgagcgcaaccctcaccttatgttgccatcatttagttgggcactcgtaaggaactgccggtgacaaaccggaggaaggcggggatgacgtcaaatcctcatggcctttatgtctagggcaacacacgtgctacaatggccggtacaaagggtagccaactcgcgagggggagctaatctcaaaaagccggtcccagttcggattggagtctgcaactcgactccatgaagtcggaatcgctagtaatcgcggatcagcatgccgcggtgaatacgttcccggaccttgtacacaccgcccgtcacaccacctgagtggggagcacccgaagtggtctttgccaaccgtaaggaagcagactactaaggtgaaactcgtgaagggggtg

SEQ ID NO: 1849 - DNA, 1422 bp, Leptospira terpstrae
aactaacgctggcggcgcgtcttaaacatgcaagtcaaacgggtagcaataccagtggcgaacgggtgagtaatacatggataacctacctaaaagttggggataacacagagaaatttgtgctaataccgaatgtgacggttcctggtagcagggattggttaaagcagcaatgcgcttttagatgggtccatggctgattagctagttggtggggtaaaggcccaccaaggcgacgatcagtagccggcctgagagggtgaacggccacaatggaactgagacacggtccatactcctacgggaggcagcagttaagaatcttgctcaatgggcgaaagcctgaagcagcgacgccgcgtgaacgatgaaggtcttcggattgtaaagttcagtaagtagggacgaaaaaaatgacggtacctacctaaagcaccggctaactacgtgccagcagccgcggtaatacgtatggtgcaagcgttgttcggaatcattgggcgtaaagggtgtgtaggcggactaacaagtcaggtgtgaaatcttcgggctcaactcgaaacctgcatttgaaactgttagtctggaatctgggagaggcaagtggaatttctggtgtagcggtgaaatgcgtagatatcagaaggaacaccgatggcgaaggcaacttgctggcctaagattgacgctgaaacacgaaagcgtgggtagtgaacgggattagataccccggtaatccacgccctaaacgttgtctaccagttgttagaggtattaactcctctagtaacgaacctaacggattaagtagaccgcctggggactacgctcgcaagagtgaaactcaaaggaattgacgggggtccgcacaagcggtggagcatgtggtttaattcgatgatacgcgaaaaaccttacctaggcttgacatgcacgtgaactatgtagagatacatgggccttcgggcgcgtgcacaggtgctgcatggctgtcgtcagctcgtgtcgtgagatgttgggttaagtcccgcaacgagcgcaacccttactttctgttgccatcattcagttgggcactcggaaagaactgccggtgacaaaccggaggaaggcggggatgacgtcaagtcctcatggcctttatgtctagggcaacacacgtgctacaatggccggtacagagggtcgccaaactgcaaagtggagctaatctcttaaaaccggtcccagttcagattggagtctgcaactcgactccatgaagtcggaatcgctagtaatcgcggatcagcatgccgcggtgaatacgttcccggaccttgtacacaccgcccgtcacaccatctgagtggggagcacccgaagaggttgtccttaaccgcaaggagaggcacttctaaggtgaaactcgtgaagagggtg

SEQ ID NO: 1850 - DNA, 1424 bp, Leptospira vanthielii
aactaacgctggcggcgcgtcttaaacatgcaagtcaaacgggtagcaataccagtggcgaacgggtgagtaatacatggataacctacctagaagttggggataacacagagaaatttgtgctaataccgaatgtgacggttcctgatagcagggattggttaaagcagcaatgcgtcttttagatgggtccatggctgattagctagttggtggggtaaaggctcaccaaggcgacgatcagtagccggcctgagagggtgaacggccacaatggaactgagacacggtccatactcctacgggaggcagcagttaagaatcttacgccacgtaccgaaagcctgaagcagcgacgccgcgtgaacgatgaaggtcttcggattgtaaagttcagtaagtagggacgaaaaaaatgacggtacctacctaaagcaccggctaactacgtgccagcagccgcggtaatacgtatggtgcaagcgttgttcggaatcattgggcgtaaagggtgtgtaggcggactaacaagtcaggtgtgaaatcttcgggctcaactcgaaacctgcatttgaaactgttagtctggaatctgggagaggcaagtggaatttctggtgtagcggtgaaatgcgtagatatcagaaggaacaccgatggcgaaggcaacttgctggcctaagattgacgctgaaacacgaaagcgtgggtagtgaacgggattagataccccggtaatccacgccctaaacgttgtctaccagttgttagaggtattaactcctctagtaacgaacctaacggattaagtagaccgcctggggactacgctcgcaagagtgaaactcaaaggaattgacgggggtccgcacaagcggtggagcatgtggtttaattcgatgatacgcgaaaaaccttacctaggcttgacatgcacgtgaactatgtagagatacatgggccttcgggcacgtgcacaggtgctgcatggctgtcgtcagctcgtgtcgtgagatgttgggttaagtcccgcaacgagcgcaacccttactttctgttgccatcattcagttgggcactcggaaagaactgccggtgacaaaccggaggaaggcggggatgacgtcaagtcctcatggcctttatgtctagggcaacacacgtgctacaatggccggtacagagggtcgccaaactgcaaagtggagctaatctcttaaaaccggtcccagttcagattggagtctgcaactcgactccatgaagtcggaatcgctagtaatcgcggatcagcatgccgcggtgaatacgttcccggaccttgtacacaccgcccgtcacaccatctgagtggggagcacccgaagaggttgtccttaaccgcaaggggaggcacttctaaggtgaaactcgtgaagagggtg

SEQ ID NO: 1851 - DNA, 1428 bp, Leptospira weilii
  misc_feature (872)..(874): n is a, c, g, or t
aactaacgctggcggcgcgtcttaaacatgcaagtcaagcggagtagcaatactcagcggcgaacgggtgagtaacacgtgggtaatcttcctccgagtctgggataactttccgaaaggggagctaatactggatggtcccgagaggtcatatgatttttcgggtaaagatttattgctcggagctgagcccgcgcccgattagctagttggtgaggtaatggctcaccaaggcgacgatcggtagccggcctgagagggtgttcggccacaatggaactgagacacggtccatactctacgggaggcagcagttaagaatcttgctcaatggggggaaccctgaagcagcgacgccgcgtgaacgatgaaggtcttcggattgtaaagttcaataagcagggaaaaataagcagcgatgtgatgatggtacctgcctaaagcaccggctaactacgtgccagcagccgcggtaatacgtatggtgcaagcgttgttcggaatcattgggcgtaaagggtgcgtaggcggacatgtaagtcaggtgtgaaaactgcgggctcaactcgcagcctgcacttgaaactatgtgtctggagtttgggagaggcaagtggaattccaggtgtagcggtgaaatgcgtagatatctggaggaacaccagtggcgaaggcgacttgctggcctaaaactgacgctgaggcacgaaagcgtgggtagtgaacgggattagataccccggtaatccacgccctaaacgttgtctaccagttgttgggggttttaaccctcagtaacgaactaacggattaagtagaccgcctggggactatgctcgcaagagtgaaactcaaaggaattgacgggggtnnncacaagcggtggagcatgtggtttaattcgatgatacgcgaaaaacctcacctaggcttgacatggagtggaattatgtagagatacatgagcttcgggccgcttcacaggtgctgcatggttgtcgtcagctcgtgtcgtgagatgttgggttaagtcccgcaacgagcgcaaccctcaccttatgttgccatcatttagttgggcactcgtaaggaactgccggtgacaaaccggaggaaggcggggatgacgtcaaatcctcatggcctttatgtctagggcaacacacgtgctacaatggccggtacaaagggtagccaactcgcgagggggagctaatctcaaaaagccggtcccagttcggattggagtctgcaactcgactccatgaagtcggaatcgctagtaatcgcggatcagcatgccgcggtgaatacgttcccggaccttgtacacaccgcccgtcacaccacctgagtggggagcacccgaagtggtctttgccaaccgtaaggaagcagactactaaggtgaaactcgtgaagggggtg

SEQ ID NO: 1852 - DNA, 1420 bp, Leptospira wolbachii
aactaacgctggcggcgcgtcttaaacatgcaagtcaaacgggtagcaataccagtggcgaacgggtgagtaatacatggataacctacgcgtagactggggataacacagagaaatttgtgctaataccgaatgtgacggttcctggtagcagggacgcgtagactgcaatgcgcttttagatgggtccatggctgattagctagttggtggggtaaaggctcaccaaggcgacgatcagtagccggcctgagagggtgaacggccacaatggaactgagacacggtccatactcctacgggaggcagcagttaagaatcttgctcaatgggcgaaagcctgaagcagcgacgccgcgtgaacgatgaaggtcttcggattgtaaagttcagtaagtagggacgaaaaaaatgacggtacctacctaaagcaccggctaactacgtgccagcagccgcggtaatacgtatggtgcaagcgttgttcggaatcattgggcgtaaagggtgtgtaggcggactaacaagtcaggtgtgaaatcttcgggctcaactcgaaacctgcatttgaaactgttagtctggaatctgggagaggcaagtggaatttctggtgtagcggtgaaatgcgtagatatcagaaggaacaccgatggcgaaggcaacttgctggcctaagattgacgctgaaacacgaaagcgtgggtagtgaacgggattagataccccggtaatccacgccctaaacgttgtctaccagttgttagaggtattaactcctctagtaacgaacctaacggattaagtagaccgcctggggactacgctcgcaagagtgaaactcaaaggaattgacgggggtccgcacaagcggtcgagcatgtggtttaattcgatgatacgcgaaaaaccttacctaggcttgacatgcacgtgaactatgtagagatacatgggccttcgggcgcgtgcacaggtgctgcatggctgtcgtcagctcgtgtcgtgagatgttgggttaagtcccgcaacgagcgcaacccttactttctgttgccatcattcagttgggcactcggaaagaactgccggtgacaaaccggaggaaggcggggatgacgtcaagtcctcatggcctttatgtctagggcaacacacgtgctacaatggccggtacagagggtcgccaaagcgcaagctggagctaatctcttaaaaccggtcccagttcagattggagtctgcaactcgactccatgaagtcggaatcgctagtaatcgcggatcagcatgccgcggtgaatacgttcccggaccttgtacacaccgcccgtcacaccatctgagtggggagcacccgaagaggttgtccttaaccgcaaggggaggcacttctaaggtgaaactcgtgaagagggtg

SEQ ID NO: 1853 - DNA, 1431 bp, Leptospira wolffii
aactaacgctggcggcgcgtcttaaacatgcaagtcgagcggagtagcaatacttagcggcgaacgggtgagtaacacgtgggtaatcttcctccgaatctgggataactttccgaaaggaaagctaataccggatagttctattggatcacaggatttgatagataaaggtttactgttcggagatgagcccgcggccgattagctagttggtgaggtaatggctcaccaaggcgacgatcggtagccggcctgagagggtgtccggccacaatggaactgagacacggtccatactcctacgggaggcagcagttaagaatcttgctcaatgggggcaaccctgaagcagcgacgccgcgtgaacgaagaaggtcttcggattgtaaagttcagtaagcagggaaaaataagcagcaatgtgatgatggtacctgcctaaagcaccggctaactacgtgccagcagccgcggtaatacgtatggtgcaagcgttgttcggaatcattgggcgtaaagggtgcgtaggcggacttgtaagtcaggtgtgaaaactgcgggctcaacccgtggcctgcacttgaaactacaggtctggagtttgggagaggcaagtggaattccaggtgtagcggtgaaatgcgtagatatctggaggaacaccagtggcgaaggcgacttgctggctcaaaactgacgctgaggcacgaaagcgtgggtagtaaacgggattagataccccggtaatccacgccctaaacgttgtctaccagttgttgggggttttaaccctcagtaacgaacctaacggattaagtagaccgcctggggactatgctcgcaagagtgaaactcaaaggaattgacgggggtccgcacaagcggtggagcatgtggtttaattcgatgatacgcgaagaacctcacctgggcttgacatggagtggaatcatatagagatatatgagccttcgggccgcttcacaggtgctgcatggttgtcgtcagctcgtgtcgtgagatgttgggttaagtcccgcaacgagcgcaacccctatcgtatgttgctaccattaagttgggcactcgtacgaaactgccggtgacaaaccggaggaaggcggggatgacgtcaaatcctcatggcctttatgtccagggccacacacgtgctacaatggccgatacaaagggttgccaaagcgcaagctggagctaatctcaaaaagtcggtcccagttcggattggagtctgcaactcgactccatgaagtcggaatcgctagtaatcgcggatcagcatgccgcggtgaatacgttcccggaccttgtacacaccgcccgtcacaccacctgagtggggagcacccgaagtggtctttgttaaccgtaaggagacagactactaaggtgaaactcgtgaagggggtg

SEQ ID NO: 1854 - DNA, 1423 bp, Leptospira yanagawae
aactaacgctggcggcgcgtcttaaacatgcaagtcaaacgggtagcaataccagtggcgaacgggtgagtaatacatggataacctacctagaagttggggataacacagagaaatttgtgctaataccgaatgtgacggttcctggtagcagggattggttaaagcagcaatgcgcttttagatgggtccatggctgattagctagttggtggggtaaaggcctaccaaggcgacgatcagtagccggcctgagagggtgaacggccacaatggaactgagacacggtccatactcctacgggaggcagcagttaagaatcttgctcaatgggcgaaagcctgaagcagcgacgccgcgtgaacgatgaaggtcttcggattgtaaagttcagtaagtagggacgaaaaaaatgacggtacctacctaaagcaccggctaactacgtgccagcagccgcggtaatacgtatggtgcaagcgttgttcggaatcattgggcgtaaagggtgtgtaggcggactaacaagtcaggtgtgaaatcttcgggctcaactcgaaacctgcatttgaaactgttagtctggaatctgggagaggcaagtggaatttctggtgtagcggtgaaatgcgtagatatcagaaggaacaccgatggcgaaggcaacttgctggcctaagattgacgctgaaacacgaaagcgtgggtagtgaacgggattagataccccggtaatccacgccctaaacgttgtctagtcagttgttagaggtattaactcctctagtaacgaacctaacggattaagtagaccgcctggggactacgctcgcaagagtgaaactcaaaggaattgacgggggtccgcacaagcggtggagcatgtggtttaattcgatgatacgcgaaaaaccttacctaggcttgacatgcacgtgaatcatgtagagatacatgagccttcgggcgcgtgcacaggtgctgcatggctgtcgtcagctcgtgtcgtgagatgttgggttaagtcccgcaacgagcgcaacccttactttctgttgccatcattcagttgggcactcggaaagaactgccggtgacaaaccggaggaaggcggggatgacgtcaagtcctcatggcctttatgtctagggcaacacacgtgctacaatggccggtacagagggtcgccaaactgcaaagtggagctaatctcttaaaaccggtcccagttcagattggagtctgcaactcgactccatgaagtcggaatcgctagtaatcgcggatcagcatgccgcggtgaatacgttcccggaccttgtacacaccgcccgtcacaccatctgagtggggagcacccgaagaggttgtccttaaccgcaaggagaggcacttctaaggtgaaactcgtgaagagggtg

SEQ ID NO: 1855 - DNA, 1482 bp, Leptospirillum ferriphilum
aacgaacgctggcggcgtgcctaacacatgcaagtccgacgtgaaaggggagcaatcccccggtagggtggcaaacgggtgagtaagacatgggtgatctgccctggagatggggatatccctccgaaagggggggcaataccgaatagtatccggttccgtgaagggggccggggaaagggaggcctctggtacaagcttccgctcctggatgagcccatggcccatcagctagttggtagggtaaaggcctaccaaggcgacgacgggtagctggtctgagaggacaaccagccacactggcactgagacacgggccagactcctacgggaggcagcagtgaggaatattgcgcaatgggggcaaccctgacgcagcaacgccgcgtgtgggaagaaggctttcgggttgtaaaccacttttgcccgggacgaaaggggggacctgaataaggttgcccgatgacggtaccgggagaataagccacggctaactctgtgccagcagccgcggtaagacagaggtggcaagcgttgttcggagttactgggcgtaaagagtctgtaggtggtctgtcaagtctttggtgaaaggccgtggcttaaccatgggaatgccaaagagactggcagactggaggctgggagagggaagcggaatttctggtgtagcggtgaaatgcgtagatatcagaaggaaggccggtggcgaaggcggcttcctggaacagacctgacactgagagacgaaagcgtggggagcaaacaggattagataccctggtagtccacgccctaaacgatgggtactaagtgtgggagggttaaacctcccgtgccgcagccaacgcagtaagtaccccgcctggggagtacggccgcaaggttgaaactcaaaggaattgacgggggcccgcacaagcggtggtgcatgtggtttaattcgacgcaacgcgaagaaccttacctgggcttgacatgccgcgagtaggaaaccgaaaggggaccgaccggttcagtccggaagcggaacaggtgctgcatggctgtcgtcagctcgtgccgtgaggtgttgggttcagtcccgcaacgagcgcaaccctcgccctctgttgccaccgggtcatgccgggcactctgaggggactgccagcgacaagttggaggaaggagaggatgacgtcaagtcatcatggcccttatgcccagggccacacacgtgcaacaatggccggtacagacggaagcaagaccgagaggtggagcaaatccgagaaagccggtcccagttcggattgaggtctgcaactcgacctcatgaagtcggaatcgctagtaatcgcgtatcagcacgacgcggtgaatacgttcccgggccttgtacacaccgcccgtcacaccacgaaagtctgttgtacctgaagtcggtgccccaaccggaaacggagggagccgcccaaggtatggccggtaattggggtg

SEQ ID NO: 1856 - DNA, 1484 bp, Leptospirillum ferrooxidans
  misc_feature (74)..(74): n is a, c, g, or t
  misc_feature (355)..(355): n is a, c, g, or t
  misc_feature (813)..(813): n is a, c, g, or t
aacgaacgctggcggcgtgcctaacacatgcaagtccgacgtgaaaggggagcaatcccccggtagggtggcanacgggtgagtaatacatgggtgatctaccttagggatggggatatccttccgaaaggaggggcaataccgaatattgtccggagccgtgaagggttccggggaaagggaggcctctgatacaagctttcgccttaagatgagcccatggcccatcagctagttggtagggtaaaggcctaccaaggctacgacgggtcgctggtctgagaggacgaccagccacactggcactgagatacgggccagactcctacgggaggcagcagtgaggaatattgcncaatgggggaaaccctgacgcagcaacgccgcgtgtgggaagaaggccttcgggtcgtaaaccacttttgcacgggacgaaaaagggatatcgaacaaatatccccgatgacggtaccgtgagaataagccacggctaactctgtgccagcagccgcggtaagacagaggtggcaagcgttgttcggaattactgggcgtaaagagtctgtaggtggtttgtcaagtctttggtgaaaggccgtagcttaactatgggaatgccaaagagactggcaggctggaggctgggagagggaagcggaatttctggtgtagcggtgaaatgcgtagatatcagaaggaaggccggtggcgaaggcggcttcctggaacagtcctgacactgagagacgaaagcgtggggagcacacaggattagataccctggtagtccacgccctaaacgatgggtactangtgtggaggggttaaaccctccgtgccgcagcaaacgcagtaagtaccccgcctggggagtacggccgcaaggttgaaactcaaaggaattgacgggggcccgcacaagcggtggtgcatgtggtttaattcgacgcaacgcgaggaaccttacctaggcttgacatgtggtgagtagcgaaccgaaaggggagcgacccgtcaaatcgggccatcacacaggtgctgcatggctgtcgtcagctcgtgccgtgaggtgttgggttcagtcccgcaacgagcgcaaccctcgccctttgttgccatcgggtaaagccgggcactctaaggggactgccagcgacaagttggaggaaggagaggatgacgtcaagtcatcatggcctttatgcctagggccacacacgtgcaacaatggccggtacagacggaggcaatgccgagaggcggagcaaacccgagaaaaccggtcccagttcggattgaggtctgcaactcgacctcatgaagtcggaatcgctagtaatcgcatatcagaacgatgcggtgaatacgttcccgggccttgtacacaccgcccgtcacaccacgaaagtttgttgtacccgaagtcggtgccttaacctcgcaagaggagagagccgcccaaggtatggccgatgattggcgtg

SEQ ID NO: 1857 - DNA, 1433 bp, Leucothrix pacifica
ggcatggcggcatgcttacacatgcagtcgaacggaaacgatggtagcttgctaccaggcgtcgagtggcggacgggtgagtaacgcgtaggaatctacccagttgtgggggatagcccggagaaatccggattaataccgcatacgccctacgggggaaaacaggggatcttcggaccttgtgcaattggatgagcctgcgttagattagctagttggtgaggtaagagctcaccaaggcgacgatctatagctggtctgagaggatgatcagccacatcgggactgagacacggcccggactcctacgggaggcagcagtggggaatattggacaatgggcgcaagcctgatccagcaatgccgcgtgtgtgaagaaggcctgagggttgtaaagcactttcaattgtgaagaaggggttagagttaatacctctgacctttgacgttaactttagaagaagcaccggctaactccgtgccagcagccgcggtaatacggagggtgcaagcgttaatcggaattactgggcgtaaagcgcgcgtaggcggttatttaagtcagatgtgaaagccccgggctcaacctgggaattgcctctgatactgggtaactagagtttggaagaggggagtagaatttcaggtgtagcggtgaaatgcatagagatctgaaggaataccagtggcgaaggcggctctctggtccagaactgacgctgaggtgcgaaagcgtgggtagcaaacgggattagataccccggtagtccacgccgtaaacgatgtcaactagccgttgggtgccttgtgcacttagtggcgcagctaacgcattaagttgaccgcctggggagtacggtcgcaagactaaaactcaaaggaattgacgggggcccgcacaagcggtggagcatgtggtttaattcgatgcaacgcgaagaaccttaccatcccttgacatccagtgaatatagcagagacgctttagtgccttcgggagcactgagacaggtgctgcatggctgtcgtcagctcgtgtcgtgagatgttgggttaagtcccgcaacgagcgcaacccctatccttggttgctagcaggtaatgctgagaactccaaggagactgccggtgacaaaccggaggaaggtggggatgacgtcaagtcatcatggcccttacgggatgggctacacacgtgctacaatggccggtacagagggtcgcgaacctgcgagggtgagccaatcccacaaagccggtcgtagtccggattggagtctgcaactcgactccatgaagttggaatcgctagtaatcgtggatcagaatgccacggtgaatacgttcccgggccttgtacacaccgcccgtcacaccatgggagtgggttgctccagaagtagctagtctaaccttagggaggacggtaccac

SEQ ID NO: 1858 - DNA, 1410 bp, Liberibacter asiaticus
  misc_feature (764)..(764): n is a, c, g, or t
  misc_feature (787)..(787): n is a, c, g, or t
  misc_feature (1066)..(1066): n is a, c, g, or t
  misc_feature (1113)..(1113): n is a, c, g, or t
  misc_feature (1287)..(1288): n is a, c, g, or t
  misc_feature (1363)..(1363): n is a, c, g, or t
ctggcggcaggcctaacacatgcaagtcgagcgcgtatgcaatacgagcggcagacgggtgagtaacgcgtaggaatctacctttttctacgggataacgcatggaaacgtgtgctaataccgtatacgccctattgggggaaagattttattggagagagatgagcctgcgttggattagctagttggtagggtaagagcctaccaaggctacgatctatagctggtctgagaggacgatcagccacactgggactgagacacggcccagactcctacgggaggcagcagtggggaatattggacaatgggggcaaccctgatccagccatgccgcgtgagtgaagaaggccttagggttgtaaagctctttcgccggagaagataatgacggtattcggagaagaagccccggctaacttcgtgccagcagccgcggtaatacgaagggggcgagcgttgttcggaataactgggcgtaaagggcgcgtaggcggcgattaagttagaggtgaaatcccaggctcaaccttggaactgcctttaatactggttgtctagagtttaggagaggtgagtggaattccgagtgtagaggtgaaattcgtagatattcggaggaacaccggtggcgaaggcggctcactggcctgatactgacgctgaggcgcgaaagcgtggggagcaaacaggattagataccctggtagtccacgccgtaaacgatgagtgctagctgttgggtggtttaccattcagtggcncacgtaacgcattaagcactccncctggggagtacggtcgcaagattaaaactcaaaggaattgacgggggcccgcacaagcgtggagcatgtggtttaattcgatgcaacgcgcagaaccttaccagcccttgacatgtataggacgatatcagagatggtattttcttttcggagacctttacacaggtgctgcatggctgtcgtcagctcgtgtcgtgagatgttgggttaagtcccgcaacgagcgcaacccctgcctctagttgccatcaagtttaggttttacctagatgttgggnactttatagggactgccggtgataagccggaggaaggtggggatgangtcaagtcctcatgcgccttatgggctgggctacacacgtgctacaatggtggttacaatgggttgcgaagtcgcgaggcggagctaatccccaaaagccatctcagttcggattgcactctgcaactcgagtgcatgaagtcggaatcgctagtaatcgcggatcagcatgcnncggtgaatacgttctcgggccttgtacacaccgcccgtcacaccatgggagttggttttgcctgaagacggtgtntaaccgcaaggaggcagccggccacggtagggtcagcgactggggtg

SEQ ID NO: 1859 - DNA, 1404 bp, Liberibacter crescens
aacgaacgctggcggcaggcttaacacatgcaagtcgagcgcgtatttatacgagcggcagacgggtgagtaacgcgtgggaatctacctttttctacaggataacgcatggaaacgtgtgctaatactgtatacgcccttttggggaaagatttattggagagagatgagcccgcgttggattagctagttggtggggtaaaggcctaccaaggcgacgatccatagctggtctgagaggatgatcagccacactgggactgagacacggcccagactcctacgggaggcagcagtggggaatattggacaatgggggcaaccctgatccagccatgccgcgtgagtgaagaaggccctagggttgtaaagctctttcaccggagaagataatgacggtatccggagaagaagccccggctaacttcgtgccagcagccgcggtaatacgaagggggcgagcgttgttcggaataactgggcgtaaagggcgcgtaggcggatgattaagtcagtggtgaaatcccaaggctcaaccttggaactgcctctgatactggttatcttgagttcagaagaggtgagtggaattccgagtgtagaggtgaaattcgtagatattcggaggaacaccagtggcgaaggcggctcactggtctgatactgacgctgaggtgcgaaagcgtggggagcaaacaggattagataccctggtagtccacgctgtaaacgatgagtgctagctgttgggcagtttactgcttagtggcgcagctaacgcattaagcactccgcctggggagtacggtcgcaagattaaaactcaaaggaattgacgggggcccgcacaagcggtggagcatgtggtttaattcgaagcaacgcgcagaaccttaccagcccttgacatggcgtgacgaataccagagatggtattttcttcttcggaggcacgcacacaggtgctgcatggctgtcgtcagctcgtgtcgtgagatgttgggttaagtcccgcaacgagcgcaaccctcgcctctagttgccatcattaagttgggcactctatggggactgccggcgataagccggaggaaggtggggatgacgtcaagtcctcatggcccttatgggctgggctacacacgtgctacaatggtggtgacaatgggcagcgaagtcgtgaggcggagctaatctccaaaagccatctcagttcggattgcactctgcaactcgagtgcatgaagttggaatcgctagtaatcgcggatcagcatgccgcggtgaatacgttctcgggccttgtacacaccgcccgtcacaccatgggagttggttttaccttaagacggtgcgctaaccgcaaggaggcagccggccacggtaaggtcagcgactggggtg

SEQ ID NO: 1860 - DNA, 1424 bp, Liberibacter solanacearum
aacgaacgctggcggcaggcttaacacatgcaagtcgagcgcttatttttaataggagcggcagacgggtgagtaacgcgtgggaatctacctttttctacgggataacgcacggaaacgtgtgctaataccgtatacgccctgagaaggggaaagatttattggagagagatgagcccgcgttagattagctagttggtggggtaaatgcctaccaaggctacgatctatagctggtctgagaggacgatcagccacactgggactgagacacggcccagactcctacgggaggcagcagtggggaatattggacaatgggggcaaccctgatccagccatgccgcgtgagtgaagaaggccttagggttgtaaagctctttcgccggagaagataatgacggtatccggagaagaagtcccggctaacttcgtgccagcagccgcggtaatacgaagggggcgagcgttgttcggaataactgggcgtaaagggcgcgtaggcgggtaattaagttaggggtgaaatcccaaggctcaaccttggaactgcctttaatactggttatctagagtttaggagaggtgagtggaattccgagtgtagaggtgaaattcgcagatattcggaggaacaccagtggcgaaggcggctcactggcctgatactgacgctgaggcgcgaaagcgtggggagcaaacaggattagataccctggtagtccacgctgtaaacgatgagtgctagctgttgggtggtttaccattcagtggcgcagctaacgcattaagcactccgcctggggagtacggtcgcaagattaaaactcaaaggaattgacgggggcccgcacaagcggtggagcatgtggtttaattcgatgcaacgcgcagaaccttaccagcccttgacatatagaggacgatatcagagatggtattttcttttcggagacctttatacaggtgctgcatggctgtcgtcagctcgtgtcgtgagatgttgggttaagtcccgcaacgagcgcaacccctacctctagttgccatcaagtttagattttatctagatgttgggtactttatagggactgccggtgataatccggaggaaggtggggatgacgtcaagtcctcatggcccttatgggctgggctacacacgtgctacaatggtggttacaatgggttgcgaagtcgcgaggcggagctaatcccaaaaggccatctcagttcggattgcactctgcaactcgagtgcatgaagttggaatcgctagtaatcgcggatcagcatgccgcggtgaatacgttctcgggccttgtacacaccgcccgtcacaccatgggagttggttttgcttgaagacggtgcgctaaccgtaaggaggcagccggccacggtagggtcagcgactggggtg

SEQ ID NO: 1861 - DNA, 1440 bp, Lihuaxuella thermophila
gacgaacgctggcggcgtgcctaatacatgcaagtcgagcggggtttgcttcttcggaagtaaacctagcggcgaacgggtgagtaacacgtgggcaacctgccctcaagaccgggataacaccgggaaaccggtgctaataccggataatcctccctctcgcatgagagggaagtaaaaggcttcggccacttgaggatgggcccgcggcgcattagctagttggtgaggtaacggctcaccaaggcgacgatgcgtagccgacctgagagggtgaccggccacactgggactgagacacggcccagactcctacgggaggcagcagtagggaattttccgcaatgggcgaaagcctgacggagcaacgccgcgtgagtgaagacggccttcgggttgtaaaactctgttcttggggaagaagctctgacggtacccaaggagaaagccccggctaactacgtgccagcagccgcggtaatacgtagggggcgagcgttgtccggaattattgggcgtaaagcgcgcgcaggcggctctttaagtcaggtgtgaaaggctgcggctcaaccgcagagcggcacctgaaactggagagcttgagtgcaggagaggggagcggaattcccggtgtagcggtggaatgcgtagagatcgggaggaacaccagtggcgaaggcggctctctggcctgtaactgacgctgaggcgcgaaagcgtggggagcaaacaggattagataccctggtagtccacgccgtaaacgatgagtgctaggtgttgggggcgttacgccctcagtgccgaaggtaacccaataagcactccgcctggggagtacggccgcaaggctgaaactcaaaggaattgacgggggcccgcacaagcggtggagcatgtggtttaattcgaagcaacgcgaagaaccttaccagggcttgacatcccgctgaccgctccagagatggagcttcccttcggggcagcggtgacaggtggtgcatggttgtcgtcagctcgtgtcgtgagatgttgggttcagtcccgcaacgagcgcaacccttatcgtcagttgccagcacttcgggtgggcactctggcgagacagccggtgaaagccggaggaaggtggggatgacgtcaaatcatcatgccccttatgtcctgggctacacacgtgctacaatggctggtacaaagggcagcaaacccgcgagggggagccaatcccaaaaaaccagtctcagttcggatcgcaggctgcaactcgcctgcgtgaagccggaatcgctagtaatcgcggatcagcatgccgcggtgaatacgttcccgggccttgtacacaccgcccgtcacaccacgagagtttgcaacacccgaagtcggtgaggtaacccgcaagggagccagccgccgaaggtggggcaaatgattggggtg

SEQ ID NO: 1862 - DNA, 1385 bp, Limimaricola cinnabarinus
aacgaacgctggcggcaggcctaacacatgcaagtcgagcgagaccttcgggtttagcggcggacgggttagtaacgcgtgggaatgtacccttcacttcggaatagtcccgggaaactgggtttaataccgtatacgccctttgggggaaagatttatcggtgaaggatcagcccgcgtctgattagatagttggtggggtaatggcctaccaagtctacgatcagtagctggtttgagaggatgatcagcaacactgggactgagacacggcccagactcctacgggaggcagcagtggggaatcttagacaatgggcgcaagcctgatctagccatgccgcgtgagtgatgaaggccttagggtcgtaaagctctttcgctggggaagataatgacggtacccagtaaagaaaccccggctaactccgtgccagcagccgcggtaatacggagggggttagcgttgttcggaattactgggcgtaaagcgcgcgtaggcggattggaaagttgggggtgaaatcccggggctcaaccccggaactgcctccaaaactatcagtctagaggtcgagagaggtgagtggaattccgagtgtagaggtgaaattcgtagatattcggaggaacaccagtggcgaaggcggctcactggctcgatactgacgctgaggtgcgaaagcgtggggagcaaacaggattagataccctggtagtccacgccgtaaacgatgaatgccagacgtcggggggcttgcccttcggtgtcacacctaacggattaagcattccgcctggggagtacggtcgcaagattaaaactcaaaggaattgacgggggcccgcacaagcggtggagcatgtggtttaattcgaagcaacgcgcagaaccttaccaacccttgacatcctcggaccgctggagagatccagttttctcgtaagagaccgagtgacaggtgctgcatggctgtcgtcagctcgtgtcgtgagatgttcggttaagtccggcaacgagcgcaacccacacccttagttgccagcattcagttgggcactctaggggaactgcccgtgataagcgggaggaaggtgtggatgacgtcaagtcctcatggcccttacgggttgggctacacacgtgctacaatggcatcaacaatgggttaatccctaaaagatgtctcagttcggattggggtctgcaactcgaccccatgaagtcggaatcgctagtaatcgcgtaacagcatgacgcggtgaatacgttcccgggccttgtacacaccgcccgtcacaccatgggagttggttctacccgacgacgctgcgctaacccttcggggaggcaggcggccacggtaggatcagcgactggggtg

SEQ ID NO: 1863 - DNA, 1306 bp, Limimaricola hongkongensis
tgcaagtcgagcgagaccttcgggtctagcggcggacgggttagtaacgcgtgggaacgtgcccttcactacggaatagtcccgggaaactgggtttaataccgtatacgccccttgggggaaagatttatcggtgaaggatcggcccgcgtctgattagatagttggtggggtaacggcctaccaagtcgacgatcagtagctggtttgagaggatgatcagcaacactgggactgagacacggcccagactcctacgggaggcagcagtggggaatcttagacaatgggcgcaagcctgatctagccatgccgcgtgagtgatgaaggccttagggtcgtaaagctctttcgctggggaagataatgacggtacccagtaaagaaaccccggctaactccgtgccagcagccgcggtaatacggagggggttagcgttgttcggaattactgggcgtaaagcgcgcgtaggcggattggaaagttgggggtgaaatcccggggctcaaccccggaactgcctccaaaactatcagtctagaggtcgagagaggtgagtggaattccgagtgtagaggtgaaattcgtagatattcggaggaacaccagtggcgaaggcggctcactggctcgatactgacgctgaggtgcgaaagcgtggggagcaaacaggattagataccctggtagtccacgccgtaaacgatgaatgccagacgtcggggggcttgcccttcggtgtcacacctaacggattaagcattccgcctggggagtacggtcgcaagattaaaactcaaaggaattgacgggggcccgcacaagcggtggagcatgtggtttaattcgaagcaacgcgcagaaccttaccaacccttgacatcctcggaccgtcgcagagatgcgtctttctcgtaagagaccgagtgacaggtgctgcatggctgtcgtcagctcgtgtcgtgagatgttcggttaagtccggcaacgagcgcaacccacacccttagttgccagcattcagttgggcactctaggggaactgcccgtgataagcgggaggaaggtgtggatgacgtcaagtcctcatggcccttacgggttgggctacacacgtgctacaatggcatcaacaatgggttaatccctaaaagatgtctcagttcggattggggtctgcaactcgaccccatgaagtcggaatcgctagtaatcgcgtaacagcatgacgcggtgaatacgttcccgggccttgtacacaccgcccgtcacaccatgggagttggttctacccgacgacgctgc

SEQ ID NO: 1864 - DNA, 1385 bp, Limimaricola soesokkakensis
aacgaacgctggcggcaggcctaacacatgcaagtcgaacgaagccttcgggcttagtggcggacgggttagtaacgcgtgggaacgtgcccttctctacggaatagtcccgggaaactgggtttaataccgtatacgcccttcgggggaaagatttatcggggaaggatcggcccgcgtctgattagatagttggtggggtaatggcctaccaagtcgacgatcagtagctggtttgagaggatgatcagcaacactgggactgagacacggcccagactcctacgggaggcagcagtggggaatcttagacaatgggcgcaagcctgatctagccatgccgcgtgagtgatgaaggccttagggtcgtaaagctctttcgctggggaagataatgactgtacccagtaaagaaaccccggctaactccgtgccagcagccgcggtaatacggagggggttagcgttgttcggaattactgggcgtaaagcgcgcgtaggcggattggaaagttgggggtgaaatcccggggctcaaccccggaacggcctccaaaactatcagtctagaggtcgagagaggtgagtggaattccgagtgtagaggtgaaattcgtagatattcggaggaacaccagtggcgaaggcggctcactggctcgatactgacgctgaggtgcgaaagcgtggggagcaaacaggattagataccctggtagtccacgccgtaaacgatgaatgccagacgtcggggggcttgcccttcggtgtcacacctaacggattaagcattccgcctggggagtacggtcgcaagattaaaactcaaaggaattgacgggggcccgcacaagcggtggagcatgtggtttaattcgaagcaacgcgcagaaccttaccaacccttgacatcctcggaccgtcgcagagatgcgtctttctcgtaagagaccgagtgacaggtgctgcatggctgtcgtcagctcgtgtcgtgagatgttcggttaagtccggcaacgagcgcaacccacacccttagttgccagcattcagttgggcactctaggggaactgcccgtgataagcgggaggaaggtgtggatgacgtcaagtcctcatggcccttacgggttgggctacacacgtgctacaatggcatcaacaatgggttaatccctaaaagatgtctcagttcggattggggtctgcaactcgaccccatgaagtcggaatcgctagtaatcgcgtaacagcatgacgcggtgaatacgttcccgggccttgtacacaccgcccgtcacaccatgggagttggttctacccgacgacgctgcgctaacccttcggggaggcaggcggccacggtaggatcagcgactggggtg

SEQ ID NO: 1865 - DNA, 1434 bp, Limimonas halophila
aacgaacgctggcggcaggcctaacacatgcaagtcgaacggggttcgtcggcttcggctggcggacttacgtggcggacgggtgagtaacgcgtgggaatctgccccggggtgggggataaccgctggaaacggcggctaataccgcataatccggccattggtcgggaaagccttacggcgccctgggaggagcccgcgtccgattagcttgttggtggggtaacggcctaccaaggcgacgatcggtagctggtctgagaggatgatcagccacactgggactgagacacggcccagacgcctacgggcggcagcagtggggaatcttggacaatgggggaaaccctgatccagccatgccgcgtgggtgaagaaggccctagggtcgtaaagccctttcggcggggaagatgatgacggtacccgcagaagaagccccggctaactccgtgccagcagccgcggtaagacggagggggctagcgttgttcggaatcactgggcgtaaagggcgcgtaggcggtccatcaagtcaggggtgaaaggcctgggctcaacctgggaactgcccttgaaactggtggactagagtccgggagagggtagcggaattcccagtgtagaggtgaaattcgtagatattgggaagaacaccagtggcgaaggcggctacctggaccgggactgacgctgaggcgcgaaagcgtggggagcaaacaggattagataccctggtagtccacgccgtaaacgctgtgtgctagccgttgggggacgtagtccgtcagtggcgcagctaacgcgataagcacaccgcctggggagtacggccgcaaggctaaaactcaaaggaattgacgggggcccgcacaagcggtggagcatgtggtttaattcgaagcaacgcgcagaatcttaccgcctcttgacatggtccgtcgcgctgacgtgagagcgtcggcttcagttcggctggacggatcacaggtgctgcatggctgtcgtcagctcgtgtcgtgagatgttgggttaagtcccgcaacgagcgcaacccctacccttagttgccagcggtccggccgggcactctaaggggactgccggtgacaagccggaggaaggcggggacgacgtcaagtcatcatggcccttacggggcgggctacacacgtgctacaatggcggcgacagagggcagctagaccgcgaggtcacgcgaatcccgaaacgccgtctcagttcggattgcactctgcaactcgagtgcatgaagccggaatcgctagtaatcgcggatcaccatgccgcggtgaatacgttcccgggccttgtacacaccgcccgtcacaccatgggagttgaccttacccgaagccggtgcgccaaccctttgggaggcagccgaccacggtaaggtcagcgactggggtg

SEQ ID NO: 1866 - DNA, 1451 bp, Limnohabitans curvus
acgctggcggaatgctttacacatgcaagtcgaacggcagcacggacttcggtctggtggcgagtggcgaacgggtgagtaatatatcggaacgtgcccagtcgtgggggataacgtagtgaaaattacgctaataccgcatacgatctaaggatgaaagcgggggatcgcaagacctcgcgcgattggagcggccgatatcagattaggtagttggtgaggtaaaggctcaccaagccaacgatctgtagctggtctgagaggacgaccagccacactggaactgagacacggtccagactcctacgggaggcagcagtggggaattttggacaatggacgcaagtctgatccagccattccgcgtgcaggacgaaggccttcgggttgtaaactgcttttgtacagaacgaaaaggtttctattaatactaggggctcatgacggtactgtaagaataagcaccggctaactacgtgccagcagccgcggtaatacgtagggtgcaagcgttaatcggaattactgggcgtaaagcgtgcgcaggcggttatataagacagatgtgaaatccccgggctcaacctgggaactgcatttgtgactgtatagctggagtgcggcagagggggatggaattccgcgtgtagcagtgaaatgcgtagatatgcggaggaacaccgatggcgaaggcaatcccctgggcctgcactgacgctcatgcacgaaagcgtggggagcaaacaggattagataccctggtagtccacgccctaaacgatgtcaactggttgttgggtcttcactgactcagtaacgaagctaacgcgtgaagttgaccgcctggggagtacggccgcaaggttgaaactcaaaggaattgacggggacccgcacaagcggtggatgatgtggtttaattcgatgcaacgcgaaaaaccttacccacctttgacatgtacggaagcctttagagatagaggcgtgctcgaaagagagccgtaacacaggtgctgcatggctgtcgtcagctcgtgtcgtgagatgttgggttaagtcccgcaacgagcgcaacccttgtcattagttgctacatttagttgggcactctaatgagactgccggtgacaaaccggaggaaggtggggatgacgtcaagtcctcatggcccttataggtggggctacacacgtcatacaatggctggtacaaagggttgccaacccgcgagggggagctaatcccataaaaccagtcgtagtccggatcgcagtctgcaactcgactgcgtgaagtcggaatcgctagtaatcgtggatcagaatgtcacggtgaatacgttcccgggtcttgtacacaccgcccgtcacaccatgggagcgggttctgccagaagtagttagcctaaccgtaaggagggcgattaccacggcagggttcgtgactggggt

SEQ ID NO: 1867 - DNA, 1271 bp, Limnoraphis robusta
  misc_feature (1265)..(1265): n is a, c, g, or t
caatgggcgcaagcctgacggagcaagaccgcgtgggggaggaaggctcttgggttgtaaaccccttttctcagggaagaaccaaatgacggtacctgaggaatcagcctcggctaactccgtgccagcagccgcggtaatacggaggaggcaagcgttatccggaatgattgggcgtaaagcgttcgtaggtggctattcaagtctgctgtcaaagacagaagctcaacttctgaaaggcagtggaaactgagtagctggagtgcggtaggggcagagggaattcccggtgtagcggtgaaatgcgtagagatcgggaagaacaccggtggcgaaagcgctctgctgggccgcaactgacactgagggacgaaagctaggggagcgaatgggattagataccccagtagtcctagctgtaaacgatggaaactaggtgttgcctgtatcgacccaggcagtgccgtagctaacgcgttaagtttcccgcctggggagtacgcacgcaagtgtgaaactcaaaggaattgacgggggcccgcacaagcggtggagtatgtggtttaattcgatgcaacgcgaagaaccttaccagggcttgacatgtccggaaccctggcgaaagctaggggtgccttcgggagccggaacacaggtggtgcatggctgtcgtcagctcgtgtcgtgagatgttgggttaagtcccgcaacgagcgcaaccctcgttcttagttgccatcattaagttgggcactctagggagactgccggtgacaaaccggaggaaggtggggatgacgtcaagtcatcatgccccttacgtcctgggctacacacgtactacaatgggaaggacagagggcagccacttcgcgaggaggagctaatcccgtaaacctttcctcagttcagattgcaggctgcaactcgcctgcatgaaggaggaatcgctagtaatcgcaggtcagcatactgcggtgaatccgttcccgggccttgtacacaccgcccgtcacaccatggaagttagccatgcccgaagtcattactctaacctttcgaggaggagggtgccgaaggcagggctgatgactggggtgaagtcgtaacaaggtagccgtaccggaaggtgtggctggatcacctcctttttagggagaccaaacttcggttgagctaaccccaatttacaagccaactgaggtcatcccaggtcgtgcgaggaattgagtaactactaggctttcaaactttcggttcggatnttatga

SEQ ID NO: 1868 - DNA, 1410 bp, Limnothrix rosea
gatgaacgctggcggtatgcctaacacatgcaagtcgaacgaagtcttcggacttagtggcggacgggtgagtaacgcgtgagaatctgccttcaggatggggacaacagttggaaacgactgctaatacccaatatgcctacgggtgaaacttatttggcctgaagatgagctcgcgtctgattagctagttggtggtgtaagagactaccaaggcgacgatcagtagctggtctgagaggatgagcagccacactgggactgagacacggcccagactcctacgggaggcagcagtggggaattttccgcaatgggcgaaagcctgacggagcaataccgcgtgagggaggaaggtttttggattgtaaacctcttttctcagggaagaattttgacggtacctgaggaataagcaccggctaactccgtgccagcagccgcggtaatacggagggtgcaagcgttatccggaattattgggcgtaaagagtccgtaggtggtcatgcaagtctgctgtcaaagcccacagcttaactgtggataggcggtggaaactgcatgacttgagtacggtaggggtagagggaattcccagtgtagcggtgaaatgcgtagatattgggaagaacaccggtggcgaaagcgctctactggaccgtaactgacactgagggacgaaagccaaggtagcgaaagggattagatacccctgtagtcttggccgtaaacgatggatactaggcgttgtctgtatcgacccggacagtgccgaagctaacgcgttaagtatcccgcctggggagtacgcacgcaagtgtgaaactcaaaggaattgacgggggcccgcacaagcggtggagtatgtggtttaattcgatgcaacgcgaagaaccttaccaagatttgacatcccgtgaactatccagagatggatgggtgccttcgggaacacggagacaggtggtgcatggctgtcgtcagctcgtgtcgtgagatgttgggttaagtcccgcaacgagcgcaaccctcgtccttagttgccatcattaagttgggcactctagggagactgccggggacaactcggaggaaggtggggatgacgtcaagtcatcatgccccttacattttgggctacacacgtactacaatggtcgggacaaagggcagcaaccccgcgagggcaagcgaatctcatcaaacccggcctcagttcagattgcaggctgcaactcgcctgcatgaaggaggaatcgctagtaatcgcaggtcagcatactgcggtgaatccgttcccgggccttgtacacaccgcccgtcacaccatggaagctggcaacgcccgaagtcgttactctaaccgttcgcggaggagggcgccgaaggcagtgctagtgactggggtg

SEQ ID NO: 1869 - DNA, 1472 bp, Listeria booriae
gacgaacgctggcggcgtgcctaatacatgcaagtcgaacgaaccgacgaaaagcttgcttttctgacgtgagtggcggacgggtgagtaacacgtgggcaacctgcctatcagttggggataactccgggaaaccggggctaataccgaataataacgggcgtcgcatgacgctggtttgaaagatggtttcggctatcgctgatagatgggcccgcggtgcattagctagttggtggggtaatggctcaccaaggcaacgatgcatagccgacctgagagggtgatcggccacactgggactgagacacggcccagactcctacgggaggcagcagtagggaatcttccgcaatggacgaaagtctgacggagcaacgccgcgtgtgtgaagaaggttttcggatcgtaaagcactgttgttagagaagaacaaggataagagtaactgcttgtcccttgacggtatctaaccagaaagccacggctaactacgtgccagcagccgcggtaatacgtaggtggcaagcgttgtccggatttattgggcgtaaagcgagcgcaggcggtttcttaagtctgatgtgaaagcccccggcttaaccggggagggtcattggaaactgagagacttgaatgcaggagaggtaagtggaattccacgtgtagcggtgaaatgcgtagatatgtggaggaacaccagtggcgaaggcggcttactggcctgtaattgacgctgaggctcgaaagcgtggggagcaaacaggattagataccctggtagtccacgccgtaaacgatgagtgctaagtgttagggggtttccgccccttagtgctgcagctaacgcattaagcactccgcctggggagtacgaccgcaaggttgaaactcaaaggaattgacgggggcccgcacaagtggtggagcatgtggtttaattcgaagcaacgcgaagaaccttaccaggtcttgacatcctttgaccactctggagacagagctttcccttcggggacaaagtgacaggtggtgcatggttgtcgtcagctcgtgtcgtgagatgttgggttaagtcccgcaacgagcgcaacccttgattttagttgccagcatttagttgggcactctaaagtgactgccggtgcaagccggaggaaggtggggatgacgtcaaatcatcatgccccttatgacctgggctacacacgtgctacaatggataatacaaagggttgccaaaccgcgaggtcgagctaatcccataaaattattctcagttcggattgtaggctgcaactcgcctacatgaagccggaatcactagtaatcgtggatcagcatgccacggtgaatacgttcccgggccttgtacacaccgcccgtcacaccacgagagtttgtaacacccgaagtcggtagggtaacctttatggagccagccgccgaaggtgggacagataattggggtg

SEQ ID NO: 1870 - DNA, 1447 bp, Listeria cornellensis
tgcaagtcgaacgaaccgacgaaagagcttgctctttctgacgttagtggcggacgggtgagtaacacgtgggcaacctgcctgtaagttggggataactccgggaaaccggggctaataccgaataataacaagcgtcgcatgacgcctgtttgaaagatggtttcggctatcacttacagatgggcccgcggtgcattagctagttggtagggtaatggcctaccaaggcaacgatgcatagccgacctgagagggtgatcggccacactgggactgagacacggcccagactcctacgggaggcagcagtagggaatcttccgcaatggacgaaagtctgacggagcaacgccgcgtgtgtgaagaaggttttcggatcgtaaagcactgttgttagagaagaacaaggataagagtaactgcttgtcccttgacggtatctaaccagaaagccacggctaactacgtgccagcagccgcggtaatacgtaggtggcaagcgttgtccggatttattgggcgtaaagcgagcgcaggcggtttcttaagtctgatgtgaaagcccccggcttaaccggggagggtcattggaaactgagagacttgaatgcaggagaggtaagtggaattccacgtgtagcggtgaaatgcgtagatatgtggaggaacaccagtggcgaaggcggcttactggcctgtaattgacgctgaggctcgaaagcgtggggagcaaacaggattagataccctggtagtccacgccgtaaacgatgagtgctaagtgttagggggtttccgccccttagtgctgcagctaacgcattaagcactccgcctggggagtacgaccgcaaggttgaaactcaaaggaattgacgggggcccgcacaagtggtggagcatgtggtttaattcgaagcaacgcgaagaaccttaccaggtcttgacatcctttgaccattctggagacagaactttcccttcggggacaaagtgacaggtggtgcatggttgtcgtcagctcgtgtcgtgagatgttgggttaagtcccgcaacgagcgcaacccttgattttagttgccagcatttagttgggcactctaaagtgactgccggtgcaagccggaggaaggtggggatgacgtcaaatcatcatgccccttatgacctgggctacacacgtgctacaatggataatacaaagggttgccaaaccgcgaggtcgagctaatcccataaaattattctcagttcggattgtaggctgcaactcgcctacatgaagccggaatcactagtaatcgtggatcagcatgccacggtgaatacgttcccgggccttgtacacaccgcccgtcacaccacgagagtttgtaacacccgaagtcggtagggtaaccatttatggagccagccgccgaaggtgggacagataattggggtg

SEQ ID NO: 1871 - DNA, 1474 bp, Listeria grandensis
gacgaacgctggcggcgtgcctaatacatgcaagtcgaacgaaccgaagaaagagcttgctctttcggacgttagtggcggacgggtgagtaacacgtgggcaacctgcctgtaagttggggataactccgggaaaccggggctaataccgaataataacaagcgtcgcatgacgcctgtttgaaagatggtttcggctatcacttacagatgggcccgcggtgcattagctagttggtagggtaatggcctaccaaggcgacgatgcatagccgacctgagagggtgatcggccacactgggactgagacacggcccagactcctacgggaggcagcagtagggaatcttccgcaatggacgaaagtctgacggagcaacgccgcgtgtgtgaagaaggttttcggatcgtaaagcactgttgttagagaagaacaaggataagagtaactgcttgtcccttgacggtatctaaccagaaagccacggctaactacgtgccagcagccgcggtaatacgtaggtggcaagcgttgtccggatttattgggcgtaaagcgagcgcaggcggtttcttaagtctgatgtgaaagcccccggcttaaccggggagggtcattggaaactgagagacttgaatgcaggagaggtaagtggaattccacgtgtagcggtgaaatgcgtagatatgtggaggaacaccagtggcgaaggcggcttactggcctgtaattgacgctgaggctcgaaagcgtggggagcaaacaggattagataccctggtagtccacgccgtaaacgatgagtgctaagtgttagggggtttccgccccttagtgctgcagctaacgcattaagcactccgcctggggagtacgaccgcaaggttgaaactcaaaggaattgacgggggcccgcacaagtggtggagcatgtggtttaattcgaagcaacgcgaagaaccttaccaggtcttgacatcctttgaccattctggagacagaactttcccttcggggacaaagtgacaggtggtgcatggttgtcgtcagctcgtgtcgtgagatgttgggttaagtcccgcaacgagcgcaacccttgattttagttgccagcatttagttgggcactctaaagtgactgccggtgcaagccggaggaaggtggggatgacgtcaaatcatcatgccccttatgacctgggctacacacgtgctacaatggataatacaaagggttgccaaaccgcgaggtcgagctaatcccataaaattattctcagttcggattgtaggctgcaactcgcctacatgaagccggaatcactagtaatcgtggatcagcatgccacggtgaatacgttcccgggccttgtacacaccgcccgtcacaccacgagagtttgtaacacccgaagtcggtagggtaacctttatggagccagccgccgaaggtgggacagataattggggtg

SEQ ID NO: 1872 - DNA, 1474 bp, Listeria rocourtiae
gacgaacgctggcggcgtgcctaatacatgcaagtcgaacgaaccgacgaaagagcttgctctttctgacgttagtggcggacgggtgagtaacacgtgggcaacctgcctgtaagttggggataactccgggaaaccggggctaataccgaataataacaagcgtcgcatgacgcctgtttgaaagacggtttcggctgtcacttacagatgggcccgcggtgcattagctagttggtagggtaatggcctaccaaggcgacgatgcatagccgacctgagagggtgatcggccacactgggactgagacacggcccagactcctacgggaggcagcagtagggaatcttccgcaatggacgaaagtctgacggagcaacgccgcgtgtgtgaagaaggttttcggatcgtaaagcactgttgttagagaagaacaaggataagagtaactgcttgtcccttgacggtatctaaccagaaagccacggctaactacgtgccagcagccgcggtaatacgtaggtggcaagcgttgtccggatttattgggcgtaaagcgagcgcaggcggtttcttaagtctgatgtgaaagcccccggcttaaccggggagggtcattggaaactgagagacttgaatgcaggagaggtaagtggaattccacgtgtagcggtgaaatgcgtagatatgtggaggaacaccagtggcgaaggcggcttactggcctgtaattgacgctgaggctcgaaagcgtggggagcaaacaggattagataccctggtagtccacgccgtaaacgatgagtgctaagtgttagggggtttccgccccttagtgctgcagctaacgcattaagcactccgcctggggagtacgaccgcaaggttgaaactcaaaggaattgacgggggcccgcacaagtggtggagcatgtggtttaattcgaagcaacgcgaagaaccttaccaggtcttgacatcctttgaaccttctggagacagaactttcccttcggggacaaagtgacaggtggtgcatggttgtcgtcagctcgtgtcgtgagatgttgggttaagtcccgcaacgagcgcaacccttgattttagttgccagcatttagttgggcactctaaagtgactgccggtgcaagccggaggaaggtggggatgacgtcaaatcatcatgccccttatgacctgggctacacacgtgctacaatggataatacaaagggttgccaaaccgcgaggtcgagctaatcccataaaattattctcagttcggattgtaggctgcaactcgcctacatgaagccggaatcactagtaatcgtggatcagcatgccacggtgaatacgttcccgggccttgtacacaccgcccgtcacaccacgagagtttgtaacacccgaagtcggtagggtaacctttatggagccagccgccgaaggtgggacagataattggggtg

SEQ ID NO: 1873 - DNA, 1354 bp, Litorimonas taeanensis
catgcaagtcgaacgagaaattaccttcgggtaatggacagtggcagacgggtgagtaacgcgtggcaacctacccttcactacgggacaacagttggaaacgactgctaataccgtatacgtcctccgggagaaagatttatcggtgatggatggggccgcgttagattagcttgttggtggggtaatggcctaccaaggcgacgatctatagctggtctgagaggatgatcagccacactgggactgagacacggcccagactcctacgggaggcagcagtggggaatattggacaatgggcgcaagcctgatccagcaacgccgcgtgaatgatgaaggccttagggttgtaaaattctttcgctagggaagataatgactgtacctagtaaagaagccccggctaactccgtgccagcagccgcggtaatacggagggggctagcgttgttcggaattactgggcgtaaagcgtgcgtaggcggattaataagttagatgtgaaatcccagggctcaaccctggaactgcatttaaaactgttagtcttgagttctggagaggtaagtggaattcctagtgtagaggtgaaattcgtagatattaggaggaacaccagaggcgaaggcggcttactggacagatactgacgctgaggcacgaaagtgtggggagcaaacaggattagataccctggtagtccacaccgtaaacgatgagagctagttgtctgcaagcatgcttgtaggtgacgcagctaacgcattaagctctccgcctggggagtacggtcgcaagattaaaactcaaagaaattgacgggggcccgcacaagcggtggagcatgtggtttaattcgaagcaacgcgcagaaccttacctacccttgacatgccggtcgcgatttccagagatggatttcttcaattcggttggaccgtgcacaggtgctgcatggctgtcgtcagctcgtgtcgtgagatgttgggttaagtcccgcaacgagcgcaaccctcatctttagttgccagcatttagttgggcactctagagaaactgccggtgctaagccggaggaaggtggggatgacgtcaagtcctcatggcccttacgggtagggctacacacgtgctacaatggcgctgacagagggttaatccctaaaaggcgtctcagttcggattgtcttctgcaactcgaagacatgaagttggaatcgctagtaatcgtggatcagcatgccacggtgaatacgttcccgggccttgtacacaccgcccgtcacaccatgggagttggttctacccgaaggtggtgcgctaacctgcttgcaggaggcagccacccccg

SEQ ID NO: 1874 - DNA, 1383 bp, Loktanella hongkongensis
aacgaacgctggcggcaggcctaacacatgcaagtcgagcgagaccttcgggtctagcggcggacgggttagtaacgcgtgggaacgtgcccttcactacggaatagtcccgggaaactgggtttaataccgtatacgccccttgggggaaagatttatcggtgaaggatcggcccgcgtctgattagatagttggtggggtaacggcctaccaagtcgacgatcagtagctggtttgagaggatgatcagcaacactgggactgagacacggcccagactcctacgggaggcagcagtggggaatcttagacaatgggcgcaagcctgatctagccatgccgcgtgagtgatgaaggccttagggtcgtaaagctctttcgctggggaagataatgacggtacccagtaaagaaaccccggctaactccgtgccagcagccgcggtaatacggagggggttagcgttgttcggaattactgggcgtaaagcgcgcgtaggcggattggaaagttgggggtgaaatcccggggctcaaccccggaactgcctccaaaactatcagtctagaggtcgagagaggtgagtggaattccgagtgtagaggtgaaattcgtagatattcggaggaacaccagtggcgaaggcggctcactggctcgatactgacgctgaggtgcgaaagcgtggggagcaaacaggattagataccctggtagtccacgccgtaaacgatgaatgccagacgtcggggggcttgcccttcggtgtcacacctaacggattaagcattccgcctggggagtacggtcgcaagattaaaactcaaaggaattgacgggggcccgcacaagcggtggagcatgtggtttaattcgaagcaacgcgcagaaccttaccaacccttgacatcctcggaccgtcgcagagatgcgtctttctcgtaagagaccgagtgacaggtgctgcatggctgtcgtcagctcgtgtcgtgagatgttcggttaagtccggcaacgagcgcaacccacacccttagttgccagcattcagttgggcactctaggggaactgcccgtgataagcgggaggaaggtgtggatgacgtcaagtcctcatggcccttacgggttgggctacacacgtgctacaatggcatcaacaatgggttaatccctaaaagatgtctcagttcggattggggtctgcaactcgaccccatgaagtcggaatcgctagtaatcgcgtaacagcatgacgcggtgaatacgttcccgggccttgtacacaccgcccgtcacaccatgggagttggttctacccgacgacgctgcgctaaccttcgggaggcaggcggccacggtaggatcagcgactggggtg

SEQ ID NO: 1875 - DNA, 1445 bp, Lonepinella koalarum
  misc_feature (14)..(14): n is a, c, g, or t
  misc_feature (19)..(19): n is a, c, g, or t
  misc_feature (37)..(37): n is a, c, g, or t
  misc_feature (124)..(124): n is a, c, g, or t
  misc_feature (798)..(798): n is a, c, g, or t
  misc_feature (961)..(961): n is a, c, g, or t
  misc_feature (975)..(975): n is a, c, g, or t
  misc_feature (1088)..(1088): n is a, c, g, or t
  misc_feature (1217)..(1217): n is a, c, g, or t
  misc_feature (1405)..(1405): n is a, c, g, or t
aggcttaacacatncaagncgagcggtaacggagagnacttgtacttttcttgacgagtggcggacgggtgagtaatgcttgggaatctggcttatggagggggataactacgggaaactgtanctaataccgcgtaatatcttcggattaaagtatgggatcgcaagaccatatgccataagatgagcccaagtgggattaggtagttggtggggtaaaggcctaccaagccgacgatctctagctggtctgagaggatgaccagccacactggaactgagacacggtccagactcctacgggaggcagcagtggggaatattgcgcaatgggggcaaccctgacgcagccatgccgcgtgaatgaagaagtccttcgggttgtaaagttctttcggtgatgaggaagggatttagtttaatagactaagtcattgacgttagtcacagaagaagcaccggctaactccgtgccagcagccgcggtaatacggagggtgcgagcgttaatcggaataactgggcgtaaagggcacgcaggcggttatttaagtaagatgtgaaagccccgagcttaacttgggaattgcattttagactggataactagagtactttagggaggggtagaattccacgtgtagcggtgaaatgcgtagagatgtggaggaataccgaaggcgaaggcacccccttgggaatgtactgacgctcatgtgcgaaagcgtggggagcaaacaggattagataccctggtagtccacgctgtaaacgctgtcgatttgggggttgggcttngagcctggcgcccgtagctaacgtgataaatcgaccgcctggggagtacggccgcaaggttaaaactcaaatgaattgacgggggcccgcacaagcggtggagcatgtggtttaattcgatgcaacgcgaagaaccttacctactcttgacatccatagaagntctcagagatgagngtgtgccttcgggaactatgagacaggtgctgcatggctgtcgtcagctcgtgttgtgaaatgttgggttaagtcccgcaacgagcgcaacccttatcctttgttgccagcanttcggtcgggaactcaaaggagactgccagtgataaactggaggaaggtggggatgacgtcaagtcatcatggcccttacgagtagggctacacacgtgctacaatggtgcatacagagggaagcgatnccgcgaggtggagcgaatctcacaaagtgcatctaagtccggattggagtctgcaactcgactccatgaagtcggaatcgctagtaatcgcaaatcagaatgttgcggtgaatacgttcccgggccttgtacacaccgcccgtcacaccatgggagtgggttgtaccagaagtagatagcttaaccgnaaggggggcgtttaccacggtatgattcatgactggggtg

SEQ ID NO: 1876 - DNA, 1454 bp, Longibacter salinarum
gacgaacgctggcggcaggcttaacacatgcaagtcgtacgagaaagttccttcgggaacgagtaaagtggcgaacgggtgcgtaacgcgtgaccaacctgcccttgagaggagaataactactggaaacggtagctaatgctccataatgtttagctctcacctgagagctaaatcaaaggcctttggcgctcaaggatggggtcgcgtcggattagctcgttggtgaggtaacggctcaccaaggcaacaatccgtagctggtctgagaggatgatcagccacactggcactgagacacgggccagactcctacgggaggcagcagtggggaatcttaggcaatgggggaaaccctgacctagccatgccgcgtggaggaagacacccctatggggcgtaaactccttttctaccggaagaaaaccctgttttgcagggcgtgacggtacggtaggaataagcaccggctaactccgtgccagcagccgcggtaatacggagggtgcaagcgttgtccggaatcactgggcgtaaagggtgtgtaggtgggatagcaagtcagaggtgaaagcctgcggcttaaccgtagaagtgcctttgaaactgctattcttgagtcctagagaggttgctggaattcgtggtgtagcggtgaaatgcgtagatatcacgaggaacaccagaggcgtaagcgagcaactggataggtactgacactgaggcacgagagcgtggggagcaaacaggattagataccctggtagtccacgccgtaaacgatgaatgctcgccgttactccgcttaaggagtagtggctaagttaacgcgttaagcattccgcctggggagtacgatcgcaagattgaaactcaaaggaattgacgggggcccgcacaagcggtggagcatgtggcttaattcgatgcaacgcgaagaaccttacctaggctcgaacgctaccggaccggtcccgaaaaggaccttcccgtaagggctggtagtgaggtgctgcatggctgtcgtcagctcgtgtcgtgagatgttgggttaagtcccgcaacgagcgcaacccctgttactagttaccatcgggtcatgccggggactctagtgagactgcctgcgcaagcagtgaggaaggtggggacgacgtcaagtcatcatggcccttacgcctagggctgcacacgtgctacaatggctggtacagagggctgccacttcgcgagaaggagcgaatccctaaagccagtcccagttcggattggagtctgcaacccgactccatgaagcaggaatcgctagtaatcgtggatcagcaatgccacggtgaatacgttcccgggccttgtacacaccgcccgtcaagccatggaagctgagagtgcccgaagtccgtgacccaaccttagggagggagcggccgaaggtgagctcagtgactggggct

SEQ ID NO: 1877 - DNA, 1455 bp, Longimonas halophila
gacgaacgctggcggcaggcctaacacatgcaagtcgcacgagaacacaccttcgggtgttagtaaagtggcggacgggtgagtaacgcgtagataacctgcccttgagagaggaataactactggaaacggtagctaatgccacatgatatcaaccagccgcatggccggttgatcaaagccttcgggcactcaaggatggatctgcgtcggattagcttgttggtgaggtaatagctcaccaaggcaataatccgtagctggtctgagaggatgatcagctacactggcactgagacacgggccagactcctacgggaggcagcagtggggaatcttaggcaatgggggaaaccctgacctagccatgccgcgtggaggaagacacccctatggggcgtaaactccttttctattggaagaaaaccctgttttgcagggcatgacggtacaataggaataagcaccggctaactccgtgccagcagccgcggtaatacggagggtgcaagcgttgtccggaatcactgggtgtaaagggtgtgcaggcgggacagcaagtcagaggtgaaagcccacggctcaaccgtggaagtgcctttgaaactgctgttcttgagtctcggagaagttgctggaattcgtggtgtagcggtgaaatgcgtagatatcacgaggaacaccagaagcgtaagcgagcaactagacgagtactgacgctgaggcacgaaagcgtggggagcaaacaggattagataccctggtagtccacgccgtaaactatgaatgctcgcggttgccccggtaaaggggcagttggctaagctaacgcgttaagcattcccctggggactacgatcgcaaggattgagatcagaggaattgacggggcacggcacaaccggtggagcatgtggcttaattcgatgcaacgcgaagaaccttacctaggctcgaacgctaccggaccgctcccgaaaaggagcttcccttcggggctggtagtgaggtgctgcatggctgtcgtcagctcgtgtcgtgagatgttgggttaagtcccgcaacgagcgcaacccctatcgttagttaccagcggattatgccggggactctaatgagactgcctgcgcaagcagtgaggaaggtggggatgacgtcaagtcatcatggcccttacgcctagggctgcacacgtgctacaatggccggtacaatgggcagccactccgcaaggaggcgcgaatcccaaaaaccggtcccagttcggattgaagtctgcaactcgacttcatgaaggcggaatcgctagtaatcgcgtatcagcaatgtcgcggtgaatacgttcccgggccttgtacacaccgcccgtcaagccatggaagctgagagcgcccgaagtccgtgtcccaaccctatgggagggagcggccgaaggtgagctcagtgactggggct

SEQ ID NO: 1878 - DNA, 1345 bp, Lonsdalea britannica
  misc_feature (104)..(104): n is a, c, g, or t
  misc_feature (407)..(407): n is a, c, g, or t
ggacgggtgagtaatgtctggggatctgcccgatggagggggataactactggaaacggtagctaataccgcataacgtcgcaagaccaaagtgggggaccttngggcctcacaccatcggatgaacccagatgggattagctagtaggcggggtaaaggcccacctaggcgacgatctctagctggtctgagaggatgaccagccacactggaactgagacacggtccagactcctacgggaggcagcagtggggaatattgcacaatgggggaaaccctgatgcagccatgccgcgtgtatgaagaaggccttcgggttgtaaagtactttcagcggggaggaagggagtaaggttaatagccttattcattgacgttacccgcagaagaagcaccggctaactncgtgccagcagccgcggtaatacggagggtgcaagcgttaatcggaatgactgggcgtaaagcgcacgcaggcggtttgttaagtcagatgtgaaatccccgagcttaacttgggaactgcatttgaaactggcaagctagagtcttgtagaggggggtagaattccaggtgtagcggtgaaatgcgtagagatctggaggaataccggtggcgaaggcggccccctggacaaagactgacgctcaggtgcgaaagcgtggggagcaaacaggattagataccctggtagtccacgctgtaaacgatgtcgacttggaggttgcggtcttgaactgtggcttccggagctaacgcgttaagtcgaccgcctggggagtacggccgcaaggttaaaactcaaatgaattgacgggggcccgcacaagcggtggagcatgtggtttaattcgatgcaacgcgaagaaccttacctactcttgacatccagagaatttagcagagatgctttagtgccttcgggaactctgagacaggtgctgcatggctgtcgtcagctcgtgttgtgaaatgttgggttaagtcccgcaacgagcgcaacccttatcctttgttgccagcacataatggtgggaactcaaaggagactgccggtgataaaccggaggaaggtggggatgacgtcaagtcatcatggcccttacgagtagggctacacacgtgctacaatggcgcatacaaagagaagcgaacttgcgagagtaagcggacctcataaagtgcgtcgtagtccggattggagtctgcaactcgactccatgaagtcggaatcgctagtaatcgtagatcagaatgctacggtgaatacgttcccgggccttgtacacaccgcccgtcacaccatgggagtgggttgcaaaagaagtaggtagcttaacct

SEQ ID NO: 1879 - DNA, 1465 bp, Lonsdalea iberica
attgaacgctggcggcaggcctaacacatgcaagtcgagcggcagcggaaggaagcttgcttccttgccggcgagcggcggacgggtgagtaatgtctggggatctgcctgatggagggggataactactggaaacggtagctaataccgcataacgtcgcaagaccaaagtgggggaccttcgggcctcacaccatcggatgaacccagatgggattagctagtaggcggggtaaaggcccacctaggcgacgatctctagctggtctgagaggatgaccagccacactggaactgagacacggtccagactcctacgggaggcagcagtggggaatattgcacaatgggggaaaccctgatgcagccatgccgcgtgtatgaagaaggccttcgggttgtaaagtactttcagcggggaggaaggcagtgaacttaatacgttcgctgattgacgttacccgcagaagaagcaccggctaactccgtgccagcagccgcggtaatacggagggtgcaagcgttaatcggaatgactgggcgtaaagcgcacgcaggcggtttgttaagtcagatgtgaaatccccgagcttaacttgggaactgcatttgaaactggcaagctagagtcttgtagaggggggtagaattccaggtgtagcggtgaaatgcgtagagatctggaggaataccggtggcgaaggcggccccctggacaaagactgacgctcaggtgcgaaagcgtggggagcaaacaggattagataccctggtagtccacgctgtaaacgatgtcgacttggaggttgcggtcttgaactgtggcttccggagctaacgcgttaagtcgaccgcctggggagtacggccgcaaggttaaaactcaaatgaattgacgggggcccgcacaagcggtggagcatgtggtttaattcgatgcaacgcgaagaaccttacctactcttgacatccagagaacttggcagagatgccttggtgccttcgggaactctgagacaggtgctgcatggctgtcgtcagctcgtgttgtgaaatgttgggttaagtcccgcaacgagcgcaacccttatcctttgttgccagcacgtaatggtgggaactcaaaggagactgccggtgataaaccggaggaaggtggggatgacgtcaagtcatcatggcccttacgagtagggctacacacgtgctacaatggcgcatacaaagagaagcgaacttgcgagagtaagcggacctcataaagtgcgtcgtagtccggattggagtctgcaactcgactccatgaagtcggaatcgctagtaatcgtagatcagaatgctacggtgaatacgttcccgggccttgtacacaccgcccgtcacaccatgggagtgggttgcaaaagaagtaggtagcttaaccttcgggagggcgcttaccactttgtgattcatgactggggtg

SEQ ID NO: 1880 - DNA, 1465 bp, Lonsdalea populi
attgaacgctggcggcaggcctaacacatgcaagtcgagcggcagcggaagggagcttgctcccttgccggcgagcggcggacgggtgagtaatgtctggggatctgcccgatggagggggataactactggaaacggtagctaataccgcataacgtcgcaagaccaaagtgggggaccttagggcctcacaccatcggatgaacccagatgggattagctagtaggcggggtaagagcccacctaggcgacgatctctagctggtctgagaggatgaccagccacactggaactgagacacggtccagactcctacgggaggcagcagtggggaatattgcacaatgggggaaaccctgatgcagccatgccgcgtgtatgaagaaggccttcgggttgtaaagtactttcagcggggaggaaggcagtgaacttaatacgttcgctgattgacgttacccgcagaagaagcaccggctaactccgtgccagcagccgcggtaatacggagggtgcaagcgttaatcggaatgactgggcgtaaagcgcacgcaggcggtttgttaagtcagatgtgaaatccccgagcttaacttgggaactgcatttgaaactggcaggctagagtcttgtagaggggggtagaattccaggtgtagcggtgaaatgcgtagagatctggaggaataccggtggcgaaggcggccccctggacaaagactgacgctcaggtgcgaaagcgtggggagcaaacaggattagataccctggtagtccacgctgtaaacgatgtcgacttggaggttgcggtcttgaactgtggcttccggagctaacgcgttaagtcgaccgcctggggagtacggccgcaaggttaaaactcaaatgaattgacgggggcccgcacaagcggtggagcatgtggtttaattcgatgcaacgcgaagaaccttacctactcttgacatccagagaacttggcagagatgccctggtgccttcgggagctctgagacaggtgctgcatggctgtcgtcagctcgtgttgtgaaatgttgggttaagtcccgcaacgagcgcaacccttatcctttgttgccagcacgtcatggtgggaactcaaaggagactgccggtgataaaccggaggaaggtggggatgacgtcaagtcatcatggcccttacgagtagggctacacacgtgctacaatggcgcatacaaagagaagcgaacttgcgagagtaagcggacctcataaagtgcgtcgtagtccggattggagtctgcaactcgactccatgaagtcggaatcgctagtaatcgtagatcagaatgctacggtgaatacgttcccgggccttgtacacaccgcccgtcacaccatgggagtgggttgcaaaagaagtaggtagcttaaccttcgggagggcgcttaccactttgtgattcatgactggggtg

SEQ ID NO: 1881 - DNA, 1464 bp, Lonsdalea quercina
attgaacgctggcggcaggcctaacacatgcaagtcgagcggcagcggaaggaagcttgcttccttgccggcgagcggcggacgggtgagtaatgtctggggatctgcccgatggagggggataactactggaaacggtagctaataccgcataacgtcgcaagaccaaagtgggggaccttcgggcctcacaccatcggatgaacccagatgggattagctagtaggcggggtaaaggcccacctaggcgacgatctctagctggtctgagaggatgaccagccacactggaactgagacacggtccagactcctacgggaggcagcagtggggaatattgcacaatgggggaaaccctgatgcagccatgccgcgtgtatgaagaaggccttcgggttgtaaagtactttcagcggggaggaaggcagtgaacttaatacgttcgctgattgacgttacccgcagaagaagcaccggctaactccgtgccagcagccgcggtaatacggagggtgcaagcgttaatcggaatgactgggcgtaaagcgcacgcaggcggtttgttaagtcagatgtgaaatccccgagcttaacttgggaactgcatttgaaactggcaggctagagtcttgtagaggggggtagaattccaggtgtagcggtgaaatgcgtagagatctggaggaataccggtggcgaaggcggccccctggacaaagactgacgctcaggtgcgaaagcgtggggagcaaacaggattagataccctggtagtccacgctgtaaacgatgtcgacttggaggttgcggtcttgaactgtggcttccggagctaacgcgttaagtcgaccgcctggggagtacggccgcaaggttaaaactcaaatgaattgacgggggcccgcacaagcggtggagcatgtggtttaattcgatgcaacgcgaagaaccttacctactcttgacatccagagaacttggcagagatgccttggtgccttcgggaactctgagacaggtgctgcatggctgtcgtcagctcgtgttgtgaaatgttgggttaagtcccgcaacgagcgcaacccttatcctttgttgccagcgattcggtcgggaactcaaaggagactgccggtgataaaccggaggaaggtggggatgacgtcaagtcatcatggcccttacgagtagggctacacacgtgctacaatggcgcatacaaagagaagcgaacttgcgagagtgagcggacctcataaagtgcgtcgtagtccggattggagtctgcaactcgactccatgaagtcggaatcgctagtaatcgtagatcagaatgctacggtgaatacgttcccgggccttgtacacaccgcccgtcacaccatgggagtgggttgcaaaagaagtaggtagcttaaccttcgggagggcgcttaccactttgtgattcatgactggggtg

SEQ ID NO: 1882 - DNA, 1456 bp, Luminiphilus syltensis
attgaacgctggcggcaggcctaacacatgcaagtcgagcgagaaagatcttcggatcgagtacagcggcggacgggtgagtaacgcgtaggaatctacctagtagtgggggacaactcggggaaactcgagctaataccgcatacgccctacgggggaaagcgggggaccttcgggcctcgtgctattagatgagcctgcgttggattagcttgttggtgaggtaaaggctcaccaaggcgacgatccatagctggtctgagaggatgatcagccacaccgggactgagacacggcccggactcctacgggaggcagcagtggggaatattgcgcaatgggcgaaagcctgacgcagccatgccgcgtgtgtgaagaaggccttcgggttgtaaagcactttcaattgggaggaaaggtttgcagttaataactgtaagctgtgacgttacctttagaagaagcaccggctaactccgtgccagcagccgcggtaatacggagggtgcaagcgttaatcggaattactgggcgtaaagcgcgcgtaggcggtttgttaagtcggatgtgaaagccctgggctcaacctgggaactgcacccgatactggctaactagagtgcgagagagggaggtagaattccatgtgtagcggtgaaatgcgtagatatatggaggaataccagtggcgaaggcggcctcctggctcgacactgacgctgaggtgcgaaagcgtggggagcaaacaggattagataccctggtagtccacgccgtaaacgatgtctactagctgttggggtacttgagaccttggtagcgcagctaacgcactaagtagaccgcctggggagtacggccgcaaggttaaaactcaaatgaattgacgggggcccgcacaagcggtggagcatgtggtttaattcgatgcaacgcgaagaaccttaccaggccttgacatcctagaaacttagcagaaatgctttggtgccttcgggaatctagtgacaggtgctgcatggctgtcgtcagctcgtgtcgtgagatgttgggttaagtcccgtaacgagcgcaacccttgtccttagttgccagcacataatggtgggaactctaaggagactgccggtgacaaaccggaggaaggtggggacgacgtcaagtcatcatggcccttacggtctgggctacacacgtgctacaatggcaggtacagacggtcgctaacccgcgagggggagccaatccgagaaaacttgtcgtagtccggattggagtctgcaactcgactccatgaagtcggaatcgctagtaatcgcgaatcagaatgtcgcggtgaatacgttcccgggccttgtacacaccgcccgtcacaccatgggagtgggttgctccagaagtggttagtctaaccttcgggaggacgatcaccacggagtgattcatgactggggtg

SEQ ID NO: 1883 - DNA, 1467 bp, Luteibacter rhizovicinus
attgaacgctggcggcatgcttaacacatgcaagtcgaacggcagcacagcagagcttgctctgtgggtggcgagtggcggacgggtgagtaatgcatcgggacctacccaactgtgggggataacgtagggaaacttacgctaataccgcatacgtcctacgggagaaagcgggggaccttcgggcctcgcgcggttggatggaccgatgtgcgattagcttgttggtgaggtaacggctcaccaaggcgacgatcgctagctggtctgagaggatgatcagccacactgggactgagacacggcccagactcctacgggaggcagcagtggggaatattggacaatgggcgcaagcctgatccagcaatgccgcgtgtgtgaagaaggccttcgggttgtaaagcacttttatcaggagcgaaatctgcagggctaatacccatgcagtctgacggtacctgaggaataagcaccggctaactccgtgccagcagccgcggtaatacggagggtgcaagcgttaatcggaattactgggcgtaaagcgtgcgtaggcggttcgttaagtctgttgtgaaagccccgggctcaacctgggaatggcaatggatactggcgagctagagtgtgtcagaggatggtggaattcccggtgtagcggtgaaatgcgtagagatcgggaggaacatcagtggcgaaggcggccatctgggacaacactgacgctgaggcacgaaagcgtggggagcaaacaggattagataccctggtagtccacgccctaaacgatgcgaactggatgttggtctcaactcggagatcagtgtcgaagctaacgcgttaagttcgccgcctggggagtacggtcgcaagactgaaactcaaaggaattgacgggggcccgcacaagcggtggagtatgtggtttaattcgatgcaacgcgaagaaccttacctggccttgacatgtccggaatccagcagagatgcaggagtgccttcgggaatcggaacacaggtgctgcatggctgtcgtcagctcgtgtcgtgagatgttgggttaagtcccgcaacgagcgcaacccttgtccttagttgccagcgagtaatgtcgggaactctaaggagactgccggtgacaaaccggaggaaggtggggatgacgtcaagtcatcatggcccttacggccagggctacacacgtactacaatggtcggtacagagggttgcgatgccgcgaggtggagctaatcccagaaagccgatcccagtccggattggagtctgcaactcgactccatgaagtcggaatcgctagtaatcgcagatcagctatgctgcggtgaatacgttcccgggccttgtacacaccgcccgtcacaccatgggagtgagctgctccagaagccgttagtctaaccgcaagggggacgacgaccacggagtggttcatgactggggtg

SEQ ID NO: 1884 - DNA, 1467 bp, Luteibacter yeojuensis
attgaacgctggcggcatgcttaacacatgcaagtcgaacggcagcacagcagagcttgctctgtgggtggcgagtggcggacgggtgagtaatgcatcgggacctacccagacgtgggggataacgtagggaaacttacgctaataccgcatacgtcctacgggagaaagcgggggatcgcaagacctcgcgcggttggatggaccgatgtgcgattagctagttggtgaggtaatggctcaccaaggcgacgatcgctagctggtctgagaggatgatcagccacactgggactgagacacggcccagactcctacgggaggcagcagtggggaatattggacaatgggcgcaagcctgatccagcaatgccgcgtgtgtgaagaaggccttcgggttgtaaagcacttttatcaggagcgaaatctgcagggctaatacctttgcagtctgacggtacctgaggaataagcaccggctaactccgtgccagcagccgcggtaatacggagggtgcaagcgttaatcggaattactgggcgtaaagcgtgcgtacgcggttagttaagtctgctgtgaaagccccgggctcaacctgggaatggcagtggatactggctagctagagtgtgatagaggatggtggaattcccggtgtagcggtgaaatgcgtagagatcgggaggaacatcagtggcgaaggcggccatctggatcaacactgacgctgaggcacgaaagcatgtggagcaaacaggattagataccctggtagtccacgccctaaacgatgcgaactggatgttggtctcaactcggagatcagtgtcgaagctaacgcgttaagttcgccgcctggggagtacggtcgcaagactgaaactcaaaggaattgacgggggcccgcacaagcggtggagtatgtggtttaattcgatgcaacgcgaagaaccttacctggccttgacatgtccggaatcctgcagagatgcgggagtgccttcgggaatcggaacacaggtgctgcatggctgtcgtcagctcgtgtcgtgagatgttgggttaagtcccgcaacgagcgcaacccttgtccttagttgccagcacgtaatggtgggaactctaaggagactgccggtgacaaaccggaggaaggtggggatgacgtcaagtcatcatggcccttacggccagggctacacacgtactacaatggtcggtacagagggttgcgagaccgcgaggtggagctaatcccagaaagccgatcccagtccggattggagtctgcaactcgactccatgaagtcggaatcgctagtaatcgcagatcagctatgctgcggtgaatacgttcccgggccttgtacacaccgcccgtcacaccatgggagtgagctgctccagaagccgttagtctaaccgcaagggggacgacgaccacggagtggttcatgactggggtg

SEQ ID NO: 1885 - DNA, 1409 bp, Luteimonas aestuarii
catgcagtcgaacggcagcacaagggagcttgctccctgggtggcgagtggcggacgggtgaggaatacatcggaatctgcctatttgtgggggataacgtagggaaacttacgctaataccgcatacgacctacgggtgaaagcggaggaccttcgggcttcgcgcagatagatgagccgatgtcggattagctagttggcggggtaaaggcccaccaaggcgacgatccgtagctggtctgagaggatgatcagccacactggaactgagacacggtccagactcctacgggaggcagcagtggggaatattggacaatgggcgcaagcctgatccagccatgccgcgtgggtgaagaaggccttcgggttgtaaagcccttttgttgggaaagaaaagcaatcggttaatacccggttgttctgacggtacccaaagaataagcaccggctaacttcgtgccagcagccgcggtaatacgaagggtgcaagcgttactcggaattactgggcgtaaagcgtgcgtaggtggttcgttaagtctgatgtgaaagccctgggctcaacctgggaattgcattggatactggcgggctagagtgcggtagagggcagtggaattcctggtgtagcagtgaaatgcgtagagatcaggaggaacatctgtggcgaaggcgactgcctggaccagcactgacactgaggcacgaaagcgtggggagcaaacaggattagataccctggtagtccacgccctaaacgatgcgaactggatgttgggtgcaatttggcactcagtatcgaagctaacgcgttaagttcgccgcctggggagtacggtcgcaagactgaaactcaaaggaattgacgggggcccgcacaagcggtggagtatgtggtttaattcgatgcaacgcgaagaaccttacctggccttgacatgcacggaactttccagagatggattggtgccttcgggaaccgtgacacaggtgctgcatggctgtcgtcagctcgtgtcgtgagatgttgggttaagtcccgcaacgagcgcaacccttgtccttagttgccagcacgtaatggtgggaactctaaggagaccgccggtgacaaaccggaggaaggtggggatgacgtcaagtcatcatggcccttacggccagggctacacacgtactacaatgggaaggacagagggctgcaaacccgcgagggcaagccaatcccagaaaccttctctcagtccggatcggagtctgcaactcgactccgtgaagtcggaatcgctagtaatcgcagatcagcattgctgcggtgaatacgttcccgggccttgtacacaccgcccgtcacaccatgggagtttgttgcaccagaagcaggtagcctaaccttcgggggggc

SEQ ID NO: 1886 - DNA, 1467 bp, Luteimonas cucumeris
agtgaacgctggcggtaggcctaacacatgcaagtcgaacggcagcacaggagagcttgctctctgggtggcgagtggcggacgggtgaggaatacatcggaatctaccttttcgtgggggataacgtagggaaacttacgctaataccgcatacgaccttagggtgaaagcggaggaccttcgggcttcgcgcggatagatgagccgatgtcggattagctagttggcggggtaaaggcccaccaaggcgacgatccgtagctggtctgagaggatgatcagccacactggaactgagacacggtccagactcctacgggaggcagcagtggggaatattggacaatgggcgcaagcctgatccagccataccgcgtgggtgaagaaggccttcgggttgtaaagcccttttgttgggaaagaaatcctgtcggttaatacccggcagggatgacggtacccaaagaataagcaccggctaacttcgtgccagcagccgcggtaatacgaagggtgcaagcgttactcggaattactgggcgtaaagcgtgcgtaggtggtttgttaagtctgatgtgaaagccctgggctcaacctgggaatggcattggatactggcaggctagagtgcggtagaggatggcggaattcccggtgtagcagtgaaatgcgtagagatcgggaggaacatctgtggcgaaggcggccatctggaccagcactgacactgaggcacgaaagcgtggggagcaaacaggattagataccctggtagtccacgccctaaacgatgcgaactggatgttgggagcaacttggctctcagtatcgaagctaacgcgttaagttcgccgcctggggagtacggtcgcaagactgaaactcaaaggaattgacgggggcccgcacaagcggtggagtatgtggtttaattcgatgcaacgcgaagaaccttacctggccttgacatgtccggaatcctgcagagatgcgggagtgccttcgggaatcggaacacaggtgctgcatggctgtcgtcagctcgtgtcgtgagatgttgggttaagtcccgcaacgagcgcaacccttgtccttagttgccagcacgtaatggtgggaactctaaggagaccgccggtgacaaaccggaggaaggtggggatgacgtcaagtcatcatggcccttacggccagggctacacacgtactacaatggtagggacagagggctgcaaacccgcgagggtgagccaatcccagaaaccctatctcagtccggatcggagtctgcaactcgactccgtgaagtcggaatcgctagtaatcgcagatcagcattgctgcggtgaatacgttcccgggccttgtacacaccgcccgtcacaccatgggagtttgttgcaccagaagcaggtagcttaaccgcaaggggggcgcttgccacggtgtggccgatgactggggtg

SEQ ID NO: 1887 - DNA, 1423 bp, Luteimonas marina
atgcaagtcgaacggcagcacaggggagcttgctccctgggtggcgagtggcggacgggtgaggaatacatcggaatctgcctatacgtgggggataacgtagggaaacttacgctaataccgcatacgacctacgggtgaaagcgggggatcgcaagacctcgcgcggatagatgagccgatgtccgattagctagttggcggggtaatggcccaccaaggcgacgatcggtagctggtctgagaggatgatcagccacactggaactgagacacggtccagactcctacgggaggcagcagtggggaatattggacaatgggcgcaagcctgatccagccatgccgcgtgggtgaagaaggccttcgggttgtaaagcccttttgttgggaaagaaaactttccgattaatacccggagagaatgacggtacccaaagaataagcaccggctaacttcgtgccagcagccgcggtaatacgaagggtgcaagcgttactcggaattactgggcgtaaagcgtgcgtaggtggttcgttaagtctgatgtgaaagccctgggctcaacctgggaattgcattggatactggcgggctagagtacggtagagggtagtggaattcctggtgtagcagtgaaatgcgtagagatcaggaggaacatccgtggcgaaggcgactacctggaccagtactgacactgaggcacgaaagcgtggggagcaaacaggattagataccctggtagtccacgccctaaacgatgcgaactggatgttgggttcaactaggaactcagtatcgaagctaacgcgttaagttcgccgcctggggagtacggtcgcaagactgaaactcaaaggaattgacgggggcccgcacaagcggtggagtatgtggtttaattcgatgcaacgcgcagaaccttacctggccttgacatccacggaactttccagagatggattggtgccttcgggaaccgtgagacaggtgctgcatggctgtcgtcagctcgtgtcgtgagatgttgggttaagtcccgcaacgagcgcaacccttgtccttagttgccagcacgtaatggtgggaactctaaggagaccgccggtgacaaaccggaggaaggtggggatgacgtcaagtcatcatggcccttacggccagggctacacacgtactacaatgggaaggacagagggctgcaaacccgcgagggcaagccaatcccagaaaccttctctcagtccggatcggagtctgcaactcgactccgtgaagtcggaatcgctagtaatcgcagatcagcattgctgcggtgaatacgttcccgggccttgtacacaccgcccgtcacaccatgggagtttgttgcaccagaagcaggtagcctaaccgcaaggagggcgcttgccacggtgt

SEQ ID NO: 1888 - DNA, 1462 bp, Luteimonas terrae
  misc_feature (26)..(26): n is a, c, g, or t
agtgaacgctggcggcaggcagctancatgcagtcgacggcagcacagaggagcttgctccttgggtggcgagtggcggacgggtgaggaatacatcggaatctgcctatttgtgggggataacgtagggaaacttacgctaataccgcatacgacctacgggtgaaagcggaggaccttcgggcttcgcgcagatagatgagccgatgtcggattagctagttggcggggtaaaggcccaccaaggcgacgatccgtagctggtctgagaggatgatcagccacactggaactgagacacggtccagactcctacgggaggcagcagtggggaatattggacaatgggcgcaagcctgatccagccatgccgcgtgggtgaagaaggccttcgggttgtaaagcccttttgttgggaaagaaaagcagccggttaatacccggttgttctgacggtacccaaagaataagcaccggctaacttcgtgccagcagccgcggtaatacgaagggtgcaagcgttactcggaattactgggcgtaaagcgtgcgtaggtggtttgttaagtctgatgtgaaagccctgggctcaacctgggaattgcattggatactggcaggctagagtgcggtagagggtagtggaattcccggtgtagcagtgaaatgcgtagagatcgggaggaacatccgtggcgaaggcgactacctggaccagcactgacactgaggcacgaaagcgtggggagcaaacaggattagataccctggtagtccacgccctaaacgatgcgaactggatgttgggttcaactaggaactcagtatcgaagctaacgcgttaagttcgccgcctggggagtacggtcgcaagactgaaactcaaaggaattgacgggggcccgcacaagcggtggagtatgtggtttaattcgatgcaacgcgaagaaccttacctggccttgacatgcacggaactttccagagatggattggtgccttcgggaaccgtgacacaggtgctgcatggctgtcgtcagctcgtgtcgtgagatgttgggttaagtcccgcaacgagcgcaacccttgtccttagttgccagcacgtaatggtgggaactctaaggagaccgccggtgacaaaccggaggaaggtggggatgacgtcaagtcatcatggcccttacggccagggctacacacgtactacaatgggaaggacagagggctgcaaacccgcgagggcaagccaatcccagaaaccttctctcagtccggattggagtctgcaactcgactccatgaagtcggaatcgctagtaatcgcagatcagcattgctgcggtgaatacgttcccgggccttgtacacaccgcccgtcacaccatgggagtttgttgcaccagaagtaggtagtctaaccgcaaggaggacgctaccacggtgtggccgatgactgggg

SEQ ID NO: 1889 - DNA, 1476 bp, Luteitalea pratensis
aatcaacgctggcggcgtgcctaacacatgcaagtcgaacgtgaaaggggcttcggccccgagtaaagtggcaaacgggtgagtaacgcgtgggtgatctgcctctgagtgggggataaccttccgaaaggagggctaataccgcatgacatcctgttcttggatgaacggagatcgaagctggggaccgcaaggcctggcgcttggagaggagcccgcgtccgattagctagttggtggggtaatggctcaccaaggcgacgatcggtagccggcctgagagggcggacggccacactgggactgagacacggcccagactcctacgggaggcagcagtggggaattgttcgcaatgggcgcaagcctgacgacgcaacgccgcgtgggggatgaaggtcttcggattgtaaacccctgttgggtgggacgaacaccttcgtggtgaatatccacgagggctgacggtaccacctgaggaagccccggctaactctgtgccagcagccgcggtaatacagagggggcaagcgttgttcggaattactgggcgtaaagggcgcgtaggcggcctgttaagtcggacgtgaaatccctcggctcaaccggggaactgcgtccgatactggcgggcttgaattcgggagagggatgtggaattccaggtgtagcggtgaaatgcgtagatatctggaggaacaccggtggcgaaggcggcatcctggaccgacattgacgctgaggcgcgaaagccaggggagcaaacgggattagataccccggtagtcctggccctaaacgatgagtgcttggtgtggcgggtatcgatccctgccgtgccgaagctaacgcattaagcactccgcctggggagtacggtcgcaaggctgaaactcaaaggaattgacgggggcccgcacaagcggtggagcatgtggtttaattcgacgcaacgcgaagaaccttacccaggctcgaaatgcagacgatcgccggtgaaagccggttcccgcaagggcgtctgtataggtgctgcatggctgtcgtcagctcgtgtcgtgagatgttgggttaagtcccgcaacgagcgcaacccttgtttcctgttgccatcaggtcaagctgggcactctggagaaactgccggtgacaaaccggaggaaggtggggatgacgtcaagtcagcatggcctttatgtctggggctacacacgtgctacaatggccggtacaaaccgttgcaaactcgcgagggtgagctaatcggagaaagccggtctcagttcggattgtaggctgcaactcgcctgcatgaagttggaatcgctagtaatcgcggatcagcatgccgcggtgaatacgttcccgggccttgtacacaccgcccgtcacatcacgaaagctggctgtactagaagtcgccacgctaacccgcaagggaggctagcgccgaaggtatggttagtgattggggtg

SEQ ID NO: 1890 - DNA, 1411 bp, Lyngbya aestuarii
  misc_feature (205)..(205): n is a, c, g, or t
  misc_feature (1397)..(1397): n is a, c, g, or t
gatgaacgctggcggtctgcttaacacatgcaagtcgaacggactcttcggagttagtggcggacgggtgagtaacgcgtgagaatctgcctctagaacggggacaacagagggaaacttctgctaatcccggatgagccgaaaggtcaaagatttatcgtctagagatgagctcgcgtctgattagctagttggtaaggtaaangcttaccaaggcgacgatcagtagctggtctgagaggatgatcagccacactgggactgagacacggcccagactcctacgggaggcagcagtggggaattttccgcaatgggcgcaagcctgacggagcaagaccgcgtgggggaggaaagcctttgggttgtaaaccccttttctcagggaagaagaaagtgacggtacctgaggaatcagcctcggctaactccgtgccagcagccgcggtaatacggaggaggcaagcgttatccggaatgattgggcgtaaagcgttcgtaggtggcaattcaagtctgctgtcaaagacagtagctcaactactgcaaggcagtggaaactgaatagctagagtgcggtaggggcagagggaattcccggtgtagcggtgaaatgcgtagagatcgggaagaacaccggtggcgaaagcgctctgctgggccgcaactgacactgagggacgaaagctaggggagcgaatgggattagataccccagtagtcctagctgtaaacgatggaaactaggtgttgcctgtatcgacccaggcagtgccgtagctaacgcgttaagtttcccgcctggggagtacgcacgcaagtgtgaaactcaaaggaattgacgggggcccgcacaagcggtggagtatgtggtttaattcgatgcaacgcgaagaaccttaccagggcttgacatgtccggaattctggggaaactcggaagtgccttcgggaaccggaacacaggtggtgcatggctgtcgtcagctcgtgtcgtgagatgttgggttaagtcccgcaacgagcgcaaccctcgtttttagttgccatcattaagttgggcactctagagagactgccggtgacaaaccggaggaaggtggggatgacgtcaagtcatcatgccccttacgtcctgggctacacacgtactacaatggtaaggacaaagggcagccacttcgcgaggaggagctaatcccgtaaaccttgcctcagttcagattgcaggctgcaactcgcctgcatgaaggaggaatcgctagtaatcgcaggtcagcatactgcggtgaatccgttcccgggccttgtacacaccgcccgtcacaccatggaagttaaccatgcccgaagtcattactctaacctttcgaggaggagggtgccgaaggcagggntgatgactggggtg

SEQ ID NO: 1891 - DNA, 1411 bp, Lyngbya majuscula
gatgaacgctggcggtatgcttaacacatgcaagtcgaacgccccttcgggggagtggcggacgggtgagtaacgcgtgagaatctgccttcgggtcggggacaaccaccggaaacagtggctaataccggatatgcctattggtgaaagatttattgccagaagaggagctcgcgtctgattagctagttggtagggtaaaggcctaccaaggcaacgatcagtagctggtctgagaggatgagcagccacactgggactgagacacggcccagactcctacgggaggcagcagtggggaattttccgcaatgggcgaaagcctgacggagcaataccgcgtgagggaggaaggcttttgggttgtaaacctcttttatcagggaagaagaaagtgacggtacctgaggaaaaagcatcggctaactccgtgccagcagccgcggtaatacggaggatgcaagcgttatccggaattattgggcgtaaagggtccgtaggtggtacctcaagtcggctgttaaagaccagggcttaactctgggcaggcagtggaaactgaggaactagagggcagtaggggtagagggaattcccggtgtagcggtgaaatgcgtagatttcgggaagaacatcggtggcgaaggcgctctactggactgcacctgacactgagggacgaaagctaggggagcgaatgggattagataccccagtagtcctagctgtaaacgatggatactaggtgtagcttgtatcgacccaagctgtgccgaagccaacgcgttaagtatcccgcctggggagtacgcacgcaagtgtgaaactcaaaggaattgacgggggcccgcacaagcggtggagtatgtggtttaattcgatgcaacgcgaagaaccttaccagggcttgacatgtcgcgaatcccggtgaaagctgggagtgccttagggagcgcgaacacaggtggtgcatggctgtcgtcagctcgtgtcgtgagatgttgggttaagtcccgcaacgagcgcaaccctcgtttttagttgccagcacttcaggtgggcactctagagagactgccggtgacaaaccggaggaaggtggggatgacgtcaagtcagcatgccccttacgtcctgggctacacacgtactacaatggtgaggacaatgggcagccaacccgcaagggggagctaatctcatcaaacctggcctcagttcagattgccggctgcaactcgccggcatgaaggaggaatcgctagtaatcgccggtcagaatacggcggtgaatccgttcccgggccttgtacacaccgcccgtcacaccatggaagctggccacgcccgaagtcgttaccctaaccctttagggagggggatgccgaaggcagggttggtgactggggtg

SEQ ID NO: 1892 - DNA, 1476 bp, Lysinibacillus chungkukjangi
gacgaacgctggcggcgtgcctaatacatgcaagtcgagcggactttagaaaagcttgcttttctaaagttagcggcggacgggtgagtaacacgtgggcaacctgccctatagttggggataactccgggaaaccggggctaataccgaataatacattccttctcctgttggaatgttgaaagatggtttacgctatcgctataggatgggcccgcggcgcattagctagttggtgaggtaacggctcaccaaggcgacgatgcgtagccgacctgagagggtgatcggccacactgggactgagacacggcccagactcctacgggaggcagcagtagggaatcttccacaatgggcgaaagcctgatggagcaacgccgcgtgagtgaagaaggttttcggatcgtaaaactctgttgtaagggaagaacaagtacagtagtaactggctgtaccttgacggtaccttattagaaagccacggctaactacgtgccagcagccgcggtaatacgtaggtggcaagcgttgtccggaattattgggcgtaaagcgcgcgcaggtggtcctttaagtctgatgtgaaagcccacggctcaaccgtggagggtcattggaaactgggggacttgagtgcagaagaggaaagtggaattccaagtgtagcggtgaaatgcgtagagatttggaggaacaccagtggcgaaggcgactttctggtctgtaactgacactgaggcgcgaaagcgtggggagcaaacaggattagataccctggtagtccacgccgtaaacgatgagtgctaagtgttagggggtttccgccccttagtgctgcagctaacgcattaagcactccgcctggggagtacggtcgcaagactgaaactcaaaggaattgacgggggcccgcacaagcggtggagcatgtggtttaattcgaagcaacgcgaagaaccttaccaggtcttgacatcccattgaccgctatggagacatagctttcccttcggggacagtggtgacaggtggtgcatggttgtcgtcagctcgtgtcgtgagatgttgggttaagtcccgcaacgagcgcaacccttgttcttagttgccatcatttagttgggcactctaaggagactgccggtgacaaaccggaggaaggtggggatgacgtcaaatcatcatgccccttatgacctgggctacacacgtgctacaatggacggtacaaacggttgccaacccgcgagggggagctaatccgataaaaccgttctcagttcggattgtaggctgcaactcgcctacatgaagccggaatcgctagtaatcgcggatcagcatgccgcggtgaatacgttcccgggccttgtacacaccgcccgtcacaccacgagagtttgtaacacccgaagccggtggggtaacccttttgggagccagccgtcgaaggtgggacagatgattggggtg

SEQ ID NO: 1893 - DNA, 1449 bp, Lysinibacillus composti
gacgaacgctgcggcgtgcctaatacatgcaagtcgagcgaacttgcgggagcttgctcccaaaagttagcggcggacgggtgagtaacacgtgggcaacctgccctatagtttgggataactccgggaaaccggggctaataccgaataatacatttcatctcctgttggaatgttgaaagatggtttcggctatcgctataggatgggcccgcggcgcattagctagtaggtgaggtaacggctcacctaggcgacgatgcgtagccgacctgagagggtgatcggccacactgggactgagacacggcccagactcctacgggaggcagcagtagggaatcttccacaatgggcgaaagcctgatggagcaacgccgcgtgagtgaagaaggttttcggatcgtaaaactctgttgtaagggaagaacaagtgcagtagtaactggctgcaccttgacggtaccttattagaaagccacggctaactacgtgccagcagccgcggtaatacgtaggtggcaagcgttgtccggaattattgggcgtaaagcgcgcgcaggcggtttcttaagtctgatgtgaaagcccccggcttaaccggggagggtcattggaaactgggagacttgagtgcagaagaggaaagtggaattccaagtgtagcggtgaaatgcgtagagatttggaggaacaccagtggcgaaggcgactttctggtctgtaactgacgctgaggcgcgaaagcgtggggagcaaacaggattagataccctggtagtccacgccgtaaacgatgagtgctaagtgttagggggtttccgccccttagtgctgcagctaacgcattaagcactccgcctggggagtacggtcgcaagactgaaactcaaaggaattgacgggggcccgcacaagcggtggagcatgtggtttaattcgaagcaacgcgaagaaccttaccaggtcttgacatcccactgaccgctatggagacatagttttcccttcggggacagtggtgacaggtggtgcatggttgtcgtcagctcgtgtcgtgagatgttgggttaagtcccgcaacgagcgcaacccttgatcttagttgccatcatttagttgggcactctaaggtgactgccggtgacaaaccggaggaaggtggggatgacgtcaaatcatcatgccccttatgacctgggctacacacgtgctacaatggacggtacaaacggttgccaacccgcgagggggagctaatccgataaaaccgttctcagttcggattgtaggctgcaactcgcctacatgaagccggaatcgctagtaatcgcggatcagcatgccgcggtgaatacgttcccgggccttgtacacaccgcccgtcacaccacgagagtttgtaacacccgaagtcggtgaggtaaccttttggggccagccgccgaa

SEQ ID NO: 1894 - DNA, 1430 bp, Lysinibacillus halotolerans
tctataatgcagtcgagcgaacagataaggagcttgctcctttgacgttagcggcggacgggtgagtaacacgtgggcaacctgccctatagttggggataactccgggaaaccggggctaataccgaataatacattttatctcctgatgagatgttgaaagatggcatctagctatcgctataggatgggcccgcggcgcattagctagttggtgaggtaacggctcaccaaggcgacgatgcgtagccgacctgagagggtgatcggccacactgggactgagacacggcccagactcctacgggaggcagcagtagggaatcttccacaatgggcgaaagcctgatggagcaacgccgcgtgagtgaagaaggttttcggatcgtaaaactctgttgtaagggaagaacaagtacagtagtaactggctgtaccttgacggtaccttattagaaagccacggctaactacgtgccagcagccgcggtaatacgtaggtggcaagcgttgtccggaattattgggcgtaaagcgcgcgcaggcggtcctttaagtctgatgtgaaagcccacggctcaaccgtggagggtcattggaaactggaggacttgagtgcagaagaggaaagtggaattccaagtgtagcggtgaaatgcgtagagatttggaggaacaccagtggcgaaggcgactttctggtctgtaactgacgctgaggcgcgaaagcgtggggagcaaacaggattagataccctggtagtccacgccgtaaacgatgagtgctaagtgttagggggtttccgccccttagtgctgcagctaacgcattaagcactccgcctggggagtacggtcgcaagactgaaactcaaaggaattgacgggggcccgcacaagcggtggagcatgtggtttaattcgaagcaacgcgaagaaccttaccaggtcttgacatcccattgaccgctatggagacatagttttcccttcggggacagtggtgacaggtggtgcatggttgtcgtcagctcgtgtcgtgagatgttgggttaagtcccgcaacgagcgcaacccttgttcttagttgccatcatttagttgggcactctaaggagactgccggtgacaaaccggaggaaggtggggatgacgtcaaatcatcatgccccttatgacctgggctacacacgtgctacaatggacggtacaaacggttgccaacccgcgagggggagctaatccgataaaaccgttctcagttcggattgtaggctgcaactcgcctacatgaagccggaatcgctagtaatcgcggatcagcatgccgcggtgaatacgttcccgggccttgtacacaccgcccgtcacaccacgagagtttgtaacacccgaagtcggtgaggtaacctttggagccagccgccgaa

SEQ ID NO: 1895 - DNA, 1478 bp, Lysinibacillus odysseyi
gacgaacgctggcggcgtgcctaatacatgcaagtcgagcggacgttttgttggtgcttgcaccgacttaacgttagcggcggacgggtgagtaacacgtgggcaacctgccctgtagtctgggataactccgggaaaccggggctaataccggatgatactttttgattcatgtcagaaagttgaaagatggtttacgctatcgctacaggatgggcccgcggcgcattagctagttggtgaggtaacggctcaccaaggcaacgatgcgtagccgacctgagagggtgatcggccacactgggactgagacacggcccagactcctacgggaggcagcagtagggaatcttccacaatggacgaaagtctgatggagcaacgccgcgtgagtgaagaaggatttcggttcgtaaaactctgttgtaagggaagaacaagtacagtagtaactggctgtaccttgacggtaccttattagaaagccacggctaactacgtgccagcagccgcggtaatacgtaggtggcaagcgttgtccggaattattgggcgtaaagcgcgcgcaggcggtcctttaagtctgatgtgaaagcccacggctcaaccgtggagggtcattggaaactgggggacttgagtgcagaagaggaaagtggaattccaagtgtagcggtgaaatgcgtagagatttggaggaacaccagtggcgaaggcgactttctggtctgtaactgacgctgaggcgcgaaagcgtggggagcaaacaggattagataccctggtagtccacgccgtaaacgatgagtgctaagtgttagggggtttccgccccttagtgctgcagctaacgcattaagcactccgcctggggagtacggtcgcaagactgaaactcaaaggaattgacgggggcccgcacaagcggtggagcatgtggtttaattcgaagcaacgcgaagaaccttaccaggtcttgacatcccattgaccactgtagagatacagttttcccttcggggacaacggtgacaggtggtgcatggttgtcgtcagctcgcgtcgtgagatgttgggttaagtcccgcaacgagcgcaacccttgttcttagttgccatcatttagttgggcactctaaggagactgccggtgacaaaccggaggaaggtggggatgacgtcaaatcatcatgccccttatgacctgggctacacacgtgctacaatggacggtacaaacggttgccaacccgcgagggggagctaatccgataaaaccgttctcagttcggattgtaggctgcaactcgcctacatgaagccggaatcgctagtaatcgcggatcagcatgccgcggtgaatacgttcccgggccttgtacacaccgcccgtcacaccacgagagtttgtaacacccgaagtcggtggggtaaccttttggagccagccgccgaaggtgggatagatgattggggtg

SEQ ID NO: 1896 - DNA, 1467 bp, Lysobacter aestuarii
agtgaacgctggcggcaggcctaacacatgcaagtcgaacggcagcacaggagagcttgctctctgggtggcgagtggcggacgggtgaggatagcgtcggaatctgcctttttgtgggggataacgtagggaaacttacgctaataccgcatacgacctacgggtgaaagtgggggaccttcgggcctcacgcagaaagatgagccgacgtcggattagctagttggtggggtaaaggcccaccaaggcgacgatccgtagctggtctgagaggatgatcagccacactgggactgagacacggcccagactcctacgggaggcagcagtggggaatattggacaatgggcgcaagcctgatccagccatgccgcgtgtgtgaagaaggccttcgggttgtaaagcacttttgtacgggaagaaaagcgccggcttaatacgttggcgtcatgacggtaccgtaagaataagcaccggctaacttcgtgccagcagccgcggtaatacgaagggtgcaagcgttactcggaattactgggcgtaaagcgtgcgtaggtggtttgttaagtctgatgtgaaagccctgggctcaacctgggaactgcattggatactggctaactagagtgcggtagagggtagcggaattcccggtgtagcagtgaaatgcgtagatatcgggaggaacatccgtggcgaaggcggctacctggaccagcactgacactgaggcacgaaagcgtggggagcaaacaggattagataccctggtagtccacgccctaaacgatgcgaactggatgttgggtgcacttaggcactcagtatcgaagctaacgcgttaagttcgccgcctgggaagtacggtcgcaagactgaaactcaaaggaattgacgggggcccgcacaagcggtggagtatgtggtttaattcgatgcagcgcgcagaaccttacctggccttgacatccacggaactttccagagatggattggtgccttcgggaaccgtgagacaggtgctgcatggctgtcgtcagctcgtgtcgtgagatgttgggttaagtcccgcaacgagcgcaacccttgtccttagttgccagcacgtaatggtgggaactctaaggagaccgccggcgacaagccggaggaaggtggggatgacgtcaagtcatcatggcccttacggccagggctacacacgtactacaatggtagggacagagggctgcaaaccggcgacggtgagccaatcccagaaaccctatcccagtccggattggagtctgcaactcgactccatgaagtcggaatcgctagtaatcgcagatcagcattgctgcggtgaatacgttcccgggccttgtacacaccgcccgtcacaccatgggagtgggttgctccagaagtagctagtctaaccttcggggggacggttaccacggagtgattcatgactggggtg

SEQ ID NO: 1897 - DNA, 1467 bp, Lysobacter antibioticus
agtgaacgctggcggcaggcctaacacatgcaagtcgaacggcagcacagaggagcttgctccttgggtggcgagtggcggacgggtgaggaatacgtcggaatctgcctatttgtgggggataacgtagggaaacttacgctaataccgcatacgacctacgggtgaaagcggaggaccttcgggcttcgcgcagatagatgagccgacgtcggattagctagttggcggggtaaaggcccaccaaggcgacgatccgtagctggtctgagaggatgatcagccacactggaactgagacacggtccagactcctacgggaggcagcagtggggaatattggacaatgggcgcaagcctgatccagccatgccgcgtgtgtgaagaaggccttcgggttgtaaagcacttttgtccggaaagaaaagcttcgggttaataccccgaggtcatgacggtaccggaagaataagcaccggctaacttcgtgccagcagccgcggtaatacgaagggtgcaagcgttactcggaattactgggcgtaaagcgtgcgtaggtggtttgttaagtctgatgtgaaagccctgggctcaacctgggaatggcattggaaactggcttactagagtgcggtagagggtagtggaattcccggtgtagcagtgaaatgcgtagatatcgggaggaacatctgtggcgaaggcgactacctggaccagcactgacactgaggcacgaaagcgtggggagcaaacaggattagataccctggtagtccacgccctaaacgatgcgaactggatgttgggagcaacttggctctcagtatcgaagctaacgcgttaagttcgccgcctgggaagtacggtcgcaagactgaaactcaaaggaattgacgggggcccgcacaagcggtggagtatgtggtttaattcgatgcaacgcgaagaaccttacctggtcttgacatccacggaactttccagagatggattggtgccttcgggaaccgtgagacaggtgctgcatggctgtcgtcagctcgtgtcgtgagatgttgggttaagtcccgcaacgagcgcaacccttgtccttagttgccagcacgtaatggtgggaactctaaggagaccgccggtgacaaaccggaggaaggtggggatgacgtcaagtcatcatggcccttacgaccagggctacacacgtactacaatggtagggacagagggctgcaaacccgcgagggcaagccaatcccagaaaccctatctcagtccggatcggagtctgcaactcgactccgtgaagtcggaatcgctagtaatcgcagatcagcattgctgcggtgaatacgttcccgggccttgtacacaccgcccgtcacaccatgggagtttgttgcaccagaagcaggtagcttaaccttcgggagggcgcttgccacggtgtggccgatgactggggtg

SEQ ID NO: 1898 - DNA, 1467 bp, Lysobacter arseniciresistens
agtgaacgctggcggcaggcctaacacatgcaagtcgaacggcagcacgagagagcttgctctcttggtggcgagtggcggacgggtgaggaatgcgtcggaatctgcctctttgtgggggataacgtagggaaacttacgctaataccgcatacgacctacgggtgaaagccggggaccttcgggcctggcgcagagagatgagccgacgccggattagctagttggcggggtaaaggcccaccaaggcgacgatccgtagctggtctgagaggatgatcagccacactggaactgagacacggtccagactcctacgggaggcagcagtggggaatattggacaatgggcgcaagcctgatccagccatgccgcgtgtgtgaagaaggccttcgggttgtaaagcacttttgttggggaagaaaagccacgggttaataccctgtggttctgacggtacccaaagaataagcaccggctaacttcgtgccagcagccgcggtaatacgaagggtgcaagcgttactcggaattactgggcgtaaagcgtgcgtaggtggtttgttaagtctgatgtgaaagccctgggctcaacctgggaatggcattggaaactggctgactggagtgcggtagaggggtgtggaattcccggtgtagcagtgaaatgcgtagatatcgggaggaacatccgtggcgaaggcgacaccctggaccagcactgacactgaggcacgaaagcgtggggagcaaacaggattagataccctggtagtccacgccctaaacgatgcgaactggatgttggggacacttaggtcttcagtatcgaagctaacgcgttaagttcgccgcctgggaagtacggtcgcaagactgaaactcaaaggaattgacgggggcccgcacaagcggtggagtatgtggtttaattcgatgcaacgcgcagaaccttacctggccttgacatccacggaactttccagagatggattggtgccttcgggaaccgtgagacaggtgctgcatggctgtcgtcagctcgtgtcgtgagatgttgggttaagtcccgcaacgagcgcaacccttgtccttagttgccagcacgtaatggtgggaactctaaggagaccgccggtgacaaaccggaggaaggtggggatgacgtcaagtcatcatggcccttacggccagggctacacacgtactacaatggtggggacagagggctgcgaaccggcgacggtgagccaatcccagaaaccccatcccagtccggattggagtctgcaactcgactccatgaagtcggaatcgctagtaatcgcagatcagcattgctgcggtgaatacgttcccgggccttgtacacaccgcccgtcacaccatgggagtgggttgctccagaagtagctagtctaaccgcaagggggacggttaccacggagtgattcatgactggggtg

SEQ ID NO: 1899 - DNA, 1466 bp, Lysobacter capsici
agtgaacgctggcggcaggcctaacacatgcaagtcgaacggcagcacagaggagcttgctccttgggtggcgagtggcggacgggtgaggaatacgtcggaatctgcctatttgtgggggataacgtagggaaacttacgctaataccgcatacgacctacgggtgaaagcggaggaccttcgggcttcgcgcagatagatgagccgacgtcggattagctagttggcggggtaaaggcccaccaaggcgacgatccgtagctggtctgagaggatgatcagccacactggaactgagacacggtccagactcctacgggaggcagcagtggggaatattggacaatgggcgcaagcctgatccagccatgccgcgtgtgtgaagaaggccttcgggttgtaaagcacttttgtccggaaagaaaagccttgggttaataccctgaggtcatgacggtaccggaagaataagcaccggctaacttcgtgccagcagccgcggtaatacgaagggtgcaagcgttactcggaattactgggcgtaaagcgtgcgtaggtggtttgttaagtctgatgtgaaagccctgggctcaacctgggaatggcattggaaactggctgactagagtgcggtagagggtagtggaattcccggtgtagcagtgaaatgcgtagatatcgggaggaacatctgtggcgaaggcgactacctggaccagcactgacactgaggcacgaaagcgtggggagcaaacaggattagataccctggtagtccacgccctaaacgatgcgaactggatgttgggagcaacttggctctcagtatcgaagctaacgcgttaagttcgccgcctgggaagtacggtcgcaagactgaaactcaaaggaattgacgggggcccgcacaagcggtggagtatgtggtttaattcgatgcaacgcgaagaaccttacctggccttgacatccacggaactttctagagatagattggtgccttcgggaaccgtgagacaggtgctgcatggctgtcgtcagctcgtgtcgtgagatgttgggttaagtcccgcaacgagcgcaacccttgtccttagttgccagcacgtaatggtgggaactctaaggagaccgccggtgacaaaccggaggaaggtggggatgacgtcaagtcatcatggcccttacggccagggctacacacgtactacaatggtagggacagagggctgcaaacccgcgagggcaagccaatcccagaaaccctatctcagtccggatcggagtctgcaactcgactccgtgaagtcggaatcgctagtaatcgcagatcagcattgctgcggtgaatacgttcccgggccttgtacacaccgcccgtcacaccatgggagtttgttgcaccagaagcaggtagcttaaccttcgggagggcgcttgccacggtgtggccgatgactggggt

SEQ ID NO: 1900 - DNA, 1467 bp, Lysobacter concretionis
agtgaacgctggcggcaggcctaacacatgcaagtcgaacggcagcacaggagagcttgctctctgggtggcgagtggcggacgggtgaggaatacgtcggaatctgcctttttgtgggggataacgtagggaaacttacgctaataccgcatacgacctacgggtgaaagcggaggaccttcgggcttcgcgcagaaagatgagccgacgtcggattagctagttggaggggtaatggcccaccaaggcgacgatccgtagctggtctgagaggatgatcagccacactgggactgagacacggcccagactcctacgggaggcagcagtggggaatattggacaatgggcggaagcctgatccagccatgccgcgtgtgtgaagaaggccttcgggttgtaaagcacttttgtacgggaagaaaagccattggttaatacccgatggttctgacggtaccgtaagaataagcaccggctaacttcgtgccagcagccgcggtaatacgaagggtgcaagcgttactcggaattactgggcgtaaagcgtgcgtaggtggtttgttaagtctgatgtgaaagccctgggctcaacctgggaatggcattggatactggcagtctagagtgcggtagagggtagcggaattcccggtgtagcagtgaaatgcgtagatatcgggaggaacatccgtggcgaaggcggctacctggaccagcactgacactgaggcacgaaagcgtggggagcaaacaggattagataccctggtagtccacgccctaaacgatgcgaactggatgttggggacacttaggtcttcagtatcgaagctaacgcgttaagttcgccgcctgggaagtacggtcgcaagactgaaactcaaaggaattgacgggggcccgcacaagcggtggagtatgtggtttaattcgatgcaacgcgaagaaccttacctggccttgacatgcacggaactttccagagatggattggtgccttcgggaaccgtgacacaggtgctgcatggctgtcgtcagctcgtgtcgtgagatgttgggttaagtcccgcaacgagcgcaacccttgtccttagttgccagcacgtaatggtgggaactctaaggagaccgccggtgacaaaccggaggaaggtggggatgacgtcaagtcatcatggcccttacggccagggctacacacgtactacaatggtggggacagagggctgcaaacccgcgagggcaagccaatcccagaaaccccatctcagtccggattggagtctgcaactcgactccatgaagtcggaatcgctagtaatcgcagatcagcattgctgcggtgaatacgttcccgggccttgtacacaccgcccgtcacaccatgggagtgggttgctccagaagtagctagtctaaccgcaaggaggacggttaccacggagtgattcatgactggggtg

SEQ ID NO: 1901 - DNA, 1464 bp, Lysobacter daejeonensis
gaacgctggcggcaggcctaacacatgcaagtcgaacggcagcacagaggagcttgctccttgggtggcgagtggcggacgggtgaggaatgcgtcggaatctgcctttttgtgggggataacgtagggaaacttacgctaataccgcatacgacctacgggtgaaagtgggggaccgcaaggcctcacgcagaaagatgagccgacgccggattagctagttggcggggtaaaggcccaccaaggcgacgatccgtagctggtctgagaggatgatcagccacactgggactgagacacggcccagactcctacgggaggcagcagtggggaatattggacaatgggcgcaagcctgatccagccatgccgcgtgtgtgaagaaggccttcgggttgtaaagcacttttgtccggaaagaaaagcttcgggttaataacctggagtcatgacggtaccggaagaataagcaccggctaacttcgtgccagcagccgcggtaatacgaagggtgcaagcgttactcggaattactgggcgtaaagcgtgcgtaggtggtttgttaagtctgatgtgaaagccctgggctcaacctgggaacggcattggatactggcttactagagtgcggtagagggtagcggaattcccggtgtagcagtgaaatgcgtagatatcgggaggaacatccgtggcgaaggcggctacctggaccagcactgacactgaggcacgaaagcgtggggagcaaacaggattagataccctggtagtccacgccctaaacgatgcgaactggatgttgggtgcaacttggcactcagtatcgaagctaacgcgttaagttcgccgcctggggagtacggtcgcaagactgaaactcaaaggaattgacgggggcccgcacaagcggtggagtatgtggtttaattcgatgcaacgcgaagaaccttacctggccttgacatgcacggaactttccagagatggattggtgccttcgggaaccgtgacacaggtgctgcatggctgtcgtcagctcgtgtcgtgagatgttgggttaagtcccgcaacgagcgcaacccttgtccttagttgccagcacgtaatggtgggaactctaaggagaccgccggtgacaaaccggaggaaggtggggatgacgtcaagtcatcatggcccttacggccagggctacacacgtactacaatggtggggacagagggctgcaagccggcgacggtgagccaatcccagaaaccccatctcagtccggattggagtctgcaactcgactccatgaagtcggaatcgctagtaatcgcagatcagcattgctgcggtgaatacgttcccgggccttgtacacaccgcccgtcacaccatgggtagtggttgctccagaagtagctagtctaaccgcaagggggacggttaccacggagtgattcatgactggggtg

SEQ ID NO: 1902 - DNA, 1455 bp, Lysobacter defluvii
cggcaggcctaacacatgcaagtcgaacggcagcacaggggagcttgctccctgggtggcgagtggcggacgggtgaggaatgcgtcggaatctgccttttcgtgggggataacgtagggaaacttacgctaataccgcatacgacctacgggtgaaagccggggaccttcgggcctggcgcggaaagatgagccgacgtcggattagctagttggaggggtaacggcccaccaaggcgacgatccgtagctggtctgagaggatgatcagccacactgggactgagacacggcccagactcctacgggaggcagcagtggggaatattggacaatgggcgaaagcctgatccagccatgccgcgtgtgtgaagaaggccttcgggttgtaaagcacttttgtacgggaagaaaagccctgggttaataccctggggtcatgacggtaccgtaagaataagcaccggctaacttcgtgccagcagccgcggtaatacgaagggtgcaagcgttactcggaattactgggcgtaaagcgtgcgtaggtggtctgtcaagtccgatgtgaaagccctgggctcaacctgggaactgcattggaaactggcagtctggagtgcggtagagggtagcggaattcccggtgtagcagtgaaatgcgtagatatcgggaggaacatccgtggcgaaggcggctacctggaccagcactgacactgaggcacgaaagcgtggggagcaaacaggattagataccctggtagtccacgccctaaacgatgcgaactggatgttgggggcactttggccttcagtatcgaagctaacgcgttaagttcgccgcctggggagtacggtcgcaagactgaaactcaaaggaattgacgggggcccgcacaagcggtggagtatgtggtttaattcgatgcaacgcgcagaaccttacctggccttgacatccacggaaccctccagagacggaggggtgccttcgggaaccgtgagacaggtgctgcatggctgtcgtcagctcgtgtcgtgagatgttgggttaagtcccgcaacgagcgcaacccttgtccctagttgccagcacgtaatggtgggaactctagggagaccgccggtgacaaaccggaggaaggtggggatgacgtcaagtcatcatggcccttacggccagggctacacacgtactacaatggtggggacagagggcagccagccggcgacggtgagccaatcccagaaaccccatcccagtccggattggagtctgcaactcgactccatgaagtcggaatcgctagtaatcgcagatcagcattgctgcggtgaatacgttcccgggccttgtacacaccgcccgtcacaccatgggagtgggttgctccagaagtagctagtctaaccctcgggaggacggttaccacggagtgattcatgactggggtg

SEQ ID NO: 1903 - DNA, 1467 bp, Lysobacter dokdonensis
agtgaacgctggcggcaggcctaacacatgcaagtcgaacggcagcgcagcagtagcaatactgtgggcggcgagtggcggacgggtgaggaatacatgggaatctgccctgtcgtgggggataacgtagggaaacttacgctaataccgcatacgaccggaaggtgaaagcggcggaccgcaaggcgtcgcgcgactggatgagcccatgtcggattagctagttggcggggtaaaggcccaccaaggcgacgatccgtagctggtctgagaggatgatcagccacactggaactgagacacggtccagactcctacgggaggcagcagtggggaatattggacaatgggcgcaagcctgatccagccatgccgcgtgagtgaagaaggccttcgggttgtaaagctcttttgtccggaaagaaaagccttcggttaatacccgggggtgatgacggtaccggaagaataagcaccggctaacttcgtgccagcagccgcggtaatacgaagggtgcaagcgttactcggaattactgggcgtaaagcgtgcgtaggtggttcgttaagtctgatgtgaaagccctgggctcaacctgggaatggcattggaaactggcgacctagagtgcggtagagggtagtggaattcccggtgtagcagtgaaatgcgtagagatcgggaggaacatccgtggcgaaggcgactacctggaccagcactgacactgaggcacgaaagcgtggggagcaaacaggattagataccctggtagtccacgccctaaacgatgcgaactggatgttgggtgcaactaggcactcagtatcgaagctaacgcgttaagttcgccgcctggggagtacggtcgcaagactgaaactcaaaggaattgacgggggcccgcacaagcggtggagtatgtggtttaattcgatgcaacgcgaagaaccttacctggccttgacatccacggaactttccagagatggattggtgccttcgggaaccgtgagacaggtgctgcatggctgtcgtcagctcgtgtcgtgagatgttgggttaagtcccgcaacgagcgcaacccttgtccctagttgccagcacgtaatggtgggaactctagggagaccgccggtgacaaaccggaggaaggtggggatgacgtcaagtcatcatggcccttacggccagggctacacacgtactacaatggtggggacagagggctgcaatcccgcgagggtgagccaatcccagaaaccccatctcagtccggattggagtctgcaactcgactccatgaagtcggaatcgctagtaatcgcagatcagcattgctgcggtgaatacgttcccgggccttgtacacaccgcccgtcacaccatgggagtttgttgcaccagaagcaggtagcttaaccttcgggagggcgcttgccacggtgtggccgatgactggggtg

SEQ ID NO: 1904 - DNA, 1467 bp, Lysobacter enzymogenes
agtgaacgctggcggcaggcctaacacatgcaagtcgaacggcagcacagaggagcttgctccttgggtggcgagtggcggacgggtgaggaatacgtcggaatctgcctatttgtgggggataacgtagggaaacttacgctaataccgcatacgacctacgggtgaaagtgggggaccgcaaggcctcacgcagatagatgagccgacgtcggattagctagttggcggggtaaaggcccaccaaggcgacgatccgtagctggtctgagaggatgatcagccacactggaactgagacacggtccagactcctacgggaggcagcagtggggaatattggacaatgggcgcaagcctgatccagccatgccgcgtgtgtgaagaaggccttcgggttgtaaagcacttttgtccggaaagaaaagcttagggttaataaccctgagtcatgacggtaccggaagaataagcaccggctaacttcgtgccagcagccgcggtaatacgaagggtgcaagcgttactcggaattactgggcgtaaagcgtgcgtaggtggtttgttaagtctgatgtgaaagccctgggctcaacctgggaatggcattggaaactggcttactagagtgcggtagagggtagcggaattcccggtgtagcagtgaaatgcgtagatatcgggaggaacatccgtggcgaaggcggctacctggaccagcactgacactgaggcacgaaagcgtggggagcaaacaggattagataccctggtagtccacgccctaaacgatgcgaactggatgttgggggcaacttggccctcagtatcgaagctaacgcgttaagttcgccgcctgggaagtacggtcgcaagactgaaactcaaaggaattgacgggggcccgcacaagcggtggagtatgtggtttaattcgatgcaacgcgcagaaccttacctggccttgacatgtcgagaactttccagagatggattggtgccttcgggaactcgaacacaggtgctgcatggctgtcgtcagctcgtgtcgtgagatgttgggttaagtcccgcaacgagcgcaacccttgtccttagttgccagcacgtaatggtgggaactctaaggagaccgccggtgacaaaccggaggaaggtggggatgacgtcaagtcatcatggcccttacggccagggctacacacgtactacaatggtagggacagagggctgcaaacccgcgagggcaagccaatcccagaaaccctatctcagtccggattggagtctgcaactcgactccatgaagtcggaatcgctagtaatcgcagatcagcattgctgcggtgaatacgttcccgggccttgtacacaccgcccgtcacaccatgggagtttgttgcaccagaagcaggtagcttaaccttcgggagggcgcttgccacggtgtggccgatgactggggtg

SEQ ID NO: 1905 - DNA, 1467 bp, Lysobacter gummosus
agtgaacgctggcggcaggcctaacacatgcaagtcgaacggcagcacagaggagcttgctccttgggtggcgagtggcggacgggtgaggaatacgtcggaatctgcctatttgtgggggataacgtagggaaacttacgctaataccgcatacgacctacgggtgaaagcggaggaccttcgggcttcgcgcagatagatgagccgacgtcggattagctagttggcggggtaaaggcccaccaaggcgacgatccgtagctggtctgagaggatgatcagccacactggaactgagacacggtccagactcctacgggaggcagcagtggggaatattggacaatgggcgcaagcctgatccagccatgccgcgtgtgtgaagaaggccttcgggttgtaaagcacttttgtccggaaagaaaagcattgggttaataccccgatgtcatgacggtaccggaagaataagcaccggctaacttcgtgccagcagccgcggtaatacgaagggtgcaagcgttactcggaattactgggcgtaaagcgtgcgtaggtggtttgttaagtctgatgtgaaagccctgggctcaacctgggaatggcattggaaactggcttactagagtgcggtagagggtagtggaattcccggtgtagcagtgaaatgcgtagatatcgggaggaacatctgtggcgaaggcgactacctggaccagcactgacactgaggcacgaaagcgtggggagcaaacaggattagataccctggtagtccacgccctaaacgatgcgaactggatgttgggagcaacttggctctcagtatcgaagctaacgcgttaagttcgccgcctgggaagtacggtcgcaagactgaaactcaaaggaattgacgggggcccgcacaagcggtggagtatgtggtttaattcgatgcaacgcgaagaaccttacctggccttgacatccacggaactttccagagatggattggtgccttcgggaaccgtgagacaggtgctgcatggctgtcgtcagctcgtgtcgtgagatgttgggttaagtcccgcaacgagcgcaacccttgtccttagttgccagcacgtaatggtgggaactctaaggagaccgccggtgacaaaccggaggaaggtggggatgacgtcaagtcatcatggcccttacggccagggctacacacgtactacaatggtagggacagagggctgcaaacccgcgagggcaagccaatcccagaaaccctatctcagtccggatcggagtctgcaactcgactccgtgaagtcggaatcgctagtaatcgcagatcagcattgctgcggtgaatacgttcccgggccttgtacacaccgcccgtcacaccatgggagtttgttgcaccagaagcaggtagcttaaccttcgggagggcgcttgccacggtgtggccgatgactggggtg

SEQ ID NO: 1906 - DNA, 1467 bp, Lysobacter lycopersici
agtgaacgctggcggcaggcctaacacatgcaagtcgaacggcagcacaggggagcttgctccctgggtggcgagtggcggacgggtgaggaatacatcggaatctgccctgtcgtgggggataacgtagggaaacttacgctaataccgcatacgaccttcgggtgaaagagggggatcgcaagacctctcgcgattggatgagccgatgtcggattagctagttggcggggtaaaggcccaccaaggcgacgatccgtagctggtctgagaggatgatcagccacactggaactgagacacggtccagactcctacgggaggcagcagtggggaatattggacaatgggcgcaagcctgatccagccatgccgcgtgagtgaagaaggccttcgggttgtaaagctcttttgtccggaaagaaaagcattcggttaataaccgggtgtcatgacggtaccggaagaataagcaccggctaacttcgtgccagcagccgcggtaatacgaagggtgcaagcgttactcggaattactgggcgtaaagcgtgcgtaggtggttcgttaagtctgatgtgaaagccctgggctcaacctgggaatggcattggatactggcgaactggagtgcggtagaggatggcggaattcccggtgtagcagtgaaatgcgtagagatcgggaggaacatctgtggcgaaggcggccatctggaccagcactgacactgaggcacgaaagcgtggggagcaaacaggattagataccctggtagtccacgccctaaacgatgcgaactggatgttgggagcaactaggctctcagtatcgaagctaacgcgttaagttcgccgcctggggagtacggtcgcaagactgaaactcaaaggaattgacgggggcccgcacaagcggtggagtatgtggtttaattcgatgcaacgcgaagaaccttacctggtcttgacatccacggaactttccagagatggattggtgccttcgggaaccgtgagacaggtgctgcatggctgtcgtcagctcgtgtcgtgagatgttgggttaagtcccgcaacgagcgcaacccttgtccttagttgccagcacgtaatggtgggaactctaaggagaccgccggtgacaaaccggaggaaggtggggatgacgtcaagtcatcatggcccttacgaccagggctacacacgtactacaatggaagggacagagggccgcgatgccgcgaggcggagccaatcccagaaaccctttctcagtccggattggagtctgcaactcgactccatgaagtcggaatcgctagtaatcgcagatcagcattgctgcggtgaatacgttcccgggccttgtacacaccgcccgtcacaccatgggagtttgttgcaccagaagcaggtagcttaaccgcaaggagggcgcttgccacggtgtggccgatgactggggtg

SEQ ID NO: 1907 - DNA, 1400 bp, Lysobacter maris
tgcaagtcgaacggcagcacgagagagcttgctctcttggtggcgagtggcggacgggtgaggaatgcgtcggaatctgcctatttgtgggggataacgtagggaaacttacgctaataccgcatacgacctacgggtgaaagtgggggatcttcggacctcacgcagatagatgagccgacgtcggattagctagttggcggggtaaaggcccaccaaggcgacgatccgtagctggtctgagaggatgatcagccacactgggactgagacacggcccagactcctacgggaggcagcagtggggaatattggacaatgggcgcaagcctgatccagccatgccgcgtgtgtgaagaaggccttcgggttgtaaagcacttttgtacgggaagaaacgcgatcggttaatacccggtcgaactgacggtaccgtaagaataagcaccggctaacttcgtgccagcagccgcggtaatacgaagggtgcaagcgttactcggaattactgggcgtaaagcgtgcgtaggtggtttgttaagtcagatgtgaaagccctgggctcaacctgggaactgcatttgatactggcaggctagagtgcggtagagggtagcggaattcccggtgtagcagtgaaatgcgtagatatcgggaggaacatccgtggcgaaggcggctacctggaccagcactgacactgaggcacgaaagcgtggggagcaaacaggattagataccctggtagtccacgccctaaacgatgcgaactggatgttggggacacttaggtcttcagtatcgaagctaacgcgttaagttcgccgcctgggaagtacggtcgcaagactgaaactcaaaggaattgacgggggcccgcacaagcggtggagtatgtggtttaattcgatgcaacgcgcagaaccttacctggccttgacatccacggaactttccagagatggattggtgccttcgggaaccgtgagacaggtgctgcatggctgtcgtcagctcgtgtcgtgagatgttgggttaagtcccgcaacgagcgcaacccttgtccttagttgccagcacgtaatggtgggaactctaaggagaccgccggcgacaagccggaggaaggtggggatgacgtcaagtcatcatggcccttacggccagggctacacacgtactacaatggtggggacagagggctgcaagccggcgacggtgagccaatcccagaaaccccatctcagtccggattggagtctgcaactcgactccatgaagtcggaatcgctagtaatcgcagatcagcattgctgcggtgaatacgttcccgggccttgtacacaccgcccgtcacaccatgggagtgggttgctccagaagtagctagtctaaccttc

SEQ ID NO: 1908 - DNA, 1467 bp, Lysobacter ruishenii
agtgaacgctggcggcaggcctaacacatgcaagtcgaacggcagcacagtagagcttgctctatgggtggcgagtggcggacgggtgaggatagcgtcggaatctgcctatttgtgggggataacctcgggaaaccgggactaataccgcatacgacctacgggtgaaagtgggggaccttcgggcctcacgcagatagatgagccgacgtcggattagctagttggcggggtaaaggcccaccaaggcgacgatccgtagctggtctgagaggatgatcagccacactgggactgagacacggcccagactcctacgggaggcagcagtggggaatattggacaatgggcgcaagcctgatccagccatgccgcgtgtgtgaagaaggccttcgggttgtaaagcacttttgtccggaaagaaatccagtcgattaatactcggttgggatgacggtaccggaagaataagcaccggctaacttcgtgccagcagccgcggtaatacgaagggtgcaagcgttactcggaattactgggcgtaaagcgtgcgtaggtggtttgttaagtctgatgtgaaagccctgggctcaacctgggaactgcattggatactggcttactagagtgcggtagagggtagtggaattcccggtgtagcagtgaaatgcgtagatatcgggaggaacatctgtggcgaaggcgactacctggaccagcactgacactgaggcacgaaagcgtggggagcaaacaggattagataccctggtagtccacgccctaaacgatgcgaactggatgttgggtgcaacttggcactcagtatcgaagctaacgcgttaagttcgccgcctggggagtacggtcgcaagactgaaactcaaaggaattgacgggggcccgcacaagcggtggagtatgtggtttaattcgatgcaacgcgaagaaccttacctggccttgacatgcacggaactttccagagatggattggtgccttcgggaaccgtgacacaggtgctgcatggctgtcgtcagctcgtgtcgtgagatgttgggttaagtcccgcaacgagcgcaacccttgtccttagttgccagcacgtaatggtgggaactctaaggagaccgccggtgacaaaccggaggaaggtggggatgacgtcaagtcatcatggcccttacggccagggctacacacgtactacaatggtggggacagagggctgcaagccggcgacggtgagccaatcccagaaaccccatctcagtccggattggagtctgcaactcgactccatgaagtcggaatcgctagtaatcgcagatcagcattgctgcggtgaatacgttcccgggccttgtacacaccgcccgtcacaccatgggagtgggttgctccagaagtagctagtctaaccgcaagggggacggttaccacggagtgattcatgactggggtg

SEQ ID NO: 1909 - DNA, 1467 bp, Lysobacter spongiicola
agtgaacgctggcggcaggcctaacacatgcaagtcgaacggcagcacaggggagcttgctccctgggtggcgagtggcggacgggtgaggaatacgtcggaatctgccttttcgtgggggataacgtagggaaacttacgctaataccgcatacgacctacgggtgaaagccggggaccttcgggcctggcgcggaaagatgagccgacgtcggattagctagttggaggggtaatggcccaccaaggcgacgatccgtagctggtctgagaggatgatcagccacactggaactgagacacggtccagactcctacgggaggcagcagtggggaatattggacaatgggcgcaagcctgatccagccatgccgcgtgtgtgaagaaggccttcgggttgtaaagcacttttgtacgggaagaaaagcttccggttaatacccgggagtcatgacggtaccgtaagaataagcaccggctaacttcgtgccagcagccgcggtaatacgaagggtgcaagcgttactcggaattactgggcgtaaagcgtgcgtaggtggtttgttaagtctgatgtgaaagccctgggctcaacctgggaattgcattggatactggcagtctagagtgcggtagagggtagcggaattcccggtgtagcagtgaaatgcgtagatatcgggaggaacatccgtggcgaaggcggctacctggaccagcactgacactgaggcacgaaagcgtggggagcaaacaggattagataccctggtagtccacgccctaaacgatgcgaactggatgttggggacacttaggtcctcagtatcgaagctaacgcgttaagttcgccgcctgggaagtacggtcgcaagactgaaactcaaaggaattgacgggggcccgcacaagcggtggagtatgtggtttaattcgatgcaacgcgaagaaccttacctggccttgacatgtccggaacccttgagagatcgaggggtgccttcgggaaccggaacacaggtgctgcatggctgtcgtcagctcgtgtcgtgagatgttgggttaagtcccgcaacgagcgcaacccttgtccttagttgccagcacgtaatggtgggaactctaaggagaccgccggtgacaaaccggaggaaggtggggatgacgtcaagtcatcatggcccttacggccagggctacacacgtactacaatggtggggacagagggctgcaaacccgcgagggcaagccaatcccagaaaccccatctcagtccggattggagtctgcaactcgactccatgaagtcggaatcgctagtaatcgcagatcagcattgctgcggtgaatacgttcccgggccttgtacacaccgcccgtcacaccatgggagtgggttgctccagaagtagctagtctaaccttcggggggacggttaccacggagtgattcatgactggggtg

SEQ ID NO: 1910 - DNA, 1419 bp, Lysobacter tolerans
ccggcagcacaggagagcttgctctcttgggtggcgagtggcggacgggtgaggaaaacgtcggaatctgcctatttgtgggggataacgtagggaaacttacgctaataccgcatacgacctacgggtgaaagcggaggaccttcgggcttcgcgcagatagatgagccgacgtcggattagctagttggcggggtaaaggcccaccaaggcgacgatccgtagctggtctgagaggatgatcagccacactggaactgagacacggtccagactcctacgggaggcagcagtggggaatattggacaatgggcgcaagcctgatccagccatgccgcgtgggtgaagaaggccttcgggttgtaaagcccttttgttgggaaagaaaagcagccggttaatacccggttgtcatgacggtacccaaagaataagcaccggctaacttcgtgccagcagccgcggtaatacgaagggtgcaagcgttactcggaattactgggcgtaaagcgtgcgtaggtggtttgttaagtcagatgtgaaagccctgggctcaacctgggaactgcatttgatactggcaggctagagtgcggtagaggatagcggaattcctggtgtagcagtgaaatgcgtagagatcaggaggaacatccgtggcgaaggcggctatctgggccagcactgacactgaggcacgaaagcgtggggagcaaacaggattagataccctggtagtccacgccctaaacgatgcgaactggatgttgggctcaacttggagctcagtatcgaagctaacgcgttaagttcgccgcctggggagtacggtcgcaagactgaaactcaaaggaattgacgggggcccgcacaagcggtggagtatgtggtttaattcgatgcaacgcgcagaaccttacctggccttgacatgcacggaactttccagagatggattggtgccttcgggaaccgtgacacaggtgctgcatggctgtcgtcagctcgtgtcgtgagatgttgggttaagtcccgcaacgagcgcaacccctgtccttagttgccagcacgtaatggtgggaactctaaggagaccgccggtgacaaaccggaggaaggtggggatgacgtcaagtcatcatggcccttacggccagggctacacacgtactacaatggtagggacagagggctgcaaacccgcgagggcaagccaatcccagaaaccctatctcagtccggattggagtctgcaactcgactccatgaagtcggaatcgctagtaatcgcagatcagcattgctgcggtgaatacgttcccgggccttgtacacaccgcccgtcacaccatgggagtttgttgcaccagaagcaggtagcttaaccttcgggagggcgcttgccacggtgtggccga

SEQ ID NO: 1911 - DNA, 1554 bp, Macrococcus bohemicus
attatggagagtttgatcctggctcaggatgaacgctggcggcgtgcctaatacatgcaagtcgagcgaattgacagaggtgcttgcacctctcgattttagcggcggacgggtgagtaacacgtgggtaacctacctataagactgggataacttcgggaaaccggagctaataccggataatatttagcttcgcatgaagcaatagtgaaagacggttctgctgtcacttatagatggacctgcggtgtattagctagttggtgaggtaacggctcaccaaggcaacgatacatagccgacctgagagggtgatcggccacactgggactgagacacggcccagactcctacgggaggcagcagtagggaatcttccgcaatggacgaaagtctgacggagcaacgccgcgtgagtgaagaaggttttcggatcgtaaaactctgttgtaagggaagaacaagtacgttagtaactgaacgtaccttgacggtaccttaccagaaagccacggctaactacgtgccagcagccgcggtaatacgtaggtggcaagcgttatccggaattattgggcgtaaagcgcgcgtaggcggtctcttaagtctgatgtgaaagcccccggctcaaccggggagggtcattggaaactgggagacttgagtacagaagaggagagtggaattccatgtgtagcggtgaaatgcgcagagatatggaggaacaccagtggcgaaggcggctctctggtctgtaactgacgctgaggtgcgaaagcgtggggatcaaacaggattagataccctggtagtccacgccgtaaacgatgagtgctaagtgttggggggtttccgcccctcagtgctgcagctaacgcattaagcactccgcctggggagtacggtcgcaagactgaaactcaaaggaattgacggggacccgcacaagcggtggagcatgtggtttaattcgaagcaacgcgaagaaccttaccaaatcttgacatcctttgacaactctagagatagagctttccccttcgggggacaaagtgacaggtggtgcatggttgtcgtcagctcgtgtcgtgagatgttgggttaagtcccgcaacgagcgcaacccttatctttagttgccatcattcagttgggcactctagagagactgccggtgacaaaccggaggaaggtggggatgacgtcaaatcatcatgccccttatgatttgggctacacacgtgctacaatggatggtacaaagggcagcaaaaccgcgaggtcaagcaaatcccataaaaccattctcagttcggattgtagtctgcaactcgactacatgaagctggaatcgctagtaatcgtagatcagcatgctacggtgaatacgttcccgggtcttgtacacaccgcccgtcacaccacgagagtttgtaacacccgaagccggtggagtaaccttttaggagctagccgtcgaaggtgggacagatgattggggtgaagtcgtaacaaggtagccgtatcggaaggtgcggctggatcacctccttt

SEQ ID NO: 1912 - DNA, 1475 bp, Macrococcus bovicus
gatgaacgctggcggcgtgcctaatacatgcaagtcgagcggacagacgaggtgcttgcacctctgaagtcagcggcggacgggtgagtaacacgtgggtaacctacctgtaagactgggataacttcgggaaaccggagctaataccggataatattttccacctcatggtggaatagtgaaagacggttttgctgtcacttacagatggacccgcggcgcattagctagttggtgaggtaacggctcaccaaggcgacgatgcgtagccgacctgagagggtgatcggccacactgggactgagacacggcccagactcctacgggaggcagcagtagggaatcttccgcaatggacgaaagtctgacggagcaacgccgcgtgagtgaagaaggtcttcggatcgtaaaactctgttgtaagggaagaacaagtacgttagtaactgaacgtaccttgacggtaccttaccagaaagccacggctaactacgtgccagcagccgcggtaatacgtaggtggcaagcgttatccggaattattgggcgtaaagcgcgcgtaggcggtttcttaagtctgatgtgaaagcccccggctcaaccggggagggtcattggaaactgggagacttgagtgcagaagaggagagtggaattccatgtgtagcggtgaaatgcgcagagatatggaggaacaccagtggcgaaggcggctctctggtctgtaactgacgctgaggtgcgaaagcgtggggatcaaacaggattagataccctggtagtccacgccgtaaacgatgagtgctaagtgttggggggtttccgcccctcagtgctgcagctaacgcattaagcactccgcctggggagtacggtcgcaagactgaaactcaaaggaattgacggggacccgcacaagcggtggagcatgtggtttaattcgaagcaacgcgaagaaccttaccaaatcttgacatcctctgacaactctggagacagagcgttccccttcgggggacagagtgacaggtggtgcatggttgtcgtcagctcgtgtcgtgagatgttgggttaagtcccgcaacgagcgcaacccttatctttagttgccatcattcagttgggcactctagagagactgccggtgacaaaccggaggaaggtggggatgacgtcaaatcatcatgccccttatgatttgggctacacacgtgctacaatggatggtacaaagggcagcaaaaccgcgaggtcaagcaaatcccataaaaccattctcagttcggattgtagtctgcaactcgactacatgaagctggaatcgctagtaatcgtagatcagcatgctacggtgaatacgttcccgggtcttgtacacaccgcccgtcacaccacgagagtttgtaacacccgaagccggtggagtaacctttacaggagctagccgtcgaaggtgggacagatgattggggtg

SEQ ID NO: 1913 - DNA, 1475 bp, Macrococcus brunensis
gatgaacgctggcggcgtgcctaatacatgcaagtcgagcggacagacgaggtgcttgcacctctgaagtcagcggcggacgggtgagtaacacgtgggtaacctacctgtaagactgggataacttcgggaaaccggagctaataccggataatattttccacctcatggtggaatagtgaaagacggtttcggctgtcacttacagatggacccgcggcgcattagctagttggtgaggtaacggctcaccaaggcgacgatgcgtagccgacctgagagggtgatcggccacactgggactgagacacggcccagactcctacgggaggcagcagtagggaatcttccgcaatggacgaaagtctgacggagcaacgccgcgtgagtgaagaaggttttcggatcgtaaaactctgttgtaagggaagaacaagtacgttagtaactgaacgtaccttgacggtaccttaccagaaagccacggctaactacgtgccagcagccgcggtaatacgtaggtggcaagcgttatccggaattattgggcgtaaagcgcgcgtaggcggtttcttaagtctgatgtgaaagcccccggctcaaccggggagggtcattggaaactgggagacttgagtgcagaagaggagagtggaattccatgtgtagcggtgaaatgcgcagagatatggaggaacaccagtggcgaaggcggctctctggtctgtaactgacgctgaggtgcgaaagcgtggggatcaaacaggattagataccctggtagtccacgccgtaaacgatgagtgctaagtgttggggggtttccgcccctcagtgctgcagctaacgcattaagcactccgcctggggagtacggtcgcaagactgaaactcaaaggaattgacggggacccgcacaagcggtggagcatgtggtttaattcgaagcaacgcgaagaaccttaccaaatcttgacatcctctgacaactctggagacagagcgttccccttcgggggacagagtgacaggtggtgcatggttgtcgtcagctcgtgtcgtgagatgttgggttaagtcccgcaacgagcgcaacccttatctttagttgccatcattcagttgggcactctagagagactgccggtgacaaaccggaggaaggtggggatgacgtcaaatcatcatgccccttatgatttgggctacacacgtgctacaatggatggtacaaagggcagcaaaaccgcgaggtcaagcaaatcccataaaaccattctcagttcggattgtagtctgcaactcgactacatgaagctggaatcgctagtaatcgtagatcagcatgctacggtgaatacgttcccgggtcttgtacacaccgcccgtcacaccacgagagtttgtaacacccgaagccggtggagtaaccttttaggagctagccgtcgaaggtgggacagatgattggggtg

SEQ ID NO: 1914 - DNA, 1476 bp, Macrococcus canis
gatgaacgctggcggcgtgcctaatacatgcaagtcgagcgaacagacgagagtgcttgcactctctgacgttagcggcggacgggtgagtaacacgtgggtaacctacctataagactgggataacttcgggaaaccggagctaataccggataatatttagcttcgcatgaagcaatagtgaaagacggttctgctgtcacttatagatggacccgcggtgtattagctagttggtgaggtaacggctcaccaaggcaacgatacatagccgacctgagagggtgatcggccacactgggactgagacacggcccagactcctacgggaggcagcagtagggaatcttccgcaatggacgaaagtctgacggagcaacgccgcgtgagtgaagaaggttttcggatcgtaaaactctgttgtaagggaagaacaagtacgttagtaactgaacgtaccttgacggtaccttaccagaaagccacggctaactacgtgccagcagccgcggtaatacgtaggtggcaagcgttatccggaattattgggcgtaaagcgcgcgtaggcggtctcttaagtctgatgtgaaagcccccggctcaaccggggagggtcattggaaactgggagacttgagtgcagaagaggagagtggaattccatgtgtagcggtgaaatgcgcagagatatggaggaacaccagtggcgaaggcggctctctggtctgtaactgacgctgaggtgcgaaagcgtggggatcaaacaggattagataccctggtagtccacgccgtaaacgatgagtgctaagtgttggggggtttccgcccctcagtgctgcagctaacgcattaagcactccgcctggggagtacggtcgcaagactgaaactcaaaggaattgacggggacccgcacaagcggtggagcatgtggtttaattcgaagcaacgcgaagaaccttaccaaatcttgacatcctttgacaactctagagatagagctttccccttcgggggacaaagtgacaggtggtgcatggttgtcgtcagctcgtgtcgtgagatgttgggttaagtcccgcaacgagcgcaacccttatctttagttgccatcattaagttgggcactctagagagactgccggtgataaaccggaggaaggtggggatgacgtcaaatcatcatgccccttatgatttgggctacacacgtgctacaatggatggtacaaagggcagcaaaaccgcgaggtcaagcaaatcccataaaaccattctcagttcggattgtagtctgcaactcgactacatgaagctggaatcgctagtaatcgtagatcagcatgctacggtgaatacgttcccgggtcttgtacacaccgcccgtcacaccacgagagtttgtaacacccgaagccggtggagtaaccttttaggagctagccgtcgaaggtgggacagatgattggggtg

SEQ ID NO: 1915 - DNA, 1476 bp, Macrococcus carouselicus
gatgaacgctggcggcgtgcctaatacatgcaagtcgagcggacagacaggagtgcttgcactccttgaagtcagcggcggacgggtgagtaacacgtgggtaacctacctataagactgggataacttcgggaaaccggagctaataccggataatattttccacctcatggtggaatagtgaaagacggttctgctgtcacttatagatggacccgcggcgcattagctagttggtgaggtaacggctcaccaaggcgacgatgcgtagccgacctgagagggtgatcggccacactgggactgagacacggcccagactcctacgggaggcagcagtagggaatcttccgcaatggacgaaagtctgacggagcaacgccgcgtgagtgaagaaggttttcggatcgtaaaactctgttgtaagggaagaacaagtacgttagtaactgaacgtaccttgacggtaccttaccagaaagccacggctaactacgtgccagcagccgcggtaatacgtaggtggcaagcgttatccggaattattgggcgtaaagcgcgcgtaggcggtttcttaagtctgatgtgaaagcccccggctcaaccggggagggtcattggaaactgggagacttgagtgcagaagaggagagtggaattccatgtgtagcggtgaaatgcgcagagatatggaggaacaccagtggcgaaggcggctctctggtctgtaactgacgctgaggtgcgaaagcgtggggatcaaacaggattagataccctggtagtccacgccgtaaacgatgagtgctaagtgttggggggtttccgcccctcagtgctgcagctaacgcattaagcactccgcctggggagtacggtcgcaagactgaaactcaaaggaattgacggggacccgcacaagcggtggagcatgtggtttaattcgaagcaacgcgaagaaccttaccaaatcttgacatcctctgacaactctggagacagagcgttccccttcgggggacagagtgacaggtggtgcatggttgtcgtcagctcgtgtcgtgagatgttgggttaagtcccgcaacgagcgcaacccttatctttagttgccatcattcagttgggcactctagagagactgccggtgacaaaccggaggaaggtggggatgacgtcaaatcatcatgccccttatgatttgggctacacacgtgctacaatggatggtacaaagggcagcaaaaccgcgaggtcaagcaaatcccataaaaccattctcagttcggattgtagtctgcaactcgactacatgaagctggaatcgctagtaatcgtagatcagcatgctacggtgaatacgttcccgggtcttgtacacaccgcccgtcacaccacgagagtttgtaacacccgaagccggtggagtaaccttttaggagctagccgtcgaaggtgggacagatgattggggtg

SEQ ID NO: 1916 - DNA, 1476 bp, Macrococcus caseolyticus
gatgaacgctggcggcgtgcctaatacatgcaagtcgagcgaacggacgagagtgcttgcactctctgatgttagcggcggacgggtgagtaacacgtgggtaacctacctataagactgggataacttcgggaaaccggagctaataccggataatatttagcttcgcatgaagcaatagtgaaagacggttctgctgtcacttatagatggacccgcggtgtattagctagttggtgaggtaacggctcaccaaggcaacgatacatagccgacctgagagggtgatcggccacactgggactgagacacggcccagactcctacgggaggcagcagtagggaatcttccgcaatggacgaaagtctgacggagcaacgccgcgtgagtgaagaaggttttcggatcgtaaaactctgttgtaagggaagaacaagtacgttagtaactgaacgtaccttgacggtaccttaccagaaagccacggctaactacgtgccagcagccgcggtaatacgtaggtggcaagcgttatccggaattattgggcgtaaagcgcgcgtaggcggtctcttaagtctgatgtgaaagcccccggctcaaccggggagggtcattggaaactgggagacttgagtgcagaagaggagagtggaattccatgtgtagcggtgaaatgcgcagagatatggaggaacaccagtggcgaaggcggctctctggtctgtaactgacgctgaggtgcgaaagcgtggggatcaaacaggattagataccctggtagtccacgccgtaaacgatgagtgctaagtgttggggggtttccgcccctcagtgctgcagctaacgcattaagcactccgcctggggagtacggtcgcaagactgaaactcaaaggaattgacggggacccgcacaagcggtggagcatgtggtttaattcgaagcaacgcgaagaaccttaccaaatcttgacatcctttgacaactctagagatagagctttccccttcgggggacaaagtgacaggtggtgcatggttgtcgtcagctcgtgtcgtgagatgttgggttaagtcccgcaacgagcgcaacccttatctttagttgccatcattaggttgggcactctagagagactgccggtgacaaaccggaggaaggtggggatgacgtcaaatcatcatgccccttatgatttgggctacacacgtgctacaatggatggtacaaagggcagcaaaaccgcgaggtcaagcaaatcccataaaaccattctcagttcggattgtagtctgcaactcgactacatgaagctggaatcgctagtaatcgtagatcagcatgctacggtgaatacgttcccgggtcttgtacacaccgcccgtcacaccacgagagtttgtaacacccgaagccggtggagtaaccttttaggagctagccgtcgaaggtgggacagatgattggggtg

SEQ ID NO: 1917 - DNA, 1554 bp, Macrococcus epidermidis
attatggagagtttgatcctggctcaggatgaacgctggcggcgtgcctaatacatgcaagtcgagcgaattgacagaggtgcttgcacctctcgattttagcggcggacgggtgagtaacacgtgggtaacctacctataagactgggataacttcgggaaaccggagctaataccggataatatttagcttcgcatgaagcaatagtgaaagacggttctgctgtcacttatagatggacctgcggtgtattagctagttggtgaggtaacggctcaccaaggcaacgatacatagccgacctgagagggtgatcggccacactgggactgagacacggcccagactcctacgggaggcagcagtagggaatcttccgcaatggacgaaagtctgacggagcaacgccgcgtgagtgaagaaggttttcggatcgtaaaactctgttgtaagggaagaacaagtacgttagtaactgaacgtaccttgacggtaccttaccagaaagccacggctaactacgtgccagcagccgcggtaatacgtaggtggcaagcgttatccggaattattgggcgtaaagcgcgcgtaggcggtctcttaagtctgatgtgaaagcccccggctcaaccggggagggtcattggaaactgggagacttgagtacagaagaggagagtggaattccatgtgtagcggtgaaatgcgcagagatatggaggaacaccagtggcgaaggcggctctctggtctgtaactgacgctgaggtgcgaaagcgtggggatcaaacaggattagataccctggtagtccacgccgtaaacgatgagtgctaagtgttggggggtttccgcccctcagtgctgcagctaacgcattaagcactccgcctggggagtacggtcgcaagactgaaactcaaaggaattgacggggacccgcacaagcggtggagcatgtggtttaattcgaagcaacgcgaagaaccttaccaaatcttgacatcctttgacaactctagagatagagctttccccttcgggggacaaagtgacaggtggtgcatggttgtcgtcagctcgtgtcgtgagatgttgggttaagtcccgcaacgagcgcaacccttatctttagttgccatcattaagttgggcactctagagagactgccggtgacaaaccggaggaaggtggggatgacgtcaaatcatcatgccccttatgatttgggctacacacgtgctacaatggatggtacaaagggcagcaaaaccgcgaggtcaagcaaatcccataaaaccattctcagttcggattgtagtctgcaactcgactacatgaagctggaatcgctagtaatcgtagatcagcatgctacggtgaatacgttcccgggtcttgtacacaccgcccgtcacaccacgagagtttgtaacacccgaagccggtggagtaaccttttaggagctagccgtcgaaggtgggacagatgattggggtgaagtcgtaacaaggtagccgtatcggaaggtgcggctggatcacctccttt

SEQ ID NO: 1918 - DNA, 1554 bp, Macrococcus goetzii; identical to SEQ ID NO: 1917

SEQ ID NO: 1919 - DNA, 1476 bp, Macrococcus hajekii
gatgaacgctggcggcgtgcctaatacatgcaagtcgagcgaacggacaggagtgcttgcactccctgatgttagcggcggacgggtgagtaacacgtgggtaacctacctataagactgggataacttcgggaaaccggagctaataccggataatatgtttcacctcatggtgaaacagtgaaagacggttctgctgtcacttatagatggacccgcggcgcattagctagttggtgaggtaacggctcaccaaggcgacgatgcgtagccgacctgagagggtgatcggccacactgggactgagacacggcccagactcctacgggaggcagcagtagggaatcttccgcaatggacgaaagtctgacggagcaacgccgcgtgagtgaagaaggttttcggatcgtaaaactctgttgtaagggaagaacaagtacgttagtaactgaacgtaccttgacggtaccttaccagaaagccacggctaactacgtgccagcagccgcggtaatacgtaggtggcaagcgttatccggaattattgggcgtaaagcgcgcgtaggcggtttcttaagtctgatgtgaaagcccccggctcaaccggggagggtcattggaaactgggagacttgagtgcagaagaggagagtggaattccatgtgtagcggtgaaatgcgcagagatatggaggaacaccagtggcgaaggcggctctctggtctgtaactgacgctgaggtgcgaaagcgtggggatcaaacaggattagataccctggtagtccacgccgtaaacgatgagtgctaagtgttggggggtttccgcccctcagtgctgcagctaacgcattaagcactccgcctggggagtacggtcgcaagactgaaactcaaaggaattgacggggacccgcacaagcggtggagcatgtggtttaattcgaagcaacgggaagaaccttaccaaatcttgacatcctctgacaactctggagacagagcgttccccttcgggggacagagtgacaggtggtgcatggttgtcgtcagctcgtgtcgtgagatgttgggttaagtcccgcaacgagcgcaacccttatctttagttgccatcattcagttgggcactctagagagactgccggtgacaaaccggaggaaggtggggatgacgtcaaatcatcatgccccttatgatttgggctacacacgtgctacaatggatggtacaaagggcagcaaaaccgcgaggtcaagcaaatcccataaaaccattctcagttcggattgtagtctgcaactcgactacatgaagctggaatcgctagtaatcgtagatcagcatgctacggtgaatacgttcccgggtcttgtacacaccgcccgtcacaccacgagagtttgtaacacccgaagccggtggagtaaccttttaggagctagccgtcgaaggtgggacagatgattggggtg

SEQ ID NO: 1920 - DNA, 1478 bp, Macrococcus lamae
gatgaacgctggcggcgtgcctaatacatgcaagtcgagcggacagacgggagtgcttgcactccttgatgtcagcggcggacgggtgagtaacacgtgggtaacctacctgtaagactgggataacttcgggaaaccggagctaataccggatgatatgttccacctcatggtgggacagtgaaagacggtttcggctgtcacttacagatggacccgcggcgcattagctagttggtgaggtaacggctcaccaaggcgacgatgcgtagccgacctgagagggtgatcggccacactgggactgagacacggcccagactcctacgggaggcagcagtagggaatcttccgcaatggacgaaagtctgacggagcaacgccgcgtgagtgaagaaggttttcggatcgtaaaactctgttgtaagggaagaacaagtacgtgagtaactgcacgtaccttgacggtaccttaccagaaagccacggctaactacgtgccagcagccgcggtaatacgtaggtggcaagcgttatccggaattattgggcgtaaagcgcgcgtaggcggtctcttaagtctgatgtgaaagcccccggctcaaccggggagggtcattggaaactgggagacttgagtgcagaagaggagagtggaattccatgtgtagcggtgaaatgcgcagagatatggaggaacaccagtggcgaaggcggctctctggtctgtaactgacgctgaggtgcgaaagcgtggggatcaaacaggattagataccctggtagtccacgccgtaaacgatgagtgctaagtgttggggggtttccgcccctcagtgctgcagctaacgcattaagcactccgcctggggagtacggtcgcaagactgaaactcaaaggaattgacggggacccgcacaagcggtggagcatgtggtttaattcgaagcaacgcgaagaaccttaccaaatcttgacatcctctgacaactctggagacagagcgttccccttcgggggacagagtgacaggtggtgcatggttgtcgtcagctcgtgtcgtgagatgttgggttaagtcccgcaacgagcgcaacccttatctttagttgccatcattcagttgggcactctagagagactgccggtgacaaaccggaggaaggtggggatgacgtcaaatcatcatgccccttatgatttgggctacacacgtgctacaatggatggtacaaagggcagcgaaaccgcgaggtcaagccaatcccataaaaccattctcagttcggattgtagtctgcaactcgactacatgaagctggaatcgctagtaatcgtagatcagcatgctacggtgaatacgttcccgggtcttgtacacaccgcccgtcacaccacgagagtttgtaacacccgaagccggtggagtaacctttacaggagctagccgtcgaaggtgggacagatgattggggtg

SEQ ID NO: 1921 - DNA, 1426 bp, Magnetococcus marinus
aacgaacgttggtggcatgcttaacacatgcaagtcgaacggtagcaggcccttcggggtgctgacgagtggcgcacgggtgagtaacgcgtggatgacctacccagatgtgggggacaacagttggaaacgactgctaataccgcataatccctaagggggaaaggcttaggccgcatttggaggggtccgcgttggattaggtagttggtggggtaaaggcctaccaagccgacgatccatagctggtctgagaggatgatcagccacactggaactgagacacggtccagactcctacgggaggcagcagtggggaatattgcgcaatgggggaaaccctgacgcagcaatgccacgtgaatgatgaaggccttcgggttgtaaagttcttttagtagggaagatagtgacggtacctacagaaaaagctccggctaactccgtgccagcagccgcggtaatacggagggggcaaacgttgttcggaatcactgggcgtaaagggcgcgtaggcggttatctaagccagaagtgaaatctcggggctcaacctcgaaactgcttttggaactggaagactagaatccggtagaggatggtggaattccccgtgtagaggtgaaattcgtagatatggggaggaacaccggaggcgaaggcggccatctgggccggtattgacgctgaggcgcgaaagtgtgggtagcgaacaggattagataccctggtagtccacaccgtaaacgatgagtgctagtagttgcgggtatcgacccctgcggctacgaagttaacacgataagcactccgcctggggagtacggccgcaaggttaaaactcaaaggaattgacgggggcccgcacaagcggtggagcatgtggtttaattcgatgcaacgcgaagaaccttacctgcttttgacatccttggaaccttacggagacgtaggggtgcttttcggagaaccaagtgacaggtgctgcatggctgtcgtcagctcgtgtcgtgagatgttgggttaagtcccgcaacgagcgcaacccctgcctttagttgccatcattaagttgggcactctagaggaactgccggtgttaagccggaggaaggtggggatgacgtcaagtcatcatggcccttatgggcagggctacacacgtgctacaatggcggatacagagggcggcgaagcagtgatgtggagcgaatctcttaaagtccgtctcagttcggattggagtctgcaactcgactccatgaagttggaatcgctagtaatcgcggatcagcatgccgcggtgaatacgttcccgggccttgtacacaccgcccgtcacaccatgggagttggttttacccgaagccggtggcctaacctttcgaggggggagctgtctacggtaagatcagcgactggggtg

SEQ ID NO: 1922 - DNA, 1403 bp, Magnetospirillum caucaseum
aacgaacgctggcggcaggcttaacacatgcaagtcgaacgaagtcttcggacttagtggcgcacgggtgagtaacacgtgggaatatacctcttggtggggaataacatcgggaaactgatgctaataccgcatacgcctcggggaaagatttatcgccgagagattagcccgcgtccgattagctagttggtgaggtaatggctcaccaaggcgacgatcggtagctggtctgagaggatgatcagccacactgggactgagacacggcccagactcctacgggaggcagcagtggggaatattggacaatgggcgaaagcctgatccagccatgccgcgtgagtgatgaaggccttagggttgtaaagctctttcacccacgacgatgatgacggtagtgggagaagaagccccggctaacttcgtgccagcagccgcggtaatacgaagggggctagcgttgttcggaattactgggcgtaaagcgcacgcaggcggtggtcatagtcagaagtgaaagccctgggctcaacccgggaattgcttttgatactggaccgctagaatcacggagagggtagtggaattccgagtgtagaggtgaaattcgtagatattcggaagaacaccagtggcgaaggcgactacctggccgtcgattgacgctcatgtgcgaaagcgtggggagcaaacaggattagataccctggtagtccacgccgtaaacgatgagtgctagttgttggggtgcatgcacctcagtgacgcagctaacgcgttaagcactccgcctggggagtacggccgcaaggttaaaactcaaaggaattgacgggggcccgcacaagcggtggagcatgtggtttaattcgaagcaacgcgcagaaccttaccagcccttgacatgggacgtatgtttgccagagatggtgacttgtcttcggacgcgtccgcacaggtgctgcatggctgtcgtcagctcgtgtcgtgagatgttgggttaagtcccgcaacgagcgcaaccctcatcttcagttgccagcatttagttgggcactctgaagaaactgccggtgacaagccggaggaaggtggggatgacgtcaagtcctcatggcccttacgggctgggctacacacgtgctacaatggtggtgacagtgggtcgctaactcgcgagagtatgctaatccctaaaagccatctcagttcggattgcactctgcaactcgagtgcatgaagtcggaatcgctagtaatcgtggatcagcatgccacggtgaatacgttcccgggccttgtacacaccgcccgtcacaccatgggagttggctttacccgaagccggtgcgctaaccgcaaggaggcagccgaccacggtaaggtcagcgactggggtg

SEQ ID NO: 1923 - DNA, 1406 bp, Magnetospirillum gryphiswaldense
aacgaacgctggcggcaggcctaacacatgcaagtcgaacgaagtcttcggacttagtggcgcacgggtgagtaacacgtgggaatatacctttcgctgggggataacatcgggaaactgatgctaataccgcatacgccctacgggggaaagatttatcggcgagagattagcccgcgtccgattaggtagttggtgaggtaacggctcaccaagcctgcgatcggtagctggtctgagaggatgatcagccacactgggactgagacacggcccagactcctacgggaggcagcagtggggaatattggacaatgggcgcaagcctgatccagccatgccgcgtgagtgatgaaggccttagggttgtaaagctctttcgacggggacgatgatgacggtacccgtagaagaagccccggctaacttcgtgccagcagccgcggtaatacgaagggggctagcgttgttcggaattactgggcgtaaagcgcacgcaggcggttcgatcagtcagaagtgaaagccccgggcttaacctgggaactgcttttgatactgtcgagcttgaatcacggagagggtagtggaattccgagtgtagaggtgaaattcgtagatattcggaagaacaccagtggcgaaggcgactacctggccgtcgattgacgctcatgtgcgaaagcgtggggagcaaacaggattagataccctggtagtccacgccgtaaacgatgagtgctagttgttggggtgcatgcacctcagtgacgcagctaacgcgttaagcactccgcctggggagtacggccgcaaggttaaaactcaaaggaattgacgggggcccgcacaagcggtggagcatgtggtttaattcgaagcaacgcgcagaaccttaccagcctttgacatggaacgtatgatcaccagagatggtgacttgtcttcggacgcgttcacacaggtgctgcatggctgtcgtcagctcgtgtcgtgagatgttgggttaagtcccgcaacgagcgcaaccctcatcttcagttgccatcatttagttgggcactctgaagaaactgccggtgacaagccggaggaaggtggggatgacgtcaagtcctcatggcccttacgggctgggctacacacgtgctacaatggtggtgacaatgggttgctaacccgcgagggccagctaatctccaaaagccatctcagttcggattgtactctgcaactcgagtgcatgaagtcggaatcgctagtaatcgtggatcagcatgccacggtgaatacgttcccgggccttgtacacaccgcccgtcacaccatgggagttggttttacccgaagccggtgagctaaccgcaaggaggcagccgaccacggtaaggtcagcgactggggtg

SEQ ID NO: 1924 - DNA, 1406 bp, Magnetospirillum magnetotacticum
aacgaacgctggcggcaggcttaacacatgcaagtcgaacgaagtcttcggacttagtggcgcacgggtgagtaacacgtgggaatatacctcttggtggggaataacgtcgggaaactgacgctaataccgcatacgcccttcgggggaaagatttatcgccgagagattagcccgcgtccgattagctagttggtgaggtaatggctcaccaaggcgacgatcggtagctggtctgagaggatgatcagccacactgggactgagacacggcccagactcctacgggaggcagcagtggggaatattggacaatgggcgaaagcctgatccagccatgccgcgtgagtgatgaaggccttagggttgtaaagctctttcacccacgacgatgatgacggtagtgggagaagaagccccggctaacttcgtgccagcagccgcggtaatacgaagggggctagcgttgttcggaattactgggcgtaaagcgcacgcaggcggtggtcatagtcagaagtgaaagccctgggctcaacccgggaattgcttttgatactggaccgctagaatcacggagagggtagtggaattccgagtgtagaggtgaaattcgtagatattcggaagaacaccagtggcgaaggcgactacctggccgtcgattgacgctcatgtgcgaaagcgtggggagcaaacaggattagataccctggtagtccacgccgtaaacgatgagtgctagttgttggggtgcatgcacctcagtgacgcagctaacgcgttaagcactccgcctggggagtacggccgcaaggttaaaactcaaaggaattgacgggggcccgcacaagcggtggagcatgtggtttaattcgaagcaacgcgcagaaccttaccagcccttgacatgggacgtatgtttgccagagatggtgacttgtcttcggacgcgtccacacaggtgctgcatggctgtcgtcagctcgtgtcgtgagatgttgggttaagtcccgcaacgagcgcaaccctcatcttcagttgccatcatttagttgggcactctgaagaaactgccggtgacaagccggaggaaggtggggatgacgtcaagtcctcatggcccttacgggctgggctacacacgtgctacaatggtggtgacagtgggtcgctaactcgcgagagtatgctaatccctaaaagccatctcagttcggattgcactctgcaactcgagtgcatgaagtcggaatcgctagtaatcgtggatcagcatgccacggtgaatacgttcccgggccttgtacacaccgcccgtcacaccatgggagttggctttacccgaagccggtgcgctaaccgcaaggaggcagccgaccacggtaaggtcagcgactggggtg

SEQ ID NO: 1925 - DNA, 1406 bp, Magnetospirillum marisnigri
aacgaacgctggcggcaggcttaacacatgcaagtcgaacgaaggcttcggccttagtggcgcacgggtgagtaacacgtgggaatatacctcttggtgggggataacgtcgggaaactgacgctaataccgcatacgcccttcgggggaaagatttatcgccgagagattagcccgcgtccgattagctagttggtgaggtaacggctcaccaaggcgacgatcggtagctggtctgagaggatgatcagccacactgggactgagacacggcccagactcctacgggaggcagcagtggggaatattggacaatgggggcaaccctgatccagccatgccgcgtgagtgatgaaggccttagggttgtaaagctctttcacccacgacgatgatgacggtagtgggagaagaagccccggctgacttcgtgccagcagccgcggtaatacgaagggggctagcgttgttcggaattactgggcgtaaagcgcacgcaggcggtgaccatagtcagaagtgaaagccctgggctcaacccgggaattgcttttgatactgggttactagaatcacggagagggtagtggaattccgagtgtagaggtgaaattcgtagatattcggaagaacaccagtggcgaaggcgactacctggccgtcgattgacgctcatgtgcgaaagcgtggggagcaaacaggattagataccctggtagtccacgctgtaaacgatgagtgctagttgttggggtgcatgcacctcagtgacgcagctaacgcgttaagcactccgcctggggagtacggccgcaaggttaaaactcaaaggaattgacgggggcccgcacaagcggtggagcatgtggtttaattcgaagcaacgcgcagaaccttaccagcccttgacatgggacgtatgttggtcagagatgacctcttgtcttcggacgcgtccgcacaggtgctgcatggctgtcgtcagctcgtgtcgtgagatgttgggttaagtcccgcaacgagcgcaaccctcatcttcagttgccatcatttagttgggcactctgaagaaactgccggtgacaagccggaggaaggtggggatgacgtcaagtcctcatggcccttacgggctgggctacacacgtgctacaatggtggtgacagtgggctgctaactcgcgagagtaagctaatccctaaaagccatctcagttcggattgcactctgcaactcgagtgcatgaagtcggaatcgctagtaatcgtggatcagcatgccacggtgaatacgttcccgggccttgtacacaccgcccgtcacaccatgggagttggttttacccgaagccggtgagctaaccgcaaggaggcagccgaccacggtaaggtcagcgactggggtg

SEQ ID NO: 1926 - DNA, 1408 bp, Magnetospirillum moscoviense
aacgaacgctggcggcaggcttaacacatgcaagtcgaacgaagtcttcggacttagtggcgcacgggtgagtaacacgtgggaatatacctttcggtgggggataacgtcgggaaactgacgctaataccgcatacgccccttgggggaaagatttatcgccgagagattagcccgcgtccgattagctagttggtgaggtaacggctcaccaaggcgacgatcggtagctggtctgagaggatgatcagccacactgggactgagacacggcccagactcctacgggaggcagcagtggggaatattggacaatgggcgcaagcctgatccagccatgccgcgtgagtgatgaaggccttagggttgtaaagctctttcgacggggacgatgatgacggtacccgtagaagaagccccggctaacttcgtgccagcagccgcggtaatacgaagggggctagcgttgttcggaattactgggcgtaaagcgcacgcaggcggttcgatcagtcagaagtgaaagccccgggctcaacctgggaactgcttttgatactgtcgagcttgaatcacggagagggtagtggaattccgagtgtagaggtgaaattcgtagatattcggaagaacaccagtggcgaaggcgactacctggccgtcgattgacgctcatgtgcgaaagcgtggggagcaaacaggattagataccctggtagtccacgccgtaaacgatgagtgctagttgttggggtgcatgcacctcagtgacgcagctaacgcgttaagcactccgcctggggagtacggccgcaaggttaaaactcaaaggaattgacgggggcccgcacaagcggtggagcatgtggtttaattcgaagcaacgcgcagaaccttaccagcctttgacatgggaactatgggcagaagagattttgtccttcacttcgggtgggttccacacaggtgctgcatggctgtcgtcagctcgtgtcgtgagatgttgggttaagtcccgcaacgagcgcaaccctcatcttcagttgccatcatttagttgggcactctgaagaaactgccggtgacaagccggaggaaggtggggatgacgtcaagtcctcatggcccttacgggctgggctacacacgtgctacaatggtggtgacagtgggtcgctaactcgcgagagtaagctaatctctaaaagccatctcagttcggattgttctctgcaactcgagagcatgaagtcggaatcgctagtaatcgtggatcagcatgccacggtgaatacgttcccgggccttgtacacaccgcccgtcacaccatgggagttggttttacccgaagccggtgagctaaccgcaaggaggcagccgaccacggtaaggtcagcgactggggtg

SEQ ID NO: 1927 - DNA, 1418 bp, Magnetovibrio blakemorei
aacgaacgctggcggcatgcctaacacatgcaagttgaacgagaaagcggcttcggccgtgagtagagtggcgcacgggtgagtaacgcgtgggaacctgccaagcagtggggaataacctttggaaacgaaggctaataccgcatacgcccttcgggggaaagatttatcgctgtttgatggtcccgcgtccgattagctagttggtaaggtaatggcttaccaaggcgacgatcggtagctggtctgagaggatgatcagccacactggaactgagacacggtccagactcctacgggaggcagcagtggggaatattggacaatgggcgcaagcctgatccagcaatgccgcgtgagtgaagaaggccctagggttgtaaaactctttcagtagtgatgatgatgacagtaactacagaagaagcaccggctaacttcgtgccagcagccgcggtaatacgaagggtgctagcgttgttcggaattactgggcgtaaagagcatgtaggcggatagattagtcagaggtgaaagccccgagctcaacttgggaattgcctttgatactgtttatcttgagtccgagagagggtagtggaatttccagtgtagaggtgaaattcgtagatattggaaagaacaccagtggcgaaggcggctacctggctcggtactgacgctgagatgcgaaagcgtggggagcaaacaggattagataccctggtagtccacgccgtaaacgatgagtgctagctgttgggatcttaggtctcagtggcgcagctaacgcattaagcactccgcctggggagtacggtcgcaagattaaaactcaaaggaattgacgggggcccgcacaagcggtggagcatgtggtttaattcgaagcaacgcgaagaaccttaccagcccttgacataccgatcgcggttagtggagacactttccttcagttcggctggatcggatacaggtgctgcatggctgtcgtcagctcgtgtcgtgagatgttgggttaagtcccgcaacgagcgcaaccctcgcctttagttgccatcatttagttgggcactctagaggaactgccggtgacaagccggaggaaggtggggatgacgtcaagtcctcatggcccttacgggctgggctacacacgtgctacaatggcggtgacagtgggttgcgacctcgcgagaggtagccaatccctaaaaaccgtctcagttcggattgttctctgcaactcgagagcatgaagttggaatcgctagtaatcgcggatcagcatgccgcggtgaatacgttcccgggccttgtacacaccgcccgtcacaccatgggagttggttttacccgaaggcgatgcgctaaccgcaaggaggcagtcgaccacggtaaggtcagcgactggggtg

SEQ ID NO: 1928 - DNA, 1452 bp, Malikia granosa
attgaacgctggcggcatgctttacacatgcaagtcgaacggtaacaggtcttcggatgctgacgagtggcgaacgggtgagtaatgcatcggaacgtgcccagtcgtgggggataacgcagcgaaagctgtgctaataccgcatacgatctatggatgaaagcgggggaccgtaaggcctcgcgcgattggagcggccgatgtcagattagctagttggtggggtaaaggcccaccaaggcgacgatctgtagctggtctgagaggacgaccagccacactgggactgagacacggcccagactcctacgggaggcagcagtggggaattttggacaatgggcgcaagcctgatccagcaatgccgcgtgcaggaagaaggccttcgggttgtaaactgcttttgtacggaacgaaaaggttcgggttaataccctgggctcatgacggtaccgtaagaataagcaccggctaactacgtgccagcagccgcggtaatacgtagggtgcaagcgttaatcggaattactgggcgtaaagcgtgcgcaggcggttttgtaagacaggcgtgaaatccccgggctcaacctgggaatggcgcttgtgactgcaaagctggagtgcggcagagggggatggaattccgcgtgtagcagtgaaatgcgtagatatgcggaggaacaccaatggcgaaggcaatcccctgggcctgcactgacgctcatgcacgaaagcgtggggagcaaacaggattagataccctggtagtccacgccctaaacgatgtcaactggttgttggtccttagctggatcagtaacgaagctaacgcgtgaagttgaccgcctggggagtacggccgcaaggttgaaactcaaaggaattgacggggacccgcacaagcggtggatgatgtggtttaattcgatgcaacgcgaaaaaccttacccacctttgacatggcaggaatcctttagagatagaggagtgctcgaaagagaacctgcacacaggtgctgcatggctgtcgtcagctcgtgtcgtgagatgttgggttaagtcccgcaacgagcgcaacccttgtcattagttgctacgaaagggcactctaatgagactgccggtgacaaaccggaggaaggtggggatgacgtcaagtcctcatggcccttataggtggggctacacacgtcatacaatggccggtacaaagggtcgcaaacctgcgagggggagccaatccatcaaagccggtcgtagtccggatcgcagtctgcaactcgactgcgtgaagtcggaatcgctagtaatcgtggatcagcatgtcacggtgaatacgttcccgggtcttgtacacaccgcccgtcacaccctgggagcgggtctcgccagaagtagttagcctaacccgcaaggagggcgattaccacggcggggttcgtgactggggtg

SEQ ID NO: 1929 - DNA, 1452 bp, Malikia spinosa
attgaacgctggcggcatgctttacacatgcaagtcgaacggtaacaggtcttcggatgctgacgagtggcgaacgggtgagtaatgcatcggaacgtgcccagtcgtgggggataacgcagcgaaagctgtgctaataccgcatacgatctatggatgaaagcgggggatcgcaagacctcgcgcgattggagcggccgatgtcagattagctagttggtggggtaaaggcccaccaaggcgacgatctgtagctggtctgagaggacgaccagccacactgggactgagacacggcccagactcctacgggaggcagcagtggggaattttggacaatgggcgcaagcctgatccagcaatgccgcgtgcaggaagaaggccttcgggttgtaaactgcttttgtacggaacgaaaaggtctgggttaataccctgggctcatgacggtaccgtaagaataagcaccggctaactacgtgccagcagccgcggtaatacgtagggtgcaagcgttaatcggaattactgggcgtaaagcgtgcgcaggcggttttgtaagacaggcgtgaaatccccgggctcaacctgggaatggcgcttgtgactgcaaagctggagtgcggcagagggggatggaattccgcgtgtagcagtgaaatgcgtagatatgcggaggaacaccaatggcgaaggcaatcccctgggcctgcactgacgctcatgcacgaaagcgtggggagcaaacaggattagataccctggtagtccacgccctaaacgatgtcaactggttgttggtccttagctggatcagtaacgaagctaacgcgtgaagttgaccgcctggggagtacggccgcaaggttgaaactcaaaggaattgacggggacccgcacaagcggtggatgatgtggtttaattcgatgcaacgcgaaaaaccttacccacctttgacatgtacggaagttgccagagatggcttcgtgctcgaaagagaaccgtaacacaggtgctgcatggctgtcgtcagctcgtgtcgtgagatgttgggttaagtcccgcaacgagcgcaacccttgtcattagttgctacgaaagggcactctaatgagactgccggtgacaaaccggaggaaggtggggatgacgtcaagtcctcatggcccttataggtggggctacacacgtcatacaatggccggtacaaagggtcgcaaacccgcgagggggagccaatccatcaaagccggtcgtagtccggatcgcagtctgcaactcgactgcgtgaagtcggaatcgctagtaatcgtggatcagcatgtcacggtgaatacgttcccgggtcttgtacacaccgcccgtcacaccatgggagcgggtctcgccagaagtagttagcctaacccgcaaggagggcgattaccacggcggggttcgtgactggggtg

SEQ ID NO: 1930 - DNA, 1454 bp, Malonomonas rubra
aacgaacgctggcggcgtgcctaacacatgcaagtcgaacgaggaaggaatcttcggattccgagtagagtggcgcacgggtgagtaacacgtggataacctgccctatgatctgggataacatttcgaaagagatgctaataccggataagcctacacaatcttcggagcgagtaggaaaagatttatcgtcataggatgggtccgcggtccattagctagttggtggggtaacggcctaccaaggccacgatggatagctggtctgagaggatgatcagccacactggaactgagacacggtccagactcctacgggaggcagcagtggggaattttgcgcaatgggggaaaccctgacgcagcaacgccgcgtgaaggatgaaggcctttgggtcgtaaacttctgtcagtggggaagaaatgccagtaatggtgatgacggtacccgcaaaggaagcaccggctaactccgtgccagcagccgcggtaatacggagggtgcaagcgttgttcggaattattgggcgtaaagagcatgtaggcggactgttaagtctgatgtgaaagcccggggctcaaccccggaagtgcattggatactggcagtcttgagtatgggagaggaaagtggaattccgagtgtaggagtgaaatccgtagatattcggaggaacaccagtggcgaaggcggctttctggaccaatactgacgctgagatgcgaaagcgtggggagcgaacaggattagataccctggtagtccacgccgtaaacgatgaatactaggtgttgcgggtaaccactcctgcagtgccgcagctaacgcattaagtattccgcctggggagtacggccgcaaggctaaaactcaaaggaattgacgggggcccgcacaagcggtggagcatgtggtttaattcgacgcaacgcgaagaaccttacctgggtttgacatcccgatcgtacattatggaaacatagtggtcagttcggctggatcggtgacaggtgctgcatggctgtcgtcagctcgtgtcgtgagatgttgggttaagtcccgcaacgagcgcaacccttgtccttagttgccatcatttagttgggcactctagggagactgccggtgttaagccggaggaaggtggggatgacgtcaagtcctcatggcccttatatccagggctacacacgtgctacaatggccggtacaaagggcagcgataccgcgaggtggagctaatcccaaaaagccggtctcagttcggattggagtctgcaactcgactccatgaagttggaatcgctagtaatcgcgtatcagcatgacgcggtgaatacgggcccgggccttgtacacaccgcccgtcacaccacgggagtctattgtaccggaaaccggtgggccaaccttcgggaggcagccgtttatggtatgatcggtaactggggtg

SEQ ID NO: 1931 - DNA, 1371 bp, Mameliella alba
aacgaacgctggcggcaggcctaacacatgcaagtcgtgcgcgccttcgggtgagcggcggacgggtgagtaacgcgtgggaatgtgcccttctgttgaggatagccccgggaaactgggagtaatactcgatacgccctacgggggaaggaaggatcagcccgcgtctgattaggtagttggtggggtaatggcctaccaagcctacgatcagtagctggttttagaggatgatcagccacactgggactgagacacggcccagactcctacgggaggcagcagtggggaatcttagacaatgggggcaaccctgatctagccatgccgcgtgagtgatgaaggccctagggtcgtaaagctctttcgccagggatgataatgacagtacctggtaaagaaaccccggctaactccgtgccagcagccgcggtaatacggagggggttagcgttgttcggaattactgggcgtaaagcgcgcgtaggcggatcagaaagttgggggtgaaatcccggggctcaaccccggaactgcctccaaaactcctggtcttgagttcgagagaggtgagtggaattccgagtgtagaggtgaaattcgtagatattcggaggaacaccagtggcgaaggcggctcactggctcgatactgacgctgaggtgcgaaagtgtggggagcaaacaggattagataccctggtagtccacaccgtaaacgatgaatgccagtcgtcgggtagcatgctattcggtgacacacctaacggattaagcattccgcctggggagtacggtcgcaagattaaaactcaaaggaattgacgggggcccgcacaagcggtggagcatgtggtttaattcgaagcaacgcgcagaaccttaccaacccttgacatcctgtgctacatccagagatggatggttcccttcggggacgcagtgacaggtgctgcatggctgtcgtcagctcgtgtcgtgagatgttcggttaagtccggcaacgagcgcaacccacatcttcagttgccagcagttcggctgggcactctggagaaactgcccgtgataagcgggaggaaggtgtggatgacgtcaagtcctcatggcccttacgggttgggctacacacgtgctacaatggcatctacagtgggttaatccccaaaagatgtctcagttcggattgttctctgcaactcgagagcatgaagtcggaatcgctagtaatcgcgtaacagcatgacgcggtgaatacgttcccgggccttgtacacaccgcccgtcacaccatgggagttggttctacctgacggccgtgcgctaaccttcgggaggcagcggaccacggtaggatcagcgactggggtg

SEQ ID NO: 1932 - DNA, 1368 bp, Mangrovibacter phragmitis
gcttgcttctttgccggcgagcggcggacgggtgagtaatgtctgggaaactgcctgatggagggggataactactggaaacggtggctaataccgcataacgtcgcaagaccaaagagggggaccttcgggcctcttgccatcagatgtgcccagatgggattagcttgttggtgaggtaacggctcaccaaggcgacgatccctagctggtctgagaggatgaccagccacactggaactgagacacggtccagactcctacgggaggcagcagtggggaatattgcacaatgggcgcaagcctgatgcagccatgccgcgtgtatgaagaaggccttcgggttgtaaagtactttcagtcaggaggaaggtggtgagcttaatacgctcatcaattgacgttactgacagaagaagcaccggctaactccgtgccagcagccgcggtaatacggagggtgcaagcgttaatcggaattactgggcgtaaagcgcacgcaggcggtctgtcaagtcggatgtgaaatccccgggctcaacctgggaactgcattcgaaactggcaggctggagtctcgtagagggaggtagaattccaggtgtagcggtgaaatgcgtagagatctggaggaataccggtggcgaaggcggcctcctggacgaagactgacgctcaggtgcgaaagcgtggggagcaaacaggattagataccctggtagtccacgccgtaaacgatgtcgacttgggaggctgtgcccttgaggcgtggcttccggagctaacgcgttaagtcgaccgcctggggagtacggccgcaaggttaaaactcaaatgaattgacgggggcccgcacaagcggtggagcatgtggtttaattcgatgcaacgcgaagaaccttacctggtcttgacatccagagaatcctgcagagatgcgggagtgccttcgggagctctgagacaggtgctgcatggctgtcgtcagctcgtgttgtgaaatgttgggttaagtcccgcaacgagcgcaacccttatcctttgttgccagcggttaggccgggaactcaaaggagactgccagtgataaactggaggaaggtggggatgacgtcaagtcatcatggcccttacgaccagggctacacacgtgctacaatggcgcatacaaagagaagcgaacttgcgagagtaagcggacctcataaagtgcgtcgtagtccggattggagtctgcaactcgactccatgaagtcggaatcgctagtaatcgcggatcagaatgccgcggtgaatacgttcccgggccttgtacacaccgcccgtcacaccatgggagtgggttgcaaaagaagtaggtagcttaac

SEQ ID NO: 1933 - DNA, 1368 bp, Mangrovibacter plantisponsor
agcttgcttctttgccggcgagcggcggacgggtgagtaatgtctgggaaactgcctgatggagggggataactactggaaacggtagctaataccgcataacgtcgcaagaccaaagagggggaccttcgggcctcttgccatcggatgtgcccagatgggattagcttgttggtgaggtaacggctcaccaaggcgacgatccctagctggtctgagaggatgaccagccacactggaactgagacacggtccagactcctacgggaggcagcagtggggaatattgcacaatgggcgcaagcctgatgcagccatgccgcgtgtatgaagaaggccttcgggttgtaaagtactttcagtcaggaggaaggtggtgagcttaatacgctcatcaattgacgttactgacagaagaagcaccggctaactccgtgccagcagccgcggtaatacggagggtgcaagcgttaatcggaattactgggcgtaaagcgcacgcaggcggtctgtcaagtcggatgtgaaatccccgggctcaacctgggaactgcattcgaaactggcaggctagagtctcgtagagggaggtagaattccaggtgtagcggtgaaatgcgtagagatctggaggaataccggtggcgaaggcggcctcctggacgaagactgacgctcaggtgcgaaagcgtggggagcaaacaggattagataccctggtagtccacgccgtaaacgatgtcgacttggaggctgtgcccttgaggcgtggcttccggagctaacgcgttaagtcgaccgcctggggagtacggccgcaaggttaaaactcaaatgaattgacgggggcccgcacaagcggtggagcatgtggtttaattcgatgcaacgcgaagaaccttacctggtcttgacatccagagaatcctgcagagatgcgggagtgccttcgggaactctgagacaggtgctgcatggctgtcgtcagctcgtgttgtgaaatgttgggttaagtcccgcaacgagcgcaacccttatcctttgttgccagcggttaggccgggaactcaaaggagactgccagtgataaactggaggaaggtggggatgacgtcaagtcatcatggcccttacgaccagggctacacacgtgctacaatggcgcatacaaagagaagcgaacttgcgagagtaagcggacctcataaagtgcgtcgtagtccggattggagtctgcaactcgactccatgaagtcggaatcgctagtaatcgcggatcagaatgccgcggtgaatacgttcccgggccttgtacacaccgcccgtcacaccatgggagtgggttgcaaaagaagtaggtagcttaac

SEQ ID NO: 1934 - DNA, 1462 bp, Mannheimia granulomatis
attgaacgctggcggcaggcttaacacatgcaagtcgaacggtaacagattagtacttgtactaatgctgacgagtggcggacgggtgagtaatgcttgggaatctggcttatggagggggataactactggaaacggtagctaataccgcgtaatgtctgtggactaaagggtgggacctattggccacctgccataagatgagcccaagtgggattaggtagttggtgaggtaaaggctcaccaagcccacgatctctagctggtctgagaggatgaccagccacactggaactgagacacggtccagactcctacgggaggcagcagtggggaatattgcacaatggggggaaccctgatgcagccatgccgcgtgaatgaagaaggccttcgggttgtaaagttctttcggtagcgaggaaggtgattgttttaatagaacaatcaattgccgttaactacagaagaagcaccggctaactccgtgccagcagccgcggtaatacggggggtgcgagcgttaatcggaataactgggcgtaaagggcacgcaggcggacttttaagtgaggtgtgaaatccccgggcttaacctgggaattgcatttcagactgggagtctagagtactttagggaggggtagaattccacgtgtagcggtgaaatgcgtagagatgtggaggaataccgaaggcgaaggcagccccttgggaatgtactgacgctcatgtgcgaaagcgtggggagcaaacaggattagataccctggtagtccacgccgtaaacgctgtcgatttggggattgggctttgagcttggtgcccgtagctaacgtgataaatcgaccgcctggggagtacggccgcaaggttaaaactcaaatgaattgacgggggcccgcacaagcggtggagcatgtggtttaattcgatgcaacgcgaagaaccttacctactcttgacatccagagaagcttgcagagatgcgagtgtgccttcgggagctctgagacaggtgctgcatggctgtcgtcagctcgtgttgtgaaatgttgggttaagtcccgcaacgagcgcaacccttatcctttgttgccagcgattcggtcgggaactcaaaggagactgccggtgataaaccggaggaaggtggggatgacgtcaagtcatcatggcccttacgagtagggctacacacgtgctacaatggcgtatacagagggcggcgacccagcgatggtgagcgaatctcagaaagtacgtctaagtccggattggagtctgcaactcgactccatgaagtcggaatcgctagtaatcgcaaatcagaatgttgcggtgaatacgttcccgggccttgtacacaccgcccgtcacaccatgggagtgggttgtaccagaagtagatagcttaaccgaaagaggggcgtttaccacggtatgattcatgactggggtg

SEQ ID NO: 1935 - DNA, 1462 bp, Mannheimia haemolytica
attgaacgctggcggcaggcttaacacatgcaagtcgaacggtagcacataggagtttgctccttgggtgacgagtggcggacgggtgagtaatgcttgggaatctggcttatggagggggataactactggaaacggtagctaataccgcgtaatgtcttaggactaaagggtgggaccatttggccacctgccataagatgagcccaagtgggattaggtagttggtgaggtaaaggctcaccaagcccgcgatctctagctggtctgagaggatgaccagccacactggaactgagacacggtccagactcctacgggaggcagcagtggggaatattgcacaatggggggaaccctgatgcagccatgccgcgtgaatgaagaaggccttcgggttgtaaagttctttcggtgacgaggaaggcgattgttttaatagaacagtcgattgacgttaatcacagaagaagcaccggctaactccgtgccagcagccgcggtaatacggggggtgcgagcgttaatcggaataactgggcgtaaagggcacgcaggcggttgtttaagtgaggtgtgaaagccccgggcttaacctgggaattgcatttcagactgaacaactagagtactttagggaggggtagaattccacgtgtagcggtgaaatgcgtagagatgtggaggaataccgaaggcgaaggcagccccttggaaatgtactgacgctcatgtgcgaaagcgtggggagcaaacaggattagataccctggtagtccacgccgtaaacgctgtcgatttggggattggggtttaactctggtgcccgtagctaacgtgataaatcgaccgcctggggagtacggccgcaaggttaaaactcaaatgaattgacgggggcccgcacaagcggtggagcatgtggtttaattcgatgcaacgcgaagaaccttacctactcttgacatccatggaatcttgtagagatatgagagtgccttcgggaaccatgagacaggtgctgcatggctgtcgtcagctcgtgttgtgaaatgttgggttaagtcccgcaacgagcgcaacccttatcctttgttgccagcgattaggtcgggaactcaaaggagactgccggtgataaaccggaggaaggtggggatgacgtcaagtcatcatggcccttacgagtagggctacacacgtgctacaatggcgtatacagagggcggcgagccagcgatggggagcgaatctcagaaagtacgtctaagtccggattggagtctgcaactcgactccatgaagtcggaatcgctagtaatcgcaaatcagaatgttgcggtgaatacgttcccgggccttgtacacaccgcccgtcacaccatgggagtgggttgtaccagaagtagatagcttaaccgaaaggggggcgtttaccacggtatgattcatgactggggtg

SEQ ID NO: 1936 - DNA, 1462 bp, Mannheimia varigena
attgaacgctggcggcaggcttaacacatgcaagtcgaacggtaacagggagaagcttgcttctttgctgacgagtggcggacgggtgagtaatgcttgggaatctggcttatggagggggataactactggaaacggtagctaataccgcgtaatgtctttggactaaagggtgggactttcgggccacctgccataagatgagcccaagtgggattagctagttggtgaggtaaaggctcaccaaggcgacgatctctagctggtctgagaggatgaccagccacactggaactgagacacggtccagactcctacgggaggcagcagtggggaatattgcacaatggggggaaccctgatgcagccatgccgcgtgaatgaagaaggccttcgggttgtaaagttctttcggtagcgaggaaggcagacttgttaatagcaagtttgattgacgttaactacagaagaagcaccggctaactccgtgccagcagccgcggtaatacggggggtgcaagcgttaatcggaataactgggcgtaaagggcacgcaggcggacttttaagtgagatgtgaaagccccgggcttaacctgggaattgcatttcagactgggagtctagagtactttagggaggggtagaattccacgtgtagcggtgaaatgcgtagagatgtggaggaataccgaaggcgaaggcagccccttgggaatgtactgacgctcatgtgcgaaagcgtggggagcaaacaggattagataccctggtagtccacgccgtaaacgctgtcgatttggggattgggctttaagcttggtgcccgtagctaacgtgataaatcgaccgcctggggagtacggccgcaaggttaaaactcaaatgaattgacgggggcccgcacaagcggtggagcatgtggtttaattcgatgcaacgcgaagaaccttacctactcttgacatccagagaatcttgtagagatacgagagtgccttcgggaactctgagacaggtgctgcatggctgtcgtcagctcgtgttgtgaaatgttgggttaagtcccgcaacgagcgcaacccttatcctttgttgccagcgattaggtcgggaactcaaaggagactgccggtgataaaccggaggaaggtggggatgacgtcaagtcatcatggcccttacgagtagggctacacacgtgctacaatggcgtatacagagggcagcgacccagcgatggtgagcgaatctcacaaagtacgtctaagtccggattggagtctgcaactcgactccatgaagtcggaatcgctagtaatcgcaaatcagaatgttgcggtgaatacgttcccgggccttgtacacaccgcccgtcacaccatgggagtgggttgtaccagaagtagatagcttaaccttcgggggggcgtttaccacggtatgattcatgactggggtg

SEQ ID NO: 1937 - DNA, 1389 bp, Maricaulis maris
aacgaacgctggcggcaggcttaacacatgcaagtcgagcgccctgcttgcagggagcggcagacgggtgagtaacgcgtgggaacgtgcctattggttcggaatagccccgggaaactgggtttaataccgaatgtgcccttcgggggaaagatttatcgccaatagatcggcccgcgttagattagctagttggtgaggtaaaagcttaccaaggctacgatctatagctggtctgagaggatgatcagccacactgggactgagacacggcccagactcctacgggaggcagcagtgaggaatcttggacaatgggggaaaccctgatccagccatgccgcgtgaatgatgaaggccttagggttgtaaaattctttcagcagggaagataatgacggtacctgcagaagaagccccggctaactccgtgccagcagccgcggtaatacggagggggctagcgttgttcggaattactgggcgtaaagcgctcgtaggcggattggtcagtcagaggtgaaagcccagggctcaaccttggaattgcctttgatactgccagtcttgagttcgggagaggtgagcggaattccgagtgtagaggtgaaattcgtagatattcggaggaacaccagaggcgaaggcggctcactggaccgatactgacgctgaggagcgaaagcgtggggagcaaacaggattagataccctggtagtccacgccgtaaacgatgagagctagttgtctggcagcatgctgttaggtgacgcagctaacgcattaagctctccgcctggggagtacggccgcaaggttaaaactcaaagaaattgacgggggcccgcacaagcggtggagcatgtggtttaattcgaagcaacgcgcagaaccttacctacccttgacataccaatcgcgatttccagagatggatttcttcagttaggctggattggatacaggtgctgcatggctgtcgtcagctcgtgtcgtgagatgttgggttaagtcccgcaacgagcgcaaccctcgccgttagttgccagcaggtttggctgggcactctaacgggaccgccggtgtcaagccggaggaaggtggggatgacgtcaagtcctcatggcccttacgggtagggctacacacgtgctacaatggcagtgacagagagctaatctctaaaaactgtctcagttcggattgtcttctgcaactcgaaggcatgaagttggaatcgctagtaatcgcggatcagcatgccgcggtgaatacgttcccgggccttgtacacaccgcccgtcacaccatgggagttggttctacccgaagatggtgcgctaaccttttggaagcagccagccacggtaggatcagcgactggggtg

SEQ ID NO: 1938 - DNA, 1389 bp, Maricaulis salignorans
aacgaacgctggcggcaggcttaacacatgcaagtcgagcgcccacttcggtgggagcggcagacgggtgagtaacgcgtgggaacgtaccttttggttcggaatagccctgggaaactgggtgtaataccgaatgtgcccttcgggggaaagatttatcgccaaaagatcggcccgcgttagattagcttgttggtgaggtaatggctcaccaaggctacgatctatagctggtctgagaggatgatcagccacactgggactgagacacggcccagactcctacgggaggcagcagtgaggaatcttggacaatgggcgaaagcctgatccagccatgccgcgtgaatgatgaaggccttagggttgtaaaattctttcagcagggaagataatgacggtacctgcagaagaagccccggctaactccgtgccagcagccgcggtaatacggagggggctagcgttgttcggaattactgggcgtaaagcgctcgtaggcggattgataagtcagaggtgaaagcccagggctcaaccttggaattgcctttgaaactgtcagtcttgagttcaggagaggtgagcggaattccgagtgtagaggtgaaattcgtagatattcggaggaacaccagaggcgaaggcggctcactggactgatactgacgctgaggagcgaaagcgtggggagcaaacaggattagataccctggtagtccacgccgtaaactatgagagctagttgtcagcaagcatgcttgttggtgacgcagctaacgcattaagctctccgcctggggagtacggtcgcaagattaaaactcaaagaaattgacgggggcccgcacaagcggtggagcatgtggtttaattcgaagcaacgcgaagaaccttacctacccttgacataccgatcgcggatcgcagagatgctttccttcagttaggctggatcggatacaggtgctgcatggctgtcgtcagctcgtgtcgtgagatgttgggttaagtcccgcaacgagcgcaaccctcgccactagttgccagcaggtttggctgggcactctagtgggaccgccggtgtcaagccggaggaaggtggggatgacgtcaagtcctcatggcccttacgggtagggctacacacgtgctacaatggcagtgacagagagctaatctctaaaaactgtctcagttcggattgtcttctgcaactcgaaggcatgaagttggaatcgctagtaatcgcggatcagcatgccgcggtgaatacgttcccgggccttgtacacaccgcccgtcacaccatgggagttggttctacccgaagattgtgcgctaaccgcaaggaagcagcaagccacggtaggatcagcgactggggtg

SEQ ID NO: 1939 - DNA, 1451 bp, Marichromatium gracile
attgaacgctggcggcatgcctaacacatgcaagtcgaacgcgaaaccccttcggggggagtagagtggcggacgggtgagtaatgtgtgggaatctgccctgcagcgggggataacccggggaaactcgggctaataccgcatacgacctacgggtgaaagggggcttcggctctcactgcaggatgagcccacatccgattagcttgttggtgaggtaacggctcaccaaggcgacgatcggtagctggtctgagaggatgatcagccacactgggactgagacacggcccagactcctacgggaggcagcagtggggaatattggacaatgggcgaaagcctgatccagcaatgccgcgtgtgtgaagaaggcctgcgggttgtaaagcactttcagcgaggaagaaaagcctgtggttaatacccatgggtcttgacgttactcgcagaagaagcaccggctaactccgtgccagcagccgcggtaatacggagggtgcaagcgttaatcggaatcactgggcgtaaagcgcacgtaggcggcgaggtcagtcagatgtgaaagccccgggcttaacctgggaactgcatttgatactgcctggctagagtttgatagaggggggtggaattccaggtgtagcggtgaaatgcgtagatatctggaggaacaccagtggcgaaggcggccccctggatcaaaactgacgctgaggtgcgaaagcgtggggagcaaacaggattagataccctggtagtccacgccgtaaacgatgtcgactagccgttgggctcatttaagggtttagtggcgcagctaacgcgataagtcgaccgcctggggagtacggccgcaaggttaaaactcaaaggaattgacgggggcccgcacaagcggtggagcatgtggtttaattcgatgcaacgcgaagaaccttaccagcccttgacatcctcggaacttggcagagatgccttggtgccttcgggagccgagtgacaggtgctgcatggctgtcgtcagctcgtgtcgtgagatgttgggttaagtcccgtaacgagcgcaacccttgtccttagttgccagcacgtcatggtgggaactctaaggagactgccggtgataaaccggaggaaggtggggatgacgtcaagtcatcatggcccttatgggctgggctacacacgtgctacaatggtcggtacagagggttgcaaagcggcgacgtggagctaatctcagaaaaccggtcgtagtccggattgcagtctgcaactcgactgcatgaagtcggaatcgctagtaatcgcgaatcagaatgtcgcggtgaatacgttcccgggccttgtacacaccgcccgtcacaccatgggagttggttgcaccagaagtagatagcttaaccttcgggagggcgtttaccacggtgtgatcaatgactggggtg

SEQ ID NO: 1940 - DNA, 1450 bp, Marichromatium purpuratum
attgaacgctggcggcatgcctaacacatgcaagtcgaacgcgaaaccccttcggggggagtagagtggcggacgggtgagtaatgtgtgggaatctgccctgcagcgggggataacccggggaaacccgggctaataccgcatacgacctacgggtgaaagggggcttcggctctcactgcaggatgagcccacatccgattagcttgttggtgaggtaacggctcaccaaggcgacgatcggtagctggtctgagaggatgatcagccacactgggactgagacacggcccagactcctacgggaggcagcagtggggaatattggacaatgggcgaaagcctgatccagcaatgccgcgtgtgtgaagaaggcctgcgggttgtaaagcactttcagcgaggaagaaaagcctgtggttaatacccatgggtcttgacgttactcgcagaagaagcaccggctaactccgtgccagcagccgcggtaatacggagggtgcaagcgttaatcggaatcactgggcgtaaagcgcacgtaggcggcgaggtcagtcagatgtgaaagccccgggcttaacctgggaactgcatttgatactgcctggctagagtttgatagaggggggtggaattccaggtgtagcggtgaaatgcgtagatatctggaggaacaccagtggcgaaggcggccccctggatcaaaactgacgctgaggtgcgaaagcgtggggagcaaacaggattagataccctggtagtccacgccgtaaacgatgtcgactagccgttgggctcatttaagggtttagtggcgcagctaacgcgataagtcgaccgcctggggagtacggccgcaaggttaaaactcaaaggaattgacgggggcccgcacaagcggtggagcatgtggtttaattcgatgcaacgcgaagaaccttaccagcccttgacatcctcggaacttggcagagatgccttggtgccttcgggagccgagtgacaggtgctgcatggctgtcgtcagctcgtgtcgtgagatgttgggttaagtcccgtaacgagcgcaacccttgtccttagttgccagcatttcggatgggaactctaaggagactgccggtgataaaccggaggaaggtggggatgacgtcaagtcatcatggcccttatgggctgggctacacacgtgctacaatggtcggtacagagggtcgcaaagcggcgacgtggagctaatctcagaaaaccggtcgtagtccggattgcagtctgcaactcgactgcatgaagtcggaatcgctagtaatcgcgaatcagaatgtcgcggtgaatacgttcccgggccttgtacacaccgcccgtcacaccatgggagttggttgcaccagaagtagatagcttaaccttcgggagggcgtttaccacggtgtgatcaatgactggggtg

SEQ ID NO: 1941 - DNA, 1444 bp, Mariniblastus fucicola
aatgaacgttagcggcgtggattaggcatgcaagtcgagcgagaagcttttaaaagatacttcggttgattttaaaagtggacagcggcgaaagggagagtaacgagtagattacgtacccgagggtccgggatagctgcgggaaactgcaggtaataccggataatgtttccgaaccaaagatttattgccctcggagcggtctgcttactattagcttgttggtggggtaacggcctaccaaggcgaagatggttagcgggtgtgagagcatggcccgtctcactggaactgagacactgtccagacacctacgggtggctgcagtcgagaatcttccgcaatggacgaaagtctgacggagcgacgccgcgtgatggatgaaggccctcgggttgtaaacatctgtcgtaggttaggaaattttgaccgatcctaggaggaagcacaggctaagttcgtgccagcagccgcggtaatacgaactgtgcaaacgttattcggaatcactgggcttaaagggtgcgtaggcggatttgtaggtcagatgtgaaagcccacggctcaaccgtggaattgcgtttgaaaccacaaatcttgaggaagtcagaggtatgcggaactgatggtggagcggtgaaatgtgttgatatcatcaggaacaccggtggcgaaagcggcatactgggacttttctgacgctgaggcacgaaagctaggggagcgaacgggattagataccccggtagtcctagctgtaaacgatctgtactagtccgtggggacccccacatcttctcggacgtagcgaaagtgttaagtacagcgcctggggagtatggtcgcaaggctgaaactcaaaggaattgacgggggctcacacaagcggtggaggatgtggcttaattcgaggctacgcgaagaaccttacctaggcttaacatgtttgggaacgtctgtgaaagcaggaagtgcctttcggggaacccttacgtaggtgctgcatggctgtcgtcagctcgtgtcgtgagatgtcgggttaagtcccttaacgagcgaaacccttatcactagttgccagcgagtaatgtcggggactctagtgagactgccggtgttaaaccggaggaaggtggggatgacgtcaagtcctcatggcctttatgcctagggctgcacacgtcctacaatgcactatacaaagcgttgcgaactcgcgagagtaagctaaccgcataaagtagtgcccagttcggatagcaggctgaaattcgcctgcttgaagccggaatcgctagtaatcgcgggtcagcataccgcggtgaatgtgttcctgagccttgtacacaccgcccgtcaagccacgaaagttgggggggcccgaagtcgcgattctaactgcttgcagaagatagcgccgaaggtcaactcgatgattgggact

SEQ ID NO: 1942 - DNA, 1391 bp, Marinicauda algicola
aacgaacgctggcggcaggcttaacacatgcaagtcgaacgcacccttcggggtgagtggcagacgggtgagtaacgcgtgggaacgtgccctttggttcggaatagccccgggaaactgggagtaataccgaataagccctacgggggaaagatttatcgccgaaggatcggcccgcgtcagattagctagttggtagggtaatggcctaccaaggcgacgatctgtagctggtttgagaggatgatcagccacactgggactgagacacggcccagactcctacgggaggcagcagtggggaatcttggacaatgggggcaaccctgatccagccatgccgcgtgaatgatgaaggccctagggttgtaaaattctttcagcggggaagataatgacggtacccgcagaagaagccccggctaactccgtgccagcagccgcggtaatacggagggggctagcgttgttcggaattactgggcgtaaagcgcgcgtaggcggaccagccagtcagaggtgaaagcccagggctcaaccctggaattgcctttgatactgttggtctggagtccgggagaggtgtgtggaattccgagtgtagaggtgaaattcgtagatattcggaggaacaccagaggcgaaggcggcacactggaccggtactgacgctgaggcgcgaaagcgtggggagcaaacaggattagataccctggtagtccacgccgtaaacgatggatgctagttgtcaggcagcatgctgtttggtgacgcagctaacgcattaagcatcccgcctggggagtacggccgcaaggttaaaactcaaagaaattgacgggggcccgcacaagcggtggagcatgtggtttaattcgaagcaacgcgaagaaccttaccagcccttgacatcccggtcgcggtttggggagacccattccttcagttcggctggaccggtgacaggtgctgcatggctgtcgtcagctcgtgtcgtgagatgttgggttaagtcccgcaacgagcgcaaccctcgccgttagttgccagcaggtttggctgggcactctaacgggactgccggtgtcaaaccggaggaaggtggggatgacgtcaagtcatcatggcccttacgggctgggctacacacgtgctacaatggcggtgacagagggataatccctaaaaaccgtctcagttcggattgtcttctgcaactcgaaggcatgaagttggaatcgctagtaatcgcggatcagcatgccgcggtgaatacgttcccgggccttgtacacaccgcccgtcacaccatgggagttggttctacccgacgacggtgcgctaacccgcaagggaggcagccggccacggtaggatcagcgactggggtg

SEQ ID NO: 1943 - DNA, 1389 bp, Marinicauda pacifica
aacgaacgctggcggcaggcttaacacatgcaagtcgaacgcacccttcggggtgagtggcagacgggtgagtaacgcgtgggaacgtaccctttggttcggaatagcccttggaaacgaggagtaataccgaatgagccctacgggggaaagatttatcgccgaaggatcggcccgcgttagattagctagttggtgaggtaatggctcaccaaggcgacgatctatagctggtttgagaggatgatcagccacactgggactgagacacggcccagactcctacgggaggcagcagtggggaatcttggacaatgggggaaaccctgatccagccatgccgcgtgaatgatgaaggccttagggttgtaaaattctttcagtggggaagataatgacggtacccacagaagaagccccggctaactccgtgccagcagccgcggtaatacggagggggctagcgttgttcggaattactgggcgtaaagcgcgcgtaggcggactagccagtcagaggtgaaagcccagggctcaaccctggaactgcctttgatactgttagtctggagtccgggagaggtgtgtggaattccgagtgtagaggtgaaattcgtagatattcggaggaacaccagaggcgaaggcggcacactggaccggtactgacgctgaggcgcgaaagcgtggggagcaaacaggattagataccctggtagtccacgccgtaaacgatggatgctagttgtctggcagcatgctgttaggtgacgcagctaacgcattaagcatcccgcctggggagtacggccgcaaggttaaaactcaaagaaattgacgggggcccgcacaagcggtggagcatgtggtttaattcgaagcaacgcgaagaaccttaccagctcttgacatcctgatcgcggtttggggagacccattccttcagttcggctggatcagtgacaggtgctgcatggctgtcgtcagctcgtgtcgtgagatgttgggttaagtcccgcaacgagcgcaaccctcgccgttagttgccatcaggtttggctgggcactctaacgggactgccggtgtcaaaccggaggaaggtgaggatgacgtcaagtcatcatggcccttacgagctgggctacacacgtgctacaatggcggtgacagagggataatccctaaaaaccgtctcagttcggattgtcttctgcaactcgaaggcatgaagttggaatcgctagtaatcgcggatcagcatgccgcggtgaatacgttcccgggccttgtacacaccgcccgtcacaccatgggagttggttctacccgacgacgctgcgctaaccttcgggaggcaggcggccacggtaggatcagcgactggggtg

SEQ ID NO: 1944 - DNA, 1467 bp, Marinicella litoralis
attgaacgctggcggtatgcctaacacatgcaagtcgaacggtaacagaggaaagcttgctttcttgctgacgagtggcggacgggtgagtaacgcgtgggaatctacccagtagttggggatagcccggagaaatccggattaataccgaataatgtctacggacgaaaaggtgcctcttcttgaaagcacttgctattggatgagcccgcgttagattagtttgttggtggggtaacggcctaccaagactacgatctatagctggtttgagaggatgatcagccacattgggactgagacacggcccagactcctacgggaggcagcagtggggaatattggacaatgggcgcaagcctgatccagcaataccgcgtgtgtgaagaaggccttagggttgtaaagcacttttatgtaggaagaaggtttgtttgttaatagcagatgaatttgacggtactacaagaataagcaccggctaactccgtgccagcagccgcggtaatacggagggtgcgagcgttaatcggaattactgggcgtaaagggtacgtaggcggcttgataagtcagatgtgaaatccccgggcttaacctgggaactgcatttgaaactgtctggctagagtgagtgagaggttagtggaattcaaggcgtagcggtgaaatgcgtagaggtcttgaggaacatcagtggcgaaggcgactaactggcactacactgacgctgaggtacgaaagcgtggggagcgaacaggattagataccctggtagtccacgccctaaacgatgaggactggctgttggcgctatagacgcgtcggtagcgaagctaacgcgttaagttctccgcctggggagtacgaccgcaaggttgaaactcaaaggaattgacgggggcccgcacaagcggtggagcatgtggtttaattcgatgcaacgcgaagaaccttaccatcccttgacatcctcagaacggtctgtaatggacccgtgccttcgggaactgagtgacaggtgctgcacggctgtcgtcagctcgtgtcgtgagatgttgggttaagtcccgcaacgagcgcaacccctatctatagttgccagcacgtaatggtgggaactctatagagactgccggtgataagccggaggaaggtggggacgacgtcaagtcatcatggcccttacgggatgggctacacacgtgctacaatggtgcatacagagggttgccaagccgcgaggtggagctaatcccagaaagtgcatcttagtccggattgcagtctgcaactcgactgcatgaagtcggaatcgctagtaatcgcgaatcagcaatgtcgcggtgaatacgttcccgggccttgtacacaccgcccgtcacaccatgggagtgggttgctccagaagtggctagtctaaccttcgggaagacggtcaccacggagtgattcatgactggggtg

SEQ ID NO: 1945 - DNA, 1446 bp, Marinilabilia salmonicolor
gatgaacgctagcgacaggcctaacacatgcaagtcgaggggtaacattagtagcttgctactagatgacgaccggcgcacgggtgagtaacgcgtatgcaaccttcctttaacaggagaatagcccccggaaacggggattaatgctccattgtactctaagttcgcatggattaagagttaaagttccgacggttaaagatgggcatgcgtgacattagccagttggcggggtaacggcccaccaaagcaacgatgtctaggggttctgagaggaaggtcccccacactggtactgagacacggaccagactcctacgggaggcagcagtgaggaatattggtcaatggacgcaagtctgaaccagccatgtcgcgtgcaggatgactgccctatgggttgtaaactgcttttgtacgggaagaaatatagctacgagtagttatttgccggtaccgtacgaataagcatcggctaactccgtgccagcagccgcggtaatacggaggatgcgagcgttatccggatttattgggtttaaagggtgcgtaggcggaatggtaagtcagtggtgaaatcctgcagctcaactgtagttgtgccattgatactgtcattcttgagtacagatgaggtaggcggaatgagtagtgtagcggtgaaatgcatagatattactcagaacaccaattgcgaaggcagcttactaaactgacactgacgctgaagcacgaaagcgtgggtatcaaacaggattagataccctggtagtccacgccgtaaacgatgattactggttgtttgcgatacacagcaagcgactgagcgaaagcattaagtaatccacctggggagtacgtcggcaacgatgaaactcaaaggaattgacgggggcccgcacaagcggtggaacatgtggtttaattcgatgatacgcgaggaaccttacctgggtttaaatgggaagtgacaggggtagaaatacctttttcttcggacacttttcaaggtgctgcatggttgtcgtcagctcgtgccgtgaggtgtcgggttaagtcccataacgagcgcaacccctgttgttagttaccagcacataatggtggggactctaacaagactgccggtgtaaaccgcgaggaaggtggggatgacgtcaaatcagcacggcccttacatccagggctacacacgtgttacaatggcaggtacaaagggcagctacacagcgatgtgatgctaatctcgaaaacctgtcccagttcggattgaagtctgcaacccgacttcatgaagctggaatcgctagtaatcgcgcatcagccatggcgcggtgaatacgttcccgggccttgtacacaccgcccgtcaagccatggaagccgggagtacctgaagtatgtaaccgcaaggagcgtcctagggtaaaactggtgactggggct

SEQ ID NO: 1946 - DNA, 1453 bp, Marinimicrobium koreense
attgaacgctggcggcaggcctaacacatgcaagtcgagcgagaaagcccttcggggtgagtacagcggcggacgggtgagtaacgcgtgggaatctgcccagtagtgggggacaacagccggaaacggctgctaataccgcatacgccctacgggggaaagcaggggatcttcggaccttgtgctattggatgagcccgcgtcagattagcttgttggtggggtaatggcctaccaaggcgacgatctgtagctggtctgagaggatgatcagccacatcgggactgagacacggcccgaactcctacgggaggcagcagtggggaatattggacaatgggggcaaccctgatccagccatgccgcgtgtgtgaagaaggccttcgggttgtaaagcactttcagcgaggaggaaagcctgatggctaatacccatcgggggtgacgttactcgcagaagaagcaccggctaactccgtgccagcagccgcggtaatacggagggtgcaagcgttaatcggaattactgggcgtaaagcgcacgtaggcggcgagttaagctagctgtgaaagccccgggctcaacctgggaactgcagttagaactggctagctagagtacggtagaggagtgtggaatttcctgtgtagcggtgaaatgcgtagatataggaaggaacatcagtggcgaaggcgacactctggactgatactgacgctgaggcgcgaaagcgtggggagcaacaggattagataccctggtagtccacgccgtaaacgatgtctactagccgttgggagccttgagctcttagtggcgcagctaacgcactaagtagaccgcctggggagtacggccgcaaggttaaaactcaaatgaattgacgggggcccgcacaagcggtggagcatgtggtttaattcgacgcaacgcgaagaaccttaccaggccttgacatccttggaacttagcagagatgctttggtgccttcgggagccaagtgacaggtgctgcatggctgtcgtcagctcgtgtcgtgagatgttgggttaagtcccgtaacgagcgcaacccttgtccttagttgccagcacgtaatggtgggaactctaaggagactgccggtgacaaaccggaggaaggtggggacgacgtcaagtcatcatggcccttacggcctgggctacacacgtgctacaatgggcggtacaaagggttgccaatccgcgaggtggagctaatcccgaaaaaccgttcgtagtccggattggagtctgcaactcgactccatgaagtcggaatcgctagtaatcgtgaatcagaatgtcacggtgaatacgttcccgggccttgtacacaccgcccgtcacaccatgggagtgggttgcaccagaagtggctagtctaacctcggaggacggtcaccacggtgtgattcatgactggggtg

SEQ ID NO: 1947 - DNA, 1471 bp, Marininema halotolerans
gacgaacgctggcggcgtgcctaatacatgcaagtcgagcgaacggaggagagcttgctctccaaagttagcggcggacgggtgagtaacacgtgggcgacctgcccgtaagactgggataaccccgggaaaccggagctaataccagataggattttgggttgcatgacctgaaatggaaaggcggcttcggctgtcacttacggatgggcccgcggcgcattagctagttggtagggtaacggcctaccaaggcgacgatgcgtagccgacctgagagggtgaccggccacactgggactgagacacggcccagactcctacgggaggcagcagtagggaattttcgtcaatgggcgcaagcctgaacgagcaacgccgcgtgagtgaggacggctttcgggttgtaaagctctgttctctgggaagaacggcagaagggataataccccttttgtatgacggtaccagagaagaaagccccggctaactacgtgccagcagccgcggtaatacgtagggggcaagcgttgtccggaattattgggcgtaaagcgcgcgcaggcggcctgttaagtcggatgtgaaaggctacggctcaaccgtagaggtgcatccgaaactggcgggcttgagtgcaggagaggaaagtggaattcccggtgtagcggtggaatgcgtagatatcgggaggaacaccagtggcgaaggcggctttctggcctgtaactgacgctgaggcgcgaaagcgtggggagcaaacaggattagataccctggtagtccacgccgtaaacgatgagtgctaggtgttgggggtttcacgccctctgtgccgaaggtaacccaataagcactccgcctggggagtacggccgcaaggctgaaactcaaaggaattgacgggggcccgcacaagcggtggagcatgtggtttaattcgaagcaacgcgaagaaccttaccaaggcttgacatcccattgaaatctctagagatagaggccctcttcggagcaatggtgacaggtggtgcatggttgtcgtcagctcgtgtcgtgagatgttgggttcagtcccgcaacgagcgcaacccttatcgttagttgccagcatttagttgggcactctagcgagacagccggtgaaagccggaggaaggtggggatgacgtcaaatcatcatgccccttatgtcttgggctacacacgtgctacaatggttgggtacaacgggtagcgaagccgcgaggtggagccaatcccataaaaccaatctcagttcggatcgtaggctgcaactcgcctacgtgaagctggaatcgctagtaatcgcggatcagcatgccgcggtgaatacgttcccgggccttgtacacaccgcccgtcacaccacgagagtttgcaacacccgaagtcggtgagggaaccctttggggcccagccgccgaaggtggggcagatgattggggtg

SEQ ID NO: 1948 - DNA, 1470 bp, Marininema mesophilum
gacgaacgctggcggcgtgcctaatacatgcaagtcgagcgaacggaggagagcttgctctccgaagttagcggcggacgggtgagtaacacgtgggcaacctgcccgtaagaccgggataacttcgggaaaccgaagctaataccggataggattttaggtcacatgacctaaaatggaaaggcggcttcggctgtcacttacggatgggcccgcggcgcattagctagttggtagggtaacggcttaccaaggcgacgatgcgtagccgacctgagagggtgaccggccacactgggactgagacacggcccagactcctacgggaggcagcagtagggaattttcgtcaatgggcgcaagcctgaacgagcaacgccgcgtgagtgaggacggctttcgggttgtaaagctctgttctctgggaagaacggcaggagggagaataccccttttgagtgacggtaccagagaagaaagccccggctaactacgtgccagcagccgcggtaatacgtagggggcaagcgttgtccggaattattgggcgtaaagcgcgcgcaggcggcctgttaagtcggatgtgaaaggctacggctcaaccgtagaggtgcatccgaaactggcgggcttgagtgcaggagaggaaagtggaattcccggtgtagcggtggaatgcgtagatatcgggaggaacaccagtggcgaaggcggctttctggcctgtaactgacgctgaggcgcgaaagcgtggggagcaaacaggattagataccctggtagtccacgccgtaaacgatgagtgctaggtgttgggggtttcacgccctctgtgccgaaggtaacccaataagcactccgcctggggagtacggccgcaaggctgaaactcaaaggaattgacgggggcccgcacaagcggtggagcatgtggtttaattcgaagcaacgcgaagaaccttaccaaggcttgacatcccattgcaacctctagagatagaggccctcttcggagcaatggtgacaggtggtgcatggttgtcgtcagctcgtgtcgtgagatgttgggttcagtcccgcaacgagcgcaacccttatcgttagttgccagcattgagttgggcactctagcgagacagccggtgaaagccggaggaaggtggggatgacgtcaaatcatcatgccccttatgtcttgggctacacacgtgctacaatggttggtacaacgggtagcgaagccgcgaggtgaagccaatcccaaaaaaccaatctcagttcggatcgtaggctgcaactcgcctgcgtgaagctggaatcgctagtaatcgcggatcagcatgccgcggtgaatacgttcccgggccttgtacacaccgcccgtcacaccacgagagtttgcaacacccgaagtcggtgagggaaccctttgggacccagccgccgaaggtggggcagatgattggggtg

SEQ ID NO: 1949 - DNA, 1435 bp, Marinisporobacter balticus
  misc_feature (1399)..(1399): n is a, c, g, or t
gatgaacgctggcggcgtgcctaacacatgcaagtcgagcgaagttgttttaaagcttgctttaaaacaacttagcggcggacgggtgagtaacgcgtgggcaacctgccctatacagagggatagcctcgggaaaccgggattaatacctcataaaactctaacatcgcatgatgtgtgagtcaaagatttatcagtataggatgggcccgcgtctgattagctagttggtaaggtaatggcttaccaaggcgacgatcagtagccgacctgagagggtgatcggccacactggaactgagacacggtccagactcctacgggaggcagcagtggggaatattgcacaatgggcgaaagcctgatgcagcaacgccgcgtgagcgatgaaggccttcgggtcgtaaagctctgtcctaagggaagaataatgacggtaccttaggaggaagccccggctaactacgtgccagcagccgcggtaatacgtagggggcgagcgttatccggaatcattgggcgtaaagggtgcgtaggcggttatgcaagttaggggtgaaaggctacggctcaaccgtagtaagcctttaaaactgcataacttgagtgcaggagaggagagtggaattcctagtgtagcggtgaaatgcgtagatattaggaggaacaccagtggcgaaggcgactctctggactgtaactgacgctgaggcacgaaagcgtggggagcgaacaggattagataccctggtagtccacgccgtaaacgatgagtgctaggtgtcgggggtcgaacctcggtgccgcagctaacgcattaagcactccgcctggggagtacgatcgcaagattgaaactcaaaggaattgacggggacccgcacaagcagcggagcatgtggtttaattcgaagcaacgcgaagaaccttaccaaaacttgacatcctctgcattactcttaatcgaggaaatcccttcggggacagagagacaggtggtgcatggttgtcgtcagctcgtgtcgtgagatgttgggttaagtcccgcaacgagcgcaacccttgtctttagttgccagcacataatggtgggcactctagagagactgccggggataactcggaggaaggtggggatgacgtcaaatcatcatgccccttatgttttgggctacacacgtgctacaatggctggtacaacgggaagcgaaggagtaatccggagcaaatcttaaaagccagtctcagttcggattgtgggctgaaactcgcccacatgaagctggagttgctagtaatcgtgaatcagaatgtcgcggtgaatgcgttcccgggtcttgtacacaccgcccgtcacaccatggaagttgggggcacccgaagtcggctatctaaccgnaaggaggaagctgccgaaggtgaaatcaatgactgg

SEQ ID NO: 1950 - DNA, 1451 bp, Marinithermus hydrothermalis
ggtgaacgctggcggcgtgcctaagacatgcaagtcgagcggggggtctttggctttttgctgggggctcctagcggcggacgggtgagtaacgcgtaggtgacctacccggaagtgggggacaacccggggaaactcgggctaatcccgcatgtggacgcgtcctgtggggcgtgtctaaaggcgcgagccgcttccggatgggcctgcgtcccatcagctggttggtgaggtaagggctcaccaaggcgacgacgggtagccggtctgagaggatggccggccacaggggcactgagacacgggccccactcctacgggaggcagcagttaggaatcttccgcaatgggcgaaagcctgacggagcgacgccgcttgcgggaggaagcccttcggggtgtaaaccgctgaacccgggacgaaagcccctgtttggggggatgacggtaccggggtaatagcaccggccaactccgtgccagcagccgcggtaatacggagggtgcgagcgttacccggatttactgggcgtaaagggcgcgtaggcggcctcttaagtccggtgtgaaagaccacggctcaaccgtgggggcgcgccggatactggggggcttgacggccggagggggcagcggaattcccggagtagcggtgaaatgcgtagataccgggaggaacgccgatagcgaaggcagctgcctggacggtttgtgacgctgaggcgcgaaagcgtggggagcgaacgggattagataccccggtagtccacgccgtaaacgatgcgcgctgggtgtccggcttgggctgggcgccgaagctaacgcgttaagcgcgccgcctggggagtacggccgcaaggctgaaactcaaaggaattgacggggacccgcacaagcggtggagcatgtggtttaattcgaagcaacgcgaagaaccttaccaggccttgacatgcccgggaccctggtgaaagccgggggtgccccgtttggggagccgggacacaggtgctgcatggccgtcgtcagctcgtgtcgtgagatgttgggttaagtcccgcaacgagcgcaacccctgtccccagttgccagcggttgggccgggcactctggggagactgcccgcgaaagcgggaggaaggcggggacgacgtctggtcagcatggcccttacggcctgggcgacacacgtgctacaatggccgggacagcgcgttgcgaccccgcgaggggaagccaatcgctcaaacccggtcccagttcggattggagtctgcaactcgactccatgaaggcggaatcgctagtaatcgcggatcagccatgccgcggtgaatacgttcccgggtcttgtacacaccgcccgtcacgccatgggagtgggctgcacctgaagtcgccgggagcccgttaacgggcaggcgccgagggtggggctcacgactggggcg

SEQ ID NO: 1951 - DNA, 1462 bp, Marinobacter adhaerens
attgaacgctggcggcaggcttaacacatgcaagtcgagcggtaacagggggtgcttgcaccccgctgacgagcggcggacgggtgagtaatgcataggaaactgcccagtagtgggggatagcccggggaaacccggattaataccgcgtacgcccttcgggggaaagcaggggatcttcggaccttgcgctattggatgtgcctatgtcggattagctagttggtggggtaaaggcctaccaaggcgacgatccgtagctggtctgagaggatgatcagccacatcgggactgagacacggcccgaactcctacgggaggcagcagtggggaatattggacaatgggggcaaccctgatccagccatgccgcgtgtgtgaagaaggctttcgggttgtaaagcactttcagtgaggaggaaaactctgcgactaatactcgtagggcttgacgttactcacagaagaagcaccggctaactccgtgccagcagccgcggtaatacggagggtgcaagcgttaatcggaattactgggcgtaaagcgcgcgtaggtggtttgataagcgagatgtgaaagccccgggcttaacctgggaacggcatttcgaactgtcaggctagagtatggtagagggtagtggaatttcctgtgtagcggtgaaatgcgtagatataggaaggaacaccagtggcgaaggcggctacctggaccaatactgacactgaggtgcgaaagcgtggggagcaaacaggattagataccctggtagtccacgccgtaaacgatgtctactagccgttgggactcttgaagtcttagtggcgcagctaacgcactaagtagaccgcctggggagtacggccgcaaggttaaaactcaaatgaattgacgggggcccgcacaagcggtggagcatgtggtttaattcgacgcaacgcgaagaaccttacctggccttgacatgcagagaactttccagagatggattggtgccttcgggaactctgacacaggtgctgcatggccgtcgtcagctcgtgtcgtgagatgttgggttaagtcccgtaacgagcgcaacccctatccctagttgctagcagttcggctgagaactctagggagactgccggtgacaaaccggaggaaggtggggatgacgtcaggtcatcatggcccttacggccagggctacacacgtgctacaatggtgcgcacagagggctgcaaacccgcgagggggagccaatctcacaaaacgcatcgtagtccggatcgcagtctgcaactcgactgcgtgaagtcggaatcgctagtaatcgtgaatcagaatgtcacggtgaatacgttcccgggccttgtacacaccgcccgtcacaccatgggagtggattgcaccagaagtggttagtctaaccttcgggaggacgatcaccacggtgtggttcatgactggggtg

SEQ ID NO: 1952 - DNA, 1462 bp, Marinobacter algicola
attgaacgctggcggcaggcttaacacatgcaagtcgagcggtaacagggggagcttgctccccgctgacgagcggcggacgggtgagtaatgcataggaaactgcccagtagtgggggatagcccggggaaacccggattaataccgcatacgccctttgggggaaagcaggggatcttcggaccttgcgctattggatgtgcctatgtcggattagctagttggtggggtaagagcctaccaaggcgacgatccgtagctggtctgagaggatgatcagccacatcgggactgagacacggcccgaactcctacgggaggcagcagtggggaatattggacaatgggggcaaccctgatccagccatgccgcgtgtgtgaagaaggctttcgggttgtaaagcactttcagtgaggaggaaaaccttacgactaatactcgtgaggcttgacgttactcacagaagaagcaccggctaactccgtgccagcagccgcggtaatacggagggtgcaagcgttaatcggaattactgggcgtaaagcgcgcgtaggtggtttgataagcgagatgtgaaagccccgggctcaacctgggaacggcatttcgaactgtcaggctagagtatggtagaggagtgtggaatttcctgtgtagcggtgaaatgcgtagatataggaaggaacaccagtggcgaaggcggcactctggaccaatactgacactgaggtgcgaaagcgtggggagcaaacaggattagataccctggtagtccacgctgtaaacgatgtctactagccgttgggactcttgaagtcttagtggcgcagctaacgcactaagtagaccgcctggggagtacggccgcaaggttaaaactcaaatgaattgacgggggcccgcacaagcggtggagcatgtggtttaattcgacgcaacgcgaagaaccttacctggccttgacatgcagagaactttccagagatggattggtgccttcgggaactctgacacaggtgctgcatggccgtcgtcagctcgtgtcgtgagatgttgggttaagtcccgtaacgagcgcaacccctatccctagttgctagcagttcggctgagaactctagggagactgccggtgacaaaccggaggaaggtggggatgacgtcaggtcatcatggcccttacggccagggctacacacgtgctacaatggtgcgtacagagggctgcaaacccgcgagggggagctaatctcacaaaacgcatcgtagtccggatcggagtctgcaactcgactccgtgaagtcggaatcgctagtaatcgcgaatcagaatgtcgcggtgaatacgttcccgggccttgtacacaccgcccgtcacaccatgggagtggattgcaccagaagtggttagtctaaccttcgggaggacgatcaccacggtgtggttcatgactggggtg

SEQ ID NO: 1953 - DNA, 1464 bp, Marinobacter antarcticus
attgaacgctggcggcaggcttaacacatgcaagtcgagcggaaacgatggtagcttgctaccaggcgtcgagcggcggacgggtgagtaatgcttaggaatctgcccagtagtgggggatagcccggggaaactcggattaataccgcatacgcccttttggggaaagcaggggatcttcggaccttgcgctattggatgagcctaagtcggattagcttgttggtgaggtaaaggctcaccaaggcaacgatccgtagctggtctgagaggatgatcagccacatcgggactgagacacggcccgaactcctacgggaggcagcagtggggaatattggacaatgggggcaaccctgatccagccatgccgcgtgtgtgaagaaggctttcgggttgtaaagcactttcagtgaggaggaaggctttcagactaatactctggaggattgacgtcactcacagaagaagcaccggctaactccgtgccagcagccgcggtaatacggagggtgcaagcgttaatcggaattactgggcgtaaagcgcgcgtaggtggttgagtaagcgagatgtgaaagccccgggcttaacctgggaacggcacttcgaactgctcggctagagtgtggtagagggtagtggaatttcctgtgtagcggtgaaatgcgtagatataggaaggaacaccagtggcgaaggcggctacctggaccaacactgacactgaggtgcgaaagcgtggggagcaaacaggattagataccctggtagtccacgccgtaaacgatgtcaactagccgttggggatcttgaatccttagtggcgcagctaacgcactaaagttgaccgcctggggagtacggccgcaaggttaaaactcaaatgaattgacgggggcccgcacaagcggtggagcatgtggtttaattcgacgcaacgcgaagaaccttacctggccttgacatgcagagaactttccagagatggattggtgccttcgggaactctgacacaggtgctgcatggccgtcgtcagctcgtgtcgtgagatgttgggttaagtcccgtaacgagcgcaacccctatccctagttgctagcaggtaatgctgagaactctagggagactgccggtgacaaaccggaggaaggtggggatgacgtcaggtcatcatggcccttacggccagggctacacacgtgctacaatggcgcgcacagagggctgcaaacccgcgagggggagctaatctcacaaaacgcgtcgtagtccggatcggagtctgcaactcgactccgtgaagtcggaatcgctagtaatcgtgaatcagaatgtcacggtgaatacgttcccgggccttgtacacaccgcccgtcacaccatgggagtggattgcaccagaagtagttagtctaaccttcgggaggacgattaccacggtgtggttcatgactggggtg

SEQ ID NO: 1954 - DNA, 1458 bp, Marinobacter confluentis
attgaacgctggcggcaggcttaacacatgcaagtcgagcggtagcaggtccttcgggatgctgacgagcggcggacgggtgagtaatgcataggaaactgcccagtagtgggggatagcccggggaaacccggattaataccgcgtacgccctaagggggaaagcaggggatcttcggaccttgcgctattggatgtgcctatgtcggattagctagttggtggggtaagagcctaccaaggcgacgatccgtagctggtctgagaggatgatcagccacatcgggactgagacacggcccgaactcctacgggaggcagcagtggggaatattggacaatgggggcaaccctgatccagccatgccgcgtgtgtgaagaaggctttcgggttgtaaagcactttcagtgaggaggaaaaccgtacgattaatactcgtatggcttgacgttactcacagaagaagcaccggctaactccgtgccagcagccgcggtaatacggagggtgcaagcgttaatcggaattactgggcgtaaagcgcgcgtaggtggtttgataagcgagatgtgaaagccccgggcttaacctgggaacggcatttcgaactgtcaggctagagtatggtagaggagtgtggaatttcctgtgtagcggtgaaatgcgtagatataggaaggaacaccagtggcgaaggcggcactctggaccaatactgacactgaggtgcgaaagcgtggggagcaaacaggattagataccctggtagtccacgctgtaaacgatgtctactagccgttgggactcttgaagtcttagtggcgcagctaacgcactaagtagaccgcctggggagtacggccgcaaggttaaaactcaaatgaattgacgggggcccgcacaagcggtggagcatgtggtttaattcgacgcaacgcgaagaaccttacctggccttgacatgctgagaactttccagagatggattggtgccttcgggagctcagacacaggtgctgcatggccgtcgtcagctcgtgtcgtgagatgttgggttaagtcccgtaacgagcgcaacccctatccctagttgctagcagttcggctgagaactctagggagactgccggtgacaaaccggaggaaggtggggatgacgtcaggtcatcatggcccttacggccagggctacacacgtgctacaatggcgcgcacagagggctgcaaacccgcgagggggagccaatctcacaaaacgcgtcgtagtccggatcggagtctgcaactcgactccgtgaagtcggaatcgctagtaatcgtgaatcagaatgtcacggtgaatacgttcccgggccttgtacacaccgcccgtcacaccatgggagtggattgcaccagaagtggttagtctaaccttcgggaggacgatcaccacggtgtggttcatgactggggtg

SEQ ID NO: 1955 - DNA, 1459 bp, Marinobacter daqiaonensis
attgaacgctggcggcaggcctaacacatgcaagtcgagcggtaacaggtccttcgggatgctgacgagcggcggacgggtgagtaatgcataggaatttgcccagtagtgggggatagcccggggaaacccggattaataccgcatacgccctttgggggaaagcaggggatcttcggaccttgcgctattggatgagcctatgtcggattagctagttggtggggtaaaggcctaccaaggcgacgatccgtagctggtctgagaggatgatcagccacatcgggactgagacacggcccgaactcctacgggaggcagcagtggggaatattggacaatgggggcaaccctgatccagccatgccgcgtgtgtgaagaaggctttcgggttgtaaagcactttcagcgaggaggaaggccttcggcttaatacgccggaggattgacgttactcgcagaagaagcaccggctaactccgtgccagcagccgcggtaatacggagggtgcaagcgttaatcggatttactgggcgtaaagcgcgcgtaggtggtttgataagcgagatgtgaaagccccgggcttaacctgggaacggcatttcgaactgtcaggctagagtgtggtagagggtagtggaatttcctgtgtagcggtgaaatgcgtagatataggaaggaacaccagtggcgaaggcggctacctggaccaacactgacactgaggtgcgaaagcgtggggagcaaacaggattagataccctggtagtccacgccgtaaacgatgtctactagccgttggggctcttgaagctttagtggcgcagttaacgcactaagtagaccgcctggggagtacggccgcaaggttaaaactcaaatgaattgacgggggcccgcacaagcggtggagcatgtggtttaattcgacgcaacgcgaagaaccttacctggccttgacatgttgggaatccctcagagatgagggagtgccttcgggagcccaaacacaggtgctgcatggccgtcgtcagctcgtgtcgtgagatgttgggttaagtcccgtaacgagcgcaacccttatccctagttgccagcacatcatggtgggaactctagggagactgccggtgacaaaccggaggaaggtggggatgacgtcaggtcatcatggcccttacggccagggctacacacgtgctacaatggcgcgcacagagggctgcaaacccgcgagggggagccaatctcacaaaacgcgtcgtagtccggatcgcagtctgcaactcgactgcgtgaagtcggaatcgctagtaatcgtgaatcagaatgtcacggtgaatacgttcccgggccttgtacacaccgcccgtcacaccatgggagtggattgcaccagaagtggttagtctaaccttcgggaggacgatcaccacggtgtggttcatgactggggtg

SEQ ID NO: 1956 - DNA, 1463 bp, Marinobacter excellens
attgaacgctggcggcaggcttaacacatgcaagtcgagcggtaacagatctagcttgctagatgctgacgagcggcggacgggtgagtaatgcttaggaatctgcccagtagtgggggacaacaatcggaaacggttgctaataccgcatacgccctacgggggaaagcaggggatcttcggaccttgcgctattggatgagcctaagtcggattagctagttggtagggtaaaggcctaccaaggcgacgatccgtagctggtctgagaggatgatcagccacatcgggactgagacacggcccgaactcctacgggaggcagcagtggggaatattggacaatgggggcaaccctgatccagccatgccgcgtgtgtgaagaaggctttcgggttgtaaagcactttcagcgaggaggaaggctctaaagttaatacctttagggattgacgttactcgcagaagaagcaccggctaactccgtgccagcagccgcggtaatacggagggtgcaagcgttaatcggaattactgggcgtaaagcgcgcgtaggtggttaggtaagcgagatgtgaaagccccgggcttaacctgggaacggcatttcgaactgtctgactagagtgtggtagagggtagtggaatttcctgtgtagcggtgaaatgcgtagatataggaaggaacaccagtggcgaaggcggctacctggaccaacactgacactgaggtgcgaaagcgtggggagcaaacaggattagataccctggtagtccacgccgtaaacgatgtctactagccgttgggactcttgaagtcttagtggcgcagctaacgcactaagtagaccgcctggggagtacggccgcaaggttaaaactcaaatgaattgacgggggcccgcacaagcggtggagcatgtggtttaattcgacgcaacgcgaagaaccttacctggccttgacatccagagaactttccagagatggattggtgccttcgggaactctgagacaggtgctgcatggccgtcgtcagctcgtgtcgtgagatgttgggttaagtcccgtaacgagcgcaacccctatccctggttgctaacaggtaatgctgagaactccagggagactgccggtgacaaaccggaggaaggtggggatgacgtcaggtcatcatggcccttacggccagggctacacacgtgctacaatggcgcgtacagagggctgccaactcgcgagagtgagccaatcccttaaaacgcgtcgtagtccggatcgcagtctgcaactcgactgcgtgaagtcggaatcgctagtaatcgcgaatcagaatgtcgcggtgaatacgttcccgggccttgtacacaccgcccgtcacaccatgggagtggattgcaccagaagtagttagtctaaccttcgggaggacgattaccacggtgtggttcatgactggggtg

SEQ ID NO: 1957 - DNA, 1462 bp, Marinobacter flavimaris
attgaacgctggcggcaggcttaacacatgcaagtcgagcggtaacagatctagcttgctagatgctgacgagcggcggacgggtgagtaatgcataggaaactgcccagtagtgggggatagcccggggaaacccggattaataccgcgtacgcccttcgggggaaagcaggggatcttcggaccttgcgctattggatgtgcctatgtcggattagctagttggtggggtaaaggcctaccaaggcgacgatccgtagctggtctgagaggatgatcagccacatcgggactgagacacggcccgaactcctacgggaggcagcagtggggaatattggacaatgggggcaaccctgatccagccatgccgcgtgtgtgaagaaggctttcgggttgtaaagcactttcagtgaggaggaaaactctgcgactaatactcgtagggcttgacgttactcacagaagaagcaccggctaactccgtgccagcagccgcggtaatacggagggtgcaagcgttaatcggaattactgggcgtaaagcgcgcgtaggtggtttgataagcgagatgtgaaagccccgggcttaacctgggaacggcatttcgaactgtcaggctagagtatggtagagggtagtggaatttcctgtgtagcggtgaaatgcgtagatataggaaggaacaccagtggcgaaggcggctacctggaccaatactgacactgaggtgcgaaagcgtggggagcaaacaggattagataccctggtagtccacgccgtaaacgatgtctactagccgttgggactcttgaagtcttagtggcgcagctaacgcactaagtagaccgcctggggagtacggccgcaaggttaaaactcaaatgaattgacgggggcccgcacaagcggtggagcatgtggtttaattcgacgcaacgcgaagaaccttacctggccttgacatgcagagaactttccagagatggattggtgccttcgggaactctgacacaggtgctgcatggccgtcgtcagctcgtgtcgtgagatgttgggttaagtcccgtaacgagcgcaacccctatccctagttgctagcagttcggctgagaactctagggagactgccggtgacaaaccggaggaaggtggggatgacgtcaggtcatcatggcccttacggccagggctacacacgtgctacaatggtgcgcacagagggctgcaaacccgcgagggggagccaatctcacaaaacgcatcgtagtccggatcgcagtctgcaactcgactgcgtgaagtcggaatcgctagtaatcgtgaatcagaatgtcacggtgaatacgttcccgggccttgtacacaccgcccgtcacaccatgggagtggattgcaccagaagtggttagtctaaccttcgggaggacgatcaccacggtgtggttcatgactggggtg

SEQ ID NO: 1958 - DNA, 1462 bp, Marinobacter gudaonensis
attgaacgctggcggcaggcttaacacatgcaagtcgagcggtaacagggggagcttgctccctgctgacgagcggcggacgggtgagtaatgcataggaatctgcccagtagtgggggatagcccggggaaacccggattaataccgcatacgccctttgggggaaagcaggggatcttcggaccttgcgctattggatgagcctatgtcggattagctagttggtggggtaaaggcccaccaaggcgacgatccgtagctggtctgagaggatgatcagccacatcgggactgagacacggcccgaactcctacgggaggcagcagtggggaatattggacaatgggggcaaccctgatccagccatgccgcgtgtgtgaagaaggctttcgggttgtaaagcactttcagtgaggaggaaaaccttctggttaatacccaggaggcttgacgttactcacagaagaagcaccggctaactccgtgccagcagccgcggtaatacggagggtgcaagcgttaatcggaattactgggcgtaaagcgcgcgtaggtggtttgataagcgagatgtgaaagccccgggcttaacctgggaacggcatttcgaactgtcaggctagagtgtggtagagggtagtggaatttcctgtgtagcggtgaaatgcgtagatataggaaggaacaccagtggcgaaggcggctacctggaccaacactgacactgaggtgcgaaagcgtggggagcaaacaggattagataccctggtagtccacgccgtaaacgatgtcaactagccgttgggactcttgaagtcttagtggcgcagctaacgcactaagttgaccgcctggggagtacggccgcaaggttaaaactcaaatgaattgacgggggcccgcacaagcggtggagcatgtggtttaattcgacgcaacgcgaagaaccttacctggccttgacatgttgggaactttccagagatggattggtgccttcgggaacccaaacacaggtgctgcatggccgtcgtcagctcgtgtcgtgagatgttgggttaagtcccgtaacgagcgcaacccctatccctagttgctagcagttcggctgagaactctagggagactgccggtgacaaaccggaggaaggtggggatgacgtcaggtcatcatggcccttacggccagggctacacacgtgctacaatggcgcgcacagagggctgcaaacccgcgagggggagccaatctcacaaaacgcgtcgtagtccggatcgcagtctgcaactcgactgcgtgaagtcggaatcgctagtaatcgtgaatcagaatgtcacggtgaatacgttcccgggccttgtacacaccgcccgtcacaccatgggagtggattgcaccagaagtggttagtctaaccttcgggaggacgatcaccacggtgtggttcatgactggggtg

SEQ ID NO: 1959 - DNA, 1458 bp, Marinobacter guineae
attgaacgctggcggcaggcttaacacatgcaagtcgagcggtaacaggtccttcgggatgctgacgagcggcggacgggtgagtaatgcttaggaatctgcctggtagtgggggatagcccggggaaacccggattaataccgcgtacgcccttcgggggaaagcaggggatcttcggaccttgcgctatcagatgagcctaagccggattagctagttggtagggtaaaggcctaccaaggcgacgatccgtagctggtctgagaggatgatcagccacatcgggactgagacacggcccgaactcctacgggaggcagcagtggggaatattggacaatgggggcaaccctgatccagccatgccgcgtgtgtgaagaaggctttcgggttgtaaagcactttcagtgaggaggaaggccttaaggttaatacccttgaggattgacgttactcacagaagaagcaccggctaactccgtgccagcagccgcggtaatacggagggtgcaagcgttaatcggaattactgggcgtaaagcgcgcgtaggtggtttgataagcgagatgtgaaagccccgggcttaacctgggaacggcatttcgaactgtcaggctagagtgtggtagagggtagtggaatttcctgtgtagcggtgaaatgcgtagatataggaaggaacaccagtggcgaaggcggctacctggaccaacactgacactgaggtgcgaaagcgtggggagcaaacaggattagataccctggtagtccacgccgtaaacgatgtcaactagccgttgggactcttgaagtcttagtggcgcagctaacgcactaagttgaccgcctggggagtacggccgcaaggttaaaactcaaatgaattgacgggggcccgcacaagcggtggagcatgtggtttaattcgacgcaacgcgaagaaccttacctggccttgacatgcagagaactttccagagatggattggtgccttcgggaactctgacacaggtgctgcatggccgtcgtcagctcgtgtcgtgagatgttgggttaagtcccgtaacgagcgcaacccctatccctagttgctagcagttcggctgagaactctagggagactgccggtgacaaaccggaggaaggtggggatgacgtcaggtcatcatggcccttacggccagggctacacacgtgctacaatggtgcgcacagagggctgcaaacccgcgagggggagccaatctcacaaaacgcatcgtagtccggatcgcagtctgcaactcgactgcgtgaagtcggaatcgctagtaatcgtgaatcagaatgtcacggtgaatacgttcccgggccttgtacacaccgcccgtcacaccatgggagtggattgcaccagaagtggttagtctaaccttcgggaggacgatcaccacggtgtggttcatgactggggtg

SEQ ID NO: 1960 - DNA, 1458 bp, Marinobacter halophilus
aacgctggcggcaggcttaacacatgcagtcgagcggaaacgatgggagcttgctcccaggcgtcgagcggcggacgggtgagtaatgcttaggaatctgcccagtagtgggggatagcccggggaaacccggattaataccgcatacgccctacgggggaaagcaggggatcttcggaccttgcgctattggatgagcctaagtcggattagctagttggtagggtaaaggcctaccaaggcaacgatccgtagctggtctgagaggatgatcagccacatcgggactgagacacggcccgaactcctacgggaggcagcagtggggaatattggacaatgggggcaaccctgatccagccatgccgcgtgtgtgaagaaggctttcgggttgtaaagcactttcagcgaggaggaaggctttcagactaatactctggaggattgacgttactcgcagaagaagcaccggctaactccgtgccagcagccgcggtaatacggagggtgcaagcgttaatcggaattactgggcgtaaagcgcgcgtaggtggtttgctaagcgagatgtgaaagccccgggcttaacctgggaacggcatttcgaactgtcagactagagtgtggtagagggtagtggaatttcctgtgtagcggtgaaatgcgtagatataggaaggaacaccagtggcgaaggcggctacctggaccaacactgacactgaggtgcgaaagcgtggggagcaaacaggattagataccctggtagtccacgccgtaaacgatgtcaactagccgttgggactcttgaagtcttagtggcgcagctaacgcactaagttgaccgcctggggagtacggccgcaaggttaaaactcaaatgaattgacgggggcccgcacaagcggtggagcatgtggtttaattcgacgcaacgcgaagaaccttacctggccttgacatccagagaactttccagagatggattggtgccttcgggaactctgagacaggtgctgcatggccgtcgtcagctcgtgtcgtgagatgttgggttaagtcccgtaacgagcgcaacccctatccctggttgctaacaggtaatgctgagaactccagggagactgccggtgacaaaccggaggaaggtggggatgacgtcaggtcatcatggcccttacggccagggctacacacgtgctacaatggcgtgtacagagggctgccaactcgcgagagtgagccaatcccttaaaacacgtcgtagtccggatcgcagtctgcaactcgactgcgtgaagtcggaatcgctagtaatcgcgaatcagaatgtcgcggtgaatacgttcccgggccttgtacacaccgcccgtcacaccatgggagtggattgcaccagaagtagttagtctaaccttcgggaggacgattaccacggtgtggttcatgactggggtg

SEQ ID NO: 1961 - DNA, 1463 bp, Marinobacter hydrocarbonoclasticus
attgaacgctggcggcaggcttaacacatgcaagtcgagcggtaacaggggaagcttgcttcccgctgacgagcggcggacgggtgagtaatgcttaggaatctgcccagtagtgggggatagcccggggaaacccggattaataccgcatacgtcctacgggagaaagcaggggatcttcggaccttgcgctattggatgagcctaagtcggattagctagttggtggggtaaaggcctaccaaggcgacgatccgtagctggtctgagaggatgatcagccacatcgggactgagacacggcccgaactcctacgggaggcagcagtggggaatattggacaatgggggcaaccctgatccagccatgccgcgtgtgtgaagaaggctttcgggttgtaaagcactttcagtagggaggaaaaccttatggctaatacccatgaggcttgacgttacctacagaagaagcaccggctaactccgtgccagcagccgcggtaatacggagggtgcaagcgttaatcggaattactgggcgtaaagcgcgcgtaggtggtttggtaagcgagatgtgaaagccccgggcttaacctgggaacggcatttcgaactgtcagactagagtgtggtagagggtagtggaatttcctgtgtagcggtgaaatgcgtagatataggaaggaacaccagtggcgaaggcggctacctggaccaacactgacactgaggtgcgaaagcgtggggagcaaacaggattagataccctggtagtccacgccgtaaacgatgtcaactagccgttgggactcttgaagtcttagtggcgcagctaacgcactaagttgaccgcctggggagtacggccgcaaggttaaaactcaaatgaattgacgggggcccgcacaagcggtggagcatgtggtttaattcgacgcaacgcgaagaaccttacctggccttgacatccagagaactttccagagatggattggtgccttcgggaactctgagacaggtgctgcatggccgtcgtcagctcgtgtcgtgagatgttgggttaagtcccgtaacgagcgcaacccctatccctggttgctagcaggtaatgctgagaactccagggagactgccggtgacaaaccggaggaaggtggggatgacgtcaggtcatcatggcccttacggccagggctacacacgtgctacaatggcgcgtacagagggctgccaactcgcgagagtgagccaatcccttaaaacgcgtcgtagtccggatcggagtctgcaactcgactccgtgaagtcggaatcgctagtaatcgcgaatcagaatgtcgcggtgaatacgttcccgggccttgtacacaccgcccgtcacaccatgggagtggattgcaccagaagtagttagtctaaccttcgggaggacgattaccacggtgtggttcatgactggggtg

SEQ ID NO: 1962 - DNA, 1462 bp, Marinobacter lipolyticus
attgaacgctggcggcaggcttaacacatgcaagtcgagcggtaacagggggagcttgctccccgctgacgagcggcggacgggtgagtaatgcttaggaaactgcccagtagtgggggatagcccggggaaacccggattaataccgcgtacgcccttcgggggaaagcaggggatcttcggaccttgcgctattggatgtgcctaagtcggattagctagttggtggggtaaaggcctaccaaggcgacgatccgtagctggtctgagaggatgatcagccacatcgggactgagacacggcccgaactcctacgggaggcagcagtggggaatattggacaatgggggcaaccctgatccagccatgccgcgtgtgtgaagaaggctttcgggttgtaaagcactttcagtgaggaggaaggctcaaaggttaataccctttgggattgacgttactcacagaagaagcaccggctaactccgtgccagcagccgcggtaatacggagggtgcaagcgttaatcggaattactgggcgtaaagcgcgcgtaggtggtttgataagcgagatgtgaaagccccgggcttaacctgggaacggcatttcgaactgtcaggctagagtgtggtagagggtagtggaatttcctgtgtagcggtgaaatgcgtagatataggaaggaacaccagtggcgaaggcggctacctggaccaacactgacactgaggtgcgaaagcgtggggagcaaacaggattagataccctggtagtccacgccgtaaacgatgtcaactagccgttgggactcttgaagtcttagtggcgcagctaacgcactaagttgaccgcctggggagtacggccgcaaggttaaaactcaaatgaattgacgggggcccgcacaagcggtggagcatgtggtttaattcgacgcaacgcgaagaaccttacctggccttgacatgcagagaactttccagagatggattggtgccttcgggaactctgacacaggtgctgcatggccgtcgtcagctcgtgtcgtgagatgttgggttaagtcccgtaacgagcgcaacccctatccctagttgctagcagttcggctgagaactctagggagactgccggtgacaaaccggaggaaggtggggatgacgtcaggtcatcatggcccttacggccagggctacacacgtgctacaatggtgcgcacagagggctgcaaacccgcgagggggagctaatctcacaaaacgcatcgtagtccggatcggagtctgcaactcgactccgtgaagtcggaatcgctagtaatcgtgaatcagaatgtcacggtgaatacgttcccgggccttgtacacaccgcccgtcacaccatgggagtggattgcaccagaagtggttagtctaaccttcgggaggacgatcaccacggtgtggttcatgactggggtg

SEQ ID NO: 1963 - DNA, 1463 bp, Marinobacter litoralis
attgaacgctggcggcaggcttaacacatgcaagtcgagcggaaacgatgatagcttgctatcaggcgtcgagcggcggacgggtgagtaatgcttaggaatctgcccagtagtgggggacaacagtcggaaacggctgctaataccgcatacgccctacgggggaaagcaggggatcttcggaccttgcgctattggatgagcctaagtcggattagctagttggtgaggtaaaggctcaccaaggccacgatccgtagctggtttgagaggatgatcagccacatcgggactgagacacggcccgaactcctacgggaggcagcagtggggaatattggacaatgggggcaaccctgatccagccatgccgcgtgtgtgaagaaggctttcgggttgtaaagcactttcagcgaggaggaaggctctaaagctaatacctttagggattgacgttactcgcagaagaagcaccggctaactccgtgccagcagccgcggtaatacggagggtgcaagcgttaatcggaattactgggcgtaaagcgcgcgtaggtggttgagtaagcgagatgtgaaagccccgggcttaacctgggaacggcatttcgaactgctcggctagagtgtggtagagggtagtggaatttcctgtgtagcggtgaaatgcgtagatataggaaggaacaccagtggcgaaggcggctacctggaccaacactgacactgaggtgcgaaagcgtggggagcaaacaggattagataccctggtagtccacgccgtaaacgatgtcaactagccgttggggatcttgaatccttagtggcgcagctaacgcactaagttgaccgcctggggagtacggccgcaaggttaaaactcaaatgaattgacgggggcccgcacaagcggtggagcatgtggtttaattcgacgcaacgcgaagaaccttacctggccttgacatgcagagaactttccagagatggattggtgccttcgggaactctgacacaggtgctgcatggccgtcgtcagctcgtgtcgtgagatgttgggttaagtcccgtaacgagcgcaacccctatccttggttgctagcaggtaatgctgagaactccagggagactgccggtgacaaaccggaggaaggtggggatgacgtcaggtcatcatggcccttacggccagggctacacacgtgctacaatggcgtatacagagggctgccaactcgcgagagtgagccaatcccttaaagtgcgtcgtagtccggatcgcagtctgcaactcgactgcgtgaagtcggaatcgctagtaatcgcgaatcagaatgtcgcggtgaatacgttcccgggccttgtacacaccgcccgtcacaccatgggagtggattgcaccagaagtggttagtctaaccttcgggaggacgatcaccacggtgtggttcatgactggggtg

SEQ ID NO: 1964 - DNA, 1462 bp, Marinobacter lutaoensis
attgaacgctggcggcaggcttaacacatgcaagtcgagcggtaacagggggagcttgctccctgctgacgagcggcggacgggtgagtaatgcataggaatctgcccagtagtgggggatagcccggggaaacccggattaataccgcatacgccctacgggggaaagcaggggatcttcggaccttgcgctattggatgagcctatgtcggattagctagttggtggggtaaaggcctaccaaggcgacgatccgtagctggtctgagaggatgatcagccacatcgggactgagacacggcccgaactcctacgggaggcagcagtggggaatattggacaatgggcgcaagcctgatccagccatgccgcgtgtgtgaagaaggccttcgggttgtaaagcactttcagtagggaggaaaacctgatggttaatacccattgggcttgacgttacctacagaagaagcaccggctaactccgtgccagcagccgcggtaatacggagggtgcgagcgttaatcggaattactgggcgtaaagcgcgcgtaggcggtttggtaagcgagatgtgaaatccccgggcttaacctgggaactgcatttcgaactgccaggctagagtatggtagagggtagtggaatttcctgtgtagcggtgaaatgcgtagatataggaaggaacaccagtggcgaaggcggctacctggaccaatactgacgctgaggtgcgaaagcgtggggagcaaacaggattagataccctggtagtccacgccgtaaacgatgtcaactagccgttgggactcttgaagtcttagtggcgcagctaacgcactaagttgaccgcctggggagtacggccgcaaggttaaaactcaaatgaattgacgggggcccgcacaagcggtggagcatgtggtttaattcgacgcaacgcgaagaaccttacctggccttgacatccagcgaactttccagagatggattggtgccttcgggaacgctgagacaggtgctgcatggccgtcgtcagctcgtgtcgtgagatgttgggttaagtcccgtaacgagcgcaacccctatccctagttgccagcgattcggtcgggaactctagggagactgccggtgacaaaccggaggaaggtggggatgacgtcaggtcatcatggcccttacggccagggctacacacgtgctacaatggcgcgcacagagggttgcgaacccgcgagggggagctaatctcagaaaacgcgtcgtagtccggatcgcagtctgcaactcgactgcgtgaagtcggaatcgctagtaatcgcgaatcagaatgtcgcggtgaatacgttcccgggccttgtacacaccgcccgtcacaccatgggagtggattgcaccagaagtagttagtctaaccttcggggggacgattaccacggtgtggttcatgactggggtg

SEQ ID NO: 1965 - DNA, 1429 bp, Marinobacter mobilis
gtcgagcggtaacaggggtagcttgctacccgctgacgagcggcggacgggtgagtaatgcttaggaatctgcctagtagagggggatagcccggggaaacccggattaataccgcatacgccctacgggggaaagcaggggatcttcggaccttgcgctattagatgagcctaagtcggattagctagttggtggggtaaaggcctaccaaggcgacgatccgtagctggtctgagaggatgatcagccacatcgggactgagacacggcccgaactcctacgggaggcagcagtggggaatattggacaatgggggaaaccctgatccagccatgccgcgtgtgtgaagaaggctttcgggttgtaaagcactttcagtgaggaggaaggccttgtcgctaatatcggcaaggattgacgttactcacagaagaagcaccggctaactccgtgccagcagccgcggtaatacggagggtgcaagcgttaatcggaattactgggcgtaaagcgcgcgtaggtggtttgttaagcgagatgtgaaagccccgggcttaacctgggaacggcatttcgaactggcagactagagtgtggtagagggtagtggaatttcctgtgtagcggtgaaatgcgtagatataggaaggaacaccagtggcgaaggcggctacctggaccaacactgacactgaggtgcgaaagcgtggggagcaaacaggattagataccctggtagtccacgccgtaaacgatgtctactagccgttgggactcttgaagtcttagtggcgcagctaacgcactaagtagaccgcctggggagtacggccgcaaggttaaaactcaaatgaattgacgggggcccgcacaagcggtggagcatgtggtttaattcgacgcaacgcgaagaaccttacctggccttgacatcctgcgaactttctagagatagattggtgccttcgggaacgcagtgacaggtgctgcatggccgtcgtcagctcgtgtcgtgagatgttgggttaagtcccgtaacgagcgcaacccctatccctagttgctagcagttcggctgagaactctagggagactgccggtgacaaaccggaggaaggtggggatgacgtcaggtcatcatggcccttacggccagggctacacacgtgctacaatggcgcgcacagagggcagcaaacccgcgagggggagccaatctcacaaaacgcgtcgtagtccggatcgcagtctgcaactcgactgcgtgaagtcggaatcgctagtaatcgcgaatcagaatgtcgcggtgaatacgttcccgggccttgtacacaccgcccgtcacaccatgggagtggattgcaccagaagtagttagtctaaccttcgggaggacgattaccacggtgtggttcatgactggggtg

SEQ ID NO: 1966 - DNA, 1463 bp, Marinobacter nanhaiticus
attgaacgctggcggcaggcttaacacatgcaagtcgagcggtaacagggggagcttgctccccgctgacgagcggcggacgggtgagtaatgcataggaaactgcccagtagtgggggatagcccggggaaacccggattaataccgcatacgtccttcgggagaaagcaggggctcttcggaccttgcgctattggatgtgcctatgtcggattagctagttggtggggtaagagcctaccaaggcgacgatccgtagctggtctgagaggatgatcagccacatcgggactgagacacggcccgaactcctacgggaggcagcagtggggaatattggacaatgggggcaaccctgatccagccatgccgcgtgtgtgaagaaggctttcgggttgtaaagcactttcagtgaggaggaaaagtgggtccctaatacgggctcgccttgacgttactcacagaagaagcaccggctaactccgtgccagcagccgcggtaatacggagggtgcaagcgttaatcggaattactgggcgtaaagcgcgcgtaggtggtttgataagcgagatgtgaaagccccgggcttaacctgggaacggcatttcgaactgtcaggctagagtatggtagagggtagtggaatttcctgtgtagcggtgaaatgcgtagatataggaaggaacaccagtggcgaaggcggctacctggaccaatactgacactgaggtgcgaaagcgtggggagcaaacaggattagataccctggtagtccacgccgtaaacgatgtcgactagccgttgggactcttgaagtcttagtggcgcagttaacgcactaagtcgaccgcctggggagtacggccgcaaggttaaaactcaaatgaattgacgggggcccgcacaagcggtggagcatgtggtttaattcgacgcaacgcgaagaaccttacctggccttgacatgttgggaaccttccagagatggaagggtgccttcgggaacccaaacacaggtgctgcatggccgtcgtcagctcgtgtcgtgagatgttgggttaagtcccgtaacgagcgcaacccctatccctagttgccagcacatgatggtgggaactctagggagactgccggtgacaaaccggaggaaggtggggatgacgtcaggtcatcatggcccttacggccagggctacacacgtgctacaatggcgcgcacagagggctgcgaacccgcgagggcaagctaatctcttaaaacgcgtcgtagtccggatcgcagtctgcaactcgactgcgtgaagtcggaatcgctagtaatcgcgaatcagaatgtcgcggtgaatacgttcccgggccttgtacacaccgcccgtcacaccatgggagtggattgcaccagaagtggttagtctaaccttcgggaggacgatcaccacggtgtggttcatgactggggtg

SEQ ID NO: 1967 - DNA, 1462 bp, Marinobacter nitratireducens
attgaacgctggcggcaggcttaacacatgcaagtcgagcggaaacgatgggtgcttgcacccaggcgtcgagcggcggacgggtgagtaatgcttaggaatctgcctagtagtgggggatagcccggggaaacccggattaataccgcatacgtcctacgggagaaagcaggggatcttcggaccttgcgctattagatgagcctaagtcggattagctagttggtgaggtaaaggcttaccaaggcgacgatccgtagctggtctgagaggatgatcagccacatcgggactgagacacggcccgaactcctacgggaggcagcagtggggaatattggacaatgggggcaaccctgatccagccatgccgcgtgtgtgaagaaggctttcgggttgtaaagcactttcagtaaggaggaaaaccttaaggttaatacccttgaggcttgacgttacttacagaagaagcaccggctaactccgtgccagcagccgcggtaatacggagggtgcaagcgttaatcggaattactgggcgtaaagcgcgcgtaggtggtttgttaagcgagatgtgaaagccccgggcttaacctgggaacggcatttcgaactggcaggctagagtgtggtagagggtagtggaatttcctgtgtagcggtgaaatgcgtagatataggaaggaacaccagtggcgaaggcggctacctggaccaacactgacactgaggtgcgaaagcgtggggagcaaacaggattagataccctggtagtccacgccgtaaacgatgtctactagccgttgggactcttgaagtcttagtggcgcagctaacgcactaagtagaccgcctggggagtacggccgcaaggttaaaactcaaatgaattgacgggggcccgcacaagcggtggagcatgtggtttaattcgacgcaacgcgaagaaccttacctggccttgacatcctgcgaactttctagagatagattggtgccttcgggaacgcagtgacaggtgctgcatggccgtcgtcagctcgtgtcgtgagatgttgggttaagtcccgtaacgagcgcaacccctatccctagttgctagcagttcggctgagaactctagggagactgccggtgacaaaccggaggaaggtggggatgacgtcaggtcatcatggcccttacggccagggctacacacgtgctacaatggtacgtacagagggctgcaaacccgcgagggggagctaatctcataaaacgtatcgtagtccggatcgcagtctgcaactcgactgcgtgaagtcggaatcgctagtaatcgcaaatcagaatgttgcggtgaatacgttcccgggccttgtacacaccgcccgtcacaccatgggagtggattgcaccagaagtggttagtctaaccttcgggaggacgatcaccacggtgtggttcatgactggggtg

SEQ ID NO: 1968 - DNA, 1436 bp, Marinobacter pelagius
ggcggcaggcttaacacatgcaagtcgagcggtaacagggggagcttgctccctgctgacgagcggcggacgggtgagtaatgcataggaatctgcccagtagttggggatagcccggggaaacccggattaataccgaatacgccctacgggggaaagcaggggatcttcggaccttgcgctattggatgagcctatgtcggattagctagttggtggggtaatggcctaccaaggcgacgatccgtagctggtctgagaggatgatcagccacatcgggactgagacacggcccgaactcctacgggaggcagcagtggggaatattggacaatgggggcaaccctgatccagccatgccgcgtgtgtgaagaaggctttcgggttgtaaagcactttcagtgaggaggaaaaccttatggctaatatccatgaggcttgacgttactcacagaagaagcaccggctaactccgtgccagcagccgcggtaatacggagggtgcaagcgttaatcggaattactgggcgtaaagcgcgcgtaggtggttcgataagcgagatgtgaaagccccgggcttaacctgggaacggcatttcgaactgtcgggctagagtgtggtagagggtagtggaatttcctgtgtagcggtgaaatgcgtagatataggaaggaacaccagtggcgaaggcggctacctggaccaatactgacactgaggtgcgaaagcgtggggagcaaacaggattagataccctggtagtccacgccgtaaacgatgtcaactagccgttggggatcttgaatccttagtggcgcagctaacgcactaagttgaccgcctggggagtacggccgcaaggttaaaactcaaatgaattgacgggggcccgcacaagcggtggagcatgtggtttaattcgacgcaacgcgaagaaccttacctggccttgacatcctgcgaactttctagagatagattggtgccttcgggaacgcagtgacaggtgctgcatggccgtcgtcagctcgtgtcgtgagatgttgggttaagtcccgtaacgagcgcaacccctatccctagttgctagcagttcggctgagaactctagggagactgccggtgacaaaccggaggaaggtggggatgacgtcaggtcatcatggcccttacggccagggctacacacgtgctacaatggcgcgcacagagggctgcaaactcgcgagggtaagccaatctcttaaaacgcgtcgtagtccggatcgcagtctgcaactcgactgcgtgaagtcggaatcgctagtaatcgcgaatcagaatgtcgcggtgaatacgttcccgggccttgtacacaccgcccgtcacaccatgggagtggattgcaccagaagtggttagtctaaccttcgggaggacgatcaccacggtgtg

SEQ ID NO: 1969 - DNA, 1463 bp, Marinobacter persicus
attgaacgctggcggcaggcttaacacatgcaagtcgagcggtaacagggggtgcttgcaccccgctgacgagcggcggacgggtgagtaatgcttaggaatctgcccagtagtgggggatagcccggggaaacccggattaataccgcatacgtcctacgggagaaagcaggggatcttcggaccttgcgctattggatgagcctaagtcggattagctagttggtgaggtaaaggctcaccaaggccacgatccgtagctggtttgagaggatgatcagccacatcgggactgagacacggcccgaactcctacgggaggcagcagtggggaatattggacaatgggggcaaccctgatccagccatgccgcgtgtgtgaagaaggctttcgggttgtaaagcactttcagtgaggaggaaaaccttacgactaatactcgtgaggcttgacgttactcacagaagaagcaccggctaactccgtgccagcagccgcggtaatacggagggtgcaagcgttaatcggaattactgggcgtaaagcgcgcgtaggtggttcgataagcgggatgtgaaagccccgggcttaacctgggaacggcattccgaactgtcgggctagagtatggtagagggtagtggaatttcctgtgtagcggtgaaatgcgtagatataggaaggaacaccagtggcgaaggcggctacctggaccaatactgacactgaggtgcgaaagcgtggggagcaaacaggattagataccctggtagtccacgccgtaaacgatgtcaactagccgttgggactcttgaagtcttagtggcgcagctaacgcactaagttgaccgcctggggagtacggccgcaaggttaaaactcaaatgaattgacgggggcccgcacaagcggtggagcatgtggtttaattcgacgcaacgcgaagaaccttacctggccttgacatccagagaactttccagagatggattggtgccttcgggaactctgtgacaggtgctgcatggccgtcgtcagctcgtgtcgtgagatgttgggttaagtcccgtaacgagcgcaacccctatccctggttgctagcaggtaaagctgagaactccagggagactgccggtgacaaaccggaggaaggtggggatgacgtcaggtcatcatggcccttacggccagggctacacacgtgctacaatggtgcgtacagagggctgcaaactcgcgagagtaagccaatcccttaaaacgcatcgtagtccggatcggagtctgcaactcgactccgtgaagtcggaatcgctagtaatcgcgaatcagaatgtcgcggtgaatacgttcccgggccttgtacacaccgcccgtcacaccatgggagtggattgcaccagaagtggttagtctaaccttcgggaggacgatcaccacggtgtggttcatgactggggtg

SEQ ID NO: 1970 - DNA, 1463 bp, Marinobacter psychrophilus
attgaacgctggcggcaggcttaacacatgcaagtcgggcggaaacgatggtagcttgctaccaggcgtcgagcggcggacgggtgagtaatgcttaggaatctgcctagtagtgggggatagcccggggaaactcggattaataccgcatacgccctacgggggaaagcaggggatcttcggaccttgcgctattagatgagcctaagtcggattagcttgttggtggggtaatggcctaccaaggcgacgatccgtagctggtctgagaggatgatcagccacatcgggactgagacacggcccgaactcctacgggaggcagcagtggggaatattggacaatgggcgcaagcctgatccagccatgccgcgtgtgtgaagaaggctttcgggttgtaaagcactttcagcgaggaggaaggccttaagactaatactcttgaggattgacgtcactcgcagaagaagcaccggctaactccgtgccagcagccgcggtaatacggagggtgcaagcgttaatcggaattactgggcgtaaagcgcgcgtaggtggttatgtaagcgagatgtgaaagccccgggctcaacctgggaacggcacttcgaactgcatggctagagtgtggtagagggtagtggaatttcctgtgtagcggtgaaatgcgtagatataggaaggaacaccagtggcgaaggcggctacctggaccaacactgacactgaggtgcgaaagcgtggggagcaaacaggattagataccctggtagtccacgccgtaaacgatgtcaactagccgttggggatcttgaatccttagtggcgcagctaacgcactaagttgaccgcctggggagtacggccgcaaggttaaaactcaaatgaattgacgggggcccgcacaagcggtggagcatgtggtttaattcgacgcaacgcgaagaaccttacctggccttgacatgcagagaactttccagagatggatcggtgccttcgggaactctgacacaggtgctgcatggccgtcgtcagctcgtgtcgtgagatgttgggttaagtcccgtaacgagcgcaacccctatccctagttgctagcaggtaatgctgagaactctagggagactgccggtgacaaaccggaggaaggtggggatgacgtcaggtcatcatggcccttacggccagggctacacacgtgctacaatggcgcgcacagagggctgcaaacccgcgagggggagccaatctcacaaaacgcgtcgtagtccggatcggagtctgcaactcgactccgtgaagtcggaatcgctagtaatcgtgaatcagaatgtcacggtgaatacgttcccgggccttgtacacaccgcccgtcacaccatgggagtggattgcaccagaagtagttagtctaaccttcgggaggacgattaccacggtgtggttcatgactggggtg

SEQ ID NO: 1971 - DNA, 1461 bp, Marinobacter salarius
attgaacgctggcggcaggcttaacacatgcaagtcgagcggtaacagggggagcttgctccccgctgacgagcggcggacgggtgagtaatgcataggaagctgcccagtagtgggggatagcccggggaaacccggattaataccgcatacgcccttcgggggaaagcaggggatcttcggaccttgcgctattggatgtgcctatgtcggattagctagttggtggggtaagagcctaccaaggcgacgatccgtagctggtctgagaggatgatcagccacatcgggactgagacacggcccgaactcctacgggaggcagcagtggggaatattggacaatgggggcaaccctgatccagccatgccgcgtgtgtgaagaaggctttcgggttgtaaagcactttcagtgaggaggaaaaccttaagtttaatacgcttgaggcttgacgttactcacagaagaagcaccggctaactccgtgccagcagccgcggtaatacggagggtgcaagcgttaatcggaattactgggcgtaaagcgcgcgtaggtggtttgataagcgagatgtgaaagccccgggctcaacctgggaacggcatttcgaactgtcaggctagagtatggtagaggagtgtggaatttcctgtgtagcggtgaaatgcgtagatataggaaggaacaccagtggcgaaggcggcactctggaccaatactgacactgaggtgcgaaagcgtggggagcaaacaggattagataccctggtagtccacgctgtaaacgatgtcaactagccgttgggactcttgaagtcttagtggcgcagctaacgcactaagttgaccgcctggggagtacggccgcaaggttaaaactcaaatgaattgacgggggcccgcacaagcggtggagcatgtggtttaattcgacgcaacgcgaagaaccttacctggccttgacatgcagagaactttccagagatggattggtgccttcgggaactctgacacaggtgctgcatggccgtcgtcagctcgtgtcgtgagatgttgggttaagtcccgtaacgagcgcaacccctatcctagttgctagcagttcggctgagaactctagggagactgccggtgacaaaccggaggaaggtggggatgacgtcaggtcatcatggcccttacggccagggctacacacgtgctacaatggtgcgtacagagggctgcaaacccgcgagggggagctaatctcacaaaacgcatcgtagtccggatcggagtctgcaactcgactccgtgaagtcggaatcgctagtaatcgcgaatcagaatgtcgcggtgaatacgttcccgggccttgtacacaccgcccgtcacaccatgggagtggattgcaccagaagtggttagtctaaccttcgggaggacgatcaccacggtgtggttcatgactggggtg

SEQ ID NO: 1972 - DNA, 1462 bp, Marinobacter salinus
attgaacgctggcggcaggcttaacacatgcaagtcgagcggtaacagggggtgcttgcaccccgctgacgagcggcggacgggtgagtaatgcttaggaatctgcccagtagtgggggatagcccggggaaacccggattaataccgcatacgccctacgggggaaagcaggggatcttcggaccttgcgctattggatgagcctaagtcggattagctagttggtggggtaagagcctaccaaggcgacgatccgtagctggtctgagaggatgatcagccacatcgggactgagacacggcccgaactcctacgggaggcagcagtggggaatattggacaatgggggcaaccctgatccagccatgccgcgtgtgtgaagaaggctttcgggttgtaaagcactttcagtgaggaggaaaagttagtcgttaatatcggctagccttgacgttactcacagaagaagcaccggctaactccgtgccagcagccgcggtaatacggagggtgcaagcgttaatcggaattactgggcgtaaagcgcgcgtaggtggtttgataagcgagatgtgaaagccccgggcttaacctgggaacggcatttcgaactgtcaggctagagtgtggtagagggtagtggaatttcctgtgtagcggtgaaatgcgtagatataggaaggaacaccagtggcgaaggcggctacctggaccaacactgacactgaggtgcgaaagcgtggggagcaaacaggattagataccctggtagtccacgccgtaaacgatgtcaactagccgttggggatcttgaatccttagtggcgcagctaacgcactaagttgaccgcctggggagtacggccgcaaggttaaaactcaaatgaattgacgggggcccgcacaagcggtggagcatgtggtttaattcgacgcaacgcgaagaaccttacctggccttgacatgcagagaactttccagagatggattggtgccttcgggaactctgacacaggtgctgcatggccgtcgtcagctcgtgtcgtgagatgttgggttaagtcccgtaacgagcgcaacccctatccctagttgctagcagttcggctgagaactctagggagactgccggtgacaaaccggaggaaggtggggatgacgtcaggtcatcatggcccttacggccagggctacacacgtgctacaatggcgcgcacagagggctgcaaacccgcgagggggagctaatctcacaaaacgcgtcgtagtccggatcggagtctgcaactcgactccgtgaagtcggaatcgctagtaatcgtgaatcagaatgtcacggtgaatacgttcccgggccttgtacacaccgcccgtcacaccatgggagtggattgcaccagaagtagttagtctaaccttcgggaggacgattaccacggtgtggttcatgactggggtg

SEQ ID NO: 1973 - DNA, 1462 bp, Marinobacter santoriniensis
attgaacgctggcggcaggcttaacacatgcaagtcgagcggtaacaggtccagcttgctggatgctgacgagcggcggacgggtgagtaatgcataggaaactgcccaatagtgggggatagcccggggaaacccggattaataccgcatacgtcctacgggagaaagcaggggctcttcggaccttgcgctattggatgtgcctatgtcggattagctagttggtggggtaaaggcctaccaaggcgacgatccgtagctggtctgagaggatgatcagccacatcgggactgagacacggcccgaactcctacgggaggcagcagtggggaatattggacaatgggggcaaccctgatccagccatgccgcgtgtgtgaagaaggctttcgggttgtaaagcactttcagtgaggaggaaaaccttatggttaatacccatgaggcttgacgttactcacagaagaagcaccggctaactccgtgccagcagccgcggtaatacggagggtgcaagcgttaatcggaattactgggcgtaaagcgcgcgtaggtggttaggtaagcgagatgtgaaagccccgggcttaacctgggaacggcatttcgaactgtctgactagagtatggtagagggtagtggaatttcctgtgtagcggtgaaatgcgtagatataggaaggaacaccagtggcgaaggcggctacctggaccaatactgacactgaggtgcgaaagcgtggggagcaaacaggattagataccctggtagtccacgccgtaaacgatgtcaactagccgttgggactcttgaagtcttagtggcgcagctaacgcactaagttgaccgcctggggagtacggccgcaaggttaaaactcaaatgaattgacgggggcccgcacaagcggtggagcatgtggtttaattcgacgcaacgcgaagaaccttacctggccttgacatcctgcgaactttctagagatagattggtgccttcgggaacgcagtgacaggtgctgcatggccgtcgtcagctcgtgtcgtgagatgttgggttaagtcccgtaacgagcgcaacccctatccctagttgctagcagttcggctgagaactctagggagactgccggtgacaaaccggaggaaggtggggatgacgtcaggtcatcatggcccttacggccagggctacacacgtgctacaatggcgcgcacagagggctgcaaactcgcgagagtaagccaatctcttaaaacgcgtcgtagtccggatcgcagtctgcaactcgactgcgtgaagtcggaatcgctagtaatcgcgaatcagaatgtcgcggtgaatacgttcccgggccttgtacacaccgcccgtcacaccatgggagtggattgcaccagaagtggttagtctaaccttcgggaggacgatcaccacggtgtggttcatgactggggtg

SEQ ID NO: 1974 - DNA, 1387 bp, Marinobacter segnicrescens
agcggtaacagggggtgcttgcaccccgctgacgagcggcggacgggtgagtaatgcataggaatctgcccagtagtgggggatagcccggggaaacccggattaataccgcatacgccctacgggggaaagcaggggatcttcggaccttgcgctattggatgagcctatgtcggattagcttgttggtggggtaatggctcaccaaggcgacgatccgtagctggtctgagaggatgatcagccacatcgggactgagacacggcccgaactcctacgggaggcagcagtggggaatattggacaatgggggcaaccctgatccagccatgccgcgtgtgtgaagaaggctttcgggttgtaaagcactttcagtgaggaggaaaaccttatggctaatacccatgaggcttgacgttactcacagaagaagcaccggctaactccgtgccagcagccgcggtaatacggagggtgcaagcgttaatcggaattactgggcgtaaagcgcgcgtaggtggtttgataagcgagatgtgaaagccccgggcttaacctgggaacggcatttcgaactgtcaggctagagtgtggtagagggtagtggaatttcctgtgtagcggtgaaatgcgtagatataggaaggaacaccagtggcgaaggcggctacctggaccaacactgacactgaggtgcgaaagcgtggggagcaaacaggattagataccctggtagtccacgccgtaaacgatgtctactagccgttgggactcttgaagtcttagtggcgcagttaacgcactaagtagaccgcctggggagtacggccgcaaggttaaaactcaaatgaattgacgggggcccgcacaagcggtggagcatgtggtttaattcgacgcaacgcgaagaaccttacctggccttgacatgttgggaactttccagagatggattggtgccttcgggaacccaaacacaggtgctgcatggccgtcgtcagctcgtgtcgtgagatgttgggttaagtcccgtaacgagcgcaacccttatccctagttgccagcacatcatggtgggaactctagggagactgccggtgacaaaccggaggaaggtggggatgacgtcaggtcatcatggcccttacggccagggctacacacgtgctacaatggcgcgcacagagggctgcaaacccgcgagggggagccaatctcacaaaacgcgtcgtagtccggatcgcagtctgcaactcgactgcgtgaagtcggaatcgctagtaatcgtgaatcagaatgtcacggtgaatacgttcccgggccttgtacacaccgcccgtcacaccatgggagtggattgcaccagaagtggttagtctaaccttc

SEQ ID NO: 1975 - DNA, 1463 bp, Marinobacter shengliensis
attgaacgctggcggcaggcttaacacatgcaagtcgagcggtaacagggggtgcttgcaccccgctgacgagcggcggacgggtgagtaatgcttaggaatctgcccagtagtgggggatagcccggggaaacccggattaataccgcatacgtcctacgggagaaagcaggggatcttcggaccttgcgctactggatgagcctaagtcggattagctagttggtggggtaaaggcctaccaaggcgacgatccgtagctggtctgagaggatgatcagccacatcgggactgagacacggcccgaactcctacgggaggcagcagtggggaatattggacaatgggggcaaccctgatccagccatgccgcgtgtgtgaagaaggctttcgggttgtaaagcactttcagcgaggaggaaggctctgaagttaataccttcagggattgacgttactcgcagaagaagcaccggctaactccgtgccagcagccgcggtaatacggagggtgcaagcgttaatcggaattactgggcgtaaagcgcgcgtaggtggttaggtaagcgagatgtgaaagccccgggcgtaacctgggaacggcatttcgaactgtctgactagagtgtggtagagggtagtggaatttcctgtgtagcggtgaaatgcgtagatataggaaggaacaccagtggcgaaggcggctacctggaccaacactgacactgaggtgcgaaagcgtggggagcaaacaggattagataccctggtagtccacgccgtaaacgatgtcaactagccgttgggactcttgaagtcttagtggcgcagctaacgcactaagttgaccgcctggggagtacggccgcaaggttaaaactcaaatgaattgacgggggcccgcacaagcggtggagcatgtggtttaattcgacgcaacgcgaagaaccttacctggccttgacatccagagaactttccagagatggactggtgccttcgggaactctgagacaggtgctgcatggccgtcgtcagctcgtgtcgtgagatgtcgggttaagtcccgtaacgagcgcaacccctatccctggttgctagcaggtaatgctgagaactccagggagactgccggtgacaaaccggaggaaggtggggatgacgtcaggtcatcatggcccttacggccagggctacacacgtgctacaatggcgcgtacagagggctgccaactcgcgagagtgcgccaatcccttaaaacgcgtcgtagtccggatcggagtctgcaactcgactccgtgaagtcggaatcgctagtaatcgcgagtcagaatgtcgcggtgaatacgttcccgggccttgtacacaccgcccgtcacaccatgggagtggattgcaccagaagtagttagtctaaccttcgggaggacgattaccacggtgtggttcatgactggggtg

SEQ ID NO: 1976 - DNA, 1463 bp, Marinobacter vinifirmus
attgaacgctggcggcaggcttaacacatgcaagtcgagcggtaacagggggtgcttgcaccccgctgacgagcggcggacgggtgagtaatgcttaggaatctgcccagtagtgggggacaacagtcggaaacggctgctaataccgcatacgccctacgggggaaagcaggggatcttcggaccttgcgctattggatgagcctaagtcggattagctagttggtggggtaaaggcctaccaaggcgacgatccgtagctggtctgagaggatgatcagccacatcgggactgagacacggcccgaactcctacgggaggcagcagtggggaatattggacaatgggggcaaccctgatccagccatgccgcgtgtgtgaagaaggctttcgggttgtaaagcactttcagcgaggaggaaggccttaaagttaatacctttaaggattgacgttactcgcagaagaagcaccggctaactccgtgccagcagccgcggtaatacggagggtgcaagcgttaatcggaattactgggcgtaaagcgcgcgtaggtggtttggtaagcgagatgtgaaagccccgggcttaacctgggaacggcatttcgaactgtcagactagagtgtggtagagggtagtggaatttcctgtgtagcggtgaaatgcgtagatataggaaggaacaccagtggcgaaggcggctacctggaccaacactgacactgaggtgcgaaagcgtggggagcaaacaggattagataccctggtagtccacgccgtaaacgatgtcaactagccgttgggactcttgaagtcttagtggcgcagctaacgcactaagttgaccgcctggggagtacggccgcaaggttaaaactcaaatgaattgacgggggcccgcacaagcggtggagcatgtggtttaattcgacgcaacgcgaagaaccttacctggccttgacatccagagaactttccagagatggattggcgccttcgggaactctgagacaggtgctgcatggccgtcgtcagctcgtgtcgtgagatgttgggttaagtcccgtaacgagcgcaacccctatccttggttgctagcaggtaaagctgagaactccagggagactgccggtgacaaaccggaggaaggtggggatgacgtcaggtcatcatggcccttacggccagggctacacacgtgctacaatggcgcgtacagagggctgccaactcgcgagagtgagccaatcccttaaaacgcgtcgtagtccggatcggagtctgcaactcgactccgtgaagtcggaatcgctagtaatcgcgaatcagaatgtcgcggtgaatacgttcccgggccttgtacacaccgcccgtcacaccatgggagtggattgcaccagaagtagttagtctaaccttcgggaggacgattaccacggtgtggttcatgactggggtg

SEQ ID NO: 1977 - DNA, 1462 bp, Marinobacter zhejiangensis
attgaacgctggcggcaggcttaacacatgcaagtcgagcggtaacaggggtagcttgctacccgctgacgagcggcggacgggtgagtaatgcttaggaatctgcccagtagtgggggacaacaatcggaaacggttgctaataccgcatacgccctaagggggaaagcaggggatcttcggaccttgcgctattggatgagcctaagtcggattagctagttggtggggtaatggcccaccaaggcgacgatccgtagctggtctgagaggatgatcagccacatcgggactgagacacggcccgaactcctacgggaggcagcagtggggaatattggacaatgggggcaaccctgatccagccatgccgcgtgtgtgaagaaggctttcgggttgtaaagcactttcagtgaggaggaaggccaagtcgctaatatcggcttggattgacgttactcacagaagaagcaccggctaactccgtgccagcagccgcggtaatacggagggtgcaagcgttaatcggaattactgggcgtaaagcgcgcgtaggtggtttgttaagcgagatgtgaaagccccgggcttaacctgggaacggcatttcgaactggcaggctagagtgtggtagagggtagtggaatttcctgtgtagcggtgaaatgcgtagatataggaaggaacaccagtggcgaaggcggctacctggaccaacactgacactgaggtgcgaaagcgtggggagcaaacaggattagataccctggtagtccacgccgtaaacgatgtctactagccgttgggactcttgaagtcttagtggcgcagctaacgcactaagtagaccgcctggggagtacggccgcaaggttaaaactcaaatgaattgacgggggcccgcacaagcggtggagcatgtggtttaattcgacgcaacgcgaagaaccttacctggccttgacatcctgcgaactttctagagatagattggtgccttcgggaacgcagtgacaggtgctgcatggccgtcgtcagctcgtgtcgtgagatgttgggttaagtcccgtaacgagcgcaacccctatccctagttgctagcagttcggctgagaactctagggagactgccggtgacaaaccggaggaaggtggggatgacgtcaggtcatcatggcccttacggccagggctacacacgtgctacaatggcgcgcacagagggctgcaaacccgcgagggggagctaatctcacaaaacgcgtcgtagtccggattggagtctgcaactcgactccatgaagtcggaatcgctagtaatcgcgaatcagaatgtcgcggtgaatacgttcccgggccttgtacacaccgcccgtcacaccatgggagtggattgcaccagaagtagttagtctaaccttcgggaggacgattaccacggtgtggttcatgactggggtg

SEQ ID NO: 1978 - DNA, 1495 bp, Marinococcus halophilus
  misc_feature (167)..(167): n is a, c, g, or t
  misc_feature (211)..(211): n is a, c, g, or t
  misc_feature (1454)..(1454): n is a, c, g, or t
  misc_feature (1456)..(1456): n is a, c, g, or t
gacgaacgctggcggcgtgcctaatacatgcaagtcgagcgcgggaagccggcggactccttcgggaggaaaccggtggaacgagcggcggacgggtgagtaacacgtgggcaacctgccggactgatgggaataaccccgggaaaccggggctaatgcccaatacnccctgacctcgcctgaggtcagcggcaaagcagggatcttcggntccttgcgcagtccgatgggcccgcggcgcattagctagttggagaggtaagggctccccaaggcgacgatgcgtagccgacctgagagggtgatcggccacactgggactgagacacggcccagactcctacgggaggcagcagtagggaatcatccgcaatgggcgaaagcctgacggtgcaacgccgcgtgagtgatgaaggttttcggatcgtaaagctctgttgacagggaagaacccacgccagtcgaacaggctggcgtgctgacggtacctgtccagaaagccccggctaactacgtgccagcagccgcggtaatacgtagggggcaagcgttgtccggaattattgggcgtaaagggcacgcaggcggtttcgtcagtccgatgtgacaggccacggctcaaccgtggaaggccattggaaactgcgaaacttgaggacagaagaggagagtggaattccacgtgtagcggtgaaatgcgtagatatgtggaggaacaccagtggcgaaggcgactctctggtctgtacctgacgctgaggtgcgaaagcatggggagcaaacaggattagataccctggtagtccatgccgtaaacgctgagtgctaggtgttaggggtttcgatacccgtagtgccgaagctaacgcattaagcactccgcctggggagtacgaccgcaaggttgaaactcaaaggaattgacgggggcccgcacaagcggtggagcatgtggtttaattcgacgcaacgcgaagaaccttaccagatcttgacatcttccgctacgcctcgagagaggcggttccccttcgggggacggaatgacaggtggtgcatggttgtcgtcagctcgtgtcgtgagatgttgggttaagtcccgcaacgagcgcaacccctaatcttagttgccagcattcagttgggcactctaaggtgactgccggtgacaaaccggaggaaggtggggatgacgtcaaatcatcatgccccttatgatctgggctacacacgtgctacaatggatggtacaacgggaagcgaacccgcgagggggagccaatccagaaaagccattctcagttcggattgcaggctgcaactcgcctgcatgaagccggaatcgctagtaatcgcggatcagcatgccgcggtgaatacgttcccgggccttgtacacaccgcccgtcacaccacgagagtttgcaacacccgaagtcggtgagggaaccctncngggacccagccgccgaaggtggggcagatgattggggtg

SEQ ID NO: 1979 - DNA, 1495 bp, Marinococcus luteus
gacgaacgctggcggcgtgcctaatacatgcaagtcgagcgcgggaagccggcggactccttcgggaggaaaccggtggaacgagcggcggacgggtgagtaacacgtgggcaacctgccggactgatgggaataaccccgggaaaccggggctaatgcccaatacgccctgacctcgcctgaggtcagcggtaaagcagggatcttcggatccttgcacagtccgatgggcccgcggcgcattagctagttggagaggtaagggctccccaaggcgacgatgcgtagccgacctgagagggtgatcggccacactgggactgagacacggcccagactcctacgggaggcagcagtagggaatcatccgcaatgggcgaaagcctgacggtgcaacgccgcgtgagtgatgaaggttttcggatcgtaaagctctgttgacagggaagaacccacgccagtcgaacaggctggcgtgctgacggtacctgtccagaaagccccggctaactacgtgccagcagccgcggtaatacgtagggggcaagcgttgtccggaattattgggcgtaaagggcacgcaggcggtttcgtcagtccgatgtgacaggccacggctcaaccgtggaaggccattggaaactgcgaaacttgaggacagaagaggagagtggaattccacgtgtagcggtgaaatgcgtagatatgtggaggaacaccagtggcgaaggcgactctctggtctgtacctgacgctgaggtgcgaaagcatggggagcaaacaggattagataccctggtagtccatgccgtaaacgctgagtgctaggtgttaggggtttcgatacccgtagtgccgaagctaacgcattaagcactccgcctggggagtacgaccgcaaggttgaaactcaaaggaattgacgggggcccgcacaagcggtggagcatgtggtttaattcgacgcaacgcgaagaaccttaccagatcttgacatcttccgctacgcctcgagagaggcggttccccttcgggggacggaatgacaggtggtgcatggttgtcgtcagctcgtgtcgtgagatgttgggttaagtcccgcaacgagcgcaacccctaatcttagttgccagcattcagttgggcactctaaggtgactgccggtgacaaaccggaggaaggtggggatgacgtcaaatcatcatgccccttatgatctgggctacacacgtgctacaatggatggtacaacgggacgcgaacccgcgagggggagccaatccagaaaagccattctcagttcggattgcaggctgcaactcgcctgcatgaagccggaatcgctagtaatcgcggatcagcatgccgcggtgaatacgttcccgggccttgtacacaccgcccgtcacaccacgagagtttgcaacacccgaagtcggtgagggaacccttctgggacccagccgccgaaggtggggcagatgattggggtg

SEQ ID NO: 1980 - DNA, 1336 bp, Marinomonas alcarazii
  misc_feature (63)..(63): n is a, c, g, or t
  misc_feature (401)..(401): n is a, c, g, or t
acaggggagcttgctcctgctgacgagcggcggacgggtgagtaacgcgtaggaatctgcctngtagagggggacaacatgtggaaacgcatgctaataccgcatacgccctgagggggaaaggaggggacttttcggagccttccgctattagatgagcctgcgtgagattagctagttggtagggtaaaggcctaccaaggcgacgatctctaactggtctgagaggatgaccagtcacactgggactgagacacggcccagactcctacgggaggcagcagtggggaatattggacaatgggcggaagcctgatccagccatgccgcgtgtgtgaagaaggccttagggttgtaaagcactttcaggagtgaggaagggcgtttggttaatacccaancgttttgacgttagctccagaagaagcaccggctaactctgtgccagcagccgcggtaatacagagggtgcaagcgttaatcggaattactgggcgtaaagcgcgcgtaggtggtttgttaagtcggatgtgaaatcccagggctcaaccttggaatggcacccgatactggcaggctagagtacggtagaggggtgtggaatttcctgtgtagcggtgaaatgcgtagatataggaaggaacatcagtggcgaaggcgacaccctggactgatactgacactgaggtgcgaaagcgtggggagcaaacaggattagataccctggtagtccacgccgtaaacgatgtctactagccgttgggttgtaatgacttagtggcgcagctaacgcaataagtagaccgcctggggagtacggccgcaaggttaaaactcaaatgaattgacgggggcccgcacaagcggtggagcatgtggtttaattcgaagcaacgcgaagaaccttacctactcttgacatccagtgaacttagcagagatgctttggtgccttcgggaacactgagacaggtgctgcatggctgtcgtcagctcgtgttgtgaaatgttgggttaagtcccgtaacgagcgcaacccttatccttatttgccagcacttcgggtgggaactttaaggagactgccggtgacaaaccggaggaaggtggggacgacgtcaagtcatcatggcccttacgagtagggctacacacgtgctacaatggcgtatacagagggctgcgaacttgcgagagtaagcgaatcccagaaagtacgtcgtagtccggattggagtctgcaactcgactccatgaagtcggaatcgctagtaatcgtgaatcagaatgtcacggtgaatacgttcccgggccttgtacacaccgcccgtcacac

SEQ ID NO: 1981 - DNA, 1463 bp, Marinomonas aquimarina
attgaacgctggcggcaggcttaacacatgcaagtcgagcggtaacaggaattagcttgctaatttgctgacgagcggcggacgggtgagtaacgcgtaggaatctgcctggtagtgggggacaacatgtggaaacgcatgctaataccgcatacgccctacgggggaaaggaggggatcttcggacctttcgctatcagatgagcctgcgtgagattagctagttggtggggtaaaggctcaccaaggcgacgatctctagctggtctgagaggatgatcagccacactgggactgagacacggcccagactcctacgggaggcagcagtggggaatattggacaatgggcgcaagcctgatccagccatgccgcgtgtgtgaagaaggccttcgggttgtaaagcactttcagaagtgaggaagggtgtgtggctaatatccacatatcttgacgttagcttcagaagaagcaccggctaactctgtgccagcagccgcggtaatacagagggtgcgagcgttaatcggaattactgggcgtaaagcgcgcgtaggcggtttgttaagtcggatgtgaaatcccagggctcaaccttggaattgcacccgatactggcaggctagagtacggtagaggggtgtggaatttcctgtgtagcggtgaaatgcgtagatataggaaggaacatcagtggcgaaggcgacaccctggaccgatactgacgctgaggtgcgaaagcgtggggagcaaacaggattagataccctggtagtccacgccgtaaacgatgtctactagccgttggggatttatttctttagtggcgcagctaacgcgataagtagaccgcctggggagtacggccgcaaggttaaaactcaaatgaattgacgggggcccgcacaagcggtggagcatgtggtttaattcgaagcaacgcgaagaaccttacctactcttgacatccagtgaactttccagagatggattggtgccttcgggaacactgagacaggtgctgcatggctgtcgtcagctcgtgttgtgaaatgttgggttaagtcccgtaacgagcgcaacccttatccttatttgccagcacttcgggtgggaactctaaggagactgccggtgacaaaccggaggaaggtggggacgacgtcaagtcatcatggcccttacgagtagggctacacacgtgctacaatggcgcatacagagggccgcgaacttgcgagagtaagcaaatcccaaaaagtgcgtcgtagtccggattggagtctgcaactcgactccatgaagtcggaatcgctagtaatcgtgaatcagaatgtcacggtgaatacgttcccgggccttgtacacaccgcccgtcacaccatgggagttgattgctccagaagtagctagcttaaccttcgggatggcggttaccacggagtggtcaatgactggggtg

SEQ ID NO: 1982 - DNA, 1393 bp, Marinomonas aquiplantarum
gaaacgatgatagcttgctatcaggcgtcgagcggcggacgggtgagtaacgcgtaggaatctgcctagtagagggggacaacatgtggaaacgcatgctaataccgcatacgcccttttggggaaaggaggggatcttcggaccttccgctattagatgagcctgcgtgagattagctagttggtggggtaaaggcctaccaaggcgacgatctctaactggtctgagaggatgaccagtcacactgggactgagacacggcccagactcctacgggaggcagcagtggggaatattggacaatgggcgcaagcctgatccagccatgccgcgtgtgtgaagaaggccttagggttgtaaagcactttcaggagtgaggaagggtgcgttgctaataccaacgtattttgacgttagctccagaagaagcaccggctaactctgtgccagcagccgcggtaatacagagggtgcaagcgttaatcggaattactgggcgtaaagcgcgcgtaggtggtttgttaagtctgatgtgaaatcccagggctcaaccttggaatggcaccggatactggcaggctagagtacggtagaggggtgtggaatttcctgtgtagcggtgaaatgcgtagatataggaaggaacatcagtggcgaaggcgacaccctggactgatactgacactgaggtgcgaaagcgtggggagcaaacaggattagataccctggtagtccacgccgtaaacgatgtctactagccgttgggttgtaatgacttagtggcgcagctaacgcactaagtagaccgcctggggagtacggccgcaaggttaaaactcaaatgaattgacgggggcccgcacaagcggtggagcatgtggtttaattcgaagcaacgcgaagaaccttacctactcttgacatccagagaacttagcagagatgctttggtgccttcgggaactctgagacaggtgctgcatggctgtcgtcagctcgtgttgtgaaatgttgggttaagtcccgtaacgagcgcaacccttatccttacttgccagcacttcgggtgggaactttaaggagactgccggtgacaaaccggaggaaggtggggacgacgtcaagtcatcatggcccttacgagtagggctacacacgtgctacaatggcgtatacaaagggctgctaacttgcgagagtgtgcaaatcccataaagtacgtcgtagtccggattggagtctgcaactcgactccatgaagtcggaatcgctagtaatcgtggatcagaatgccacggtgaatacgttcccgggccttgtacacaccgcccgtcacaccatgggagttgattgctccagaagtagctagcttaacctttcggggatggcggt

SEQ ID NO: 1983 - DNA, 1349 bp, Marinomonas balearica
  misc_feature (116)..(116): n is a, c, g, or t
acagatctagcttgctagatgctgacgagcggcggacgggtgagtaacgcgtaggaatctgcctggtagtgggggacaacatgtggaaacgcatgctaataccgcatacgcccttntggggaaaggaggggatcttcggaccttccgctatcagatgagcctgcgtgagattagctagttggtggggtaaaggcctaccaaggcgacgatctctagctggtctgagaggatgatcagccacactgggactgagacacggcccagactcctacgggaggcagcagtggggaatattggacaatgggggcaaccctgatccagccatgccgcgtgtgtgaagaaggccttagggttgtaaagcactttcaggagtgaggaaggatgcttgattaatactcaagtatcttgacgttagctccagaagaagcaccggctaactctgtgccagcagccgcggtaatacagagggtgcaagcgttaatcggaattactgggcgtaaagcgcgcgtaggtggtttgttaagtcagatgtgaaagcccagggctcaaccttggaattgcacctgatactggcaggctagagtacggtagagggatgtggaatttcctgtgtagcggtgaaatgcgtagatataggaaggaacatcagtggcgaaggcgacatcctggactgatactgacactgaggtgcgaaagcgtggggagcaaacaggattagataccctggtagtccacgccgtaaacgatgtctactagccgttggtcgattttagattagtggcgcagctaacgcgataagtagaccgcctggggagtacggccgcaaggttaaaactcaaatgaattgacgggggcccgcacaagcggtggagcatgtggtttaattcgaagcaacgcgaagaaccttacctactcttgacatccagagaacttagcagagatgctttggtgccttcgggaactctgagacaggtgctgcatggctgtcgtcagctcgtgttgtgaaatgttgggttaagtcccgtaacgagcgcaacccttatccttatttgccagcacttcgggtgggaactctaaggagactgccggtgacaaaccggaggaaggtggggacgacgtcaagtcatcatggcccttacgagtagggctacacacgtgctacaatggcgcatacagagggcagcgaactagcgatagtaagcaaatcccaaaaagtgcgtcgtagtccggattggagtctgcaactcgactccatgaagtcggaatcgctagtaatcgtggatcagaatgccacggtgaatacgttcccgggccttgtacacaccgcccgtcacaccatgggagttgat

SEQ ID NO: 1984 - DNA, 1461 bp, Marinomonas communis
attgaacgctggcggcaggcttaacacatgcaagtcgagcggtaacatttctagcttgctagaagatgacgagcggcggacgggtgagtaacgcgtaggaatctgcctagtagtgggggacaacatgtggaaacgcatgctaataccgcatacgccctacgggggaaaggaggggatcttcggacctttcgctattagatgagcctgcgtgagattagctagttggtggggtaaaggcctaccaaggcgacgatctctagctggtctgagaggatgatcagccacactgggactgagacacggcccagactcctacgggaggcagcagtggggaatattggacaatgggcgcaagcctgatccagccatgccgcgtgtgtgaagaaggccttagggttgtaaagcactttcaggagtgaggaagggcgtatagttaatacctgtatgttttgacgttaactccagaagaagcaccggctaactctgtgccagcagccgcggtaatacagagggtgcgagcgttaatcggaattactgggcgtaaagcgcgcgtaggcggtttgttaagtcggatgtgaaatcccagggctcaaccttggaatggcacccgatactggcaggctagagtacggtagaggggtgtggaatttcctgtgtagcggtgaaatgcgtagatataggaaggaacatcagtggcgaaggcgacaccctggaccgatactgacgctgaggtgcgaaagcgtggggagcaaacaggattagataccctggtagtccacgccgtaaacgatgtctactagccgttggggatttatttctttagtggcgcagctaacgcgataagtagaccgcctggggagtacggccgcaaggttaaaactcaaatgaattgacgggggcccgcacaagcggtggagcatgtggtttaattcgaagcaacgcgaagaaccttacctactcttgacatccagagaacttttcagagatgaattggtgccttcgggaactctgagacaggtgctgcatggctgtcgtcagctcgtgttgtgaaatgttgggttaagtcccgtaacgagcgcaacccttatccttatttgccagcacttcgggtgggaactctaaggagactgccggtgacaaaccggaggaaggtggggacgacgtcaagtcatcatggcccttacgagtagggctacacacgtgctacaatggcgtatacagagggcagcgaactcgcgagggtaagcaaatcccaaaaagtacgtcgtagtccggattggagtctgcaactcgactccatgaagtcggaatcgctagtaatcgtgaatcagaatgtcacggtgaatacgttcccgggccttgtacacaccgcccgtcacaccatgggagttgattgctccagaagtagctagcttaaccttcgggatggcggttaccacggagtggtcaatgactggggtg

SEQ ID NO: 1985 - DNA, 1415 bp, Marinomonas foliarum
cgctggcggcaggcttaacacatgcaagtcgagcggtaacaggggagcttgctcctgctgacgagcggcggacgggtgagtaacgcgtaggaatctgcctagtagagggggacaacatgtggaaacgcatgctaataccgcatacgccctaagggggaaaggaggggactcttcggagccttccgctattagatgagcctgcgtaagattagctagttggtagggtaaaggcctaccaaggcgacgatctttaactggtctgagaggatgaccagtcacactgggactgagacacggcccagactcctacgggaggcagcagtggggaatattggacaatgggcgaaagcctgatccagccatgccgcgtgtgtgaagaaggccttagggttgtaaagcactttcaggggtgaggaagggtagctagttaatacctagttattttgacgttagccccagaagaagcaccggctaactctgtgccagcagccgcggtaatacagagggtgcaagcgttaatcggaattactgggcgtaaagcgcgcgtaggtggtttgttaagtcggatgtgaaatcccagggctcaaccttggaatggcacccgatactggcaggctagagtacggtagaggggtgtggaatttcctgtgtagcggtgaaatgcgtagatataggaaggaacatcagtggcgaaggcgacaccctggactgatactgacactgaggtgcgaaagcgtggggagcaaacaggattagataccctggtagtccacgccgtaaacgatgtctactagccgttgggttgtaatgacttagtggcgcagctaacgcaataagtagaccgcctggggagtacggccgcaaggttaaaactcaaatgaattgacgggggcccgcacaagcggtggagcatgtggtttaattcgaagcaacgcgaagaaccttacctactcttgacatccagtgaacttagcagagatgctttggtgccttcgggaacactgagacaggtgctgcatggctgtcgtcagctcgtgttgtgaaatgttgggttaagtcccgtaacgagcgcaacccttatccttatttgccagcacttcgggtgggaactttaaggagactgccggtgacaaaccggaggaaggtggggacgacgtcaagtcatcatggcccttacgagtagggctacacacgtgctacaatggcgtatacagagggctgcgaactagcgatagtaagcgaatcccagaaagtacgtcgtagtccggattggagtctgcaactcgactccatgaagtcggaatcgctagtaatcgtgaatcagaatgtcacggtgaatacgttcccgggccttgtacacaccgcccgtcacaccatgggagttgattgctccagaagtagctagcttaaccctt

SEQ ID NO: 1986 - DNA, 1411 bp, Marinomonas fungiae
acacatgcaagtcgagcggtaacaggaattagcttgctcatttgctgacgagcggcggacgggtgagtaacgcgtaggaatctgcctggtagtgggggacaacatgtggaaacgcatgctaataccgcatacgccctacgggggaaaggaggggatcttcggacctttcgctatcagatgagcctgcgtgagattagctagttggtggggtaaaggctcaccaaggcgacgatctctagctggtctgagaggatgatcagccacactgggactgagacacggcccagactcctacgggaggcagcagtggggaatattggacaatgggcgcaagcctgatccagccatgccgcgtgtgtgaagaaggccttcgggttgtaaagcactttcagaagtgaggaagggtgtgtagttaatacctacatatcttgacgttagcttcagaagaagcaccggctaactctgtgccagcagccgcggtaatacagagggtgcgagcgttaatcggaattactgggcgtaaagcgcgcgtaggtggtttgttaagtcggatgtgaaagcccagggctcaaccttggaattgcacccgatactggcaggctagagtacggtagaggggtgtggaatttcctgtgtagcggtgaaatgcgtagatataggaaggaacatcagtggcgaaggcgacaccctggaccgatactgacactgaggtgcgaaagcgtggggagcaaacaggattagataccctggtagtccacgccgtaaacgatgtctactagccgttggggattttattcttagtggcgcagctaacgcgataagtagaccgcctggggagtacggccgcaaggttaaaactcaaatgaattgacgggggcccgcacaagcggtggagcatgtggtttaattcgaagcaacgcgaagaaccttacctactcttgacatccagagaatttagcagagatgctttagtgccttcgggaactctgagacaggtgctgcatggctgtcgtcagctcgtgttgtgaaatgttgggttaagtcccgtaacgagcgcaacccttatccttatttgccagcacttcgggtgggaactctaaggagactgccggtgacaaaccggaggaaggtggggacgacgtcaagtcatcatggcccttacgagtagggctacacacgtgctacaatggcgtatacagagggccgcaagaccgcgaggtggagcaaatcccaaaaagtacgtcgtagtccggattggagtctgcaactcgactccatgaagtcggaatcgctagtaatcgtgaatcagaatgtcacggtgaatacgttcccgggccttgtacacaccgcccgtcacaccatgggagttgattgctccagaagtagctagcttaaccttcgggatggcggt

SEQ ID NO: 1987 - DNA, 1464 bp, Marinomonas gallaica
attgaacgctggcggcaggcttaacacatgcaagtcgagcggtaacaggaattagcttgctaatttgctgacgagcggcggacgggtgagtaacgcgtaggaatctgcctagtagtgggggacaacatgtggaaacgcatgctaataccgcatacgccctacgggggaaaggaggggatcttcggacctttcgctattagatgagcctgcgtaagattagctagttggtggggtaaaggctcaccaaggcgacgatctttagctggtctgagaggatgatcagccacactgggactgagacacggcccagactcctacgggaggcagcagtggggaatattggacaatgggcgcaagcctgatccagccatgccgcgtgtgtgaagaaggccttcgggttgtaaagcactttcagaagtgaggaagggtgattggctaatatccaattatcttgacgttagcttcagaagaagcaccggctaactctgtgccagcagccgcggtaatacagagggtgcgagcgttaatcggaattactgggcgtaaagcgcgcgtaggtggtttgttaagtcggatgtgaaagcccagggctcaaccttggaattgcacccgatactggcaggctagagtacggtagaggggtgtggaatttcctgtgtagcggtgaaatgcgtagatataggaaggaacatcagtggcgaaggcgacaccctggaccgatactgacactgaggtgcgaaagcgtggggagcaaacaggattagataccctggtagtccacgccgtaaacgatgtctactagccgttggggattttatctttagtggcgcagctaacgcgataagtagaccgcctggggagtacggccgcaaggttaaaactcaaatgaattgacgggggcccgcacaagcggtggagcatgtggtttaattcgaagcaacgcgaagaaccttacctactcttgacatccagtgaacttttgagagatcaattggtgccttcgggaacactgagacaggtgctgcatggctgtcgtcagctcgtgttgtgaaatgttgggttaagtcccgtaacgagcgcaacccttatccttatttgccagcacttcgggtgggaactctaaggagactgccggtgacaaaccggaggaaggtggggacgacgtcaagtcatcatggcccttacgagtagggctacacacgtgctacaatggcgcatacagagggccgcgaacttgcgagagtaagcaaatcccacaaagtgcgtcgtagtccggattggagtctgcaactcgactccatgaagtcggaatcgctagtaatcgtgaatcagaatgtcacggtgaatacgttcccgggccttgtacacaccgcccgtcacaccatgggagttgattgctccagaagtagctagcttaacccttcggggatggcggttaccacggagtggtcaatgactggggtg

SEQ ID NO: 1988 - DNA, 1464 bp, Marinomonas hwangdonensis
attgaacgctggcggcaggcttaacacatgcaagtcgagcggtagcacagagaaacttgtttcttgggtgacgagcggcggacgggtgagtaacgcgtaggaatctacctagtagagggggacaacatgtggaaacgcatgctaataccgcatacgcccttagggggaaaggaggggacttttcggagccttccgctattagatgagcctgcgtgagattagctagttggtagggtaaaggcctaccaaggcgacgatctctaactggtctgagaggatgaccagtcacactgggactgagacacggcccagactcctacgggaggcagcagtggggaatattggacaattggcgcaagcctgatccagccatgccgcgtgtgtgaagaaggccttagggttgtaaagcactttcaggggtgaggaagggcgtttggttaatacctaaacgtcttgacgttagccccagaagaagcaccggctaactctgtgccagcagccgcggtaatacagagggtgcaagcgttaatcggaattactgggcgtaaagcgcgcgtaggtggtttgttaagtcggatgtgaaatcccagggctcaaccttggaatggcacccgatactggcaagctagagtatggtagaggggtgtggaatttcctgtgtagcggtgaaatgcgtagatataggaaggaacatcagtggcgaaggcgacaccctggactaatactgacactgaggtgcgaaagcgtggggagcaaacaggattagataccctggtagtccacgccgtaaacgatgtctactagccgttgggttgtaatgacttagtggcgcagctaacgcaataagtagaccgcctggggagtacggccgcaaggttaaaactcaaatgaattgacgggggcccgcacaagcggtggagcatgtggtttaattcgacgcaacgcgaagaaccttacctactcttgacatccagagaattcgctagagatagcttagtgccttcgggaactctgagacaggtgctgcatggctgtcgtcagctcgtgttgtgaaatgttgggttaagtcccgtaacgagcgcaacccttatccttatttgccagcacttcgggtgggaactttaaggagactgccggtgacaaaccggaggaaggtggggacgacgtcaagtcatcatggcccttacgagtatggctacacacgtgctacaatggcgtatacagagggctgcgagctagcgatagtgagcgaatcccagaaagtacgtcgtagtccggattggagtctgcaactcgactccatgaagtcggaatcgctagtaatcgtgaatcagaatgtcacggtgaatacgttcccgggccttgtacacaccgcccgtcacaccatgggagttgattgctccagaagtagctagcctaaccgcaaggggggcggttaccacggagtggtcaatgactggggtg

SEQ ID NO: 1989 - DNA, 1461 bp, Marinomonas mediterranea
attgaacgctggcggcaggcttaacacatgcaagtcgagcggaaacgatgatagcttgctatcaggcgtcgagcggcggacgggtgagtaacgcgtaggaatctgcctagtagagggggacaacatgtggaaacgcatgctaataccgcatacgcccttttggggaaaggaggggatcttcggaccttccgctattagatgagcctgcgtgagattagctagttggtggggtaaaggcctaccaaggcgacgatctctagctggtctgagaggatgatcagccacactgggactgagacacggcccagactcctacgggaggcagcagtggggaatattggacaatgggggcaaccctgatccagccatgccgcgtgtgtgaagaaggccttagggttgtaaagcactttcagaagtgaggaagggtgcttgattaatactcaagtactttgacgttagcttcagaagaagcaccggctaactctgtgccagcagccgcggtaatacagagggtgcaagcgttaatcggaattactgggcgtaaagcgcgcgtaggtggtttgttaagtcagatgtgaaagcccagggctcaaccttggaattgcacctgatactggcaggctagagtacggtagagggatgtggaatttcctgtgtagcggtgaaatgcgtagatataggaaggaacatcagtggcgaaggcgacatcctggactgatactgacactgaggtgcgaaagcgtggggagcaaacaggattagataccctggtagtccacgccgtaaacgatgtctactagccgttggtcgattttagattagtggcgcagctaacgcgataagtagaccgcctggggagtacggccgcaaggttaaaactcaaatgaattgacgggggcccgcacaagcggtggagcatgtggtttaattcgaagcaacgcgaagaaccttacctactcttgacatccagagaacttagcagagatgctttggtgccttcgggaactctgagacaggtgctgcatggctgtcgtcagctcgtgttgtgaaatgttgggttaagtcccgtaacgagcgcaacccttatccttatttgctagcaggtgatgctgagaactctaaggagactgccggtgacaaaccggaggaaggtggggacgacgtcaagtcatcatggcccttacgagtagggctacacacgtgctacaatggcgcatacagagggcggcgaacttgcgaaagtaagcaaatcccaaaaagtgcgtcgtagtccggattggagtctgcaactcgactccatgaagtcggaatcgctagtaatcgtggatcagaatgccacggtgaatacgttcccgggccttgtacacaccgcccgtcacaccatgggagttgattgctccagaagtagctagcttaaccttcgggatggcggttaccacggagtggtcaatgactggggtg

SEQ ID NO: 1990 - DNA, 1455 bp, Marinomonas polaris
attgaacgctggcggcaggcttaacacatgcaagtcgagcggtaacaggggagcttgctcctgctgacgagcggcggacgggtgagtaacgcgtaggaatctacctagtagagggggacaacatgtggaaacgcatgctaataccgcatacaccctaagggggaaaggaggggactcttcggagccttccgctattagatgagcctgcgtgagattagctagttggtagggtaaaggcctaccaaggcgacgatctctaactggtctgagaggatgaccagtcacactgggactgagacacggcccagactcctacgggaggcagcagtggggaatattggacaatgggcggaagcctgatccagccatgccgcgtgtgtgaagaaggccttagggttgtaaagcactttcaggggtgaggaagggtgactggctaatatccagttatcttgacgttagccccagaagaagcaccggctaactctgtgccagcagccgcggtaatacagagggtgcaagcgttaatcggaattactgggcgtaagcgcgcgtaggtggtttgttaagtcggatgtgaaatcccagggctcaaccttggaatggcacccgatactggctagctagattatggtagaggggtgtggaatttcctgtgtagcggtgaaatgcgtagatataggaaggaacatcagtggcgaaggcgacaccctggactaatactgacactgaggtgcgaaagcgtggggagcaaacaggattagataccctggtagtccacgccgtaaacgatgtctactagccgttgggttgtaatgacttagtggcgcagctaacgcaataagtagaccgcctggggagtacggccgcaaggttaaaactcaaatgaattgacgggggcccgcacaagcggtggagcatgtggtttaattcgacgcaacgcgaagaaccttacctactcttgacatccagtgaatccgagagagattttggagtgccttcgggaacactgagacaggtgctgcatggctgtcgtcagctcgtgttgtgaaatgttgggttaagtcccgtaacgagcgcaacccttatccttatttgccagcacttcgggtgggaactttaaggagactgccggtgacaaaccggaggaaggtggggacgacgtcaagtcatcatggcccttacgagtagggctacacacgtgctacaatggcgtatacagagggctgcaagctagcgatagtgagcgaatcccacaaagtacgtcgtagtccggattggagtctgcaactcgactccatgaagtcggaatcgctagtaatcgtggatcagaatgccacggtgaatacgttcccgggccttgtacacaccgcccgtcacaccatgggagttgattgctccagaagtagctagcttaactcttcggggatggcggttaccacggagtggtcaatgact

SEQ ID NO: 1991 - DNA, 1380 bp, Marinomonas pollencensis
aaacgatgatagcttgctatcaggcgtcgagcggcggacgggtgagtaacgcgtaggaatctgcctagtagtgggggacaacatgtggaaacgcatgctaataccgcatacgccctacgggggaaaggaggggatcttcggacctttcgctattagatgagcctgcgtaagattagctagttggtggggtaaaggcctaccaaggcgacgatctttagctggtctgagaggatgaccagtcacactgggactgagacacggcccagactcctacgggaggcagcagtggggaatattggacaatgggcgcaagcctgatccagccatgccgcgtgtgtgaagaaggccttagggttgtaaagcactttcaggggtgaggaagggtaagtcgttaataccggcttactttgacgttaaccccagaagaagcaccggctaactctgtgccagcagccgcggtaatacagagggtgcaagcgttaatcggaattactgggcgtaaagcgcgcgtaggtggtttgttaagtcggatgtgaaatcccagggctcaaccttggaatggcacccgatactggcaggctagagtacggtagaggggtgtggaatttcctgtgtagcggtgaaatgcgtagatataggaaggaacatcagtggcgaaggcgacaccctggactgatactgacactgaggtgcgaaagcgtggggagcaaacaggattagataccctggtagtccacgccgtaaacgatgtctactagccgttgggttgtaatgacttagtggcgcagctaacgcaataagtagaccgcctggggagtacggccgcaaggttaaaactcaaatgaattgacgggggcccgcacaagcggtggagcatgtggtttaattcgaagcaacgcgaagaaccttacctactcttgacatccagtgaacttagcagagatgctttggtgccttcgggaacactgagacaggtgctgcatggctgtcgtcagctcgtgttgtgaaatgttgggttaagtcccgtaacgagcgcaacccttatccttacttgctagcaggttatgctgagaactttaaggagactgccggtgacaaaccggaggaaggtggggacgacgtcaagtcatcatggcccttacgagtagggctacacacgtgctacaatggcgtatacagagggctgcgaacttgcgagagtaagcgaatcccagaaagtacgtcgtagtccggattggagtctgcaactcgactccatgaagtcggaatcgctagtaatcgtgaatcagaatgtcacggtgaatacgttcccgggccttgtacacaccgcccgtcacaccatgggagttgattgctccagaagtagctagcttaaccttt

SEQ ID NO: 1992 - DNA, 1462 bp, Marinomonas posidonica
attgaacgctggcggcaggcttaacacatgcaagtcgagcggaaacgatgatagcttgctatcaggcgtcgagcggcggacgggtgagtaacgcgtaggaatctgcctagtagagggggacaacatgtggaaacgcatgctaataccgcatacgcccttttggggaaaggaggggatcttcggaccttccgctattagatgagcctgcgtgagattagctagttggtggggtaaaggcctaccaaggcgacgatctctaactggtctgagaggatgaccagtcacactgggactgagacacggcccagactcctacgggaggcagcagtggggaatattggacaatgggcgcaagcctgatccagccatgccgcgtgtgtgaagaaggccttagggttgtaaagcactttcaggagtgaggaagggtagtttgttaataccaaattactttgacgttagctccagaagaagcaccggctaactctgtgccagcagccgcggtaatacagagggtgcaagcgttaatcggaattactgggcgtaaagcgcgcgtaggtggtttgttaagtctgatgtgaaatcccagggctcaaccttggaatggcaccggatactggcaggctagagtacggtagaggggtgtggaatttcctgtgtagcggtgaaatgcgtagatataggaaggaacatcagtggcgaaggcgacaccctggactgatactgacactgaggtgcgaaagcgtggggagcaaacaggattagataccctggtagtccacgccgtaaacgatgtctactagccgttgggttgtaatgacttagtggcgcagctaacgcaataagtagaccgcctggggagtacggccgcaaggttaaaactcaaatgaattgacgggggcccgcacaagcggtggagcatgtggtttaattcgaagcaacgcgaagaaccttacctactcttgacatccagagaacttagcagagatgctttggtgccttcgggaactctgagacaggtgctgcatggctgtcgtcagctcgtgttgtgaaatgttgggttaagtcccgtaacgagcgcaacccttatccttacttgccagcacttcgggtgggaactttaaggagactgccggtgacaaaccggaggaaggtggggacgacgtcaagtcatcatggcccttacgagtagggctacacacgtgctacaatggcgtatacaaagggcagctaacttgcgagagtgtgcaaatcccataaagtacgtcgtagtccggattggagtctgcaactcgactccatgaagtcggaatcgctagtaatcgtggatcagaatgccacggtgaatacgttcccgggccttgtacacaccgcccgtcacaccatgggagttgattgctccagaagtagctagcttaacctttcggggatggcggttaccacggagtggtcaatgactggggtg

SEQ ID NO: 1993 - DNA, 1414 bp, Marinomonas primoryensis
catgcaagtcgagcggtaacagaggagcttgctcctgctgacgagcggcggacgggtgagtaacgcgtaggaatctgcctagtagagggggacaacatgtggaaacgcatgctaataccgcatacgccctaagggggaaaggaggggactcttcggagccttccgctattagatgagcctgcgtgagattagctagttggtagggtaaaggcctaccaaggcgacgatctctaactggtctgagaggatgaccagtcacactgggactgagacacggcccagactcctacgggaggcagcagtggggaatattggacaatgggcgcaagcctgatccagccatgccgcgtgtgtgaagaaggccttagggttgtaaagcactttcaggggtgaggaagggtgatagcttaatacgttatcattttgacgttagccccagaagaagcaccggctaactctgtgccagcagccgcggtaatacagagggtgcaagcgttaatcggaattactgggcgtaaagcgcgcgtaggtggtttgttaagtcggatgtgaaatcccagggctcaaccttggaatggcacccgatactggctagctagagtatggtagaggggtgtggaatttcctgtgtagcggtgaaatgcgtagatataggaaggaacatcagtggcgaaggcgacaccctggactaatactgacactgaggtgcgaaagcgtggggagcaaacaggattagataccctggtagtccacgccgtaaacgatgtctactagccgttgggttgtaatgacttagtggcgcagctaacgcaataagtagaccgcctggggagtacggccgcaaggttaaaactcaaatgaattgacgggggcccgcacaagcggtggagcatgtggtttaattcgaagcaacgcgaagaaccttacctactcttgacatccacagaacatttgagagatcagatggtgccttcgggaactgtgagacaggtgctgcatggctgtcgtcagctcgtgttgtgaaatgttgggttaagtcccgtaacgagcgcaacccttgtccttatttgccagcacgtaatggtgggaactttaaggagactgccggtgacaaaccggaggaaggtggggacgacgtcaagtcatcatggcccttacgagtagggctacacacgtgctacaatggcgtatacagagggctgcaagctagcgatagtgagcgaatcccacaaagtacgtcgtagtccggattggagtctgcaactcgactccatgaagtcggaatcgctagtaatcgtgaatcagaatgtcacggtgaatacgttcccgggccttgtacacaccgcccgtcacaccatgggagttgattgctccagaagtagctagcttaacccttcggggaggcggttaccaa

SEQ ID NO: 1994 - DNA, 1461 bp, Marinomonas profundimaris
attgaacgctggcggcaggcttaacacatgcaagtcgagcggaaacgatgtagcttgccacaggcgtcgagcggcggacgggtgagtaacgcgtaggaatctgcctagtagagggggacaacatgtggaaacgcatgctaataccgcatacgccctgagggggaaaggaggggatcacttgtgaccttccgctattagatgagcctgcgtgagattagctagttggtagggtaaaggcctaccaaggcgacgatctctaactggtctgagaggatgaccagtcacactgggactgagacacggcccagactcctacgggaggcagcagtggggaatattggacaatgggcgcaagcctgatccagccatgccgcgtgtgtgaagaaggccttagggttgtaaagcacttccaggagtgaggaagggcgtttggttaatacccaaatgttttgacgttagctccagaagaagcaccggctaactctgtgccagcagccgcggtaatacagagggtgcaagcgttaatcggaattactgggcgtaaagcgcgcgtaggtggtttgttaagtcggatgtgaaatcccagggctcaaccttggaatggcacccgatactggcaggctagagtacggtagaggggtgtggaatttcctgtgtagcggtgaaatgcgtagatataggaaggaacatcagtggcgaaggcgacaccctggactgatactgacactgaggtgcgaaagcgtggggagcaaacaggattagataccctggtagtccacgccgtaaacgatgtctactagccgttgggttgtaatgacttagtggcgcagctaacgcaataagtagaccgcctggggagtacggccgcaaggttaaaactcaaatgaattgacgggggcccgcacaagcggtggagcatgtggtttaattcgaagcaacgcgaagaaccttacctactcttgacatccacagaatcagaaagagatttttgagtgccttcgggaactgtgagacaggtgctgcatggctgtcgtcagctcgtgttgtgaaatgttgggttaagtcccgtaacgagcgcaacccttatccttatttgccagcgggtcatgccgggaactttaaggagactgccggtgacaaaccggaggaaggtggggacgacgtcaagtcatcatggcccttacgagtagggctacacacgtgctacaatggcgtatacagagggctgcaagctagcgatagtgagcgaatcccacaaagtacgtcgtagtccggattggagtctgcaactcgactccatgaagtcggaatcgctagtaatcgtgaatcagaatgtcacggtgaatacgttcccgggccttgtacacaccgcccgtcacaccatgggagttgattgctccagaagtagctagcttaaccttcgggatggcggttaccacggagtggtcaatgactggggtg

SEQ ID NO: 1995 - DNA, 1426 bp, Marinomonas rhizomae
ctggcggcaggcttaacacatgcaagtcgagcggtaacaggggagcttgctcctgctgacgagcggcggacgggtgagtaacgcgtaggaatctgcctagtagagggggacaacatgtggaaacgcatgctaataccgcatacgccctacgggggaaaggaggggacttttcggagccttccgctattagatgagcctgcgtaagattagctagttggtagggtaaaggcctaccaaggcgacgatctttaactggtctgagaggatgaccagtcacactgggactgagacacggcccagactcctacgggaggcagcagtggggaatattggacaatgggcgcaagcctgatccagccatgccgcgtgtgtgaagaaggccttagggttgtaaagcactttcaggagtgaggaagggtaattagttaatacctaattattttgacgttagctccagaagaagcaccggctaactctgtgccagcagccgcggtaatacagagggtgcaagcgttaatcggaattactgggcgtaaagcgcgcgtaggtggtttgttaagtcggatgtgaaatcccagggctcaaccttggaatggcacccgatactggcaggctagagtatggtagaggggtgtggaatttcctgtgtagcggtgaaatgcgtagatataggaaggaacatcagtggcgaaggcgacaccctggactaatactgacactgaggtgcgaaagcgtggggagcaaacaggattagataccctggtagtccacgccgtaaacgatgtctactagccgttgggttgtaatgacttagtggcgcagctaacgcaataagtagaccgcctggggagtacggccgcaaggttaaaactcaaatgaattgacgggggcccgcacaagcggtggagcatgtggtttaattcgacgcaacgcgaagaaccttacctactcttgacatccagagaattcgctagagatagcttagtgccttcgggaactctgagacaggtgctgcatggctgtcgtcagctcgtgttgtgaaatgttgggttaagtcccgtaacgagcgcaacccttatccttatttgccagcacttcgggtgggaactttaaggagactgccggtgacaaaccggaggaaggtggggacgacgtcaagtcatcatggcccttacgagtagggctacacacgtgctacaatggcgtatacagagggctgcgaacttgcgagagtaagcgaatcccagaaagtacgtcgtagtccggattggagtctgcaactcgactccatgaagtcggaatcgctagtaatcgtgaatcagaatgtcacggtgaatacgttcccgggccttgtacacaccgcccgtcacaccatgggagttgattgctccagaagtagctagcttaacccttcggggatggcggt

SEQ ID NO: 1996 - DNA, 1418 bp, Marinomonas spartinae
gcagtcgagcggtaacaggggagcttgctcctgctgacgagcggcggacgggtgagtaacgcgtaggaatctgcctagtagagggggacaacatgtggaaacgcatgctaataccgcatacgcctttagggggaaaggaggggatcacttgtgaccttccgctattagatgagcctgcgtaagattagctagttggtggggtaaaggcctaccaaggcgacgatctttagctggtctgagaggatgaccagccacactgggactgagacacggcccagactcctacgggaggcagcagtggggaatattggacaatggggggaaccctgatccagccatgccgcgtgtgtgaagaaggccttagggttgtaaagcactttcaggagtgaggaagggtgcttggttaatacccaagtattttgacgttagctccagaagaagcaccggctaactctgtgccagcagccgcggtaatacagagggtgcaagcgttaatcggaattactgggcgtaaagcgcgcgtaggtggtttgttaagtctgatgtgaaaccccagggctcaaccttggaatggcaccggatactggcaggctagagtacggtagagggatgtggaatttcctgtgtagcggtgaaatgcgtagatataggaaggaacatcagtggcgaaggcgacatcctggactgatactgacactgaggtgcgaaagcgtggggagcaaacaggattagataccctggtagtccacgccgtaaacgatgtctactagccgttgggttgtaatgacttagtggcgcagttaacgcgataagtagaccgcctggggagtacggccgcaaggttaaaactcaaatgaattgacgggggcccgcacaagcggtggagcatgtggtttaattcgaagcaacgcgaagaaccttacctactcttgacatccacagaagaacgcagagatgtgtttgtgccttcgggaactgtgagacaggtgctgcatggctgtcgtcagctcgtgttgtgaaatgttgggttaagtcccgtaacgagcgcaacccttatccttacttgctagcgggtaatgccgagaactttaaggagactgccggtgacaaaccggaggaaggtggggacgacgtcaagtcatcatggcccttacgagtagggctacacacgtgctacaatggcgtatacagagggcagcgaacttgcgagagtaagcgaatcccaaaaagtacgtcgtagtccggattggagtctgcaactcgactccatgaagtcggaatcgctagtaatcgtgaatcagaatgtcacggtgaatacgttcccgggccttgtacacaccgcccgtcacaccatgggagttgattgctccagaagtagatagtctaaccttaggggggacgtttaccacggagtggtc

SEQ ID NO: 1997 - DNA, 1388 bp, Marinovum algicola
aacgaacgctggcggcaggcctaacacatgcaagtcgagcgagctcttcggagctagcggcggacgggttagtaacgcgtgggaacgtgcccttcactgcggaatagccactggaaacggtgagtaataccgcatacgcccttcgggggaaagatttatcggtgaaggatcggcccgcgttagattagatagttggtggggtaacggcctaccaagtctacgatctatagctggttttagaggatgatcagcaacactgggactgagacacggcccagactcctacgggaggcagcagtggggaatcttggacaatgggcgcaagcctgatccagccatgccgcgtgagtgatgaaggccttagggtcgtaaagctctttcgccagagatgataatgacagtatctggtaaagaaaccccggctaactccgtgccagcagccgcggtaatacggagggggttagcgttgttcggaattactgggcgtaaagcgcacgtaggcggatcagaaagttgggggtgaaatcccggggctcaaccccggaactgcctccaaaactcctggtcttgagttcgagagaggtgagtggaattccgagtgtagaggtgaaattcgtagatattcggaggaacaccagtggcgaaggcggctcactggctcgatactgacgctgaggtgcgaaagtgtggggagcaaacaggattagataccctggtagtccacaccgtaaacgatgaatgccagtcgtcgggtagcatgctattcggtgacacacctaacggattaagcattccgcctggggagtacggtcgcaagattaaaactcaaaggaattgacgggggcccgcacaagcggtggagcatgtggtttaattcgaagcaacgcgcagaaccttaccaacccttgacatcctcagctacatcgagagatcgatggttcccttcggggactgagtgacaggtgctgcatggctgtcgtcagctcgtgtcgtgagatgttcggttaagtccggcaacgagcgcaacccacatccctagttgccagcagttcggctgggcactctatggaaactgcccgtgataagcgggaggaaggtgtggatgacgtcaagtcctcatggcccttacgggttgggctacacacgtgctacaatggcagtgacaatgggttaatcccaaaaaactgtctcagttcggattgtcgtctgcaactcgacggcatgaagtcggaatcgctagtaatcgcgtaacagcatgacgcggtgaatacgttcccgggccttgtacacaccgcccgtcacaccatgggagttgggttcacccgaaggccgtgcgccaacctttcgaggaggcagcggaccacggtgagctcagcgactggggtgaa

SEQ ID NO: 1998 - DNA, 1459 bp, Mariprofundus aestuarium
aacgaacgctggcggcgtgcctaacacatgcaagtcgaacggactttatttcttcggatttaaagttagtggcgcacgggtgagtaacgcgtggatatctgcctatcagtgggggacaactacgggaaaccgtagctaataccgcatacgatctaaggatgaaagcaggggaccttcgggccttgtgctgatagatgagtccgcgtcagattagctagttggtaaggtaatggcttaccaaggcgatgatctgtaactggtttgagaggatgatcagtcacactggaactgagacacggtccagactcctacgggaggcagcagtggggaatattgcacaatgggggaaaccctgatgcagcgacgccgcgtgcgggaagaaggccttcgggttgtaaaccgctttcaattgggaagaagagatgagagctaatatctctctgatttgacggtacctttagaagaagcaccggctaatttcgtgccagcagccgcggtaatacgaaaggtgcaagcgttgttcggatttactgggcgtaaagagatcgtaggtggtttgttaagtcggatgtgaaatcccggggctcaacctcggaactgcattcgatactggcaggctagagtttgggaggggtaagcggaattccgtgtgtagcagtgaaatgcgtagatatacggaggaacacctgaggcgaaggcggcttactggaccaatactgacactgaggatcgaaagcgtgggtagcaaacaggattagataccctggtagtccacgccctaaacgatgtcaactagccgttgcgggtatcgacccctgcagtggcgaagctaacgcgataagttgaccgcctggggagtacggtcgcaagattaaaactcaaaggaattgacgggggcccgcacaagcggtggagcatgtggtttaattcgacgcaacgcgaagaaccttacctgggtttgacatctacggaattctttagagatagagaagtgccttcgggagccgtaagacaggtgctgcatggctgtcgtcagctcgtgtcgtgagatgttgggttaagtcccgcaacgagcgcaacccctattgttagttgccatcattaagttgggcactctagcgagactgccggtgacaaaccggaggaaggtggggacgacgtcaagtcatcatggcccttatgtccagggctacacacgtgctacaatggtggatacaacaagttgcaatagggcgacctggagctaatctgtaaagtccatctcagttcggattgaagtctgcaactcgacttcatgaagttggaatcgctagtaatcgcggatcagcatgccgcggtgaatacgttcccgggccttgtacacaccgcccgtcacaccatgggaattggttgcaccagaagccgccgggctaacccttcggggaggcaggcgtctacggtgtggtcggtaactggggtg

SEQ ID NO: 1999 - DNA, 1458 bp, Mariprofundus ferrooxydans
aacgaacgctggcggcgtgcctaacacatgcaagtcgaacggactttaagacttcggttttaaagttagtggcgcacgggtgagtaacgcgtggatatctgcctatcagtgggggacaactacaggaaactgtagctaataccgcatacgctgtacgcaggaaagcgggggatcttcggacctcgcgctgatagatgagtccgcgtctgattagctagttggtggggtaaaggcctaccaaggcgatgatcagtaactggtttgagaggatgatcagtcacactggaactgagacacggtccagactcctacgggaggcagcagtggggaatattgcacaatgggggaaaccctgatgcagcgacgccgcgtgcgggaagaaggccttcgggttgtaaaccgctttcaattgggaagaagagatgagtactaatactgctctgatttgacggtacctttagaagaagcaccggctaatttcgtgccagcagccgcggtaatacgaaaggtgcaagcgttgttcggatttactgggcgtaaagagatcgtaggtggtttgttaagtcggatgtgaaatcccagggctcaaccctggaactgcattcgatactggcagactagagtttgggaggggtaagcggaattccgtgtgtagcagtgaaatgcgtagatatacggaggaacacctgaggcgaaggcggcttactggaccaatactgacactgaggatcgaaagcgtgggtagcaaacaggattagataccctggtagtccacgccctaaacgatgtcaactagccgtagcgggtatcgacccctgctgtggcgaagctaacgcgataagttgaccgcctggggagtacggtcgcaagattaaaactcaaaggaattgacgggggcccgcacaagcggtggagcatgtggtttaattcgacgcaacgcgaagaaccttacctgggtttgacatcctaagaatactttagagatagagtagtgccttcgggagcttagagacaggtgctgcatggctgtcgtcagctcgtgtcgtgagatgttgggttaagtcccgcaacgagcgcaacccctatcgttagttgccatcatttagttgggcactctagcgagactgccggtgacaaaccggaggaaggtggggacgacgtcaagtcatcatggcccttatgtccagggctacacacgtgctacaatggcgactacaacaagttgcgaacccgcgagggggagccaatcttataaaagtcgtctcagttcggattggagtctgcaactcgactccatgaagttggaatcgctagtaatcgcggatcagcatgccgcggtgaatacgttcccgggccttgtacacaccgcccgtcacaccatgggaattggttgcaccagaagccgccgggctaaccttcgggaggcaggcgtctacggtgtggtcggtaactggggtg

SEQ ID NO: 2000 - DNA, 1459 bp, Mariprofundus micogutta
aacgaacgctggcggcgtgcctaacacatgcaagtcgaacggtaacagtgacttcggtcagctgacgagtggcgcacgggtgagtaacgcgtggatatctgcctattagtgggggacaactacgggaaaccgtagctaataccgcataatctctacggaggaaagcaggggaccttcgggccttgcgctgatagatgagtccgcgtctgattagctagttggtagggtaatggcctaccaaggcgatgatcagtaactggtttgagaggatgatcagtcacactggaactgagacacggtccagacttctacggaaggcagcagtggggaatattgcacaatgggcgaaagcctgatgcagcgacgccgcgtgcgggaagaaggccttcgggttgtaaaccgctttcaattgggaagaagagaagagtgctaatatcgctctgatttgacggtacctttagaagaagcaccggctaatttcgtgccagcagccgcggtaatacgaaaggtgcaagcgttgttcggatttactgggcgtaaagagatcgtaggtggtttgttaagtcggatgtgaaatcccggggctcaaccccggaactgcattcgatactggcagactagagtttgggaggggtaagcggaattccgtgtgtagcagtgaaatgcgtagatatacggaggaacacctgaggcgaaggcggcttactggaccaatactgacactgaggatcgaaagcgtgggtagcaaacaggattagataccctggtagtccacgccctaaacgatgtcaactagccgttgcgggtatcgacccctgcagtggcgaagctaacgcgataagttgaccgcctggggagtacggtcgcaagattaaaactcaaaggaattgacgggggcccgcacaagcggtggagcatgtggtttaattcgacgcaacgcgaagaaccttacctgggtttgacatccttagaattctctagagatagagaagtgccttcgggagctaagtgacaggtgctgcatggttgtcgtcagctcgtgtcgtgagatgttgggttaagtcccgcaacgagcgcaacccctattgttagttgccatcattaagttgggcactctagcgagactgccggtgacaaaccggaggaaggtggggacgacgtcaaatcatcatggcccttatgtccagggctacacacgtgctacaatggtggctacagcaggaagcgatggggtgacccggagccaatcgtcaaaagccatctcagttcggattgtagtctgcaactcgactacatgaagttggaatcgctagtaatcgcggatcagcatgccgcggtgaatacgttcccgggccttgtacacaccgcccgtcacaccatgggaattggttgcaccagaagccgccgggctaacccttcggggaggcaggcgtctacggtgtggtcggtaactggggtg

SEQ ID NO: 2001 - DNA, 1406 bp, Maritalea myrionectae
aacgaacgctggcggcaggcttaacacatgcaagtcgagcgctcacttcggtgggagcggcagacgggtgagtaacgcgtgggaacatacctagtagtacggaataacgtttggaaacgaacgctaataccgtatacgcccttagggggaaagatttatcgctattagattggcccgcgttggattagtttgttggtggggtaatggcctaccaagactacgatctatagctggtctgagaggatgatcagccacactgggactgagacacggcccagactcctacgggaggcagcagtggggaatattggacaatgggggcaaccctgatccagccatgccgcgtgagtgatgaaggccttagggttgtaaagctctttcgctagggaagataatgacggtacctagtaaagaagccccggctaacttcgtgccagcagccgcggtaatacgaagggggctagcgttgttcggaattactgggcgtaaagcgcacgtaggcggattagtaagttaggggtgaaatcccgaggctcaacctcggaactgcctttaatactgctagtctcgagttcgggagaggtgtatggaactcctagtgtagaggtggaattcgtagatattaggaagaacaccagtggcgaaggcgatacactggcccgatactgacgctgaggtgcgaaagcgtggggagcaaacaggattagataccctggtagtccacgccgtaaacgatgagagctagccgttggggtgtttacacttcagtggcgcagttaacgcattaagctctccgcctggggagtacggtcgcaagattaaaactcaaaggaattgacgggggcccgcacaagcggtggagcatgtggtttaattcgaagcaacgcgaagaaccttaccagctcttgacatacctatcgcagtctccggagacggagaccttcagttcggctggataggatacaggtgctgcacggctgtcgtcagctcgtgtcgtgagatgttgggttaagtcccgcaacgagcgcaaccctcgcccttagttgccagcatttagttgggcactctagggggactgccggtgataagccggaggaaggtggggacgacgtcaagtcatcatggcccttacgggctgggctacacacgtgctacaatggcggtgacagagggcagccactccgcgaggaggagctaatccctaaaaaccgtctcagttcggattgcactctgcaactcgagtgcatgaagttggaatcgctagtaatcgtgggtcagcataccacggtgaatacgttcccgggccttgtacacaccgcccgtcacaccatgggagttggttctacccgaaggcgctgcgctaacttttgaggcaggcgaccacggtagggtcagcgactggggtg

SEQ ID NO: 2002 - DNA, 1394 bp, Marivivens niveibacter
ggctcagaacgaacgctggcggcaggcctaacacatgcaagtcgaacgagatcttcggatctagtggcggacgggttagtaacgcgtgggaacgtacccttcactacggaatagtcctgggaaactgggtttaataccgtatacgcccttcgggggaaagaatttcggtgagggatcggcccgcgttagattagttagttggtggggtaacggcctaccaagactacgatctatagctggtttgagaggatgatcagcaacactgggactgagacacggcccagactcctacgggaggcagcagtggggaatcttagacaatgggggcaaccctgatctagccatgccgcgtgagtgacgaaggccttagggtcgtaaagctctttcgcctgtgaagataatgactgtagcaggtaaagaaaccccggctaactccgtgccagcagccgcggtaatacggagggggttagcgttgttcggaattactgggcgtaaagcgcacgtaggcggactggaaagttagaggtgaaatcccggggctcaacctcggaactgcctttaaaactatcagtctagagttcgagagaggtgagtggaattccgagtgtagaggtgaaattcgtagatattcggaggaacaccagtggcgaaggcggctcactggctcgatactgacgctgaggtgcgaaagcgtggggagcaaacaggattagataccctggtagtccacgccgtaaacgatgaatgccagtcgtcaggttgcttgcaacttggtgacacacctaacggattaagcattccgcctggggagtacggtcgcaagattaaaactcaaaggaattgacgggggcccgcacaagcggtggagcatgtggtttaattcgaagcaacgcgcagaaccttaccaacccttgacatcctaggaccgccagagagatttggctttcacttcggtgacctagtgacaggtgctgcatggctgtcgtcagctcgtgtcgtgagatgttcggttaagtccggcaacgagcgcaacccacacccttagttgccaattatggaactctaagggaactgcccgtgataagcgggaggaaggtgtggatgacgtcaagtcctcatggcccttacgggttgggctacacacgtgctacaatggcatctacagtgggttaatccccaaaagatgtctcagttcggattggggtctgcaactcgaccccatgaagtcggaatcgctagtaatcgcgtaacagcatgacgcggtgaatacgttcccgggccttgtacacaccgcccgtcacaccatgggagttgggtctacccgacggccgtgcgctaacccttttgggaggcagcggaccacggtaggctcagcgactggggtgaagtcgtaa

SEQ ID NO: 2003 - DNA, 1443 bp, Massilia albidiflava
ggcggcatgctttacacatgcaagtcgaacggcagcgcgggcttcggcctggcggcgagtggcgaacgggtgagtaatatatcggaacgtgcccaagagtgggggataacgtagcgaaagttacgctaataccgcatacgatccaaggatgaaagcaggggaccgcaaggccttgtgctcctggagcggccgatatctgattagctagttggtgaggtaaaggctcaccaaggcgacgatcagtagctggtctgagaggacgaccagccacactggaactgagacacggtccagactcctacgggaggcagcagtggggaattttggacaatgggggcaaccctgatccagcaatgccgcgtgagtgaagaaggccttcgggttgtaaagctcttttgtcagggaagaaaagggtacggctaatatccgtgcctcatgacggtacctgaagaataagcaccggctaactacgtgccagcagccgcggtaatacgtagggtgcaagcgttaatcggaattactgggcgtaaagcgtgcgcaggcggttttgtaagtctgtcgtgaaatccccgggcttaacctgggaatggcgatggagactgcaaggctagagtttggcagaggggggtagaattccacgtgtagcagtgaaatgcgtagagatgtggaggaacaccgatggcgaaggcagccccctgggtcaagactgacgctcatgcacgaaagcgtggggagcaaacaggattagataccctggtagtccacgccctaaacgatgtctactagttgttgggtcttaattgacttagtaacgcagctaacgcgtgaagtagaccgcctggggagtacggtcgcaagattaaaactcaaaggaattgacggggacccgcacaagcggtggatgatgtggattaattcgatgcaacgcgaaaaaccttacctacccttgacatgtcaggaatcctggagagatccgggagtgcccgaaagggaacctgaacacaggtgctgcatggctgtcgtcagctcgtgtcgtgagatgttgggttaagtcccgcaacgagcgcaacccttgtcattagttgctacgaaagggcactctaatgagactgccggtgacaaaccggaggaaggtggggatgacgtcaagtcctcatggcccttatgggtagggcttcacacgtcatacaatggtacatacagagggccgccaacccgcgagggggagctaatcccagaaagtgtatcgtagtccggattgtagtctgcaactcgactgcatgaagttggaatcgctagtaatcgcggatcagcatgtcgcggtgaatacgttcccgggtcttgtacacaccgcccgtcacaccatgggagcgggttttaccagaagtaggtagcttaaccgcaaggagggcgcttaccacggtaggattcgtgactggggtg

SEQ ID NO: 2004 - DNA, 1443 bp, Massilia aurea
attgaacgctggcggcatgctttacacatgcaagtcgaacggcagcgcggggcaacctggcggcgagtggcgaacgggtgagtaatatatcggaacgtacccaagagtgggggataacgtagcgaaagttacgctaataccgcatacgatctaaggatgaaagcaggggatcttcggaccttgtgctcctggagcggccgatatctgattagctagttggtgaggtaaaggctcaccaaggccacgatcagtagctggtctgagaggacgaccagccacactggaactgagacacggtccagactcctacgggaggcagcagtggggaattttggacaatgggcgaaagcctgatccagcaatgccgcgtgagtgaagaaggccttcgggttgtaaagctcttttgtcagggaagaaacggtgagggctaatatccttcgctaatgacggtacctgaagaataagcaccggctaactacgtgccagcagccgcggtaatacgtagggtgcaagcgttaatcggaattactgggcgtaaagcgtgcgcaggcggttttgtaagtctgacgtgaaatccccgggctcaacctgggaattgcgttggagactgcaaggctagaatctggcagaggggggtagaattccacgtgtagcagtgaaatgcgtagagatgtggaggaacaccgatggcgaaggcagccccctgggtcaagattgacgctcatgcacgaaagcgtggggagcaaacaggattagataccctggtagtccacgccctaaacgatgtctactagttgtcgggttttaattaacttggtaacgcagctaacgcgtgaagtagaccgcctggggagtacggtcgcaagattaaaactcaaaggaattgacggggacccgcacaagcggtggatgatgtggattaattcgatgcaacgcgaaaaaccttacctacccttgacatgtacggaagaccgaagagatttggttgtgctcgaaagagaaccgtaacacaggtgctgcatggctgtcgtcagctcgtgtcgtgagatgttgggttaagtcccgcaacgagcgcaacccttgtcattagttgctacatttagttgagcactctaatgagactgccggtgacaaaccggaggaaggtggggatgacgtcaagtcctcatggcccttatgggtagggcttcacacgtcatacaatggtacatacagagggccgccaacccgcgagggggagctaatcccagaaagtgtatcgtagtccggatcgcagtctgcaactcgactgcgtgaagttggaatcgctagtaatcgcggatcagcatgtcgcggtgaatacgttcccgggtcttgtacacaccgcccgtcacaccatgggagcgggttttaccagaagtaggtagcttaaccgcaaggagggcgcttaccacggtaggattc

SEQ ID NO: 2005 - DNA, 1451 bp, Massilia eurypsychrophila
attgaacgctggcggcatgccttacacatgcaagtcgaacggcagcgcggggcaacctggcggcgagtggcgaacgggtgagtaatatatcggaacgtgccctggagtgggggataacgcagcgaaagttgcgctaataccgcatacgatctaaggatgaaagcaggggaccgcaaggccttgtgctcctggagcggccgatatctgattagctagttggtggggtaaaggcctaccaaggcatcgatcagtagctggtctgagaggacgaccagccacactggaactgagacacggtccagactcctacgggaggcagcagtggggaattttggacaatgggcgaaagcctgatccagcaatgccgcgtgagtgaagaaggccttcgggttgtaaagctcttttgtcagggaagaaacggtgtgggctaatatcctgcactaatgacggtacctgaagaataagcaccggctaactacgtgccagcagccgcggtaatacgtagggtgcaagcgttaatcggaattactgggcgtaaagcgtgcgcaggcggttttgtaagtttgtcgtgaaatccccgggctcaacctgggaattgcgatgaagactgcaaggctagaatctggcagaggggggtagaattccacgtgtagcagtgaaatgcgtagagatgtggaggaacaccgatggcgaaggcagccccctgggtcaagattgacgctcatgcacgaaagcgtggggagcaaacaggattagataccctggtagtccacgccctaaacgatgtctactagttgtcgggttttaattaacttggtaacgcagctaacgcgtgaagtagaccgcctggggagtacggtcgcaagattaaaactcaaaggaattgacggggacccgcacaagcggtggatgatgtggattaattcgatgcaacgcgaaaaaccttacctacccttgacatgtacggaagccacgagagatcgaggtgtgctcgaaagagagccgtaacacaggtgctgcatggctgtcgtcagctcgtgtcgtgagatgttgggttaagtcccgcaacgagcgcaacccttgtcattagttgctacgaaagagcactctaatgagactgccggtgacaaaccggaggaaggtggggatgacgtcaagtcctcatggcccttatgggtagggcttcacacgtcatacaatggtacatacagagggccgccaacccgcgagggggagctaatcccagaaagtgtatcgtagtccggattgtagtctgcaactcgactacatgaagttggaatcgctagtaatcgcggatcagcatgtcgcggtgaatacgttcccgggtcttgtacacaccgcccgtcacaccatgggagcgggttttaccagaagtaggtagcttaaccgcaaggagggcgcttaccacggtaggattcgtgactggggtg

SEQ ID NO: 2006 - DNA, 1406 bp, Massilia flava
catgcaagtcgaacggcagcgcgggcttcggcctggcggcgagtggcgaacgggtgagtaatatatcggaacgtgcccaagagtgggggataacgtagcgaaagttacgctaataccgcatacgatctacggatgaaagcaggggaccttcgggccttgtgctcctggagcggccgatatctgattagctagttggtgaggtaaaggctcaccaaggcgacgatcagtagctggtctgagaggacgaccagccacactggaactgagacacggtccagactcctacgggaggcagcagtggggaattttggacaatgggggcaaccctgatccagcaatgccgcgtgagtgaagaaggccttcgggttgtaaagctcttttgtcagggaagaaaaggtcgtggctaatatccatggctcatgacggtacctgaagaataagcaccggctaactacgtgccagcagccgcggtaatacgtagggtgcaagcgttaatcggaattactgggcgtaaagcgtgcgcaggcggttttgtaagtctgtcgtgaaatccccgggcttaacctgggaatggcgatggagactgcaaggctagaatctggcagaggggggtagaattccacgtgtagcagtgaaatgcgtagagatgtggaggaacaccgatggcgaaggcagccccctgggctaagattgacgctcatgcacgaaagcgtggggagcaaacaggattagataccctggtagtccacgccctaaacgatgtctactagttgttgggtcttaattgacttagtaacgcagctaacgcgtgaagtagaccgcctggggagtacggtcgcaagattaaaactcaaaggaattgacggggacccgcacaagcggtggatgatgtggattaattcgatgcaacgcgaaaaaccttacctacccttgacatgtcaggaatccttgagagattgaggagtgcccgaaagggagcctgaacacaggtgctgcatggctgtcgtcagctcgtgtcgtgagatgttgggttaagtcccgcaacgagcgcaacccttgtcattagttgctacgcaagagcactctaatgagactgccggtgacaaaccggaggaaggtggggatgacgtcaagtcctcatggcccttatgggtagggcttcacacgtcatacaatggtacatacagagggccgccaacccgcgagggggagctaatcccagaaagtgtatcgtagtccggattgtagtctgcaactcgactacatgaagttggaatcgctagtaatcgcggatcagcatgtcgcggtgaatacgttcccgggtcttgtacacaccgcccgtcacaccatgggagcgggttttaccagaagtaggtagcttaaccgcaaggagggcgcttaccacg

SEQ ID NO: 2007 - DNA, 1463 bp, Massilia glaciei
attgaacgctggcggcatgccttacacatgcaagtcgaacggcagcgcggaatggggcaacccggcctggcggcgagtggcgaacgggtgagtaatatatcggaacgtgccctggagtgggggataacgcagcgaaagttgcgctaataccgcatacgatctaaggatgaaagtgggggattcgcaagaacctcatgctcctggagcggccgatatctgattagctagttggtggggtaaaggcctaccaaggcatcgatcagtagctggtctgagaggacgaccagccacactggaactgagacacggtccagactcctacgggaggcagcagtggggaattttggacaatgggcgaaagcctgatccagcaatgccgcgtgagtgaagaaggccttcgggttgtaaagctcttttgtcagggaagaaacggtggcctctaatacaggttgctaatgacggtacctgaagaataagcaccggctaactacgtgccagcagccgcggtaatacgtagggtgcaagcgttaatcggaattactgggcgtaaagcgtgcgcaggcggttttgtaagtctgtcgtgaaatccccgggctcaacctgggaattgcgatggagactgcaaggctagaatctggcagaggggggtagaattccacgtgtagcagtgaaatgcgtagagatgtggaggaacaccgatggcgaaggcagccccctgggtcaagattgacgctcatgcacgaaagcgtggggagcaaacaggattagataccctggtagtccacgccgtaaacgatgtctactagttgtcgggttttaatcaacttggtaacgcagctaacgcgtgaagtagaccgcctggggagtacggtcgcaagattaaaactcaaagggattgacggggacccgcacaagcggtggatgatgtggattaattcgatgcaacgcgaaaaaccttacctacccttgacatgtacggaagccacgagagatcgaggtgtgctcgaaagagaaccgtaacacaggtgctgcatggctgtcgtcagctcgtgtcgtgagatgttgggttaagtcccgcaacgagcgcaacccttgtcattagttgctacgaaagagcactctaatgagactgccggtgacaaaccggaggaaggtggggatgacgtcaagtcctcatggcccttatgggtagggcttcacacgtcatacaatggtacatacagagggccgccaacccgcgagggggagctaatcccagaaagtgtatcgtagtccggattgtagtctgcaactcgactacatgaagttggaatcgctagtaatcgcggatcagcatgtcgcggtgaatacgttcccgggtcttgtacacaccgcccgtcacaccatgggagcgggttttaccagaagtaggtagcttaaccgcaaggagggcgcttaccacggtaggattcgtgactggggtg

SEQ ID NO: 2008 - DNA, 1453 bp, Massilia lurida
attgaacgctggcggcatgctttacacatgcaagtcgaacggtaacagggagcttgctccgctgacgagtggcgaacgggtgagtaatatatcggaacgtacccaagagtgggggataacgtagcgaaagttacgctaataccgcatacgatctaaggatgaaagtgggggatcttcggacctcatgctcctggagcggccgatatctgattagctagttggtagggtaaaggcctaccaaggcatcgatcagtagctggtctgagaggacgaccagccacactggaactgagacacggtccagactcctacgggaggcagcagtggggaattttggacaatgggggcaaccctgatccagcaatgccgcgtgagtgaagaaggccttcgggttgtaaagctcttttgtcagggaagaaacgggtgcggctaatatctgcatctaatgacggtacctgaagaataagcaccggctaactacgtgccagcagccgcggtaatacgtagggtgcaagcgttaatcggaattactgggcgtaaagcgtgcgcaggcggttttgtaagtctgttgtgaaatccccgggctcaacctgggaatggcaatggagactgcaaggctagagtttggcagaggggggtagaattccacgtgtagcagtgaaatgcgtagagatgtggaggaacaccgatggcgaaggcagccccctgggtcaagactgacgctcatgcacgaaagcgtggggagcaaacaggattagataccctggtagtccacgccctaaacgatgtctactagttgttgggtcttaattgacttagtaacgcagctaacgcgtgaagtagaccgcctggggagtacggtcgcaagattaaaactcaaaggaattgacggggacccgcacaagcggtggatgatgtggattaattcgatgcaacgcgaaaaaccttacctacccttgacatggaaggaacctcggagagatctgagggtgctcgaaagagaaccttcacacaggtgctgcatggctgtcgtcagctcgtgtcgtgagatgttgggttaagtcccgcaacgagcgcaacccttgtcattagttgctacgaaagagcactctaatgagactgccggtgacaaaccggaggaaggtggggatgacgtcaagtcctcatggcccttatgggtagggcttcacacgtcatacaatggtacatacagagggccgccaacccgcgagggggagctaatcccagaaagtgtatcgtagtccggatcgtagtctgcaactcgactacgtgaagttggaatcgctagtaatcgcggatcagcatgtcgcggtgaatacgttcccgggtcttgtacacaccgcccgtcacaccatgggagcgggttttaccagaagtaggtagcttaaccgcaaggggggcgcttaccacggtaggattcgtgactggggtg

SEQ ID NO: 2009 - DNA, 1437 bp, Massilia lutea
gctttacacatgcaagtcgaacggcagcagcgggcttcggcctggtcggcgagtggcgaacgggtgagtaatatatcggaacgtgcccaagagtgggggataacgtagcgaaagttacgctaataccgcatacgatctatggatgaaagcgggggaccgcaaggccttgtgctcctggagcggccgatatctgattagctagttggtgaggtaaaggctcaccaaggcgacgatcagtagctggtctgagaggacgaccagccacactggaactgagacacggtccagactcctacgggaggcagcagtggggaattttggacaatgggggcaaccctgatccagcaatgccgcgtgagtgaagaaggccttcgggttgtaaagctcttttgtcagggaagaaaagggtacggctaatatccgtgcctcatgacggtacctgaagaataagcaccggctaactacgtgccagcagccgcggtaatacgtagggtgcaagcgttaatcggaattactgggcgtaaagcgtgcgcaggcggttttgtaagtctgttgtgaaatccccgggcttaacctgggaatggcaatggagactgcaaggctagagtttggcagaggggggtagaattccacgtgtagcagtgaaatgcgtagagatgtggaggaacaccgatggcgaaggcagccccctgggtcaagactgacgctcatgcacgaaagcgtggggagcaaacaggattagataccctggtagtccacgccctaaacgatgtctactagttgttgggtcttaattgacttagtaacgcagctaacgcgtgaagtagaccgcctggggagtacggtcgcaagattaaaactcaaaggaattgacggggacccgcacaagcggtggatgatgtggattaattcgatgcaacgcgaaaaaccttacctacccttgacatgtcaggaatcccggagagatccgggagtgcccgaaagggaacctgaacacaggtgctgcatggctgtcgtcagctcgtgtcgtgagatgttgggttaagtcccgcaacgagcgcaacccttgtcattagttgctacgaaagagcactctaatgagactgccggtgacaaaccggaggaaggtggggatgacgtcaagtcctcatggcccttatgggtagggcttcacacgtcatacaatggtacatacagagggccgccaacccgcgagggggagctaatcccagaaagtgtatcgtagtccggattgtagtctgcaactcgactgcatgaagttggaatcgctagtaatcgcggatcagcatgtcgcggtgaatacgttcccgggtcttgtacacaccgcccgtcacaccatgggagcgggttttaccagaagtaggtagcttaaccgcaaggagggcgcttaccacggtaggattcgtgactggggtg

SEQ ID NO: 2010 - DNA, 1451 bp, Massilia namucuonensis
attgaacgctggcggcatgctttacacatgcaagtcgaacggcagcgcggggcaacctggcggcgagtggcgaacgggtgagtaatatatcggaacgtacccaagagtgggggataacgtagcgaaagttacgctaataccgcatacgatccaaggatgaaagcaggggaccttcgggccttgtgctcctggagcggccgatatctgattagctagttggtagggtaaaggcctaccaaggcatcgatcagtagctggtctgagaggacgaccagccacactggaactgagacacggtccagactcctacgggaggcagcagtggggaattttggacaatgggcgcaagcctgatccagcaatgccgcgtgagtgaagaaggccttcgggttgtaaagctcttttgtcagggaagaaacgggcgtggctaatatccatgtctaatgacggtacctgaagaataagcaccggctaactacgtgccagcagccgcggtaatacgtagggtgcaagcgttaatcggaattactgggcgtaaagcgtgcgcaggcggttttgtaagtctgtcgtgaaatccccgggctcaacctgggaattgcgatggagactgcaaggctagaatctggcagaggggggtagaattccacgtgtagcagtgaaatgcgtagagatgtggaggaacaccgatggcgaaggcagccccctgggtcaagattgacgctcatgcacgaaagcgtggggagcaaacaggattagataccctggtagtccacgccctaaacgatgtctactagttgtcgggtcttaattgacttggtaacgcagctaacgcgtgaagtagaccgcctggggagtacggtcgcaagattaaaactcaaaggaattgacggggacccgcacaagcggtggatgatgtggattaattcgatgcaacgcgaaaaaccttacctacccttgacatggaaggaacctccgagagattggagggtgcccgaaagggaacctttacacaggtgctgcatggctgtcgtcagctcgtgtcgtgagatgttgggttaagtcccgcaacgagcgcaacccttgtcattagttgctacgaaagggcactctaatgagactgccggtgacaaaccggaggaaggtggggatgacgtcaagtcctcatggcccttatgggtagggcttcacacgtcatacaatggtacatacagagggccgccaacccgcgagggggagctaatcccagaaagtgtatcgtagtccggattgtagtctgcaactcgactgcatgaagttggaatcgctagtaatcgcggatcagcatgtcgcggtgaatacgttcccgggtcttgtacacaccgcccgtcacaccatgggagcgggttttaccagaagtaggtagcttaaccgtaaggagggcgcttaccacggtaggattcgtgactggggtg

SEQ ID NO: 2011 - DNA, 1394 bp, Massilia niastensis
  misc_feature (973)..(973): n is a, c, g, or t
gcaagtcgaacggcagcgcggggcaacctggcggcgagtggcgaacgggtgagtaatatatcggaacgtacccagaagtgggggataacgtagcgaaagttacgctaataccgcatacgatctacggatgaaagtgggggaccttcgggcctcatgcttgtggagcggccgatatctgattagctagttggtgaggtaaaggctcaccaaggcgacgatcagtagctggtctgagaggacgaccagccacactgggactgagacacggcccagactcctacgggaggcagcagtggggaattttggacaatgggcgcaagcctgatccagcaatgccgcgtgagtgaagaaggccttcgggttgtaaagctcttttgtcagggaagaaacggtccaggataataccctgggctaatgacggtacctgaagaataagcaccggctaactacgtgccagcagccgcggtaatacgtagggtgcaagcgttaatcggaattactgggcgtaaagcgtgcgcaggcggttttgtaagtctgacgtgaaatccccgggctcaacctgggaattgcgttggagactgcaaggctagaatctggcagaggggggtagaattccacgtgtagcagtgaaatgcgtagagatgtggaggaacaccgatggcgaaggcagccccctgggtcaagattgacgctcatgcacgaaagcgtggggagcaaacaggattagataccctggtagtccacgccctaaacgatgtctactagttgtcgggtcttaattgacttggtaacgcagctaacgcgtgaagtagaccgcctggggagtacggtcgcaagattaaaactcaaaggaattgacggggacccgcacaagcggtggatgatgtggattaattcgatgcaacgcgaaaaaccttacctacccttgacatgtcaggaatccttgagagatcgaggagtgcccgaaagggancctgaacacaggtgctgcatggctgtcgtcagctcgtgtcgtgagatgttgggttaagtcccgcaacgagcgcaacccttgtcattagttgctacgcaagagcactctaatgagactgccggtgacaaaccggaggaaggtggggatgacgtcaagtcctcatggcccttatgggtagggcttcacacgtcatacaatggtacatacagagggccgccaacccgcgagggggagctaatcccagaaagtgtatcgtagtccggatcgcagtctgcaactcgactgcgtgaagttggaatcgctagtaatcgcggatcagcatgtcgcggtgaatacgttcccgggtcttgtacacaccgcccgtcacaccatgggagcgggttttaccagaagtaggtagcttaaccgcaaggagggcgct

SEQ ID NO: 2012 - DNA, 1450 bp, Massilia oculi
  misc_feature (727)..(727): n is a, c, g, or t
acgctggcggcatgctttacacatgcaagtcgaacggtaacagggagcttgctccgctgacgagtggcgaacgggtgagtaatatatcggaacgtacccagaagtgggggataacgtagcgaaagttacgctaataccgcatacgatccacggatgaaagtaggggaccttcgggccttatgcttttggagcggccgatatctgattagctagttggtagggtaaaggcctaccaaggcgacgatcagtagctggtctgagaggacgaccagccacactggaactgagacacggtccagactcctacgggaggcagcagtggggaattttggacaatgggcgcaagcctgatccagcaatgccgcgtgagtgaagaaggccttcgggttgtaaagctcttttgtcagggaagaaacggtagaggctaatatcctttgctaatgacggtacctgaagaataagcaccggctaactacgtgccagcagccgcggtaatacgtagggtgcaagcgttaatcggaattactgggcgtaaagcgtgcgcaggcggttttgtaagtctgacgtgaaatccccgggctcaacctgggaattgcgttggagactgcaaggctagaatctggcagaggggggtagaattccacgtgtagcagtgaaatgcgtagagatgtggaggaacaccgatggcgaaggcagccccctgggtcaagattgacgctcatgcacnaaagcgtggggagcaaacaggattagataccctggtagtccacgccctaaacgatgtctactagttgtcgggttttaattaacttggtaacgcagctaacgcgtgaagtagaccgcctggggagtacggtcgcaagattaaaactcaaaggaattgacggggacccgcacaagcggtggatgatgtggattaattcgatgcaacgcgaaaaaccttacctacccttgacatgtacggaatgccgaagagatttggcagtgctcgaaagagaaccgtaacacaggtgctgcatggctgtcgtcagctcgtgtcgtgagatgttgggttaagtcccgcaacgagcgcaacccttgtcattagttgctacattcagttgagcactctaatgagactgccggtgacaaaccggaggaaggtggggatgacgtcaagtcctcatggcccttatgggtagggcttcacacgtcatacaatggtacatacagagggccgccaacccgcgagggggagctaatcccagaaagtgtatcgtagtccggatcgtagtctgcaactcgactacgtgaagttggaatcgctagtaatcgcggatcagcatgccgcggtgaatacgttcccgggtcttgtacacaccgcccgtcacaccatgggagcgggttttaccagaagtaggtagcttaaccgcaaggagggcgcttaccacggtaggattcgtgactgggg

SEQ ID NO: 2013 - DNA, 1430 bp, Massilia phosphatilytica
gcttggcggctgctttaccatgcagtcgaacggcagcgcggggcaacctggcggcgagtggcgaacgggtgagcaatatatcggaacgtacccaagagtgggggataacgtagcgaaagttacgctaataccgcatacgatctaaggatgaaagtgggggatcttcggacctcatgctcctggagcggccgatatctgattagctagttggtgaggtaaaggctcaccaaggcgacgatcagtagctggtctgagaggacgaccagccacactgggactgagacacggcccagactcctacgggaggcagcagtggggaattttggacaatgggcgcaagcctgatccagcaatgccgcgtgagtgaagaaggccttcgggttgtaaagctcttttgtcagggaagaaacggggttggctaatatctgatgctaatgacggtacctgaagaataagcaccggctaactacgtgccagcagccgcggtaatacgtagggtgcaagcgttaatcggaattactgggcgtaaagcgtgcgcaggcggttttgtaagtctgtcgtgaaagccccgggcttaacctgggaattgcgatggagactgcaaggcttgaatctggcagaggggggtagaattccacgtgtagcagtgaaatgcgtagagatgtggaggaacaccgatggcgaaggcagccccctgggtcaagattgacgctcatgcacgaaagcgtggggagcaaacaggattagataccctggtagtccacgccctaaacgatgtctactagttgtcgggtcttaattgacttggtaacgcagctaacgcgtgaagtagaccgcctggggagtacggtcgcaagattaaaactcaaaggaattgacggggacccgcacaagcggtggatgatgtggattaattcgatgcaacgcgaaaaaccttacctacccttgacatgtcaggaacctccgagagattggagggtgcccgaaagggaacctgaacacaggtgctgcatggctgtcgtcagctcgtgtcgtgagatgttgggttaagtcccgcaacgagcgcaacccttgtcattagttgctacgaaagggcactctaatgagactgccggtgacaaaccggaggaaggtggggatgacgtcaagtcctcatggcccttatgggtagggcttcacacgtcatacaatggtacatacagagggccgccaacccgcgagggggagctaatcccagaaagtgtatcgtagtccggatcgcagtctgcaactcgactgcgtgaagttggaatcgctagtaatcgcggatcagcatgccgcggtgaatacgttcccgggtcttgtacacaccgcccgtcacgccatgggagcgggttttaccagaagtaggtagctaaccgcaaggagggcgctacccacggtaggattcg

SEQ ID NO: 2014 - DNA, 1443 bp, Massilia plicata
tggcggctgctttacacatgcaagtcgaactgtaacagggagcttgctccgctgacgagtggcgaacgggtgagtaatatatcggaacgtacccaagagtgggggataacgtagcgaaagttacgctaataccgcatacgatccaaggatgaaagcaggggaccgcaaggccttgtgctcctggagcggccgatatctgattagctagttggtagggtaaaggcctaccaaggcatcgatcagtagctggtctgagaggacgaccagccacactggaactgagacacggtccagactcctacgggaggcagcagtggggaattttggacaatgggcgcaagcctgatccagcaatgccgcgtgagtgaagaaggccttcgggttgtaaagctcttttgtcagggaagaaacgggtgcggctaatatctgcatctaatgacggtacctgaagaataagcaccggctaactacgtgccagcagccgcggtaatacgtagggtgcaagcgttaatcggaattactgggcgtaaagcgtgcgcaggcggttttgtaagtctgttgtgaaatccccgggcttaacctgggaatggcaatggagactgcaaggctagagtttggcagaggggggtagaattccacgtgtagcagtgaaatgcgtagagatgtggaggaacaccgatggcgaaggcagccccctgggtcaagactgacgctcatgcacgaaagcgtggggagcaaacaggattagataccctggtagtccacgccctaaacgatgtctactagttgtcgggtcttaattgacttggtaacgcagctaacgcgtgaagtagaccgcctggggagtacggtcgcaagattaaaactcaaaggaattgacggggacccgcacaagcggtggatgatgtggattaattcgatgcaacgcgaaaaaccttacctacccttgacatgtacggaagccacgagagatcgaggtgtgctcgaaagagaaccgtaacacaggtgctgcatggctgtcgtcagctcgtgtcgtgagatgttgggttaagtcccgcaacgagcgcaacccttgtcattagttgctacgaaagagcactctaatgagactgccggtgacaaaccggaggaaggtggggatgacgtcaagtcctcatggcccttatgggtagggcttcacacgtcatacaatggtacatacagagggccgccaacccgcgagggggagctaatcccagaaagtgtatcgtagtccggattgtagtctgcaactcgactgcatgaagttggaatcgctagtaatcgcggatcagcatgtcgcggtgaatacgttcccgggtcttgtacacaccgcccgtcacaccatgggagcgggttttaccagaagtaggtagcttaaccgcaaggagggcgcttaccacggtaggattcgtgactggggtg

SEQ ID NO: 2015 - DNA, 1451 bp, Massilia psychrophila
attgaacgctggcggcatgccttacacatgcaagtcgaacggcagcgcggggcaacctggcggcgagtggcgaacgggtgagtaatatatcggaacgtgccctggagtgggggataacgcagcgaaagttgcgctaataccgcatacgatctaaggatgaaagcaggggaccgcaaggccttgtgctcctggagcggccgatatctgattagctagttggtggggtaaaggcctaccaaggcatcgatcagtagctggtctgagaggacgaccagccacactggaactgagacacggtccagactcctacgggaggcagcagtggggaattttggacaatgggcgcaagcctgatccagcaatgccgcgtgagtgaagaaggccttcgggttgtaaagctcttttgtcagggaagaaacggtgtgggctaatactctgcactaatgacggtacctgaagaataagcaccggctaactacgtgccagcagccgcggtaatacgtagggtgcaagcgttaatcggaattactgggcgtaaagcgtgcgcaggcggttttgtaagtttgtcgtgaaatccccgggctcaacctgggaatggcgatgaagactgcaaggctagaatctggcagaggggggtagaattccacgtgtagcagtgaaatgcgtagagatgtggaggaacaccgatggcgaaggcagccccctgggtcaagattgacgctcatgcacgaaagcgtggggagcaaacaggattagataccctggtagtccacgccctaaacgatgtctactagttgtcgggttttaattaacttggtaacgcagctaacgcgtgaagtagaccgcctggggagtacggtcgcaagattaaaactcaaaggaattgacggggacccgcacaagcggtggatgatgtggattaattcgatgcaacgcgaaaaaccttacctacccttgacatggtcggaagtccggagagatctggatgtgcccgcaagggaaccgatacacaggtgctgcatggctgtcgtcagctcgtgtcgtgagatgttgggttaagtcccgcaacgagcgcaacccttgtcattagttgctacgaaagagcactctaatgagactgccggtgacaaaccggaggaaggtggggatgacgtcaagtcctcatggcccttatgggtagggcttcacacgtcatacaatggtacatacagagggccgccaacccgcgagggggagctaatcccagaaagtgtatcgtagtccggattgcagtctgcaactcgactgcatgaagttggaatcgctagtaatcgcggatcagcatgtcgcggtgaatacgttcccgggtcttgtacacaccgcccgtcacaccatgggagcgggttttaccagaagtaggtagcttaaccgtaaggagggcgcttaccacggtaggattcgtgactggggtg

SEQ ID NO: 2016 - DNA, 1453 bp, Massilia timonae
attgaacgctggcggcatgctttacacatgcaagtcgaacggtaacagggagcttgctccgctgacgagtggcgaacgggtgagtaatatatcggaacgtacccaagagtgggggataacgtagcgaaagttacgctaataccgcatacgatccaaggatgaaagcaggggaccttcgggccttgtgctcctggagcggccgatatctgattagctagttggtgaggtaaaggctcaccaaggcgacgatcagtagctggtctgagaggacgaccagccacactggaactgagacacggtccagactcctacgggaggcagcagtggggaattttggacaatgggcgcaagcctgatccagcaatgccgcgtgagtgaagaaggccttcgggttgtaaagctcttttgtcagggaagaaacggcagaggctaatatccacggctaatgacggtacctgaagaataagcaccggctaactacgtgccagcagccgcggtaatacgtagggtgcaagcgttaatcggaattactgggcgtaaagcgtgcgcaggcggttttgtaagtctgtcgtgaaatccccgggctcaacctgggaattgcgatggagactgcaaggctagaatctggcagaggggggtagaattccacgtgtagcagtgaaatgcgtagagatgtggaggaacaccgatggcgaaggcagccccctgggtcaagattgacgctcatgcacgaaagcgtggggagcaaacaggattagataccctggtagtccacgccctaaacgatgtctactagttgtcgggttttaattaacttggtaacgcagctaacgcgtgaagtagaccgcctggggagtacggtcgcaagattaaaactcaaaggaattgacggggacccgcacaagcggtggatgatgtggattaattcgatgcaacgcgaaaaaccttacctacccttgacatgtcaggaagaccgaagagatctggctgtgcccgaaagggaacctgaacacaggtgctgcatggctgtcgtcagctcgtgtcgtgagatgttgggttaagtcccgcaacgagcgcaacccttgtcattagttgctacgcaagagcactctaatgagactgccggtgacaaaccggaggaaggtggggatgacgtcaagtcctcatggcccttatgggtagggcttcacacgtcatacaatggtacatacagagggccgccaacccgcgagggggagctaatcccagaaagtgtatcgtagtccggatcgtagtctgcaactcgactacgtgaagttggaatcgctagtaatcgcggatcagcatgccgcggtgaatacgttcccgggtcttgtacacaccgcccgtcacaccatgggagcgggttttaccagaagtaggtagcttaaccgtaaggagggcgcttaccacggtaggattcgtgactggggtg

SEQ ID NO: 2017 - DNA, 1405 bp, Massilia umbonata
gggcttcggcctggtggcgagtggcgaacgggtgagtaatatatcggaacgtgcccaagagtgggggataacgtagcgaaagttacgctaataccgcatacgatctaaggatgaaagtgggggatcgcaagacctcatgctcctggagcggccgatatctgattagctagttggtgaggtaaaggctcaccaaggcgacgatcagtagctggtctgagaggacgaccagccacactggaactgagacacggtccagactcctacgggaggcagcagtggggaattttggacaatgggggcaaccctgatccagcaatgccgcgtgagtgaagaaggccttcgggttgtaaagctcttttgtcagggaagaaaagggtacggctaatatccgtgcctcatgacggtacctgaagaataagcaccggctaactacgtgccagcagccgcggtaatacgtagggtgcaagcgttaatcggaattactgggcgtaaagcgtgcgcaggcggttttgtaagtctgtcgtgaaatccccgggcttaacctgggaatggcgatggagactgcaaggctagagtttggcagaggggggtagaattccacgtgtagcagtgaaatgcgtagagatgtggaggaacaccgatggcgaaggcagccccctgggtcaagactgacgctcatgcacgaaagcgtggggagcaaacaggattagataccctggtagtccacgccctaaacgatgtctactagttgttgggtcttaattgacttagtaacgcagctaacgcgtgaagtagaccgcctggggagtacggtcgcaagattaaaactcaaaggaattgacggggacccgcacaagcggtggatgatgtggattaattcgatgcaacgcgaaaaaccttacctacccttgacatgtcaggaatcctggagagatctaggagtgcccgaaagggaacctgaacacaggtgctgcatggctgtcgtcagctcgtgtcgtgagatgttgggttaagtcccgcaacgagcgcaacccttgtcattagttgctacgaaagagcactctaatgagactgccggtgacaaaccggaggaaggtggggatgacgtcaagtcctcatggcccttatgggtagggcttcacacgtcatacaatggtacatacagagggccgccaacccgcgagggggagctaatcccagaaagtgtatcgtagtccggattgtagtctgcaactcgactgcatgaagttggaatcgctagtaatcgcggatcagcatgtcgcggtgaatacgttcccgggtcttgtacacaccgcccgtcacaccatgggagcgggttttaccagaagtaggtagcttaaccgcaaggagggcgcttaccacggtaggattcgtgactggggtg

SEQ ID NO: 2018 - DNA, 1454 bp, Massilia yuzhufengensis
attgaacgctggcggcatgctttacacatgcaagtcgaacggcagcgcggggcaacctggcggcgagtggcgaacgggtgagtaatatatcggaacgtacccagaagtgggggataacgtagcgaaagttacgctaataccgcatacgatctacggatgaaagtgggggaccttcgggcctcatgcttttggagcggccgatatctgattagctagttggtagggtaaaggcctaccaaggcgacgatcagtagctggtctgagaggacgaccagccacactggaactgagacacggtccagactcctacgggaggcagcagtggggaattttggacaatgggcgcaagcctgatccagcaatgccgcgtgagtgaagaaggccttcgggttgtaaagctcttttgtcagggaagaaacggtctaggttaataccttgggctaatgacggtacctgaagaataagcaccggctaactacgtggccagcagcgcggtaatacgtagggtgcaagcgttaatcggaattactgggcgtaaagcgtgcgcaggcggttttgtaagtctgtcgtgaaagcccgggctcaacctgggaattgcgatggagactgcaaggcttgaatctggcagaggggggtagaattccacgtgtagcagtgaaatgcgtagagatgtggaggaacaccgatggcgaaggcagccccctgggtcaagattgacgctcatgcacgaaagcgtggggagcaaacaggattagataccctggtagtccacgccctaaacgatgtctactagttgtcgggttttaattaacttggtaacgcagctaacgcgtgaagtagaccgcctggggagtacggtcgcaagattaaaactcaaaggaattgacggggacccgcacaagcggtggatgatgtggattaattcgatgcaacgcgaaaaaccttacctacccttgacatggaaggaagtccggagagatctggatgtgcccgaaaggaaaccttcacacaggtgctgcatggctgtcgtcagctcgtgtcgtgagatgttgggttaagtcccgcaacgagcgcaacccttgtcattagttgctacatttagttgagcactctaatgagactgccggtgacaaaccggaggaaggtggggatgacgtcaagtcctcatggcccttatgggtagggcttcacacgtcatacaatggtacatacagagggccgccaacccgcgagggggagctaatcccagaaagtgtatcgtagtccggattgtagtctgcaactcgactacatgaagttggaatcgctagtaatcgcggatcagcatgttgcggtgaatacgttcccgggtcttgtacacaccgcccgtcacaccatgggagcgggttttaccagaagtaggtagcttaaccgcaaggggggcgcttaccacggtaggattcgtgactggggtg

SEQ ID NO: 2019 - DNA, 1411 bp, Mastigocladus laminosus
gatgaacgctggcggtatgcttaacacatgcaagtcgaacggggcttttcggagcctagtggcggacgggtgagtaacgcgtgagaatctagcttcaggttcgggacaacattgggaaaccgatgctaataccggatgtgccgtgaggtaaaaggcttgctgcctgaagatgagctcgcgtctgattagctagttggtggtgtaagggactaccaaggcgacgatcagtagctggtctgagaggatgatcagccacactggaactgagacacggtccagactcctacgggaggcagcagtggggaattttccgcaatgggcgaaagcctgacggagcaataccgcgtgagggaggaaggctcttgggttgtaaacctcttttctcaaggaagaatcttgacggtacttgaggaatcagcatcggctaactccgtgccagcagccgcggtaatacggaggatgcaagcgttatccggaatgattgggcgtaaagcgtccgcaggtggttgtgtgtgtctattgtcaaagggtcatgcttaacatgataaaggcagtggaaactacacgactagagtgcgttcggggcagagggaattcctggtgtagcggtgaaatgcgtagagatcaggaagaacaccggtggcgaaagcgctctgctaggcctgcactgacactgagggacgaaagctaggggagcgaatgggattagataccccagtagtcctagccgtaaacgatggatactaggcgttgagagtatcgaccctctcagtgccgtagctaacgcgttaagtatcccgcctggggagtacgcacgcaagtgtgaaactcaaaggaattgacgggggcccgcacaagcggtggagtatgtggtttaattcgatgcaacgcgaagaaccttaccagggcttgacatgtctgggacttcggtgaaagctgaaggtgccttcgggagccagaacacaggtggtgcatggctgtcgtcagctcgtgtcgtgagatgttgggttaagtcccgcaacgagcgcaaccctcgttcttagttgccagcacttcgggtgggcactctagggagactgccggtgacaaaccggaggaaggtggggatgacgtcaagtcagcatgccccttacgtcctgggctacacacgtactacaatgctcgagacaaagggcagcaagcaggtaactgcaagcaaatctcataaactcgggctcagttcagatcgcaggctgcaactcgcctgcgtgaaggtggaatcgctagtaattgcaggtcagcatactgcggtgaattcgttcccgggccttgtacacaccgcccgtcacaccatggaagctggtcacgcccgaagtcgttaccctaaccgttcgcgggggggacgccgaaggtaggactggtgactggggtg

SEQ ID NO: 2020 - DNA, 1411 bp, Mastigocoleus testarum
gatgaacgctggcggtatgcttaacacatgcaagtcgaacgaactcttcggagttagtggcggacgggtgagtaacgcgtgagaatctgcctccgggctcgggacaacagttggaaacgactgctaataccggatgtgcctattggtgaaagatttattacctggagatgagctcgcgttggattagctagttggtgtggtaagagcgcaccaaggcgacgatctatagctggtctgagaggacgatcagccacactgggactgagacacggcccagactcctacgggaggcagcagtggggaattttccgcaatgggcgaaagcctgacggagcaataccgcgtgagggaggaaggcttttgggttgtaaacctcttttctcaaggaagaagttctgacggtacttgaggaatcagcatcggctaactccgtgccagcagccgcggtaatacggaggatgcaagcgttatccggaatgattgggcgtaaagcgtccgcaggtggttatgcaagtttactgttaaagagtgaagcttaacttcataagggccgtagaaactgcatgactagagtgcgttcggggcagagggaattcctggtgtagcggtgaaatgcgtagatatcaggaagaacaccggtggcgaaagcgctctgctaggccgcaactgacactgagggacgaaagctaagggagcgaatgggattagataccccagtagtcttagccgtaaacgatggatactaggcgttgcttgtatcgacccgagcagtgccgtagctaacgcgttaagtatcccgcctggggagtacgcacgcaagtgtgaaactcaaaggaattgacgggggcccgcacaagcggtggagtatgtggtttaattcgatgcaacgcgaagaaccttaccaggacttgacatctggcgaatcttgctgaaaggtgagagtgccttcgggaacgccaagacaggtggtgcatggctgtcgtcagctcgtgtcgtgagatgttgggttaagtcccgcaacgagcgcaaccctcgtttttagttgccagcacttagggtgggcactctagagagactgccggtgacaaaccggaggaaggtggggacgacgtcaagtcatcatgccccttacgttctgggctacacacgtactacaatgctatggacaaagagcagccaactggcgacagtgcgctaatctcataaaccatggctcagttcagattgcaggctgcaactcgcctgcatgaaggaggaatcgctagtaattgcaggtcagcatactgcagtgaattcgttcccgggccttgtacacaccgcccgtcacaccatggaagttggtcacgcccgaagtcgttaccctaaccgttcgcggagggggatgccgaaggtaggactggtgactggggtg

SEQ ID NO: 2021 - DNA, 1478 bp, Megamonas hypermegale
gacgaacgctggcggcgtgcttaacacatgcaagtcgaacggggtgtttatttcggtaaacaccaagtggcgaacgggtgagtaacgcgtaagcaatctaccttcaagatggggacaacacttcgaaaggggtgctaataccgaatgaatgagagatgaccgcatggatatttctctaaaggaggcctctgaaaatgcttccgcttgaagatgagcttgcgtctgattagctagttggtgagggtaaaggcccaccaaggcgacgatcagtagccggtctgagaggatgaacggccacattgggactgagacacggcccagactcctacgggaggcagcagtggggaatcttccgcaatgggcgaaagcctgacggagcaacgccgcgtgaacgaagaaggtcttaggatcgtaaagttctgttgttaggggcgaagggtagcattttgaataagggtgctatttgacggtacttaacgaggaagccacggctaactacgtgccagcagccgcggtaatacgtaggcggcaagcgttgtccggaattattgggcgtaaagggagcgcaggcgggaagttaagcggactttaaaagtgcggggctcaaccccgtgagggggtccgaactgactttcttgagtgcaggagagggaagcggaattcctagtgtagcggtgaaatgcgtagatattaggaagaacaccagtggcgaaggcggctttctggactgtaactgacgctgaggctcgaaagctagggtagcgaacgggattagataccccggtagtcctagccgtaaacgatggatactaggtgtgggaggtatcgaccccttccgtgccggagttaacgcaataagtatcccgcctggggagtacggccgcaaggttgaaactcaaaggaattgacgggggcccgcacaagcggtggagtatgtggtttaattcgacgcaacgcgaagaaccttaccaagacttgacatcgactgacgtacttagagataagtatttttacttcggtaaacaggaagacaggtggtgcatggctgtcgtcagctcgtgtcgtgagatgttgggttaagtcccgcaacgagcgcaacccctatactatgttgccagcacgtaaaggtgggaactcatagtagactgccgcggacaacgcggaggaaggcggggatgacgtcaagtcatcatgccccttacgtcttgggctacacacgtactacaatgggatgaacagagggaagcgaagtcgcgaggcagagcggaaccctaaaagcatctctcagttcggattgcaggctgaaactcgcctgcatgaagtcggaatcgctagtaatcgcaggtcagcatactgcggtgaatacgttcccgggccttgtacacaccgcccgtcacaccacgaaagtcattcacacccgaagccggctaagggccgaaaggaaccgaccgtcgaaggtgggggcgatgattggggtg

SEQ ID NO: 2022 - DNA, 1489 bp, Megasphaera cerevisiae
gacgaacgctggcggcgtgcttaacacatgcaagtcgaacgagaggacaagagaagcttgcttcttttggaatcgagtggcaaacgggtgagtaacgcgtaaacaacctgccctccggatggggacaacagctggaaacggctgctaataccgaatacgatctaaaggccgcatgacctttagaagaaaagatggccactgaatatgctatcgccggaagaggggtttgcgtctgattagctagttggaggggtaacggcccaccaaggcaatgatcagtagccggtctgagaggatgaacggccacattggaactgagacacggtccagactcctacgggaggcagcagtggggaatcttccgcaatgggcgaaagcctgacggagcaacgccgcgtgagtgaagacggccttcgggttgtaaagctctgttatatgggacgaacgggtgtatggtcaatacccatacgccgtgacggtaccgtaagagaaagccacggctaactacgtgccagcagccgcggtaatacgtaggtggcaagcgttgtccggaatcattgggcgtaaagggcgcgcaggcggttcggtaagtcggtcttaaaagtgcggggcttaaccccgtgatgggattgaaactgccggactggagtgtcggagaggaaagcagaattcctagtgtagcggtgaaatgcgtagatattaggaggaataccagtggcgaaagcggctttctggacgacaactgacgctgaggcgcgaaagccaggggagcaaacgggattagataccccggtagtcctggccgtaaacgatggatactaggtgtaggaggtatcgaccccttctgtgccggagttaacgcaataagtatcccgcctggggagtacggccgcaaggttgaaactcaaaggaattgacgggggcccgcacaagcggtggagtatgtggtttaattcgacgcaacgcgaagaaccttaccaagccttgacattgagtgccagggatagagatatcctgttcttcttcggaagacgcgaaaacaggtggtgcacggctgtcgtcagctcgtgtcgtgagatgttgggttaagtcccgcaacgagcgcaacccctatcttctgttgccagcacgtaaaggtgggaactcagaagagactgccgcagacaatgcggaggaaggcggggatgacgtcaagtcatcatgccccttatggcttgggctacacacgtactacaatggctcttaatagagggaagcaaaggagcgatccggagcaaaccccaaaaacagagtcccagttcggattgcaggctgcaactcgcctgcatgaagcaggaatcgctagtaatcgcaggtcagcatactgcggtgaatacgttcccgggccttgtacacaccgcccgtcacaccacgaaagtcattcacacccgaagccggtgaggtaaccgcaaggagccagccgtcgaaggtgggggcgatgattggggtg

SEQ ID NO: 2023 - DNA, 1490 bp, Megasphaera hexanoica
gacgaacgctggcggcgtgcttaacacatgcaagtcgaacgagaggacatggaaagcttgctttttatggaatcgagtggcaaacgggtgagtaacgcgtaagcaacctgccctgcagatggggacaacagctggaaacggctgctaataccgaatacgaagcagctcccgcatgggggcagcttgaaaggatggcctctgaatatgctatcgctgcaggaggggcttgcgtctgattagctggttggaggggtaacggcccaccaaggcgacgatcagtagccggtctgagaggatgaacggccacattgggactgagacacggcccagactcctacgggaggcagcaggtggggaatcttccgcaatggacgaaagtctgacggagcaacgccgcgtgagtgaagacggccttcgggttgtaaagctctgttatacgggacgaacgggcgggatgctaataccatcctgttgtgacggtaccgtaagagaaagccacggctaactacgtgccagcagccgcggtaatacgtaggtggcaagcgttgtccggaattattgggcgtaaagggtgcgcaggcggtctcttaagtctgtcttaaaagtgcggggctcaaccccgtgaggggacggaaactgggagactggagtatcggagaggaaagcagaattcctagtgtagcggtgaaatgcgtagatattaggaggaataccagtggcgaaagcggctttctggacgacaactgacgctgaggcacgaaagccaggggagcgaacgggattagataccccggtagtcctggccgtaaacgatgggtactaggtgtaggaggtatcgaccccttctgtgccggagttaacgcaataagtaccccgcctggggagtacggccgcaaggctgaaactcaaaggaattgacgggggcccgcacaagcggtggagtatgtggtttaattcgacgcaacgcgaagaaccttaccaagccttgacattgatcgcaatggatagagatatccagttcctcttcggaggacgagaaaacaggtggtgcacggctgtcgtcagctcgtgtcgtgagatgttgggttaagtcccgcaacgagcgcaacccctatcttctgttaccagcacgtgatggtggggactcaggagagactgccgcagacaatgcggaggaaggcggggatgacgtcaagtcatcatgccccttatggcttgggctacacacgtactacaatggctcttaatagagggaagcgaaagggcgacctggagcaaaccccaaaaacagagtcccagttcggattgcaggctgcaacccgcctgcatgaaggaggaatcgctagtaatcgcaggtcagcatactgcggtgaatacgttcccgggccttgtacacaccgcccgtcacaccacgaaagtcattcacacccgaagccggtgaggcaaccgcaaggaaccagccgtcgaaggtgggggcgatgattggggtg

SEQ ID NO: 2024 - DNA, 1401 bp, Melaminivora alkalimesophila
cttaccatgcagtcgaacggtaacgggccttcgggtgccgacgagtggcgaacgggtgagtaatacatcggaacgtgcccgagagtgggggataacgaggcgaaagctttgctaataccgcatacgatctcaggatgaaagcaggggaccttcgggccttgcgctcacggagcggccgatggcagattaggtagttggtgggataagagcttaccaagcctgcgatctgtagctggtctgagaggatgatcagccacactgggactgagacacggcccagactcctacgggaggcagcagtggggaattttggacaatgggggcaaccctgatccagccatgccgcgtgcaggatgaaggccttcgggttgtaaactgcttttgtacggaacgaaaaagcgccttctaatacagggcgtccatgacggtaccgtaagaataagcaccggctaactacgtgccagcagccgcggtaatacgtagggtgcgagcgttaatcggaattactgggcgtaaagcgtgcgcaggcggtcatgcaagacagaggtgaaatccccgggctcaacctgggaactgcctttgtgactgcatggctggagtgcggcagagggggatggaattccgcgtgtagcagtgaaatgcgtagatatgcggaggaacaccgatggcgaaggcaatcccctgggcctgcactgacgctcatgcacgaaagcgtggggagcaaacaggattagataccctggtagtccacgccctaaacgatgtcaactggttgttggggatttatttcttcagtaacgaagctaacgcgtgaagttgaccgcctggggagtacggccgcaaggttgaaactcaaaggaattgacggggacccgcacaagcggtggatgatgtggtttaattcgatgctacgcgaagaaccttacccacctttgacatggtcggaaccctgcagagacgcaggggtgcccgaaagggagccgacacacaggtgctgcatggctgtcgtcagctcgtgtcgtgagatgttgggttaagtcccgcaacgagcgcaacccttgccattagttgctacgaaagggcactctaatgggactgccggtgacaaaccggaggaaggtggggatgacgtcaagtcctcatggcccttataggtggggctacacacgtcatacaatggctggtacagagggttgccaacccgcgagggggagccaatcccacaaagccagtcgtagtccggatcgcagtctgcaactcgactgcgtgaagtcggaatcgctagtaatcgcggatcagaatgtcgcggtgaatacgttcccgggtcttgtacacaccgcccgtcacaccatgggagcgggtctcgccagaagtgggtagcctaaccgcaaggagggcgct

SEQ ID NO: 2025 - DNA, 1468 bp, Melghirimyces algeriensis
  misc_feature (241)..(241): n is a, c, g, or t
gacgaacgctggcggcgtgcctaatacatgcaagtcgagcggaggaagctccttcgggagtggaatcagcggcggacgggtgagtaacacgtgggcaacctgcctgcaagatcgggataactccgggaaaccggggctaataccgggtaggatcttccatcgcatgatgggagatggaaaggcggcttcggctgtcacttgcagatgggcccgcggcgcattagctggttggtgaggtaanggctcaccaaggcgacgatgcgtagccgacctgagagggtgatcggccacactgggactgagacacggcccagactcctacgggaggcagcagtagggaattttccgcaatgggcgaaagcctgacggagcaacgccgcgtgagtgaggacggccttcgggttgtaaagctctgttcttcgggaagaacgacgggagggtgaatagcccttttgtgtgacggtaccgaagaagaaagccccggctaactacgtgccagcagccgcggtaatacgtagggggcaagcgttgtccggaattattgggcgtaaagcgcgcgcaggcggcttgttaagtctggtgtgaaagaccacggctcaaccgtgggggtgcatcagaaactgacaggcttgagtgcaggagaggagagtggaattcccggtgtagcggtggaatgcgtagagatcgggaggaacaccagtggcgaaggcggctctctggcctgtaactgacgctgaggcgcgaaagcgtggggagcgaacaggattagataccctggtagtccacgccgtaaacgatgagtgctaggtgttgggggtttccgccctctgtgccgaaggtaacccaataagcactccgcctggggagtacggccgcaaggctgaaactcaaaggaattgacgggggcccgcacaagcggtggagcatgtggtttaattcgaagcaacgcgaagaaccttaccagggcttgacatcccgctgaccggtgtagagatacaccttcccttcggggcagcggtgacaggtggtgcatggttgtcgtcagctcgtgtcgtgagatgttgggttaagtcccgcaacgagcgcaacccttatcgtcagttgccagcacatcatggtgggcactctggcgagacagccggtgaaagccggaggaaggtggggatgacgtcaaatcatcatgccccttatgtcctgggcgacacacgtgctacaatggccggtacaacgagcagcgaacccgcgagggggagccaatcccaaaaaaccggtctcagttcggatcgcaggctgcaactcgcctgcgtgaagctggaatcgctagtaatcgcagatcagcatgctgcggtgaatacgttcccgggccttgtacacaccgcccgtcacaccacgagagtctgcaacacccgaagtcagtgagggaaccttttggacccagctgccgaaggtggggcagatgattggggtg

SEQ ID NO: 2026 - DNA, 1427 bp, Melghirimyces profundicolus
tgcagtcgagcggaggagccgacggatcccttcggggtgacgttggtggaatcagcggcggacgggtgagtaacacgtgggcaacctgcccgcaagaccgggataactccgggaaaccggggctaataccggataggacattcccttgcatgagggggtgtggaaaggcggccttttggctgtcacttgcggatgggcccgcggcgcattagcttgttggtgaggtaacggctcaccaaggcgacgatgcgtagccgacctgagagggtgaccggccacactgggactgagacacggcccagactcctgcgggaggcagcagtagggaattttccgcaatgggcgaaagcctgacggagcaacgccgcgtgagtgaggacggccttcgggttgtaaagctctgttctgcgggaagaacgacggccgggtgaagaatccggccgggtgacggtaccgcagaagaaagccccggctaactacgtgccagcagccgcggtaatacgtagggggcaagcgttgtccggaattattgggcgtaaagcgcgcgcaggcggcctgttaagtcgggtgtgaaagaccacggctcaaccgtgggggtgcatccgaaactggcaggcttgagtgcaggagaggagagcggaattcccggtgtagcggtggaatgcgtagagatcgggaggaacaccagtggcgaaggcggctctctggcctgtgactgacgctgaggcgcgaaagcgtggggagcgaacaggattagataccctggtagtccacgccgtaaacgatgagtgctaggtgttgggggtatcacgccctctgtgccgaaggtaacccaataagcactccgcctggggagtacggccgcaaggctgaaactcaaaggaattgacgggggcccgcacaagcggtggagcatgtggtttaattcgaagcaacgcgaagaaccttaccagggcttgacatcccgctgaccggcgtagagatacgccttcccttcggggcagcggtgacaggtggtgcatggttgtcgtcagctcgtgtcgtgagatgttgggttcagtcccgcaacgagcgcaacccctatcgtcagttgccagcacttcgggtgggcactctggcgagacagccggtgaaagccggaggaaggtggggatgacgtcaaatcatcatgccccttatgtcctgggctacacacgtgctacaatggccggtacaacgggcagcgaacccgcgagggggagccaatcccaaaaaaccggtctcagttcggatcgcaggctgcaactcgcctgcgtgaagctggaatcgctagtaatcgcggatcagcatgccgcggtgaatacgttcccgggccttgtacacaccgcccgtcacaccacgagagtctgcaacacccgaagtcggtgagggaaccctttggacccagc

SEQ ID NO: 2027 - DNA, 1485 bp, Melghirimyces thermohalophilus
gacgaacgctggcggcgtgcctaatacatgcaagtcgtgcggaggaagccgacggatcccttcggggtgaagacggtggaatcagcggcggacgggtgagtaacacgtgggcaacctgcctgcaagaccgggataactccgggaaaccggggctaataccggataggacttttcatcgcctgatgggaagtggaaaggcggctttggctgtcacttgcagatgggcccgcggcgcattagctagttggtggggtaatggcctaccaaggcaacgatgcgtagccgacctgagagggtgatcggccacactgggactgagacacggcccagactcctacgggaggcagcagtagggaattttccgcaatgggcgcaagcctgacggagcacgccgcgtgagtgaggacggccttcgggttgtaaaactctgttctgcgggaagaacggcagccgggtgaacagtccggttgagtgacggtaccgcagaagaaagccccggctaactacgtgccagcagccgcggtaatacgtagggggcaagcgttgtccggaattattgggcgtaaagggcgcgcaggcggcctgttaagtctgatgtgaaagaccgcggctcaaccgcggggtggcatcagaaactggcaggcttgagtgcaggagaggagagtggaattcccggtgtagcggtggaatgcgtagagatcgggaggaacaccagtggcgaaggcggctctctggcctgttactgacgctgaggcgcgaaagcgtggggagcgaacaggattagataccctggtagtccacgccgtaaacgatgagtgctaggtgttgggggtatcacgccctctgtgccgaaggtaacccaataagcactccgcctggggagtacggccgcaaggctgaaactcaaaggaattgacgggggcccgcacaagcggtggagcatgtggtttaattcgaagcaacgcgaagaaccttaccagggcttgacatcccgctgatcggtgtagagatacaccttcccttttgggcagcggtgacaggtggtgcatggttgtcgtcagctcgtgtcgtgagatgttgggttcagtcccgcaacgagcgcaacccttatcgtcagttgccagcacttggggtgggcactctggcgagacagccggtgaaagccggaggaaggtggggatgacgtcaaatcatcatgccccttatgtcctgggctacacacgtgctacaatggccggtacaacgggcagcgaacccgcgagggggagccaatcccagaaaaccggtctcagttcggatcgcaggctgcaactcgcctgcgtgaagctggaatcgctagtaatcgcggatcagcatgccgcggtgaatccgttcccgggccttgtacacaccgcccgtcacaccacgagagtctgcaacacccgaagtcggtgagggaacccttatgggacccagccgccgaaggtggggccgatgattggggtg

SEQ ID NO: 2028 - DNA, 1468 bp, Melioribacter roseus
gacgaacgctggcggcgtgcttaacacatgcaagtctaggggaaattccggcttcggttggaagagtacactggcgcacgggtgagtaatatgtaagtaacctacccataggttcgggataactcgtcgaaagacgggctaataccgaatgatgcagcggacccgcatgggtatgttgttaaagcctatatggtgcctatggatgggcttgcatccgattagctagttggtagggtaacggcctaccaaggcgacgatcggtagctggtctgagaggatgatcagccacactggaactgagacacggtccagactcctacgggaggcagcagtgaggaatattgggcaatgcccgcaagggtgacccagcaacgccgcgtggaggatgacggccgtaaggttgtaaactccttttgagagggacgaaaaattccgatggaatcggaacttgactgtacctctagaaaaagccccggctaactacgtgccagcagccgcggtaatacgtagggggcaagcgttgtccggatttactgggtgtaaagggcgcgtaggcggacctgttagtcagaggtgaaatcctgcggcttaaccgtagaactgcctttgatactgcaggtcttgagttcgaaagagagtagcggaattccaggtgtagtggtgaaatacgtagatatctggaagaacaccagtggcgaaggcggctacttggttcgcaactgacgctgaggcgcgaaagcgtggggagcaaacaggattagataccctggtagtccacgccgtaaacgatgaatactaggtgttggctccgttaggagtcagtgccgcagctaacgcattaagtattccacctggggagtacgatcgcaaggttgaaactcaaaggaattgacgggggcccgcacaagcagtggagcatgtggtttaattcgatgcaacgcgaagaaccttacctaggcttgaaaagcaggcgaccgggtgtgaaagcacccttcccttcggggcgcctgtacaggtgctgcatggctgtcgtcagctcgtgccgtgaggtgttgggttaagtcccgcaacgagcgcaacccctaccattagttgccatcaggttaagctgggcactctaatgggactgcctacgcaagtagtgaggaaggtggggatgacgtcaagtcagcatggcccttacgcctagggctacacacgtgctacaatgggtgctacaacgggtagcgaaaccgcgaggtggagccaatccctaaaaagcatcctcagttcggattggagtctgcaacccgactccatgaagctggaattgctagtaatcgcgcatcagcacggcgcggtgaatacgttcccgggccttgtacacaccgcccgtcaagccatggaagccgggggtacccgaagtcagtgacccaactccgcctcggcggagagggagctgccgaaggtaaaaccggtgactggggct

SEQ ID NO: 2029 - DNA, 1458 bp, Melittangium boletus
aacgaacgctggcggcgtgcctaacacatgcaagtcgagcgcgaatggagcaatcctagtagagcggcgcacgggtgcgtaacacgtgggtaatctgcctgggtgtctgggataaccagtcgaaagattggctaataccggatgagcccccgggagcttcggctcttgagggaaaaggtggcctctgtatacaagctatcacacccagatgagcccgcggcccatcagctagttggcggggtaatggcccaccaaggcgacgacgggtagctggtctgagaggacgatcagccacactggaactgagacacggtccagactcctacgggaggcagcagtggggaattttgcgcaatgggcgaaagcctgacgcagcaacgccgcgtgtgtgatgaaggtctttggattgtaaagcactttcgaccgggacgaaaaccccctggctaatactcaggggcttgacggtaccgggagaagaagcaccggctaactctgtgccagcagccgcggtaatacagagggtgcaagcgttgttcggaattattgggcgtaaagcgcgtgtaggcggctttgcaagtcggatgtgaaagccctcggctcaaccgaggaagtgcgttcgaaactgcagagcttgagtgccggagagggtggcggaattccccaagtagaggtgaaattcgtagatatggggaggaacaccggtggcgaaggcggccacctggacggtgactgacgctgagacgcgaaagcgtgggtagcaaacaggattagataccctggtagtccacgccgtaaacgatgagaactaggtgtcgtgggtgttgacccccgcggtgccgtagctaacgcattaagttctccgcctgggaagtacggtcgcaagactaaaactcaaaggaattgacgggggcccgcacaagcggtggagcatgtggtttaattcgacgcaacgcgcagaaccttacctggtcttgacatcctcggaacctctcagagatgagggggtgcccgcaagggaaccgagagacaggtgctgcatggctgtcgtcagctcgtgtcgtgagatgttgggttaagtcccgcaacgagcgcaaccctcgcctttagttgccacgcaagtggatctctagagggactgccggtgttaaaccggaggaaggtggggatgacgtcaagtcctcatggcctttatgaccagggctacacacgtgctacaatggccggtacaaagcgttgccaactcgcgagagggagctaatcgcataaaaccggtctcagttcagattggagtctgcaactcgactccatgaaggcggaatcgctagtaatcgcagatcagcacgctgcggtgaatacgttcccgggccttgtacacaccgcccgtcacaccatgggagtcgattgctccagaagtcatctcaccaagaggtgcccaaggagtggtcggtaactggggtg

SEQ ID NO: 2030 - DNA, 1411 bp, Merismopedia glauca
gatgaacgctggcggtatgcctaacacatgcaagtcgaacgggctcttcggagctagtggcggacgggtgagtaacacgtaagaacctaccttcaggatggggacaacagttggaaacgactgctaatacccgatgtgccgagaggcgaaagatttatcgcctgaagatgggcttgcggctgattagctagttggtggtgtaatggactaccaaggcaacgatcagtagctggtctgagaggatgagcagccacactgggactgagacacggcccagactcctacgggaggcagcagtggggaattttccgcaatgggcgaaagcctgacggagcaataccgcgtgagggaggaaggttcttggattgtaaacctcttttctcagggaagaagatctgacggtacctgaggaataagcatcggctaactccgtgccagcagccgcggtaatacggaggatgcaagcgttatccggaatcattgggcgtaaagcgtccgtaggtggcgaagcaagtctgctgtcaaagaatggagcttaactccataaaggcggtggaaactgcgtcgctagagtacggtaggggtagcgggaattcccagtgtagcggtgaaatgcgtagatattgggaagaacatcggtggcgaaagcgcgctactgggcctgtactgacactgagggacgaaagctaggggagcaaaagggattagatacccctgtagtcctagccgtaaacgatggatactaggcgttgctcgtatcgacccgagcagtgccgaagctaacgcgttaagtatcccgcctggggagtacgctcgcaagagtgaaactcaaaggaattgacgggggcccgcacaagcggtggagtatgtggtttaattcgatgcaacgcgaagaaccttaccaaggcttgacatccccagaatcctcttgaaagagaggagtgccttcgggaactgggagacaggtggtgcatggctgtcgtcagctcgtgtcgtgagatgttgggttaagtcccgcaacgagcgcaacccacgtttttagttgccagcattaagttgggcactctagaaagactgccggtgacaaaccggaggaaggtgtggacgacgtcaagtcatcatgccccttacgccttgggctacacacgtactacaatggtcaggacaacgggcagcgagcgcgcaagtgtaagcgaatcccaacaaacctggcctcagttcagattgcaggctgcaactcgcctgcatgaaggaggaatcgctagtaatcgcaggtcagcatactgcggtgaattcgttcccgggccttgtacacaccgcccgtcacaccatgggagctggtcacgcccgaagtcgttactccaacctttcgagggggaggacgcctaaggcagggctagtgactggggtg

SEQ ID NO: 2031 - DNA, 1330 bp, Mesocricetibacter intestinalis
attgaacgctggcggcaggcttaacacatgcaagtcgaacggtagcaggaagagagcttgctttctttgctgacgagtggcggacgggtgagtaatgcttgggaatctggcttatggagggggataactacgggaaactgtagctaataccgcgtataatcgagagatgaaaggccgggaccttagggccggttgccataagatgagcccaagtgggattaggtagttggtggggtaaaggcctaccaagcctgcgatctctagctggtctgagaggatggccagccacactgggactgagacacggcccagactcctacgggaggcagcagtggggaatattgcgcaatggggggaaccctgacgcagccatgccgcgtgaatgaagaaggccttcgggttgtaaagttctttcggtaatgaggaaggagatggggttaacagccttatcaattgacgttaattacagaagaagcaccggctaactccgtgccagcagccgcggtaatacggagggtgcgagcgttaatcggaataactgggcgtaaagggcacgcaggcggatttttaagtgaggtgtgaaagccccgggcttaacctgggaattgcatttcagactgggaatctagagtactttagggaggggtagaattccacgtgtagcggtgaaatgcgtagagatgtggaggaataccgaaggcgaaggcagccccttgggaatgtactgacgctcatgtgcgaaagcgtggggagcaaacaggattagataccctggtagtccacgctgtaaacgctgtcgatttggggattggggtttagccctggtgcccgaagctaacgtgataaatcgaccgcctggggagtacggccgcaaggttaaaactcaaatgaattgacgggggcccgcacaagcggtggagcatgtggtttaattcgatgcaacgcgaagaaccttacctactcttgacatccagagaatcctgtagagatacgggagtgccttcgggaactttgagacaggtgctgcatggctgtcgtcagctcgtgttgtgaaatgttgggttaagtcccgcaacgagcgcaacccttatcctttgttgccagcgcgtaatggcgggaactcaaaggagactgccggtgataaaccggaggaaggtggggatgacgtcaagtcatcatggcccttacgagtagggctacacacgtgctacaatggtgcatacagagggcggcgaagtcgtaaggcggagcgaatctcagaaagtgcatctaagtccggattggcgtctgcaactcgacgccatgaagtcggaatcgctagtaatcgcga

SEQ ID NO: 2032 - DNA, 1486 bp, Mesorhizobium albiziae
aacgaacgctggcggcaggcttaacacatgcaagtcgagcgcccctccttcaagcaagcttgaaggagttctttttccgccgggaggcggggagggaattcaagaaagccccaggctttcttgatggaggggagcggcagacgggtgagtaacgcgtgggaatctacccatctctacggaacaactccgggaaactggagctaataccgtatacgtccttcgggagaaagatttatcggagatggatgagcccgcgttggattagctagttggtggggtaatggcctaccaaggcgacgatccatagctggtctgagaggatgatcagccacactgggactgagacacggcccagactcctacgggaggcagcagtggggaatattggacaatgggcgcaagcctgatccagccatgccgcgtgagtgatgaaggccctagggttgtaaagctctttcaccggtgaagataatgacggtaaccggagaagaagccccggctaacttcgtgccagcagccgcggtaatacgaagggggctagcgttgttcggaattactgggcgtaaagcgcacgtaggcggatacttaagttaggggtgaaatcccagagctcaactctggaactgcctttaatactgggtatctcgagtccgagagaggtgagtggaattccgagtgtagaggtgaaattcgtagatattcggaggaacaccagtggcgaaggcggctcactggctcggtactgacgctgaggtgcgaaagcgtggggagcaaacaggattagataccctggtagtccacgccgtaaacgatggaagctagccgttggcaagtttacttgtcggtggcgcagctaacgcattaagcttcccgcctggggagtacggtcgcaagattaaaactcaaaggaattgacgggggcccgcacaagcggtggagcatgtggtttaattcgaagcaacgcgcagaaccttaccagcccttgacatcccggtcgcggtttccagagatggataccttcagttcggctggaccggtgacaggtgctgcatggctgtcgtcagctcgtgtcgtgagatgttgggttaagtcccgcaacgagcgcaaccctcgcccttagttgccagcattcagttgggcactctaaggggactgccggtgataagccgagaggaaggtggggatgacgtcaagtcctcatggcccttacgggctgggctacacacgtgctacaatggtggtgacagtgggcagcgagaccgcgaggtcgagctaatctccaaaagccatctcagttcggattgcactctgcaactcgagtgcatgaagttggaatcgctagtaatcgcggatcagcatgccgcggtgaatacgttcccgggccttgtacacaccgcccgtcacaccatgggagttggttttacccgaaggtagtgtgctaaccgcaaggaggcagctaaccacggtagggtcagcgactggggtg

SEQ ID NO: 2033 - DNA, 1406 bp, Mesorhizobium amorphae
aacgaacgctggcggcaggcttaacacatgcaagtcgagcgccccgcaaggggagcggcagacgggtgagtaacgcgtgggaatctacccatctctacggaacaactccgggaaactggagctaataccgtatacgtccttcgggagaaagatttatcggagatggatgagcccgcgttggattagctagttggtggggtaatggcctaccaaggcgacgatccatagctggtctgagaggatgatcagccacactgggactgagacacggcccagactcctacgggaggcagcagtggggaatattggacaatgggcgaaagcctgatccagccatgccgcgtgagtgatgaaggccctagggttgtaaagctctttcaacggtgaagataatgacggtaaccgtagaagaagccccggctaacttcgtgccagcagccgcggtaatacgaagggggctagcgttgttcggaattactgggcgtaaagcgcacgtaggcggatacttaagtcaggggtgaaatcccggggctcaaccccggaactgcctttgatactgggtatctcgagtccggaagaggtgagtggaattccgagtgtagaggtgaaattcgtagatattcggaggaacaccagtggcgaaggcggctcactggtccggtactgacgctgaggtgcgaaagcgtggggagcaaacaggattagataccctggtagtccacgccgtaaacgatggaagctagccgttggcaagtttacttgtcggtggcgcagctaacgcattaagcttcccgcctggggagtacggtcgcaagattaaaactcaaaggaattgacgggggcccgcacaagcggtggagcatgtggtttaattcgaagcaacgcgcagaaccttaccagcccttgacatcccggtcgcggtttccagagatggattccttcagttcggctggaccggtgacaggtgctgcatggctgtcgtcagctcgtgtcgtgagatgttgggttaagtcccgcaacgagcgcaaccctcgcccttagttgccagcattaagttgggcactctaaggggactgccggtgataagccgagaggaaggtggggatgacgtcaagtcctcatggcccttacgggctgggctacacacgtgctacaatggtggtgacagtgggcagcgagaccgcgaggtcgagctaatctccaaaagccatctcagttcggattgcactctgcaactcgagtgcatgaagttggaatcgctagtaatcgcggatcagcatgccgcggtgaatacgttcccgggccttgtacacaccgcccgtcacaccatgggagttggttttacccgaaggcgctgtgctaaccgcaaggaggcaggcgaccacggtaggtcagcgactggggtg

SEQ ID NO: 2034 - DNA, 1407 bp, Mesorhizobium australicum
aacgaacgctggcggcaggcttaacacatgcaagtcgagcgccccgcaaggggagcggcagacgggtgagtaacgcgtgggaatctacccatctctacggaacaactccgggaaactggagctaataccgtatacgtccttttggagaaagatttatcggagatggatgagcccgcgttggattagctagttggtggggtaatggcctaccaaggcgacgatccatagctggtctgagaggatgatcagccacactgggactgagacacggcccagactcctacgggaggcagcagtggggaatattggacaatgggcgcaagcctgatccagccatgccgcgtgagtgatgaaggccctagggttgtaaagctctttcaacggtgaagataatgacggtaaccgtagaagaagccccggctaacttcgtgccagcagccgcggtaatacgaagggggctagcgttgttcggaattactgggcgtaaagcgcacgtaggcggattgttaagttaggggtgaaatcccagggctcaaccctggaactgcctttaatactggcaatctcgagtccgagagaggtgagtggaattccgagtgtagaggtgaaattcgtagatattcggaggaacaccagtggcgaaggcggctcactggctcggtactgacgctgaggtgcgaaagcgtggggagcaaacaggattagataccctggtagtccacgccgtaaactatgagagctagccgtcggcaagtttacttgtcggtggcgcagctaacgcattaagctctccgcctggggagtacggtcgcaagattaaaactcaaaggaattgacgggggcccgcacaagcggtggagcatgtggtttaattcgaagcaacgcgcagaaccttaccagcccttgacatcccggtcgcggtttccagagatggataccttcagttcggctggaccggtgacaggtgctgcatggctgtcgtcagctcgtgtcgtgagatgttgggttaagtcccgcaacgagcgcaaccctcgcccttagttgccagcattaagttgggcactctaaggggactgccggtgataagccgagaggaaggtggggatgacgtcaagtcctcatggcccttacgggctgggctacacacgtgctacaatggtggtgacagtgggcagcgagaccgcgaggtcgagctaatctccaaaagccatctcagttcggattgcactctgcaactcgagtgcatgaagttggaatcgctagtaatcgcggatcagcatgccgcggtgaatacgttcccgggccttgtacacaccgcccgtcacaccatgggagttggttttacccgaaggcgctgtgctaaccgcaaggaggcaggcgaccacggtagggtcagcgactggggtg

SEQ ID NO: 2035 - DNA, 1407 bp, Mesorhizobium ciceri
  misc_feature (317)..(317): n is a, c, g, or t
  misc_feature (531)..(531): n is a, c, g, or t
aacgaacgctggcggcaggcttaacacatgcaagtcgagcgccccgcaaggggagcggcagacgggtgagtaacgcgtgggaatctacccatctctacggaacaactccgggaaactggagctaataccgtatacgtccttcgggagaaagatttatcggagatggatgagcccgcgttggattagctagttggtggggtaatggcctaccaaggcgacgatccatagctggtctgagaggatgatcagccacattgggactgagacacggcccaaactcctacgggaggcagcagtggggaatattggacaatggncgaaagcctgatccagccatgccgcgtgagtgatgaaggccctagggttgtaaagctctttcaacggtgaagataatgacggtaaccgtagaagaagccccggctaacttcgtgccagcagccgcggtaatacgaagggggctagcgttgttcggaattactgggcgtaaagcgcacgtaggcggattgttaagttaggggtgaaatcccaggnctcaaccctggaactgcctttaatactggcaatctcgagtccgagagaggtgagtggaattccgagtgtagaggtgaaattcgtagatattcggaggaacaccagtggcgaaggcggctcactggctcggtactgacgctgaggtgcgaaagcgtggggagcaaacaggattagataccctggtagtccacgccgtaaactatgagagctagccgtcggcaagtttacttgtcggtggcgcagctaacgcattaagctctccgcctggggagtacggtcgcaagattaaaactcaaaggaattgacgggggcccgcacaagcggtggagcatgtggtttaattcgaagcaacgcgcagaaccttaccagcccttgacatcccggtcgcggtttccagagatggataccttcagttcggctggaccggtgacaggtgctgcatggctgtcgtcagctcgtgtcgtgagatgttgggttaagtcccgcaacgagcgcaaccctcgcccttagttgccagcattaagttgggcactctaaggggactgccggtgataagccgagaggaaggtggggatgacgtcaagtcctcatggcccttacgggctgggctacacacgtgctacaatggtggtgacagtgggcagcgagaccgcgaggtcgagctaatctccaaaaaccatctcagttcggattgcactctgcaactcgagtgcatgaagttggaatcgctagtaatcgcggatcagcatgccgcggtgaatacgttcccgggccttgtacacaccgcccgtcacaccatgggagttggttttacccgaaggcgctgtgctaaccgcaaggaggcaggcgaccacggtagggtcagcgactggggtg

SEQ ID NO: 2036 - DNA, 1462 bp, Mesorhizobium delmotii
ggctcagaacgaacgctggcggcaggcttaacacatgcaagtcgagcgccccgcaaggggagcggcagacgggtgagtaacgcgtgggaatctacccatctctacggaacaactccgggaaactggagctaataccgtatacgtccttttggagaaagatttatcggagatggatgagcccgcgttggattagctagttggtggggtaatggcctaccaaggcgacgatccatagctggtctgagaggatgatcagccacattgggactgagacacggcccaaactcctacgggaggcagcagtggggaatattggacaatgggcgcaagcctgatccagccatgccgcgtgagtgatgaaggccctagggttgtaaagctctttcaacggtgaagataatgacggtaaccgtagaagaagccccggctaacttcgtgccagcagccgcggtaatacgaagggggctagcgttgttcggaattactgggcgtaaagcgcacgtaggcggatatttaagtcaggggtgaaatcccggggctcaaccccggaactgcctttgatactgggtatctcgagtccgagagaggtgagtggaattccgagtgtagaggtgaaattcgtagatattcggaggaacaccagtggcgaaggcggctcactggctcggtactgacgctgaggtgcgaaagcgtggggagcaaacaggattagataccctggtagtccacgccgtaaacgatggaagctagccgttggcaagtttacttgtcggtggcgcagctaacgcattaagcttcccgcctggggagtacggtcgcaagattaaaactcaaaggaattgacgggggcccgcacaagcggtggagcatgtggtttaattcgaagcaacgcgcagaaccttaccagcccttgacatcccggtcgcggtctccagagatggagaccttcagttcggctggaccggtgacaggtgctgcatggctgtcgtcagctcgtgtcgtgagatgttgggttaagtcccgcaacgagcgcaaccctcgcccttagttgccagcattcagttgggcactctaaggggactgccggtgataagccgagaggaaggtggggatgacgtcaagtcctcatggcccttacgggctgggctacacacgtgctacaatggtggtgacagtgggcagcgagaccgcgaggtcgagctaatctccaaaagccatctcagttcggattgcactctgcaactcgagtgcatgaagttggaatcgctagtaatcgcggatcagcatgccgcggtgaatacgttcccgggccttgtacacaccgcccgtcacaccatgggagttggttttacccgaaggcgctgtgctaaccgcaaggaggcaggcgaccacggtagggtcagcgactggggtgaagtcgtaacaaggtagccgtaggggaacctgcggctggatcacctcc

SEQ ID NO: 2037 - DNA, 1407 bp, Mesorhizobium erdmanii
aacgaacgctggcggcaggcttaacacatgcaagtcgagcgccccgcaaggggagcggcagacgggtgagtaacgcgtgggaatctacccatctctacggaacaactccgggaaactggagctaataccgtatacgtccttttggagaaagatttatcggagatggatgagcccgcgttggattagctagttggtggggtaatggcctaccaaggcgacgatccatagctggtctgagaggatgatcagccacactgggactgagacacggcccagactcctacgggaggcagcagtggggaatattggacaatgggcgcaagcctgatccagccatgccgcgtgagtgatgaaggccctagggttgtaaagctctttcaacggtgaagataatgacggtaaccgtagaagaagccccggctaacttcgtgccagcagccgcggtaatacgaagggggctagcgttgttcggaattactgggcgtaaagcgcacgtaggcggatacttaagtcaggggtgaaatcccggggctcaaccccggaactgcctttgatactgggtatctcgagtccggaagaggtgagtggaattccgagtgtagaggtgaaattcgtagatattcggaggaacaccagtggcgaaggcggctcactggtccggtactgacgctgaggtgcgaaagcgtggggagcaaacaggattagataccctggtagtccacgccgtaaacgatggaagctagccgttggcaagtttacttgtcggtggcgcagctaacgcattaagcttcccgcctggggagtacggtcgcaagattaaaactcaaaggaattgacgggggcccgcacaagcggtggagcatgtggtttaattcgaagcaacgcgcagaaccttaccagcccttgacatcccggtcgcggtttccagagatggataccttcagttcggctggaccggtgacaggtgctgcatggctgtcgtcagctcgtgtcgtgagatgttgggttaagtcccgcaacgagcgcaaccctcgcccttagttgccagcattcagttgggcactctaaggggactgccggtgataagccgagaggaaggtggggatgacgtcaagtcctcatggcccttacgggctgggctacacacgtgctacaatggtggtgacagtgggcagcgagaccgcgaggtcgagctaatctccaaaagccatctcagttcggattgcactctgcaactcgagtgcatgaagttggaatcgctagtaatcgcggatcagcatgccgcggtgaatacgttcccgggccttgtacacaccgcccgtcacaccatgggagttggttttacccgaaggcgctgtgctaaccgcaaggaggcaggcgaccacggtagggtcagcgactggggtg

SEQ ID NO: 2038 - DNA, 1408 bp, Mesorhizobium hawassense
aacgaacgctggcggcaggcttaacacatgcaagtcgagcgccccgcaaggggagcggcagacgggtgagtaacgcgtgggaatctacccatctctacggaacaactccgggaaactggagctaataccgtatacgtccttcgggagaaagatttatcggagatggatgagcccgcgttggattagctagttggtggggtaatggcctaccaaggcgacgatccatagctggtctgagaggatgatcagccacactgggactgagacacggcccagactcctacgggaggcagcagtggggaatattggacaatgggcgaaagcctgatccagccatgccgcgtgagtgatgaaggccctagggttgtaaagctctttcaacggtgaagataatgacggtaaccgtagaagaagccccggctaacttcgtgccagcagccgcggtaatacgaagggggctagcgttgttcggaattactgggcgtaaagcgcacgtaggcggatacttaagtcaggggtgaaatcccggggctcaacccccgaactgcctttgatactgggtatctcgagtccggaagaggtgagtggaattccgagtgtagaggtgaaattcgtagatattcggaggaacaccagtggcgaaggcggctcactggtccggtactgacgctgatgtgcgaaagcgtggggagcaaacaggattagataccctggtagtccacgccgtaaacgatggaagctagccgttggcaagtttacttgtcggtggcgcagctaacgcattaagcttcccgcctggggagtacggtcgcaagattaaaactcaaaggaattgacgggggcccgcacaagcggtggagcatgtggtttaattcgaagcaacgcgcagaaccttaccagcccttgacatcccggtcgcggtttccagaaatggtttccttcagttcggctgcaccggtgacaggtgctgcatggctgtcgtcagctcgtgtcgtgagatgttgggttaagtcccgcaacgagcgcaaccctcgcccttagttgccatcattcagttgggcactctaaggggactgccggtgataagccgagaggaaggtggggatgacgtcaagtcctcatggcccttacgggctgggctacacacgtgctacaatggtggtgacagtggggcagcgagaccgcgaggtcgagctaatctccaaaggccatctcagttcggattgcactctgcaactcgagtgcatgaagttggaatcgctagttatcgcggatcagcttgccgcggtgaatacgttcccgggccttgtacaccccgcccgtcacaccatgggagttggttttacccgaaggcgctgtgctaaccgcaaggaggcaggcgaccacggtagggtcagcgactggggtg

SEQ ID NO: 2039 - DNA, 1400 bp, Mesorhizobium helmanticense
aacgaacgctggcggcaggcttaacacatgcaagtcgagcgcctcgcaagaggagcggcagacgggtgagtaacgcgtgggaatctacccatctctacggaacaactccgggaaactggagctaataccgtatacgtccttcgggagaaagatttatcggagatggatgagcccgcgttggattagctagttggtggggtaatggcctaccaaggcgacgatccatagctggtctgagaggatgatcagccacattgggactgagacacggcccaaactcctacgggaggcagcagtggggaatattggacaatgggcgaaagcctgatccagccatgccgcgtgagtgatgaaggccctagggttgtaaagctctttcaacggtgaagataatgacggtaaccgtagaagaagccccggctaacttcgtgccagcagccgcggtaatacgaagggggctagcgttgttcggaattactgggcgtaaagcgcacgtaggcggatatttaagtcaggggtgaaatcccggggctcaaccccggaactgcctttgatactgggtatctcgagtccgagagaggtgagtggaattccgagtgtagaggtgaaattcgtagatattcggaggaacaccagtggcgaaggcggctcactggctcggtactgacgctgaggtgcgaaagcgtggggagcaaacaggattagataccctggtagtccacgccgtaaacgatggaagctagccgttggcaagtttacttgtcggtggcgcagctaacgcattaagcttcccgcctggggagtacggtcgcaagattaaaactcaaaggaattgacgggggcccgcacaagcggtggagcatgtggtttaattcgaagcaacgcgcagaaccttaccagcccttgacatcccggtcgcggtttccagagatggattccttcagttcggctggaccggtgacaggtgctgcatggctgtcgtcagctcgtgtcgtgagatgttgggttaagtcccgcaacgagcgcaaccctcgcccttagttgccagcattaagttgggcactctaaggggactgccggtgataagccgagaggaaggtggggatgacgtcaagtcctcatggcccttacgggctgggctacacacgtgctacaatggtggtgacagtgggcagcgagaccgcgaggtcgagctaatctccaaaagccatctcagttcggattgcactctgcaactcgagtgcatgaagttggaatcgctagtaatcgcggatcagcatgccgcggtgaatacgttcccgggccttgtacacaccgcccgtcacaccatgggagttggttttacccgaaggcgctgtgctaaccgcaaggaggcaggcgaccacggtagggtcagcgac

SEQ ID NO: 2040 - DNA, 1407 bp, Mesorhizobium japonicum; identical to SEQ ID NO: 2037

SEQ ID NO: 2041 - DNA, 1347 bp, Mesorhizobium kowhaii
cacatgcagtcgagcgcctcgcaagaggagcggcagacgggtgagtaacgcgtgggaatctacccatctctacggaacaactccgggaaactggagctaataccgtatacgtccttcgggagaaagatttatcggagatggatgagcccgcgttggattagctagttggtggggtaatggcctaccaaggcgacgatccatagctggtctgagaggatgatcagccacattgggactgagacacggcccaaactcctacgggaggcagcagtggggaatattggacaatgggcgaaagcctgatccagccatgccgcgtgagtgatgaaggccctagggttgtaaagctctttcaacggtgaagataatgacggtaaccgtagaagaagccccggctaacttcgtgccagcagccgcggtaatacgaagggggctagcgttgttcggaattactgggcgtaaagcgcacgtaggcggattgttaagttaggggtgaaatcccggggctcaaccccggaactgcctttaatactggcaatctcgagtccgagagaggtgagtggaattccgagtgtagaggtgaaattcgtagatattcggaggaacaccagtggcgaaggcggctcactggctcggtactgacgctgaggtgcgaaagcgtggggagcaaacaggattagataccctggtagtccacgccgtaaactatgagagctagccgtcggcaagtttacttgtcggtggcgcagctaacgcattaagctctccgcctggggagtacggtcgcaagattaaaactcaaaggaattgacgggggcccgcacaagcggtggagcatgtggtttaattcgaagcaacgcgcagaaccttaccagcccttgacatcccggtcgcggtttccagagatggtaaccttcagttcggctggaccggtgacaggtgctgcatggctgtcgtcagctcgtgtcgtgagatgttgggttaagtcccgcaacgagcgcaaccctcgcccttagttgccagcattaagttgggcactctaaggggactgccggtgataagccgagaggaaggtggggatgacgtcaagtcctcatggcccttacgggctgggctacacacgtgctacaatggtggtgacagtgggcagcgagaccgcgaggtcgagctaatctccaaaagccatctcagttcggattgcactctgcaactcgagtgcatgaagttggaatcgctagtaatcgcggatcagcatgccgcggtgaatacgttcccgggccttgtacacaccgcccgtcacaccatgggagttggttttacccgaaggcgctgtgctaaccgcaagga

SEQ ID NO: 2042 - DNA, 1403 bp, Mesorhizobium loti
aacgaacgctggcggcaggcttaacacatgcaagtcgagcgcctcgcaagagcggcagacgggtgagtaacgcgtgggaatctacccatctctacggaacaactccgggaaactggagctaataccgtatacgtcttcgggagaaagatttatcggagatggatgagcccgcgttggattagctagttggtggggtaatggcctaccaaggcgacgatccatagctggtctgagaggatgatcagccacattgggactgagacacggcccaaactcctacgggaggcagcagtggggaatattggacaatgggcgaaagcctgatccagccatgccgcgtgagtgatgaaggccctagggttgtaaagctctttcaacggtgaagataatgacggtaaccgtagaagaagccccggctaacttcgtgccagcagccgcggtaatacgaagggggctagcgttgttcggaattactgggcgtaaagcgcacgtaggcggattgttaagttaggggtgaaatcccagggctcaaccctggaactgcctttaatactggcaatctcgagtccgagagaggtgagtggaattccgagtgtagaggtgaaattcgtagatattcggaggaacaccagtggcgaaggcggctcactggctcggtactgacgctgaggtgcgaaagcgtggggagcaaacaggattagataccctggtagtccacgccgtaaacgatgagagctagccgtcggcaagtttacttgtcggtggcgcacgtaacgcattaagctctccgcctggggagtacggtcgcaagattaaaactcaaaggaattgacgggggcccgcacaagcggtggagcatgtggtttaattcgaagcaacgcgcagaaccttaccagcccttgacatcccggtcgcggtttccagagatggataccttcagttcggctggaccggtgacaggtgctgcatggctgtcgtcagctcgtgtcgtgagatgttgggttaagtcccgcaacgagcgcaaccctcgcccttagttgccagcattcagttgggcactctaaggggactgccggtgataagccgagaggaaggtggggatgacgtcaagtcctcatggcccttacgggctgggctacacacgtgctacaatggtggtgacagtgggcagcgagaccgcgaggtcgagctaatctccaaaagccatctcagttcggattgcactctgcaactcgagtgcatgaagttggaatcgctagtaatcgcggatcagcatgccgcggtgaatacgttcccgggccttgtacacaccgcccgtcacaccatgggagttggttttacccgaaggcgctgtgctaaccgcaaggaggcaggcgaccacggtagggtcagcgactggggtg

SEQ ID NO: 2043 - DNA, 1407 bp, Mesorhizobium mediterraneum
aacgaacgctggcggcaggcttaacacatgcaagtcgagcgccccgcaaggggagcggcagacgggtgagtaacgcgtgggaatctacccatctctacggaacaactccgggaaactggagctaataccgtatacgtccttcgggagaaagatttatcggagatggatgagcccgcgttggattagctagttggtggggtaatggcctaccaaggcgacgatccatagctggtctgagaggatgatcagccacattgggactgagacacggcccaaactcctacgggaggcagcagtggggaatattggacaatgggcgcaagcctgatccagccatgccgcgtgagtgatgaaggccctagggttgtaaagctctttcaacggtgaagataatgacggtaaccgtagaagaagccccggctaacttcgtgccagcagccgcggtaatacgaagggggctagcgttgttcggaattactgggcgtaaagcgcacgtaggcggatatttaagtcaggggtgaaatcccggggctcaaccccggaactgcctttgatactgggtatctcgagtccgagagaggtgagtggaattccgagtgtagaggtgaaattcgtagatattcggaggaacaccagtggcgaaggcggctcactggctcggtactgacgctgaggtgcgaaagcgtggggagcaaacaggattagataccctggtagtccacgccgtaaacgatggaagctagccgttggcaagtttacttgtcggtggcgcagctaacgcattaagcttcccgcctggggagtacggtcgcaagattaaaactcaaaggaattgacgggggcccgcacaagcggtggagcatgtggtttaattcgaagcaacgcgcagaaccttaccagcccttgacatcccggtcgcggtctccagagatggagaccttcagttcggctggaccggtgacaggtgctgcatggctgtcgtcagctcgtgtcgtgagatgttgggttaagtcccgcaacgagcgcaaccctcgcccttagttgccagcattcagttgggcactctaaggggactgccggtgataagccgagaggaaggtggggatgacgtcaagtcctcatggcccttacgggctgggctacacacgtgctacaatggtggtgacagtgggcagcgagaccgcgaggtcgagctaatctccaaaagccatctcagttcggattgcactctgcaactcgagtgcatgaagttggaatcgctagtaatcgcggatcagcatgccgcggtgaatacgttcccgggccttgtacacaccgcccgtcacaccatgggagttggttttacccgaaggcgctgtgctaaccgcaaggaggcaggcgaccacggtagggtcagcgactggggtg

SEQ ID NO: 2044 - DNA, 1407 bp, Mesorhizobium metallidurans
aacgaacgctggcggcaggcttaacacatgcaagtcgagcgcctcgcaagaggagcggcagacgggtgagtaacgcgtgggaatctacccatctctacggaacaactccgggaaactggagctaataccgtatacgtccttcgggagaaagatttatcggagatggatgagcccgcgttggattagctagttggtggggtaatggcctaccaaggcgacgatccatagctggtctgagaggatgatcagccacattgggactgagacacggcccaaactcctacgggaggcagcagtggggaatattggacaatgggcgaaagcctgatccagccatgccgcgtgagtgatgaaggccctagggttgtaaagctctttcaacggtgaagataatgacggtaaccgtagaagaagccccggctaacttcgtgccagcagccgcggtaatacgaagggggctagcgttgttcggaattactgggcgtaaagcgcacgtaggcggatatttaagtcaggggtgaaatcccggggctcaaccccggaactgcctttgatactgggtatctcgagtccgagagaggtgagtggaattccgagtgtagaggtgaaattcgtagatattcggaggaacaccagtggcgaaggcggctcactggctcggtactgacgctgaggtgcgaaagcgtggggagcaaacaggattagataccctggtagtccacgccgtaaacgatggaagctagccgttggcaagtttacttgtcggtggcgcagctaacgcattaagcttcccgcctggggagtacggtcgcaagattaaaactcaaaggaattgacgggggcccgcacaagcggtggagcatgtggtttaattcgaagcaacgcgcagaaccttaccagcccttgacatcccggtcgcggtttccagagatggattccttcagttcggctggaccggtgacaggtgctgcatggctgtcgtcagctcgtgtcgtgagatgttgggttaagtcccgcaacgagcgcaaccctcgcccttagttgccagcattaagttgggcactctaaggggactgccggtgataagccgagaggaaggtggggatgacgtcaagtcctcatggcccttacgggctgggctacacacgtgctacaatggtggtgacagtgggcagcgagaccgcgaggtcgagctaatctccaaaagccatctcagttcggattgcactctgcaactcgagtgcatgaagttggaatcgctagtaatcgcggatcagcatgccgcggtgaatacgttcccgggccttgtacacaccgcccgtcacaccatgggagttggttttacccgaaggcgctgtgctaaccgcaaggaggcaggcgaccacggtagggtcagcgactggggtg

SEQ ID NO: 2045 - DNA, 1407 bp, Mesorhizobium muleiense
aacgaacgctggcggcaggcttaacacatgcaagtcgagcgccccgcaaggggagcggcagacgggtgagtaacgcgtgggaatctacccatctctacggaacaactccgggaaactggagctaataccgtatacgtccttatggagaaagatttatcggagatggatgagcccgcgttggattagctagttggtggggtaatggcctaccaaggcgacgatccatagctggtctgagaggatgatcagccacattgggactgagacacggcccaaactcctacgggaggcagcagtggggaatattggacaatgggcgcaagcctgatccagccatgccgcgtgagtgatgaaggccctagggttgtaaagctctttcaacggtgaagataatgacggtaaccgtagaagaagccccggctaacttcgtgccagcagccgcggtaatacgaagggggctagcgttgttcggaattactgggcgtaaagcgcacgtaggcggatatttaagtcaggggtgaaatcccggggctcaaccccggaactgcctttgatactgggtatctcgagtccgagagaggtgagtggaattccgagtgtagaggtgaaattcgtagatattcggaggaacaccagtggcgaaggcggctcactggctcggtactgacgctgaggtgcgaaagcgtggggagcaaacaggattagataccctggtagtccacgccgtaaacgatggaagctagccgttggcaagtttacttgtcggtggcgcagctaacgcattaagcttcccgcctggggagtacggtcgcaagattaaaactcaaaggaattgacgggggcccgcacaagcggtggagcatgtggtttaattcgaagcaacgcgcagaaccttaccagcccttgacatcccggtcgcggtctccagagatggagaccttcagttcggctggaccggtgacaggtgctgcatggctgtcgtcagctcgtgtcgtgagatgttgggttaagtcccgcaacgagcgcaaccctcgcccttagttgccagcattcagttgggcactctaaggggactgccggtgataagccgagaggaaggtggggatgacgtcaagtcctcatggcccttacgggctgggctacacacgtgctacaatggtggtgacagtgggcagcgagaccgcgaggtcgagctaatctccaaaagccatctcagttcggattgcactctgcaactcgagtgcatgaagttggaatcgctagtaatcgcggatcagcatgccgcggtgaatacgttcccgggccttgtacacaccgcccgtcacaccatgggagttggttttacccgaaggcgctgtgctaaccgcaaggaggcaggcgaccacggtagggtcagcgactggggtg

SEQ ID NO: 2046 - DNA, 1407 bp, Mesorhizobium opportunistum
aacgaacgctggcggcaggcttaacacatgcaagtcgagcgccccgcaaggggagcggcagacgggtgagtaacgcgtgggaatctacccatctctacggaacaactccgggaaactggagctaataccgtatacgtccttacggagaaagatttatcggagatggatgagcccgcgttggattagctagttggtggggtaatggcctaccaaggcgacgatccatagctggtctgagaggatgatcagccacactgggactgagacacggcccagactcctacgggaggcagcagtggggaatattggacaatgggcgcaagcctgatccagccatgccgcgtgagtgatgaaggccctagggttgtaaagctctttcaacggtgaagataatgacggtaaccgtagaagaagccccggctaacttcgtgccagcagccgcggtaatacgaagggggctagcgttgttcggaattactgggcgtaaagcgcacgtaggcggatacttaagtcaggggtgaaatcccggggctcaaccccggaactgcctttgatactgggtatctcgagtccggaagaggtgagtggaattccgagtgtagaggtgaaattcgtagatattcggaggaacaccagtggcgaaggcggctcactggtccggtactgacgctgaggtgcgaaagcgtggggagcaaacaggattagataccctggtagtccacgccgtaaacgatggaagctagccgttggcaagtttacttgtcggtggcgcagctaacgcattaagcttcccgcctggggagtacggtcgcaagattaaaactcaaaggaattgacgggggcccgcacaagcggtggagcatgtggtttaattcgaagcaacgcgcagaaccttaccagcccttgacatcccggtcgcggtttccagagatggaaaccttcagttcggctggaccggtgacaggtgctgcatggctgtcgtcagctcgtgtcgtgagatgttgggttaagtcccgcaacgagcgcaaccctcgcccttagttgccagcattcagttgggcactctaaggggactgccggtgataagccgagaggaaggtggggatgacgtcaagtcctcatggcccttacgggctgggctacacacgtgctacaatggtggtgacagtgggcagcgagaccgcgaggtcgagctaatctccaaaagccatctcagttcggattgcactctgcaactcgagtgcatgaagttggaatcgctagtaatcgcggatcagcatgccgcggtgaatacgttcccgggccttgtacacaccgcccgtcacaccatgggagttggttttacccgaaggcgctgtgctaaccgcaaggaggcaggcgaccacggtagggtcagcgactggggtg

SEQ ID NO: 2047 - DNA, 1407 bp, Mesorhizobium plurifarium
aacgaacgctggcggcaggcttaacacatgcaagtcgagcgccccgcaaggggagcggcagacgggtgagtaacgcgtgggaatctacccatctctacggaacaactccgggaaactggagctaataccgtatacgtccttcgggagaaagatttatcggagatggatgagcccgcgttggattagctagttggtggggtaatggcctaccaaggcgacgatccatagctggtctgagaggatgatcagccacactgggactgagacacggcccagactcctacgggaggcagcagtggggaatattggacaatgggcgaaagcctgatccagccatgccgcgtgagtgatgaaggccctagggttgtaaagctctttcaacggtgaagataatgacggtaaccgtagaagaagccccggctaacttcgtgccagcagccgcggtaatacgaagggggctagcgttgttcggaattactgggcgtaaagcgcacgtaggcggatacttaagtcaggggtgaaatcccggggctcaaccccggaactgcctttgatactgggtatctggagtccggaagaggtgagtggaattccgagtgtagaggtgaaattcgtagatattcggaggaacaccagtggcgaaggcggctcactggtccggtactgacgctgaggtgcgaaagcgtggggagcaaacaggattagataccctggtagtccacgccgtaaacgatggaagctagccgttggcaagtttacttgtcggtggcgcagctaacgcattaagcttcccgcctggggagtacggtcgcaagattaaaactcaaaggaattgacgggggcccgcacaagcggtggagcatgtggtttaattcgaagcaacgcgcagaaccttaccagcccttgacatcccggtcgcggttaccagaaatggtttccttcagttcggctggaccggtgacaggtgctgcatggctgtcgtcagctcgtgtcgtgagatgttgggttaagtcccgcaacgagcgcaaccctcgcccttagttgccatcattcagttgggcactctaaggggactgccggtgataagccgagaggaaggtggggatgacgtcaagtcctcatggcccttacgggctgggctacacacgtgctacaatggtggtgacagtgggcagcgagaccgcgaggtcgagctaatctccaaaagccatctcagttcggattgcactctgcaactcgagtgcatgaagttggaatcgctagtaatcgcggatcagcatgccgcggtgaatacgttcccgggccttgtacacaccgcccgtcacaccatgggagttggttttacccgaaggcgctgtgctaaccgcaaggaggcaggcgaccacggtagggtcagcgactggggtg

SEQ ID NO: 2048 - DNA, 1407 bp, Mesorhizobium prunaredense
aacgaacgctggcggcaggcttaacacatgcaagtcgagcgccccgcaaggggagcggcagacgggtgagtaacgcgtgggaatctacccatctctacggaacaactccgggaaactggagctaataccgtatacgtccttttggagaaagatttatcggagatggatgagcccgcgttggattagctagttggtggggtaatggcctaccaaggcgacgatccatagctggtctgagaggatgatcagccacattgggactgagacacggcccaaactcctacgggaggcagcagtggggaatattggacaatgggcgcaagcctgatccagccatgccgcgtgagtgatgaaggccctagggttgtaaagctctttcaacggtgaagataatgacggtaaccgtagaagaagccccggctaacttcgtgccagcagccgcggtaatacgaagggggctagcgttgttcggaattactgggcgtaaagcgcacgtaggcggatatttaagtcaggggtgaaatcccggggctcaaccccggaactgcctttgatactgggtatctcgagtccgagagaggtgagtggaattccgagtgtagaggtgaaattcgtagatattcggaggaacaccagtggcgaaggcggctcactggctcggtactgacgctgaggtgcgaaagcgtggggagcaaacaggattagataccctggtagtccacgccgtaaacgatggaagctagccgttggcaagtttacttgtcggtggcgcagctaacgcattaagcttcccgcctggggagtacggtcgcaagattaaaactcaaaggaattgacgggggcccgcacaagcggtggagcatgtggtttaattcgaagcaacgcgcagaaccttaccagcccttgacatcccggtcgcggtctccagagatggagaccttcagttcggctggaccggtgacaggtgctgcatggctgtcgtcagctcgtgtcgtgagatgttgggttaagtcccgcaacgagcgcaaccctcgcccttagttgccagcattcagttgggcactctaaggggactgccggtgataagccgagaggaaggtggggatgacgtcaagtcctcatggcccttacgggctgggctacacacgtgctacaatggtggtgacagtgggcagcgagaccgcgaggtcgagctaatctccaaaagccatctcagttcggattgcactctgcaactcgagtgcatgaagttggaatcgctagtaatcgcggatcagcatgccgcggtgaatacgttcccgggccttgtacacaccgcccgtcacaccatgggagttggttttacccgaaggcgctgtgctaaccgcaaggaggcaggcgaccacggtagggtcagcgactggggtg

SEQ ID NO: 2049 - DNA, 1308 bp, Mesorhizobium qingshengii
ggagcggcagacgggtgagtaacgcgtgggaatctacccatctctacggaacaactccgggaaactggagctaataccgtatacgtccttcgggagaaagatttatcggagatggatgagcccgcgttggattagctagttggtggggtaatggcctaccaaggcgacgatccatagctggtctgagaggatgatcagccacactgggactgagacacggcccagactcctacgggaggcagcagtggggaatattggacaatgggcgaaagcctgatccagccatgccgcgtgagtgatgaaggccctagggttgtaaagctctttcaacggtgaagataatgacggtaaccgtagaagaagccccggctaacttcgtgccagcagccgcggtaatacgaagggggctagcgttgttcggaattactgggcgtaaagcgcacgtaggcggattgttaagttaggggtgaaatcccagggctcaaccctggaactgcctttaatactggcaatctcgagtccgagagaggtgagtggaattccgagtgtagaggtgaaattcgtagatattcggaggaacaccagtggcgaaggcggctcactggctcggtactgacgctgaggtgcgaaagcgtggggagcaaacaggattagataccctggtagtccacgccgtaaactatgagagctagccgtcggcaagtttacttgtcggtggcgcagctaacgcattaagctctccgcctggggagtacggtcgcaagattaaaactcaaaggaattgacgggggcccgcacaagcggtggagcatgtggtttaattcgaagcaacgcgcagaaccttaccagcccttgacatcccggtcgcggtttccagagatggattccttcagttcggctggaccggtgacaggtgctgcatggctgtcgtcagctcgtgtcgtgagatgttgggttaagtcccgcaacgagcgcaaccctcgcccttagttgccagcattaagttgggcactctaaggggactgccggtgataagccgagaggaaggtggggatgacgtcaagtcctcatggcccttacgggctgggctacacacgtgctacaatggtggtgacagtgggcagcgagaccgcgaggtcgagctaatctccaaaagccatctcagttcggattgcactctgcaactcgagtgcatgaagttggaatcgctagtaatcgcggatcagcatgccgcggtgaatacgttcccgggccttgtacacaccgcccgtcacaccatgggagttggttttacccgaaggcgctgtg

SEQ ID NO: 2050 - DNA, 1406 bp, Mesorhizobium tamadayense
aacgaacgctggcggcaggcttaacacatgcaagtcgagcgccccgcaaggggagcggcagacgggtgagtaacgcgtgggaatctacccatctctacggaacaactccgggaaactggagctaataccgtatacgtccttcgggagaaagatttatcggagatggatgagcccgcgttggattagctagttggtggggtaatggcctaccaaggcgacgatccatagctggtctgagaggatgatcagccacactgggactgagacacggcccagactcctacgggaggcagcagtggggaatattggacaatgggcgaaagcctgatccagccatgccgcgtgagtgatgaaggccctagggttgtaaagctctttcaacggtgaagataatgacggtaaccgtagaagaagccccggctaacttcgtgccagcagccgcggtaatacgaagggggctagcgttgttcggaattactgggcgtaaagcgcacgtaggcggatatttaagtcaggggtgaaatcccggggctcaaccccggaactgcctttgatactgggtatctcgagtccgagagaggtgagtggaattccgagtgtagaggtgaaattcgtagatattcggaggaacaccagtggcgaaggcggctcactggctcggtactgacgctgaggtgcgaaagcgtggggagcaaacaggattagataccctggtagtccacgccgtaaacgatggaagctagccgttggcaagtttacttgtcggtggcgcagctaacgcattaagcttcccgcctggggagtacggtcgcaagattaaaactcaaaggaattgacgggggcccgcacaagcggtggagcatgtggtttaattcgaagcaacgcgcagaaccttaccagcccttgacatcccggtcgcggtttccagagatggaatccttcagttcggctggaccggtgacaggtgctgcatggctgtcgtcagctcgtgtcgtgagatgttgggttaagtcccgcaacgagcgcaaccctcgcccttagttgccatcattaagttgggcactctaaggggactgccggtgataagccgagaggaaggtggggatgacgtcaagtcctcatggcccttacgggctgggctacacacgtgctacaatggtggtgacagtgggcagcgagacgcgaggtcgagctaatctccaaaagccatctcagttcggattgcactctgcaactcgagtgcatgaagttggaatcgctagtaatcgcggatcagcatgccgcggtgaatacgttcccgggccttgtacacaccgcccgtcacaccatgggagttggttttacccgaaggcgctgtgctaaccgcaaggaggcaggcgaccacggtagggtcagcgactggggtg

SEQ ID NO: 2051 - DNA, 1394 bp, Mesorhizobium temperatum
ggcaggcttaacacatgcaagtcgagcgccccgcaaggggagcggcagacgggtgagtaacgcgtgggaatctacccatctctacggaacaactccgggaaactggagctaataccgtatacgtccttcgggagaaagatttatcggagatggatgagcccgcgttggattagctagttggtggggtaatggcctaccaaggcgacgatccatagctggtctgagaggatgatcagccacattgggactgagacacggcccaaactcctacgggaggcagcagtggggaatattggacaatgggcgcaagcctgatccagccatgccgcgtgagtgatgaaggccctagggttgtaaagctctttcaacggtgaagataatgacggtaaccgtagaagaagccccggctaacttcgtgccagcagccgcggtaatacgaagggggctagcgttgttcggaattactgggcgtaaagcgcacgtaggcggatatttaagtcaggggtgaaatcccggggctcaaccccggaactgcctttgatactgggtatctcgagtccgagagaggtgagtggaattccgagtgtagaggtgaaattcgtagatattcggaggaacaccagtggcgaaggcggctcactggctcggtactgacgctgaggtgcgaaagcgtggggagcaaacaggattagataccctggtagtccacgccgtaaacgatggaagctagccgttggcaagtttacttgtcggtggcgcagctaacgcattaagcttcccgcctggggagtacggtcgcaagattaaaactcaaaggaattgacgggggcccgcacaagcggtggagcatgtggtttaattcgaagcaacgcgcagaaccttaccagcccttgacatcccggtcgcggtctccagagatggagaccttcagttcggctggaccggtgacaggtgctgcatggctgtcgtcagctcgtgtcgtgagatgttgggttaagtcccgcaacgagcgcaaccctcgcccttagttgccagcattcagttgggcactctaaggggactgccggtgataagccgagaggaaggtggggatgacgtcaagtcctcatggcccttacgggctgggctacacacgtgctacaatggtggtgacagtgggcagcgagaccgcgaggtcgagctaatctccaaaagccatctcagttcggattgcactctgcaactcgagtgcatgaagttggaatcgctagtaatcgcggatcagcatgccgcggtgaatacgttcccgggccttgtacacaccgcccgtcacaccatgggagttggttttacccgaaggcgctgtgctaaccgcaagagggcaggcgaccacggtagggtcagcgactggggtg

SEQ ID NO: 2052 - DNA, 1407 bp, Mesorhizobium tianshanense
aacgaacgctggcggcaggcttaacacatgcaagtcgagcgccccgcaaggggagcggcagacgggtgagtaacgcgtgggaatctacccatctctacggagcaactccgggaaactggagctaataccgtatacgtccttcgggagaaagatttatcggagatggatgagcccgcgttggattagctagttggtggggtaatggcctaccaaggcgacgatccatagctggtctgagaggatgatcagccacattgggactgagacacggcccaaactcctacgggaggcagcagtggggaatattggacaatgggcgaaagcctgatccagccatgccgcgtgagtgatgaaggccctagggttgtaaagctctttcaacggtgaagataatgacggtaaccgtagaagaagccccggctaacttcgtgccagcagccgcggtaatacgaagggggctagcgttgttcggaattactgggcgtaaagcgcacgtaggcggatatttaagtcaggggtgaaatcccggggctcaaccccggaactgcctttgatactgggtatctcgagtccgagagaggtgagtggaattccgagtgtagaggtgaaattcgtagatattcggaggaacaccagtggcgaaggcggctcactggctcggtactgacgctgaggtgcgaaagcgtggggagcaaacaggattagataccctggtagtccacgccgtaaacgatggaagctagccgttggcaagtttacttgtcggtggcgcagctaacgcattaagcttcccgcctggggagtacggtcgcaagattaaaactcaaaggaattgacgggggcccgcacaagcggtggagcatgtggtttaattcgaagcaacgcgcagaaccttaccagcccttgacatcccggtcgcggtttccagagatggattccttcagttcggctggaccggtgacaggtgctgcatggctgtcgtcagctcgtgtcgtgagatgttgggttaagtcccgcaacgagcgcaaccctcgcccttagttgccagcattaagttgggcactctaaggggactgccggtgataagccgagaggaaggtggggatgacgtcaagtcctcatggcccttacgggctgggctacacacgtgctacaatggtggtgacagtgggcagcgagaccgcgaggtcgagctaatctccaaaagccatctcagttcggattgcactctgcaactcgagtgcatgaagttggaatcgctagtaatcgcggatcagcatgccgcggtgaatacgttcccgggccttgtacacaccgcccgtcacaccatgggagttggttttacccgaaggcgctgtgctaaccgcaaggaggcaggcgaccacggtagggtcagcgactggggtg

SEQ ID NO: 2053 - DNA, 1295 bp, Mesorhizobium waimense
tctacccatctctacggaacaactccgggaaactggagctaataccgtatacgtccttcgggagaaagatttatcggagatggatgagcccgcgttggattagctagttggtggggtaatggcctaccaaggcgacgatccatagctggtctgagaggatgatcagccacactgggactgagacacggcccagactcctacgggaggcagcagtggggaatattggacaatgggcgcaagcctgatccagccatgccgcgtgagtgatgaaggccctagggttgtaaagctctttcaacggtgaagataatgacggtaaccgtagaagaagccccggctaacttcgtgccagcagccgcggtaatacgaagggggctagcgttgttcggaattactgggcgtaaagcgcacgtaggcggatacttaagtcaggggtgaaatcccggggctcaaccccggaactgcctttgatactgggtatctcgagtccggaagaggtgagtggaattccgagtgtagaggtgaaattcgtagatattcggaggaacaccagtggcgaaggcggctcactggtccggtactgacgctgaggtgcgaaagcgtggggagcaaacaggattagataccctggtagtccacgccgtaaacgatggaagctagccgttggcaagtttacttgtcggtggcgcagctaacgcattaagcttcccgcctggggagtacggtcgcaagattaaaactcaaaggaattgacgggggcccgcacaagcggtggagcatgtggtttaattcgaagcaacgcgcagaaccttaccagcccttgacatcccggtcgcggtttccagagatggattccttcagttcggctggaccggtgacaggtgctgcatggctgtcgtcagctcgtgtcgtgagatgttgggttaagtcccgcaacgagcgcaaccctcgcccttagttgccagcattaagttgggcactctaaggggactgccggtgataagccgagaggaaggtggggatgacgtcaagtcctcatggcccttacgggctgggctacacacgtgctacaatggtggtgacagtgggcagcgagaccgcgaggtcgagctaatctccaaaagccatctcagttcggattgcactctgcaactcgagtgcatgaagttggaatcgctagtaatcgcggatcagcatgccgcggtgaatacgttcccgggccttgtacacaccgcccgtcacaccatgggagttggttttacccgaaggcgctgtgctaaccgcaaggagacagg

SEQ ID NO: 2054 - DNA, 1339 bp, Methylarcula marina
  misc_feature (672)..(672): n is a, c, g, or t
aacgaacgctggcggcaggcttaacacatgcaagtcgagtcgactttcgggatagcggcggacgggtgagtaacgcgtgggaacgtgcccttcactgcggaatagcccagggaaacttggattaataccgcatacgcccttcaggggaaagatttatcggtgaaggatcggcccgcgttagattaggtagttggtggggtaatggcctaccaagccgacgatccatagctggtttgagaggatgatcagccacactgggactgagacacggcccagactcctacgggaggcagcagtggggaatcttagacaatgggggcaaccctgatctagccatgccgcgtgagtgatgaaggccttagggtcgtaaagatctttcaactgggaagataatgacggtaccagcagaagaagccccggctaactccgtgccagcagccgcggtaatacggagggggctagcgttgttcggaattactgggcgtaaagcgcacgtaggcggacaggaaagttaggggtgaaattccggggctcaacctcggaactgccttcaaaactatctgtctggagttcgagagaggtgagtggaattccgagtgtagaggtgaaattcgtagatattcggaggaacaccagtggcgaaggcggcttgctggctcgatactgacgctnaggtgcgaaagcgtggggagcaaacaggattagatacccttgtagtccacgccgtaaacgatggatgccagacgtcgggttgctatctgttcggtgacacctaacggattaagcattccgcctggggagtacggtcgcaagattaaaactcaaaggaattgacgggggcccgcacaagcggtggaggctgtggtttaattcgaagcaacgcgcagaaccttaccaacccttgacatcccgggccagcaccagagatggtgtctccacttcggtggctcagagacaggtgctgcatggctgtcgtcagctcgtgtcgtgagatgttcggttaagtccggcaacgagcgcaacccacgtccatagttgccagcaggtttagctgggcactctagggagactgccggtgataagcgggaggaaggtgtggatgacgtcaagtcctcatggcccttacgggttgggctacacacgtgctacaatggtggtgacaatgggttaatccccaaaagccatctcagttcggattgtcctctgcaactcgagtgcatgaagttggaatcgctagtaatcgcggatcagcatgccgcggtgaatacgttcccgggccttgtacacaccgcccgtcacaccatgggagttggttctacccgaaggcagtgcgctaacc

SEQ ID NO: 2055 - DNA, 1453 bp, Methylibium petroleiphilum
attgaacgctggcggcatgccttacacatgcaagtcgaacggcagcacgggagcaatcctggtggcgagtggcgaacgggtgagtaatacatcggaacgtgcccagttgtgggggatagcccggcgaaagccggattaataccgcatacgacctacgggtgaaagcgggggatcgcaagacctcgcgctattggagcggccgatgtcggattagctagttggtggggtaaaagcctaccaaggctacgatccgtagctggtctgagaggacgaccagccacactgggactgagacacggcccagactcctacgggaggcagcagtggggaattttggacaatgggcgcaagcctgatccagccatgccgcgtgcgggaagaaggccttcgggttgtaaaccgcttttgtcagggaagaaacggtttgggctaataccccgaactaatgacggtacctgaagaataagcaccggctaactacgtgccagcagccgcggtaatacgtagggtgcaagcgttaatcggaattactgggcgtaaagcgtgcgcaggcggctttgcaagacagatgtgaaatccccgggctcaacctgggaactgcatttgtgactgcaaggctggagtgcggcagagggggatggaattccgcgtgtagcagtgaaatgcgtagatatgcggaggaacaccgatggcgaaggcaatcccctgggcctgcactgacgctcatgcacgaaagcgtggggagcaaacaggattagataccctggtagtccacgccctaaacgatgtcaactggttgttggacggcttgctgttcagtaacgaagctaacgcgtgaagttgaccgcctggggagtacggccgcaaggttgaaactcaaaggaattgacggggacccgcacaagcggtggatgatgtggtttaattcgatgcaacgcgaaaaaccttacctacccttgacatgtctagaagttaccagagatggtttcgtgctcgaaagagaactagaacacaggtgctgcatggccgtcgtcagctcgtgtcgtgagatgttgggttaagtcccgcaacgagcgcaacccttgtcattagttgctacgtaagggcactctaatgagactgccggtgacaaaccggaggaaggtggggatgacgtcaggtcatcatggcccttatgggtagggctacacacgtcatacaatggccggtacagagggctgccaacccgcgagggggagccaatcccagaaaaccggtcgtagtccggatcgcagtctgcaactcgactgcgtgaagtcggaatcgctagtaatcgcggatcagcttgccgcggtgaatacgttcccgggtcttgtacacaccgcccgtcacaccatgggagcgggttctgccagaagtagttagcctaaccgcaaggagggcgattaccacggcagggttcgtgactggggtg

SEQ ID NO: 2056 - DNA, 1465 bp, Methylobacillus flagellatus
attgaacgctggcggcatgctttacacatgcaagtcgaacggcagcacggggagcttgctccctggtggcgagtggcgaacgggtgagtaatatatcggaacgtgtccaataatgggggataactagtcgaaagattagctaataccgcatacgccctgagggggaaagtgggggatcttcggacctcacgttaatggagcggccgatatctgattagctagttggtggggtaaaagcctaccaaggcgacgatcagtagctggtctgagaggatgatcagccacactgggactgagacacggcccagactcctacgggaggcagcagtggggaattttggacaatgggcgcaagcctgatccagccatgccgcgtgagtgaagaaggccttcgggttgtaaagctctttcgcaaggaaagaaaacttatccactaatactggatgaggatgacggtaccttgataagaagcaccggctaactacgtgccagcagccgcggtaatacgtagggtgcaagcgttaatcggaattactgggcgtaaagcgagcgcaggcggttttgtaagtcagatgtgaaagccccgggctcaacctgggaactgcgtttgaaactacaaggctagagtatgggagagggaggtagaattccacgtgtagcagtgaaatgcgtagagatgtggaggaataccaatggcgaaggcagcctcctggcctaatactgacgctcatgctcgaaagcgtggggagcaaacaggattagataccctggtagtccacgccctaaacgatgtcaactagttgttggtggagtaaaatccattagtaacgcagctaacgcgtgaagttgaccgcctggggagtacggtcgcaagattaaaactcaaaggaattgacgggggcccgcacaagcggtggattatgtggattaattcgatgcaacgcgaaaaaccttacctggccttgacatgccactaacgaagcagagatgcattaggtgcccgaaagggaaagtggacacaggtgctgcatggctgtcgtcagctcgtgtcgtgagatgttgggttaagtcccgcaacgagcgcaacccttgccaataattgccatcattcagttgggcactttattgggactgccggtgacaaaccggaggaaggtggggatgacgtcaagtcctcatggcccttatggccagggcttcacacgtaatacaatggtcggtacagagggttgccaacccgcgagggggagctaatctcagaaagccgatcgtagtccggattgcagtctgcaactcgactgcatgaagtcggaatcgctagtaatcgcggatcagcatgtcgcggtgaatacgttcccgggccttgtacacaccgcccgtcacaccatgggagtgggtttcaccagaagtaggtagcctaaccgcaaggagggcgcttaccacggtgggattcatgactggggtg

SEQ ID NO: 2057 - DNA, 1467 bp, Methylobacillus rhizosphaerae
attgaacgctggcggcatgctttacacatgcaagtcgaacggtaacagagagaagcttgcttctctgctgacgagtggcgaacgggtgagtaacatatcggaacgtgtccaataatgggggataactagtcgaaagattagctaataccgcatacgccctgagggggaaagctggggatcttcggacctagcgttaatggagcggccgatatctgattagctagttggtggggtaaaagcctaccaaggcgacgatcagtagctggtctgagaggatgatcagccacactgggactgagacacggcccagactcctacgggaggcagcagtggggaattttggacaatgggcgcaagcctgatccagccatgccgcgtgagtgaagaaggccttcgggttgtaaagctctttcgcaaggaaagaaaacttactctctaatatagagtgaggctgacggtaccttgataagaagcaccggctaactacgtgccagcagccgcggtaatacgtagggtgcgagcgttaatcggaattactgggcgtaaagcgagcgcaggcggttttgtaagtcagatgtgaaatccccgggctcaacctgggaactgcgtttgaaactacaaggctagagtatgggagaggggggtagaattccacgtgtagcagtgaaatgcgtagagatgtggaggaataccaatggcgaaggcagccccctggcctaatactgacgctcatgctcgaaagcgtggggagcaaacaggattagataccctggtagtccacgccctaaacgatgtcaactagttgttggtggagtaaaatccattagtaacgcagctaacgcgtgaagttgaccgcctggggagtacggtcgcaagattaaaactcaaaggaattgacgggggcccgcacaagcggtggattatgtggattaattcgatgcaacgcgaaaaaccttacctggccttgacatgccactaacgaagcagagatgcattaggtgctcgaaagagaaagtggacacaggtgctgcatggctgtcgtcagctcgtgtcgtgagatgttgggttaagtcccgcaacgagcgcaacccttgccaataattgccatcattcagttgggcactttattgggactgccggtgacaaaccggaggaaggtggggatgacgtcaagtcctcatggcccttatggccagggcttcacacgtaatacaatggtcggtacagagggttgccaacccgcgagggggagctaatctcagaaagccgatcgtagtccggattgtagtctgcaactcgactacatgaagtcggaatcgctagtaatcgcggatcagcatgtcgcggtgaatacgttcccgggccttgtacacaccgcccgtcacaccatgggagtgggtttcaccagaagtagttagcctaaccgcaaggagggcgattaccacggtgggattcatgactggggtg

SEQ ID NO: 2058 - DNA, 1457 bp, Methylobacter marinus
attgaacgctggcggtatgcttaacacatgcaagtcgaacggtaacaggccttcgggcgctgacgagtggcggacgggtgagtaacgcgtaggaatctgcctcatagtgggggacaacttggggaaactcaagctaataccgcatacgccctacgggggaaagcgggggaccttcgggcctcgcgctatgagatgagcctgcgttagattagctagttggtggggtaaaggcctaccaaggcgacgatctatagctggtctgagaggacgatcagccacactgggactgagacacggcccagactcctacgggaggcagcagtggggaatattggacaatgggcgcaagcctgatccagcaataccgcgtgtgtgaagaaggcctgagggttgtaaagcactttcaattgggaggaaaacctgccggtcaatacccggcagcttgacattacctttagaagaagcaccggctaactccgtgccagcagccgcggtaatacggagggtgcgagcgttaatcggaattactgggcgtaaagcgtgcgtaggcggttatttaagtcagatgtgaaagccccgggcttaacctgggaactgcatttgatactgggtaactagagtttagtagaggagagtggaatttcaggtgtagcggtgaaatgcgtagagatctgaaggaacaccagtggcgaaggcgactctctggactaaaactgacgctgaggtacgaaagcgtgggtagcaaacaggattagataccctggtagtccacgccgtaaacgatgtcaactagccgttgggccttttaacaggcttagtggcgcagctaacgcattaagttgaccgcctggggagtacggccgcaaggttaaaactcaaatgaattgacgggggcccgcacaagcggtggagcatgtggtttaattcgatgcaacgcgaagaaccttacctacccttgacatccagagaatctgttagagatagcggagtgccttcgggaactctgagacaggtgctgcatggctgtcgtcagctcgtgtcgtgagatgttgggttaagtcccgtaacgagcgcaacccttatccttagttgccagcacgtgatggtgggaactctagggagactgccggtgataaaccggaggaaggtggggacgacgtcaagtcatcatggcccttatgggtagggctacacacgtgctacaatggccggtacagagggcagcgaactcgcgagagtcagcaaatcccagaaagccggtcctagtccggattggagtctgcaactcgactccatgaagtcggaatcgctagtaatcgcgaatcagaatgtcgcggtgaatacgttcccgggccttgtacacaccgcccgtcacaccatgggagtgggttgcaaaagaagtgggtagtctaaccttcgggagggcgctcaccactttgtgattcatgactggggtg

SEQ ID NO: 2059 - DNA, 1457 bp, Methylobacter tundripaludum
attgaacgctggcggtatgcttaacacatgcaagtcgaacggtaacaggccttcgggcgctgacgagtggcggacgggtgagtaacgcgtaggaatctgcctcatagtgggggacaacgtggggaaactcacgctaataccgcatacgccctacgggggaaagcgggggatcttcggacctcgcgctatgagatgagcctgcgttagattagctagttggtagggtaaaggcctaccaaggcgacgatctatagctggtctgagaggacgatcagccacactgggactgagacacggcccagactcctacgggaggcagcagtggggaatattggacaatgggcgaaagcctgatccagcaataccgcgtgtgtgaagaaggccttagggttgtaaagcactttcaattgggaggaaaacctaccggtcaatacccggtagcttgacattacctttagaagaagcaccggctaactccgtgccagcagccgcggtaatacggagggtgcgagcgttaatcggaattactgggcgtaaagcgtgcgtaggcggttcgttaagtcagatgtgaaagccctgggctcaacctgggaactgcatttgaaactggcggactagagtttagtagaggggagtggaatttcaggtgtagcggtgaaatgcgtagatatctgaaggaacaccagtggcgaaggcgactccctggactagaactgacgctgaggtacgaaagcgtgggtagcaaacaggattagataccctggtagtccacgccgtaaacgatgtcgactagccgttggtcctatttacaggattagtggcgcagctaacgcattaagtcgaccgcctggggagtacggccgcaaggttaaaactcaaatgaattgacgggggcccgcacaagcggtggagcatgtggtttaattcgatgcaacgcgaagaaccttacctacccttgacatccagagaatctgttagagatagtagagtgccttcgggagctctgagacaggtgctgcatggctgtcgtcagctcgtgtcgtgagatgttgggttaagtcccgtaacgagcgcaacccttatccttagttgccagcgggtaatgccgggaactctagggagactgccggtgataaaccggaggaaggtggggacgacgtcaagtcatcatggcccttatgggtagggctacacacgtgctacaatggccggtacagagggctgcgaacttgcgaaagtaagcaaatcccagaaagccggtcctagtccggattggagtctgcaactcgactccatgaagtcggaatcgctagtaatcgcgaatcagaatgtcgcggtgaatacgttcccgggccttgtacacaccgcccgtcacaccatgggagtgggttgcaaaagaagtgggtagtctaaccttcgggagggcgctcaccactttgtgattcatgactggggtg

SEQ ID NO: 2060 - DNA, 1360 bp, Methylocaldum marinum
attgaacgctggcggcatgcttaacacatgcaagtcgaacggcagcacagccgggtaaccggtgggtggcgagtggcggacgggtgagtaatgcgtaggaatctgccttgtagtgggggataacccggggaaactcgggctaataccgcatacgttctacggaggaaagcgggggatcttcggacctcgcgctatgagatgagcctacgtccgattagctagttggtagggtaatggcctaccaaggcgacgatcggtagctggtctgagaggacgatcagccacactggaactgagacacggtccagactcctacgggaggcagcagtggggaatattggacaatgggcgcaagcctgatccagcaatgccgcgtgtgtgaagaaggcctgcgggttgtaaagcactttaagcggggaagaaaggtggggtgttaataccatctcacattgacgttacctgcagaataagcaccggctaactccgtgccagcagccgcggtaatacggagggtgcgagcgttaatcggaattactgggcgtaaagcgcgcgtaggcggtttgttaagtcagctgtgaaagccccgggcttaacctgggaatggcagttgatactggcaggctagagtgtggtagaggggtgtggaatttccggtgtagcagtgaaatgcgtagagatcggaaggaacaccagtggcgaaggcggcaccctggaccgacactgacgctgaggtgcgaaagcgtggggagcaaacaggattagataccctggtagtccacgctgtaaacgatgagaactagccgttgggcacaattgagtgtttagtggcgcagctaacgcgataagttctccgcctggggagtacggccgcaaggttaaaactcaaatgaattgacgggggcccgcacaagcggtggagcatgtggtttaattcgatgcaacgcgaagaaccttacctggtcttgacatcttaggaacccttgagagattgaggggtgccttcgggagcctaaagacaggtgctgcatggctgtcgtcagctcgtgtcgtgagatgttgggttaagtcccgtaacgagcgcaacccttgtccctagttgccagcgttaagtcgggaactctagggagactgccggtgataaaccggaggaaggtggggatgacgtcaagtcatcatggcccttatgaccagggctacacacgtgctacaatggtcggtacagagggtagccaagccgcgaggcggagccaatctcacaaagccgatcgtagtccggattgcagtctgcaactcgactgcatgaagtcggaatcgctagtaatcgcggatcagcatgccgcggtgaatacgttcccgggcc

SEQ ID NO: 2061 - DNA, 1408 bp, Methylocapsa palsarum
aacgaacgctggcggcaggcctaacacatgcaagtcgaacgccgtagcaatacggagtggcagacgggtgagtaacacgtgggaacatacccttcggttcggaataactcagggaaacttgtgctaataccggatacgtccgcaaggagaaagatttatcgccgaaggattggcccgcgtctgattagcttgttggtgaggtaatggctcaccaaggcgacgatcagtagctggtctgagaggatgatcagccacattgggactgagacacggcccagactcctacgggaggcagcagtggggaatattggacaatgggcgaaagcctgatccagccatgccgcgtgagtgatgaaggccttagggttgtaaagctcttttacctgggaagataatgacggtaccaggagaataagccccggctaacttcgtgccagcagccgcggtaatacgaagggggctagcgttgttcggatttactgggcgtaaagcgcacgtaggcggatctttaagtcaggggtgaaatcccgaggctcaacctcggaactgcctttgatactggggatctcgagtccgggagaggtgagtggaactgcgagtgtagaggtgaaattcgtagatattcgcaagaacaccagtggcgaaggcggctcactggcccggtactgacgctgaggtgcgaaagcgtggggagcaaacaggattagataccctggtagtccacgccgtaaacgatggatgctagccgttagacagcttgctgtttagtggcgcagttaacgctttaagcatcccgcctggggagtacggtcgcaagattaaaactcaaaggaattgacgggggcccgcacaagcggtggagcatgtggtttaattcgaagcaacgcgcagaaccttaccagctcttgacatgtctagtatggtcgccagagatggcttccttcccgcaaggggctagaacacaggtgctgcatggctgtcgtcagctcgtgtcgtgagatgttgggttaagtcccgcaacgagcgcaaccctcgcccttagttgccatcattcagttgggcactctagggggactgccggtgataagccgagaggaaggtggggatgacgtcaagtcctcatggcccttacgggctgggctacacacgtgctacaatggcggtgacagtgggatgcggaggggcgaccccgagcaaatctcaaaaagccgtctcagttcggattgtactctgcaactcgagtgcatgaaggtggaatcgctagtaatcgtagatcagaacgctacggtgaatacgttcccgggccttgtacacaccgcccgtcacaccatgggagttggttctacccgaaggcgttttgctaaccgcaagggggcaggcgaccacggtagggtcagcgactggggtg

SEQ ID NO: 2062 - DNA, 1413 bp, Methyloceanibacter caenitepidi
aacgaacgctggcggcaggcctaacacatgcaagtcgaacgagaagctaccttcgggtagtggaaagtggcagacgggtgagtaacgcgtgggaacgtgcctttcggttcggaataactcagggaaacttgggctaataccggatacgcccttcgggggaaagatttatcgccgaaagatcggcccgcgtcagattagctagttggtggggtaatggctcaccaaggcgacgatctgtagctggtctgagaggatgatcagccacactgggactgagacacggcccagactcctacgggaggcagcagtggggaatattggacaatgggcgaaagcctgatccagccatgccgcgtgggtgaagaaggccctagggttgtaaacccctttcagcggggaagataatgacggtacccgcagaagaagccccggctaactccgtgccagcagccgcggtaatacggagggggctagcgttgttcggaattactgggcgtaaagcgcgcgtaggcggactttcaagtcaggggtgaaatcccgaggctcaacctcggaactgcctttgatactgtaagtcttgagtccgagagaggtgagtggaattcctagtgtagaggtgaaattcgtagatattaggaagaacaccagtggcgaaggcggctcactggctcggtactgacgctgaggcgcgaaagcgtggggagcaaacaggattagataccctggtagtccacgccgtaaactatggatgctagccgtcggggagcatgctcttcggtggcgcagccaacgcattaagcatcccgcctggggagtacggtcgcaagattaaaactcaaaggaattgacgggggcccgcacaagcggtggagcatgtggtttaattcgaggcaacgcgaagaaccttaccagctcttgacttcctggtcggggctccagagacggagctcttcaattggccagtgacaggtgctgcatggctgtcgtcagctcgtgtcgtgagatgttgggttaagtcccgcaacgagcgcaacccctaccattagttgccagcattaagttgggcactctagtgggactgccggtgataagccggaggaaggtggggatgacgtcaagtcatcatggcccttacgggctgggctacacacgtgctacaatggcagtgacaatgggcagctacttcgcgaggagatgctaatcccaaaaaactgtctcagttcggattgttctctgcaactcgagagcatgaagtcggaatcgctagtaatcgcggatcagcatgccgcggtgaatacgttcccgggccttgtacacaccgcccgtcacaccatgggagttggttttacccgaagacggtgcgctaaccagcaatggaggcagccggccacggtagggtcagcgactggggtg

SEQ ID NO: 2063 - DNA, 1414 bp, Methyloceanibacter marginalis
aacgaacgctggcggcaggcctaacacatgcaagtcgaacgagaagccacctcgggtggtggacagtggcagacgggtgagtaacgcgtgggaacgtgcctttcggttcgggataacccagggaaacttgggctaataccggatacgcccttcgggggaaagattcattgccgaaagatcggcccgcgtcggattagcttgttggtggggtaaaagcctaccaaggcgacgatccgtagctggtctgagaggatgaccagccacactgggactgagacacggcccagactcctacgggaggcagcagtggggaatattggacaatgggcgaaagcctgatccagccatgccgcgtgggtgaagaaggccttagggttgtaaacccctttcagcggggaagataatgacggtacccgcagaagaagccccggctaactccgtgccagcagccgcggtaatacggagggggctagcgttgttcggaattactgggcgtaaagcgcgcgtaggcggatctgcaagtcaggggtgaaatcccgaggctcaacctcggaactgcctttgatactgcggatctcgagtccgagagaggtgagtggaattcctagtgtagaggtgaaattcgtagatattaggaagaacaccagtggcgaaggcggctcactggctcggtactgacgctgaggcgcgaaagcgtggggagcaaacaggattagataccctggtagtccacgccgtaaactatgggtgctagccgtcggagagcatgctcttcggtggcgcagcaaacgcattaagcaccccgcctggggagtacggtcgcaagattaaaactcaaaggaattgacgggggcccgcacaagcggtggagcatgtggtttaattcgaggcaacgcgaagaaccttaccagctcttgacatcctggtcggggctccagagacggagcctatcaattggccagtgacaggtgctgcatggctgtcgtcagctcgtgtcgtgagatgttgggttaagtcccgcaacgagcgcaacccctgccattagttgccagcattaagttgggcactctagtgggactgccggtgataagccggaggaaggtggggatgacgtcaagtcatcatggcccttacgggctgggctacacacgtgctacaatggcagtgacaatgggcagccactccgcgagggggagctaatcccaaaaaactgtctcagttcggattgttctctgcaactcgagagcatgaagtcggaatcgctagtaatcgcggatcagcatgccgcggtgaatacgttcccgggccttgtacacaccgcccgtcacaccatgggagttggttttacccgaagacggtgcgctaacctcgcaagaggaggcagccggccacggtagggtcagcgactggggtg

SEQ ID NO: 2064 - DNA, 1415 bp, Methyloceanibacter methanicus
aacgaacgctggcggcaggcctaacacatgcaagtcgaacgagaagctttccttcgggaaggtggacagtggcagacgggtgagtaacgcgtgggaacgtgcctttcggttcggaataactcagggaaacttgggctaataccggatacgcccttcgggggaaagatttatcgccgaaagatcggcccgcgtcagattagctagttggtggggtaatggctcaccaaggcgacgatctgtagctggtctgagaggatgatcagccacactgggactgagacacggcccagactcctacgggaggcagcagtggggaatattggacaatgggcgaaagcctgatccagccatgccgcgtgggtgaagaaggccctagggttgtaaacccctttcagcggggaagataatgacggtacccgcagaagaagccccggctaactccgtgccagcagccgcggtaatacggagggggctagcgttgttcggaattactgggcgtaaagcgcgcgtaggcggactttcaagtcaggggtgaaatcccgaggctcaacctcggaactgcctttgatactgtaagtcttgagtccgagagaggtgagtggaattcctagtgtagaggtgaaattcgtagatattaggaagaacaccagtggcgaaggcggctcactggctcggtactgacgctgaggtgcgaaagcgtggggagcaaacaggattagataccctggtagtccacgccgtaaactatggatgctagccgtcggggagcatgctcttcggtggcgcagcaaacgcattaagcatcccgcctggggagtacggtcgcaagattaaaactcaaaggaattgacgggggcccgcacaagcggtggagcatgtggtttaattcgaggcaacgcgaagaaccttaccagctcttgacttcctggtcggggctccagagacggagctcttcaattggccagtgacaggtgctgcatggctgtcgtcagctcgtgtcgtgagatgttgggttaagtcccgcaacgagcgcaacccctgccattagttgccagcattaagttgggcactctagtgggactgccggtgataagccggaggaaggtggggatgacgtcaagtcatcatggcccttacgggctgggctacacacgtgctacaatggcagtgacaatgggcagctactccgcgaggagatgctaatcccaaaaaactgtctcagttcggattgttctctgcaactcgagagcatgaagtcggaatcgctagtaatcgcggatcagcatgccgcggtgaatacgttcccgggccttgtacacaccgcccgtcacaccatgggagttggttttacccgaagacggtgcgctaacccgcaagggaggcagccggccacggtagggtcagcgactggggtg

SEQ ID NO: 2065 - DNA, 1415 bp, Methyloceanibacter stevinii
aacgaacgctggcggcaggcttaacacatgcaagtcgaacgagaagctttccttcgggaaggtggacagtggcagacgggtgagtaacgcgtgggaacgtgcctttcggttcggaataactcagggaaacttgggctaataccggatacgcccttcgggggaaagatttatcgccgaaagatcggcccgcgtcagattagctagttggtggggtaatggctcaccaaggcgacgatctgtagctggtctgagaggatgatcagccacactgggactgagacacggcccagactcctacgggaggcagcagtggggaatattggacaatgggcgaaagcctgatccagccatgccgcgtgggtgaagaaggccctagggttgtaaacccctttcagcggggaagataatgacggtacccgcagaagaagctccggctaactccgtgccagcagccgcggtaatacggagggagctagcgttgttcggaattactgggcgtaaagcgcgcgtaggcggactttcaagtcaggggtgaaatcccgaggctcaacctcggaactgcctttgatactgtaagtcttgagtccgagagaggtgagtggaattcctagtgtagaggtgaaattcgtagatattaggaagaacaccagtggcgaaggcggctcactggctcggtactgacgctgaggcgcgaaagcgtggggagcaaacaggattagataccctggtagtccacgccgtaaactatggatgctagccgtcggggagcatgctcttcggtggcgcagccaacgcattaagcatcccgcctggggagtacggtcgcaagattaaaactcaaaggaattgacgggggcccgcacaagcggtggagcatgtggtttaattcgaggcaacgcgaagaaccttaccagctcttgacttcctggtcggggctccagagacggagctcttcaattggccagtgacaggtgctgcatggctgtcgtcagctcgtgtcgtgagatgttgggttaagtcccgcaacgagcgcaacccctgccattagttgccagcattaagttgggcactctagtgggactgccggtgataagccggaggaaggtggggatgacgtcaagtcatcatggcccttacgggctgggctacacacgtgctacaatggcagtgacaatgggcagctactccgcgaggagatgctaatcccaaaaaactgtctcagttcggattgttctctgcaactcgagagcatgaagtcggaatcgctagtaatcgcggatcagcatgccgcggtgaatacgttcccgggccttgtacacaccgcccgtcacaccatgggagttggctttacccgaagacggtgcgctaaccagcaatggaggcagccggccacggtagggtcagcgactggggtg

SEQ ID NO: 2066 - DNA, 1414 bp, Methyloceanibacter superfactus
aacgaacgctggcggcaggcctaacacatgcaagtcgaacgtgaagccaccttcgggtggtggaaagtggcagacgggtgagtaacgcgtgggaacgtgcctttcggttcggaataacccagggaaacttgggctaataccggatacgcccttcgggggaaagattcatcgccgaaagatcggcccgcgtcggattagcttgttggtggggtaaaagcctaccaaggcgacgatccgtagctggtctgagaggatgaccagccacactgggactgagacacggcccagactcctacgggaggcagcagtggggaatattggacaatgggcgaaagcctgatccagccatgccgcgtgggtgaagaaggccctagggttgtaaacccctttcagcggggaagataatgacggtacccgcagaagaagccccggctaactccgtgccagcagccgcggtaatacggagggggctagcgttgttcggaattactgggcgtaaagcgcgcgtaggcggactttcaagtcaggggtgaaatcccgaggctcaacctcggaactgcctttgatactgtaagtcttgagtccgagagaggtgagtggaattcctagtgtagaggtgaaattcgtagatattaggaagaacaccagtggcgaaggcggctcactggctcggtactgacgctgaggcgcgaaagcgtggggagcaaacaggattagataccctggtagtccacgccgtaaactatgggtgctagccgtcggagagcatgctcttcggtggcgcagcaaacgcattaagcaccccgcctggggagtacggtcgcaagattaaaactcaaaggaattgacgggggcccgcacaagcggtggagcatgtggtttaattcgaggcaacgcgaagaaccttaccagctcttgacttcctggtcggggctccagagacggagctcttcaattggccagtgacaggtgctgcatggctgtcgtcagctcgtgtcgtgagatgttgggttaagtcccgcaacgagcgcaacccctgccattagttgccagcattaagttgggcactctagtgggactgccggtgataagccggaggaaggtggggatgacgtcaagtcatcatggcccttacgggctgggctacacacgtgctacaatggcagtgacaatgggcagccactccgcgaggaggagctaatcccaaaaaactgtctcagttcggattgttctctgcaactcgagagcatgaagtcggaatcgctagtaatcgcggatcagcatgccgcggtgaatacgttcccgggcctgtacacaccgcccgtcacaccatgggagttggctttacccgaagacggtgcgctaacctcgcaagaggaggcagccggccacggtagggtcagcgactggggtg

SEQ ID NO: 2067 - DNA, 1409 bp, Methylocella silvestris
aacgaacgctggcggcaggcctaacacatgcaagtcgaacgctgtagcaatacagagtggcagacgggtgagtaacacgtgggaacatacccttcggttcggaacaactcagggaaacttgagctaataccggatacgccctttgggggaaagatttatcgccgaaggattggcccgcgtctgattagctagttggcggggtaatggcccaccaaggcgacgatcagtagctggtctgagaggatgatcagccacattgggactgagacacggcccaaactcctacgggaggcagcagtggggaatattggacaatgggcgcaagcctgatccagccatgccgcgtgagtgatgaaggccttagggttgtaaagctcttttacctgggaagataatgacggtaccaggagaataagccccggctaacttcgtgccagcagccgcggtaatacgaagggggctagcgttgttcggatttactgggcgtaaagcgcacgtaggcggatctttaagtcaggggtgaaatcccggggctcaacctcggaactgcctttgatactggggatctcgagtccgggagaggtgagcggaactgcgagtgtagaggtgaaattcgtagatattcgcaagaacaccagtggcgaaggcggctcactggcccggtactgacgctgaggtgcgaaagcgtggggagcaaacaggattagataccctggtagtccacgccgtaaacgatggatgctagccgttaggcagcttgctgcttagtggcgcagttaacgctttaagcatcccgcctggggagtacggtcgcaagattaaaactcaaaggaattgacgggggcccgcacaagcggtggagcatgtggtttaattcgaagcaacgcgcagaaccttaccagctcttgacatgtccggtttggtttccagagatggattccttcagttaggctggccggaacacaggtgctgcatggctgtcgtcagctcgtgtcgtgagatgttgggttaagtcccgcaacgagcgcaaccctcgcccttagttgccatcatttagttgggcactctagggggactgccggtgataagccgagaggaaggtggggatgacgtcaagtcctcatggcccttacgggctgggctacacacgtgctacaatggcggtgacagtgggatgctaaggggcgacccctcgcaaatctcaaaaagccgtctcagttcggattgcgctctgcaactcgagcgcatgaaggtggaatcgctagtaatcgtagatcagaacgctacggtgaatacgttcccgggccttgtacacaccgcccgtcacaccatgggagttggttctacccgaaggcgttttcttaaccgcaaggagagaggcgaccacggtagggtcagcgactggggtg

SEQ ID NO: 2068 - DNA, 1457 bp, Methylococcus capsulatus
attgaacgctggcggcatgcttaacacatgcaagtcgaacggtaacaggccttcgggcgctgacgagtggcggacgggtgagtaatgcgtaggaatctgccttgttgtgggggataactcggggaaacccgagctaataccgcatacgctccacggaggaaagcgggggatcttcggacctcgcgcaataagatgagcctacgtcggattagctggttggtggggtaaaggcctaccaaggcgacgatccgtagctggtctgagaggacgatcagccacactgggactgagacacggcccagactcctacgggaggcagcagtggggaatattggacaatgggcgcaagcctgatccagcaatgccgcgtgtgtgaagaaggcctgcgggttgtaaagcactttaagcaggaaagaagggtggggtgttaataccatctcacattgacgttacctgcagaataagcaccggctaactccgtgccagcagccgcggtaatacggagggtgcgagcgttaatcggaattactgggcgtaaagcgcgcgtaggcggtttgataagtctgatgtgaaagccctgggcttaacctgggaactgcattggatactgtcaggctcgagtgtggtagagggtagtggaatttccggtgtagcagtgaaatgcgtagagatcggaaggaacaccagtggcgaaggcggctacctggaccaacactgacgctgaggtgcgaaagcgtggggagcaaacaggattagataccctggtagtccacgctgtaaacgatgtcaactagccgttggaggggtttaaccttttagtggcgcagctaacgcgataagttgaccgcctggggagtacggccgcaaggttaaaactcaaatgaattgacgggggcccgcacaagcggtggagcatgtggtttaattcgatgcaacgcgaagaaccttacctggccttgacatgcttggaatcctgcagagatgcgggagtgccttcgggagccaagacacaggtgctgcatggctgtcgtcagctcgtgtcgtgagatgttgggttaagtcccgtaacgagcgcaacccttgtccttagttgccagcggttcggccgggaactctaaggagactgccggtgataaaccggaggaaggtggggatgacgtcaagtcatcatggcccttatggccagggctacacacgtgctacaatggccggtacagagggtagccaagccgcgaggtggagccaatcccagaaagccggtcttagtccggattgcagtctgcaactcgactgcatgaagtcggaatcgctagtaatcgcggatcagcatgccgcggtgaatacgttcccgggccttgtacacaccgcccgtcacaccatgggagtgggttgcaccagaagtaggtagtctaaccgcgaggagggcgcttaccacggtgtgattcatgactggggtg

SEQ ID NO: 2069 - DNA, 1409 bp, Methylocystis bryophila
aacgaacgctggcggcaggcttaacacatgcaagtcgaacgctgtagcaatacagagtggcagacgggtgagtaacgcgtgggaacgtgcccttcggttcggaataactcagggaaacttgagctaataccggatacgtgcgagagcagaaagatttatcgccgaaggatcggcccgcgtccgattagctagttggtggggtaatggcccaccaaggcgacgatcggtagctggtctgagaggatgatcagccacactgggactgagacacggcccagactcctacgggaggcagcagtggggaatattggacaatgggcgcaagcctgatccagccatgccgcgtgagtgatgaaggccctagggttgtaaagctctttcgccagggacgataatgacggtacctggataagaagccccggctaacttcgtgccagcagccgcggtaatacgaagggggctagcgttgttcggatttactgggcgtaaagcgcacgtaggcggatctttaagtcaggggtgaaatcccggggctcaacctcggaactgcctttgatactggaggtctcgagtccgggagaggtgagtggaactgcgagtgtagaggtgaaattcgtagatattcgcaagaacaccagtggcgaaggcggctcactggcccggaactgacgctgaggtgcgaaagcgtggggagcaaacaggattagataccctggtagtccacgccgtaaacgatggatgctagccgttggggagcttgctcttcagtggcgcagctaacgctttaagcatcccgcctggggagtacggtcgcaagattaaaactcaaaggaattgacgggggcccgcacaagcggtggagcatgtggtttaattcgaagcaacgcgcagaaccttaccagcttttgacatgcccggtatggtcgacagagatgtcttccttcccgcaaggggccggagcacaggtgctgcatggctgtcgtcagctcgtgtcgtgagatgttgggttaagtcccgcaacgagcgcaaccctcgcccttagttgccatcattcagttgggcactctagggggactgccggtgataagccgcgaggaaggtggggatgacgtcaagtcctcatggcccttacaggctgggctacacacgtgctacaatggcggtgacagagggatgcgaaggggcgacctggagcaaatcctttaaaagccgtctcagttcggattgcactctgcaactcgggtgcatgaaggtggaatcgctagtaatcgcagatcagcacgctgcggtgaatacgttcccgggccttgtacacaccgcccgtcacaccatgggagttggttttacccgaaggcgtttcgctaaccgcaaggaggcagacgaccacggtagggtcagcgactggggtg

SEQ ID NO: 2070 - DNA, 1406 bp, Methylocystis heyeri
aacgaacgctggcggcaggcttaacacatgcaagtcgaacgccccgcaaggggagtggcagacgggtgagtaacacgtgggaacgtaccctttggttcggaataactcagggaaacttgagctaataccggataagtgcgagagcagaaagatttatcgccgaaggatcggcccgcgtccgattagctagttggtgaggtaatggctcaccaaggcgacgatcggtagctggtctgagaggatgatcagccacattgggactgagacacggcccaaactcctacgggaggcagcagtggggaatattggacaatgggcgcaagcctgatccagccatgccgcgtgagtgatgaaggccttagggttgtaaagctctttcgccagggacgataatgacggtacctggataagaagccccggctaacttcgtgccagcagccgcggtaatacgaagggggctagcgttgttcggatttactgggcgtaaagcgcacgtaggcggatctttaagtcaggggtgaaatgccggggctcaacctcggaactgcctttgatactggaggtctcgagttcgggagaggtgagtggaactgcgagtgtagaggtgaaattcgtagatattcgcaagaacaccagtggcgaaggcggctcactggcccgatactgacgctgaggtgcgaaagcgtggggagcaaacaggattagataccctggtagtccacgccgtaaacgatggatgctagccgttgggcagcttgctgttcagtggcgcagctaacgctttaagcatcccgcctggggagtacggtcgcaagattaaaactcaaaggaattgacgggggcccgcacaagcggtggagcatgtggtttaattcgaagcaacgcgcagaaccttaccagcttttgacatgcccggtatgatcgccagagatggctttcttcccgcaaggggccggagcacaggtgctgcatggctgtcgtcagctcgtgtcgtgagatgttgggttaagtcccgcaacgagcgcaaccctcgcccttagttgccatcattaagttgggcactctagggggactgccggtgataagccgcgaggaaggtggggatgacgtcaagtcctcatggcccttacaggctgggctacacacgtgctacaatggcggtgacaaagggaagcgaaagggcgacctggagcaaatctcaaaaagccgtctcagttcggattgcactctgcaactcgagtgcatgaaggtggaatcgctagtaatcgcagatcagcacgctgcggtgaatacgttcccgggccttgtacacaccgcccgtcacaccatgggagttggctttacccgaaggcgtttcgctaaccgcaaggaggcaggcgaccacggtagggtcagcgactggggtg

SEQ ID NO: 2071 - DNA, 1408 bp, Methylocystis hirsuta
aacgaacgctggcggcaggcctaacacatgcaagtcgaacgccctagcaatagggagtggcagacgggtgagtaacgcgtgggaacgtacccttcggtctggaataacccagggaaacttggactaataccggatacgtgcgagagcagaaagatttatcgccgaaggatcggcccgcgtccgattagctagttggtgaggtaaaagctcaccaaggcgacgatcggtagctggtctgagaggatgatcagccacactgggactgagacacggcccagactcctacgggaggcagcagtggggaatattggacaatgggcgaaagcctgatccagccatgccgcgtgagtgatgaaggccctagggttgtaaagctctttcgccagggacgataatgacggtacctggataagaagccccggctaagttcgtgccagcagccgcggtaatacgaagggggctagcgttgttcggaatcactgggcgtaaagcgcacgtaggcggatctttaagtcaggggtgaaatcccgaggctcaacctcggaactgcctttgatactggaggtctcgagtccgggagaggtgagtggaactgcgagtgtagaggtgaaattcgtagatattcgcaagaacaccagtggcgaaggcggctcactggcccggtactgacgctgaggtgcgaaagcgtggggagcaaacaggattagataccctggtagtccacgctgtaaactatggatgctagccgttgggcagcttgctgttcagtggcgcagctaacgctttaagcatcccgcctggggagtacggtcgcaagattaaaactcaaaggaattgacgggggcccgcacaagcggtggagcatgtggtttaattcgaagcaacgcgcagaaccttaccagcttttgacatgcccggtatgatcgccagagatggctttcttcccgcaaggggccggtgcacaggtgctgcatggctgtcgtcagctcgtgtcgtgagatgttgggttaagtcccgcaacgagcgcaaccctcgcccttagttgccatcattaagttgggcactctagggggactgccggtgataagccgcgaggaaggtggggatgacgtcaagtcctcatggcccttacaggctgggctacacacgtgctacaatggcggtgacaatgggatgcggaagggcgacctcgagcaaatctcaaaaagccgtctcagttcggattgcactctgcaactcgagtgcatgaaggtggaatcgctagtaatcgcagatcagcacgctgcggtgaatacgttcccgggccttgtacacaccgcccgtcacaccatgggagttggttttacccgaaggcgtttcgccaaccgcaaggaggcaggcgaccacggtagggtcagcgactggggtg

SEQ ID NO: 2072 - DNA, 1408 bp, Methylocystis rosea
aacgaacgctggcggcaggcctaacacatgcaagtcgaacgccctagcaatagggagtggcagacgggtgagtaacgcgtgggaacgtacccttcggtctggaataacccagggaaacttgggctaataccggatacgtgcgagagcagaaagatttatcgccgaaggatcggcccgcgtccgattagctagttggtgaggtaaaagctcaccaaggcgacgatcggtagctggtctgagaggatgatcagccacactgggactgagacacggcccagactcctacgggaggcagcagtggggaatattggacaatgggcgaaagcctgatccagccatgccgcgtgagtgatgaaggccctagggttgtaaagctctttcgccagggacgataatgacggtacctggataagaagccccggctaacttcgtgccagcagccgcggtaatacgaagggggctagcgttgttcggatttactgggcgtaaagcgcacgtaggcggatttttaagtcaggggtgaaatcccaaggctcaaccttggaactgcctttgatactggaagtctcgagtccgggagaggtgagtggaactgcgagtgtagaggtgaaattcgtagatattcgcaagaacaccagtggcgaaggcggctcactggcccggtactgacgctgaggtgcgaaagcgtggggagcaaacaggattagataccctggtagtccacgccgtaaactatggatgctagccgttgggcagcttgctgttcagtggcgcagctaacgctttaagcatcccgcctggggagtacggtcgcaagattaaaactcaaaggaattgacgggggcccgcacaagcggtggagcatgtggtttaattcgaagcaacgcgcagaaccttaccagcttttgacatgcccggtatgatcgccagagatggctttcttcccgcaaggggccggtgcacaggtgctgcatggctgtcgtcagctcgtgtcgtgagatgttgggttaagtcccgcaacgagcgcaaccctcgcccttagttgccatcattaagttgggcactctagggggactgccggtgataagccgcgaggaaggtggggatgacgtcaagtcctcatggcccttacaggctgggctacacacgtgctacaatggcggtgacaatgggatgcggaagggcgacctcgagcaaatctcaaaaagccgtctcagttcggattgcactctgcaactcgagtgcatgaaggtggaatcgctagtaatcgcagatcagcacgctgcggtgaatacgttcccgggccttgtacacaccgcccgtcacaccatgggagttggttttacccgaaggcgtttcgccaaccgcaaggaggcaggcgaccacggtagggtcagcgactggggtg

SEQ ID NO: 2073 - DNA, 1409 bp, Methyloferula stellata
aacgaacgctggcggcaggcctaacacatgcaagtcgaacgctgtagcaatacagagtggcagacgggtgagtaacacgtgggaacatgcccttcggttcggaataactcagggaaacttgagctaataccggatacgtccgcgaggagaaagatttatcgccgaaggattggcccgcgtctgattagcttgttggtgaggtaatggctcaccaaggcgacgatcagtagctggtctgagaggatgatcagccacattgggactgagacacggcccaaactcctacgggaggcagcagtggggaatattggacaatgggcgaaagcctgatccagccatgccgcgtgagtgatgaaggccttagggttgtaaagctcttttgcccgggaagataatgacggtaccgggagaataagccccggctaacttcgtgccagcagccgcggtaatacgaagggggctagcgttgttcggatttactgggcgtaaagcgcacgtaggcggattcttaagtcagaggtgaaatcccagggctcaaccctggaactgcctttgatactggggatcttgagtccgggagaggtgagtggaactgcgagtgtagaggtgaaattcgtagatattcgcaagaacaccagtggcgaaggcggctcactggcccggtactgacgctgaggtgcgaaagcgtggggagcaaacaggattagataccctggtagtccacgccgtaaacgatggatgctagccgttaggcagcttgctgcttagtggcgcagttaacgctttaagcatcccgcctggggagtacggtcgcaagattaaaactcaaaggaattgacgggggcccgcacaagcggtggagcatgtggtttaattcgaagcaacgcgcagaaccttaccagctcttgacatgtcccgtgtggtttccagagatggattccttcagttcggctggcgggaacacaggtgctgcatggctgtcgtcagctcgtgtcgtgagatgttgggttaagtcccgcaacgagcgcaaccctcgcccttagttgccatcatttagttgggcactctagggggactgccggtgataagccgagaggaaggtggggatgacgtcaagtcctcatggcccttacgggctgggctacacacgtgctacaatggcggtgacagtgggatgcaaaagggcgacctctagcaaatctcaaaaagccgtctcagttcggattgcactctgcaactcgagtgcatgaaggtggaatcgctagtaatcgtagatcagaacgctacggtgaatacgttcccgggccttgtacacaccgcccgtcacaccatgggagttggttctacccgaaggcgttttgctaaccgcaagggggcagacgaccacggtagggtcagcgactggggtg

SEQ ID NO: 2074 - DNA, 1452 bp, Methyloglobulus morosus
attgaacgctggcggtatgcttaacacatgcaagtcgaacggcagtcgcttcggcggcgagagtggcggacgggtgagtaacgcgtaggaacctggcccgtagtgggggacaacttagggaaacttaagctaataccgcatacgccccaagggggaaagcgggggaccgcaaggcctcgcgctatgggatgggcctgcgtcggattagcttgttggtggggtaacggcccaccaaggcgacgatccgtagctggtctgagaggacgaccagccacactgggactgagacacggcccagactcctacgggaggcagcagtggggaatattggacaatgggcgcaagcctgatccagcaataccgcgtgtgtgaagaaggcctgagggttgtaaagcactttcagcggggaggaaaaaggcggggcgaacacccccgcccttgacattacccgcacaagaagcaccggctaactccgtgccagcagccgcggtaatacggagggtgcgagcgttaatcggaattactgggcgtaaagcgtgcgcaggcggcgcaccaagccaggcgtgaaagccccgggctcaacctgggaactgcgcctgggactggtgcgctggagtcgggtagaggcaggcggaattccgggtgtagcggtgaaatgcgtagatatccggaggaacaccagtggcgaaggcggcctgctgggcccagactgacgctgaggcacgaaagcgtgggtagcaaacaggattagataccctggtagtccacgccgtaaacgatgtcgactagccgttggccccttatgggggttagtggcgcagccaacgcattaagtcgaccgcctggggagtacggccgcaaggttaaaactcaaatgaattgacgggggcccgcacaagcggtggagcatgtggtttaattcgatgcaacgcgaagaaccttacctgcccttgacatcctaagaatttggcggagacgccttagtgccttcgggaacttagagacaggtgctgcatggctgtcgtcagctcgtgtcgtgagatgttgggttaagtcccgtaacgagcgcaaccctcgcccccagttgccagcgcgtcatggcggggactctggggggactgccggtgataaaccggaggaaggcggggacgacgtcaagtcatcatggcccttatgggcagggctacacacgtgctacaatggccggtacagagggctgcgaactggcaacagtgagccaatcccagaaagccggtcccagtccggatcggggtctgcaactcgaccccgtgaagtcggaatcgctagtaatcgcggatcagaatgccgcggtgaatacgttcccgggccttgtacacaccgcccgtcacaccatgggagtgggttgctccagaagcaggtggcctaaccgcaaggggggcgcttgccacggagtggtccatgactggggtg

SEQ ID NO: 2075 - DNA, 1402 bp, Methyloligella halotolerans
aacgaacgctggcggcaggcttaacacatgcaagtcgaacgcaccttcgggtgagtggcagacgggtgagtaacgcgtgggaacgtgcctttcggtctggaataacccagggaaacttgggctaataccggatacgccctccgggggaaagatttatcgccgaaagatcggcccgcgtcggattagcttgttggtggggtaatggcctaccaaggctacgatccgtagctggtctgagaggatgatcagccacactgggactgagacacggcccagactcctacgggaggcagcagtggggaatattggacaatgggcgcaagcctgatccagccatgccgcgtgagtgacgaaggccttagggttgtaaagctctttcagcggggaagataatgacggtacccgcagaagaagccccggctaactccgtgccagcagccgcggtaatacggagggggctagcgttgttcggaattactgggcgtaaagcgcgcgtaggcggactttcaagtcaggggtgaaatcccggggcttaacctcggaactgcctttgatactgttggtcttgagtccgggagaggtgagcggaattcctagtgtagaggtgaaattcgtagatattaggaagaacaccagtggcgaaggcggctcactggcccggtactgacgctgaggcgcgaaagcgtggggagcaaacaggattagataccctggtagtccacgccgtaaacgatggatgctagccgtcggtcagcatgctgatcggtggcgcagctaacgcattaagcatcccgcctggggagtacggtcgcaagattaaaactcaaaggaattgacgggggcccgcacaagcggtggagcatgtggtttaattcgaggcaacgcgaagaaccttaccagcccttgacatcccggtttggggaccagagatggaccccatttaacgccggtgacaggtgctgcatggctgtcgtcagctcgtgtcgtgagatgttgggttaagtcccgcaacgagcgcaacccctaccattagttgccagcattaagttgggcactctagtgggactgccggtgataagccggaggaaggtggggatgaggtcaagtcatcatggcccttacgggctgggctacacacgtgctacaatggcggtgacagagggcagccactccgcgaggaggagctaatccctaaaaaccgtctcagttcggattgttctctgcaactcgagagcatgaagtcggaatcgctagtaatcgcggatcagcatgccgcggtgaatacgttcccgggccttgtacacaccgcccgtcacaccatgggagttggctttacccgaagacggtgcgctaacctcgcaagaggaggcagccggccacggtagggtcagcgactggggtg

SEQ ID NO: 2076 - DNA, 1452 bp, Methylomagnum ishizawai
attgaacgctggcggcatgcttaacacatgcaagtcgaacggtagggacttcggtcccgagagtggcggacgggtgagtaacacgtaggaatctgcctgatagtgggggataacccggggaaactcgggctaataccgcatacgctccacggaggaaagcgggggatcttcggacctcgcgctatcagatgagcctgcgtccgattagctagttggcggggtaagggcccaccaaggcgacgatcggtagctggtctgagaggacgatcagccacactggaactgagacacggtccagactcctacgggaggcagcagtggggaatattggacaatgggcgcaagcctgatccagcaatgccgcgtgtgtgaagaaggcctgcgggttgtaaagcactttaagcaggaaagaaggctccaaggccaatacccttggagattgacgttacctgcagaataagcaccggctaactccgtgccagcagccgcggtaatacggagggtgcgagcgttaatcggaattactgggcgtaaagcgcgcgtaggcggtccgttaagtcagccgtgaaagccccgggcttaacctgggaactgcggatgatactggcggactagagtgtggcagagggtggcggaatttccggtgtagcagtgaaatgcgtagagatcggaaggaacaccagtggcgaaggcggccatctgggccaacactgacgctgaggtgcgaaagcgtggggagcaaacaggattagataccctggtagtccacgccgtaaacgatgagaactagccgttgggcacgatttggtgcttagtggcgcagctaacgcgataagttctccgcctggggagtacggccgcaaggttaaaactcaaatgaattgacgggggcccgcacaagcggtggagcatgtggtttaattcgatgcaacgcgaagaaccttacctggccttgacatccagagaactttccagagatggattggtgccttcgggaactctgagacaggtgctgcatggctgtcgtcagctcgtgtcgtgagatgttgggttaagtcccgtaacgagcgcaacccttgtccctagttgccagcgtaaagtcgggaactctagggagaccgccggtgataaaccggaggaaggtggggatgacgtcaagtcatcatggcccttatggccagggctacacacgtgctacaatggccggtacagagggtcgcgaagccgcgaggtggagccaatcccacaaagccggtcgtagtccggattggagtctgcaactcgactccatgaagtcggaatcgctagtaatcgcggatcagaatgccgcggtgaatacgttcccgggccttgtacacaccgcccgtcacaccatgggagtgggttgcaccagaagcaggtagtctaaccgcaaggagggcgcttgccacggtgtgattcatgactggggtg

SEQ ID NO: 2077 - DNA, 1457 bp, Methylomicrobium album
attgaacgctggcggtatgcttaacacatgcaagtcgaacggtaacaggccttcgggcgctgacgagtggcggacgggtgcgtaacgcgtaggaatctgcctgttagtgggggacaacgtggggaaactcacgctaataccgcatacgccctgagggggaaagcgggggaccttcgggcctcgcgctaacagatgagcctgcgtgggattagctagttggtagggtaaaggcctaccaaggcgacgatccctagctggtctgagaggacgatcagccacactgggactgagacacggcccagactcctacgggaggcagcagtggggaatattggacaatgggcgcaagcctgatccagcaataccgcgtgtgtgaagaaggcctgagggttgtaaagcacttttaatcgggaggaacatctgatggcgaatacccatcagtctgacattaccgatagaaaaagcaccggctaactccgtgccagcagccgcggtaatacggagggtgcaagcgttaatcggaattactgggcgtaaagcgtgcgtaggcggctgcttaagtcagatgtgaaagccccgggcttaacctgggaacggcatttgatactgggcagctcgagttgagtagaggagaggggaatttccggtgtagcggtgaaatgcgtagagatcggaaggaacaccagtggcgaaggcgcctctctggactcaaactgacgctgaggtacgaaagcgtgggtagcaaacaggattagataccctggtagtccacgccgtaaacgatgtcaactagccgttggtcttattcgtaagattcgtggcgcagctaacgcgataagttgaccgcctggggagtacggccgcaaggttaaaactcaaatgaattgacgggggcccgcacaagcggtggagcatgtggtttaattcgatgcaacgcgaagaaccttacctacccttgacatccagagaatctgtgagagatcgtagagtgccttcgggaactctgagacaggtgctgcatggctgtcgtcagctcgtgtcgtgagatgttgggttaagtcccgtaacgagcgcaacccttatccttagttgccaacgggtgatgccgggaactctagggagactgccggtgataaaccggaggaaggtggggacgacgtcaagtcatcatggcccttatgggtagggctacacacgtgctacaatggccggtacagagggcagcgaactcgcgagagccagccaatcccacaaagccggtcctagtccggattggagtctgcaactcgactccatgaagtcggaatcgctagtaatcgcgaatcagaatgtcgcggtgaatacgttcccgggccttgtacacaccgcccgtcacaccatgggagtgggttgcaaaagaagtaggtagtctaaccttcgggagggcgcttaccactttgtgattcatgactggggtg

SEQ ID NO: 2078 - DNA, 1457 bp, Methylomicrobium alcaliphilum
attgaacgctggcggtatgcttaacacatgcaagtcgaacggtaacggtccttcgggagccgacgagtggcggacgggtgagtaacgcgtaggaatctgcctggtagtgggggacaactcggagaaatccgagctaataccgcatacgccctgagggggaaagcgggggatcttcggacctcgcgctatcagatgagcctgcgttggattagctagttggtggggtaaaggcctaccaaggcgacgatccatagctggtctgagaggacgatcagccacactgggactgagacacggcccagactcctacgggaggcagcagtggggaatattggacaatgggcgcaagcctgatccagcaataccgcgtgtgtgaagaaggcctgagggttgtaaagcactttcaatagggaggaaaaagcgttggttaatagccgatgccttgacattacctatagaagaagcaccggctaactccgtgccagcagccgcggtaatacggagggtgcgagcgttaatcggaattactgggcgtaaagcgtgcgtaggcggttatttaagtcagatgtgaaagccccgggcttaacctgggaacggcatttgatactgggtaacttgagtttaggagaggagagtggaatttccggtgtagcggtgaaatgcgtagagatcggaaggaacaccagtggcgaaggcggctctctggcctaaaactgacgctgaggtacgaaagcgtgggtagcaaacaggattagataccctggtagtccacgccgtaaacgatgtcaactagccgttgggtctttattaagacttagtggtgcagctaacgcattaagttgaccgcctggggagtacggccgcaaggttaaaactcaaatgaattgacgggggcccgcacaagcggtggagcatgtggtttaattcgatgcaacgcgaagaaccttacctacccttgacatccagagaatctgtgagagatcgtagagtgccttcgggaactctgagacaggtgctgcatggctgtcgtcagctcgtgtcgtgagatgttgggttaagtcccgtaacgagcgcaacccttatccttagttgccaacaggtcaagctgggaactctagggagactgccggtgataaaccggaggaaggtggggacgacgtcaagtcatcatggcccttatgggtagggctacacacgtgctacaatggccggtacagagggcagcgaacttgcgaaagtcagcaaatcccagaaagccggtcctagtccggattgcagtctgcaactcgactgcatgaagtcggaatcgctagtaatcgcgaatcagaatgtcgcggtgaatacgttcccgggccttgtacacaccgcccgtcacaccatgggagtgggttgcaaaagaagtaggtagtttaaccttcgggagggcgcttaccactttgtgattcatgactggggtg

SEQ ID NO: 2079 - DNA, 1456 bp, Methylomicrobium buryatense
attgaacgctggcggtatgcttaacacatgcaagtcgaacggtaacggtccttcgggagcccgacgagtggcggcgggttgagtaacgcgtaggaatctgcctggtagtgggggacaacgtggggaaactcacgctaataccgcatacgccctgagggggaaagcgggggatcttcggacctcgcctatcagatgagcctgcgttggattagctagttggtagggtaaaggcctaccaaggcgacgatccatagctggtctgagaggacgatcagccacactgggactgagacacggcccagactcctacgggaggcagcagtggggaatattggacaatgggcgcaagcctgatccagcaataccgcgtgtgtgaagaaggcctgagggttgtaaagcactttcaatagggaggaaaaagcgttggcgaatacccgatgccttgacattacctatagaagaagcaccggctaactccgtgccagcagccgcggtaatacggagggtgcgagcgttaatcggaattactgggcgtaaagcgtgcgtaggcggctgtttaagtcagatgtgaaagccccgggcttaacctgggaacggcatttgatactgggcagctagagtttaggagaggagagtggaatttccggtgtagcggtgaaatgcgtagagatcggaaggaacaccagtggcgaaggcggctctctggcctaaaactgacgctgaggtacgaaagcgtgggttgcaaacaggattagataccctggtagtccacgccgtaaacgatgtcaactagccgttgggtctttattgagacttagtggtgcagctaacgcattaagttgaccgcctggggagtacggcgcaagtttaaaactcaaatgaattgacgggggcccgcacaagcggtggagcatgtggtttaattcgatgcaacgcgaagaaccttacctacccttgacatccagagaatctgttagagatagtggagtgccttcgggaactctgagacaggtgctgcatggctgtcgtcagctcgtgtcgtgagatgttgggttaagtcccgtaacgagcgcaacccttatccttagttgccaacaggtcaagctgggaactctagggagactgccggtgataaaccggaggaaggtggggacgacgtcaagtcatcatggcccttatgggtagggctacacacgtgctacaatggcaggtacagagggcagcgaacttgcgagagtaagcaaatcccagaaagccggtcctagtccggattgcagtctgcaactcgactgcatgaagtcggaatcgctagtaatcgcgaatcagaatgtcgcggtgaatacgttcccgggccttgtacacaccgcccgtcacaccatgggagtgggttgcaaaagaagtaggtagtttaaccttcgggagggcgcttaccactttgtgattcatgactggggtg

SEQ ID NO: 2080 - DNA, 1456 bp, Methylomicrobium kenyense
  misc_feature (305)..(305): n is a, c, g, or t
  misc_feature (824)..(824): n is a, c, g, or t
attgaacgctggcggtatgcttaacacatgcaagtcgaacggtaacggtccttcgggagccgacgagtggcggacgggtgagtaacgcgtaggaatctgcctggtagtgggggacaactcggagaaattcgagctaataccgcatacgccctatgggggaaagcgggggatcttcggacctcgcgctatcggatgagcctgcgttggattagctagttggtggggtaaaggcctaccaaggcgacgatccatagctggtctgagaggacgatcagccacactgggactgagacacggcccagacncctacgggaggcagcagtggggaatattggacaatgggcgcaagcctgatccagcaataccgcgtgtgtgaagaaggcctgagggttgtaaagcactttcaatagggaggaaaaagcgttggttaatacccgatgccttgacattacctatagaagaagcaccggctaactccgtgccagcagccgcggtaatacggagggtgcgagcgttaatcggaattactgggcgtaaagcgtgcgtaggcggctgtttaagtcagatgtgaaagccccgggcttaacctgggaactgcatttgatactggacagctcgagtttaggagaggagagtggaatttccggtgtagcggtgaaatgcgtagagatcggaaggaacaccagtggcgaaggcggctctctggcctaaaactgacgctgaggtacgaaagcgtgggtagcaaacaggattagataccctggtagtccacgccgtaaacgatgtcaactagccgttgggtttattaatgaacttagtggtgnagctaacgcattaagttgaccgcctggggagtacggccgcaaggttaaaactcaaatgaattgacgggggcccgcacaagcggtggagcatgtggtttaattcgatgcaacgcgaagaaccttacctacccttgacatccagagaatctgtcagagatgattgagtgccttcgggaactctgagacaggtgctgcatggctgtcgtcagctcgtgtcgtgagatgttgggttaagtcccgtaacgagcgcaacccttatccttagttgccaacagttcggctgggaactctagggagactgccggtgataaaccggaggaaggtggggacgacgtcaagtcatcatggcccttatgggtagggctacacacgtgctacaatggccggtacagagggcagcgaacttgcgaaagtcagcaaatcccagaaagccggtcctagtccggattgcagtctgcaactcgactgcatgaagtcggaatcgctagtaatcgcgaatcagaatgtcgcggtgaatacgttcccgggccttgtacacaccgcccgtcacaccatgggagtgggttgcaaaagaagtaggtagtttaaccttcgggagggcgcttaccactttgtgattcatgactggggtg

SEQ ID NO: 2081 - DNA, 1483 bp, Methylomirabilis oxyfera
aacgaacgctggcggcgtgcctaacacatgcaagtcgagcgagaaagtcccggcaacgggatgagtaaagcggcaaacgggtgagtaacgcgtaggtaatctatccttcggatcgggataacctgctgaaaagtgggataataccggataacgttcttgtgggtatcctatgagaaccaaagggggcgagcgtaagcagctcccaccaaaggaggagcctgcgtccgattagctagttggtggggtaaaggcctaccaaggcgacgatcggtagccggcctgagagggcgaccggccacactggaactgagacacggtccagactcctacgggaggcagcagtggggaatattgcgcaatgggcgaaagcctgacgcagcgacgccgcgtgggtgatgaaggccttcgggttgtaaagccctgtctggtggaacgaatggcttagcggcaaataaccgctaggcgtgacggtaccaccgaaggaagccccggctaactacgtgccagcagccgcggtaagacgtagggggcgagcgttgttcggatttactgggcgtaaagcgcgcgtaggcggctagataagtcgggtgtgaaatccctcggcttaaccgaggacccgcatccgatactgcctggctcgagtctaggagaggaaagcggaattcccagtgtagcggtgaaatgcgtagatattgggaggaacaccggtggcgaaggcggctttccggactagcactgacgctgaggcgcgaaagctaggggagcgaacgggattagataccccggtagtcctagccgtaaacgatgggcactaggtgtgggaggtattgaccccttccgcgccgaagctaacgcattaagtgccccgcctggggagtacggccgcaaggctaaaactcaaaggaattgacgggggcccgcacaagcggtggagcatgtggtttaattcgacgcaacgcgaagaaccttaccagggcttgacatcccacgaacctgcctgaaagggcggggtgcccgcaagggagcgtggagacaggtggtgcatggctgtcgtcagctcgtgtcgtgagatgttgggttaagtcccgcaacgagcgcaaccctcacccctggttgccaccggataaagccgagcactcgaggggaactgccagcgtcaagctggaggaaggcggggatgacgtcaagtcatcatgccccttacgccctgggctacacacgtgctacaatggccggtacaaagggacgcgagaccgcgaggtggagctaatcccaaaaaaccggtctaagttcagattgcagtctgcaactcgactgcatgaaggaggaatcgctagtaatcgcgcatcagcacggcgcggtgaatacgttcccgggccttgtacacaccgcccgtcacaccacgaaagctgtctgtactcgaagtcgctgagctaacccgcaaggggggcaggcgccgaaggtatggtcagtgattggggtg

SEQ ID NO: 2082 - DNA, 1452 bp, Methylomonas denitrificans
attgaacgctggcggtatgcttaacacatgcaagtcgaacggtagcaggccttcgggcgctgacgagtggcggacgggtgagtaatgcataggaatctgcctattagtgggggacaacgtggggaaactcacgctaataccgcatacgctacgggggaaagctggggaccttcgggcctggcgctaatagatgagcctatgttggattagctagttggtagggtaacggcctaccaaggcgacgatccatagctggtctgagaggatgatcagcacactgggactgagacacggcccagactcctacgggaggcagcagtggggaatattggacaatgggcgaaagcctgatccagcaataccgcgtgtgtgaagaaggcctgagggttgtaaagcactttcaataggaaggaatacctgccggttaatacccggtagactgacattacctatacaagaagcaccggctaactccgtgccagcagccgcggtaatacggagggtgcaagcgttaatcggaattactgggcgtaaagcgtgcgtaggcggttgtttaagtcagatgtgaaagcctgggcttaacctgggaactgcatttgatactgggcaactagagtttagtagaggggagtggaatttcaggtgtagcggtgaaatgcgtagagatctgaaggaacaccagtggcgaaggcggctccctggactaaaactgacgctgaggtacgaaagcgtgggtagcaaacaggattagataccctggtagtccacgccgtaaacgatgtcaactaactgttgggttcttaaagaacttagtagtggagctaacgtattaagttgaccgcctggggagtacggccgcaaggctaaaactcaaatgaattgacgggggcccgcacaagcggtggagcatgtggtttaattcgatgcaacgcgaagaaccttacctacccttgacatccagagaatctgttagagatagcggagtgccttcgggagctctgagacaggtgctgcatggctgtcgtcagctcgtgttgtgaaatgttgggttaagtcccgtaacgagcgcaacccttatccttagttgccagcgggtcatgccgggaactctagggagactgccggtgataaaccggaggaaggtggggacgacgtcaagtcatcatggcccttatgggtagggctacacacgtgctacaatggccggtacagagggctgcgaactcgcgagagtaagctaatcccaaaaagccggtcccagtccggatcgcagtctgcaactcgactgcgtgaagtcggaatcgctagtaatcgcggatcagaatgccgcggtgaatacgttcccgggccttgtacacaccgcccgtcacaccatgggagtgggttgcaaaagaagtaggtagtttaaccttcgggagggcgcttaccactttgtgattcatgactggggtg

SEQ ID NO: 2083 - DNA, 1458 bp, Methylomonas koyamae
attgaacgctggcggtatgcttaacacatgcaagtcgaacgctgataaggtgcttgcacctttgatgagtggcggacgggtgagtaatgcataggaatctgcctattagtgggggacaacgtggggaaactcacgctaataccgcatacgatctacggatgaaagcaggggaccttcgggccttgcgctaatagatgagcctatgtcggattagctagttggtggggtaaaggcctaccaaggcgacgatccgtagctggtctgagaggatgatcagccacactgggactgagacacggcccagactcctacgggaggcagcagtggggaatattggacaatgggcgaaagcctgatccagcaataccgcgtgtgtgaagaaggcctgagggttgtaaagcactttcaatgggaaggaacacctatcggttaatacccggtagactgacattacccatacaagaagcaccggctaactccgtgccagcagccgcggtaatacggagggtgcaagcgttaatcggaattactgggcgtaaagcgtgcgtaggcggttgtttaagtcagatgtgaaagccccgggcttaacctgggaactgcatttgatactgggcaactagagttgagtagaggggagtggaatttcaggtgtagcggtgaaatgcgtagagatctgaaggaacaccagtggcgaaggcggctccctggactcaaactgacgctgaggtacgaaagcgtgggtagcaaacaggattagataccctggtagtccacgccgtaaacgatgtcaactaactgttgggttctttaagaacttagtagtggagctaacgtattaagttgaccgcctggggagtacggccgcaaggctaaaactcaaatgaattgacgggggcccgcacaagcggtggagcatgtggtttaattcgatgcaacgcgaagaaccttacctacccttgacatcctcggaacttgtcagagatgacttggtgccttcgggaaccgagagacaggtgctgcatggctgtcgtcagctcgtgttgtgaaatgttgggttaagtcccgtaacgagcgcaacccttatccttagttgccagcgagtaatgtcgggaactctagggagactgccggtgataaaccggaggaaggtggggacgacgtcaagtcatcatggcccttatgggtagggctacacacgtgctacaatggccggtacagagggcagcgaaaccgtgaggtcaagcaaatcccacaaagccggtcccagtccggattgcagtctgcaactcgactgcatgaagtcggaatcgctagtaatcgcggatcagaatgccgcggtgaatacgttcccgggccttgtacacaccgcccgtcacaccatgggagtgggttgcaaaagaagtaggtagtttaaccttcgggagggcgcttaccactttgtgattcatgactggggtg

SEQ ID NO: 2084 - DNA, 1456 bp, Methylomonas lenta
  misc_feature (114)..(114): n is a, c, g, or t
attgaacgctggcggtatgcttaacacatgcaagtcgaacggtagcaggccttcgggcgctgacgagtggcggacgggtgagtaatgcataggaatctgcctattagtgggggncaacgtggggaaactcacgctaataccgcatacgccctacgggggaaagctggggaccttcgggcctggcgctaatagatgagcctatgttggattagctagttggtagggtaaaggcctaccaaggcgacgatccatagctggtctgagaggatgatcagccacactgggactgagacacggcccagactcctacgggaggcagcagtggggaatattggacaatgggcgaaagcctgatccagcaataccgcgtgtgtgaagaaggcctgagggttgtaaagcactttcaataggaaggaatacctatcggcgaatacccggtagactgacattacctatacaagaagcaccggctaactccgtgccagcagccgcggtaatacggagggtgcaagcgttaatcggaattactgggcgtaaagcgtgcgtaggcggttatttaagtcagatgtgaaagccccgggcttaacctgggaactgcatttgatactggatgactagagttgagtagaggagagtggaatttcaggtgtagcggtgaaatgcgtagagatctgaaggaacaccagtggcgaaggcggctctctggactcaaactgacgctgaggtacgaaagcgtgggtagcaaacaggattagataccctggtagtccacgccgtaaacgatgtcaactaaccgttgggcgctttaagtgcttagtggtggagctaacgtattaagttgaccgcctggggagtacggccgcaaggctaaaactcaaatgaattgacgggggcccgcacaagcggtggagcatgtggtttaattcgatgcaacgcgaagaaccttacctacccttgacatccagagaatctgttagagatagtagagtgccttcgggaactctgagacaggtgctgcatggctgtcgtcagctcgtgtcgtgagatgttgggttaagtcccgtaacgagcgcaacccttatccttagttgccagcgggtaatgccgggaactctagggagactgccggtgataaaccggaggaaggtggggacgacgtcaagtcatcatggcccttatgggtagggctacacacgtgctacaatggccggtacagagggcagcgaacttgcgaaagtaagcaaatcccagaaagccggtcctagtccggattggagtctgcaactcgactccatgaagtcggaatcgctagtaatcgcggatcagaatgccgcggtgaatacgttcccgggccttgtacacaccgcccgtcacaccatgggagtgggttgcaaaagaagtaggtagtctaaccttcgggagggcgcttaccactttgtgattcatgactggggtg

SEQ ID NO: 2085 - DNA, 1456 bp, Methylomonas methanica
  misc_feature (859)..(859): n is a, c, g, or t
  misc_feature (880)..(881): n is a, c, g, or t
attgaacgctggcggtatgcttaacacatgcaagtcgaacggtaacaggccttcgggcgctgacgagtggcggacgggtgagtaacgcgtaggaatctgcctcatagtgggggacaacttggggaaactcaagctaataccgcatacgccctacgggggaaagcgggggaccttcgggcctcgcgctatgagatgagcctgcgttggattagctagttggtagggtaccggcctaccaaggcgacgatccatagctggtctgagaggatgatcagccacactgggactgagacacggcccagactcctacgggaggcagcagtggggaatattggacaatgggcgaaagcctgatccagcaataccgcgtgtgtgaagaaggcctgagggttgtaaagcactttcaataggaaggaatacctgccggttaatacccggtagactgacattacctatacaagaagcaccggctaactccgtgccagcagccgcggtaatacggagggtgcaagcgttaatcggaattactgggcgtaaagcgtgcgtaggcggttgtttaagtcagatgtgaaagccctgggcttaacctgggaactgcatttgatactgggcaactagagtttagtagaggggagtggaatttcaggtgtagcggtgaaatgcgtagagatctgaaggaacaccagtggcgaaggcggctccctggactaaaactgacgctgaggtacgaaagcgtgggtagcaaacaggattagataccctggtagtccacgccgtaaacgatgtcaactaactgttgggttcttaaagaacttagtagtggagctaacgtattaagttgaccgcctggggagtacgnccgcaaggttaaaactcaaannaattgacgggggcccgcacaagcggtggagcatgtggtttaattcgatgcaacgcgaagacccttacctacccttgacatccagagaatctgttagagatagcggagtgccttcgggagctctgagacaggtgctgcatggctgtcgtcagctcgtgttgtgaaatgttgggttaagtcccgtaacgagcgcaacccttatccttagttgccagcgggtcatgccgggaactctagggagactgccggtgataaaccggaggaaggtggggacgacgtcaagtcatcatggcccttatgggtagggctacacacgtgctacaatggccggtacagagggctgcgaactcgcgagagtaagctaatcccaaaaagccggtcccagtccggatcgcagtctgcaactcgactgcgtgaagtcggaatcgctagtaatcgcggatcagaatgccgcggtgaatacgttcccgggccttgtacacaccgcccgtcacaccatgggagtgggttgcaaaagaagtaggtagtttaaccttcgggagggcgcttaccactttgtgattcatgactggggtg

SEQ ID NO: 2086 - DNA, 1404 bp, Methylomusa anaerophila
cagtcgaacggggagttagcaataactcctagtggcgaacgggtgagtaacgcgtaggcaatctgccttctagatggggacaacaccgcgaaagtggtgctaataccgaatgagatataagagatgcatatttcttataagaaaggtggcctctgaagatgctaccgctagaagatgagcctgcgtctgattagctagttggtgaggtaacggctcaccaaggcgacgatcagtagccggtctgagaggatgaacggccacactgggactgagacacggcccagactcctacgggaggcagcagtggggaatcttccgcaatggacgaaagtctgacggagcaacgccgcgtgagtgaagaaggttttcggactgtaaaactctgtcttgagggacgaacgtattataggtaaagaatctatgataatgacggtacctgaggaggaagccacggctaactacgtgccagcagccgcggtaatacgtaggtggcaagcgttgtccggaattattgggcgtaaagggcgcgcaggcgggtctttaagtcgaaagtctaagtgcggggctcaaccccgtatgggcgttggaaactggagaccttgagtgcaggagaggaaagtggaattcccagtgtagcggtgaaatgcgtagagattgggaggaacaccagtggcgaaggcgactttctggactgtgtctgacgctgaggcgcgaaagccaggggagcgaacgggattagataccccggtagtcctggccgtaaacgatgggtactaggtgtagaaggtatcgaccccttctgtgccggagttaacgcaataagtaccccgcctggggagtacggccgcaaggttgaaactcaaaggaattgacgggggcccgcacaagcggtggagtatgtggtttaattcgacgcaacgcgaagaaccttaccagggcttgacatcgattggaacattcagagatggatgcctctcttcggagacaagaagacaggtggtgcatggctgtcgtcagctcgtgtcgtgagatgttgggttaagtcccgcaacgagcgcaacccttatcctttgttgccagcgcgtaaaggtgggaactcaaaggagactgccgcagagaatgcggaggaaggcggggatgacgtcaagtcatcatgccccttatgtcctgggctacacacgtactacaatgggcttcaacagagagaagcgaagccgcgaggtggagccaagctcacaaacaagctctcagttcggatcggaggctgcaactcgcctccgtgaagtcggaatcgctagtaatcgcaggtcagcatactgcggtgaatacgttcccgggccttgtacacaccgcccgtcacaccacgagagttggaaacacccgaagccggtgaggtaactgaaa

SEQ ID NO: 2087 - DNA, 1452 bp, Methylophaga aminisulfidivorans
attgaacgctggcggcatgcctaacacatgcaagtcgaacgatgacgaaacagcttgctgtttctgattagtggcggacgggtgagtaatgtatagggatctgcctagtagtgggggacaacagccggaaacggctgctaataccgcatacgctctacggaggaaagcgggggctcgtaagacctcgtgctattagatgaacctatatcagattagctagttggtggggtaagggcctaccaaggcgacgatctgtagctggtctgagaggatgatcagccacactgggactgagacacggcccagactcctacgggaggcagcagtggggaatattggacaatgggcgcaagcctgatccagcaatgccgcgtgtgtgaagaaggccttcgggttgtaaagcactttcaatagggaggaaaggttatgcgttaataccgtatagctgtgacgttacctatagaagaagcaccggctaactccgtgccagcagccgcggtaatacggagggtgcaagcgttaatcggatttactgggcgtaaagcgcgcgtaggcggtatttaagtcagatgtgaaagccccgggctcaacctgggaattgcatttgatactggatggctagagtgtggtagagtgagtggatttcagtgtagcgtgaaatgcgtagagatctgaaggaacatcagtgcgaagcgactcactgggccattactgacgctgaggtgcgaaagcgtgggtagcaaacaggattagatacctggtagtccacgccctaaacgatgtcaactaggtgtatggagaatttattctttgtgtatcgaagctaacgcgataagttgaccgcctggggagtacggtcgcaagactaaaactcaaatgaattgacgggggcccgcacaagcggtggagcatgtggtttaattcgatgcaacgcgaagaaccttacctggccttgacatgtacggaagattgaagagattcgattgtgccttcgggaaccgtaacacaggtgctgcatggctgtcgtcagctcgtgtcgtgagatgttgggttaagtcccgcaacgagcgcaacccctgtccttagttgccatcattaagttgggcactctaaggagactgccggtgacaaaccggaggaaggtggggatgacgtcaagtcatcatggcccttatggccagggctacacacgtgctacaatgggcagtacaaagggttgctaactcgcgagggtatgctaatcccataaagctgttcgtagtccggatcgcagtctgcaactcgactgcgtgaagtcggaatcgctagtaatcgcggatcagaatgccgcggtgaatacgttcccgggccttgtacacaccgcccgtcacaccatgggagttggctgcaaaagaagtaggtagactaaccttcgggaggtcgcttaccactttgtggtcaatgactggggtg

SEQ ID NO: 2088 - DNA, 1458 bp, Methylophaga frappieri
attgaacgctggcggcatgcctaacacatgcaagtcgaacgatgaagtctagcttgctaggcggattagtggcggacgggtgagtaatgtatagggatctgcctgttagtgggggacaacagccggaaacggctgctaataccgcatacgctctacggaggaaagtgggggaccttcgggcctcacgctgacagatgaacctatatcagattagctagttggtggggtaaaggcctaccaaggcgacgatctgtagctggtttgagagaatgatcagccacactgggactgagacacggcccagactcctacgggaggcagcagtggggaatattggacaatgggggcaaccctgatccagcaatgccgcgtgtgtgaagaaggccttcgggttgtaaagcactttaagttgggaggaaaagctgggagttaatagctcctagtattgacgttaccaacagaataagcaccggctaactccgtgccagcagccgcggtaatacggagggtgcaagcgttaatcggaattactgggcgtaaagcgcgcgtaggcggtttgttaagtcagatgtgaaatccccgggctcaacctgggaatggcatttgagactggcaggctagagtgtggtagaggtgagtggaatttcaggtgtagcggtgaaatgcgtagagatctgaaggaacatcagtggcgaaggcgactcactgggccataactgacgctgaggtgcgaaagcgtgggtagcaaacaggattagataccctggtagtccacgccctaaacgatgtcaactaggtgtatggagaatttattctttgtgtatcgaagctaacgcgataagttgaccgcctggggagtacggtcgcaagactaaaactcaaatgaattgacgggggcccgcacaagcggtggagcatgtggtttaattcgatgcaacgcgaagaaccttacctggccttgacatgcacggaagacagaagagattttgttgtgccttcgggaaccgtgacacaggtgctgcatggctgtcgtcagctcgtgtcgtgagatgttgggttaagtcccgcaacgagcgcaacccctgtccttagttgccatcatttagttgggcactctaaggagactgccggtgacaaaccggaggaaggtggggatgacgtcaagtcatcatggcccttatggccagggctacacacgtgctacaatgggcagtacaaagggttgccaactcgcgagagtgcgctaatcccataaagctgctcgtagtccggattggagtctgcaactcgactccatgaagtcggaatcgctagtaatcgcggatcagaatgccgcggtgaatacgttcccgggccttgtacacaccgcccgtcacaccatgggagttggctgcaaaagaagtaggtagactaaccttcgggaggtcgcttaccactttgtggtcaatgactggggtg

SEQ ID NO: 2089 - DNA, 1458 bp, Methylophaga lonarensis
attgaacgctggcggcatgcctaacacatgcaagtcgaacgatgattatgagcttgctcatatgattagtggcggacgggtgagtaatgtatagggatctgcctggtagtgggggacaacagccggaaacggctgctaataccgcatacgctctacggaggaaaggaggggaccttcgggcctttcgctatcagatgaacctatattggattagctagttggtggggtaagggcctaccaaggcgacgatccatagctggtctgagaggatgatcagccacactgggactgagacacggcccagactcctacgggaggcagcagtggggaatattggacaatgggggcaaccctgatccagcaatgccgcgtgtgtgaagaaggccttcgggttgtaaagcactttcagatgtgaggaaaggtagttggttaatacccaattgctgtgacgttaacatcagaagaagcaccggctaactccgtgccagcagccgcggtaatacggagggtgcaagcgttaatcggaattactgggcgtaaagcgcgcgtaggcggttatttaagtcagatgtgaaagccccgggcttaacctgggaatggcatttgatactggatggctagagtgtggtagaggtgagtggaatttcaggtgtagcggtgaaatgcgtagagatctgaaggaacatcagtggcgaaggcgactcactgggccattactgacgctgaggtgcgaaagcgtgggtagcaaacaggattagataccctggtagtccacgccctaaacgatgtcaactaggtgtatggagaatttattctttgtgtatcgaagctaacgcgataagttgaccgcctggggagtacggtcgcaagactaaaactcaaatgaattgacgggggcccgcacaagcggtggagcatgtggtttaattcgatgcaacgcgaagaaccttacctggccttgacatgcacggaacctttcagagatggaagggtgccttcgggaaccgtgacacaggtgctgcatggctgtcgtcagctcgtgtcgtgagatgttgggttaagtcccgcaacgagcgcaacccctgtccttagttgccatcattcagttgggcactctaaggagactgccggtgacaaaccggaggaaggtggggatgacgtcaagtcatcatggcccttatggccagggctacacacgtgctacaatgggcagtacaaagggttgccaactcgcgagagtgcgctaatcccataaagctgttcgtagtccggattggagtctgcaactcgactccatgaagtcggaatcgctagtaatcgcagatcagaatgctgcggtgaatacgttcccgggccttgtacacaccgcccgtcacaccatgggagttggctgcaaaagaagtaggtagactaaccttttggaggtcgcttaccactttgtggtcaatgactggggtg

SEQ ID NO: 2090 - DNA, 1415 bp, Methylophaga muralis
  misc_feature (484)..(484): n is a, c, g, or t
ctaacacatgcaagtcgaacgatgattttcagcttgctgaaatgattagtggcggacgggtgagtaatgtatagggatctgcctgttagtgggggacaacagccggaaacggctgctaataccgcatacgctctacggaggaaagtgggggaccctcgggcctcacgctaacagatgaacctatattggattagctagttggtagggtaaaggcctaccaaggcgacgatccatagctggtttgagagaatgatcagccacactgggactgagacacggcccagactcctacgggaggcagcagtggggaatattggacaatgggcgcaagcctgatccagcaatgccgcgtgtgtgaagaaggccttcgggttgtaaagcactttaagttgggaggaaaagctgggagttaatagcttctagtgttgacgttaccaacagaataagcaccggctaactccgtgccagcagccgcggtaatacngagggtgcaagcgttgaatcggaatgactgggcgtaaagcgcgcgtaggcggttatgtaagtcagatgtgaaagccccgggcttaacctgggaatggcatttgagactggatggctagagtatggtagaggtgagtggaatttcaggtgtagcggtgaaatgcgtagagatctgaaggaacatcagtggcgaaggcgactcactgggccattactgacgctgaggtgcgaaagcgtgggtagcaacaggattagataccctggtagtccacgccctaaacgatgtcaactaggtgtatggagaatttattctttgtgtatcgaagctaacgcgataagttgaccgcctggggagtacggtcgcagactaaactcaaatgaattgacgggggcccgcacaagcggtggagcatgtggtttattcgatgcaacgcgaagaaccttacctggccttgacatgtacggaagatagaagagattttattgtgccttcgggaaaccgtaacacaggtgctgcatggctgtcgtcagctcgtgtcgtgagatgttgggttaagtcccgcaacgagcgcaacccctgtccttagttgccatcattaagttgggcactctaaggagactgccggtgacaaaccggaggaaggtggggatgacgtcaagtcatcatggcccttatggccagggctacacacgtgctacaatggctagtacaaagggttgccaactcgcgagagtgcgctaatcccataaagctagtcgtagtccggattggagtctgcaactcgactccatgaagtcggaatcgctagtaatcgcagatcagaatgctgcggtgaatacgttcccgggcttgtacacaccgcccgtcacaccatgggagttggctgcaaaagaagtaggtagactaacttcgggaggtcgcttaccacttt

SEQ ID NO: 2091 - DNA, 1458 bp, Methylophaga nitratireducenticrescens
attgaacgctggcggcatgcctaacacatgcaagtcgaacgatgatttccagcttgctggaatgattagtggcggacgggtgagtaatatatagggatctgcctgttagtgggggacaacagccggaaacggctgctaataccgcatacgctctacggaggaaagtgggggaccctcgggcctcacgctaacagatgaacctatatcagattagctagatggtggggtaaaggcctaccatggcgacgatctgtagctggtttgagagaatgatcagccacactgggactgagacacggcccagactcctacgggaggcagcagtggggaatattggacaatgggcgcaagcctgatccagcaatgccgcgtgtgtgaagaaggccttcgggttgtaaagcactttaagttgggaggaaaagcttggggttaatagccttaagtgttgacgttaccaacagaataagcaccggctaactccgtgccagcagccgcggtaatacggagggtgcaagcgttaatcggaattactgggcgtaaagcgcgcgtaggcggtttgttaagtcagatgtgaaatccccgggctcaacctgggaatggcatttgagactggcaggctagagtatggtagaggtgagtggaatttcaggtgtagcggtgaaatgcgtagagatctgaaggaacatcagtggcgaaggcgactcactgggccattactgacgctgaggtgcgaaagcgtgggtagcaaacaggattagataccctggtagtccacgccctaaacgatgtcaactaggtgtatggagaaaatattctttgtgtatcgaagctaacgcgataagttgaccgcctggggagtacggtcgcaagactaaaactcaaatgaattgacgggggcccgcacaagcggtggagcatgtggtttaattcgatgcaacgcgaagaaccttacctggccttgacatgtacggaagactgcagagatgcggttgtgccttcgggaaccgtaacacaggtgctgcatggctgtcgtcagctcgtgtcgtgagatgttgggttaagtcccgcaacgagcgcaacccctgtccttagttgccatcattcagttgggcactctaaggagactgccggtgacaaaccggaggaaggtggggatgacgtcaagtcatcatggcccttatggccagggctacacacgtgctacaatggctagtacaaagggttgccaactcgcgagagtgcgctaatcccataaagctagtcgtagtccggatcggagtctgcaactcgactccgtgaagtcggaatcgctagtaatcgcagatcagaatgctgcggtgaatacgttcccgggccttgtacacaccgcccgtcacaccatgggagttggctgcaaaagaagtaggtagactaaccttcgggaggtcgcttaccactttgtggtcaatgactggggtg

SEQ ID NO: 2092 - DNA, 1458 bp, Methylophaga sulfidovorans
attgaacgctggcggcatgcctaacacatgcaagtcgaacgatgaagtctagcttgctagacggattagtggcggacgggtgagtaatgtatagggatctgcctagtagtgggggacaacagccggaaacggctgctaataccgcatacgctctacggaggaaagcgggggctcttcggacctcgtgctattagatgaacctatatcagattagctagttggtggggtaaaggcctaccaaggcgacgatctgtagctggtctgagaggatgatcagccacactgggactgagacacggcccagactcctacgggaggcagcagtggggaatattggacaatgggcgcaagcctgatccagcaatgccgcgtgtgtgaagaaggccttcgggttgtaaagcactttcaatagggaggaaaggttatgcgttaataccgtatagctgtgacgttacctatagaagaagcaccggctaactccgtgccagcagccgcggtaatacggagggtgcaagcgttaatcggaattactgggcgtaaagcgcgcgtaggcggttatttaagtcagatgtgaaagccccgggctcaacctgggaattgcatttgatactggatggctagagtgtggtagaggtgagtggaatttcaggtgtagcggtgaaatgcgtagagatctgaaggaacatcagtggcgaaggcgactcactgggccattactgacgctgaggtgcgaaagcgtgggtagcaaacaggattagataccctggtagtccacgccctaaacgatgtcaactaggtgtatggagaatttattctttgtgtatcgaagctaacgcgataagttgaccgcctggggagtacggtcgcaagactaaaactcaaatgaattgacgggggcccgcacaagcggtggagcatgtggtttaattcgatgcaacgcgaagaaccttacctggccttgacatgtacggaagatagaagagattttattgtgccttcgggaaccgtaacacaggtgctgcatggctgtcgtcagctcgtgtcgtgagatgttgggttaagtcccgcaacgagcgcaacccctgtccttagttgccatcattaagttgggcactctaaggagactgccggtgacaaaccggaggaaggtggggatgacgtcaagtcatcatggcccttatggccagggctacacacgtgctacaatggctagtacaaagggttgctaactcgcgagagtatgctaatcccataaagctagtcgtagtccggatcgcagtctgcaactcgactgcgtgaagtcggaatcgctagtaatcgcggatcagaatgccgcggtgaatacgttcccgggccttgtacacaccgcccgtcacaccatgggagttggctgcaaaagaagtaggtagactaaccttcgggaggtcgcttaccactttgtggtcaatgactggggtg

SEQ ID NO: 2093 - DNA, 1462 bp, Methylophaga thiooxydans
attgaacgctggcggcatgcctaacacatgcaagtcgaacgatgacgaaacagcttgctgtttctgattagtggcggacgggtgagtaatgtatagggatctgcctgacagtgggggacaacagccggaaacggctgctaataccgcatacgctctacggaggaaagtgggggacctttcggggcctcacgctgacagatgaacctatatcagattagctagttggtggggtaatggcttaccaaggcgacgatctgtagctggtctgagaggatgatcagccacactgggactgagacacggcccagactcctacgggaggcagcagtggggaatattggacaatgggggcaaccctgatccagcaatgccgcgtgtgtgaagaaggccttcgggttgtaaagcactttcaatagggaggaaaagttatgcgttaatagcgtatagccgtgacgttacctatagaagaagcaccggctaactccgtgccagcagccgcggtaatacggagggtgcaagcgttaatcggaattactgggcgtaaagcgcgcgtaggcggtttattaagtcagatgtgaaagccccgggctcaacctgggaattgcatttgagactggtaggctagagtgtggtagaggtgagtggaatttcaggtgtagcggtgaaatgcgtagagatctgaaggaacatcagtggcgaaggcgactcactgggccattactgacgctgaggtgcgaaagcgtgggtagcaaacaggattagataccctggtagtccacgccctaaacgatgtcaactaggtgtatggagaatttattctttgtgtatcgaagctaacgcgataagttgaccgcctggggagtacggtcgcaagactaaaactcaaatgaattgacgggggcccgcacaagcggtggagcatgtggtttaattcgatgcaacgcgaagaaccttacctggccttgacatgtacggaagatagaagagattttattgtgccttcgggaaccgtaacacaggtgctgcatggctgtcgtcagctcgtgtcgtgagatgttgggttaagtcccgcaacgagcgcaacccctgtccttagttgccatcattaagttgggcactctaaggagactgccggtgacaaaccggaggaaggtggggatgacgtcaagtcatcatggcccttatggccagggctacacacgtgctacaatggcaagtacaaagggttgctaactcgcgagagtgtgctaatcccataaagcttgtcgtagtccggatcgcagtctgcaactcgactgcgtgaagtcggaatcgctagtaatcgcggatcagaatgccgcggtgaatacgttcccgggccttgtacacaccgcccgtcacaccatgggagttggctgcaaaagaagtaggtagactaaccttcgggaggtcgcttaccactttgtggtcaatgactggggtg

SEQ ID NO: 2094 - DNA, 1453 bp, Methylophilus methylotrophus
cgctggcggaatgctttacacatgcaagtcgaacgatgaaccttagcttgctaaggggattagtggcgaacgggtgagtaatatatcggaacgtgccttgtaatgggggataactagtcgaaagattagctaataccgcatacgccctgagggggaaagtaggggatcttcggaccttacgttataagagcggccgatatctgattagctagttggtggggtaatggcctaccaaggcttcgatcagtagctggtctgagaggacgaccagccacactggaactgagacacggtccagactcctacgggaggcagcagtggggaattttggacaatgggcgcaagcctgatccagccattccgcgtgagtgaagaaggccttcgggttgtaaagctctttcgcaagggaagaaaacttacattctaataaagtgtgaggctgacggtaccttgataagaagcaccggctaactacgtgccagcagccgcggtaatacgtagggtgcgagcgttaatcggaattactgggcgtaaagcgtgcgcaggcggttttgtaagtcagatgtgaaatccccgagctcaacttgggaactgcgtttgaaactacaagactagaatatgtcagaggggggtagaattccacgtgtagcagtgaaatgcgtagagatgtggaggaataccaatggcgaaggcagccccctgggataatattgacgctcatgcacgaaagcgtggggagcaaacaggattagataccctggtagtccacgccctaaacgatgtctactagttgttggtggagtaaaatccatgagtaacgcagctaacgcgtgaagtagaccgcctggggagtacggtcgcaagattaaactcaaaggaattgacgggggcccgcacaagcggtggattatgtggattaattcgatgcaacgcgaaaaccttacctggccttgacatgccactaacgaagcagagatgcattaggtgcccgtaagggaaagtggacacaggtgctgcatggctgtcgtcagctcgtgtcgtgagatgttgggttaagtcccgcaacgagcgcaacccttgccattaattgccatcatttagttgggcactttaatgggactgccggtgacaaaccggaggaaggtggggatgacgtcaagtcctcatggcccttatggccagggcttcacacgtaatacaatggtcggtacagagagttgccaacccgcgagggggagctaatctcagaaagccgatcgtagtccggattgttctctgcaactcgagagcatgaagtcggaatcgctagtaatcgcggatcagcatgtcgcggtgaatacgttcccgggccttgtacacaccgcccgtcacaccatgggagtgggttttaccagaagtagttagtctaaccgtaagggggacgattaccacggtagtattcatgactggggtg

SEQ ID NO: 2095 - DNA, 1461 bp, Methylophilus rhizosphaerae
attgaacgctggcggaatgctttacacatgcaagtcgaacgatgaaccttagcttgctaaggggattagtggcgaacgggtgagtaatatatcggaacgtgccttgtaatgggggataactagtcgaaagattagctaataccgcatacgccctgagggggaaagtaggggatcttcggaccttacgttataagagcggccgatatctgattagctagttggtggggtaatggcctaccaaggcatcgatcagtagctggtctgagaggacgaccagccacactggaactgagacacggtccagactcctacgggaggcagcagtggggaattttggacaatgggcgcaagcctgatccagccattccgcgtgagtgaagaaggccttcgggttgtaaagctctttcgcaagggaagaaaacttactcaataacactgagtgaggctgacggtaccttgataagaagcaccggctaactacgtgccagcagccgcggtaatacgtagggtgcgagcgttaatcggaattactgggcgtaaagcgtgcgcaggcggtttggcaagtcagatgtgaaatccccgagctcaacttgggaactgcgtttgaaactgccagactagaatatgtcagaggggggtagaattccacgtgtagcagtgaaatgcgtagagatgtggaggaataccaatggcgaaggcagccccctgggataatattgacgctcatgcacgaaagcgtggggagcaaacaggattagataccctggtagtccacgccctaaacgatgtctactagttgttggtggagtaaaatccatgagtaacgcagctaacgcgtgaagtagaccgcctggggagtacggtcgcaagattaaaactcaaaggaattgacgggggcccgcacaagcggtggattatgtggattaattcgatgcaacgcgaaaaaccttacctggccttgacatgccactaacgaagcagagatgcattaggtgcccgtaagggaaagtggacacaggtgctgcatggctgtcgtcagctcgtgtcgtgagatgttgggttaagtcccgcaacgagcgcaacccttgccattaattgccatcatttagttgggcactttaatgggactgccggtgacaaaccggaggaaggtggggatgacgtcaagtcctcatggcccttatggccagggcttcacacgtaatacaatggtcggtacagagagttgccaacccgcgagggggagctaatctcagaaagccgatcgtagtccggattgttctctgcaactcgagagcatgaagtcggaatcgctagtaatcgcggatcagcatgtcgcggtgaatacgttcccgggccttgtacacaccgcccgtcacaccatgggagtgggttttaccagaagtagttagtctaaccgcaagggggacgattaccacggtagtattcatgactggggtg

SEQ ID NO: 2096 - DNA, 1414 bp, Methyloprofundus sedimenti
ccatgcaagtcgaacggtaacaggctagcttgctagcgctgacgagtggcggacgggtgcgtaacgcgtaggaatctgcctattagtgggggacaacctggtgaaaaccaggctaataccgcatacgccctacgggggaaagcaggggatcttcggaccttgcgctaatagatgagcctgcgttagattagcttgttggtgaggtaatggctcaccaaggcgacgatctatagctggtctgagaggacgatcagccacactgggactgagacacggcccagactcctacgggaggcagcagtggggaatattggacaatgggcgaaagcctgatccagcaataccgcgtgtgtgaagaaggcctgagggttgtaaagcactttcaattgggaggaaaacaggcaggttaatatcctgtctcttgacattacctttagaagaagcaccggctaactccgtgccagcagccgcggtaatacggagggtgcaagcgttaatcggaattactgggcgtaaagcgttcgtaggcggttggttaagttagatgtgaaagccccgggcttaacctgggaactgcatttaatactggctaactagagtttaggagagggaagtggaatttcaggtgtagcagtgaaatgcgtagagatctgaaggaacaccagtggcgaaggcgacttcctggactaaaactgacgctgaggaacgaaagcgtgggtagcaaacgggattagataccccggtagtccacgccgtaaacgatgtcaactagccgttgggcctatatacaggcttagtggcggagctaacgtattaagttgaccgcctggggagtacggccgcaaggttaaaactcaaatgaattgacgggggcccgcacaagcggtggagcatgtggtttaattcgatgcaacgcgaagaaccttacctacccttgacatccagagaatctgttagagatagtagagtgccttcgggaactctgagacaggtgctgcatggctgtcgtcagctcgtgtcgtgagatgttgggttaagtcccgtaacgagcgcaacccctatccttagttgctagcaggtcatgctgagaactctaaggagactgccggtgataaaccggaggaaggtggggacgacgtcaagtcatcatggcccttatgggtagggctacacacgtgctacaatggtcggtacagagggccgcaaactcgcgagagtaagctaatcccagaaagccgatcttagtccggattgcagtctgcaactcgactgcatgaagttggaatcgctagtaatcgcgaatcagaatgtcgcggtgaatacgttcccgggccttgtacacaccgcccgtcacaccatgggagtgggttgcaaaagaagtgggtagtctaaccttcgggagggcgctcaccac

SEQ ID NO: 2097 - DNA, 1435 bp, Methylorubrum extorquens
cgaacgctggcggcaggcttaacacatgcaagtcgaacgggcaccttcgggtgtcagtggcagacgggtgagtaacacgtgggaacgtacccttcggttcggaataactcagggaaacttgagctaataccggatacgcccttttggggaaaggtttactgccgaaggatcggcccgcgtctgattagcttgttggtggggtaacggcctaccaaggcgacgatcagtagctggtctgagaggatgatcagccacactgggactgagacacggcccagactcctacgggaggcagcagtggggaatattggacaatgggcgcaagcctgatccagccatgccgcgtgagtgatgaaggccttagggttgtaaagctcttttgtccgggacgataatgacggtaccggaagaataagccccggctaacttcgtgccagcagccgcggtaatacgaagggggctagcgttgctcggaatcactgggcgtaaagggcgcgtaggcggccgattaagtcgggggtgaaagcctgtggctcaaccacagaattgccttcgatactggttggcttgagaccggaagaggacagcggaactgcgagtgtagaggtgaaattcgtagatattcgcaagaacaccagtggcgaaggcggctgtctggtccggttctgacgctgaggcgcgaaagcgtggggagcaaacaggattagataccctggtagtccacgccgtaaacgatgaatgccagccgttggcctgcttgcaggtcagtggcgccgctaacgcattaagcattccgcctggggagtacggtcgcaagattaaaactcaaaggaattgacgggggcccgcacaagcggtggagcatgtggtttaattcgaagcaacgcgcagaaccttaccatcccttgacatggcatgttacctcgagagatcggggatcctcttcggaggcgtgcacacaggtgctgcatggctgtcgtcagctcgtgtcgtgagatgttgggttaagtcccgcaacgagcgcaacccacgtccttagttgccatcattcagttgggcactctagggagactgccggtgataagccgcgaggaaggtgtggatgacgtcaagtcctcatggcccttacgggatgggctacacacgtgctacaatggcggtgacagtgggacgcgaagccgcgaggtggagcaaatccccaaaaaccgtctcagttcggattgcactctgcaactcgggtgcatgaaggcggaatcgctagtaatcgtggatcagcacgccacggtgaatacgttcccgggccttgtacacaccgcccgtcacaccatgggagttggtcttacccgacggcgctgcgccaaccgcaaggaggcaggcgaccacggtagggtcagcgactggggtgaagtcgtaacaaggtagccgtaggggaacc

SEQ ID NO: 2098 - DNA, 1449 bp, Methylorubrum populi
  misc_feature (8)..(8): n is a, c, g, or t
  misc_feature (63)..(64): n is a, c, g, or t
  misc_feature (99)..(99): n is a, c, g, or t
  misc_feature (101)..(101): n is a, c, g, or t
  misc_feature (105)..(105): n is a, c, g, or t
  misc_feature (110)..(110): n is a, c, g, or t
  misc_feature (115)..(115): n is a, c, g, or t
  misc_feature (575)..(575): n is a, c, g, or t
  misc_feature (607)..(607): n is a, c, g, or t
  misc_feature (728)..(728): n is a, c, g, or t
  misc_feature (1316)..(1316): n is a, c, g, or t
  misc_feature (1344)..(1344): n is a, c, g, or t
  misc_feature (1348)..(1348): n is a, c, g, or t
  misc_feature (1363)..(1363): n is a, c, g, or t
  misc_feature (1370)..(1370): n is a, c, g, or t
  misc_feature (1376)..(1376): n is a, c, g, or t
tcgaacgntggcgtgcaggcttaacacatgcaagtcgaacgggcttcttcgcgaagtcagtgnnagacgggtgagtaacacgtgggaacgtgcccttcngntcgnaatanctcanggaaacttgagctaataccggatacgcccttacggggaaaggtttactgccgaaggatcggcccgcgtctgattagcttgttggtggggtaacggcctaccaaggcgacgatcagtagctggtctgagaggatgatcagccacactgggactgagacacggcccagactcctacgggaggcagcagtggggaatattggacaatgggcgcaagcctgatccagccatgccgcgtgagtgatgaaggccttagggttgtaaagctcttttgtccgggacgataatgacggtaccggaagaataagccccggctaacttcgtgccagcagccgcggtaatacgaagggggctagcgttgctcggaatcactgggcgtaaagggcgcgtaggcggccgattaagtcgggggtgaaagcctgtggctcaaccacagaattgccttcgatactggttggcttganaccggaagaagacagcggaactgcgagtgtanaggtgaaattcgtaaatattcgcaaaaacccccagtggcaaaggcggctgtctggtcccgttcttacccttaggcccggaaaccgtggggagcaaacaggattagataccctggtagtccnccccgtaaaccaatgaaatcccagccgttggcctgcttgcaggtcagtggcgccgctaaacgcattaagcattcccgcctggggaagtacggtcgcaaaaattaaaactcaaaggaattgacgggggcccgcacaagcggtggagcatgtggtttaattcgaagcaacgcgcagaaccttacccatcccttgacatggcatgttacctcgagagatcggggatcctcttcggaggcgtgcacacaggtgctgcatggctgtcgtcagctcgtgtcgtgagatgttgggttaagtcccgcaacgagcgcaacccacgtccttagttgccatcattcagttgggcactctagggagactgccggtgataagccgcgaggaaggtgtggatgacgtcaagtcctcatggcccttacgggatgggctacacacgtgctacaatggcggtgacagtgggacgcgaaaccgcgaggttgagcaaatccccaaaagccgtctcagttcggattgcactctgcaactcgggtgcatgaaggcggaatcgctagtaatcgtggatcagcacgccacggtgaatacgttgcccgggcnttgtacacaccgcctgtcacaccatggnagtnggtcttacccgaggncgctgcnccaacngcaagggggcaggcgaccacggtagggtcagcgtactggggtgaagtcgtaacaaggtagccgtaggggaacc

SEQ ID NO: 2099 - DNA, 1480 bp, Methylorubrum salsuginis
  misc_feature (544)..(544): n is a, c, g, or t
  misc_feature (602)..(602): n is a, c, g, or t
  misc_feature (689)..(689): n is a, c, g, or t
agagtttgatcctggctcagagcgaacgctggcggcaggcttaacacatgcaagtcgagcgggcccttcggggtcagcggcagacgggtgagtaacacgtgggaacgtgcccttcggttcggaataactcagggaaacttgagctaataccggatacgcccttttggggaaaggtttactgccgaaggatcggcccgcgtctgattagctagttggtggggtaacggcctaccaaggcgacgatcagtagctggtctgagaggatgatcagccacactgggactgagacacggcccagactcctacgggaggcagcagtggggaatattggacaatgggcgcaagcctgatccagccatgccgcgtgagtgatgaaggccttagggttgtaaagctcttttgtccgggacgataatgacggtaccggaagaataagccccggctaacttcgtgccagcagccgcggtaatacgaagggggctaagcgttgctcggaaatcactggggcgtaaaggggcgcgtaggcggctttttaagtcggggntgaaagcctgtggctcaaccaccagaattgccttcgatactggaaagcttgagaccgnaagaggacagcggaactgcgagtgtagaggtgaaattcgtagatattcgcaagaacaccagtggcgaaggcggctgtctggtccggntctgacgctgaggcgcgaaagcgtggggagcaaacaggattagataccctggtagtccacgccgtaaacgatgaatgccagccgttggtctgcttgcaggtcagtggcgccgctaacgcattaagcattccgcctggggagtacggtcgcaagattaaaactcaaaggaattgacgggggcccgcacaagcggtggagcatgtggtttaattcgaagcaacgcgcagaaccttaccatcccttgacatggcaggattgtccgagagatcggtcgttcccttcggggacctgcacacaggtgctgcatggctgtcgtcagctcgtgtcgtgagatgttgggttaagtcccgcaacgagcgcaacccacgtccttagttgccatcattcagttgggcactctagggagactgccggtgataagccgcgaggaaggtgtggatgacgtcaagtcctcatggcccttacgggatgggctacacacgtgctacaatggcggtgacagtgggacgcgaaaccgcgaggttgagcaaatccccaaaagccgtctcagttcggattgcactctgcaactcgggtgcatgaaggcggaatcgctagtaatcgtggatcagcatgccacggtgaatacgttcccgggccttgtacacaccgcccgtcacaccatgggagttggtcttacccgacggcgctgcgccaaccgcaaggaggcaggcgaccacggtagggtcagcgactggggtgaagtcgtaacaaggtagccgtaggggaacctgcggctggatcacctcctt

SEQ ID NO: 2100 - DNA, 1435 bp, Methylorubrum zatmanii
cgaacgctggcggcaggcttaacacatgcaagtcgaacgggcaccttcgggtgtcagtggcagacgggtgagtaacacgtgggaacgtgcccttcggttcggaataactcagggaaacttgagctaataccggatacgcccttctggggaaaggtttactgccgaaggatcggcccgcgtctgattagcttgttggtggggtaacggcctaccaaggcgacgatcagtagctggtctgagaggatgatcagccacactgggactgagacacggcccagactcctacgggaggcagcagtggggaatattggacaatgggcgcaagcctgatccagccatgccgcgtgagtgatgaaggccttagggttgtaaagctcttttgtccgggacgataatgacggtaccggaagaataagccccggctaacttcgtgccagcagccgcggtaatacgaagggggctagcgttgctcggaatcactgggcgtaaagggcgcgtaggcggccgattaagtcgggggtgaaagcctgtggctcaaccacagaattgccttcgatactggttggcttgagaccggaagaggacagcggaactgcgagtgtagaggtgaaattcgtagatattcgcaagaacaccagtggcgaaggcggctgtctggtccggttctgacgctgaggcgcgaaagcgtggggagcaaacaggattagataccctggtagtccacgccgtaaacgatgaatgccagccgttggcctgcttgcaggtcagtggcgccgctaacgcattaagcattccgcctggggagtacggtcgcaagattaaaactcaaaggaattgacgggggcccgcacaagcggtggagcatgtggtttaattcgaagcaacgcgcagaaccttaccatcccttgacatggcatgttacctcgggagaccggggatcctcttcggaggcgtgcacacaggtgctgcatggctgtcgtcagctcgtgtcgtgagatgttgggttaagtcccgcaacgagcgcaacccacgtccttagttgccatcattcagttgggcactctagggagactgccggtgataagccgcgaggaaggtgtggatgacgtcaagtcctcatggcccttacgggatgggctacacacgtgctacaatggcggtgacagtgggacgcgaaaccgcgaggtcgagcaaatccccaaaaaccgtctcagttcggattgcactctgcaactcgggtgcatgaaggcggaatcgctagtaatcgtggatcagcacgccacggtgaatacgttcccgggccttgtacacaccgcccgtcacaccatgggagttggtcttacccgacggcgctgcgccaaccgcaaggaggcaggcgaccacggtagggtcagcgactggggtgaagtcgtaacaaggtagccgtaggggaacc

SEQ ID NO: 2101 - DNA, 1456 bp, Methylosarcina fibrata
attgaacgctggcggtatgcttaacacatgcaagtcgaacggtaacaggccttcgggcgctgacgagtggcggacgggtgcgtaacgcgtaggaatctgcctggtagtgggggacaacttggggaaactcaagctaataccgcatacgccctacgggggaaagcgggggaccttcgggcctcgcgctatcagatgagcctgcgttggattagctagttggtagggtaaaggcctaccaaggcgacgatccatagctggtctgagaggacgatcagccacactgggactgagacacggcccagactcctacgggaggcagcagtggggaatattggacaatgggcgcaagcctgatccagcaataccgcgtgtgtgaagaaggcctgagggttgtaaagcacttttaatcgggaggaaaacctgtcggccaatacccggcagcttgacattaccgatagaaaaagcaccggctaactccgtgccagcagccgcggtaatacggagggtgcaagcgttaatcggaattactgggcgtaaagcgtgcgtaggcggccgtttaagtcagatgtgaaagccccgggcttaacctgggaactgcatttgatactggagggctagagtttaatagaggggagtggaatttccggtgtagcggtgaaatgcgtagagatcggaaggaacaccagtggcgaaggcgactccctggattaaaactgacgctgaggtacgaaagcgtgggtagcaaacaggattagataccctggtagtccacgccgtaaacgatgtcaactagccgttggtcttattgataagattagtggcgcagctaacgcattaagttgaccgcctggggagtacggccgcaaggttaaaactcaaatgaattgacgggggcccgcacaagcggtggagcatgtggtttaattcgatgcaacgcgaagaaccttaccaccccttgacatccagagaatctgtgagagatcgtagagtgccttcgggagctctgagacaggtgctgcatggctgtcgtcagctcgtgtcgtgagatgttgggttaagtcccgtaacgagcgcaacccttatccttagttgccaacagttcggctgggaactctagggagactgccggtgataaaccggaggaaggtggggacgacgtcaagtcatcatggcccttatggggtgggctacacacgtgctacaatggccggtacagagggcagccagctcgcgagagtcagcaaatcccacaaagccggtcctagtccggattgcagtctgcaactcgactgcatgaagtcggaatcgctagtaatcgcgaatcagaatgtcgcggtgaatacgttcccgggccttgtacacaccgcccgtcacaccatgggagtgggttgcaaaagaagtaggtagtctaaccttcgggagggcgcttaccactttgtgattcatgactggggtg

SEQ ID NO: 2102 - DNA, 1408 bp, Methylosinus sporium
aacgaacgctggcggcaggcttaacacatgcaagtcgaacgctgtagcaatacagagtggcagacgggtgagtaacgcgtgggaacgtgcctttcggttcggaataactcagggaaacttgagctaataccggatacgcccttcgggggaaagatttattgccgaaagatcggcccgcgtccgattagctagttggtgaggtaatggctcaccaaggcgacgatcggtagctggtctgagaggatgatcagccacactgggactgagacacggcccagactcctacgggaggcagcagtggggaatattggacaatgggcgcaagcctgatccagccatgccgcgtgagtgatgaaggccctagggttgtaaagctctttcgccagggacgataatgacggtacctggataagaagccccggctaacttcgtgccagcagccgcggtaatacgaagggggctagcgttgttcggaatcactgggcgtaaagcgcacgtaggcggatctttaagtcaggggtgaaatcccgaggctcaacctcggaactgcctttgatactggaggtctagagtccgggagaggtgagtggaactgcgagtgtagaggtgaaattcgtagatattcgcaagaacaccagtggcgaaggcggctcactggcccggaactgacgctgaggtgcgaaagcgtggggagcaaacaggattagataccctggtagtccacgccgtaaacgatggatgctagccgttgggcagcttgctgttcagtggcgcagctaacgctttaagcatcccgcctggggagtacggtcgcaagattaaaactcaaaggaattgacgggggcccgcacaagcggtggagcatgtggtttaattcgaagcaacgcgcagaaccttaccagcttttgacatgtctagtatggtcgacagagatgtcttccttcccgcaaggggctagaacacaggtgctgcatggctgtcgtcagctcgtgtcgtgagatgttgggttaagtcccgcaacgagcgcaaccctcgcccttagttgccatcattcagttgggcactctagggggactgccggtgataagccgcgaggaaggtggggatgacgtcaagtcctcatggcccttacaggctgggctacacacgtgctacaatggcggtgacaatgggacgcgaaggggcgacccttagcaaatctcaaaaaaccgtctcagttcggattgcactctgcaactcgagtgcatgaaggtggaatcgctagtaatcgcagatcagcacgctgcggtgaatacgttcccgggccttgtacacaccgcccgtcacaccatgggagttggctttacccgaaggcgtttcgctaaccgcaaggaggcagacgaccacggtagggtcagcgactggggtg

SEQ ID NO: 2103 - DNA, 1410 bp, Methylosinus trichosporium
aacgaacgctggcggcaggcttaacacatgcaagtcgaacgggcgcagcgatgcgtcagtggcagacgggtgagtaacgcgtgggaacgtacctttcggttcggaataactcagggaaacttgagctaataccggatacgcccttagggggaaagatttattgccgaaagatcggcccgcgtccgattagctagttggtgaggtaaaggctcaccaaggcgacgatcggtagctggtctgagaggatgatcagccacactgggactgagacacggcccagactcctacgggaggcagcagtggggaatattggacaatgggcgcaagcctgatccagccatgccgcgtgagtgatgaaggccctagggttgtaaagctctttcgccagggacgataatgacggtacctggataagaagccccggctaacttcgtgccagcagccgcggtaatacgaagggggctagcgttgttcggaatcactgggcgtaaagcgcacgtaggcggattgttaagtcaggggtgaaatcccgaggctcaacctcggaactgcctttgatactggcgatctagagtccgggagaggtgagtggaactgcgagtgtagaggtgaaattcgtagatattcgcaagaacaccagtggcgaaggcggctcactggcccggaactgacgctgaggtgcgaaagcgtggggagcaaacaggattagataccctggtagtccacgccgtaaacgatggatgctagccgttggggagcttgctcttcagtggcgcagctaacgctttaagcatcccgcctggggagtacggtcgcaagattaaaactcaaaggaattgacgggggcccgcacaagcggtggagcatgtggtttaattcgaagcaacgcgcagaaccttaccagcttttgacatgtccggtatggtcgtcagagatgacttccttcccgcaaggggccggaacacaggtgctgcatggctgtcgtcagctcgtgtcgtgagatgttgggttaagtcccgcaacgagcgcaaccctcgcccttagttgccatcattcagttgggcactctagggggactgccggtgataagccgcgaggaaggtggggatgacgtcaagtcctcatggcccttacaggctgggctacacacgtgctacaatggcggtgacaatgggaagcgaaggggtgacccggagcaaatctccaaaagccgtctcagttcggattgcactctgcaactcgagtgcatgaaggtggaatcgctagtaatcgcagatcagcacgctgcggtgaatacgttcccgggccttgtacacaccgcccgtcacaccatgggagttggctttacccgaaggcgtttcgctaaccgcaaggaggcagacgaccacggtagggtcagcgactggggtg

SEQ ID NO: 2104 - DNA, 1460 bp, Methylotenera mobilis
attgaacgctggcggaatgctttacacatgcaagtcgaacgatgaaacctagcttgctaggttgattagtggcgaacgggtgagtaatgtatcggaacgtatccaataatgggggataactaaccgaaaggttagctaataccgcatacgccctacgggggaaagcaggggatcttcggaccttgcgttaatggagcggccgatatctgattagctagttggtgaggtaaaagctcaccaaggcgacgatcagtagctggtctgagaggacgaccagccacactggaactgagacacggtccagactcctacgggaggcagcagtggggaattttggacaatgggcgaaagcctgatccagccattccgcgtgagtgaagaaggccttcgggttgtaaagctctttcgcaagggaagaaaacttatcctctaataaagggtgaggttgacggtaccttgataagaagcaccggctaactacgtgccagcagccgcggtaatacgtagggtgcgagcgttaatcggaattactgggcgtaaagcgtgcgcaggcggtttggtaagtcagatgtgaaatccccgagctcaacttgggaactgcgtttgaaactaccagactagaatatgtcagaggggggtagaattccacgtgtagcagtgaaatgcgtagagatgtggaggaataccaatggcgaaggcagccccctgggataatattgacgctcatgcacgaaagcgtggggagcaaacaggattagataccctggtagtccacgccctaaacgatgtctactagttgttggtggagtaaaatccatgagtaacgcagctaacgcgtgaagtagaccgcctggggagtacggtcgcaagattaaaactcaaaggaattgacgggggcccgcacaagcggtggattatgtggattaattcgatgcaacgcgaaaaaccttacctggccttgacatgtaacgaactttccagagatggattggtgctcgaaagagaacgttaacacaggtgctgcatggctgtcgtcagctcgtgtcgtgagatgttgggttaagtcccgcaacgagcgcaacccttgccattaattgccatcatttagttgggcactttaatgggactgccggtgacaaaccggaggaaggtggggatgacgtcaagtcctcatggcccttatggccagggcttcacacgtaatacaatggtcggtacagagggttgccaagccgcgaggtggagccaatcccagaaagccgatcgtagtccggattgtagtctgcaactcgactacatgaagtcggaatcgctagtaatcgcggatcagcatgtcgcggtgaatacgttcccgggccttgtacacaccgcccgtcacaccatgggagtgggttttaccagaagtaggtagtctaaccgcaagggggacgcttaccacggtagtattcatgactggggtg

SEQ ID NO: 2105 - DNA, 1460 bp, Methylotenera versatilis
attgaacgctggcggaatgctttacacatgcaagtcgaacggcagcacggacttcggtctggtggcgagtggcgaacgggtgagtaatatatcggaacgtatccaataatgggggataactaatcgaaaggttggctaataccgcatacgccctacgggggaaagctagggaccttcgggcctggcgttaatggagcggctgatatctgattagctagtaggtgaggtaaaagctcacctaggcgacgatcagtagctggtctgagaggacgaccagccacactggaactgagacacggtccagactcctacgggaggcagcagtggggaattttggacaatgggcgaaagcctgatccagccattccgcgtgagtgaagaaggccttcgggttgtaaagctctttcgcaagggaagaaaacttagatactaatattatctgaggttgacggtaccttgataagaagcaccggctaactacgtgccagcagccgcggtaatacgtagggtgcgagcgttaatcggaattactgggcgtaaagcgtgcgcaggcggttttgtaagtcagatgtgaaatccccgagctcaacttgggaactgcgtttgaaactacaagactagaatatgtcagaggggggtagaattccacgtgtagcagtgaaatgcgtagagatgtggaggaataccaatggcgaaggcagccccctgggataatattgacgctcatgcacgaaagcgtggggagcaaacaggattagataccctggtagtccacgccctaaacgatgtctactagttgttggtggagtaaaatccatgagtaacgcagctaacgcgtgaagtagaccgcctggggagtacggtcgcaagattaaaactcaaatgaattgacgggggcccgcacaagcggtggattatgtggattaattcgatgcaacgcgaaaaaccttacctggccttgacatgtaacgaactttccagagatggattggtgctcgaaagagaacgttaacacaggtgctgcatggctgtcgtcagctcgtgtcgtgagatgttgggttaagtcccgcaacgagcgcaacccttgccattaattgccatcatttagttgggcactttaatgggactgccggtgacaaaccggaggaaggtggggatgacgtcaagtcctcatggcccttatggccagggcttcacacgtaatacaatggtcggtacagagggtcgccaacccgcaagggggagccaatcccagaaagccgatcgtagtccggattgaggtctgcaactcgacctcatgaagtcggaatcgctagtaatcgcggatcagcatgtcgcggtgaatacgttcccgggccttgtacacaccgcccgtcacaccatgggagtgggttttaccagaagtaggtagtctaaccttcgggaggacgcttaccacggtagtattcatgactggggtg

SEQ ID NO: 2106 - DNA, 1455 bp, Methyloversatilis universalis
attgaacgctggcggaatgctttacacatgcaagtcgagcggcagcacgggggtaaccctggtggcgagcggcgaacgggtgagtaatacatcggaacatgcccagtcgtgggggataacacttcgaaagaagtgctaataccgcatacgtcctgagggagaaagcgggggatcgcaagacctcgcgcgattggagtggccgatgtcagattagctagttggtggggtaaaggcctaccaaggcaacgatctgtagctggtctgagaggatgatcagccacactgggactgagacacggcccagactcctacgggaggcagcagtggggaattttggacaatgggggcaaccctgatccagccattccgcgtgagtgaagaaggccttcgggttgtaaagctctttcggcaggaacgaaacggtgagctctaacatagcttgctaatgacggtacctgaagaagaagcaccggctaactacgtgccagcagccgcggtaatacgtagggtgcgagcgttaatcggaattactgggcgtaaagcgtgcgcaggcggttgtgtaagacaggtgtgaaatccccgggcttaacctgggaactgcgcttgtgactgcacagctagagtatggcagaggggggtggaattccacgtgtagcagtgaaatgcgtagagatgtggaggaacaccgatggcgaaggcagccccctgggccaatactgacgctcatgcacgaaagcgtggggagcaaacaggattagataccctggtagtccacgccctaaacgatgtcgactaggtgttcggtgaggagactcattgagtaccgcagctaacgcgtgaagtcgaccgcctggggagtacggtcgcaagattaaaactcaaaggaattgacggggacccgcacaagcggtggatgatgtggattaattcgatgcaacgcgaaaaaccttacctacccttgacatgtacggaaccctgctgagaggtgggggtgctcgaaagagagccgtaacacaggtgctgcatggctgtcgtcagctcgtgtcgtgagatgttgggttaagtcccgcaacgagcgcaacccttgtcattagttgctacgcaagagcactctaatgagactgccggtgacaaaccggaggaaggtggggatgacgtcaagtcctcatggcccttatgggtagggcttcacacgtcatacaatggtcggtacagagggttgccaagccgcgaggtggagccaatcccagaaagccgatcgtagtccggatcgcagtctgcaactcgactgcgtgaagtcggaatcgctagtaatcgcggatcagcatgccgcggtgaatacgttcccgggtcttgtacacaccgcccgtcacaccatgggagtgggtttcaccagaagaggctagcctaaccgtaaggggggcggtcgccacggtgagattcatgactggggtg

SEQ ID NO: 2107 - DNA, 1383 bp, Methylovirgula ligni
aacgaacgctggcggcaggcttaacacatgcaagtcgaacgctgtagcaatacagagtggcagacgggtgagtaacacgtgggaacatacccttcggttcggaataactcagggaaacttgagctaataccggatacgtccgcgaggagaaagattcatcgccgaaggattggcccgcgtctgattagctagttggtgaggtaacggctcaccaaggcgacgatcagtagctggtctgagaggatgatcagccacactgggactgagacacggcccagactcctacgggaggcagcagtggggaatattggacaatgggcgaaagcctgatccagccatgccgcgtgagtgatgaaggccttagggttgtaaagctcttttacccgggaagataatgacggtaccgggagaataagccccggctaacttcgtgccagcagccgcggtaatacgaagggggctagcgttgttcggatttactgggcgtaaagcgcacgtaggcggattcttaagtcaggggtgaaatcccgaggctcaacctcggaactgcctttgatactggggatcttgagttcgggagaggtgagtggaactgcgagtgtagaggtgaaattcgtagatattcgcaagaacaccagtggcgaaggcggctcactggcccgatactgacgctgaggtgcgaaagcgtggggagcaaacaggattagataccctggtagtccacgccgtaaactatggatgctagccgttaggcagcttgctgcttagtggcgcagctaacgctttaagcatcccgcctggggagtacggtcgcaagattaaaactcaaaggaattgacgggggcccgcacaagcggtggagcatgtggtttaattcgaagcaacgcgcagaaccttaccagcctttgacatgcctcggacggttaccagagatggtttcttctcttcggagccggggacacaggtgctgcatggctgtcgtcagctcgtgtcgtgagatgttgggttaagtcccgcaacgagcgcaaccctcgcccttagttgccatcatttagttgggcactctagggggactgccggtgataagccgcgaggaaggtggggatgacgtcaagtcctcatggcccttacaggctgggctacacacgtgctacaatggcggtgacaatgggacgcaaaggggtgacccctagcaaatctcaaaaagccgtctcagttcagattgtactctgcaactcgagtacatgaaggtggaatcgctagtaatcgtagatcagaacgctacggtgaatacgttcccgggccttgtacacaccgcccgtcacaccatgggagttggttctacccgaaggcgttttcttaaccgcaaggagagagacgacc

SEQ ID NO: 2108 - DNA, 1450 bp, Methylovulum miyakonense
attgaacgctggcggtatgcttaacacatgcaagtcgggcgagtagccttcgggcgagagcggcggacgggtgagtaacgcataggaacctgccccgtagtgggggacaacgtggggaaacccacgctaataccgcatacgccccaagggggaaagcgggggaccttcgggcctcgcgctatgggatgggcctatgttggattagctagttggtggggtaaaggcctaccaaggcgacgatccatagctggtctgagaggatgatcagccacactgggactgagacacggcccagactcctacgggaggcagcagtggggaatattggacaatgggcgcaagcctgatccagcaataccgcgtgtgtgaagaaggcctgagggttgtaaagcacttttaatggggaggaacccctgccggcgaacacccggcagactgacattacccatagaaaaagcaccggctaactccgtgccagcagccgcggtaatacggagggtgcaagcgttaatcggaattactgggcgtaaagcgtgcgtaggcggcccgtcaagtcagatgtgaaagccccgggctcaacctgggaacggcatttgaaactggcgggctagagtttgggagaggtaagtggaatttcaggtgtagcggtgaaatgcgtagagatctgaaggaacaccagtggcgaaggcgacttactggcccaaaactgacgctgaggtacgaaagcgtgggtagcaaacaggattagataccctggtagtccacgccgtaaacgatgccgactagccgttggccccaattatggggtaagtggcgcagctaacgcgataagtcggccgcctggggagtacggccgcaaggttaaaactcaaatgaattgacgggggcccgcacaagcggtggagcatgtggtttaattcgatgcaacgcgaagaaccttacctacccttgacatccagtggattcggcagagatgccttagtgccttcgggaacactgagacaggtgctgcatggctgtcgtcagctcgtgtcgtgagatgttgggttaagtcccgtaacgagcgcaacccttatccttagttgccagcgggtcatgccgggaactctagggagactgccggtgataaaccggaggaaggtggggacgacgtcaagtcatcatggcccttatgggtagggctacacacgtgctacaatggccggtacagagggctgcgaacccgcaagggtaagccaatcccacaaagccggtcctagtccggatcggggtctgcaactcgaccccgtgaagtcggaatcgctagtaatcgcggatcagaatgccgcggtgaatacgttcccgggccttgtacacaccgcccgtcacaccatgggagcgggctgcaaaagaagcaggtagtctaaccttcgggggggcgcttgccactttgtggttcgtgactggggtg

SEQ ID NO: 2109 - DNA, 1454 bp, Methylovulum psychrotolerans
attgaacgctggcggtatgcttaacacatgcaagtcggacgagtagttgcttcggcaatgagagtggcggacgggtgagtaacgcataggaatctgccctgtagtgggggataacgtggggaaacccacgctaataccgcatacgccccaagggggaaagcgggggactttcgggcctcgcgctataggatgagcctatgttggattagctagttggtggggtagaggcctaccaaggcgacgatccatagctggtctgagaggatgatcagccacactgggactgagacacggctcagactcctacgggaggcagcagtggggaatattggacaatgggcgcaagcctgatccagcaataccgcgtgtgtgaagaaggcctgagggttgtaaagcacttttaatggggaggaactcctgccggcgaatacccggcagactgacattacccatagaaaaagcaccggctaactccgtgccagcagccgcggtaatacggagggtgcaagcgttaatcggaattactgggcgtaaagcgtgcgtaggcggcccgttaagtcagatgtgaaagccccgggctcaacctgggaacggcatttgaaactggcgggctagagttaggtagaggggagtggaatttcaggtgtagcggtgaaatgcgtagagatctgaaggaacaccagtggcgaaggcgactccctggacccaaactgacgctgaggtacgaaagcgtgggtagcaaacaggattagataccctggtagtccacgccgtaaacgatgtcaactagccgttggccccaattatggggtaagtggcgaagctaacgcgataagttgaccgcctggggagtacggccgcaaggttaaaactcaaatgaattgacgggggcccgcacaagcggtggagcatgtggtttaattcgatgcaacgcgaagaaccttacctacccttgacatcctaagaaccctgcggagacgcgggggtgccttcgggaacttagagacaggtgctgcatggctgtcgtcagctcgtgttgtgaaatgttgggttaagtcccgtaacgagcgcaacccttatccttagttgccagcgggtcatgccgggaactctagggagactgccggtgataaaccggaggaaggtggggacgacgtcaagtcatcatggcccttatgggtagggctacacacgtgctacaatggccggtacagagggctgcgaacttgcgaaagtgagccaatcccagaaagccggtcttagtccggattgcagtctgcaactcgactgcatgaagtcggaatcgctagtaatcgcggatcagaatgtcgcggtgaatacgttcccgggccttgtacacaccgcccgtcacaccatgggagtgggttgcaaaagaagtcggtagtctaaccttcgggggggcgctgaccactttgtgattcatgactggggtg

SEQ ID NO: 2110 - DNA, 1456 bp, Microbulbifer agarilyticus
attgaacgctggcggcaggcctaacacatgcaagtcgagcgcgaaagttcttcggaacaagtagagcggcggacgggtgagtaatgcataggaatctgcccagtagtgggggatagcccggggaaacccggattaataccgcatacgtcctacgggagaaagcaggggatcttcggaccttgtgctactggatgagcctatgtcggattagcttgttggtggggtaacggcccaccaaggcgacgatccgtagctggtctgagaggatgatcagccacactggaactgagacacggtccagactcctacgggaggcagcagtggggaatattgcacaatgggggaaaccctgatgcagccatgccgcgtgtgtgaagaaggccttcgggttgtaaagcactttcagtagggaggaaggccctaaagttaatacctttagggattgacgttacctacagaagaagcaccggctaactccgtgccagcagccgcggtaatacggagggtgcgagcgttaatcggaattactgggcgtaaagcgcgcgtaggcggttagttaagctggatgtgaaagccctgggctcaacctgggaactgcattcagaactggctggctagagtacgagagagggtagtggaatttcctgtgtagcggtgaaatgcgtagatataggaaggaacatcagtggcgaaggcgactgcctggctcgatactgacgctgaggtgcgaaagcgtggggagcaaacaggattagataccctggtagtccacgccgtaaacgatgtctactagtcgtagggttccttgaggactttgtgacgcagctaacgcaataagtagaccgcctggggagtacggccgcaaggttaaaactcaaatgaattgacgggggcccgcacaagcggtggagcatgtggtttaattcgaagcaacgcgaagaaccttaccagggcttgacatccagagaactttctagagatagattggtgccttcgggaactctgtgacaggtgctgcatggctgtcgtcagctcgtgtcgtgagatgttgggttaagtcccgtaacgagcgcaacccttgtcctttgttgccaacacgtaatggtgggaactcaaaggagactgccggtgacaaaccggaggaaggtggggacgacgtcaagtcatcatggcccttacgtcctgggctacacacgtgctacaatggcaggtacagacggtcgctaagccgcgaggtggagctaatccgagaaaacctgtcgtagtccggattggagtctgcaactcgactccatgaagtcggaatcgctagtaatcgtgaatcagaatgtcacggtgaatacgttcccgggccttgtacacaccgcccgtcacaccatgggagtgggttgctccagaagtggctagtctaaccttcggggggacggtcaccacggagtgattcatgactggggtg

SEQ ID NO: 2111 - DNA, 1458 bp, Microbulbifer aggregans
attgaacgctggcggcaggcctaacacatgcaagtcgagcgcgaaagttccttcgggaacgagtagagcggcggacgggtgagtaacgcgtgggaaattgcccagtagtgggggacaacaaccggaaacggttgctaataccgcatacgccctacgggggaaagcgggggatcttcggacctcgtgctattggagatgcccgcgtcggattagcttgttggtgaggtaacggctcaccaaggcaacgatccgtagctggtctgagaggatgatcagccacactgggactgagacacggcccagactcctacgggaggcagcagtggggaatattggacaatgggggcaaccctgatccagccatgccgcgtgtgtgaagaaggccttcgggttgtaaagcactttcagtagggaggaaggccctaaagttaatacctttagggattgacgttacctacagaagaagcaccggctaactccgtgccagcagccgcggtaatacggagggtgcaagcgttaatcggaattactgggcgtaaagcgcgcgtaggcggttagttaagctggatgtgaaagccccgggctcaacctgggaactgcattcagaactggctagctagagtacgagagagggtagtggaatttcctgtgtagcggtgaaatgcgtagatataggaaggaacatcagtggcgaaggcgactgcctggctcgatactgacgctgaggtgcgaaagcgtggggagcaaacaggattagataccctggtagtccacgccgtaaacgatgtctactagccgtagggttccttgaggactttgtggcgcagctaacgcaataagtagaccgcctggggagtacggccgcaaggttaaaactcaaatgaattgacgggggcccgcacaagcggtggagcatgtggtttaattcgaagcaacgcgaagaaccttaccagggcttgacatccagagaactttctagagatagattggtgccttcgggaactctgtgacaggtgctgcatggctgtcgtcagctcgtgtcgtgagatgttgggttaagtcccgtaacgagcgcaacccttgtcctttgttgccagcacgtaatggtgggaactcaaaggagactgccggtgacaaaccggaggaaggtggggacgacgtcaagtcatcatggcccttacgtcctgggctacacacgtgctacaatggcaggtacagacggttgcgagaccgcgaggtggagctaatccgataaaacctgtcgtagtccggatcggagtctgcaactcgactccgtgaagtcggaatcgctagtaatcgtgaatcagaatgtcacggtgaatacgttcccgggccttgtacacaccgcccgtcacaccatgggagtgggttgctccagaagtggctagtctaacctttgggaggacggtcaccacggagtgattcatgactggggtg

SEQ ID NO: 2112 - DNA, 1416 bp, Microbulbifer donghaiensis
acacatgcaagtcgagcgcgaaagttccttcgggaatgagtagagcggcggacgggtgagtaacgcgtgggaaattgcccagtagtgggggacaacattcggaaacggatgctaataccgcatacgccctacgggggaaagcgggggatcttcggacctcgtgctattggatatgcccgcgtcggattagctagttggtgaggtaatggctcaccaaggcgacgatccgtagctggtctgagaggatgatcagccacactgggactgagacacggcccagactcctacgggaggcagcagtggggaatattggacaatgggggcaaccctgatccagccatgccgcgtgtgtgaagaaggccttcgggttgtaaagcactttcagcagggaggaaggcttgtagattaatactctgcaagattgacgttacctgcagaagaagcaccggctaactccgtgccagcagccgcggtaatacggagggtgcaagcgttaatcggaattactgggcgtaaagcgcgcgtaggcggttatttaagctggatgtgaaagccccgggcttaacctgggaactgcattcagaactggatggctagagtacgagagagggtagtggaatttcctgtgtagcggtgaaatgcgtagatataggaaggaacatcagtggcgaaggcgactgcctggctcgatactgacgctgaggtgcgaaagcgtggggagcaaacaggattagataccctggtagtccacgccgtaaacgatgtctactagtcgtagggttccttgaggactttgtgacgcagctaacgcaataagtagaccgcctggggagtacggccgcaaggttaaaactcaaatgaattgacgggggcccgcacaagcggtggagcatgtggtttaattcgaagcaacgcgaagaaccttaccagggcttgacatcctcagaactttccagagatggattggtgccttcgggaactgagtgacaggtgctgcatggctgtcgtcagctcgtgtcgtgagatgttgggttaagtcccgtaacgagcgcaacccttgtcctttgttgccaacacgtaatggtgggaactcaaaggagactgccggtgacaaaccggaggaaggtggggacgacgtcaagtcatcatggcccttacgtcctgggctacacacgtgctacaatggttggtacagacggttgcgaatccgcgaggtggagctaatccgagaaaaccaatcgtagtccggatcggagtctgcaactcgactccgtgaagtcggaatcgctagtaatcgtgaatcagaatgtcacggtgaatacgttcccgggccttgtacacaccgcccgtcacaccatgggagtgggttgctccagaagtggctagtctaaccttcggggggacggtcaccacgga

SEQ ID NO: 2113 - DNA, 1458 bp, Microbulbifer marinus
attgaacgctggcggcaggcctaacacatgcaagtcgagcgcgaaagttccttcgggagcgagtagagcggcggacgggtgagtaacgcgtgggaaattgcccagtagtgggggacaactcgaggaaactcgagctaataccgcatacgccctacgggggaaagcgggggatcttcggacctcgtgctattggatatgcccgcgtcggattagcttgttggtgaggtaacggctcaccaaggcgacgatccgtagctggtctgagaggatgatcagccacactgggactgagacacggcccagactcctacgggaggcagcagtggggaatattggacaatgggggcaaccctgatccagccatgccgcgtgtgtgaagaaggccttcgggttgtaaagcactttcagcagggaggaaggccttaagattaatactcttaaggattgacgttacctgcagaagaagcaccggctaactccgtgccagcagccgcggtaatacggagggtgcaagcgttaatcggaattactgggcgtaaagcgcgcgtaggcggttagttaagctggatgtgaaagccctgggctcaacctgggaactgcattcagaactggctggctagagtacgagagagggtagtggaatttcctgtgtagcggtgaaatgcgtagatataggaaggaacatcagtggcgaaggcgactgcctggctcgatactgacgctgaggtgcgaaagcgtggggagcaaacaggattagataccctggtagtccacgccgtaaacgatgtctactagtcgtagggttccttgaggactttgtgacgcagctaacgcaataagtagaccgcctggggagtacggccgcaaggttaaaactcaaatgaattgacgggggcccgcacaagcggtggagcatgtggtttaattcgaagcaacgcgaagaaccttaccagggcttgacatcctcagaactttccagagatggattggtgccttcgggaactgagtgacaggtgctgcatggctgtcgtcagctcgtgtcgtgagatgttgggttaagtcccgtaacgagcgcaacccttgtccctagttgctagcaggtaatgctgagaactctagggagactgccggtgacaaaccggaggaaggtggggacgacgtcaagtcatcatggcccttacgtcctgggctacacacgtgctacaatggttggtacagacggtcgctaagccgcgaggtggagctaatccgaaaaaaccaatcgtagtccggatcggagtctgcaactcgactccgtgaagtcggaatcgctagtaatcgtgaatcagaatgtcacggtgaatacgttcccgggccttgtacacaccgcccgtcacaccatgggagtgggttgctccagaagtggctagtctaaccttcgggaggacggtcaccacggagtgattcatgactggggtg

SEQ ID NO: 2114 - DNA, 1457 bp, Microbulbifer thermotolerans
attgaacgctggcggcaggcctaacacatgcaagtcgagcgcgaaagttccttcgggaataagtagagcggcggacgggtgagtaacgcgtgggaaattgcccagtagtgggggacaactcggggaaactcgagctaataccgcatacgccctacgggggaaagcgggggatcttcggacctcgcgctattggatatgcccgcgtcggattagctagttggtgaggtaaaggctcaccaaggcgacgatccgtagctggtctgagaggatgatcagccacactgggactgagacacggcccagactcctacgggaggcagcagtggggaatattggacaatgggcgcaagcctgatccagccatgccgcgtgtgtgaagaaggccctagggttgtaaagcactttcagtcgggaggaaggcctaatggttaatacccattaggattgacgttaccgacagaagaagcaccggctaactccgtgccagcagccgcggtaatacggagggtgcgagcgttaatcggaattactgggcgtaaagcgcgcgtaggcggttagttaagctggatgtgaaagccccgggctcaacctgggaactgcattcagaactggctggctagagtacgagagagggtagtggaatttcctgtgtagcggtgaaatgcgtagatataggaaggaacaccagtggcgaaggcgactgcctggctcgatactgacgctgaggtgcgaaagcgtggggagcaaacaggattagataccctggtagtccacgccgtaaacgatgtctactagtcgtagggctccttgagggctttgtgacgcagctaacgcaataagtagaccgcctggggagtacggccgcaaggttaaaactcaaatgaattgacgggggcccgcacaagcggtggagcatgtggtttaattcgaagcaacgcgaagaaccttaccagggcttgacatcctcggaactttccagagatggattggtgccttcgggaaccgagtgacaggtgctgcatggctgtcgtcagctcgtgtcgtgagatgttgggttaagtcccgtaacgagcgcaacccttgtccctagttgccagcactttgggtgggaactctagggagactgccggtgacaaaccggaggaaggtggggacgacgtcaagtcatcatggcccttacgtcctgggctacacacgtgctacaatggctggtacagacggttgcgagaccgcgaggtggagctaatccgagaaaaccagtcgtagtccggatcggagtctgcaactcgactccgtgaagtcggaatcgctagtaatcgcgaatcagaatgtcgcggtgaatacgttcccgggccttgtacacaccgcccgtcacaccatgggagtgggttgctccagaagtggctagtctaaccttcggggggacggtcaccacggagtgattcatgactggggtg

SEQ ID NO: 2115 - DNA, 1456 bp, Microbulbifer variabilis
attgaacgctggcggcaggcctaacacatgcaagtcgagcgcgaaagttcttcggaatgagtagagcggcggacgggtgagtaacgcgtgggaaattgcccagtagtgggggacaacattcggaaacggatgctaataccgcatacgccctacgggggaaagcaggggatcttcggaccttgtgctattggatatgcccgcgtcggattagctagttggtgaggtaatggctcaccaaggcaacgatccgtagctggtctgagaggatgatcagccacactgggactgagacacggcccagactcctacgggaggcagcagtggggaatattggacaatgggcgcaagcctgatccagccatgccgcgtgtgtgaagaaggctctagggttgtaaagcactttcagtagggaggaaggccttaaagttaatacctttgaggattgacgttacctacagaagaagcaccggctaactccgtgccagcagccgcggtaatacggagggtgcgagcgttaatcggaattactgggcgtaaagcgcgcgtaggcggttagttaagctggatgtgaaagccccgggctcaacctgggaactgcattcagaactggctggctagagtacgagagagggtagtggaatttcctgtgtagcggtgaaatgcgtagatataggaaggaacatcagtggcgaaggcgactgcctggctcgatactgacgctgaggtgcgaaagcgtggggagcaaacaggattagataccctggtagtccacgccgtaaacgatgtctactagtcgtagggttccttgaggactttgtgacgcagctaacgcaataagtagaccgcctggggagtacggccgcaaggttaaaactcaaatgaattgacgggggcccgcacaagcggtggagcatgtggtttaattcgaagcaacgcgaagaaccttaccagggcttgacatcctcggaagtctgcagagatgcggatgtgccttcgggaaccgagtgacaggtgctgcatggctgtcgtcagctcgtgtcgtgagatgttgggttaagtcccgtaacgagcgcaacccttgtccttagttgccagcacgtaatggtgggaactctagggagactgccggtgacaaaccggaggaaggtggggacgacgtcaagtcatcatgggccttacgtcctgggctacacacgtgctacaatggttggtacagacggtcgctaagccgcgaggtggagctaatccgaaaaaaccaatcgtagtccggattggagtctgcaactcgactccatgaagtcggaatcgctagtaatcgtgaatcagaatgtcacggtgaatacgttcccgggccttgtacacaccgcccgtcacaccatgggagtgggttgctccagaagtggctagtctaaccttcggggggacggtcaccacggagtgattcatgactggggtg

SEQ ID NO: 2116 - DNA, 1458 bp, Microbulbifer yueqingensis
attgaacgctggcggcaggcctaacacatgcaagtcgagcgcgaaagttccttcgggaacgagtagagcggcggacgggtgagtaacgcataggaatctgcccagtagtgggggatagcccggggaaacccggattaataccgcatacgccctacgggggaaagcaggggatcttcggaccttgcgctattggatgagcctatgtcggattagcttgttggtggggtaacggcccaccaaggcgacgatccgtagctggtctgagaggatgatcagccacactgggactgagacacggcccagactcctacgggaggcagcagtggggaatattggacaatgggggcaaccctgatccagccatgccgcgtgtgtgaagaaggccttcgggttgtaaagcactttcagcagggaggaaggcctgacggttaatacccgtcaggattgacgttacctgcagaagaagcaccggctaactccgtgccagcagccgcggtaatacggagggtgcaagcgttaatcggaattactgggcgtaaagcgcgcgtaggcggttagttaagctggatgtgaaagcccagggctcaaccttggaactgcattcagaactggctagctagagtacgagagagggtagtggaatttcctgtgtagcggtgaaatgcgtagatataggaaggaacaccagtggcgaaggcgactgcctggctcgatactgacgctgaggtgcgaaagcgtggggagcaaacaggattagataccctggtagtccacgccgtaaacgatgtctactagccgtagggttccttgaggactttgtggcgcagctaacgcaataagtagaccgcctggggagtacggccgcaaggttaaaactcaaatgaattgacgggggcccgcacaagcggtggagcatgtggtttaattcgaagcaacgcgaagaaccttaccagggcttgacatcctcggaactttctagagatagattggtgccttcgggaaccgagtgacaggtgctgcatggctgtcgtcagctcgtgtcgtgagatgttgggttaagtcccgtaacgagcgcaacccttgtcctttgttgccagcacgtaatggtgggaactcaaaggagactgccggtgacaaaccggaggaaggtggggacgacgtcaagtcatcatggcccttacgtcctgggctacacacgtgctacaatggttggtacagacggtcgctaagccgcgaggtggagctaatccgagaaaaccaatcgtagtccggatcggagtctgcaactcgactccgtgaagtcggaatcgctagtaatcgtgaatcagaatgtcacggtgaatacgttcccgggccttgtacacaccgcccgtcacaccatgggagtgggttgctccagaagtggctagtctaaccttcgggaggacggtcaccacggagtgattcatgactggggtg

SEQ ID NO: 2117 - DNA, 1410 bp, Microcoleus chthonoplastes
gatgaacgctggcggtctgcttaacacatgcaagtcgaacgcaaccttcgggttgagtggcggacgggtgagtaacgcgtgagaatctgccttggggtcggggacaaccactggaaacggtggctaataccggataagccttcgggtaaaagatttattgccccaagaggagctcgcgtctgattagctagttggtgaggtaagagctcaccaaggcagcgatcagtagctggtctgagaggacgatcagccacactgggactgagacacggcccagactcctacgggaggcagcagtggggaattttccgcaatgggcgaaagcctgacggagcaagaccgcgtgagggaggaaggctcttgggttgtaaacctcttttctcagggaagaagctctgacggtacctgaggaatcagcctcggctaactccgtgccagcagccgcggtaatacggaggaggcaagcgttatccggaattattgggcgtaaagcgtccgcaggtggcgattcaagtctgctgtcaaagcacggggcttaactccgttaaggcagtggaaactgaatagctagagtgccgtaggggtagagggaattcccggtgtagcggtgaaatgcgtagagatcgggaagaacatcggtggcgaaagcgctctactggacggcaactgacactcagggacgaaagctaggggagcgaatgggattagataccccagtagtcctagctgtaaacgatggatactaggtgtagcttgtatcgacccgagctgtgccgaagctaacgcgttaagtatcccgcctggggagtacgcacgcaagtgtgaaactcaaaggaattgacgggggcccgcacaagcggtggagtatgtggtttaattcgatgcaacgcgaagaaccttaccagggcttgacatgtccggaaccccggtgaaagctgggggtgccttcgggagccggaacacaggtggtgcatggctgtcgtcagctcgtgtcgtgagatgttgggttaagtcccgcaacgagcgcaaccctcgtctttagttgccagcattaagttgggcactctagagagactgccggtgacaaaccggaggaaggtggggatgacgtcaagtcagcatgccccttacgctctgggcgacacacgtactacaatggtcgggacagagggcagctaacctgcgaaggcaagctaatcccagaaactcggcctcagttcagatcgcaggctgcaactcgcctgcgtgaaggaggaatcgctagtaatcgccggtcagaatacggcggtgaatccgttcccgggccttgtacacaccgcccgtcacaccatggaagctggccacgcccgaagtcgttaccctaaccctccggggagggggacgccgaaggcagggttggtgactggggtg

SEQ ID NO: 2118 - DNA, 1422 bp, Microcoleus vaginatus
gatgaacgctggcggtctgcttaacacatgcaagtcgaacggagtagaaatacttagtggcggacgggtgagtaacgcgtgagaatctgccttcaggacggagacaacagttggaaacgactgctaagccccgatgaaccgaaagggaaaatatttatagcctgaagatgagctcgcgtccgattagctagttggcggggtaaaagcccaccaaggcgacgatcggtagctggtctgagaggacgatcagccacactgggactgagacacggcccagactcctacgggaggcagcagtggggaattttccgcaatgggcgaaagcctgacggagcaagaccgcgtgggggaagaaggctcttgggttgtaaaccccttttctctgggaagaaagttgtgaaagcaacctgacggtaccagaggaatcagcatcggctaactccgtgccagcagccgcggtaagacggaggatgcaagcgttatccggaatgattgggcgtaaagcgtccgcaggtggcagttcaagtctgctgtcaaagaccggggcttaacttcggaaaggcagtggaaactgaacagctagagtatggtaggggcagagggaattcctggtgtagcggtgaaatgcgtagagatcaggaagaacatcggtggcgaaggcgctctgctggaccataactgacactcagggacgaaagctaggggagcgaatgggattagataccccagtagtcctagccgtaaacgatggatactaggtgttgtctgtatcgacccggacagtgccgtagctaacgcgttaagtatcccgcctggggagtacgcacgcaagtgtgaaactcaaaggaattgacgggggcccgcacaagcggtggagtatgtggtttaattcgatgcaacgcgaagaaccttaccaggacttgacatgtcgcgaatcctttggaaacagaggagtgccttcgggagcgcgaacacaggtggtgcatggctgtcgtcagctcgtgtcgtgagatgttgggttaagtcccgcaacgagcgcaaccctcgtgtttagttgccatcattaagttgggcactctaaacagactgccggtgacaaaccggaggaaggtggggatgacgtcaagtcagcatgccccttacgtcctgggctacacacgtactacaatggtagggacagagggcagccaacccgcgagggcgagctaatcccgtaaaccctgcctcagttcagattgcaggctgcaactcgcctgcatgaaggcggaatcgctagtaatcgcaggtcagcatactgcggtgaatccgttcccgggccttgtacacaccgcccgtcacaccatggaagttggccacgcccgaagtcattactctaacctttcgaggaggaggatgccgaaggcagggctgatgactggggtg

SEQ ID NO: 2119 - DNA, 1411 bp, Microcystis aeruginosa
gatgaacgctggcggcgtgcctaacacatgcaagtcgaacgggaatcttcggattccagtggcggacgggtgagtaacgcgtaagaatctaacttcaggacggggacaacagttggaaacgactgctaatacccgatgtgccgcgaggtgaaacctaattggcctgaagaagagcttgcgtctgattagctagttggtggggtaaaggcctaccaaggcgacgatcagtagctggtctgagaggatgagcagccacactgggactgagacacggcccagactcctacgggaggcagcagtggggaattttccgcaatgggcgaaagcctgacggagcaacgccgcgtgagggaggaaggtctttggattgtaaacctcttttctcaaggaagaagttctgacggtacttgaggaatcagcctcggctaactccgtgccagcagccgcggtaatacgggggaggcaagcgttatccggaattattgggcgtaaagcgtccgcaggtggtcagccaagtctgctgtcaaatcaggttgcttaacgacctaaaggcggtggaaactggcagactagagagcagtaggggtagcaggaattcccagtgtagcggtgaaatgcgtagagattgggaagaacatcggtggcgaaagcgtgctactgggctgtatctgacactcagggacgaaagctaggggagcgaaagggattagatacccctgtagtcctagccgtaaacgatggatactaggcgtggcttgtatcgacccgagccgtgccgaagctaacgcgttaagtatcccgcctggggagtacgcacgcaagtgtgaaactcaaaggaattgacgggggcccgcacaagcggtggagtatgtggtttaattcgatgcaacgcgaagaaccttaccaagacttgacatgtcgcgaaccctggtgaaagctgggggtgccttcgggagcgcgaacacaggtggtgcatggctgtcgtcagctcgtgtcgtgagatgttgggttaagtcccgcaacgagcgcaaccctcgttcttagttgccagcattaagttggggactctaaggagactgccggtgacaaaccggaggaaggtggggatgacgtcaagtcagcatgccccttacgtcttgggcgacacacgtactacaatggtcgggacaaagggcagcgaactcgcgagagccagcgaatcccagcaaacccggcctcagttcagattgcaggctgcaactcgcctgcatgaaggaggaatcgctagtaatcgccggtcagcatacggcggtgaattcgttcccgggccttgtacacaccgcccgtcacaccatggaagctggtcacgcccgaagtcattacctcaaccgcaaggagggggatgcctaaggcagggctagtgactggggtg

SEQ ID NO: 2120 - DNA, 1406 bp, Microcystis flosaquae
acgctggcggcgtgcctaacacatgcaagtcgaacgggaatcttcggattctagtggcggacgggtgagtaacgcgtaagaatctaacttcaggacggggacaacagttggaaacgactgctaatacccgatgtgccgcaaggtgaaaactaattggcctgaagaagagcttgcgtctgattagctagttggtggggtaagagcctaccaaggcgacgatcagtagctggtctgagaggatgagcagccacactgggactgagacacggcccagactcctacgggaggcagcagtggggaattttccgcaatgggcgaaagcctgacggagcaacgccgcgtgagggaggaaggtctttggattgtaaacctcttttctcaaggaagaagttctgacggtacttgaggaatcagcctcggctaactccgtgccagcagccgcggtaatacgggggaggcaagcgttatccggaattattgggcgtaaagcgtccgcaggtggtcagccaagtctgctgtcaaatcaggttgcttaacgacctaaaggcggtggaaactggcagactagagagcagtaggggtagcaggaattcccagtgtagcggtgaaatgcgtagagattgggaagaacatcggtggcgaaagcgtgctactgggctgtatctgacactcagggacgaaagctaggggagcgaaagggattagatacccctgtagtcctagccgtaaacgatggatactaggcgtggcttgtatcgacccgagccgtgccgaagctaacgcgttaagtatcccgcctggggagtacgcacgcaagtgtgaaactcaaaggaattgacgggggcccgcacaagcggtggagtatgtggtttaattcgatgcaacgcgaagaaccttaccaagacttgacatgtcgcgaaccctggtgaaagctaggggtgccttcgggagcgcgaacacaggtggtgcatggctgtcgtcagctcgtgtcgtgagatgttgggttaagtcccgcaacgagcgcaaccctcgttcttagttgccagcattaagttggggactctaaggagactgccggtgacaaaccggaggaaggtggggatgacgtcaagtcagcatgccccttacgtcttgggcgacacacgtactacaatggtcgggacaaagggcagcgaactcgcgagagccagcgaatcccagcaaacccggcctcagttcagattgcaggctgcaactcgcctgcatgaaggaggaatcgctagtaatcgccggtcagcatacggcggtgaattcgttcccgggccttgtacacaccgcccgtcacaccatggaagctggtcacgcccgaagtcattacctcaaccgcaaggagggggatgcctaaggcagggctagtgactggggtg

SEQ ID NO: 2121 - DNA, 1406 bp, Microcystis novacekii
acgctggcggcgtgcctaacacatgcaagtcgaacgggaatcttcggattctagtggcggacgggtgagtaacgcgtaagaatctaacttcaggacggggacaacagttggaaacgactgctaatacccgatatgccgcgaggtgaaacctaattggcctgaagaagagcttgcgtctgattagctagttggtggggtaaaagcctaccaaggcgacgatcagtagctggtctgagaggatgagcagccacactgggactgagacacggcccagactcctacgggaggcagcagtggggaattttccgcaatgggcgaaagcctgacggagcaacgccgcgtgagggaggaaggtctttggattgtaaacctcttttctcaaggaagaagttctgacggtacttgaggaatcagcctcggctaactccgtgccagcagccgcggtaatacgggggaggcaagcgttatccggaattattgggcgtaaagcgtccgcaggtggtcagccaagtctgctgtcaaatcaggttgcttaacgacctaaaggcggtggaaactggcagactagagagcagtaggggtagcaggaattcccagtgtagcggtgaaatgcgtagagattgggaagaacatcggtggcgaaagcgtgctactgggctgtatctgacactcagggacgaaagctaggggagcgaaagggattagatacccctgtagtcctagccgtaaacgatggatactaggcgtggcttgtatcgacccgagccgtgccgaagctaacgcgttaagtatcccgcctggggagtacgcacgcaagtgtgaaactcaaaggaattgacgggggcccgcacaagcggtggagtatgtggtttaattcgatgcaacgcgaagaaccttaccaagacttgacatgtcgcgaaccctggtgaaagctgggggtgccttcgggagcgcgaacacaggtggtgcatggctgtcgtcagctcgtgtcgtgagatgttgggttaagtcccgcaacgagcgcaaccctcgttcttagttgccagcattaagttggggactctaaggagactgccggtgacaaaccggaggaaggtggggatgacgtcaagtcagcatgccccttacgtcttgggcgacacacgtactacaatggtcgggacaaagggcagcgaactcgcgagagccagcgaatcccagcaaacccggcctcagttcagattgcaggctgcaactcgcctgcatgaaggaggaatcgctagtaatcgccggtcagcatacggcggtgaattcgttcccgggccttgtacacaccgcccgtcacaccatggaagctggtcacgcccgaagtcattacctcaaccgcaaggagggggatgcctaaggcagggctagtgactggggtg

SEQ ID NO: 2122 - DNA, 1411 bp, Microcystis panniformis
gatgaacgctggcggcgtgcctaacacatgcaagtcgaacgggaatcttcggattctagtggcggacgggtgagtaacgcgtaagaatctaacttcaggacggggacaacagttggaaacgactgctaatacccgatgtgccgcaaggtgaaacctaattggcctggagaagagcttgcgtctgattagctagttggtggggtaagagcctaccaaggcgacgatcagtagctggtctgagaggatgagcagccacactgggactgagacacggcccagactcctacgggaggcagcagtggggaattttccgcaatgggcgaaagcctgacggagcaacgccgcgtgagggaggaaggtctttggattgtaaacctcttttctcaaggaagaagttctgacggtacttgaggaatcagcctcggctaactccgtgccagcagccgcggtaatacgggggaggcaagcgttatccggaattattgggcgtaaagcgtccgcaggtggtcagccaagtctgccgtcaaatcaggttgcttaacgacctaaaggcggtggaaactggcagactagagagcagtaggggtagcaggaattcccagtgtagcggtgaaatgcgtagagattgggaagaacatcggtggcgaaagcgtgctactgggctgtatctgacactcagggacgaaagctaggggagcgaaagggattagatacccctgtagtcctagccgtaaacgatggatactaggcgtggcttgtatcgacccgagccgtgccgaagctaacgcgttaagtatcccgcctggggagtacgcacgcaagtgtgaaactcaaaggaattgacgggggcccgcacaagcggtggagtatgtggtttaattcgatgcaacgcgaagaaccttaccaagacttgacatgtcgcgaaccctggtgaaagctgggggtgccttcgggagcgcgaacacaggtggtgcatggctgtcgtcagctcgtgtcgtgagatgttgggttaagtcccgcaacgagcgcaaccctcgttcttagttgccagcattaagttggggactctaaggagactgccggtgacaaaccggaggaaggtggggatgacgtcaagtcagcatgccccttacgtcttgggcgacacacgtactacaatggtcgggacaaagggcagcgaactcgcgagagccagcgaatcccagcaaacccggcctcagttcagattgcaggctgcaactcgcctgcatgaaggaggaatcgctagtaatcgccggtcagcatacggcggtgaattcgttcccgggccttgtacacaccgcccgtcacaccatggaagctggtcacgcccgaagtcattacctcaaccgcaaggagggggatgcctaaggcagggctagtgactggggtg

SEQ ID NO: 2123 - DNA, 1395 bp, Microcystis viridis
gcgtcctaacacatgcaagtcgaacgggaatcttcggattccagtggcggacgggtgagtaaggggtaagaatctaacttcaggacggggacaacagttggaaacgactgctaatacccgatgtgccgcgaggtgaaacctaattggcctgaagaagagcttgcgtctgattagctagttggtggggtaaaggcctaccaaggcgacgatcagtagctggtctgagaggatgagcagccacactgggactgagacacggcccagactcctacgggaggcagcagtggggaattttccgcaatgggcgaaagcctgacggagcaacgccgcgtgagggaggaaggtctttggattgtaaacctcttttctcaaggaagaagttctgacggtacttgaggaatcagccgcggctaactccgtgccagcagccgcggtaatacgggggaggcaaacgttatccggaattattggtgtaaagcgtccgcaggtggtcagccaagtctgctgtcaaatcaggttgcttaacgacctaaaggcggtggaaactggcagactagagagcagtaggggtagcagtaattcccagtgtagcggtgaaatgcgtagagattgggaagaacacggtggcgaaagcgtgctactgggctgtatctgacactcagggacgaaagctaggggagcgaaagggattagatacccctgtagtcctagccgtaaacgatggatactaggcgtggcttgtatcgacccgagccgtgccgaagctaacgcgttaagtatcccgcctggggagtacgcacgcaagtgtgaaactcaaaggaattgacgggggcccgcacaagcggtggagtatgtggtttaattcgatgcaacgcgaagaaccttaccaagacttgacatgtcgcgaaccctggtgaaagctgggggtgccttcgggagcgcgaacacaggtggtgcatggctgtcgtcagctcgtgtcgtgagatgttgggttaagtcccgcaacgagcgcaaccctcgttcttagttgccagcattaagttggggactctaaggagactgccggtgacaaactggaggaaggtggggatgacgtcaagtcagcatgccccttacgtcttgggcgacacacgtactacaatggtcgggacaaagggcagcgaactcgcgagagccagcgaatcccagcaaacccggcctcagttcagattgcaggctgcaactcgcctgcatgaaggaggaatcgctagtaatcgccggtcagcatacggcggtgaattcgttcccgggccttgtacacaccgcccgtcacaccatggaagctggtcacgcccgaagtcattacctcaaccgcaaggacgggggatgcctaaggcagggctagttactggtctg

SEQ ID NO: 2124 - DNA, 1394 bp, Microcystis wesenbergii
gcgtgcctaacacatgcaagtcgaacgggaatcttcggattccagtgacggacgggtgagtaacccgtaagaatctaacttcaggacggggacaacagttggaacgactgctcatacccgatgtgccgcaaggtgaaacctaattggcctgaagaagagcttgcgtctgattagctagttggtggggtaagagcctaccaaggcgtcgatcagtagctggtctgagaggatgagcagccacactgggactgagacacggcccagactcctacgggaggcagcagtggggaattttccgcaatgggcgaaagcctgacggagcaacgccgcgtgagggaggaaggtctttggattgtaaacctcttttctcaaggaagaagttctgacggtacttgaggaatcagcctcggctaactccgtgccagcagccgcggtaatacgggggaggcaagcgttatccggaattattgggcgtaaagcgtccgcaggtggtcagccaagtctgctgtcaaatcaggttgcttaacgacctaaaggcggtggaaactggcagactagagagcagtaggggtagcaggaattcccagtgtacggtgaaatcgtagagattgggaagaacatcggtggcgaaagcgtgctactgggctgtatctgacactcagggacgaaagctaggggagcgaaagggattagatacccctgtagtcctagccgtaaacgatggatactaggcgtggcttgtatcgacccgagccgtgccgaatctaacgcgttaagtatcccgcctggggagtacgcacgcaagtgtgaaactcaaaggaattgacgggggcccgcacaagcggtggagtatgtggtttaattcgatgcaacgcgaagaaccttaccaagacttgacatgtcgggaaccctggtgaaaggtgggggtgccttcgggagcccgaacacagatggtgcatggctgtcgtcagctcgtgtcgtgagatgttgggttaagtcccgcaacgagcgcaaccctcgttcttagttgccagcattaagttggggactctaaggagactgccggtgacaaaccggaggaaggtggggatgacgtcaagtcagcatgccccttacgtcttgggcgacacacgtactacaatggtcgggacaaagggcagcgaactcgcgagagccagcgaatcccagcaaacccggcctcagttcagattgcaggctgcaactcgcctgcatgaaggaggaatcgctagtaatcgccggtcagcatacggcggtgaattcgttcccgggccttgtacacaccgcccgtcacaccatggaagctggtcacgcccgaagtcattacctcaaccgcaaggagggggatgactaaggcagagcttgtgactggggtg

SEQ ID NO: 2125 - DNA, 1409 bp, Microvirga aerophila
aacgaacgctggcggcaggcttaacacatgcaagtcgaacgcccctttcggggggagtggcagacgggtgagtaacacgtgggaacgtacccttttgttcggaataacccagggaaacttgggctaataccggatacgcccttacggggaaagatttatcgcagaaggatcggcccgcgtctgattagctagttggtgaggtaaaggctcaccaaggcgacgatcagtagctggtctgagaggatgatcagccacactgggactgagacacggcccagactcctacgggaggcagcagtggggaatattggacaatgggcgcaagcctgatccagccatgccgcgtgagtgatgaaggccttagggttgtaaagctctttcggcggggacgataatgacggtacccgcagaagaagccccggctaacttcgtgccagcagccgcggtaatacgaagggggctagcgttgttcggaatcactgggcgtaaagggcgcgtaggcggctttgtaagtcgggggtgaaagcctgtggctcaaccacagaattgccttcgatactgcatggcttgagaccggaagaggtaagtggaactgcgagtgtagaggtgaaattcgtagatattcgcaagaacaccagtggcgaaggcggcttactggtccggttctgacgctgaggcgcgaaagcgtggggagcaaacaggattagataccctggtagtccacgccgtaaacgatgaatgccagccgttgggcagcttgctgttcagtggcgcagctaacgctttaagcattccgcctggggagtacggtcgcaagattaaaactcaaaggaattgacgggggcccgcacaagcggtggagcatgtggtttaattcgaagcaacgcgcagaaccttaccaacctttgacatgtccagtatgggctccagagatggggctcttcagttcggctggctggaacacaggtgctgcatggctgtcgtcagctcgtgtcgtgagatgttgggttaagtcccgcaacgagcgcaaccctcgcccttagttgccatcattcagttgggcactctaaggggactgccggtgataagccgcgaggaaggtggggatgacgtcaagtcctcatggcccttacaggttgggctacacacgtgctacaatggcggtgacaatgggcagcgaacccgcgagggggagctaatcccaaaaagccgtctcagttcggattgcactctgcaactcgagtgcatgaaggtggaatcgctagtaatcgtggatcagaacgccacggtgaatacgttcccgggccttgtacacaccgcccgtcacaccatgggagttggtcttacccgacggcgctgcgccaaccgcaaggaggcaggcgaccacggtagggtcagcgactggggtg

SEQ ID NO: 2126 - DNA, 1409 bp, Microvirga guangxiensis
aacgaacgctggcggcaggcttaacacatgcaagtcgaacgggcccttcggggtcagtggcagacgggtgagtaacgcgtgggaacgtgcccttcagtttggaataacccagggaaacttgggctaataccggatacgccctaacggggaaagatttatcgctgaaggatcggcccgcgtctgattagctagttggtgaggtaatggctcaccaaggcgacgatcagtagctggtctgagaggatgatcagccacattgggactgagacacggcccaaactcctacgggaggcagcagtggggaatattggacaatgggcgcaagcctgatccagccatgccgcgtgagtgatgacggccttagggttgtaaagctctttcggcggggacgataatgacggtacccgcagaagaagccccggctaacttcgtgccagcagccgcggtaatacgaagggggctagcgttgttcggaatcactgggcgtaaagggcgcgtaggcggcttgataagtcgggggtgaaagcctgtggctcaaccacagaattgccttcgatactgtctggcttgagaccggaagaggtaagtggaactgcgagtgtagaggtgaaattcgtagatattcgcaagaacaccagtggcgaaggcggcttactggtccggttctgacgctgaggcgcgaaagcgtggggagcaaacaggattagataccctggtagtccacgccgtaaacgatgaatgccagccgttgggcagcttgctgctcagtggcgcagctaacgctttaagcattccgcctggggagtacggtcgcaagattaaaactcaaaggaattgacgggggcccgcacaagcggtggagcatgtggtttaattcgaagcaacgcgcagaaccttaccagcctttgacatgtcccgtgtgattgccagagatggctttcttcagttcggctggcgggaacacaggtgctgcatggctgtcgtcagctcgtgtcgtgagatgttgggttaagtcccgcaacgagcgcaaccctcgcccctagttgccatcattcagttgggcactctagggggactgccggtgataagccgagaggaaggtggggatgacgtcaagtcctcatggcccttacgggctgggctacacacgtgctacaatggcggtgacaatgggcagctaacccgcgagggtgcgctaatcccaaaaagccgtctcagttcggattgcactctgcaactcgagtgcatgaaggtggaatcgctagtaatcgtggatcagaacgccacggtgaatacgttcccgggccttgtacacaccgcccgtcacaccatgggagttggtcttacccgacggcgctgcgccaaccgcaaggaggcaggcgaccacggtagggtcagcgactggggtg

SEQ ID NO: 2127 - DNA, 1409 bp, Microvirga lotononidis
aacgaacgctggcggcaggcttaacacatgcaagtcgaacgggcccttcggggtcagtggcagacgggtgagtaacgcgtgggaacgtgcccttcagtttggaataacccagggaaacttgggctaataccggatacgcccgcaaggggaaagatttatcgctgaaggatcggcccgcgtctgattagctggttggtgaggtaatggctcaccaaggcgacgatcagtagctggtctgagaggatgatcagccacattgggactgagacacggcccaaactcctacgggaggcagcagtggggaatattggacaatgggcgcaagcctgatccagccatgccgcgtgagtgatgacggccttagggttgtaaagctctttcgcacgcgacgataatgacggtagcgtgagaagaagccccggctaacttcgtgccagcagccgcggtaatacgaagggggctagcgttgttcggaatcactgggcgtaaagggcgcgtaggcggctttgtaagtcgggggtgaaagcctgtggctcaaccacagaattgccttcgatactgcatggcttgagaccggaagaggttagtggaactgcgagtgtagaggtgaaattcgtagatattcgcaagaacaccagtggcgaaggcggctgactggtccggatctgacgctgaggcgcgaaagcgtggggagcaaacaggattagataccctggtagtccacgccgtaaacgatgaatgccagccgttggcgagcttgctcgtcagtggcgcagctaacgctttaagcattccgcctggggagtacggtcgcaagattaaaactcaaaggaattgacgggggcccgcacaagcggtggagcatgtggtttaattcgaagcaacgcgcagaaccttaccagcctttgacatgtcccgtatgaggagtggagacacgcctcttcagttcggctggcgggaacacaggtgctgcatggctgtcgtcagctcgtgtcgtgagatgttgggttaagtcccgcaacgagcgcaaccctcgcccctagttgccatcattgagttgggcactctagggggactgccggtgataagccgcgaggaaggtggggatgacgtcaagtcctcatggcccttacgggctgggctacacacgtgctacaatggcggtgacaaagggcagcgaacccgcgagggggagctaatcctcaaaagccgtctcagttcggattgcactctgcaactcgagtgcatgaaggcggaatcgctagtaatcgtggatcagaacgccacggtgaatacgttcccgggccttgtacacaccgcccgtcacaccatgggagttggtcttacccgacggcgctgcgccaaccgcaaggaggcaggcgaccacggtagggtcagcgactggggtg

SEQ ID NO: 2128 - DNA, 1409 bp, Microvirga ossetica
aacgaacgctggcggcaggcttaacacatgcaagtcgaacgcatccttcggggtgagtggcagacgggtgagtaacgcgtgggaacgtgcccttcagttcgggataacccagggaaacttgggctaataccggatacgtgcgagagcagaaagattgatcgctgaaggatcggcccgcgtctgattagctagttggtggggtaatggcccaccaaggcgacgatcagtagctggtctgagaggatgatcagccacattgggactgagacacggcccaaactcctacgggaggcagcagtggggaatattggacaatgggcgcaagcctgatccagccatgccgcgtgagtgatgaaggccttagggttgtaaagctctttcgtccgggacgataatgacggtaccggaagaagaagccccggctaacttcgtgccagcagccgcggtaatacgaagggggctagcgttgttcggaatcactgggcgtaaagggcgcgtaggcggctttataagtcgggggtgaaagcctgtggctcaaccacagaattgccttcgatactgtagagcttgagaccggaagaggtaagtggaactgcgagtgtagaggtgaaattcgtagatattcgcaagaacaccagtggcgaaggcggcttactggtccggttctgacgctgaggcgcgaaagcgtggggagcaaacaggattagataccctggtagtccacgccgtaaacgatgaatgccagccgttggcgagcttgctcgtcagtggcgcagctaacgctttaagcattccgcctggggagtacggtcgcaagattaaaactcaaaggaattgacgggggcccgcacaagcggtggagcatgtggtttaattcgaagcaacgcgcagaaccttaccagcctttgacatgtcccgtatgggtgccggagacggcatccttcagttcggctggcgggaacacaggtgctgcatggctgtcgtcagctcgtgtcgtgagatgttgggttaagtcccgcaacgagcgcaaccctcgcccctagttgccatcatttggttgggcactctagggggactgccggtgataagccgagaggaaggtggggatgacgtcaagtcctcatggcccttacgggctgggctacacacgtgctacaatggcggtgacaaagggcagcgaacccgcgagggggagctaatcctaaaaagccgtctcagttcggattgcactctgcaactcgagtgcatgaaggcggaatcgctagtaatcgtggatcagaacgccacggtgaatacgttcccgggccttgtacacaccgcccgtcacaccatgggagttggtcttacccgacggcgctgcgccaaccgcaagggggcaggcgaccacggtagggtcagcgactggggtg

SEQ ID NO: 2129 - DNA, 1409 bp, Microvirga vignae
aacgaacgctggcggcaggcttaacacatgcaagtcgaacgggcccttcggggtcagtggcagacgggtgagtaacgcgtgggaacgtgcccttcagttcggaataacccagggaaacttgggctaataccggatacgtccgtaaggagaaagatttatcgctgaaggatcggcccgcgtctgattagctggttggtagggtaatggcctaccaaggcgacgatcagtagctggtctgagaggatgatcagccacattgggactgagacacggcccaaactcctacgggaggcagcagtggggaatattggacaatgggcgcaagcctgatccagccatgccgcgtgagtgatgacggccttagggttgtaaagctctttcggcggggacgataatgacggtacccgcagaagaagccccggctaacttcgtgccagcagccgcggtaatacgaagggggctagcgttgttcggaatcactgggcgtaaagggcgcgtaggcggctttgtaagtcgggggtgaaagcctgtggctcaaccacagaattgccttcgatactgcatggcttgagaccggaagaggtaagtggaactgcgagtgtagaggtgaaattcgtagatattcgcaagaacaccagtggcgaaggcggcttactggtccggttctgacgctgaggcgcgaaagcgtggggagcaaacaggattagataccctggtagtccacgccgtaaacgatgaatgccagccgttggcgagcttgctcgtcagtggcgcagctaacgctttaagcattccgcctggggagtacggtcgcaagattaaaactcaaaggaattgacgggggcccgcacaagcggtggagcatgtggtttaattcgaagcaacgcgcagaaccttaccagcctttgacatgtcccgtgtggatcctggagacaggatccttcagttcggctggcgggaacacaggtgctgcatggctgtcgtcagctcgtgtcgtgagatgttgggttaagtcccgcaacgagcgcaaccctcgcccctagttgccatcattgagttgggcactctagggggactgccggtgataagccgcgaggaaggtggggatgacgtcaagtcctcatggcccttacgggctgggctacacacgtgctacaatggcggtgacaatgggcagccaacccgcgagggtgcgctaatcccaaaaagccgtctcagttcagattgcactctgcaactcgagtgcatgaaggcggaatcgctagtaatcgtggatcagaacgccacggtgaatacgttcccgggccttgtacacaccgcccgtcacaccatgggagttggtcttacccgacggcgctgcgccaaccgcaaggaggcaggcgaccacggtagggtcagcgactggggtg

SEQ ID NO: 2130 - DNA, 1460 bp, Microvirgula aerodenitrificans
attgaacgctggcggcatgctttacacatgcaagtcgaacggtaacaggggagcttgctcccgctgacgagtggcgaacgggtgagtaatgcatcggaacgtgccgaatagtgggggataacgcaccgaaaggtgtgctaataccgcatacgccctgagggggaaagtgggggaccgcaaggcctcacgctaatcgagcggccgatgtcggattagctagttggtggggtaaaggctcaccaaggcgacgatccgtagcgggtctgagaggatgatccgccacactgggactgagacacggcccagactcctacgggaggcagcagtggggaattttggacaatgggggaaaccctgatccagccatgccgcgtgtctgaagaaggccttcgggttgtaaaggacttttgtccgggaggaaaccctgatcgttaatagcggtcgggactgacagtaccggaagaataagcaccggctaactacgtgccagcagccgcggtaatacgtagggtgcaagcgttaatcggaattactgggcgtaaagcgtgcgcaggcggtgagataagtcagctgtgaaagccccgggctcaacctgggaactgcggccgaaactgtctcgctagagtacgtcagaggggggtggaattccacgtgtagcagtgaaatgcgtagagatgtggaggaacaccaatggcgaaggcagccccctgggatgatactgacgctcatgcacgaaagcgtggggagcaaacaggattagataccctggtagtccacgccctaaacgatgtcgactagccgttggagacctcggtctttggtggcgcagctaacgcgtgaagtcgaccgcctggggagtacggtcgcaagattaaaactcaaaggaattgacgggggcccgcacaagcggtggatgatgtggattaattcgatgcaacgcgaaaaaccttacctacccttgacatgccaggaatctcccggagatgggagagtgcccgaaagggaacctgggcacaggtgctgcatggctgtcgtcagctcgtgtcgtgagatgttgggttaagtcccgcaacgagcgcaacccttgccattagttgccatcattaagttgggcactttaatgggactgccggtgacaaaccggaggaaggtggggatgacgtcaagtcctcatggcccttatgggtagggcttcacacgtcatacaatggtcggtacagagggttgcgaagccgcgaggtgaagctaatcccagaaaaccgatcgtagtccggatcgcagtctgcaactcgactgcgtgaagtcggaatcgctagtaatcgcggatcagcatgccgcggtgaatacgttcccgggccttgtacacaccgcccgtcacaccatgggagtggaatccgccagaagtgggtagggtaaccgtaaggagcccgcttaccacggtaggtttcatgactggggtg

SEQ ID NO: 2131 - DNA, 1424 bp, Midichloria mitochondrii
agtgaacgctggcggcgtgcttaacacatgcaagtcgaacgggcaagagctgtagcgatacagagttctgctagtggcagacgggtgagtagtacatgggaatctaccttgcagtgcgaaataacagttggaagcaattgctaatgtcgcatatagccgagaggtgaaagatttatcgctgcaagacgagcccatgcaggattagctagttggtgaggtaatggctcaccaaggcaacgatctttagttggtctgagaggatgatcagccacactggaactgagacacggtccagactcctacgggaggcagcagtggggaatattggacaatgggcgcaagcctgatccagcgacgccgcgtgagtgaagaaggccttcgggttgtaaagctcttttagtggggaagataatgacggtacccacagaaaaagccccggctaacttcgtgccagcagccgcggtaatacgaagggggctagcgttactcggaattattgggcgtaaagcgtgcgtaggctgcttagtaagtcaaaagtgaaagccttgggctcaacctaagaattgcttttgaaactaccaagcttgagtactgtaggggatagcggaattcctagtgtaggggtgaaattcgtagatattaggaggaacaccggaggcgaaagcggttatctggacagttactgacgctgttgcacgaaagcgtggggagcaaacaggattagataccctggtagtccacgcagtaaacgatgagtgctagatgttgggatttaagtctcagtgtcgcagctaacgcattaagcactccgcctggggagtacggtcgcaagattaaaactcaaaggaattgacggggacccgcacaagcggtggaacatgtggtttaattcgatgctacgcgaaaaaccttaccaggccttgacatggtgatcatatggctgcgaaagcagttagtcggttcggccggatcgtcacaggtgttgcatggctgtcgtcagctcgtgtcgtgagatgttgggttaagtcccgcaacgagcgcaacccttatccttagttgccagcgagtgatgtcgggaactttaaggaaactgccggtgataagccggaggaaggtggggatgacgtcaagtcagcatggcccttacggcctgggctacacacgtgttacaatggtggtgacaaaaagaagcaatagggcgacctggagcagatcttataaaagctatctcagttcggattgcactctgcaactcgggtgcatgaagtcggaatcgctagtaatcgcagatcagcatgctgcggtgaatacgttcccgggtcttgtacacactgcccgtcacgccatgggagtcggttttgcctgaagtaggtgcgctaaccgcaaggaggcagcttaccacggtaaggttgacgactggggtg

SEQ ID NO: 2132 - DNA, 1494 bp, Mixta gaviniae
  misc_feature (66)..(66): n is a, c, g, or t
  misc_feature (432)..(432): n is a, c, g, or t
  misc_feature (435)..(435): n is a, c, g, or t
  misc_feature (446)..(446): n is a, c, g, or t
  misc_feature (994)..(994): n is a, c, g, or t
attgaacgctggcggcaggcctaacacatgcaagtcgaacggtaacaggaagcagcttgctgcttngctgacgagtggcggacgggtgagtaatgtctggggatctgcccgatggagggggataaccactggaaacggtggctaataccgcataacgtcgcaagaccaaagtgggggaccttcgggcctcacaccatcggatgaacccagatgggattagctagtaggtggggtaacggctcacctaggcgacgatccctagctggtctgagaggatgaccagccacactggaactgagacacggtccagactcctacgggaggcagcagtggggaatattgcacaatgggcgcaagcctgatgcagccatgccgcgtgtatgaagaaggccttcgggttgtaaagtactttcagcggggaggaagggatgncgnttaatacgcgncgtcattgacgttacccgcagaagaagcaccggctaactccgtgccagcagccgcggtaatacggagggtgcaagcgttaatcggaattactgggcgtaaagcgcacgcaggcggtctgttaagtcagatgtgaaatccccgggcttaacctgggaactgcatttgaaactggcaggcttgagtctcgtagaggggggtagaattccaggtgtagcggtgaaatgcgtagagatctggaggaataccggtggcgaaggcggccccctggacgaagactgacgctcaggtgcgaaagcgtggggagcaaacaggattagataccctggtagtccacgccgtaaacgatgtcgacttggaggctgttcccttgaggagtggcttccggagctaacgcgttaagtcgaccgcctggggagtacggccgcaaggttaaaactcaaatgaattgacgggggcccgcacaagcggtggagcatgtggtttaattcgatgcaacgcgaagaaccttacctggtcttgacatccacggaattcggcagagatgccntagtgccttcgggaaccgtgagacaggtgctgcatggctgtcgtcagctcgtgttgtgaaatgttgggttaagtcccgcaacgagcgcaacccttatcctttgttgccagcggctcggccgggaactcaaaggagactgccggtgataaaccggaggaaggtggggatgacgtcaagtcatcatggcccttacgaccagggctacacacgtgctacaatggcgcatacaaagagaagcgacctcgcgagagcaagcggacctcataaagtgcgtcgtagtccggattggagtctgcaactcgactccatgaagtcggaatcgctagtaatcgtggatcagaatgccacggtgaatacgttcccgggccttgtacacaccgcccgtcacaccatgggagtgggttgcaaaagaagtaggtagcttaaccttcgggagggcgcttaccactttgtgattcatgactggggtgaagtcgtaacaaggtaaccgtaggggaacc

SEQ ID NO: 2133 - DNA, 1494 bp, Mixta theicola
  misc_feature (430)..(430): n is a, c, g, or t
attgaacgctggcggcaggcctaacacatgcaagtcgaacggtaacaggaagcagcttgctgcttcgctgacgagtggcggacgggtgagtaatgtctggggatctgcccgatggagggggataaccactggaaacggtggctaataccgcataacgtcgcaagaccaaagtgggggaccttcgggcctcacaccatcggatgaacccagatgggattagctagtaggtggggtaacggctcacctaggcgacgatccctagctggtctgagaggatgaccagccacactggaactgagacacggtccagactcctacgggaggcagcagtggggaatattgcacaatgggcgcaagcctgatgcagccatgccgcgtgtatgaagaaggccttcgggttgtaaagtactttcagcggggaggaagggantaaggttaataaccttgttcattgacgttacccgcagaagaagcaccggctaactccgtgccagcagccgcggtaatacggagggtgcaagcgttaatcggaattactgggcgtaaagcgcacgcaggcggtctgtcaagtcggatgtgaaatccccgggctcaacccgggaactgcattcgaaactggcaggctagagtctcgtagaggggggtagaattccaggtgtagcggtgaaatgcgtagagatctggaggaataccggtggcgaaggcggccccctggacgaagactgacgctcaggtgcgaaagcgtggggagcaaacaggattagataccctggtagtccacgccgtaaacgatgtcgacttggaggctgtgagcttgactcgtggcttccggagctaacgcgttaagtcgaccgcctggggagtacggccgcaaggttaaaactcaaatgaattgacgggggcccgcacaagcggtggagcatgtggtttaattcgatgcaacgcgaagaaccttacctggtcttgacatccacggaattctgcagagatgcggaagtgccttcgggaaccgtgagacaggtgctgcatggctgtcgtcagctcgtgttgtgaaatgttgggttaagtcccgcaacgagcgcaacccttatcctttgttgccagcggttcggccgggaactcaaaggagactgccggtgataaaccggaggaaggtggggatgacgtcaagtcatcatggcccttacgaccagggctacacacgtgctacaatggcgcatacaaagagaagcgacctcgcgagagcaagcggacctcataaagtgcgtcgtagtccggattggagtctgcaactcgactccatgaagtcggaatcgctagtaatcgtggatcagaatgccacggtgaatacgttcccgggccttgtacacaccgcccgtcacaccatgggagtgggttgcaaaagaagtaggtagcttaaccttcgggagggcgcttaccactttgtgattcatgactggggtgaagtcgtaacaaggtaaccgtaggggaacc

SEQ ID NO: 2134 - DNA, 1463 bp, Mizugakiibacter sediminis
attgaacgctggcggcatgcctaacacatgcaagtcgaacggcagcgcggggggcaacccctggcggcgagtggcggacgggtgaggaatgcatcggaatctgcccggtggtgggggataacgtagggaaacttacgctaataccgcatacgaccgagaggtgaaagcgggggatcttcggacctcgcgccattggatgagccgatgccggattagctagttggtggggtaaaggcccaccaaggcgacgatccgtagctggtctgagaggatgatcagccacactgggactgagacacggcccagactcctacgggaggcagcagtggggaatattggacaatgggcgcaagcctgatccagcaatgccgcgtgtgtgaagaaggccttcgggttgtaaagcacttttatcgggagcgaaatcgtttcggctaatacccggagcgtctgacggtacccgatgaataagcaccggctaactccgtgccagcagccgcggtaatacggagggtgcaagcgttaatcggaattactgggcgtaaagcgtgcgtaggcggttcgttaagtccgttgtgaaatccccgagctcaacttgggaatggcagtggatactggcgggctggagtgcggtagaggagggtggaattcccggtgtagcggtgaaatgcgtagagatcgggaggaacatcagtggcgaaggcggccctctggaccagcactgacgctgaggcacgaaagcgtggggagcaaacaggattagataccctggtagtccacgccctaaacgatgcgaactggacgttggtcacactacggtgatcagtgtcgaagctaacgcgttaagttcgccgcctggggagtacggtcgcaagactgaaactcaaaggaattgacgggggcccgcacaagcggtggagtatgtggtttaattcgatgcaacgcgcagaaccttacctggccttgacatccagggaacttggcagagatgccttggtgccttcgggaaccctgagacaggtgctgcatggctgtcgtcagctcgtgtcgtgagatgttgggttaagtcccgcaacgagcgcaacccttgtccctagttgccagcgagtaaagtcgggaactctagggagactgccggtgacaaaccggaggaaggtggggatgacgtcaagtcatcatggcccttacggccagggctacacacgtactacaatggtcggtacagagggttgcgataccgcgaggtggagccaatcccagaaagccgatcccagtccggatcggagtctgcaactcgactccgtgaagtcggaatcgctagtaatcgcagatcagcaatgctgcggtgaatacgttcccgggccttgtacacaccgcccgtcacaccatgggagttggctgcaccagaagccggtagtctaaccgcaaggaggacgccgaccacggtgtggtcaatgactggggtg

SEQ ID NO: 2135 - DNA, 1453 bp, Mobilisporobacter senegalensis
gatgaacgctggcggcgtgcttaacacatgcaagtcgaacgaagcagttaagtggaggtcttcggaccaaagcttaattgacttagtggcggacgggtgagtaacgcgtgggtaacctgcctcatacagggggataacagttggaaacgactgctaagaccgcataagcctacagtttcgcatgagacagtaggaaaatatttataggtatgagatggacccgcgtctgattagctagttggtgaggtaacggcccaccaaggcgacgatcagtagccgacttgagagagtgatcggccacattgggactgagacacggcccaaactcctacgggaggcagcagtggggaatattgcacaatgggggaaaccctgatgcagcgacgccgcgtgagtgaagaagtatttcggtatgtaaagctctatcagcaaggaagataatgacggtacttgactaagaagccccggctaactacgtgccagcagccgcggtaatacgtagggggcaagcgttatccggatttactgggtgcaaagggagcgtacgtggtatggtaagacagatgtgaaagcccccggcttgggactgcatttgaaactgccaaactagagtgcaggagaggtaagtggaattcctagtgtagcggtgaaatgcgtacatattaggaggaacaccagtggcgaaggcggcttactggactgtaactgacactgaggctcgaaagcgtggggagcaaacaggattagataccctggtagtccacgccgtaaacgatgaatactaggtgtcgggggtcataagaccttcggtgccgcagcaaacgcaataagtattccacctggggagtacgttcgcaagaatgaaactcaaaggaattgacggggacccgcacaagcggtggagcatgtggtttaattcgaagcaacgcgaagaacctaaccaggtcttgacatccctctgaccggtccttaaccgggccttcccttcggggcagaggagacaggtggtgcatggttgtcgtcagctcgtgtcgtgagatgttgggttaagtcccgcaacgagcgcaacccttatctttagtagccagcattttggatgggcactctagagagactgccagggataacctggaggaaggtggggatgacgtcaaatcatcatgccccttatgatctgggctacacacgtgctacaatggtgataacaaagagaagcgaagtcgtgaggcgaagcaaatctcaaaaatgtcatctcagttcggattgtagtctgcaactcgactacatgaagctggaatcgctagtaatcgcgaatcagaatgtcgcggtgaatacgttcccgggtcttgtacacaccgcccgtcacaccatgggagtcggaaatgcccgaagtctgtgacccaacccttatcagtggatatgacgtcgtgataattgaatgaacgaagtgagt

SEQ ID NO: 2136 - DNA, 1354 bp, Moorea bouillonii
cggacgggtgagtaacgcgtgagaatctgccttagggtcggggacaaccaccggaaacagtggctaataccggatgtgccgagaggtgaaagatttattgccataagaggagctcgcgtctgattagctagttggtagggtaaaggcttaccaaggcaacgatcagtagctggtctgagaggatgagcagccacactgggactgagacacggcccagactcctacgggaggcagcagtggggaattttccgcaatgggcgaaagcctgacggagcaataccgcgtgagggaggaaggcttttgggttgtaaacctcttttatcagggaagaagaaagtgacggtacctgaggaaaaagcatcggctaactccgtgccagcagccgcggtaatacggaggatgcaagcgttatccggaattattgggcgtaaagcgtccgtaggtggtacctcaagtcggctgttaaagaccagggcttaactctgggcaggcagtggaaactgaggaactagagggcagtaggggtagagggaattcccggtgtagcggtgaaatgcgtagatttcgggaagaacatcggtggcgaaggcgctctactggactgaacctgacactgagggacgaaagctaggggagcgaatgggattagataccccagtagtcctagctgtaaacgatggatactaggtgtagcttgtatcgacccaagctgtgccgaagccaacgcgttaagtatcccgcctggggagtacgcacgcaagtgtgaaactcaaaggaattgacgggggcccgcacaagcggtggagtatgtggtttaattcgatgcaacgcgaagaaccttaccagggcttgacatgtcgcgaatcccggtgaaagctgggagtgccttcgggagcgcgaacacaggtggtgcatggctgtcgtcagctcgtgtcgtgagatgttgggttaagtcccgcaacgagcgcaaccctcgtttttagttgccagcacgtggtggtgggcactctagagagactgccggtgacaaaccggaggaaggtggggatgacgtcaagtcagcatgccccttacgccctgggctacacacgtactacaatggtcaggacaatgggcagccaactcgcaagggggagctaatctcatcaaacctggcctcagttcagattgccggctgcaactcgccggcatgaaggaggaatcgctagtaatcgccggtcagaatacggcggtgaatccgttcccgggccttgtacacaccgcccgtcacaccatggaagctggccacgcccgaagtcgttaccctaacccgtatgggagggggatgccgaaggcagggttggtgactggggtg

SEQ ID NO: 2137 - DNA, 1412 bp, Moorea producens
gatgaacgctggcggtatgcttaacacatgcaagtcgaacgccccttcgggggagtggcggacgggtgagtaacgcgtgagaatctgccttagggtcggggacaaccaccggaaacagtggctaataccggatgtgccgagaggtgaaagatttattgccataagaggagctcgcgtctgattagctagttggtagggtaaaggcctaccaaggcaacgatcagtagctggtctgagaggatgagcagccacactgggactgagacacggcccagactcctacgggaggcagcagtggggaattttccgcaatgggcgaaagcctgacggagcaataccgcgtgagggaggaaggcttttgggttgtaaacctcttttatcagggaagaagaaagtgacggtacctgaggaaaaagcatcggctaactccgtgccagcagccgcggtaatacggaggatgcaagcgttatccggaattattgggcgtaaagcgtccgtaggtggtacctcaagtcggctgttaaagaccagggcttaactctgggcaggcagtggaaactgaggaactagagggcagtaggggtagagggaattcccggtgtagcggtgaaatgcgtagatttcgggaagaacatcggtggcgaaggcgctctactggactgaacctgacactgagggacgaaagctaggggagcgaatgggattagataccccagtagtcctagctgtaaacgatggatactaggtgtagcttgtatcgacccaagctgtgccgaagccaacgcgttaagtatcccgcctggggagtacgcacgcaagtgtgaaactcaaaggaattgacgggggcccgcacaagcggtggagtatgtggtttaattcgatgcaacgcgaagaaccttaccagggcttgacatgtcgcgaatcccggtgaaagctgggagtgccttcgggagcgcgaacacaggtggtgcatggctgtcgtcagctcgtgtcgtgagatgttgggttaagtcccgcaacgagcgcaaccctcgtttttagttgccagcacgtgaaggtgggcactctagagagactgccggtgacaaaccggaggaaggtggggatgacgtcaagtcagcatgccccttacgccctgggctacacacgtactacaatggtcaggacaatgggcagccaactcgcaagggggagctaatctcatcaaacctggcctcagttcagattgccggctgcaactcgccggcatgaaggaggaatcgctagtaatcgccggtcagaatacggcggtgaatccgttcccgggccttgtacacaccgcccgtcacaccatggaagctggccacgcccgaagtcgttaccctaacccgtatgggagggggatgccgaaggcagggttggtgactggggtg

SEQ ID NO: 2138 - DNA, 1353 bp, Moorea producta
cggacgggtgagtaacgcgtgagaatctgccttcgggtcggggacaaccaccggaaacagtggctaataccggatgtgccgagaggtaaaagatttattgccagaagaggagctcgcgtctgattagctagttggtagggtaaaggcctaccaaggcaacgatcagtagctggtctgagaggatgagcagccacactgggactgagacacggcccagactcctacgggaggcagcagtggggaattttccgcaatgggcgaaagcctgacggagcaataccgcgtgagggaggaaggcttttgggttgtaaacctcttttatcagggaagaagaaagtgacggtacctgaggaaaaagcatcggctaactccgtgccagcagccgcggtaatacggaggatgcaagcgttatccggaattattgggcgtaaagggtccgtaggtggtacctcaagtcggctgttaaagaccagggcttaactctgggcaggcagtggaaactgaggaactagagggcagtaggggtagagggaattcccggtgtagcggtgaaatgcgtagatttcgggaagaacatcggtggcgaaggcgctctactggactgaacctgacactgagggacgaaagctaggggagcgaatgggattagataccccagtagtcctagctgtaaacgatggatactaggtgtagcttgtatcgacccaagctgtgccgaagccaacgcgttaagtatcccgcctggggagtacgcacgcaagtgtgaaactcaaaggaattgacgggggcccgcacaagcggtggagtatgtggtttaattcgatgcaacgcgaagaaccttaccagggcttgacatgtcgcgaatcccggtgaaagctgggagtgccttagggagcgcgaacacaggtggtgcatggctgtcgtcagctcgtgtcgtgagatgttgggttaagtcccgcaacgagcgcaaccctcgtttttagttgccagcacttcaggtgggcactctagagagactgccggtgacaaaccggaggaaggtggggatgacgtcaagtcagcatgccccttacgccctgggcgacacacgtactacaatggtcaggacaaagggcagccaactcgcaagggggagctaatctcatcaaacctggcctcagttcagattgccggctgcaactcgccggcatgaaggaggaatcgctagtaatcgccggtcagaatacggcggtgaatccgttcccgggccttgtacacaccgcccgtcacaccatggaagctggccacgcccgaagtcgttaccctaacccttaggggagggggatgccgaaggcagggttggtgactggggtg

SEQ ID NO: 2139 - DNA, 1482 bp, Moorella glycerini
gacaaacgctggcggcgtgcctaacacatgcaagtcgagcggtctttgacccggcggaatcttcggaggaagcgggttaaagatagcggcggacgggtgagtaacgcgtgggtaatctacccttcagaccgggataacaccgggaaactggtgctaataccggatacgttctgctggaggcatctccggtagaagaaaagggaacgtgagtgaccgctgaaggatgagcccgcgtcccattagctagttggtgaggtaacggctcaccaaggcgacgatgggtagccggcctgagagggtggccggccacactgggactgagacacggcccagactcctacgggaggcagcagtggggaatcttgcgcaatgggcgaaagcctgacgcagcgacgccgcgtgagcgatgaaggccttcgggttgtaaagctctgtcatcagggacgaagtctcgataagaggtgacggtacctgaggaggaagccccggctaactacgtgccagcagccgcggtaaaacgtagggggcgagcgttgtccggaattactgggcgtaaagggcgtgtaggcggcccggcaagtcagatgtgaaaaacccaggctcaacctggggggtgcatttgaaactggcgggcttgagggcaggagaggagagtggaattcccggtgtagcggtgaaatgcgtagatatcgggaggaacaccagtggcgaaggcgactctctggactgaccctgacgctgaggcgcgaaagcgtggggagcaaacaggattagataccctggtagtccacgccgtaaacgatgggtactaggtgttggaggtatcgacccctccagtgccgcagttaacacaataagtaccccgcctggggagtacggccgcaaggctgaaactcaaaggaattgacgggggcccgcacaagcggtggagcatgtggtttaattcgacgcaacgcgaagaaccttaccggggtttgacatcccgcgaacctggtggaaacaccggggtgccggttttaccggagcgcggagacaggtggtgcatggttgtcgtcagctcgtgtcgtgagatgttgggttaagtcccgcaacgagcgcaacccttacctttagttgccagcacgtgaaggtgggcactctaaagggactgccggtgacaaaccggaggaaggtggggatgacgtcaaatcatcatgccccttatatcccgggctacacacgtgctacaatggcctgtacaaaggggggcgaacccgcgagggggagcaaatcccaaaaagcaggtctcagttcggattgcaggctgcaactcgcctgcatgaagtcggaatcgctagtaatcgcggatcagcatgccgcggtgaatacgttcccgggccttgtacacaccgcccgtcacaccacgaaagctggcaacacccgaagccggtgacccaacccgcgagggagggaccgtccaaggtggggctggtgattggggtg

SEQ ID NO: 2140 - DNA, 1450 bp, Moraxella atlantae
attgaacgctggcggcaggcttaacacatgcaagtcgaacgatggaacctagcttgctaggggaaatagtggcgaacgggtgagtaagatttaggaaactgccttatagagggggatagctcggggaaactcgaattaataccgcatacgtcctacgggagaaaggagcttttgggttctgctataagatgtgcctaaattagattagctagatggtgaggtaaaggctcaccatggcgacgatctataactggtcttagaggatgatcagtcacaccggaactgagacacggtccggactcctacgggaggcagcagtggggaatattggacaatgggggaaaccctgatccagccatgccgcgtgtgtgaagaaggtcataagattgtaaagcactttaagcagggaggaagagccagtggagaaacacactggtggtgacgttacctgcagaataagcaccggctaactctgtgccagcagccgcggtaatacagagggtgcgagcgttaatcggaattactgggcgtaaagcgggtgcaggtggtgcactaagtcatatgtgaaagccctgggcttaacctaggaacagcatatgatactggtgaactagagtatatgagagggaagtagaattccaggtgtagcggtgaaatgcgtagagatctggaggaataccgatggcgaaggcagctttctggcacaatactgacactcagacccgaaagcgtgggtagcaaacaggattagataccctggtagtccacgccgtaaacgatgtctactagccgttggggctcatgaagccttagtggcgcagctaacgcgataagtagaccgcctggggagtacggccgcaaggttaaaactcaaatgaattgacgggggcccgcacaagcggtggagcatgtggtttaattcgatgcaacgcgaagaaccttacctggtcttgacatagtgagaatcctacagagatgtgggagtgccttcgggaattcacatacaggtgctgcatggctgtcgtcagctcgtgtcgtgagatgttgggttaagtcccgcaacgagcgcaacccttatccttacttgctagcaggtgaagctgagaactgtaaggagactgccagtgacaaactggaggaaggcggggacgacgtcaagtcatcatggcccttacgaccagggctacacacgtgctacaatggtaggtacagagggcagctacacagcgatgtgacgcgaatctcaaaaagcctatcgtagtccggattggagtctgcaactcgactccatgaagtcggaatcgctagtaatcgcagatcagaatgctgcggtgaatacgttcccgggccttgtacacaccgcccgtcacaccatgggagtctattgcaccagaagtaggtagcctaacgaaagggggcgcttaccacggtgtggtcgatgactggggtg

SEQ ID NO: 2141 - DNA, 1455 bp, Moraxella boevrei
attgaacgctggcggcaggcttaacacatgcaagtcgaacgatgagtatctagcttgctagatatgattagtggcgaacgggtgagtaatatttaggaatctgcctcataatgggggatagcttggggaaacccaaattaataccgcatacgtcctacgggggaaagatggcatttatgctgttgttatgagatgagcctaaattggattagctagttggtggggtaagggcttaccaaggcgacgatccatagctggtctgagaggatgatcagccacactgggactgagacacggcccagactcctacgggaggcagcagtggggaatattggacaatgggcgaaagcctgatccagccatgccgcgtgtgtgaagaaggccttttggttgtaaagcactttaagtagggaggaagagttatcaattaatacctgatgatgatgacgttacctacagaataagcaccggctaactctgtgccagcagccgcggtaatacagagggtgcgagcgttaatcggaattactgggcgtaaagcgagcgtaggtggcttgataagtcacatgtgaaatccctgggcttaacctaggaactgcatgtgatactgttaagctagagtagatgagaggggggtagaattccaggtgtagcggtgaaatgcgtagagatctggaggaataccgatggcgaaggcagccccctggcaccatactgacactgaggttcgaaagcgtgggtagcaaacaggattagataccctggtagtccacgccgtaaacgatgtctactagccgttgggtgacttgattacttagtggcgcagttaacgcgataagtagaccgcctggggagtacggccgcaaggttaaaactcaaatgaattgacgggggcccgcacaagcggtggagcatgtggtttaattcgatgcaacgcgaagaaccttacctggtcttgacatacagagaatttgctagagatagcttagtgcctttgggaactctgatacaggtgctgcatggctgtcgtcagctcgtgtcgtgagatgttgggttaagtcccgcaacgagcgcaacccttttccttacttgccagcgggtaaagccgggaactttaaggatactgccagtgacaaactggaggaaggcggggacgacgtcaagtcatcatggcccttacgaccagggctacacacgtgctacaatggtaggtacagagggtagctacacagcgatgtgatgccaatctcaaaaagcctatcgtagtccggattggagtctgcaactcgactccatgaagtcggaatcgctagtaatcgcggatcagaaagccgcggtgaatacgttcccgggccttgtacacaccgcccgtcacaccatgggagtctattgcaccagaagtagttagcctaacgtaagggggcgattaccacggtgtggtcgatgactggggtg

SEQ ID NO: 2142 - DNA, 1453 bp, Moraxella bovis
attgaacgctggcggcaggcttaacacatgcaagtcgaacgatgactatctagcttgctagatatgattagtggcgaacgggtgagtaatgcttaggaatctgcctagtagtgggggataactatccgaaaggatagctaataccgcatacgacctacgggtgaaagggggcttttagctctcgctattagatgagcctaagtcggattagctagttggtggggtaaaggcctaccaaggcgacgatctgtagctggtctgagaggatgatcagccacactgggactgagacacggcccagactcctacgggaggcagcagtggggaatattggacaatgggcgaaagcctgatccagccatgccgcgtgtgtgaagaaggccttttggttgtaaagcactttaagtagggaggaaaagcttgtggttaatacccacaagccctgacgttacctacagaataagcaccggctaactctgtgccagcagccgcggtaatacagagggtgcaagcgttaatcggaattactgggcgtaaagcgagcgtaggtggtcatttaagtcagatgtgaaagccccgggcttaacctgggaactgcatctgatactggatgactagagtaggtgagagggaagtagaattccaggtgtagcggtgaaatgcgtagagatctggaggaataccgatggcgaaggcagcttcctggcatcatactgacactgaggttcgaaagcgtgggtagcaaacaggattagataccctggtagtccacgccgtaaacgatgtctaccagtcgttgggtctcttgaagacttagtgacgcagttaacgcaataagtagaccgcctggggagtacggccgcaaggttaaaactcaaatgaattgacgggggcccgcacaagcggtggagcatgtggtttaattcgatgcaacgcgaagaaccttacctggtcttgacataccaagaattcgctagagatagcttagtgccttcgggagcttggatacaggtgctgcatggctgtcgtcagctcgtgtcgtgagatgttgggttaagtcccgcaacgagcgcaacccttttccttagttaccagcgactcggtcgggaactctaaggatactgccagtgacaaactggaggaaggcggggacgacgtcaagtcatcatggcccttacgaccagggctacacacgtgctacaatggttggtacaaagggttgctacacagcgatgtgatgctaatctcaaaaagccaatcgtagtccggattggagtctgcaactcgactccatgaagtcggaatcgctagtaatcgcagatcagaatgctgcggtgaatacgttcccgggccttgtacacaccgcccgtcacaccatgggagttgatctcaccagaagtggttagcctaacgcaagagggcgatcaccacggtggggtcgatgactggggtg

SEQ ID NO: 2143 - DNA, 1453 bp, Moraxella bovoculi
attgaacgctggcggcaggcttaacacatgcaagtcgaacgatgactatctagcttgctagatatgattagtggcgaacgggtgagtaatgcttaggaatctgcctattagtgggggataaccatccgaaaggatggctaataccgcatacgtcttacgagagaaagggggcttttagctctcgctaatagatgagcctaagtcggattagctagttggtggggtaaaggcctaccaaggcgacgatctgtagctggtctgagaggatgatcagccacactgggactgagacacggcccagactcctacgggaggcagcagtggggaatattggacaatgggcgaaagcctgatccagccatgccgcgtgtgtgaagaaggccttttggttgtaaagcactttaagtggggaggaaaagcttgtggttaatacccacaagccctgacgttacctacagaataagcaccggctaactctgtgccagcagccgcggtaatacagagggtgcaagcgttaatcggaattactgggcgtaaagcgagcgtaggtggtcatttaagtcagatgtgaaagccccgggcttaacctgggaactgcatctgatactgggtgactagagtaggtgagagggaagtagaattccaggtgtagcggtgaaatgcgtagagatctggaggaataccgatggcgaaggcagcttcctggcatcatactgacactgaggttcgaaagcgtgggtagcaaacaggattagataccctggtagtccacgccgtaaacgatgtctaccagtcgttgggtcttttaaagacttagtgacgcagttaacgcaataagtagaccgcctggggagtacggccgcaaggttaaaactcaaatgaattgacgggggcccgcacaagcggtggagcatgtggtttaattcgatgcaacgcgaagaaccttacctggtcttgacatagtaggaatcctgcagagatgcgggagtgccttcgggaatctacatacaggtgctgcatggctgtcgtcagctcgtgtcgtgagatgttgggttaagtcccgcaacgagcgcaacccttttccttagttaccagcgactcggtcgggaactctaaggatactgccagtgacaaactggaggaaggcggggacgacgtcaagtcatcatggcccttacgaccagggctacacacgtgctacaatggttggtacaaagggttgctacacagcgatgtgatgctaatctcaaaaagccaatcgtagtccggattagagtctgcaactcgactctatgaagtcggaatcgctagtaatcgcagatcagaatgctgcggtgaatacgttcccgggccttgtacacaccgcccgtcacaccatgggagttgatctcaccagaagtgggtagcctaacgcaagagggcgctcaccacggtggggtcgatgactggggtg

SEQ ID NO: 2144 - DNA, 1451 bp, Moraxella canis
attgaacgctggcggcaggcttaacacatgcaagtcgaacgaggttagaaagcttgcttttgatacctagtggcggacgggtgagtaatgcttaggaatctgcctagtagtgggggataacttggggaaactcaagctaataccgcatacgacctacgggtgaaagggggcgcaagctctcgctattagatgagcctaagtcggattagctagttggtggggtaaaggcctaccaaggcgacgatctgtagctggtctgagaggatgatcagccacactgggactgagacacggcccagactcctacgggaggcagcagtggggaatattggacaatgggcgaaagcctgatccagccatgccgcgtgtgtgaagaaggccttttggttgtaaagcactttaagtggggaggaaaagttaatggttaatacccattagccctgacgttacccacagaataagcaccggctaactctgtgccagcagccgcggtaatacagagggtgcaagcgttaatcggaattactgggcgtaaagcgcgcgtaggtggttacttaagtcagatgtgaaagccccgggcttaacctgggaactgcatctgatactgggtgactagagtaggtgagaggggagtagaattccaggtgtagcggtgaaatgcgtagagatctggaggaataccgatggcgaaggcagctccctggcatcatactgacactgaggtgcgaaagcgtgggtagcaaacaggattagataccctggtagtccacgccgtaaacgatgtctaccagtcgttgggtcttttaaagacttagtgacgcagttaacgcaataagtagaccgcctggggagtacggccgcaaggttaaaactcaaatgaattgacgggggcccgcacaagcggtggagcatgtggtttaattcgatgcaacgcgaagaaccttacctggtcttgacatagtaggaatcctgcagagatgcgggagtgccttcgggaatctacatacaggtgctgcatggctgtcgtcagctcgtgtcgtgagatgttgggttaagtcccgcaacgagcgcaacccttttccttagttaccagcacctcgggtgggaactctaaggatactgccagtgacaaactggaggaaggcggggacgacgtcaagtcatcatggcccttacgaccagggctacacacgtgctacaatggtaggtacaaagggttgctacacagcgatgtgatgccaatctcaaaaagcctatcgtagtccggattggagtctgcaactcgactccatgaagtcggaatcgctagtaatcgcagatcagaatgctgcggtgaatacgttcccgggccttgtacacaccgcccgtcacaccatgggagttgatctcaccagaagtgggtagcctaacgcaagagggcgctcaccacggtggggtcgatgactggggtg

SEQ ID NO: 2145 - DNA, 1549 bp, Moraxella caprae
attgaacgctggcggcaggcttaacacatgcaagtcgaacgatgaagtctagcttgctagacggattagtggcgaacgggtgagtaatgcttaggaatctgcctattagtgggggataacgtagggaaacttacgctaataccgcatacgtcttacgagagaaaggggcccgaccactaaatttaattttaagtaattgtcttttaaataaatacaatttgtgcttattaagcaacacctaacttaattaggatgagttaaatttagtggtcgggtctcgctaatagatgagcctaagtcggattagctagttggtggggtaaaggcctaccaaggcgacgatctgtagctggtctgagaggatgatcagccacactgggactgagacacggcccagactcctacgggaggcagcagtggggaatattggacaatgggcgaaagcctgatccagccatgccgcgtgtgtgaagaaggccttttggttgtaaagcactttaagtggggaggaaaagcttgtggttaatacccacaagccctgacgttacccacagaataagcaccggctaactctgtgccagcagccgcggtaatacagagggtgcaagcgttaatcggaattactgggcgtaaagcgagcgtaggtggtcatttaagtcagatgtgaaagccccgggcttaacctgggaactgcatctgatactgggtgactagagtaggtgagagggaagtagaattccaggtgtagcggtgaaatgcgtagagatctggaggaataccgatggcgaaggcagcttcctggcatcatactgacactgaggttcgaaagcgtgggtagcaaacaggattagataccctggtagtccacgccgtaaacgatgtctaccagtcgttgggtctcttgaagacttagtgacgcagttaacgcaataagtagaccgcctggggagtacggccgcaaggttaaaactcaaatgaattgacgggggcccgcacaagcggtggagcatgtggtttaattcgatgcaacgcgaagaaccttacctggtcttgacatacagagaattcgctagagatagcttagtgccttcgggaactctgatacaggtgctgcatggctgtcgtcagctcgtgtcgtgagatgttgggttaagtcccgcaacgagcgcaacccttttccttagttaccagcgactcggtcgggaactctaaggatactgccagtgacaaactggaggaaggcggggacgacgtcaagtcatcatggcccttacgaccagggctacacacgtgctacaatggttggtacaaagggttgctacacagcgatgtgatgctaatctcaaaaagccaatcgtagtccggattggagtctgcaactcgactccatgaagtcggaatcgctagtaatcgcagatcagaatgctgcggtgaatacgttcccgggccttgtacacaccgcccgtcacaccatgggagttgatctcaccagaagtggttagcctaacgcaagagggcgatcaccacggtggggtcgatgactggggtg

SEQ ID NO: 2146 - DNA, 1452 bp, Moraxella catarrhalis
attgaacgctggcggcaggcttaacacatgcaagtcgaacgaagttaggaagcttgcttctgatacttagtggcggacgggtgagtaatgcttaggaatctgcctagtagtgggggataacttggggaaacccaagctaataccgcatacgacctacgggtgaaagggggcttttagctctcgctattagatgagcctaagtcggattagctggttggtggggtaaaggcctaccaaggcgacgatctgtagctggtctgagaggatgatcagccacactgggactgagacacggcccagactcctacgggaggcagcagtggggaatattggacaatgggcgaaagcctgatccagccatgccgcgtgtgtgaagaaggccttttggttgtaaagcactttaagtggggaggaaaagcttatggttaatacccataagccctgacgttacccacagaataagcaccggctaactctgtgccagcagccgcggtaatacagagggtgcaagcgttaatcggaattactgggcgtaaagcgcgcgtaggtggttatttaagtcagatgtgaaagccccgggcttaacctgggaactgcatctgatactggataactagagtaggtgagaggggagtagaattccaggtgtagcggtgaaatgcgtagagatctggaggaataccgatggcgaaggcagctccctggcatcatactgacactgaggtgcgaaagcgtgggtagcaaacaggattagataccctggtagtccacgccgtaaacgatgtctaccagtcgttgggtcttttaaagacttagtgacgcagttaacgcaataagtagaccgcctggggagtacggccgcaaggttaaaactcaaatgaattgacgggggcccgcacaagcggtggagcatgtggtttaattcgatgcaacgcgaagaaccttacctggtcttgacatagtgagaatcttgcagagatgcgagagtgccttcgggaattcacatacaggtgctgcatggctgtcgtcagctcgtgtcgtgagatgttgggttaagtcccgcaacgagcgcaacccttttccttagttaccagcgactcggtcgggaactctaaggatactgccagtgacaaactggaggaaggcggggacgacgtcaagtcatcatggcccttacgaccagggctacacacgtgctacaatggttggtacaaagggttgctacacagcgatgtgatgctaatctcaaaaagccaatcgtagtccggattggagtctgcaactcgactccatgaagtcggaatcgctagtaatcgcagatcagaatgctgcggtgaatacgttcccgggccttgtacacaccgcccgtcacaccatgggagttgatctcaccagaagtggttagcctaacgcaagagggcgatcaccacggtggggtcgatgactggggtg

SEQ ID NO: 2147 - DNA, 1452 bp, Moraxella caviae
attgaacgctggcggcaggcttaacacatgcaagtcgaacgaggttagggagcttgctcctgatacctagtggcgaacgggtgagtaatgcttaggaatctgcctagtagtgggggataactacccgaaagggtagctaataccgcatacgacctacgggtgaaagggggcttttagctctcgctattagatgagcctaagtcggattagctagttggtggggtaaaggcctaccaaggcgacgatctgtagctggtctgagaggatgatcagccacactgggactgagacacggcccagactcctacgggaggcagcagtggggaatattggacaatgggcgaaagcctgatccagccatgccgcgtgtgtgaagaaggccttttggttgtaaagcactttaagtagggaggaaaagctaatggttaatacccattagccctgacgttacctacagaataagcaccggctaactctgtgccagcagccgcggtaatacagagggtgcgagcgttaatcggaattactgggcgtaaagcgagcgtaggtggttatttaagtcagatgtgaaagccccgggcttaacctgggaactgcatctgatactggataactagagtaggtgagagggaagtagaattccaggtgtagcggtgaaatgcgtagagatctggaggaataccgatggcgaaggcagcttcctggcatcatactgacactgaggttcgaaagcgtgggtagcaaacaggattagataccctggtagtccacgccgtaaacgatgtctaccagtcgttgggtctcttgaagacttagtgacgcagttaacgcaataagtagaccgcctggggagtacggccgcaaggttaaaactcaaatgaattgacgggggcccgcacaagcggtggagcatgtggtttaattcgatgcaacgcgaagaaccttacctggtcttgacatagtaggaatcttgcagagatgcgagagtgccttcgggaatctacatacaggtgctgcatggctgtcgtcagctcgtgtcgtgagatgttgggttaagtcccgcaacgagcgcaacccttttccttagttaccagcgattcggtcgggaactctaaggatactgccagtgacaaactggaggaaggcggggacgacgtcaagtcatcatggcccttacgaccagggctacacacgtgctacaatggttggtacaaagggttgctacctagcgataggatgctaatctcaaaaagccaatcgtagtccggattggagtctgcaactcgactccatgaagtcggaatcgctagtaatcgcagatcagaatgctgcggtgaatacgttcccgggccttgtacacaccgcccgtcacaccatgggagttgatctcaccagaagtggttagcctaacgcaagagggcgatcaccacggtggggtcgatgactggggtg

SEQ ID NO: 2148 - DNA, 1452 bp, Moraxella cuniculi
attgaacgctggcggcaggcttaacacatgcaagtcgaacgaagttagggagcttgctcctgatacttagtggcggacgggtgagtaatgcttaggaatctgcctagtagtgggggataactatccgaaaggatagctaataccgcatacgacctacgggtgaaagggggcgtaagctctcgctattagatgagcctaagtcggattagctagttggtggggtaaaggcctaccaaggcgacgatctgtagctggtctgagaggatgatcagccacactgggactgagacacggcccagactcctacgggaggcagcagtggggaatattggacaatgggcgaaagcctgatccagccatgccgcgtgtgtgaagaaggccttttggttgtaaagcactttaagtggggaggaaaagctaatagctaatacctattagccctgacgttacccacagaataagcaccggctaactctgtgccagcagccgcggtaatacagagggtgcaagcgttaatcggaattactgggcgtaaagcgcgcgtaggtggttacttaagtcagatgtgaaagccccgggcttaacctgggaactgcatctgatactgggtaactagagtaggtgagagggaagtagaattccaggtgtagcggtgaaatgcgtagagatctggaggaataccgatggcgaaggcagcttcctggcatcatactgacactgaggtgcgaaagcgtgggtagcaaacaggattagataccctggtagtccacgccgtaaacgatgtctaccagtcgttgggtctcttgaagacttagtgacgcagttaacgcaataagtagaccgcctggggagtacggccgcaaggttaaaactcaaatgaattgacgggggcccgcacaagcggtggagcatgtggtttaattcgatgcaacgcgaagaaccttacctggtcttgacatacacagaattcgctagagatagcttagtgccttcgggaactgtgatacaggtgctgcatggctgtcgtcagctcgtgtcgtgagatgttgggttaagtcccgcaacgagcgcaacccttttccttagttaccagcactttaaggtgggaactctaaggatactgccagtgacaaactggaggaaggcggggacgacgtcaagtcatcatggcccttacgaccagggctacacacgtgctacaatggttggtacaaagggttgctacacagcgatgtgatgctaatctcaaaaagccaatcgtagtccggattggagtctgcaactcgactccatgaagtcggaatcgctagtaatcgcagatcagaatgctgcggtgaatacgttcccgggccttgtacacaccgcccgtcacaccatgggagttgatctcaccagaagtggttagcctaacgcaagagggcgatcaccacggtggggtcgatgactggggtg

SEQ ID NO: 2149 - DNA, 1451 bp, Moraxella equi
attgaacgctggcggcaggcttaacacatgcaagtcgaacgatgaagtctagcttgctagacggattagtggcgaacgggtgagtaatgcttaggaatctgcctattagtgggggataacgtagggaaacttacgctaataccgcatacgtcttacgagagaaagggggcttttagctctcgctaatagatgagtctaagtcggattagctagttggtggggtaaaggcctaccaaggcgacgatctgtagctggtctgagaggatgatcagccacactgggactgagacacggcccagactcctacgggaggcagcagtggggaatattggacaatgggcgaaagcctgatccagccatgccgcgtgtgtgaagaaggccttttggttgtaaagcactttaagtggggaggaaaagcttgtggttaatacccacaagccctgacgttacccacagaataagcaccggctaactctgtgccagcagccgcggtaatacagagggtgcaagcgttaatcggaattactgggcgtaaagcgagcgtaggtggtcatttaagtcagatgtgaaagccccgggcttaacctgggaactgcatctgatactgggtgactagagtaggtgagagggaagtagaattccaggtgtagcggtgaaatgcgtagagatctggaggaataccgatggcgaaggcagcttcctggcatcatactgacactgaggttcgaaagcgtgggtagcaaacaggattagataccctggtagtccacgccgtaaacgatgtctaccagtcgttgggtctcttgaagacttagtgacgcagttaacgcaataagtagaccgcctggggagtacggccgcaaggttaaaactcaaatgaattgacgggggcccgcacaagcggtggagcatgtggtttaattcgatgcaacgcgaagaaccttacctggtcttgacatagtgagaatcctgcagagatgcgggagtgccttcgggaattcacatacaggtgctgcatggctgtcgtcagctcgtgtcgtgagatgttgggttaagtcccgcaacgagcgcaacccttttccttagttaccagcacttcgggtgggaactctaaggatactgccagtgacaaactggaggaaggcggggacgacgtcaagtcatcatggcccttacgaccagggctacacacgtgctacaatggttggtacaaagggttgctacacagcgatgtgatgctaatctcaaaaagccaatcgtagtccggattggagtctgcaactcgactccatgaagtcggaatcgctagtaatcgcagatcagaatgctgcggtgaatacgttcccgggccttgtacacaccgcccgtcacaccatgggagttgatctcaccagaagtggttagcctaacgcgagagggcgatcaccacggtggggtcgatgactggggtg

SEQ ID NO: 2150 - DNA, 1452 bp, Moraxella lacunata
attgaacgctggcggcaggcttaacacatgcaagtcgaacgatgaagtctagcttgctagacggattagtggcgaacgggtgagtaatgcttaggaatctgcctattagtgggggataacgtagggaaacttacgctaataccgcatacgtcttacgagagaaagggggcttttagctctcgctaatagatgagcctaagtcggattagctagttggtggggtaaaggcctaccaaggcgacgatctgtagctggtctgagaggatgatcagccacactgggactgagacacggcccagactcctacgggaggcagcagtggggaatattggacaatgggcgaaagcctgatccagccatgccgcgtgtgtgaagaaggccttttggttgtaaagcactttaagtggggaggaaaagcttgtggttaatacctacaagccctgacgttacccacagaataagcaccggctaactctgtgccagcagccgcggtaatacagagggtgcaagcgttaatcggaattactgggcgtaaagcgagcgtaggtggtcatttaagtcagatgtgaaagccccgggcttaacctgggaactgcatctgatactgggtgactagagtaggtgagagggaagtagaattccaggtgtagcggtgaaatgcgtagagatctggaggaataccgatggcgaaggcagcttcctggcatcatactgacactgaggttcgaaagcgtgggtagcaaacaggattagataccctggtagtccacgccgtaaacgatgtctaccagtcgttgggtctcttgaagacttagtgacgcagttaacgcaataagtagaccgcctggggagtacggccgcaaggttaaaactcaaatgaattgacgggggcccgcacaagcggtggagcatgtggtttaattcgatgcaacgcgaagaaccttacctggtcttgacatagtgagaatcctgcagagatgcgggagtgccttcgggaattcacatacaggtgctgcatggctgtcgtcagctcgtgtcgtgagatgttgggttaagtcccgcaacgagcgcaacccttttccttagttaccagcgatttaagtcgggaactctaaggatactgccagtgacaaactggaggaaggcggggacgacgtcaagtcatcatggcccttacgaccagggctacacacgtgctacaatggttggtacaaagggttgctacacagcgatgtgatgctaatctcaaaaagccaatcgtagtccggattggagtctgcaactcgactccatgaagtcggaatcgctagtaatcgcagatcagaatgctgcggtgaatacgttcccgggccttgtacacaccgcccgtcacaccatgggagttgatctcaccagaagtggttagcctaacgcaagagggcgatcaccacggtggggtcgatgactggggtg

SEQ ID NO: 2151 - DNA, 1450 bp, Moraxella lincolnii
attgaacgctggcggcaggcttaacacatgcaagtcgaacgaagaggtctagcttgctagactgattagtggcgaacgggtgagtaacatttaggaatctaccttatagagggggatagctcggggaaactcgaattaataccgcatacgacctacgggtgaaagggggcgcaagctcttgctataagatgagcctaaaccagattagctagttggtggggtaaaggcctaccaaggcgacgatctgtagctggtctgagaggatgatcagccacactgggactgagacacggcccagactcctacgggaggcagcagtggggaatattggacaatgggcgaaagcctgatccagccatgccgcgtgtgtgaagaaggccttatggttgtaaagcactttaagtggggaggaaaagcttatggataacacccataggttctgacgttacccacagaataagcaccggctaactctgtgccagcagccgcggtaatacagagggtgcaagcgttaatcggaattactgggcgtaaagcgagcgtaggtggtttattaagtcagatgtgaaatccctgggcttaacctaggaactgcatctgatactgataaactagagtaggtgagaggaaagtagaattccaggtgtagcggtgaaatgcgtagagatctggaggaataccgatggcgaaggcagctttctggcatcatactgacactgaggttcgaaagcgtgggtagcaaacaggattagataccctggtagtccacgccgtaaacgatgtctaccagtcgttgggtcttttaaaggcttagtgacgcagttaacgcgataagtagaccgcctggggagtacggccgcaaggttaaaactcaaatgaattgacgggggcccgcacaagcggtggagcatgtggtttaattcgatgcaacgcgaagaaccttacctggtcttgacatagtgagaatcttgcagagatgcgagagtgcctttgggaattcacatacaggtgctgcatggctgtcgtcagctcgtgtcgtgagatgttgggttaagtcccgcaacgagcgcaacccttttccttagttaccagcgacttggtcggggactttaaggacactgccagtgacaaactggaggaaggcggggacgacgtcaagtcatcatggcccttacgaccagggctacacacgtgctacaatggtaggtacagagggcagctacacggcgacgtgatgccaatctcaaaaagcctatcttagtccagattggagtctgcaactcgactccatgaagtcggaatcgctagtaatcgcggatcagaatgccgcggtgaatacgttcccgggccttgtacacaccgcccgtcacaccatgggagttgattgcaccagaagtggttagcctaacttaggagggcgatcaccacggtgtggttaatgactggggtg

SEQ ID NO: 2152 - DNA, 1443 bp, Moraxella nonliquefaciens
ctggcggcaggcttaacacatgcaagtcgaacgatgaagtctagcttgctagacggattagtggcgaacgggtgagtaatgcttaggaatctgcctattagtgggggataacgtagggaaacttacgctaataccgcatacgacctacgggtgaaagggggcttttagctctcgctaatagatgagcctaagtcggattagctagttggtggggtaaaggcctaccaaggcgacgatctgtagctggtctgagaggatgatcagccacactgggactgagacacggcccagactcctacgggaggcagcagtggggaatattggacaatgggcgaaagcctgatccagccatgccgcgtgtgtgaagaaggccttttggttgtaaagcactttaagtggggaggaaaagcttatggttaatacccataagccctgacgttacccacagaataagcaccggctaactctgtgccagcagccgcggtaatacagagggtgcaagcgttaatcggaattactgggcgtaaagcgcgcgtaggtggttatttaagtcagatgtgaaagccccgggcttaacctgggaactgcatctgatactggataactagagtaggtgagaggggagtagaattccaggtgtagcggtgaaatgcgtagagatctggaggaataccgatggcgaaggcagctccctggcatcatactgacactgaggtgcgaaagcgtgggtagcaaacaggattagataccctggtagtccacgccgtaaacgatgtctaccagtcgttgggtcttttaaagacttagtgacgcagttaacgcaataagtagaccgcctggggagtacggccgcaaggttaaaactcaaatgaattgacgggggcccgcacaagcggtggagcatgtggtttaattcgatgcaacgcgaagaaccttacctggtcttgacatagtgagaatcttgcagagatgcgagagtgccttcgggaattcacatacaggtgctgcatggctgtcgtcagctcgtgtcgtgagatgttgggttaagtcccgcaacgagcgcaacccttttccttagttaccagcgactcggtcgggaactctaaggatactgccagtgacaaactggaggaaggcggggacgacgtcaagtcatcatggcccttacgaccagggctacacacgtgctacaatggttggtacaaagggttgctacacagcgatgtgatgctaatctcaaaaagccaatcgtagtccggattggagtctgcaactcgactccatgaagtcggaatcgctagtaatcgcagatcagaatgctgcggtgaatacgttcccgggccttgtacacaccgcccgtcacaccatgggagttgatctcaccagaagtggttagcctaacgcaagagggcgatcaccacggtggggtcgatgactggggtg

SEQ ID NO: 2153 - DNA, 1452 bp, Moraxella ovis
attgaacgctggcggcaggcttaacacatgcaagtcgaacgatgagtatccagcttgctggatatgattagtggcgaacgggtgagtaatgcttaggaatctgcctagtagtgggggataaccatccgaaaggatggctaataccgcatacgacctacgggtgaaagggggcgtaagctctcgctattagatgagcctaagtcggattagctggttggtggggtaaaggcctaccaaggcgacgatctgtagctggtctgagaggatgatcagccacactgggactgagacacggcccagactcctacgggaggcagcagtggggaatattggacaatgggcgaaagcctgatccagccatgccgcgtgtgtgaagaaggccttttggttgtaaagcactttaagtggggaggaaaagcttgtggttaatacccacaagccctgacgttacccacagaataagcaccggctaactctgtgccagcagccgcggtaatacagagggtgcgagcgttaatcggaattactgggcgtaaagcgcgcgtaggtggttgtttaagtcagatgtgaaatccctgggcttaacctaggaactgcatctgatactggacaactagagtaggtgagagggaagtagaattccaggtgtagcggtgaaatgcgtagagatctggaggaataccgatggcgaaggcagcttcctggcatcatactgacactgaggtgcgaaagcgtgggtagcaaacaggattagataccctggtagtccacgccgtaaacgatgtctaccagtcgttgggtcttttaaagacttagtgacgcagttaacgcaataagtagaccgcctggggagtacggccgcaaggttaaaactcaaatgaattgacgggggcccgcacaagcggtggagcatgtggtttaattcgatgcaacgcgaagaaccttacctggtcttgacatatctagaatcctgcagagatgcgggagtgccttcgggaattagaatacaggtgctgcatggctgtcgtcagctcgtgtcgtgagatgttgggttaagtcccgcaacgagcgcaacccttttccttagttaccagcgactcggtcgggaactctaaggatactgccagtgacaaactggaggaaggcggggacgacgtcaagtcatcatggcccttacgaccagggctacacacgtgctacaatggttggtacaaagggttgctacacagcgatgtgatgccaatctcaaaaagccaatcgtagtccggattagagtctgcaactcgactctatgaagtcggaatcgctagtaatcgcagatcagaatgctgcggtgaatacgttcccgggccttgtacacaccgcccgtcacaccatgggagttgatctcaccagaagtgggtagcctaacgcaagagggcgctcaccacggtggggtcgatgactggggtg

SEQ ID NO: 2154 - DNA, 1452 bp, Moraxella pluranimalium
attgaacgctggcggcaggcttaacacatgcaagtcgaacgaggttagggagcttgctcctgatacctagtggcgaacgggtgagtaatgcttaggaatctgcctagtagtgggggataacttggggaaactcaagctaataccgcatacgacctacgggtgaaagggggcgcaagctctcgctattagatgagcctaagtcggattagctagttggtggggtaaaggcctaccaaggcgacgatctgtagctggtctgagaggatgatcagccacactgggactgagacacggcccagactcctacgggaggcagcagtggggaatattggacaatgggcgaaagcctgatccagccatgccgcgtgtgtgaagaaggccttttggttgtaaagcactttaagtagggaggaaaagctaatggttaatacccattagccctgacgttacctacagaataagcaccggctaactctgtgccagcagccgcggtaatacagagggtgcaagcgttaatcggaattactgggcgtaaagcgcgcgtaggtggttacttaagtcagatgtgaaagccccgggcttaacctgggaactgcatctgatactgggtaactagagtaggtgagaggggagtagaattccaggtgtagcggtgaaatgcgtagagatctggaggaataccgatggcgaaggcagctccctggcatcatactgacactgaggtgcgaaagcgtgggtagcaaacaggattagataccctggtagtccacgccgtaaacgatgtctaccagtcgttgggtctcttgaagacttagtgacgcagttaacgcaataagtagaccgcctggggagtacggccgcaaggttaaaactcaaatgaattgacgggggcccgcacaagcggtggagcatgtggtttaattcgatgcaacgcgaagaaccttacctggtcttgacatacacagaattcgctagagatagcttagtgccttcgggaactgtgatacaggtgctgcatggctgtcgtcagctcgtgtcgtgagatgttgggttaagtcccgcaacgagcgcaacccttttccttagttaccagcgggttatgccgggaactctaaggatactgccagtgacaaactggaggaaggcggggacgacgtcaagtcatcatggcccttacgaccagggctacacacgtgctacaatggttggtacaaagggttgctacacagcgatgtgatgctaatctcaaaaagccaatcgtagtccggattggagtctgcaactcgactccatgaagtcggaatcgctagtaatcgcagatcagaatgctgcggtgaatacgttcccgggccttgtacacaccgcccgtcacaccatgggagttgatctcaccagaagtggttagcctaacgcaagagggcgatcaccacggtggggtcgatgactggggtg

SEQ ID NO: 2155 - DNA, 1451 bp, Moraxella porci
attgaacgctggcggcaggcttaacacatgcaagtcgaacgaggttagaaagcttgctttcgatacctagtggcgaacgggtgagtaatgcttaggaatctgcctagtagtgggggataacttggggaaactcaagctaataccgcatacgacctacgggtgaaagggggcgcaagctctcgctattagatgagcctaagtcggattagctagttggtggggtaaaggcctaccaaggcgacgatctgtagctggtctgagaggatgatcagccacactgggactgagacacggcccagactcctacgggaggcagcagtggggaatattggacaatgggcgaaagcctgatccagccatgccgcgtgtgtgaagaaggccttttggttgtaaagcactttaagtagggaggaaaagctaatggttaatacccattagccctgacgttacctacagaataagcaccggctaactctgtgccagcagccgcggtaatacagagggtgcaagcgttaatcggaattactgggcgtaaagcgcgcgtaggtggttacttaagtcagatgtgaaagccccgggcttaacctgggaactgcatctgatactgggtgactagagtaggtgagaggggagtagaattccaggtgtagcggtgaaatgcgtagagatctggaggaataccgatggcgaaggcagctccctggcatcatactgacactgaggtgcgaaagcgtgggtagcaaacaggattagataccctggtagtccacgccgtaaacgatgtctaccagtcgttgggtctcttgaagacttagtgacgcagttaacgcaataagtagaccgcctggggagtacggccgcaaggttaaaactcaaatgaattgacgggggcccgcacaagcggtggagcatgtggtttaattcgatgcaacgcgaagaaccttacctggtcttgacatacagagaattcgctagagatagcttagtgccttcgggaactctgatacaggtgctgcatggctgtcgtcagctcgtgtcgtgagatgttgggttaagtcccgcaacgagcgcaacccttttccttagttaccagcacttcgggtgggaactctaaggatactgccagtgacaaactggaggaaggcggggacgatgtcaagtcatcatggcccttacgaccagggctacacacgtgctacaatggttggtacaaagggttgctacacagcgatgtgatgctaatctcaaaaagccaatcgtagtccggattggagtctgcaactcgactccatgaagtcggaatcgctagtaatcgcagatcagaatgctgcggtgaatacgttcccgggccttgtacacaccgcccgtcacaccatgggagttgatctcaccagaagtggttagcctaacgcaagagggcgatcaccacggtggggtcgatgactggggtg

SEQ ID NO: 2156 - DNA, 1356 bp, Morganella psychrotolerans
agcttgcttctctgctgacgagcggcggacgggtgagtaatgtatggggatctgcctgatggagggggataactactggaaacggtagctaataccgcataatgtctccggaccaaagcgggggaccttcgggcctcgcaccatcagatgaacccatatgggattagctagtaggtgaggtaatggctcacctaggcgacgatctctagctggtctgagaggatgatcagccacactgggactgagacacggcccagactcctacgggaggcagcagtggggaatattgcacaatgggcgcaagcctgatgcagccatgccgcgtgtatgaagaaggccttagggttgtaaagtactttcagtcgggaggaaggtgttgagtttaatatgctcagcaattgacgttaccgacagaagaagcaccggctaactccgtgccagcagccgcggtaatacggagggtgcaagcgttaatcggaattactgggcgtaaagcgcacgcaggcggttgattaagtcagatgtgaaatccccgggctcaacccgggaattgcatctgagactggtcagctagagtcttgtagaggggggtagaattccatgtgtagcggtgaaatgcgtagagatgtggaggaataccggtggcgaaggcggccccctggacaaagactgacgctcaggtgcgaaagcgtggggagcaaacaggattagataccctggtagtccacgctgtaaacgatgtcgacttggaggttgtgcccttgaggcgtggcttccggagctaacgcgttaagtcgaccgcctggggagtacggccgcaaggttaaaactcaaatgaattgacgggggcccgcacaagcggtggagcatgtggtttaattcgatgcaacgcgaagaaccttacctactcttgacatccagagaacttagcagagatgctttggtgccttcgggaactctgagacaggtgctgcatggctgtcgtcagctcgtgttgtgaaatgttgggttaagtcccgcaacgagcgcaacccttatcctttgttgccagcgcgtaatggcgggaactcaaaggagactgccggtgataaaccggaggaaggtggggatgacgtcaagtcatcatggcccttacgagtagggctacacacgtgctacaatggcgtatacaaagggaagcgacctcgcgagagcaagcggaactcacaaagtacgtcgtagtccggattggagtctgcaactcgactccatgaagtcggaatcgctagtaatcgtagatcagaatgctacggtgaatacgttcccgggccttgtacacaccgcccgtcacaccatgggagtgggttgcaaaagaag

SEQ ID NO: 2157 - DNA, 1467 bp, Moritella dasanensis
attgaacgctggcggtaggcttaacacatgcaagtcgagcggaaacgaagaatagcttgctattctggcgtcgagcggcggacgggtgagtaatgcttgggaatctgcctagtcgagggggacaacagttggaaacgactgctaataccgcatacgacctacgggtgaaagggggcctcttcttgaaagctcccgcgactagatgagcccaagtgggattagcttgttggtgaggtaagagctcaccaaggcgacgatccctagctggtctgagaggatgatcagccacactggaactgagacacggtccagactcctacgggaggcagcagtggggaatattgcacaatgggcgaaagcctgatgcagccataccgcgtgtatgaagaaggccttagggttgtaaagtactttcagcgaggaggaaaggttaacgattaatactcgttagctgtgacgttactcgcagaagaagcaccggctaactccgtgccagcagccgcggtaatacggagggtgcaagcgttaatcggaattactgggcgtaaagcgcatgcaggcggtttgttaagcgagatgtgaaagccccgggctcaacctgggaactgcatttcgaactggcaaactagagttcttgagagggtggtagaatttcaggtgtagcggtgaaatgcgtagagatctgaaggaataccagtggcgaaggcggccacctggcaagtaactgacgctcagatgcgaaagcgtgggtagcaaacgggattagataccccggtagtccacgccgtaaacgatgtctactcggagtttggttccttgcgaactgggctcttaagctaacgcattaagtagaccgcctggggagtacggccgcaaggttaaaactcaaatgaattgacgggggcccgcacaagcggtggagcatgtggtttaattcgatgcaacgcgaagaaccttacctactcttgacatccacagaatctggtagagatacctcagtgccttcgggaactgtgagacaggtgctgcatggctgtcgtcagctcgtgttgtgaaatgttgggttaagtcccgcaacgagcgcaacccttatccttatttgccagcacgtaatggtgggaactctaaggagactgccggtgataaaccggaggaaggtggggacgacgtcaagtcatcatggcccttacgagtagggctacacacgtgctacaatggcgcatacaaagggctgcaaaccagcgatggtaagcgaatcccataaagtgcgtcgtagtccggattggggtctgcaactcgaccccatgaagtcggaatcgctagtaatcgtgaatcagaatgtcacggtgaatacgttcccgggccttgtacacaccgcccgtcacaccatgggagtgggctgcaccagaagtcattagcttaaccttcgggagggcgatgaccacggtgtggttcatgactggggtg

SEQ ID NO: 2158 - DNA, 1426 bp, Moritella marina
attgaacgctggcggtaggcttaacacatgcaagtcgagcggaaacgaagaatagcttgctattctggcgtcgagcggcggacgggtgagtaatgcttgggaatctgcctagtcgagggggacaacagttggaaacgactgctaataccgcatacgacctacgggtgaaagggggcctcttcttgaaagctctcgcgactagatgagctcaagtgggattagcttgttggtgaggtaagagctcaccaaggcgacgatccctagctggtctgagaggatgatcagccacactggaactgagacacggtccagactcctacgggaggcagcagtggggaatattgcacaatgggcgaaagcctgatgcagccataccgcgtgtatgaagaaggccttcgggttgtaaagtactttcagcgaggaggaaaggtggtaaattaatactttaccactgtgacgttactcgcagaagaagcaccggctaactccgtgccagcagccgcggtaatacggagggtgcaagtaatcggaattactgggcgtaaagcgcatgcaggcggtttgttaagcgagatgtgaaagccccgggctcaacctgggaactgcatttcgaagggtggtagaatttcaggtgtagcggtgaaatgcgtagagatctgaaggaataccagtggcgaaggcggccacctggcaagtaactgacgctcagatgcgaaagcgtgggtagcaaacgggattagataccccggttccacgccgtaaacgatgtctactttggttccttgagaactgggctcttaagctaacgcattaagtagaccgcctggggagtacggccgcaaggttaaaactcaaatgaattgacgggggcccgcacaagcggtggagcatgtggtttaattcgatgcaacgcgaagaaccttacctactcttgacatccatagaacttttcagagatgaattggtgccttcgggaactatgagacaggtgctgcatggctgtcgtcagctcgtgttgtgaaatgttgggttaagtcccgcaacgagcgcaacccttatccttatttgccagcataatggtgggaactctaaggagactgccggtgataaaccggaggaaggtggggacgacgtcaagtcatcatggcccttacgagtagggctacacacgtgctacaatggcgcatacaaagggctgcaaaccagcgatggtaatcccataaagtgcgtcgtagtccggattggggtctgcaactcgaccccatgaagtcggaatcgctagtaatcgtgaatcagaatgtcacggtgaatacgttcccgggccttgtacacaccgcccgtcacaccatgggagtgggctgcaccagaagtcattagcttaaccttcgggagggcgatgaccacggtgtggttcatgactggggtg

SEQ ID NO: 2159 - DNA, 1467 bp, Moritella viscosa
attgaacgctggcggtaggcttaacacatgcaagtcgagcggaaacgaagaatagcttgctattctggcgtcgagcggcggacgggtgagtaatgcttgggaatctgcctagtcgagggggacaacagttggaaacgactgctaataccgcatacgacctacgggtgaaagggggcctcttcttgaaagctctcgcgactagatgagcccaagtgggattagcttgttggtgaggtaagagctcaccaaggcgacgatccctagctggtctgagaggatgatcagccacactggaactgagacacggtccagactcctacgggaggcagcagtggggaatattgcacaatgggggaaaccctgatgcagccataccgcgtgtatgaagaaggccttagggttgtaaagtactttcagcgaggaggaaaggtagtagattaatactctgctactgtgacgttactcgcagaagaagcaccggctaactccgtgccagcagccgcggtaatacggagggtgcaagcgttaatcggaattactgggcgtaaagcgcatgcaggcggtttgttaagcgagatgtgaaagccccgggctcaacctgggaactgcatttcgaactggcaaactagagttcttgagagggtggtagaatttcaggtgtagcggtgaaatgcgtagagatctgaaggaataccagtggcgaaggcggccacctggcaagtaactgacgctcagatgcgaaagcgtgggtagcaaacgggattagataccccggtagtccacgccgtaaacgatgtctactcggagtttggttccttgagaactgggctcttaagctaacgcattaagtagaccgcctggggagtacggccgcaaggttaaaactcaaatgaattgacgggggcccgcacaagcggtggagcatgtggtttaattcgatgcaacgcgaagaaccttacctactcttgacatccatagaactttccagagatgaattggtgccttcgggaactatgagacaggtgctgcatggctgtcgtcagctcgtgttgtgaaatgttgggttaagtcccgcaacgagcgcaacccttatccttatttgccagcacgtaatggtgggaactctaaggagactgccggtgataaaccggaggaaggtggggacgacgtcaagtcatcatggcccttacgagtagggctacacacgtgctacaatggcgcatacaaagggctgcaaaccagcaatggtaagcgaatcccataaagtgcgtcgtagtccggattggggtctgcaactcgaccccatgaagtcggaatcgctagtaatcgtgaatcagaatgtcacggtgaatacgttcccgggccttgtacacaccgcccgtcacaccatgggagtgggctgcaccagaagtcattagcttaaccttcgggagggcgatgaccacggtgtggttcatgactggggtg

SEQ ID NO: 2160 - DNA, 1466 bp, Moritella yayanosii
attgaacgctggcggtaggcttaacacatgcaagtcgagcggaaacgaagaatagcttgctattctggcgtcgagcggcggacgggtgagtaatgcttgggaatctgcctagtcgagggggacaacagttggaaacgactgctaataccgcatacgacctacgggtgaaagggggcctcttcttgaaagctctcgcgactagatgagcccaagtgggattagcttgttggtgaggtaagagctcaccaaggcgacgatccctagctggtctgagaggatgatcagccacactggaactgagacacggtccagactcctacgggaggcagcagtggggaatattgcacaatggaggaaactctgatgcagccataccgcgtgtatgaagaaggccttagggttgtaaagtactttcagcaaggaggaaaggtggtgacttaatacgttatcactgtgacgttactcgcagaagaagcaccggctaactccgtgccagcagccgcggtaatacggagggtgcgagcgttaatcggaattactgggcgtaaagcgcatgcaggcggtttgttaagcgagatgtgaaagccccgggctcaacctgggaactgcatttcgaactggcaaactagagttcttgagagggtggtagaatttcaggtgtagcggtgaaatgcgtagagatctgaaggaataccagtggcgaaggcggccacctggcaagtaactgacgctcagatgcgaaagcgtgggtagcaaacgggattagataccccggtagtccacgccgtaaacgatgtctactcggagtttggttccttgagaactgggctcttaagctaacgcattaagtagaccgcctggggagtacggccgcaaggttaaaactcaaatgaattgacgggggcccgcacaagcggtggagcatgtggtttaattcgatgcaacgcgaagaaccttacctactcttgacatccatagaactttccagagatggattggtgccttcgggaactatgagacaggtgctgcatggctgtcgtcagctcgtgttgtgaaatgttgggttaagtcccgcaacgagcgcaacccttatccttatttgccagcacgtaatggtgggaactctaaggagactgccggtgataaaccggaggaaggtggggacgacgtcaagtcatcatggcccttacgagtagggctacacacgtgctacaatggcgcatacaaagggctgcaaaccagcaatggtaagcgaatcccacaaagtgcgtcgtagtccggattggggtctgcaactcgaccccatgaagtcggaatcgctagtaatcgtgaatcagaatgtcacggtgaatacgttcccgggccttgtacacaccgcccgtcacaccatgggagtgggctgcaccagaagtcattagcttaaccttcgggagggcgatgaccacggtgtggttcatgactgggtg

SEQ ID NO: 2161 - DNA, 1463 bp, Morococcus cerebrosus
attgaacgctggcggcatgctttacacatgcaagtcggacggcagcacagagaagcttgcttcttgggtggcgagtggcgaacgggtgagtaacatatcggaacgtaccgagcagtgggggataactaatcgaaagattagctaataccgcatatattctgaggaagaaagcaggggaccatttggccttgcgctgtttgagcggccgatatctgattagctagttggtggggtaaaggcctaccaaggcgacgatcagtagcgggtctgagaggatgatccgccacactgggactgagacacggcccagactcctacgggaggcagcagtggggaattttggacaatgggcgaaagcctgatccagccatgccgcgtgtctgaagaaggccttcgggttgtaaaggacttttgtcagggaagaaaagggcggggttaatacccctgtctgatgacggtacctgaagaataagcaccggctaactacgtgccagcagccgcggtaatacgtagggtgcgagcgttaatcggaattactgggcgtaaagcgggcgcagacggttacttaagcaggatgtgaaatccccgggctcaacctgggaactgcgttctgaactgggtgactagagtgtgtcagagggaggtagaattccacgtgtagcagtgaaatgcgtagagatgtggaggaataccgatggcgaaggcagcctcctgggataacactgacgttcatgcccgaaagcgtgggtagcaaacaggattagataccctggtagtccacgccctaaacgatgtcgattagctgttgggcagcatgactgcttagtagcgaagctaacgcgtgaaatcgaccgcctggggagtacggtcgcaagattaaaactcaaaggaattgacggggacccgcacaagcggtggatgatgtggattaattcgatgcaacgcgaagaaccttacctggtcttgacatgtacggaatcctccagagacggaggagtgccttcgggagccgtaacacaggtgctgcatggctgtcgtcagctcgtgtcgtgagatgttgggttaagtcccgcaacgagcgcaacccttgtcattagttgccatcattaagttgggcactctaatgagactgccggtgacaagccggaggaaggtggggatgacgtcaagtcctcatggcccttatgaccagggcttcacacgtcatacaatggtcggtacagagggtagccaagccgcgaggtggagccaatctcacaaaaccgatcgtagtccggattgcactctgcaactcgagtgcatgaagtcggaatcgctagtaatcgcaggtcagcatactgcggtgaatacgttcccgggtcttgtacacaccgcccgtcacaccatgggagtgggggataccagaagtaggtagggtaaccgcaaggagcccgcttaccacggtatgcttcatgactggggtg

SEQ ID NO: 2162 - DNA, 1438 bp, Mucilaginibacter gracilis
gatgaacgctagcggcaggcctaatacatgcaagtcggacgggatttgggagcttgctcctgatgagagtggcgcacgggtgcgtaacacgtatgtaacctaccttatccagggggatagcctctcgaaagagagattaagaccgcataacattacgactcagcattgagatgtaatcaaatatttatagggataagatgggcatgcgggacattagctagttggcggggtaacggcccaccaaggcgacgatgtctaggggatctgagaggatgaccccccacactggtactgagacacggaccagactcctacgggaggcagcagtaaggaatattggtcaatgggcggaagcctgaaccagccatgccgcgtgcaggaagacggccctacgggttgtaaactgcttttgcaggggaataaaccttcgtatgtatacgaagctgaatgtactctgagaataaggatcggctaactccgtgccagcagccgcggtaatacggaggatccaagcgttatccggatttattgggtttaaagggtgcgtaggcggccaattaagtcaggggtgaaagacggtagcttaactatcgcagtgcctttgatactgattggcttgaatggactagaggtaggcggaatgtgacaagtagcggtgaaatgcatagatatgtcacagaacaccaattgcgaaggcagcttactatggtttaattgacgctgaggcacgaaagcgtggggatcaaacaggattagataccctggtagtccacgccctaaacgatgaacactcgatgttagcgatatacagttagcgtctaagcgaaagcgttaagtgttccacctggggagtacgcccgcaagggtgaaactcaaaggaattgacgggggcccgcacaagcggaggagcatgtggtttaattcgatgatacgcgaggaaccttacccgggcttgaaagttagtgaatgattcagagacggatcagctcttcggagccaggaaattaggtgctgcatggctgtcgtcagctcgtgccgtgaggtgttgggttaagtcccgcaacgagcgcaacccctatgtttagttgccagcacgttaaggtggggactctaaacagactgcctacgcaagtagagaggaaggaggggacgacgtcaagtcatcatggcccttacgtccggggctacacacgtgctacaatggatggtacagagggcagctacctggcaacaggatgcaaatctcttaaagccattcacagttcggatcggggtctgcaactcgaccccgtgaagttggattcgctagtaatcgcatatcagcaatgatgcggtgaatacgttcccgggccttgtacacaccgcccgtcaagccatggaagctggaagtacctgaagtgcgtaaccgcaaggagcgtcctagggtaaagtcggtaac

SEQ ID NO: 2163 - DNA, 1471 bp, Mucispirillum schaedleri
aacgaacgctggcggcgtgcttaacacatgcaagtcagggagaaagtctcttcggggatgattaaaccggcgcacgggtgagtaacacgtgagtgacctgccttttagactggaacaacttaccgaaaggtgagctaatgccggatgagttatataagtgcatgtttatataggaaaagttggggagacctgacgctgaaagatggactcgcgtcccattagctagttggtagggtaatggcctaccaaggcgacgatgggtagccggcctgagagggtggccggccacactgggactgagacacggcccagactcctacgggaggcagcagtggggaattttgcgcaatgctcgtaagagtgacgcagcgacgccgcgtgaatgacgaaggccttcgggtcgtaaagttctttcgacagggaagaaaatgcctataagtaactgtgtatgtattgacggtacctgtataagcagccccggctaactccgtgccagcagccgcggtaatacggagggggcgagcgttgttcggagtgactgggcgtaaagagcacgtaggcggtgttgtaagtcattagtcaaagactagagctcaactttagtaaggctagtgatactataatactagagtatcagagaggattgcagaattcctggtgtagcggtgaaatgcgtagatatcaggaggaataccgttagcgaaggcggcaatctggctggaaactgacgctgaggtgcgaaagcgtgggtagcaaacaggattagataccctggtagtccacgctgtaaacgatggatgctaggtgttgggcttttaagttcagtgccgcagcaaacgcgataagcatcccgcctggggagtacgtttgcaagaatgaaactcaaaggaattgacgggggcccgcacaagcggtggagcacgtggtttaattcgatgctaaccgaagaaccttacctgggtttgacatccacagaaggcgttagagataatgctgtgcctgatttatcaggagctgtgagacaggtgctgcatggctgtcgtcagctcgtgccgtgaggtgttgggttaagtcccgcaacgagcgcaacccctatttccagttgctaacggttgaagctgagcactctggagagactgccagcgataagctggaggaaggtggggacgacgtcaagtcatcatggcccttatgtccagggctacacacgtgctacaatggcataatcagagggaagcatctccgcaaggataagcgaatctcataaattatgtctcagttcagattgcagtctgcaactcgactgcatgaagtcggaatcgctagtaatcgcagatcagcaaagctgcggtgaatacgttcccgggccttgtacacaccgcccgtcacaccacgggagtcggtcgcgcctgaagccggtggcctatcagtaatgggggagccgtctatggcgagattggtaactggggtg

SEQ ID NO: 2164 - DNA, 1455 bp, Muribacter muris
  misc_feature (231)..(231): n is a, c, g, or t
  misc_feature (587)..(588): n is a, c, g, or t
  misc_feature (757)..(757): n is a, c, g, or t
  misc_feature (810)..(810): n is a, c, g, or t
  misc_feature (1057)..(1057): n is a, c, g, or t
  misc_feature (1102)..(1102): n is a, c, g, or t
  misc_feature (1135)..(1135): n is a, c, g, or t
attgaacgctggcggcaggcttaacacatgcaagtcgaacggtagcagaagagagcttgctctcttgctgacgagtggcggacgggtgagtaatgcttgggaatctggcttatggagggggataactactggaaacggtagctaataccgcgtaatgtctgcggactaaagggggcgaaagctcttgccataagatgagcccaagtgggattaggtagttggtgaggtaanggctcaccaagccgtcgatctctagctggtctgagaggatgaccagccacactggaactgagacacggtccagactcctacgggaggcagcagtggggaatattgcacaatgggggaaaccctgatgcagccatgccgcgtgaatgaagaaggccttcgggttgtaaagttctttcggtgatgaggaaggtgtaatggttaatacccgttacaattgacgttagtcacagaagaagcaccggctaactccgtgccagcagccgcggtaatacggagggtgcgagcgttaatcggaataactgggcgtaaagggcacgcaggcggttgtttaagtgaggtgtgaaagccctgggccnnacctgggaattgcatttcagactggacaactagagtactttagggaggggtagaattccacgtgtagcggtgaaatgcgtagagatgtggaggaataccgaaggcgaaggcagccccttgggaatgtactgacgctcatgtgcgaaagcgtggggagcaaacaggattngataccctggtagtccacgccgtaaacgctgtcgatttggggattgggctttnagcttggtgcccgtagctaacgtgataaatcgaccgcctggggagtacggccgcaaggttaaaactcaaatgaattgacgggggcccgcacaagcggtggagcatgtggtttaattcgatgcaacgcgaagaaccttacctactcttgacatcctaagaagagactagagatagtcttgtgccttcgggaacttagagacaggtgctgcatggctgtcgtcagctcgtgttgtgaaatgttgggttnagtcccgcaacgagcgcaacccttatcctttgttgccagcgattngggtcgggaactcaaaggagactgccggtgatnaaccggaggaaggtggggatgacgtcaagtcatcatggcccttacgagtagggctacacacgtgctacaatggtgcatacagagggtagcgaacctgcgagggtaagccaatctcagaaagtgcatctaagtccggattggagtctgcaactcgactccatgaagtcggaatcgctagtaatcgcaaatcagaatgttgcggtgaatacgttcccgggccttgtacacaccgcccgtcacaccatgggagtgggttgtaccagaagtggatagcttaaccgcaaggggggcgttcaccacggtatgattcatgactgggg

SEQ ID NO: 2165 - DNA, 1462 bp, Muribaculum intestinale
gatgaacgctagcgacaggcctaacacatgcaagtcgaggggcatcggggagcgaagcttgctttgctccgccggcgaccggcgcacgggtgagtaacgcgtatgcaacctgcccgtttcagcgggataacccggagaaatccggcctaataccgcatgtggccgaggggaggcatcttctttcggccaaaggaggcgactccggagacggatgggcatgcgtgacattagcttgttggcggggtaacggcccaccaaggcgacgatgtctaggggttctgagaggaaggtcccccacactggtactgagacacggaccagactcctacgggaggcagcagtgaggaatattggtcaatgggcgagagcctgaaccagccaagtcgcgtgaaggatgacggccctacgggttgtaaacttcttttgtcagggagcaattgggtccacgcgtgggcttagcgagagtacctgaagaaaaagcatcggctaactccgtgccagcagccgcggtaatacggaggatgcgagcgttatccggatttattgggtttaaagggtgcgtaggcggaatatcaagtcagcggtaaaaattcggggctcaaccccgtcgtgccgttgaaactgatgttcttgagtgggcgagaagtatgcggaatgcgtggtgtagcggtgaaatgcatagatatcacgcagaactccgattgcgaaggcagcataccggcgcccaactgacgctgaagcacgaaagcgtgggtatcgaacaggattagataccctggtagtccacgcagtaaacgatgaatgctaattgtccggagggattgacctctgggtgatacagcgaaagcgttaagcattccacctggggagtacgccggcaacggtgaaactcaaaggaattgacgggggcccgcacaagcggaggaacatgtggtttaattcgatgatacgcgaggaaccttacccgggctcaaacgcaggaggaatacatttgaaagggtgtagctctacggagtcttctgcgaggtgctgcatggttgtcgtcagctcgtgccgtgaggtgtcggcttaagtgccataacgagcgcaacccctatcgacagttgccaacaggtgaagctgggaactctgtcgagactgccggcgcaagctgagaggaaggcggggatgacgtcaaatcagcacggcccttacgtccggggcgacacacgtgttacaatggcggccacagcgggaagccaggcggcgacgccgagcggaacccgaaaagccgtctcagttcggattggagtctgcaacccgactccatgaagctggattcgctagtaatcgcgcatcagccacggcgcggtgaatacgttcccgggccttgtacacaccgcccgtcaagccatgggagccgggagtgcctgaagtacgtgaccgcaaggagcgtcctagggtaagaccggtgactggggct

SEQ ID NO: 2166 - DNA, 1439 bp, Muricauda taeanensis
gatgaacgctagcggcaggcctaacacatgcaagtcgaggggtagggggtgcttgcacccctgagaccggcgcacgggtgcggaacgcgtatggaacctgcccctgtcaggggaatagcccagggaaacttggattaatgccccatggtatcattacatcgcatgatgttatgattaaagatttatcggacagggatggccatgcgtaccattagcttgatggtggggtaacggcccaccatggcaacgatggttaggggccctgagagggggatcccccacactggtactgagacacggaccagactcctacgggaggcagcagtgaggaatattggacaatggtcggaagactgatccagccatgccgcgtgcaggatgacggccctatgggttgtaaactgcttttatacgggaagaaacccacctacgtgtaggtggctgacggtaccgtaagaataaggaccggctaactccgtgccagcagccgcggtaatacggagggtccgagcgttatccggaatcattgggtttaaagggtccgtaggcgggcctgtaagtcaggggtgaaagtttgtggctcaaccataaaattgcctttgatactgcaggtcttgagtcatggtggggttgccggaacatgtggtgtagcggtgaaatgcatagatatcacatagaacaccgatcgcgaaggcaggtgaccaaccatgtactgacgctgatggacgaaagcgtgggtagcgaacgggattagataccccggtagtccacgccgtaaacgatggatactagctgtggggacattgtctccgtggccaagcgaaagtgataagtatcccacctggggagtacgaccgcaaggttgaaactcaaaggaattgacgggggcccgcacaagcggtggagcatgtggtttaattcgatgatacgcgaggaaccttaccagggcttaaatgcaggctgcatggggtggagacatcccttccttcggaccgcctgcaaggtgctgcatggttgtcgtcagctcgtgccgtgaggtgtcaggttaagtcctataacgagcgcaacccctaccgttagttgccagcgagtcaagtcggggactctaacgggactgccggtgcaaaccgtgaggaaggtggggacgacgtcaaatcatcacggcccttacgtcctgggccacacacgtgctacaatggccggtacagagggaagccaccccgcaagggggcgcggatctataaaaccggtcacagttcggatcggggtctgcaactcgaccccgtgaagctggaatcgctagtaatcggatatcagccatgatccggtgaatacgttcccgggccttgtacacaccgcccgtcaagccatggaagccgggagtgcctgaagtccgtcaccgcaaggagcggcctagggcaaaatcggtaactagggct

SEQ ID NO: 2167 - DNA, 1453 bp, Mycoavidus cysteinexigens
attgaacgctggcggcatgctttacacatgcaagtcgaacggcagcgcgggtttcggcctggcggcgagtggcgaacgggtgagtaatacatcggaacgtgtcctgtagagggggatagcccggcgaaagccggattaataccgcatacgatctacggatgaaagcgggggaccttcgggcctcgcgctataggggcggccgatgtcggattagctagttggtggggtaaaggcctaccaaggcgacgatccgtagctggtctgagaggacgaccagccacactgggactgagacacggcccagactcctacgggaggcagcagtggggaattttggacaatgggggcaaccctgatccagcaatgccgcgtgtgtgaagaaggccttcgggttgtaaagcacttttgttcgggaagaaagcgttagggtaaataatcttaatgtatgacggtaccgaaagaataagcaccggctaactacgtgccagcagccgcggtaatacgtagggtgcaagcgttaatcggaattattgggcgtaaagggtgcgtaggcggtttgttaagacggatgtgaaatccctgggctcaacctgggaactgcatacgtgactggcagactagagtatggcagagggaggtggaattccacgtgtagcagtgaaatgcgtagatatgtggaggaacaccgatggcgaaggcagcctcctgggccaatactgacgctgaggcacgaaagcgtggggagcaaacaggattagataccctggtagtccacgccctaaacgatgtcaactggttgttggggatagctatccttagtaacgaagctaacgcgtgaagttgaccgcctggggagtacgatcgcaagattaaaactcaaaggaattgacggggacccgcacaagcggtggatgatgtggattaattcgatgcaacgcgaaaaaccttacctacccttgacatgtacataatctggctgagaggtcagagtgctcgaaagagagatgtaacacaggtgctgcatggctgtcgtcagctcgtgtcgtgagatgttgggttaagtcccgcaacgagcgcaacccttatccttagttgctacgcaagggcactctaaggagactgccggtgacaaaccggaggaaggtggggatgatgtcaagtcctcatggcccttatgggtagggcttcacacgtcatacaatggtcggtacagagggctgcaaacccgcgagggggagccaatctcagaaagccgatcgtagtccggattgcagtctgcaactcgactgcatgaagttggaatcgctagtaatcgcggatcagcatgccgcggtgaatacgttcccgggtcttgtacacaccgcccgtcacaccatgggagtgggttttaccagaagtggctagtctaaccgtaaggagggcggtcaccacggtaggattcatgactggggtg

SEQ ID NO: 2168 - DNA, 1388 bp, Myroides indicus
atgcaagtcgaggggtagggatacttcggtttcctgagaccggcggatgggtgagtaacgcgtatgcaacctacctttcacaggggaatagcccggagaaatccggattaatgctccatggattatttggatggcatcatttaaataataaagatttatcggtgaaagatgggcatgcgtatcattagctagttggtgtggtaacggcacaccaaggcgacgatgattcggggtcctgagagggagatcccccacactggtactgagacacggaccagactcctacgggaggcagcagtgaggaatattggtcaatggaggcaactctgaaccagccatgccgcgtgcaggatgactgccctatgggttgtaaactgcttttatacaggaagaaatgtatctacgcgtagatatttgacggtactgtaggaataaggatcggctaactccgtgccagcagccgcggtaatacggaggatccgagcgttatccggaattattgggtttaaagggttcgtaggcggccttataagtcaggggtgaaatctctcagctcaactgagaacttgcctttgatactgtatggcttgaatagtagtgaagtaactagaatatgtagtgtagcggtgaaatgcatagatattacatggaataccaattgcgaaggcaggttactaattatttattgacgctgatgaacgaaagcgtgggtagcgaacaggattagataccctggtagtccacgccgtaaacgatggatactagctgtttgattttcggattgagtggctaagcgaaagtgataagtatcccacctggggagtacgttcgcaagaatgaaactcaaaggaattgacgggggcccgcacaagcggtggagcatgtggtttaattcgatgatacgcgaggaaccttaccaggtcttaaatgtgttttgccttacctggaaacaggtatttcttcggacaagatacaaggtgctgcatggttgtcgtcagctcgtgccgtgaggtgtcaggttaagtcctataacgagcgcaacccctattgttagttgccagcgagtcatgtcgggaactctagcaagactgccggtgcaaaccgcgaggaaggtggggatgacgtcaaatcatcacggcccttacgacctgggctacacacgtgctacaatggccggtacagagggcagctaccacgtgagtggatgcgaatcttcaaagccggtcacagttcggatcggagtctgcaactcgactccgtgaagctggaatcgctagtaatcggatatcagccatgatccggtgaatacgttcccgggccttgtacacaccgcccgtcaagccatggaagctgggggtacctgaagtcggtcgccgcaaggagctgcc

SEQ ID NO: 2169 - DNA, 1460 bp, Myxococcus fulvus
aacgaacgctggcggcgtgcctaacacatgcaagtcgagcgcgaataggggcaacccttagtagagcggcgcacgggtgcgtaacacgtggataatctgcctggatgctcgggataaccagtcgaaagattggctaataccggataagcccacggtttcttcggagactgagggaaaaggtggcctctgtatacaagctatcacaaccagatgagtccgcggcccatcagctagttggcggggtaatggcccaccaaggcaacgacgggtagctggtctgagaggacgatcagccacactggaactgagacacggtccagactcctacgggaggcagcagtggggaattttgcgcaatgggcgaaagcctgacgcagcaacgccgcgtgtgtgatgaaggtcttcggattgtaaagcactttcgaccgggacgaaaacccgtagcccaacacgctacggcttgacggtaccgggagaagaagcaccggctaactctgtgccagcagccgcggtaatacagagggtgcaagcgttgttcggaattattgggcgtaaagcgcgtgtaggcggcgtgacaagtcgggtgtgaaagccctcagctcaactgaggaagtgcgcccgaaactgtcgtgcttgagtgccggagagggtggcggaattccccaagtagaggtgaaattcgtagatatggggaggaacaccggtggcgaaggcggccacctggacggtaactgacgctgagacgcgaaagcgtggggagcaaacaggattagataccctggtagtccacgccgtaaacgatgagaactaggtgtcgtgggagttgacccccgcggtgccgtagctaacgcattaagttctccgcctgggaagtacggtcgcaagactaaaactcaaaggaattgacgggggcccgcacaagcggtggagcatgtggtttaattcgacgcaacgcgcagaaccttacctggtcttgacatcctcggaatctctcagagatgagggagtgcccgcaagggaaccgagagacaggtgctgcatggctgtcgtcagctcgtgtcgtgagatgttgggttaagtcccgcaacgagcgcaaccctcgcctttagttgccacgcaagtggatctctagagggactgccggtgttaaaccggaggaaggtggggatgacgtcaagtcctcatggcctttatgaccagggctacacacgtgctacaatggccggtacagagcgttgccaacccgcgagggggagctaatcgcataaaaccggtctcagttcagattggagtctgcaactcgactccatgaaggcggaatcgctagtaatcgcagatcagcacgctgcggtgaatacgttcccgggccttgtacacaccgcccgtcacaccatgggagtcgattgctccagaagtcatctcaccaagagatgcccaaggagtggtcggtaactggggtg

SEQ ID NO: 2170 - DNA, 1493 bp, Myxococcus macrosporus
aacgaacgctggcggcgtgcctaacacatgcaagtcgagcgcgaataggggcaacccttagtagagcggcgcacgggtgcgtaacacgtggataatctgcctgagtgctcgggataaccagtcgaaagattggctaataccggataagcccacggtttcttcggagactgagggaaaaggtggcctctgtatacaagctatcacattcagatgagtccgcggcccatcagctagttggcggggtaatggcccaccaaggcgacgacgggtagctggtctgagaggacgatcagccacactggaactgagacacggtccagactcctacgggaggcagcagtggggaattttgcgcaatgggcgaaagcctgacgcagcaacgccgcgtgtgtgatgaaggtctttggattgtaaagcactttcgaccgggaagaaaacccgttggctaacatccaacggcttgacggtaccgggagaagaagcaccggctaactctgtgccagcagccgcggtaatacagagggtgcaagcgttgttcggaattattgggcgtaaagcgcgtgtaggcggcgtgacaagtcgggtgtgaaagccctcagctcaactgaggaagtgcgcccgaaactgtcgtgcttgagtgccggagagggtggcggaattccccaagtagaggtgaaattcgtagatatggggaggaacaccggtggcgaaggcggccacctggacggtaactgacgctgagacgcgaaagcgtggggagcaaacaggattagataccctggtagtccacgccgtaaacgatgagaactaggtgtcgtgggagttgacccccgcggtgccgaagctaacgcattaagttctccgcctgggaagtacggtcgcaagactaaaactcaaaggaattgacgggggcccgcacaagcggtggagcatgtggtttaattcgacgcaacgcgcagaaccttacctggtcttgacatcctcggaatccttcagagatgagggagtgcccgcaagggaaccgagagacaggtgctgcatggctgtcgtcagctcgtgtcgtgagatgttgggttaagtcccgcaacgagcgcaaccctcgcctttagttgccacgcaagtggatctctagagggactgccggtgttaaaccggaggaaggtggggatgacgtcaagtcctcatggcctttatgaccagggctacacacgtgctacaatggccggtacagagcgttgccaacccgcgagggggagctaatcgcataaaaccggtctcagttcagattggagtctgcaactcgactccatgaaggcggaatcgctagtaatcgcagatcagcacgctgcggtgaatacgttcccgggccttgtacacaccgcccgtcacaccatgggagtcgattgctccagaagtcatctcaccaagaggtgcccaaggagtggtcggtaactggggtgaagtcgtaacaaggtagccgtaggggaacctgc

SEQ ID NO: 2171 - DNA, 1458 bp, Myxococcus stipitatus
aacgaacgctggcggcgtgcctaacacatgcaagtcgagcgcgaatagggaaaccttagtagagcggcgcacgggtgcgtaacacgtggataatctgcctggatgcctgggataaccagtcgaaagattggctaataccggataagcccacggtttcttcggagactgagggaaaaggtggcctctgtatacaagctatcacaaccagatgagtccgcggcccatcagctagttggcggggtaatggcccaccaaggcaacgacgggtagctggtctgagaggacgatcagccacactggaactgagacacggtccagactcctacgggaggcagcagtggggaattttgcgcaatgggcgaaagcctgacgcagcaacgccgcgtgtgtgatgaaggtcttcggattgtaaagcactttcgaccgggacgaaaacccgtagcccaacacgctacggcttgacggtaccgggagaagaagcaccggctaactctgtgccagcagccgcggtaatacagagggtgcaagcgttgttcggaattattgggcgtaaagcgcgtgtaggcggcgtgacaagtcgggtgtgaaagccctcagctcaactgaggaagtgcgcccgaaactgtcgtgcttgagtgccggagagggtggcggaattccccaagtagaggtgaaattcgtagatatggggaggaacaccggtggcgaaggcggccacctggacggtaactgacgctgagacgcgaaagcgtggggagcaaacaggattagataccctggtagtccacgccgtaaacgatgagaactaggtgtcgtgggagttgacccccgcggtgccgtagctaacgcattaagttctccgcctgggaagtacggtcgcaagactaaaactcaaaggaattgacgggggcccgcacaagcggtggagcatgtggtttaattcgacgcaacgcgcagaaccttacctggtcttgacatcctcggaatctttcagagatgagagagtgcccgcaagggaaccgagagacaggtgctgcatggctgtcgtcagctcgtgtcgtgagatgttgggttaagtcccgcaacgagcgcaaccctcgcctttagttgtcacgcaagtgaatctctagagggactgccggtgttaaaccggaggaaggtggggatgacgtcaagtcctcatggcctttatgaccagggctacacacgtgctacaatggccggtacagagcgttgccaacccgcgagggggagctaatcgcataaaaccggtctcagttcagattggagtctgcaactcgactccatgaaggcggaatcgctagtaatcgcagatcagcacgctgcggtgaatacgttcccgggccttgtacacaccgcccgtcacaccatgggagtcgattgctccagaagtcatctcaccaagagatgcccaaggagtggtcggtaactggggtg

SEQ ID NO: 2172 - DNA, 1460 bp, Myxococcus virescens
aacgaacgctggcggcgtgcctaacacatgcaagtcgagcgcgaataggggcaacccttagtagagcggcgcacgggtgcgtaacacgtggataatctgcctgagtgctcgggataaccagtcgaaagattggctaataccggataagcccacggtttcttcggagactgagggaaaaggtggcctctgtatacaagctatcacattcagatgagtccgcggcccatcagctagttggcggggtaatggcccaccaaggcaacgacgggtagctggtctgagaggacgatcagccacactggaactgagacacggtccagactcctacgggaggcagcagtggggaattttgcgcaatgggcgaaagcctgacgcagcaacgccgcgtgtgtgatgaaggtctttggattgtaaagcactttcgaccgggaagaaaacccgttggctaacatccaacggcttgacggtaccgggagaagaagcaccggctaactctgtgccagcagccgcggtaatacagagggtgcaagcgttgttcggaattattgggcgtaaagcgcgtgtaggcggcgtgacaagtcgggtgtgaaagccctcagctcaactgaggaagtgcgcccgaaactgttgtgcttgagtgccggagagggtggcggaattccccaagtagaggtgaaattcgtagatatggggaggaacaccggtggcgaaggcggccacctggacggtaactgacgctgagacgcgaaagcgtggggagcaaacaggattagataccctggtagtccacgccgtaaacgatgagaactaggtgtcgtgggagttgacccccgcggtgccgaagctaacgcattaagttctccgcctgggaagtacggtcgcaagactaaaactcaaaggaattgacgggggcccgcacaagcggtggagcatgtggtttaattcgacgcaacgcgcagaaccttacctggtcttgacatcctcagaatccttcagagatgagggagtgcccgcaagggaactgagagacaggtgctgcatggctgtcgtcagctcgtgtcgtgagatgttgggttaagtcccgcaacgagcgcaaccctcgcctttagttgccacgcaagtggatctctagagggactgccggtgttaaaccggaggaaggtggggatgacgtcaagtcctcatggcctttatgaccagggctacacacgtgctacaatggccggtacagagcgttgccaacccgcgagggggagctaatcgcataaaaccggtctcagttcagattggagtctgcaactcgactccatgaaggcggaatcgctagtaatcgcagatcagcacgctgcggtgaatacgttcccgggccttgtacacaccgcccgtcacaccatgggagtcgattgctccagaaatcatctcaccaagaggtgctcaaggagtggtcggtaactggggtg

SEQ ID NO: 2173 - DNA, 1460 bp, Myxococcus xanthus
aacgaacgctggcggcgtgcctaacacatgcaagtcgagcgcgaataggggcaacccttagtagagcggcgcacgggtgcgtaacacgtggataatctgcctgagtgctcgggataaccagtcgaaagattggctaataccggataagcccacggtttcttcggagactgagggaaaaggtggcctctgtatacaagctatcacattcagatgagtccgcggcccatcagctagttggcggggtaatggcccaccaaggcaacgacgggtagctggtctgagaggacgatcagccacactggaactgagacacggtccagactcctacgggaggcagcagtggggaattttgcgcaatgggcgaaagcctgacgcagcaacgccgcgtgtgtgatgaaggtctttggattgtaaagcactttcgaccgggaagaaaacccgttggctaacatccaacggcttgacggtaccgggagaagaagcaccggctaactctgtgccagcagccgcggtaatacagagggtgcaagcgttgttcggaattattgggcgtaaagcgcgtgtaggcggcgtgacaagtcgggtgtgaaagccctcagctcaactgaggaagtgcgcccgaaactgttgtgcttgagtgccggagagggtggcggaattccccaagtagaggtgaaattcgtagatatggggaggaacaccggtggcgaaggcggccacctggacggtaactgacgctgagacgcgaaagcgtggggagcaaacaggattagataccctggtagtccacgccgtaaacgatgagaactaggtgtcgtgggagttgacccccgcggtgccgaagctaacgcattaagttctccgcctgggaagtacggtcgcaagactaaaactcaaaggaattgacgggggcccgcacaagcggtggagcatgtggtttaattcgacgcaacgcgcagaaccttacctggtcttgacatcctcagaatccttcagagatgagggagtgcccgcaagggaactgagagacaggtgctgcatggctgtcgtcagctcgtgtcgtgagatgttgggttaagtcccgcaacgagcgcaaccctcgcctttagttgccacgcaagtggatctctagagggactgccggtgttaaaccggaggaaggtggggatgacgtcaagtcctcatggcctttatgaccagggctacacacgtgctacaatggccggtacagagcgttgccaacccgcgagggggagctaatcgcataaaaccggtctcagttcagattggagtctgcaactcgactccatgaaggaggaatcgctagtaatcgcagatcagcacgctgcggtgaatacgttcccgggccttgtacacaccgcccgtcacaccatgggagtcgattgctccagaaatcatctcaccaagaggtgctcaaggagtggtcggtaactggggtg

SEQ ID NO: 2174 - DNA, 1451 bp, Nannocystis exedens
agcgaacgtttgcggcgggcctaacacatgcaagtcgaacgggctagcaatagtcagtggcgcacgggtgcgtaacacgtaggtaatcaacccctcggttcgggataacgttctgaaaggagcgctaataccggacgtgtcttcgggagcttcggctcctgtcgagaaagacccgcaagggttgccgagggacgagcctgcggcccatcagctagttggcgaggtaatagctcaccaaggcgaagacgggtagctggtctgagaggatgatcagtcacactggaactgagacacggtccagactcctacgggaggcagcagtggggaatattgcgcaatgggcgaaagcctgacgcagccacgccgcgtgagcgatgaaggccttcgggtcgtaaagctctgtggggagagacgaagaaagcctgtgaagagcgggccttgacggtatctccttagcaagcaccggctaactccgtgccagcagccgcggtaatacggagggtgcgaacgttgctcggaatcattgggcgtaaagcgcacgtaggcggcggcgtaagcgggatgtgaaagcccagggctcaaccctggaagtgcatcccgaactgcgtcgcttgaatctcggagggggacagagaattcccggtgtagaggtgaaattcgtagatatcgggaggaataccagtggcgaaggcgctgtcctggacgaagattgacgctgaggtgcgaaagcgtggggagcaaacaggattagataccctggtagtccacgctgtaaacgatgagtgctggacggtggaggatttgaccccttcgctgtcgaagctaacgcgttaagcactccgcctggggagtacggtcgcaagactaaaactcaaaggaattgacgggggcccgcacaagcggtggagcatgtggtttaattcgacgcaacgcgcagaaccttacctgggttaaatccactggaacctggctgaaaggctggggtgcccttcggggagccggtgagaaggtgctgcatggctgtcgtcagctcgtgtcgtgagatgttgggttaagtcccgcaacgagcgcaacccctatcgccagttgccaccattgagttgggaactctggcgagactgccggtctaaaccggaggaaggtggggacgacgtcaagtcctcatggcccttatgcccagggctacacacgtgctacaatggctggtacaaagagccgcaagcccgcgagggtgagcaaatctcaaaaaaccagtctcagttcggattgcagtctgcaactcgactgcatgaagctggaatcgctagtaatcggagatcagcacgctccggtgaatacgttcccgggccttgtacacaccgcccgtcacaccatgggagtcggctgctccagaagtaggaacctcaaccgcaaggaaaggccctaccaaggagcggtcggtgactggggtg

SEQ ID NO: 2175 - DNA, 1463 bp, Natranaerobius trueperi
gacgaacgctggcggcgtgcttaacacatgcaagtcgagcgaacccttcggaaattagattcgtctattttccggtcagggttagcggcggacgggtgagtaacacgtggataacctaccctagagaccgggataacagctcgaaagggctgctaataccggataagctttacgtgctgcatggtatgtaaagaaaacgggtttaactgctctaggatgggtccgcgtcccattagctagttggtggggtaacagcctaccaaggcgacgatgggtagccgaccttagcgggtgatcggccacactgggactgagacacggcccagactcctacgggaggcagcagtggggaattttgcgcaatgggcgaaagcctgacgcagcgacgccgcgtgagcgatgaaggccttcgggtcgtaaagctctgtcgagggggaagaattcagacggtacccctcaagaaagccccggctaactacgtgccagcagccgcggtaacacgtagggggcgagcgttgtccggaattactgggcgtaaagggcgcgcaggctgcccagcaagtcagatgtgaaattccggagctcaactccggacttgcatttgaaactgttgggcttgagtacaggagaggggagtggaattcctagtgtagcggtgaaatgcgtagatattaggaagaacaccagtggcgaaggcgactccctggcctgttactgacgctgaggcgcgaaagcgtgggtagcgaacaggattagataccctggtagtccacgctgtaaacgctgggtactaggtgttgggggtttagataccctcagtgccgcagctaacgcattaagtaccccgcctggggagtacggtcgcaagactgaaactcaaaggaattgacgggggcccgcacaagcggtggagcatgtggtttaattcgaagcaacgcgaagaaccttaccagggcttgacatatagttgataagtgtagagatacacttttcccttcggggacagctatacaggtggtgcatggctgtcgtcagctcgtgtcgtgagatgttgggttaagtcccgtaacgagcgcaacccctgtccttagttgccatcggttcggccgggcactctagggagactgccggtgacaaaccggaggaaggtggggacgacgtcaagtcatcatgccccttatgccctgggctacacacgtgctacaatggcctgtacagagggaagcgaagccgcaaggtgtagccaaccccttaaagcaggtcccagttcggattgcaggctgcaattcgcctgcatgaagctggaatcgctagtaatcgcggatcagaatgccgcggtgaatacgttcccgggccttgtacacaccgcccgtcacaccacgaaagccggcaacacccgaagccagcgacgctaacctcttttgaggaagcagctgtcgaaggtggggccggtgattggggtg

SEQ ID NO: 2176 - DNA, 1456 bp, Natranaerovirga hydrolytica
gatgaacgctggcggcgtgcctaacacatgcaagtcgagcgagaaacatataacggaaacttcggtagaaattatatgtggaaagcggcggacgggtgagtaacgcgtgggcaacctgccctatacattgggataacaacgagaaatcgttgctaataccgaataagcctccagtaaggcatcttactgaaggaaaaactccggtggtataggatgggcccgcgtctgattagctagttggtaaggtagaggcttaccaaggcaacgatcagtagccgacctgagagggtgaccggccacattgggactgagacacggcccaaactcctacgggaggcagcagtggggaatattgcacaatgggggaaaccctgatgcagcgacgccgcgtgaaggaagaaggttttcggatcgtaaacttctatcagcagggaagaaaaaaatgacggtacctgactaagaagccccggctaactacgtgccagcagccgcggtaatacgtagggggcaagcgttatccggaattactgggtgtaaagggtgcgtaggcggttatgcaagtcagatgtgaaagcccaagtctcaaactagggattgcatttgaaactgtgtaactagagtacaggagaggtaagtggaatttctagtgtagcggtgaaatgcgtagatattaggaagaacaccagtggcgaaggcggcttactggactgtaactgacgctgaggcacgaaagcgtggggagcgaacaggattagataccctggtagtccacgccgtaaacgatgaatgctaggtgtcgggggtcgacagaccttcggtgccgaagttaacacattaagcattccacctggggagtacgatcgcaagattgaaactcaaaggaattgacgggggcccgcacaagcagtggagcatgtggtttaattcgaagcaacgcgaagaaccttaccaagtcttgacatccctttgatcggaccgtaacgggaccttctcttcagagcaaaggtgacaggtggtgcatggttgtcgtcagctcgtgtcgtgagatgttgggttaagtcccccaacgagcgcaacccttatctttagtagccagccttacggatggggactctaaagagactgccggggataactcggaggaaggtggggatgacgtcaaatcatcatgccccttatgacttgggctacacacgtgctacaatggtggtgacaaagggaagcaagcaagtgattgtaagccaacctcaaaaaagccatctcagttcggattgtagtctccaactcgactatatgaagctggaattcctagtaatcgcggatcagaaacccgcggtgaatacgttcccgggccttgtacacaccccccgtcacaccatggaagtcggaagcccccgaagccggtgactcaaccgcaaggagagagccgtcgaaggtgaagtcgataactagggtg

SEQ ID NO: 2177 - DNA, 1454 bp, Natranaerovirga pectinivora
gatgaacgctggcggcgtgcctaacacatgcaagtcgagcggacgaatatcaatgaagccttcgggtggatttgatatgagttagcggcggacgggtgagtaacgcgtgggcaacctgccctatacaggaggataacaacgagaaatcgttgctaatactgcataagaccccagtaaggcatcttactgaggtaaaaactccggtggtataggatgggcccgcgtctgattagctagttggtaaggtaatggcttaccaaggcgacgatcagtagccgacctgagagggtgatcggccacattgggactgagacacggcccaaactcctacgggaggcagcagtggggaatattgcacaatgggggaaaccctgatgcagcaacgccgcgtgaaggaagaaggtcttcggattgtaaacttctatcagcagggaagataatgacggtacctgactaagaagccccggctaactacgtgccagcagccgcggtaatacgtagggggcaagcgttatccggaattactgggtgtaaagggtgcgtaggcggctatgcaagtcagatgtgaaagcccagggctcaaccctgggactgcatttgaaactgtgtagctagagtgcaggagaggtaagtggaattcctagtgtagcggtgaaatgcgtagatattaggaggaacaccagtggcgaaggcggcttactggactgtaactgacgctgaggcacgaaagcgtggggagcgaacaggattagataccctggtagtccacgccgtaaacgatgagtgctaggtgtcgggggtcgacagaccttcggtgccgaagttaacacattaagcactccacctggggagtacgatcgcaagattgaaactcaaaggaattgacgggggcccgcacaagcagtggagcatgtggtttaattcgaagcaacgcgaagaaccttaccaagtcttgacatccctctgacccggtccgtaacgggaccttctcttcggagcagaggtgacaggtggtgcatggttgtcgtcagctcgtgtcgtgagatgttgggttaagtcccgcaacgagcgcaacccttatctttagtagccagcaattcggttggggactctagagagactgccggggataactcggaggaaggtggggatgacgtcaaatcatcatgccccttatgacttgggctacacacgtgctacaatggtgacgacaaagggaagcgaaggagtgatctggagccaaccccaaaaaagtcatctcagttcggattgtagtctgcaactcgactacatgaagctggaattgctagtaatcgcgaatcagaatgtcgcggtgaatacgttcccgggccttgtacacaccgcccgtcacaccatgggagtcggaagcgcccgaagccggtgactcaaccgcaaggagagagccgtcgaaggtgaagtcgatgactggggtg

SEQ ID NO: 2178 - DNA, 1547 bp, Natribacillus halophilus
gacgaacgctggcggcgtgcctaatacatgcaagtcgaacggtctagaggtgagagttgagaggtgagaagtgagctgtcgtagacatcggcagagccgagtcacctaaatcccacttcccatttcccacctctcacttctagacagtggcggccgggtgagtaacacgtgggcaacctgccgcggagactggaataacaccgggaaaccggtgctaataccggatatgtccctgcctgcgcctgcaggcggggagaaaggcggtcttttgaccgccactccgcgaggggcccgcggcgcattagctggttggtggggtaaaagcctaccaaggcgacgatgcgtcgccgacctgagagggtgatcggccacactgggactgagacacggcccagactcctacgggaggcagcagtagggaatcatccgcaatggacgaaagtctgacggtgcaacgccgcgtgagtgaggaaggttttcggatcgtaaagctctgttgtgagggaagaaccccttcgggcggaaatacccggaggctgacggtacctcaccagaaagccacggctaactacgtgccagcagccgcggtaatacgtaggtggcaagcgttgtccggaattattgggcgtaaagggcacgcaggcggagcgttaagtctgatgtgaaaggccggggctcacccccggaatggcattggaaactggggctcttgagtgcagaagaggagagtggaattccacgtgtagcggtgaaatgcgtagagatgtggaggaacaccagtggcgaaggcgactctctgtctgcgactgacgctgaggtgcgaaagcgtggggagcgaacaggattagataccctggtagtccacgccgtaaacgttgagtgctaggtgttaggggtttcgatacccgtagtgccgaagcaaacgcaataagcactccgcctggggagtacgaccgcaaggttgaaactcaaaggaattgacgggggcccgcacaagcggtggagcatgtggtttaattcgaagcaacgcgaagcaccttaccaggccttgacatcctctgagcgccttggaaacaaggtttcccttttgggcagagtgacaggtggtgcatggttgtcgtcagctcgtgtcgtgagatgttgggttaagtcccgtaacgagcgcaacccttgaatgtcgttgccagcattgagttgggcactcgacattgactgccggtgacaaaccggaggaaggtggggatgacgtcaaatcatcatgccccttatggcctgggcgacacacgtgctacaatggacggtacagagggccgcgaagccgcgaggtggagcgaatccccgaaaagccgttctcagttcggattgcaggctgcaactcgcctgcatgaagctggaatcgctagtaatcgcggatcagcatgccgcggtgaatacgttcccgggccttgtacacaccgcccgtcacaccacgagagccggcaacacccgaagtcgatgaggcaacctacgggagccagtcgccgaaggtggggctggtgattggggtg

SEQ ID NO: 2179 - DNA, 1442 bp, Natronoflexus pectinivorans
gatgaacgctagcgacaggcctaacacatgcaagtcgaggggtaacaggggtttcggcccgctgacgaccggcgcacgggtgagtaacgcgtatgcaacctacctgtaacagggggatagctccctgaaaggggaattaacaccgcataagactacgctaccgcatggtagcgtggtaaaatatttataggttacagatgggcatgcgtgacattagctagttggcggggtaacggcccaccaaggcaacgatgtctaggggttctgagaggaaggtcccccacactggtactgagacacggaccagactcctacgggaggcagcagtgaggaatattggtcaatgggcgcaagcctgaaccagccatgtcgcgtgcaggaagactgccctatgggttgtaaactgcttttttacgggaagaaaaccagctacgtgtagttgtttgccggtaccgtaggaataagcatcggctaactccgtgccagcagccgcggtaatacggaggatgcgagcgttatccggatttattgggtttaaagggtgcgtaggcggaatagtaagtcaggggtgaaatactgcagctcaactgtagaattgcctttgatactgttattcttgagtatagatgaggtaggcggaatgtggtgtgtagcggtgaaatgcatagatataccacagaacaccgattgcgaaggcagcttactaaactataactgacgctgatgcacgaaagcgtgggtatcaaacaggattagataccctggtagtccacgccgtaaacgatgattactggttgtttgcgatacattgcaagtgactgagcgaaagcattaagtaatccacctggggagtacgtcggcaacgatgaaactcaaaggaattgacgggggcccgcacaagcggaggaacatgtggtttaattcgatgatacgcgaggaaccttacctgggtttaaatgggaagtgacagacttggaaacaggtttttcttcggacacttttcaaggtgctgcatggttgtcgtcagctcgtgccgtgaggtgtcgggttaagtcccataacgagcgcaacccctattgtcagttaccagcacgtaatggtggggactctggcaagactgccggtgtaaaccgagaggaaggtggggatgacgtcaaatcagcacggcccttacatccagggctacacacgtgttacaatggccggtacaaagggccgctacctcgcgagaggatgcgaatcttaaaagccggtctcagttcggatcggagtctgcaacccgactccgtgaagctggattcgctagtaatcgcgcatcagccatggcgcggtgaatacgttcccgggccttgtacacaccgcccgtcaagccatggaagccgggggtacctgaagtatgtaaccgcaaggagcgtcctagggtaaaactggtgactggggct

SEQ ID NO: 2180 - DNA, 1428 bp, Nautilia profundicola
agtgaacgctggcggcatgcttaacacatgcaagtcgaggggcagcaggcgggaacttcggttcccgtgctggcgaccggcggacgggtgagtaacacgtagctacttgccccacagagggggataacacaccgaaaggtgtgctaataccgcatacacccgagaggggaaagggcttcggtccgctgtgggatagggctgcggcgtatcagctagttggtgaggtaacggcttaccaaggcgatgacgcgtagctggtctgagaggatgatcagccacactggaactgagacacggtccagactcctacgggaggcagcagtggggaatattgggcaatgggggaaaccctgacccagcaatgccgcgtggaggaagaagcctttcggggtgtaaactccttttgcaggggaagaaactgacggtaccctgcgaataagctccggctaactccgtgccagcagccgcggtaatacggggggagcgagcgttactcggaatcactgggcgtaaagggtgcgtaggcggtttgataagttgggagtgaaatcctatggctcaaccatagaactgcttccaaaactgtcagactagagttcgggagaggccaagggaattcctggtgtaggggtgaaatccgtagagatcaggaggaatgccgaaagcgaaggcgcttggctggaacgatactgacgctgaggcacgaaagcgtggggagcaaacaggattagataccctggtagtccacgccctaaacgatgggtactagtggttggggggatagtccctcagtcacgcagcaaacgcgataagtaccccgcctggggagtacggccgcaaggctaaaactcaaaggaatagacggggacccgaacaagcggtggagcatgtggtttaattcgaagatacgcgaagaaccttacctgggcttgacatccctggaaccctgcagagatgcgggggtgctacttcggtagaaccaggagacaggtgctgcatggctgtcgtcagctcgtgtcgtgagatgttgggttaagtcccgcaacgagcgcaacccctgtccttagttggcatcagttcggctggccactctaaggagactgcccgggcaaccgggaggaaggtggggatgacgtcaagtcatcatggcccttatgtccagggcgacacacgtgctacaatggccgggacagagagatgcgaaaccgcgaggtggagcaaatctctaaacccggtctcagttcggattgcactctgcaactcgagtgcatgaaggcggaatcgctagtaatcgcggatcagccatgccgcggtgaatacgttcccgggtcttgtactcaccgcccgtcacaccatgggagtcgggttcacccgaagtcggtatccctaagataggggccgcctacggtggacccggcgactggggtg

SEQ ID NO: 2181 - DNA, 1355 bp, Neisseria animalis
cagcggggaagtgcttgcacttctgccggcgagtggcgaacgggtgagtaacatattggaacgtaccgagtaatgggggataactgatcgaaagattagctaataccgcatacgctctgaggaggaaagcaggggaccttcgggccttgcgttattcgagcggccaatatctgattagctggttggtggggtaaaggcctaccaaggcgacgatcagtagcgggtctgagaggatgatccgccacactgggactgagacacggcccagactcctacgggaggcagcagtggggaattttggacaatgggcgcaagcctgatccagccatgccgcgtgtctgaagaaggccttcgggttgtaaaggacttttgtcagggaagaaaagggagatgctaataccatttcctcatgacggtacctgaagaataagcaccggctaactacgtgccagcagccgcggtaatacgtagggtgcgagcgttaatcggaattactgggcgtaaagcgagcgcagacggttacttaagcaggatgtgaaatccccgggctcaacctgggaactgcgttctgaactgggtgactagagtatgtcagaggggggtagaattccacgtgtagcagtgaaatgcgtagagatgtggaggaataccgatggcgaaggcagccccctgggataatactgacgttcatgctcgaaagcgtgggtagcaaacaggattagataccctggtagtccacgccctaaacgatgtcaattagctgttgggcaacttgattgcttagtagcgtagctaacgcgtgaaattgaccgcctggggagtacggtcgcaagattaaaactcaaaggaattgacggggacccgcacaagcggtggatgatgtggattaattcgatgcaacgcgaagaaccttacctggtcttgacatgtacggaatcctccagagacggaggagtgccttcgggagccgtaacacaggtgctgcatggctgtcgtcagctcgtgtcgtgagatgttgggttaagtcccgcaacgagcgcaacccttgtcattagttgccatcatttggttgggcactctaatgagactgccggtgacaagccggaggaaggtggggatgacgtcaagtcctcatggcccttatgaccagggcttcacacgtcatacaatggtcggtacagagggtagccaagccgcgaggcggagccaatctcacaaaaccgatcgtagtccggattgcactctgcaactcgagtgcatgaagtcggaatcgctagtaatcgcaggtcagcatactgcggtgaatacgttcccgggtcttgtacacaccgcccgtcacaccatgggagtggggg

SEQ ID NO: 2182 - DNA, 1463 bp, Neisseria animaloris
attgaacgctggcggcatgctttacacatgcaagtcgaacggcagcacggaagagcttgctcttttggtggcgagtggcgaacgggtgagtaatacatcggaacgtaccgagtagtgggggataactgtccgaaaggatggctaataccgcatattctctgaggaggaaagcaggggaccttcgggccttgcgctatttgagcggccgatgtctgattagctagttggtggggtaaaggcctaccaaggcgacgatcagtagcgggtctgagaggatgatccgccacactgggactgagacacggcccagactcctacgggaggcagcagtggggaattttggacaatggggggaaccctgatccagccatgccgcgtgtctgaagaaggccttcgggttgtaaaggacttttgtcagggaagaaaagcttgaggttaatacccttgggtgatgacggtacctgaagaataagcaccggctaactacgtgccagcagccgcggtaatacgtagggtgcgagcgttaatcggaattactgggcgtaaagcgggcgcagacggttacttaagtcagatgtgaaatccccgggctcaacctgggaactgcgtttgaaactgggtgactagagtatgtcagaggggggtagaattccacgtgtagcagtgaaatgcgtagagatgtggaggaataccgatggcgaaggcagccccctgggataatactgacgttcatgcccgaaagcgtgggtagcaaacaggattagataccctggtagtccacgccctaaacgatgtcaattagctgttggggtacttgatgccttagtagcgtagctaacgcgtgaaattgaccgcctggggagtacggtcgcaagattaaaactcaaaggaattgacggggacccgcacaagcggtggatgatgtggattaattcgatgcaacgcgaagaaccttacctggtcttgacatgtacggaatcctccagagacggaggagtgccttcgggagccgtaacacaggtgctgcatggctgtcgtcagctcgtgtcgtgagatgttgggttaagtcccgcaacgagcgcaacccttgtcattagttgccatcattaagttgggcactctaatgagactgccggtgacaagccggaggaaggtggggatgacgtcaagtcctcatggcccttatgaccagggcttcacacgtcatacaatggtcggtacagagggtagccaagccgcgaggtggagccaatcccagaaaaccgatcgtagtccggattgcactctgcaactcgagtgcatgaagtcggaatcgctagtaatcgcaggtcagcatactgcggtgaatacgttcccgggtcttgtacacaccgcccgtcacaccatgggagtgggggataccagaagtaggtagggtaaccgtaaggagcccgcttaccacggtatgcttcatgactggggtg

SEQ ID NO: 2183 - DNA, 1463 bp, Neisseria arctica
attgaacgctggcggcatgctttacacatgcaagtcgaacggcagcacgaaagagcttgctcttttggtggcgagtggcgaacgggtgagtaatacattggaacgtaccgagtaatgggggataactgtccgaaaggatggctaataccgcatacgctctgaggaggaaagcgggggaccttcgggcctcgcgttattcgagcggccaatgtctgattagctagttggtggggtaaaggcctaccaaggcgacgatcagtagtgggtctgagaggatgatccgccacactgggactgagacacggcccagactcctacgggaggcagcagtggggaattttggacaatgggcgaaagcctgatccagccatgccgcgtgtctgaagaaggccttcgggttgtaaaggacttttgtcagggaagaaagggtttgggttaataccctgagcttatgacggtacctgaagaataagcaccggctaactacgtgccagcagccgcggtaatacgtagggtgcgagcgttaatcggaattactgggcgtaaagcgagcgcagacggttacttaagcaagatgtgaaagccccgggctcaacctgggaactgcgttttgaactgggtgactagagtgtgtcagaggggggtagaattccacgtgtagcagtgaaatgcgtagagatgtggaggaataccgatggcgaaggcagccccctgggataacactgacgttcatgctcgaaagcgtgggtagcaaacaggattagataccctggtagtccacgccctaaacgatgtcaattagctgttggggtacttgataccttagtagcgtagctaacgcgtgaaattgaccgcctggggagtacggtcgcaagattaaaactcaaaggaattgacggggacccgcacaagcggtggatgatgtggattaattcgatgcaacgcgaagaaccttacctggtcttgacatgtacggaaccctccagagacggaggggtgccttcgggaaccgtaacacaggtgctgcatggctgtcgtcagctcgtgtcgtgagatgttgggttaagtcccgcaacgagcgcaacccttgtcattagttgccatcatttagttgggcactctaatgagactgccggtgacaagccggaggaaggtggggatgacgtcaagtcctcatggcccttatgaccagggcttcacacgtcatacaatggtcggtacagagggtagccaagccgcgaggcggagccaatcccagaaaaccgatcgtagtccggattgcactctgcaactcgagtgcatgaagtcggaatcgctagtaatcgcaggtcagcatactgcggtgaatacgttcccgggtcttgtacacaccgcccgtcacaccatgggagtgggggataccagaattgggtagggtaaccttcgggagcccgcttaacacggtatgcttcatgactggggtg

SEQ ID NO: 2184 - DNA, 1463 bp, Neisseria bacilliformis
attgaacgctggcggcatgctttacacatgcaagtcggacggcagcacagagaagcttgcttcttgggtggcgagtggcgaacgggtgagtaacgcatcggaacgtaccgagtaatgggggataactgtccgaaaggacagctaataccgcatacgccctgagggggaaagcgggggatcttaggacctcgcgttattcgagcggccgatgtctgattagctggttggcggggtaaaggcccaccaaggcgacgatcagtagcgggtctgagaggatgatccgccacactgggactgagacacggcccagactcctacgggaggcagcagtggggaattttggacaatgggcgcaagcctgatccagccatgccgcgtgtctgaagaaggccttcgggttgtaaaggacttttgtcagggaagaaaaggggcatgttaataccgtgctctgatgacggtacctgaagaataagcaccggctaactacgtgccagcagccgcggtaatacgtagggtgcgagcgttaatcggaattactgggcgtaaagcgggcgcagacggttacttaagcgggatgtgaaatccccgggctcaacccgggaactgcgttccgaactgggtggctagagtgtgtcagaggggggtagaattccacgtgtagcagtgaaatgcgtagagatgtggaggaataccgatggcgaaggcagccccctgggataacactgacgttcatgcccgaaagcgtgggtagcaaacaggattagataccctggtagtccacgccctaaacgatgtcgattagctgttggggcacttgatgccttagtagcgtagctaacgcgtgaaatcgaccgcctggggagtacggtcgcaagattaaaactcaaaggaattgacggggacccgcacaagcggtggatgatgtggattaattcgatgcaacgcgaagaaccttacctggtcttgacatgtacggaaccttccagagacggaagggtgccttcgggagccgtaacacaggtgctgcatggctgtcgtcagctcgtgtcgtgagatgttgggttaagtcccgcaacgagcgcaacccttgtcattagttgccatcatttggttgggcactctaatgagactgccggtgacaaaccggaggaaggtggggatgacgtcaagtcctcatggcccttatgaccagggcttcacacgtcatacaatggtcggtacagagggtagccaagccgcgaggcggagccaatcccagaaaaccgatcgtagtccggattgcactctgcaactcgagtgcatgaagtcggaatcgctagtaatcgcaggtcagcatactgcggtgaatacgttcccgggtcttgtacacaccgcccgtcacaccatgggagtgggggataccagaagcaggtaggctaaccgcaagggggccgcttgccacggtatgcttcatgactggggtg

SEQ ID NO: 2185 - DNA, 1463 bp, Neisseria dentiae
attgaacgctggcggcatgctttacacatgcaagtcggacggcagcacagagaagcttgcttcttgggtggcgagtggcgaacgggtgagtaacgcatcggaacgtaccgagtagtgggggataactgtccgaaaggatggctaataccgcatacgctttgagaaggaaagcgggggctcttcggacctcgcgctattcgagcggccgatgtctgattagctggttggtggggtaaaggcctaccaaggcgacgatcagtagcgggtctgagaggatgatccgccacactgggactgagacacggcccagactcctacgggaggcagcagtggggaattttggacaatgggggcaaccctgatccagccatgccgcgtgtctgaagaaggccttcgggttgtaaaggacttttgtcagggaagaaaagcttcgggttaataccccggggtgatgacggtacctgaagaataagcaccggctaactacgtgccagcagccgcggtaatacgtagggtgcgagcgttaatcggaattactgggcgtaaagcgggcgcagacggttacttaagcaggatgtgaaatccccgggcttaacctgggaactgcgttctgaactgggtgactagagtatgtcagaggggggtagaattccacgtgtagcagtgaaatgcgtagagatgtggaggaataccgatggcgaaggcagccccctgggataatactgacgttcatgcccgaaagcgtgggtagcaaacaggattagataccctggtagtccacgccctaaacgatgtcaattagctgttggggtacttgataccttagtagcgtagctaacgcgtgaaattgaccgcctggggagtacggtcgcaagattaaaactcaaaggaattgacggggacccgcacaagcggtggatgatgtggattaattcgatgcaacgcgaagaaccttacctggtcttgacatgtacggaaccctccagagacggaggggtgccttcgggagccgtaacacaggtgctgcatggctgtcgtcagctcgtgtcgtgagatgttgggttaagtcccgcaacgagcgcaacccttgtcattagttgccatcatttggttgggcactctaatgagactgccggtgacaagccggaggaaggtggggatgacgtcaagtcctcatggcccttatgaccagggcttcacacgtcatacaatggtcggtacagagggtagccaagccgcgaggcggagccaatcccaaaaaaccgatcgtagtccggattgcactctgcaactcgagtgcatgaagtcggaatcgctagtaatcgcaggtcagcatactgcggtgaatacgttcccgggtcttgtacacaccgcccgtcacaccatgggagtgggggataccagaagtaggtaggctaaccgcaaggaggccgcttaccacggtatgcttcatgactggggtg

SEQ ID NO: 2186 - DNA, 1463 bp, Neisseria dumasiana
attgaacgctggcggcatgctttacacatgcaagtcggacggcagcacagagaagcttgcttcttgggtggcgagtggcgaacgggtgagtaacgcatcggaacgtaccgagtagtgggggataactgtccgaaaggatggctaataccgcatacgctttgagaaggaaagcgggggatcttcggacctcgcgctattcgagcggccgatgtctgattagctagttggtggggtaaaggcctaccaaggcgacgatcagtagcgggtctgagaggatgatccgccacactgggactgagacacggcccagactcctacgggaggcagcagtggggaattttggacaatgggcgcaagcctgatccagccatgccgcgtgtctgaagaaggccttcgggttgtaaaggacttttgtcagggaagaaaagcttgaggctaatacccttgagtgatgacggtacctgaagaataagcaccggctaactacgtgccagcagccgcggtaatacgtagggtgcgagcgttaatcggaattactgggcgtaaagcgggcgcagacggttacttaagtcagatgtgaaatccccgggctcaacctgggaactgcgtttgaaactgggtagctagagtatgtcagaggggggtagaattccacgtgtagcagtgaaatgcgtagagatgtggaggaataccgatggcgaaggcagccccctgggataatactgacgttcatgcccgaaagcgtgggtagcaaacaggattagataccctggtagtccacgccctaaacgatgtcaattagctgttggggcacttgatgccttagtagcgtagctaacgcgtgaaattgaccgcctggggagtacggtcgcaagattaaaactcaaaggaattgacggggacccgcacaagcggtggatgatgtggattaattcgatgcaacgcgaagaaccttacctggtcttgacatgtacggaatcctccagagacggaggagtgccttcgggagccgtaacacaggtgctgcatggctgtcgtcagctcgtgtcgtgagatgttgggttaagtcccgcaacgagcgcaacccttgtcattagttgccatcattaagttgggcactctaatgagactgccggtgacaagccggaggaaggtggggatgacgtcaagtcctcatggcccttatgaccagggcttcacacgtcatacaatggtcggtacagagggtagccaagccgcgaggtggagccaatcccacaaaaccgatcgtagtccggattgcactctgcaactcgagtgcatgaagtcggaatcgctagtaatcgcaggtcagcatactgcggtgaatacgttcccgggtcttgtacacaccgcccgtcacaccatgggagtgggggataccagaagtaggtagggtaaccgcaaggagcccgcttaccacggtatgcttcatgactggggtg

SEQ ID NO: 2187 - DNA, 1462 bp, Neisseria iguanae
attgaacgctggcggcatgctttacacatgcaagtcggacggcagcacagggaagcttgcttcttgggtggcgagtggcgaacgggtgagtaacatatcggaacgtaccgagtagagggggataactgatcgaaagatgagctaataccgcatattctctgaggaggaaagccggggaccttcgggcctggcgctatttgagcggccgatatctgattagctggttggtggggtaaaggcctaccaaggcgacgatcagtagcgggtctgagaggatgatccgccacactgggactgagacacggcccagactcctacgggaggcagcagtggggaattttggacaatgggcgcaagcctgatccagccatgccgcgtgtctgaagaaggccttcgggttgtaaaggacttttgtcagggaagaaaagcaagatgcgaataacattttgtgatgacggtacctgaagaataagcaccggctaactacgtgccagcagccgcggtaatacgtagggtgcgagcgttaatcggaattactgggcgtaaagcgagcgcagacggttacttaagcaagatgtgaaagccccgggctcaacccgggaacggcgttttgaactgggtggctggagtgtgtcagaggggggtagaattccacgtgtagcagtgaaatgcgtagagatgtggaggaataccgatggcgaaggcagccccctgggataacactgacgttcatgctcgaaagcgtgggtagcaaacaggattagataccctggtagtccacgccctaaacgatgtcaattggctgttgggcaacttgattgcttagtagcgtagctaacgcgtgaaattgaccgcctggggagtacggtcgcaagattaaaactcaaaggaattgacggggacccgcacaagcggtggatgatgtggattaattcgatgcaacgcgaagaaccttacctggtcttgacatgtacggaaccttccggagacggaggggtgccttcgggagccgtaacacaggtgctgcatggctgtcgtcagctcgtgtcgtgagatgttgggttaagtcccgcaacgagcgcaacccttgtcattagttgccatcattcagttgggcactctaatgagactgccggtgacaagccggaggaaggtggggatgacgtcaagtcctcatggcccttatgaccagggcttcacacgtcatacaatggtcggtacagagggtagccaagccgcgaggcggagccaatctcacaaaaccgatcgtagtccggattgcactctgcaactcgagtgcatgaagtcggaatcgctagtaatcgcaggtcagcatactgcggtgaatacgttcccgggtcttgtacacaccgcccgtcacaccatgggagtgggggataccagaagtagatagggtaaccgtaaggagcccgttaccacggtatgcttcatgactggggtg

SEQ ID NO: 2188 - DNA, 1463 bp, Neisseria lactamica
attgaacgctggcggcatgctttacacatgcaagtcggacggcagcggggtagtgcttgcactactgccggcgagtggcgaacgggtgagtaacatatcggaacgtaccgggcagtgggggataactgatcgaaagatcagctaataccgcatattttctgaggaagaaagcaggggaccttcgggccttgcgctatccgagcggccgatatctgattagctggttggcggggtaaaggcccaccaaggcgacgatcagtagcgggtctgagaggacgatccgccacactgggactgagacacggcccagactcctacgggaggcagcagtggggaattttggacaatgggcgcaagcctgatccagccatgccgcgtgtctgaagaaggccttcgggttgtaaaggacttttgtcggggaagaaaaggtcggggttaataccctcggctgatgacggtacccgaagaataagcaccggctaactacgtgccagcagccgcggtaatacgtagggtgcgagcgttaatcggaattactgggcgtaaagcgggcgcagacggttacttaagcaggatgtgaaatccccgggctcaacccgggaattgcgttctgaactgggtggctagagtgtgtcagagggaggtagaattccacgtgtagcagtgaaatgcgtagagatgtggaggaataccgatggcgaaggcagcctcctgggataacactgacgttcatgcccgaaagcgtgggtagcaaacaggattagataccctggtagtccacgccctaaacgatgtcgattagctgttgggcagcctgactgcttggtagcgaagctaacgcgtgaaatcgaccgcctggggagtacggtcgcaagattaaaactcaaaggaattgacggggacccgcacaagcggtggatgatgtggattaattcgatgcaacgcgaagaaccttacccggttttgacatgtacggaatcctccggagacgggggagtgccttcgggagccgtaacacaggtgctgcatggctgtcgtcagctcgtgtcgtgagatgttgggttaagtcccgcaacgagcgcaacccttgtcattagttgccatcattcagttgggcactctaatgagactgccggtgacaagccggaggaaggtggggatgacgtcaagtcctcatggcccttatgaccggggcttcacacgtcatacaatggtcggtacagagggtagccaagccgcgaggcggagccaatctcacaaaaccgatcgtagtccggattgcactctgcaactcgagtgcatgaagtcggaatcgctagtaatcgcaggtcagcatactgcggtgaatacgttcccgggtcttgtacacaccgcccgtcacaccatgggagtgggggataccagaagcaggtaggctaaccgcaaggaggccgcttgccacggtatgcttcatgactggggtg

SEQ ID NO: 2189 - DNA, 1463 bp, Neisseria polysaccharea
attgaacgctggcggcatgctttacacatgcaagtcggacggcagcacagagaagcttgcttcttgggtggcgagtggcgaacgggtgagtaacatatcggaacgtaccgagtagtgggggataactgatcgaaagatcagctaataccgcatacgtcttgagagggaaagcaggggaccttcggaccttgcgctattcgagcggccgatatctgattagctagttggtggggtaaaggcctaccaaggcgacgatcagtagcgggtctgagaggatgatccgccacactgggactgagacacggcccagactcctacgggaggcagcagtggggaattttggacaatgggcgcaagcctgatccagccatgccgcgtgtctgaagaaggccttcgggttgtaaaggacttttgtcagggaagaaaaggctgttgctaatatcagcggctgatgacggtacctgaagaataagcaccggctaactacgtgccagcagccgcggtaatacgtagggtgcgagcgttaatcggaattactgggcgtaaagcgggcgcagacggttacttaagcaggatgtgaaatccccgggctcaacccgggaactgcgttctgaactgggtgactcgagtgtgtcagagggaggtagaattccacgtgtagcagtgaaatgcgtagagatgtggaggaataccgatggcgaaggcagcctcctgggataacactgacgttcatgcccgaaagcgtgggtagcaaacaggattagataccctggtagtccacgccctaaacgatgtcaattagctgttgggcaacttgattgcttggtagcgtagctaacgcgtgaaattgaccgcctggggagtacggtcgcaagattaaaactcaaaggaattgacggggacccgcacaagcggtggatgatgtggattaattcgatgcaacgcgaagaaccttacctggtcttgacatgtacggaatcctccagagacggaggagtgccttcgggagccgtaacacaggtgctgcatggctgtcgtcagctcgtgtcgtgagatgttgggttaagtcccgcaacgagcgcaacccttgtcattagttgccatcattcggttgggcactctaatgagactgccggtgacaagccggaggaaggtggggatgacgtcaagtcctcatggcccttatgaccagggcttcacacgtcatacaatggtcggtacagagggtagccaagccgcgaggtggagccaatctcacaaaaccgatcgtagtccggattgcactctgcaactcgagtgcatgaagtcggaatcgctagtaatcgcaggtcagcatactgcggtgaatacgttcccgggtcttgtacacaccgcccgtcacaccatgggagtgggggataccagaagtgggtaggataaccgcaaggggtccgcttaccacggtatgcttcatgactggggtg

SEQ ID NO: 2190 - DNA, 1463 bp, Neisseria shayeganii
attgaacgctggcggcatgctttacacatgcaagtcggacggcagcacagagaagcttgcttcttgggtggcgagtggcgaacgggtgagtaacgcatcggaacgtaccgagtagtgggggataactgtccgaaaggatggctaataccgcatacgctttgagaaggaaagcgggggatcttcggacctcgcgctattcgagcggccgatgtctgattagctagttggtggggtaaaggcctaccaaggcgacgatcagtagcgggtctgagaggatgatccgccacactgggactgagacacggcccagactcctacgggaggcagcagtggggaattttggacaatgggcgcaagcctgatccagccatgccgcgtgtctgaagaaggccttcgggttgtaaaggacttttgtcagggaagaaaagctttgggttaataccctggagtgatgacggtacctgaagaataagcaccggctaactacgtgccagcagccgcggtaatacgtagggtgcgagcgttaatcggaattactgggcgtaaagcgagcgcagacggtttgttaagcaggatgtgaaatccccgggctcaacctgggaactgcgttctgaactggcaggctagagtatgtcagaggggggtagaattccacgtgtagcagtgaaatgcgtagagatgtggaggaataccgatggcgaaggcagccccctgggataatactgacgttcatgctcgaaagcgtgggtagcaaacaggattagataccctggtagtccacgccctaaacgatgtcaattagctgttggggtgcttgacaccttagtagcgtagctaacgcgtgaaattgaccgcctggggagtacggtcgcaagattaaaactcaaaggaattgacggggacccgcacaagcggtggatgatgtggattaattcgatgcaacgcgaagaaccttacctggtcttgacatgtacggaatcctccagagacggaggagtgccttcgggagccgtaacacaggtgctgcatggctgtcgtcagctcgtgtcgtgagatgttgggttaagtcccgcaacgagcgcaacccttgtcattagttgccatcatttagttgggcactctaatgagactgccggtgacaaaccggaggaaggtggggatgacgtcaagtcctcatggcccttatgaccagggcttcacacgtcatacaatggtcggtacagagggtagccaagccgcgaggcggagccaatcccaaaaaaccgatcgtagtccggattgcactctgcaactcgagtgcatgaagtcggaatcgctagtaatcgcaggtcagcatactgcggtgaatacgttcccgggtcttgtacacaccgcccgtcacaccatgggagtgggggataccagaagtaggtagggtaaccgcaaggagcccgcttaccacggtatgcttcatgactggggtg

SEQ ID NO: 2191 - DNA, 1463 bp, Neisseria sicca
attgaacgctggcggcatgctttacacatgcaagtcggacggcagcacagagaagcttgcttcttgggtggcgagtggcgaacgggtgagtaacatatcggaacgtaccgagcagtgggggataactaatcgaaagattagctaataccgcatatcttctgaggaagaaagcaggggaccatttggccttgcgctgtttgagcggccgatatctgattagctagttggtggggtaaaggcctaccaaggcgacgatcagtagcgggtctgagaggatgatccgccacactgggactgagacacggcccagactcctacgggaggcagcagtggggaattttggacaatgggcgcaagcctgatccagccatgccgcgtgtctgaagaaggccttcgggttgtaaaggacttttgtcagggaagaaaagggcggggttaatacccctgtctgatgacggtacctgaagaataagcaccggctaactacgtgccagcagccgcggtaatacgtagggtgcgagcgttaatcggaattactgggcgtaaagcgggcgcagacggttacttaagcaggatgtgaaatccccgggctcaacttgggaactgcgttctgaactgggtgactagagtgtgtcagagggaggtagaattccacgtgtagcagtgaaatgcgtagagatgtggaggaataccgatggcgaaggcagcctcctgggataacactgacgttcatgcccgaaagcgtgggtagcaaacaggattagataccctggtagtccacgccctaaacgatgtcgattagctgttgggcagcatgactgcttagtagcgaagctaacgcgtgaaatcgaccgcctggggagtacggtcgcaagattaaaactcaaaggaattgacggggacccgcacaagcggtggatgatgtggattaattcgatgcaacgcgaagaaccttacctggtcttgacatgtacggaaccctccagagacggaggggtgccttcgggagccgtaacacaggtgctgcatggctgtcgtcagctcgtgtcgtgagatgttgggttaagtcccgcaacgagcgcaacccttgtcattagttgccatcattaagttgggcactctaatgagactgccggtgacaagccggaggaaggtggggatgacgtcaagtcctcatggcccttatgaccagggcttcacacgtcatacaatggtcggtacagagggtagccaagccgcgaggtggagccaatctcacaaaaccgatcgtagtccggattgcactctgcaactcgagtgcatgaagtcggaatcgctagtaatcgcaggtcagcatactgcggtgaatacgttcccgggtcttgtacacaccgcccgtcacaccatgggagtgggggataccagaagtaggtagggtaaccgcaaggagcccgcttaccacggtatgcttcatgactggggtg

SEQ ID NO: 2192 - DNA, 1463 bp, Neisseria wadsworthii
attgaacgctggcggcatgctttacacatgcaagtcgaacggcagcgggggagagcttgctttcctgccggcgagtggcgaacgggtgagtaatgcatcggaacgtaccgagtagtgggggataactgtccgaaaggatggctaataccgcatacgctttgcgaaggaaagcgggggctcttaggacctcgcgctattcgagcggccgatgtctgattagctagttggtggggtaaaggcctaccaaggcgacgatcagtagcgggtctgagaggatgatccgccacactgggactgagacacggcccagactcctacgggaggcagcagtggggaattttggacaatggggggaaccctgatccagccatgccgcgtgtctgaagaaggccttcgggttgtaaaggacttttgtcagggaagaaaagcttcgggttaataccctggagtgatgacggtacctgaagaataagcaccggctaactacgtgccagcagccgcggtaatacgtagggtgcgagcgttaatcggaattactgggcgtaaagcgagcgcagacggttacttaagcaggatgtgaaatccccgggctcaacctgggaactgcgttctgaactgggtgactagagtatgtcagaggggggtagaattccacgtgtagcagtgaaatgcgtagagatgtggaggaataccgatggcgaaggcagccccctgggataatactgacgttcatgctcgaaagcgtgggtagcaaacaggattagataccctggtagtccacgccctaaacgatgtcaattagctgttggggcacttgatgctttagtagcgtagctaacgcgtgaaattgaccgcctggggagtacggtcgcaagattaaaactcaaaggaattgacggggacccgcacaagcggtggatgatgtggattaattcgatgcaacgcgaagaaccttacctggtcttgacatgtacggaatcctccggagacggaggagtgccttcgggagccgtaacacaggtgctgcatggctgtcgtcagctcgtgtcgtgagatgttgggttaagtcccgcaacgagcgcaacccttgtcattagttgccatcatttagttgggcactctaatgagactgccggtgacaaaccggaggaaggtggggatgacgtcaagtcctcatggcccttatgaccagggcttcacacgtcatacaatggtcggtacagagggtagccaagccgcgaggtggagccaatcccacaaaaccgatcgtagtccggattgcactctgcaactcgagtgcatgaagtcggaatcgctagtaatcgcaggtcagcatactgcggtgaatacgttcccgggtcttgtacacaccgcccgtcacaccatgggagtgggggataccagaagtaggtagggtaaccgcaaggagcccgcttaccacggtatgcttcatgactggggtg

SEQ ID NO: 2193 - DNA, 1463 bp, Neisseria weaveri
attgaacgctggcggcatgctttacacatgcaagtcggacggcagcacagagaagcttgcttcttgggtggcgagtggcgaacgggtgagtaatatattggaacgtaccgagtaatgggggataacttgccgaaaggtaagctaataccgcatacgctctgaggaggaaagcaggggaccttcgggccttgcgttattcgagcggccaatatctgattagctagttggtggggtaaaggcctaccaaggcgacgatcagtagcgggtctgagaggatgatccgccacactgggactgagacacggcccagactcctacgggaggcagcagtggggaattttggacaatgggcgcaagcctgatccagccatgccgcgtgtctgaagaaggccttcgggttgtaaaggacttttgtcagggaagaaaaggttgtggctaatatccatgactgatgacggtacctgaagaataagcaccggctaactacgtgccagcagccgcggtaatacgtagggtgcgagcgttaatcggaattactgggcgtaaagcgagcgcagacggttacttaagcaggatgtgaaatccccgggctcaacctgggaactgcgttctgaactgggtgactagagtatgtcagaggggggtagaattccacgtgtagcagtgaaatgcgtagagatgtggaggaataccgatggcgaaggcagccccctgggataatactgacgttcatgctcgaaagcgtgggtagcaaacaggattagataccctggtagtccacgccctaaacgatgtcaattagctgttgggcaacttgattgcttagtagcgtagctaacgcgtgaaattgaccgcctggggagtacggtcgcaagattaaaactcaaaggaattgacggggacccgcacaagcggtggatgatgtggattaattcgatgcaacgcgaagaaccttacctggtcttgacatgtacggaatcctccggagacggaggagtgccttcgggagccgtaacacaggtgctgcatggctgtcgtcagctcgtgtcgtgagatgttgggttaagtcccgcaacgagcgcaacccttgtcattagttgccatcattaagttgggcactctaatgagactgccggtgacaaaccggaggaaggtggggatgacgtcaagtcctcatggcccttatgaccagggcttcacacgtcatacaatggtcggtacagagggtagccaagccgcgaggtggagccaatctcacaaaaccgatcgtagtccggattgcactctgcaactcgagtgcatgaagtcggaatcgctagtaatcgcaggtcagcatactgcggtgaatacgttcccgggtcttgtacacaccgcccgtcacaccatgggagtgggggataccagaagtaggtagggtaaccgcaaggagcccgcttaccacggtatgcttcatgactggggtg

SEQ ID NO: 2194 - DNA, 1550 bp, Neisseria zalophi
aacgctggcggcatgctttacacatgcaagtcgaacggcagcacggaagagcttgctcttttggtggcgagtggcgaacgggtgagtaatgcatcggaacgtaccgagtagtgggggataactgtccgaaaggatggctaataccgcatacgctttgagaaggaaagcgggggctcttaggacctcgcgctattcgagcggccgatgtctgattagctagttggtggggtaagagcctaccaaggcgacgatcagtagcgggtctgagaggatgatccgccacactgggactgagacacggcccagactcctacgggaggcagcagtggggaattttggacaatgggggcaaccctgatccagccatgccgcgtgtctgaagaaggccttcgggttgtaaaggacttttgtcagggaagaaagggtttgtgctaataccacgaacatatgacggtacctgaagaataagcaccggctaactacgtgccagcagccgcggtaatacgtagggtgcgagcgttaatcggaattactgggcgtaaagcgggcgcagacggttacttaagtcagatgtgaaatccccgggctcaacctgggaactgcgtttgaaactgggtagctagagtatgtcagaggggggtagaattccacgtgtagcagtgaaatgcgtagagatgtggaggaataccgatggcgaaggcagccccctgggataatactgacgttcatgcccgaaagcgtgggtagcaaacaggattagataccctggtagtccacgccctaaacgatgtcaattagctgttggggcacttgatgccttagtagcgtagctaacgcgtgaaattgaccgcctggggagtacggtcgcaagattaaaactcaaaggaattgacggggacccgcacaagcggtggatgatgtggattaattcgatgcaacgcgaagaaccttacctggtcttgacatgtacggaatcctccagagacggaggagtgccttcgggagccgtaacacaggtgctgcatggctgtcgtcagctcgtgtcgtgagatgttgggttaagtcccgcaacgagcgcaacccttgtcattagttgccatcattaagttgggcactctaatgagactgccggtgacaagccggaggaaggtggggatgacgtcaagtcctcatggcccttatgaccagggcttcacacgtcatacaatggtcggtacagagggtagccaagccgcgaggtggagccaatctcataaaaccgatcgtagtccggattgcactctgcaactcgagtgcatgaagtcggaatcgctagtaatcgcaggtcagcatactgcggtgaatacgttcccgggtcttgtacacaccgcccgtcacaccatgggagtgggggataccagaagtaggtagggtaaccgcaaggagcccgcttaccacggtatgcttcatgactggggtgaagtcgtaacaaggtagccgtaggggaacctgcggctggatcacctcctttctagagaaaagaagaggttgttgggtactcacacttatcg

SEQ ID NO: 2195 - DNA, 1463 bp, Neisseria zoodegmatis
attgaacgctggcggcatgctttacacatgcaagtcggacggcagcacagagaagcttgcttcttgggtggcgagtggcgaacgggtgagtaatgcatcggaacgtaccgagtagtgggggataactgtccgaaaggatggctaataccgcatacgctttgagaaggaaagcaggggctcttcggaccttgcgctattcgagcggccgatgtctgattagctggttggtggggtaaaggcctaccaaggcgacgatcagtagcgggtctgagaggatgatccgccacactgggactgagacacggcccagactcctacgggaggcagcagtggggaattttggacaatgggcgcaagcctgatccagccatgccgcgtgtctgaagaaggccttcgggttgtaaaggacttttgtcagggaagaaaaggttgtggttaatacccatgactgatgacggtacctgaagaataagcaccggctaactacgtgccagcagccgcggtaatacgtagggtgcgagcgttaatcggaattactgggcgtaaagcgggcgcagacggttacttaagtcagatgtgaaatccccgggctcaacctgggaactgcgtttgaaactgggtgactagagtatgtcagaggggggtagaattccacgtgtagcagtgaaatgcgtagagatgtggaggaataccgatggcgaaggcagccccctgggataatactgacgttcatgcccgaaagcgtgggtagcaaacaggattagataccctggtagtccacgccctaaacgatgtcaattagctgttgggcaacttgattgcttagtagcgtagctaacgcgtgaaattgaccgcctggggagtacggtcgcaagattaaaactcaaaggaattgacggggacccgcacaagcggtggatgatgtggattaattcgatgcaacgcgaagaaccttacctggtcttgacatgtacggaatcctccagagacggaggagtgccttcgggagccgtaacacaggtgctgcatggctgtcgtcagctcgtgtcgtgagatgttgggttaagtcccgcaacgagcgcaacccttgtcattagttgccatcatttggttgggcactctaatgagactgccggtgacaagccggaggaaggtggggatgacgtcaagtcctcatggcccttatgaccagggcttcacacgtcatacaatggtcggtacagagggtagccaagccgcgaggtggagccaatcccacaaaaccgatcgtagtccggattgcactctgcaactcgagtgcatgaagtcggaatcgctagtaatcgcaggtcagcatactgcggtgaatacgttcccgggtcttgtacacaccgcccgtcacaccatgggagtgggggataccagaagtaggtagggtaaccgcaaggagcccgcttaccacggtatgcttcatgactggggtg

SEQ ID NO: 2196 - DNA, 1411 bp, Neoasaia chiangmaiensis
agcgaacgctggcggcatgcttaacacatgcaagtcgcacggacctttcggggtgagtggcggacgggtgagtaacgcgtagggatttatccacgggtgggggataacactgggaaactggtgctaataccgcatgatgcctgagggccaaaggcgtaagtcgcctgtggaggagcctgcgttcgattagcttgttggtggggtaaaggcctaccaaggcgatgatcgatagctggtctgagaggatgatcagccacactgggactgagacacggcccagactcctacgggaggcagcagtggggaatattggacaatgggcgaaagcctgatccagcaatgccgcgtgtgtgaagaaggtcttcggattgtaaagcactttcgacggggacgatgatgacggtacccgtagaagaagccccggctaacttcgtgccagcagccgcggtaatacgaagggggctagcgttgctcggaattactgggcgtaaagggcgcgtaggcggttgtgacagtcagatgtgaaattcctgggcttaacctgggggctgcatttgatacgtgacgactagagtgtgagagagggttgtggaattcccagtgtagaggtgaaattcgtagatattgggaagaacaccggtggcgaaggcggcaacctggctcataactgacgctgaggcgcgaaagcgtggggagcaaacaggattagataccctggtagtccacgctgtaaacgatgtgtgctggatgttgggaaacttagtttttcagtgtcgaagctaacgcgctaagcacaccgcctggggagtacggccgcaaggttgaaactcaaaggaattgacgggggcccgcacaagcggtggagcatgtggtttaattcgaagcaacgcgcagaaccttaccagggcttgacatggggaggctgtgtccagagatgggcatttcccgcaagggacctcctgcacaggtgctgcatggctgtcgtcagctcgtgtcgtgagatgttgggttaagtcccgcaacgagcgcaaccctcgcctttagttgccagcatgtttgggtgggcactctagaggaactgccggtgacaagccggaggaaggtggggatgacgtcaagtcctcatggcccttatgtcctgggctacacacgtgctacaatggcggtgacagtgggaagctagacagtgatgtcatgctgatctctaaaaaccgtctcagttcggattgtactctgcaactcgagtgcatgaaggtggaatcgctagtaatcgcggatcagcatgccgcggtgaatacgttcccgggccttgtacacaccgcccgtcacaccatgggagttggttcgaccttaagctggtgagcgaaccgcaaggacgcagccaaccacggtcgggttagcgactagggtg

SEQ ID NO: 2197 - DNA, 1406 bp, Neokomagataea tanensis
agcgaacgctggcggcatgcttaacacatgcaagtcgcacggacctttcggggtgagtggcggacgggtgagtaacgcgtaggtatctatccatgggtgggggataacattgggaaactggtgctaataccgcatgacacctgagggtcaaaggcgcaagtcgcctgtggaggagcctgcgttcgattagctagttggttgggtaatggctgaccaaggcgatgatcgatagctggtttgagaggatgatcagccacactgggactgagacacggcccagactcctacgggaggcagcagtggggaatattggacaatgggggcaaccctgatccagcaatgccgcgtgtgtgaagaaggtcttcggattgtaaagcactttcgttggggacgatgatgacggtacccaaagaagaagccccggctaacttcgtgccagcagccgcggtaatacgaagggggctagcgttgctcggaatgactgggcgtaaagggcgcgtaggcggtttaagcagtcagatgtgaaatccccgggcttaacctgggaactgcatttgagacgcttagactagagttcgagagagggttgtggaattcccagtgtagaggtgaaattcgtagatattgggaagaacaccggtggcgaaggcggcaacctggctcgatactgacgctgaggcgcgaaagcgtggggagcaaacaggattagataccctggtagtccacgctgtaaacgatgtgtgctggatgttaggtaacttagttacttagtgtcgaagctaacgcgctaagcacaccgcctggggagtacggccgcaaggttgaaactcaaaggaattgacgggggcccgcacaagcggtggagcatgtggtttaattcgaagcaacgcgcagaaccttaccagggcttgcatggggaggctgtagtcagagatgactatttcttcggacctcccgcacaggtgctgcatggctgtcgtcagctcgtgtcgtgagatgttgggttaagtcccgcaacgagcgcaacccttgtctttagttgccatcaggttgggctgggcactctagagagactgccggtgacaagccggaggaaggtggggatgacgtcaagtcctcatggcccttatgtcctgggctacacacgtgctacaatggcggtgacagtgggaagctatgtggtgacacagtgctgatctctaaaagccgtctcagttcggattgtactctgcaactcgagtacatgaaggtggaatcgctagtaatcgcggatcagcatgccgcggtgaatacgttcccgggccttgtacacaccgcccgtcacaccatgggagttggttcgaccttaagccggtgagcgaaccgtaaggacgcagccgaccacggacgggtcagcgactggggtg

SEQ ID NO: 2198 - DNA, 1403 bp, Neorhizobium galegae
  misc_feature (50)..(53): n is a, c, g, or t
  misc_feature (937)..(937): n is a, c, g, or t
aacgaacgctggcggcaggcttaacacatgcaagtcgagcgcctcgcaannnnagcggcagacgggtgagtaacgcgtgggaatctacccatccctacggaacaactccgggaaactggagctaattccgtatacgcccttcgggggaaagatttatcggggatggatgagcccgcgttggattagctagttggtggggtaaaggcctaccaaggcgacgatccatagctggtctgagaggatgatcagccacattgggactgagacacggcccaaactcctacgggaggcagcagtggggaatattggacaatgggcgcaagcctgatccagccatgccgcgtgagtgatgaaggtcttaggattgtaaagctctttcaccggagaagataatgacggtatccggagaagaagccccggctaacttcgtgccagcagccgcggtaatacgaagggggctagcgttgttcggaattactgggcgtaaagcgcacgtaggcggatatttaagtcaggggtgaaatcccagagctcaactctggaactgcctttgatactgggtatcttgagtatggaagaggtaagtggaattgcgagtgtagaggtgaaattcgtagatattcgcaggaacaccagtggcgaaggcggcttactggtccattactgacgctgaggtgcgaaagcgtggggagcaaacaggattagataccctggtagtccacgccgtaaacgatgaatgttagccgtcggcaagtttacttgtcggtggcgcacgtaacgcattaaacattccgcctggggagtacggtcgcaagattaaaactcaaaggaattgacgggggcccgcacaagcggtggagcatgtggtttaattcgaagcaacgcgcagaaccttaccagcccttgacatgcccggacagctacagagatgtagtgntcccttcggggaccgggacacaggtgctgcatggctgtcgtcagctcgtgtcgtgagatgttgggttaagtcccgcaacgagcgcaaccctcgcccttagttgccagcattcagttgggcactctaaggggactgccggtgataagccgagaggaaggtggggatgacgtcaagtcctcatggcccttacgggctgggctacacacgtgctacaatggtggtgacagtgggcagcgaaggagcgatcccgagctaatctccaaaagccatctcagttcggattgcactctgcaactcgagtgcatgaagttggaatcgctagtaatcgcggatcagcacgccgcggtgaatacgttcccgggccttgtacacaccgcccgtcacaccatgggagttggttttacccgaaggtagtgcgctaaccgcaaggaggcagctaaccacggtagggtcagcgactggggtg

SEQ ID NO: 2199 - DNA, 1410 bp, Neosynechococcus sphagnicola
gatgaacgctggcggtctgcttaacacatgcaagtcgaacgggctcttcggagctagtggcggacgggtgagtaacgcgtgagaatctgcctacaggtctgggacaacagttggaaacggctgctaataccggatgtgccgagaggtgaaagctttagtgcctgtagatgagctcgcgtctgattagctagttggtggggtaagagcctaccaaggcgacgatcagtagctggtctgagaggatgatcagccacactgggactgagacacggcccagactcctacgggaggcagcagtggggaattttccgcaatgggcgaaagcctgacggagcaagaccgcgtgagggaggaaggcttttgggttgtaaacctcttttctcagggaagaagatctgacggtacctgaggaatcagcatcggctaactccgtgccagcagccgcggtaatacggaggatgcaagcgttatccggaattattgggcgtaaagcgtccgcaggtggttttacaagtctgctgttaaagcgcggagcttaacttcgtaacggcggtggaaactgtgagactagagtacggtaggggtagcgggaattcccggtgtagcggtgaaatgcgtagatatcgggaagaacaccagcggcgaaagcgcgctactgggcctgtactgacactgagggacgaaagctaggggagcgaaagggattagatacccctgtagtcctagctgtaaacgatggatactaggtgttgcgcgtatcgacccgagcagtgccgtagctaacgcgttaagtatcccgcctggggagtacgctcgcaagagtgaaactcaaaggaattgacgggggcccgcacaagcggtggagtatgtggtttaattcgatgcaacgcgaagaaccttaccagggcttgacatgtcgcgaattccggtgaaagtcgggagtgccttcgggagcgcgaacacaggtggtgcatggctgtcgtcagctcgtgtcgtgagatgttgggttaagtcccgcaacgagcgcaacccacgtctttagttgccagcattaagttgggcactttagagagactgccggtgacaaaccggaggaaggtgtggatgacgtcaagtcagcatgccccttacgtcctgggctacacacgtactacaatgcttcggacagagggttgcgagctagcgatagcaagctaatcccgtaaaccgaggctcagttcagattgcaggctgcaactcgcctgcatgaaggcggaatcgctagtaatcgcaggtcagcatactgcggtgaatacgttcccgggccttgtacacaccgcccgtcacaccatgggagttggccacgcccgaagtcgttactccaaccgcttgcggaggaggatgcctaaggcagggctgatgactggggtg

SEQ ID NO: 2200 - DNA, 1462 bp, Neptuniibacter caesariensis
attgaacgctggcggcaggcctaacacatgcaagtcgaacggtaacatgactagcttgctagttgatgacgagtggcggacgggtgagtaacgcgtaggaatctacccagtagcgggggataagccagagaaatttggtctaataccgcatacgcccttcgggggaaagcaggggatcttcggaccttgcactattggatgagcctgcgtgagattagcttgttggtgaggtaatggctcaccaaggcgacgatctctagctggtctgagaggatgatcagccacactggaactgagacacggtccagactcctacgggaggcagcagtggggaatattgcacaatgggcgcaagcctgatgcagccatgccgcgtgtgtgaagaaggccctagggttgtaaagcactttcagcagtgaggaaaggttagtagttaatacctgctagctgtgacgttaactgcagaagaagcaccggctaactccgtgccagcagccgcggtaatacggagggtgcgagcgttaatcggaattactgggcgtaaagcgcgcgtaggtggattggtcagtcagatgtgaaagcccagggctcaaccttggaactgcacctgatactgccaatctagaatacggtagagggtagtggaatttcctgtgtagcggtgaaatgcgtagatataggaaggaacaccagtggcgaaggcgactacctggaccgatattgacactgaggtgcgaaagcgtggggagcaaacaggattagataccctggtagtccacgccgtaaacgatgtctactagccgttgggggacttgatctcttagtggcgcagctaacgcgataagtagaccgcctggggagtacggccgcaaggttaaaactcaaatgaattgacgggggcccgcacaagcggtggagcatgtggtttaattcgaagcaacgcgaagaaccttaccaactcttgacatccagagaacttagcagagatgctttggtgccttcgggaactctgagacaggtgctgcatggctgtcgtcagctcgtgttgtgaaatgttgggttaagtcccgtaacgagcgcaacccttgtccttatttgccagcacttcgggtgggaactctaaggagactgccggtgacaaaccggaggaaggtggggacgacgtcaagtcatcatggcccttacgagttgggctacacacgtgctacaatggtcggtacagagggctgcaaacctgcgaaggtaagctaatctcacaaaaccggtcgtagtccggattggagtctgcaactcgactccatgaagtcggaatcgctagtaatcgtggatcagaatgccacggtgaatacgttcccgggccttgtacacaccgcccgtcacaccatgggagtggattgcaccagaagtagctagcttaaccttcgggagggcggttaccacggtgtggttcatgactggggtg

SEQ ID NO: 2201 - DNA, 1469 bp, Neptunomonas antarctica
attgaacgctggcggcaggcttaacacatgcaagtcgagcggtaacagagagtagcttgctactttgctgacgagcggcggacgggtgagtaacgcgtaggaatctacctggtagcgggggatagcccagagaaatttggattaataccgcatacgccctacgggggaaaggaggggatctatttatagacctttcactatcagatgagcctgcgtgagattagcttgttggtgaggtaaaggctcaccaaggcgacgatctctagctggtctgagaggatgatcagccacactgggactgagacacggcccagactcctacgggaggcagcagtggggaatattgcacaatgggggaaaccctgatgcagccatgccgcgtgtgtgaagaaggccttcgggttgtaaagcactttcagcgaggaggaaagggttgttattaatactaacaatctgtgacgttactcgcagaagaagcaccggctaactccgtgccagcagccgcggtaatacggagggtgcaagcgttaatcggaattactgggcgtaaagcgcgcgtaggcggcttagtcagtcagatgtgaaagccccgggctcaacctgggaattgcacctgatactgctaggctagagtacagaagagggtggtggaatttcctgtgtagcggtgaaatgcgtagatataggaaggaacatcagtggcgaaggcggccacctggtctgatactgacgctgaggtgcgaaagcgtggggagcaaacaggattagataccctggtagtccacgccgtaaacgatgtcaactagccgttgggggacttgatcctttagtggcgcagctaacgcgataagttgaccgcctggggagtacggtcgcaagattaaaactcaaatgaattgacgggggcccgcacaagcggtggagcatgtggtttaattcgaagcaacgcgaagaaccttacctactcttgacatccagagaactcgctagagatagcttggtgccttcgggaactctgagacaggtgctgcatggctgtcgtcagctcgtgttgtgaaatgttgggttaagtcccgtaacgagcgcaacccttgtccttatttgccagcacgtaatggtgggaactctaaggagactgccggtgacaaaccggaggaaggtggggacgacgtcaagtcatcatggcccttacgagtagggctacacacgtgctacaatggccggtacagagggctgcaaacctgcgaaggtaagccaatctcacaaaaccggtcgtagtccggattggagtctgcaactcgactccatgaagtcggaatcgctagtaatcgtagatcagaatgctacggtgaatacgttcccgggccttgtacacaccgcccgtcacaccatgggagtggattgcaccagaagtagatagtctaaccttcggggggacgtttaccacggtgtggttcatgactggggtg

SEQ ID NO: 2202 - DNA, 1467 bp, Neptunomonas qingdaonensis
attgaacgctggcggcaggcttaacacatgcaagtcgagcggaaacgaagatagcttgctatcaggcgtcgagcggcggacgggtgagtaacgcgtaggaatctacctagtagtgggggatagcccagagaaatttggattaataccgcatacgccctacgggggaaaggaggggatctatttatagacctttcgctatcagatgagcctgcgtgagattagcttgttggtgaggtaaaggctcaccaaggcgacgatctctagctggtctgagaggatgatcagccacactgggactgagacacggcccagactcctacgggaggcagcagtggggaatattgcacaatgggggaaaccctgatgcagccatgccgcgtgtgtgaagaaggccttcgggttgtaaagcactttcagttgtgaggaaaggttgacgtttaatacgcgttaactgtgacgttagcaacagaagaaggaccggctaactccgtgccagcagccgcggtaatacggagggtccgagcgttaatcggaattactgggcgtaaagcgcgcgtaggcggcttggtcagtcagatgtgaaatccccgggctcaacctgggaattgcacctgatactgccaggctagagtacagaagagggtggtggaatttcctgtgtagcggtgaaatgcgtagatataggaaggaacatcagtggcgaaggcggccacctggtctgatactgacgctgaggtgcgaaagcgtggggagcaaacaggattagataccctggtagtccacgccgtaaacgatgtcaactagccgttggggaacttgattctttagtggcgcagctaacgcgataagttgaccgcctggggagtacggtcgcaagattaaaactcaaatgaattgacgggggcccgcacaagcggtggagcatgtggtttaattcgaagcaacgcgaagaaccttacctactcttgacatccagagaactcgccagagatggcttggtgccttcgggaactctgagacaggtgctgcatggctgtcgtcagctcgtgttgtgaaatgttgggttaagtcccgtaacgagcgcaacccttatccttatttgccagcacgtaatggtgggaactctaaggagactgccggtgacaaaccggaggaaggtggggacgacgtcaagtcatcatggcccttacgagtagggctacacacgtgctacaatggccggtacagagggctgcaaacctgcgaaggtaagctaatctcacaaaaccggtcgtagtccggatcggagtctgcaactcgactccgtgaagtcggaatcgctagtaatcgtggatcagaatgccacggtgaatacgttcccgggccttgtacacaccgcccgtcacaccatgggagtggattgcaccagaagtagatagtctaaccttcggggggacgtttaccacggtgtggttcatgactggggtg

SEQ ID NO: 2203 - DNA, 1452 bp, Niastella koreensis
gatgaacgctagcggcaggcttaatacatgcaagtcgaggggcagcgcagtgtagcaatacatgggcggcgaccggcaaacgggtgcggaacacgtacgcaaccttccttcaagcgggggatagctttcggaaacgaaaattaataccccatagcaatgtctgatggcatctgaggacatttaaagatttatcacttgaagatgggcgtgcgcctgattaggtagttggcggggtaacggcccaccaagcctacgatcagtaactggtgtgagagcacgaccagtcacacgggcactgagacacgggcccgactccctacgggaggcagcagtaaggaatattggtcaatggacgcaagtctgaaccagccatgccgcgtggaggatgaaggtcctctggattgtaaacttcttttatcggagaagaaacccacgaaatcttttgtggttgacggtacccgatgaataagcaccggctaactccgtgccagcagccgcggtaatacggagggtgcaagcgttatccggattcactgggtttaaagggagcgtaggtgggctggtaagtcagtggtgaaatctccgggcttaactcggaaactgccgttgatactatcagtcttgaatgttgtggaggtaagcggaatatgtcatgtagcggtgaaatgcttagatatgacatagaacaccgatagcgaaggcagcttgctacacaattattgacactgaggctcgaaagcgtggggatcaaacaggattagataccctggtagtccacgccctaaacgatggatactcgacatacgcgatacacagtgtgtgtctgagcgaaagcattaagtatcccacctgggaagtacgaccgcaaggttgaaactcaaaggaattggcgggggtccgcacaagcggtggagcatgtggtttaattcgatgatacgcgaggaaccttacctgggctagaatgcaatttgaccgtgggtgaaagctcattttgtagcaatacacagattgtaaggtgctgcatggctgtcgtcagctcgtgccgtgaggtgttgggttaagtcccgcaacgagcgcaacccccatcattagttgccatcaggtaaagctgggaactctaatgaaactgccgtcgtaagacgcgaggaaggaggggatgatgtcaagtcatcatggcctttatgcccagggctacacacgtgctacaatggaagggacaaagagctgccacttggcaacaaggcgctaatctcaaaaaccctttctcagttcagattggagtctgcaactcgactccatgaagctggaatcgctagtaatcgtatatcagcaatgatacggtgaatacgttcccggaccttgcacacaccgcccgtcaagccatggaagctgggtgtacctaaagtcggtaaccgcaaggagccgcctagggtaaaactagtgactggggct

SEQ ID NO: 2204 - DNA, 1430 bp, Niastella populi
ttatacatgcagtcgaggggcagcatgactgtagcaatacagttgatggcgaccggcaaacgggtgcggaacacgtacgcaaccttccttcaaatgggggatagcccaccgaaaggtggattaataccccgtaaaatttttgggtggcatcacctgattattatagctccggcgtttgaagatgggcgtgcgcctgattaggtagttggcggagtaacagcccaccaagcctacgatcagtaactggtgtgagagcacgaccagtcacacgggcactgagacacgggcccgactcctacgggaggcagcagtaaggaatattggtcaatggacgcaagtctgaaccagccatgccgcgtggaggatgaaggtcctctggattgtaaacttcttttatcggagaagaaacccatactttctagtgtggttgacggtacccgatgaataagcaccggctaactccgtgccagcagccgcggtaatacggagggtgcaagcgttatccggattcactgggtttaaagggtgcgtaggtgggttggtaagtcagtggtgaaatctccgggcttaactcggaaactgccgttgatactatcaatcttgaatgttgtggaggtaagcggaatatgtcatgtagcggtgaaatgcttagatatgacatagaacaccgatagcgaaggcagcttgctacacaataattgacactgaggcacgaaagcgtggggatcaaacaggattagataccctggtagtccacgccctaaacgatggatactcgacatacgcgatacacagtgtgtgtctgagcgaaagcattaagtatcccacctgggaagtacgaccgcaaggttgaaactcaaaggaattgggcggggtccgcacaagcggtggagcatgtggtttaattcgatgatacgcgaggaaccttacctgggctagaatgcagattgaccgtgggtgaaagctcattttgtagcaatacacagtctgtaaggtgctgcatggctgtcgtcagctcgtgccgtgaggtgttgggttaagtcccgcaacgagcgcaacccccatcattagttgccatcaggtaaagctgggaactctaatgaaactgccgtcgtaagacgcgaggaaggaggggatgatgtcaagtcatcatggcctttatgcccagggctacacacgtgctacaatgggagggacaaagagctgccacttggcgacaaggagctaatctcaaaaaccctttctcagttcagatcgcagtctgcaactcgactgcgtgaagctggaatcgctagtaatcgtatatcagcaatgatacggtgaatacgttcccggaccttgcacacaccgcccgtcaagccatggaagctgggtgtacctaaagtcggtaaccgcaaggagccgcctagggtaaaactagtgactgggct

SEQ ID NO: 2205 - DNA, 1451 bp, Niastella vici
gatgaacgctagcggcaggcttaatacatgcaagtcgaggggcagcgcagtgtagcaatacatgggcggcgaccggcaaacgggtgcggaacacgtacgcaaccttcctttaagtgagggatagctttcggaaacgaaaattaatacctcgtaacatcgttgagtggcatcacttgatgattatagctccggcgcttaaagatgggcgtgcgcctgattaggtagttggcggagtaacagcccaccaagcctacgatcagtaactggtgtgagagcacgaccagtcacacgggcactgagacacgggcccgactcctacgggaggcagcagtaaggaatattggtcaatggacgcaagtctgaaccagccatgccgcgtggaggatgaaggtcctctggattgtaaacttcttttatcggagaagaaaccccggaaatctttctgggttgacggtacccgatgaataagcaccggctaactccgtgccagcagccgcggtaatacggagggtgcaagcgttatccggattcactgggtttaaagggtgcgtaggtgggttggtaagtcagtggtgaaatctccgggcttaactcggaaactgccgttgatactatcaatcttgaatctcgtggaggtaagcggaatatgtcatgtagcggtgaaatgcttagatatgacatagaacaccgatagcgaaggcagcttgctacacgagtattgacactgaggcacgaaagcgtggggatcaaacaggattagataccctggtagtccacgccctaaacgatggatactcgacatacgcgatacacagtgtgtgtctgagcgaaagcattaagtatcccacctgggaagtacgaccgcaaggttgaaactcaaaggaattggcgggggtccgcacaagcggtggagcatgtggtttaattcgatgatacgcgaggaaccttacctgggctagaatgcattttgaccgtgggtgaaagctcactttgtagcaatacacaatttgtaaggtgctgcatggctgtcgtcagctcgtgccgtgaggtgttgggttaagtcccgcaacgagcgcaacccccatcattagttgccatcaggtaaagctgggaactctaatgaaactgccgtcgtaagacgcgaggaaggaggggatgatgtcaagtcatcatggcctttatgcccagggctacacacgtgctacaatggaggggacaaagggctgccacttggcgacaaggagctaatcccaaaaaccccttctcagttcagatcgcagtctgcaactcgactgcgtgaagctggaatcgctagtaatcgtatatcagcaatgatacggtgaatacgttcccggaccttgcacacaccgcccgtcaagccatggaagccgggtgtacctaaagtcggtaaccgcaaggagccgcctagggtaaaactggtgactggggct

SEQ ID NO: 2206 - DNA, 1451 bp, Niastella yeongjuensis
gatgaacgctagcggcaggcttaatacatgcaagtcgaggggcagcgcagtgtagcaatacatgggcggcgaccggcaaacgggtgcggaacacgtacgcaaccttccttcaagcgggggatagctttcggaaacgaaaattaataccccatagtaatgtctgagggcatctgaggacatttaaagatttatcacttgaagatgggcgtgcgcctgattaggtagttggcggggtaacggcccaccaagcctacgatcagtaactggtgtgagagcacgaccagtcacacgggcactgagacacgggcccgactcctacgggaggcagcagtaaggaatattggtcaatggacgcaagtctgaaccagccatgccgcgtggaggatgaaggtcctctggattgtaaacttcttttatcggagaagaaaccccagatttttatttgggttgacggtacccgatgaataagcaccggctaactccgtgccagcagccgcggtaatacggagggtgcaagcgttatccggattcactgggtttaaagggagcgtaggtgggctggtaagtcagtggtgaaatctccgggcttaactcggaaactgccgttgatactatcagtcttgaatattgtggaggtaagcggaatatgtcatgtagcggtgaaatgcttagatatgacatagaacaccgatagcgaaggcagcttgctacacaattattgacactgaggctcgaaagcgtggggatcaaacaggattagataccctggtagtccacgccctaaacgatggatactcgacatatgcgatacacagtatgtgtctgagcgaaagcattaagtatcccacctgggaagtacgaccgcaaggttgaaactcaaaggaattggcgggggtccgcacaagcggtggagcatgtggtttaattcgatgatacgcgaggaaccttacctgggctagaatgcagattgaccgtgggtgaaagctcattttgtagcaatacacagtctgtaaggtgctgcatggctgtcgtcagctcgtgccgtgaggtgttgggttaagtcccgcaacgagcgcaacccccatcattagttgccatcaggtaaagctgggaactctaatgaaactgccgtcgtaagacgcgaggaaggaggggatgatgtcaagtcatcatggcctttatgcccagggctacacacgtgctacaatggaagggacaaagagctgccacttggcaacaaggcgctaatctcaaaaaccctttctcagttcagattggagtctgcaactcgactccatgaagctggaatcgctagtaatcgtatatcagcaatgatacggtgaatacgttcccggaccttgcacacaccgcccgtcaagccatggaagctgggtgtacctaaagtcggtaaccgcaaggagccgcctagggtaaaactagtgactggggct

SEQ ID NO: 2207 - DNA, 1365 bp, Nicoletella semolina
attgaacgctggcggcaggcttaacacatgcaagtcgaacggtaacagggaggaagcttgctttctttgctgacgagtggcggacgggtgagtaatgcttgggaatctggcttatggagggggataacgacgggaaactgtcgctaataccgcgtagaatcttaggattaaagaatgggaccttcgggccattcgccataagatgagcccaagtgggattaggtagttggttaggtaaaggctgaccaagcctgcgatctctagctggtctgagaggatgaccagccacactggaactgagacacggtccagactcctacgggaggcagcagtggggaatattgcacaatggggggaaccctgatgcagccatgccgcgtgaatgaagaaggccttcgggttgtaaagttctttcggtgatgaggaaggtgtttgttttaatagggcaagcaattgacgttaatcacagaagaagcaccggctaactccgtgccagcagccgcggtaatacggagggtgcgagcgttaatcggaataactgggcgtaaagggcacgcaggcggacttttaagtgagatgtgaaatcccagagcttaactttggaattgcatttcagactgggggtctagagtactttagggaggggtagaattccacgtgtagcggtgaaatgcgtagagatgtggaggaataccgaaggcgaaggcagccccttgggaatgtactgacgctcatgtgcgaaagcgtggggagcaaacaggattagataccctggtagtccacgctgtaaacgctgtcgatttggggattgggctttatgcttggtgcccgtagctaacgtgataaatcgaccgcctggggagtacggccgcaaggttaaaactcaaatgaattgacgggggcccgcacaagcggtggagcatgtggtttaattcgatgcaacgcgaagaaccttacctactcttgacatcctaagaagagactagagatagtcttgtgccttcgggaacttagagacaggtgctgcatggctgtcgtcagctcgtgttgtgaaatgttgggttaagtcccgcaacgagcgcaacccttatcctttgttgccagcatgtaaagatgggaactcaaaggagactgccagtgataaactggaggaaggtggggatgacgtcaagtcatcatggcccttacgagtagggctacacacgtgctacaatggtgcatacagagggaagcaaacctgcgagggtaagcaaatctcacaaagtgcatctaagtccggattggagtctgcaactcgactccatgaagtcggaatcgctagtaatcgcaaatcagaatgttgcggtgaatacgttcccgggcctt

SEQ ID NO: 2208 - DNA, 1439 bp, Nitratifractor salsuginis
agtgaacgctggcggcgtgcctaacacatgcaagtcgaacgagaacggcccctggcttgccaggggtgtcagctaagtggcgcacgggtgagtaaggtatagctaacgtgccctatggagggggataacggctggaaacggccgctaataccccatattccttcaccacataagtggtgttgggaaatggattccgccataggatcgggctatatggtatcagctagttggtgaggtaagagctcaccaaggctatgacgcctagctggtctgagaggatgatcagccacactggaactgagacacggtccagactcctacgggaggcagcagtggggaatattgcacaatgggcgaaagcctgatgcagcaacgccgcgtggaggatgacacccttcggggcgtaaactccttttataggggaagataatgacggtaccctatgaataagcaccggctaactccgtgccagcagccgcggtaatacggagggtgcaagcgttactcggaatcactgggcgtaaagcgcgcgcaggcgggttggtaagttgggtgtgaaagcctgcagctcaactgcagaactgcacccaaaactgccagcctagagtctgggagaggtgagtggaattagtggtgtaggggtaaaatccgtagagatcactaggaataccgaaagcgaaggcaactcactggaacagtactgacgctgaggcgcgaaagcgtggggagcaaacaggattagataccctggtagtccacgccctaaacgatggatgctagtcgttgccatgcacgtcatggcagtgatgcagctaacgcattaagcatcccgcctggggagtacggtcgcaagattaaaactcaaaggaatagacggggacccgcacaagtggtggagcatgtggtttaattcgaagatacgcgaagaaccttacccggccttgacatcccgcgaaccctccagagatggaggggtgctacttcggtagagcgcggtgacaggtgctgcacggctgtcgtcagctcgtgtcgtgagatgttgggttaagtcccgcaacgagcgcaaccctcgtgtccagttgctaacggttcggccgagcactctggacagactgcctgggtaaccaggaggaaggtgaggacgacgtcaagtcatcatggcccttacggccggggcgacacacgtgctacaatgggcaggacaatgagatgcgataccgcgaggtggagcaaatctagaaacctgctctcagttcggattgcagtctgcaactcgactgcatgaagctggaatcactagtaatcgtggatcagccatgccacggtgaatacgttcccgggtcttgtactcaccgcccgtcacaccatgggagttgagttcacccgaagacgggaagctaaaccggctaccgtccacggtgggctcagcgactggggtg

SEQ ID NO: 2209 - DNA, 1408 bp, Nitratireductor aquibiodomus
aacgaacgctggcggcaggcttaacacatgcaagtcgagcgcccccttgtggggagcggcagacgggtgagtaatgcatgggaatctacccagctctacggaataactcagggaaacttgaactaataccgtatgcgcccttcgggggaaagatttatcggagttggatgagcccatgtctgattagctagttggtggggtaaaggcctaccaaggcgacgatcagtagctggtctgagaggatgatcagccacactgggactgagacacggcccagactcctacgggaggcagcagtggggaatattggacaatgggcgcaagcctgatccagccatgccgcgtgagtgatgaaggccctagggttgtaaagctctttcaccggtgaagataatgacggtaaccggagaagaagccccggctaacttcgtgccagcagccgcggtaatacgaagggggctagcgttgttcggaattactgggcgtaaagcgcgcgtaggcggatcggtcagttaggggtgaaatcccggggctcaaccccggaactgcctctaatactgccgatctagagttcgagagaggtgagtggaattccgagtgtagaggtgaaattcgtagatattcggaggaacaccagtggcgaaggcggctcactggctcgatactgacgctgaggtgcgaaagcgtggggagcaaacaggattagataccctggtagtccacgccgtaaacgatggaagctagccgttggcaggtttacctgtcggtggcgcagttaacgcattaagcttcccgcctggggagtacggtcgcaagattaaaactcaaaggaattgacgggggcccgcacaagcggtggagcatgtggtttaattcgaagcaacgcgcagaaccttaccagcccttgacatcccgatcgcggtttccagagatggattccttcagttaggctggatcggagacaggtgctgcatggctgtcgtcagctcgtgtcgtgagatgttgggttaagtcccgcaacgagcgcaaccctcgcccttagttgccagccttaagttgggcactctaaggggactgccggtgataagccgagaggaaggtggggatgacgtcaagtcctcatggcccttacgggctgggctacacacgtgctacaatggtggtgacagtgggcagcgagacggcaacgtcgagctaatctccaaaagccatctcagttcggattggggtctgcaactcgaccccatgaagttggaatcgctagtaatcgcggatcagcatgccgcggtgaatacgttcccgggccttgtacacaccgcccgtcacaccatgggagttgggtttacccgaaggcagtgcgctaaccgcaaggaggcagctgaccacggtaggctcagcgactggggtg

SEQ ID NO: 2210 - DNA, 1407 bp, Nitratireductor indicus
aacgaacgctggcggcaggcttaacacatgcaagtcgagcgccccgcaaggggagcggcagacgggtgagtaacgcgtgggaatctacctagctctacggaataactcagggaaacttgaactaataccgtatacgccctttgggggaaagatttatcggagttggatgagcccgcgtctgattagctagttggtggggtaaaggcctaccaaggcgacgatcagtagctggtctgagaggatgatcagccacactgggactgagacacggcccagactcctacgggaggcagcagtggggaatattggacaatgggcgcaagcctgatccagccatgccgcgtgagtgatgaaggccctagggttgtaaagctctttcaccggtgaagataatgacggtaaccggagaagaagccccggctaacttcgtgccagcagccgcggtaatacgaagggggctagcgttgttcggaattactgggcgtaaagcgcacgtaggcggaccattaagtcaggggtgaaatcccggggctcaaccccggaactgcctttgatactggtggtctcgagttcgagagaggtgagtggaattccgagtgtagaggtgaaattcgtagatattcggaggaacaccagtggcgaaggcggctcactggctcgatactgacgctgaggtgcgaaagcgtggggagcaaacaggattagataccctggtagtccacgccgtaaacgatggaagctagccgttggcaggtttacctgtcggtggcgcagctaacgcattaagcttcccgcctggggagtacggtcgcaagattaaaactcaaaggaattgacgggggcccgcacaagcggtggagcatgtggtttaattcgaagcaacgcgcagaaccttaccagcccttgacatctgggtcgcggaaaccggagacggtttccttcagttaggctggacccaagacaggtgctgcatggctgtcgtcagctcgtgtcgtgagatgttgggttaagtcccgcaacgagcgcaaccctcgcccttagttgccagcattcagttgggcactctaaggggactgccggtgataagccgagaggaaggtggggatgacgtcaagtcctcatggcccttacgggctgggctacacacgtgctacaatggtggtgacagtgggcagcgagaccgcgaggtcgagctaatctccaaaagccatctcagttcggattgcactctgcaactcgggtgcatgaagttggaatcgctagtaatcgcggatcagcatgccgcggtgaatacgttcccgggccttgtacacaccgcccgtcacaccatgggagttgggtttacccgaaggcagtgcgctaaccgcaaggaggcagctgaccacggtaggctcagcgactggggtg

SEQ ID NO: 2211 - DNA, 1407 bp, Nitratireductor pacificus
aacgaacgctggcggcaggcttaacacatgcaagtcgagcgccccgcaaggggagcggcagacgggtgagtaacacgtgggaatctacccagctctacggaataactcagggaaacttgaactaataccgtatacgtcctccgggagaaagatttatcggagttggatgagcccgcgtctgattagctagttggtggggtaaaggcctaccaaggcgacgatcagtagctggtctgagaggatgatcagccacactgggactgagacacggcccagactcctacgggaggcagcagtggggaatattggacaatgggcgcaagcctgatccagccatgccgcgtgagtgatgaaggccctagggttgtaaagctctttcaccggtgaagataatgacggtaaccggagaagaagccccggctaacttcgtgccagcagccgcggtaatacgaagggggctagcgttgttcggatttactgggcgtaaagcgcacgtaggcggatcggtcagttaggggtgaaatcccggggctcaaccccggaactgcctctaatactgccggtctagagttcgagagaggtgagtggaattccgagtgtagaggtgaaattcgtagatattcggaggaacaccagtggcgaaggcggctcactggctcgatactgacgctgaggtgcgaaagcgtggggagcaaacaggattagataccctggtagtccacgccgtaaactatgagagctagccgtcggcaagtttacttgtcggtggcgcagctaacgcattaagctctccgcctggggagtacggtcgcaagattaaaactcaaaggaattgacgggggcccgcacaagcggtggagcatgtggtttaattcgaagcaacgcgcagaaccttaccagcccttgacatcccgatcgcggtttccagagatggattccttcagttaggctggatcggtgacaggtgctgcatggctgtcgtcagctcgtgtcgtgagatgttgggttaagtcccgcaacgagcgcaaccctcgcccttagttgccagccttaagttgggcactctaaggggactgccggtgataagccgagaggaaggtggggatgacgtcaagtcctcatggcccttacgggctgggctacacacgtgctacaatggtggtgacagtgggcagcgagaccgcgaggtcgagctaatctccaaaaaccatctcagttcggattgcactctgcaactcgagtgcatgaagttggaatcgctagtaatcgcggatcagcatgccgcggtgaatacgttcccgggccttgtacacaccgcccgtcacaccatgggagttgggtttacccgaaggcagtgcgctaaccgcaaggaggcagctgaccacggtaggctcagcgactggggtg

SEQ ID NO: 2212 - DNA, 1453 bp, Nitratiruptor tergarcus
agtgaacgctggcggcgtgcttaacacatgcaagtcgagcgagaacggctctatccttcgggatagagtgtcagctaagcggcgcacgggtgagtaacacgtagctaacctgccccatagtgggggataacagcccgaaagggctgctaataccctatactccttccatacgaaagtatggttgtggaaagcgttagcgctatgggatggggctgcggcctatcagctagttggtggggtaaaggcctaccaaggctatgacgggtagctggtctgagaggatggtcagccacactggaactgagacacggtccagactcctacgggaggcagcagtggggaatattgcacaatgggggaaaccctgatgcagcaacgccgcgtggaggatgacgcccttcggggtgtaaactccttttgacagggaagaagatgacggtacctgtcgaataagcaccggctaactccgtgccagcagccgcggtaatacggagggtgcaagcgttactcggaatcactgggcgtaaagggcgcgtaggcggtctgctaagttggatgtgaaagcccacagcttaactgtggaactgcgtccaaaactggtagactagagtccggaagaggcaggtggaattggtggtgtaggggtaaaatccgtagagatcaccaggaatacccattgcgaaggcgacctgctgggacggtactgacgctgaggcgcgaaagcgtggggagcaaacaggattagataccctggtagtccacgccctaaacgatggatgctagtcgttggggtgctagtcacctcagtgatgcagctaacgcaataagcatcccgcctggggagtacggccgcaaggctaaaactcaaaggaatagacggggacccgcacaagcggtggagcatgtggtttaattcgaagatacgcgaagaaccttacctgggcttgacatccctggaaccctctagagatagaggggtgcctccttttgggggagccaggtgacaggtgctgcacggctgtcgtcagctcgtgtcgtgagatgttgggttaagtcccgcaacgagcgcaaccctcgtccttagttgccagcacttcgggtgggcactctaaggagactgcccgggtaaccgggaggaaggtgaggatgacgtcaagtcatcatggcccttatgcccagggcgacacacgtgctacaatggcgcgtacagagagaggcaataccgcgaggtggagcaaatctctaaagcgcgtcccagttcggattgcagtctgcaactcgactgcatgaagtcggaatcgctagtaatcgcggatcagccatgccgcggtgaatacgttcccgggtcttgtactcaccgcccgtcacaccatgggagttgagctcacccgaagccgggggaccgacccgaaagggaggacccctgtcgacggtgggctcagcgactggggtg

SEQ ID NO: 2213 - DNA, 1382 bp, Nitrincola lacisaponensis
  misc_feature (349)..(349): n is a, c, g, or t
  misc_feature (362)..(362): n is a, c, g, or t
gggtgagtaacgcgtgggaatctacctggtagtgggggacaacttggggaaactcaagctaataccgcatacgccctacgggggaaaggaggggctcttcggacctttcgctatcagatgagcctgcgtaggattagctagttggtagggtaaaggcctaccaaggcgacgatccttagctggtctgagaggatgatcagccacactgggactgagacacggcccagactcctacgggaggcagcagtggggaatattggacaatgggggcaaccctgatccagccatgccgcgtgtgtgaagaaggccttcgggttgtaaagcactttcagtggtgaggaagggtgtnaagttaatacctntatacattgacgttagccacagaagaagcaccggctaactccgtgccagcagccgcggtaatacggagggtgcaagcgttaatcggaattactgggcgtaaagcgcgcgtaggtggttcagtcagtcagatgtgaaagccccgggcttaacctgggaattgcacctgatactgctgagctagagtacagtagaggggagtggaatttcctgtgtagcggtgaaatgcgtagatataggaaggaacaccagtggcgaaggcgactctctggactgatactgacactgaggtgcgaaagcgtggggagcaaacaggattagataccctggtagtccacgctgtaaacgatgtcaactagccgttgggacacttgatgtcttagtggcgcagctaacgcgataagttgaccgcctggggagtacggtcgcaagattaaaactcaaatgaattgacgggggcccgcacaagcggtggagcatgtggtttaattcgacgcaacgcgaagaaccttacctactcttgacatccagagaactttccagagatggattggtgccttcgggaactctgagacaggtgctgcatggctgtcgtcagctcgtgttgtgaaatgttgggttaagtcccgtaacgagcgcaacccttgtccttacttgccagcgggtaatgccgggaactttaaggagactgccggtgacaaaccggaggaaggtggggacgacgtcaagtcatcatggcccttacgagtagggctacacacgtgctacaatggccggtacagagggccgcgataccgcgaggtggagcaaatctcagaaaaccggtcgtagtccggatcgcagtctgcaactcgactgcgtgaagtcggaatcgctagtaatcgcgaatcagaatgtcgcggtgaatacgttcccgggccttgtacacaccgcccgtcacaccatgggagtgggttgcaccagaagtagctagtctaaccttaggggggacggttaccacggtgtgattcatgactggggtg

SEQ ID NO: 2214 - DNA, 1411 bp, Nitrobacter hamburgensis
agcgaacgctggcggcaggcttaacacatgcaagtcgaacgggcgtagcaatacgtcagtggcagacgggtgagtaacacgtgggaacgtaccttttggttcggaacaactgagggaaacttcagctaataccggataagcccttacggggaaagatttatcgccgaaagatcggcccgcgtctgattagcttgttggtgaggtaatggctcaccaaggcgacgatcagtagctggtctgagaggatgatcagccacattgggactgagacacggcccaaactcctacgggaggcagcagtggggaatattggacaatgggcgaaagcctgatccagccatgccgcgtgagtgatgaaggccctagggttgtaaagctcttttgtgcgggaagataatgacggtaccgcaagaataagccccggctaacttcgtgccagcagccgcggtaatacgaagggggctagcgttgctcggaatcactgggcgtaaagggtgcgtaggcggatctttaagtcaggggtgaaatcctggagctcaactccagaactgcctttgatactgaaggtcttgagttcgggagaggtgagtggaactgcgagtgtagaggtgaaattcgtagatattcgcaagaacaccagtggcgaaggcggctcactggcccgatactgacgctgaggcacgaaagcgtggggagcaaacaggattagataccctggtagtccacgccgtaaacgatgaatgccagccgttagtgggtttactcactagtggcgcagctaacgctttaagcattccgcctggggagtacggtcgcaagattaaaactcaaaggaattgacgggggcccgcacaagcggtggagcatgtggtttaattcgacgcaacgcgcagaaccttaccagcccttgacatgtccatgaccggtcgcagagatgtgaccttctcttcggagcatggagcacaggtgctgcatggctgtcgtcagctcgtgtcgtgagatgttgggttaagtcccgcaacgagcgcaacccccgtccttagttgctaccatttagttgagcactctaaggagactgccggtgataagccgcgaggaaggtggggatgacgtcaagtcctcatggcccttacgggctgggctacacacgtgctacaatggcggtgacaatgggaagcaaaggggcaacccctagcaaatctcaaaaaaccgtctcagttcggattgggctctgcaactcgagcccatgaagttggaatcgctagtaatcgtggatcagcatgccacggtgaatacgttcccgggccttgtacacaccgcccgtcacaccatgggagttggttttacctgaaggcggtgcgctaacccgcaagggaggcagccgaccacggtagggtcagcgactggggtg

SEQ ID NO: 2215 - DNA, 1411 bp, Nitrobacter vulgaris
agcgaacgctggcggcaggcttaacacatgcaagtcgaacgggcgtagcaatacgtcagtggcagacgggtgagtaacgcgtgggaacgtaccttttggttcggaacaacacagggaaacttgtgctaataccggataagcccttacggggaaagatttatcgccgaaagatcggcccgcgtctgattagcttgttggtgaggtaatggctcaccaaggcgacgatcagtagctggtctgagaggatgatcagccacattgggactgagacacggcccaaactcctacgggaggcagcagtggggaatattggacaatgggcgcaagcctgatccagccatgccgcgtgagtgatgaaggccctagggttgtaaagctcttttgtgcgggaagataatgacggtaccgcaagaataagccccggctaacttcgtgccagcagccgcggtaatacgaagggggctagcgttgctcggaattactgggcgtaaagggtgcgtaggcgggtctttaagtcagaggtgaaatcctggagctcaactccagaactgcctttgatactgaggatcttgagttcgggagaggtgagtggaactgcgagtgtagaggtgaaattcgtagatattcgcaagaacaccagtggcgaaggcggctcactggcccgatactgacgctgaggcacgaaagcgtggggagcaaacaggattagataccctggtagtccacgccgtaaacgatgaatgccagccgttagtgggtttactcactagtggcgcagctaacgctttaagcattccgcctggggagtacggtcgcaagattaaaactcaaaggaattgacgggggcccgcacaagcggtggagcatgtggtttaattcgacgcaacgcgcagaaccttaccagcccttgacatgtccatgaccggtcgcagagatgtgaccttctcttcggagcatggagcacaggtgctgcatggctgtcgtcagctcgtgtcgtgagatgttgggttaagtcccgcaacgagcgcaacccccgtccttagttgctaccatttagttgagcactctaaggagactgccggtgataagccgcgaggaaggtggggatgacgtcaagtcctcatggcccttacgggctgggctacacacgtgctacaatggcggtgacaatgggaagcaaaggggcaacccctagcaaatctcaaaaaaccgtctcagttcggattgggctctgcaacccgagcccatgaagttggaatcgctagtaatcgtggatcagcatgccacggtgaatacgttcccgggccttgtacacaccgcccgtcacaccatgggagttggttttacctgaaggcggtgcgctaacccgcaagggaggcagccgaccacggtagggtcagcgactggggtg

SEQ ID NO: 2216 - DNA, 1411 bp, Nitrobacter winogradskyi
agcgaacgctggcggcaggcttaacacatgcaagtcgaacgggcgtagcaatacgtcagtggcagacgggtgagtaacgcgtgggaacgtaccttttggttcggaacaacccagggaaacttgggctaataccggataagcccttacggggaaagatttatcgccgaaagatcggcccgcgtctgattagcttgttggtgaggtaacggctcaccaaggcgacgatcagtagctggtctgagaggatgatcagccacattgggactgagacacggcccaaactcctacgggaggcagcagtggggaatattggacaatgggcgcaagcctgatccagccatgccgcgtgagtgatgaaggccctagggttgtaaagctcttttgtgcgggaagataatgacggtaccgcaagaataagccccggctaacttcgtgccagcagccgcggtaatacgaagggggctagcgttgctcggaattactgggcgtaaagggtgcgtaggcgggtctttaagtcaggggtgaaatcctggagctcaactccagaactgcctttgatactgaggatcttgagttcgggagaggtgagtggaactgcgagtgtagaggtgaaattcgtagatattcgcaagaacaccagtggcgaaggcggctcactggcccgatactgacgctgaggcacgaaagcgtggggagcaaacaggattagataccctggtagtccacgccgtaaacgatgaatgccagccgttagtgggtttactcactagtggcgcagctaacgctttaagcattccgcctggggagtacggtcgcaagattaaaactcaaaggaattgacgggggcccgcacaagcggtggagcatgtggtttaattcgacgcaacgcgcagaaccttaccagcccttgacatgtccatgaccggtcgcagagatgtgaccttctcttcggagcatggagcacaggtgctgcatggctgtcgtcagctcgtgtcgtgagatgttgggttaagtcccgcaacgagcgcaacccccgtccttagttgctaccatttagttgagcactctaaggagactgccggtgataagccgcgaggaaggtggggatgacgtcaagtcctcatggcccttacgggctgggctacacacgtgctacaatggcggtgacaatgggaagcaaaggggtgacccctagcaaatctcaaaaaaccgtctcagttcggattgggctctgcaacccgagcccatgaagttggaatcgctagtaatcgtggatcagcatgccacggtgaatacgttcccgggccttgtacacaccgcccgtcacaccatgggagttggttttacctgaaggcggtgcgctaacccgcaagggaggcagccgaccacggtagggtcagcgactggggtg

SEQ ID NO: 2217 - DNA, 1431 bp, Nitrococcus mobilis
attgaacgctggcggcatgcctaacacatgcaagtcgagcggcagcagcgcctttcttcggaaaggtggctggcgagcggcggacgggtgagtaacgcgtgggaatctacccttcggtgggggatagcccggggaaactcggattaataccgcatacgccctatgggggaaagcgggcctctgcttgcaagctcgcaccgatggatgagcccgcgtccgattagctagttggtggggtaaaggcctaccaaggcgacgatcggtagctggtctgagaggacgatcagccacactgggactgagacacggcccagactcctacgggaggcagcagtggggaatattggacaatgggcgaaagcctgatccagcaatgccgcgtgggtgaagaaggcttgcgggttgtaaagccctttcagccgggaggaaaagcatcgggttaatacctcgatgttttgacgttaccggcagaagaagcaccggctaactccgtgccagcagccgcggtaatacggagggtgcaagcgttaatcggaattactgggcgtaaagcgcatgtaggcggtcgaataagtcgggtgtgaaagccccgggctcaacctgggaattgcatccgatactgtttggctagagtctggtagagggaggcggaattcccggtgtagcggtgaaatgcgtagatatcgggaggaacaccagtggcgaaggcggtctcctggatcaagactgacgctgaggtgcgaaagcgtggggagcaaacaggattagataccctggtagtccacgccgtaaacgatgaggactagccgttggattcatttatgagtctagtggcgcagctaacgcgttaagtcctccgcctggggagtacggccgcaaggttaaaactcaaaggaattgacgggggcccgcacaagcggtggagcatgtggtttaattcgatgcaacgcgaagaaccttacctgctcttgacatctccggaaccttgcagagatgtgagggtgccttcgggaaccggatgacaggtgctgcatggctgtcgtcagctcgtgtcgtgagatgttgggttaagtcccgcaacgagcgcaacccttgcccttagttaccagcggttcggccggggactctagggggactgccggtgacaaaccggaggaaggtggggatgacgtcaagtcatcatggcccttatgggcagggctacacacgtgctacaatggccggtacaaagggttgcaaacccgtgagggggagctaatcccaaaaagccggtcccagtccggattgcagtctgcaactcgactgcatgaagtcggaatcgctagtaatcgcggatcagcaatgccgcggtgaatacgttcccgggccttgtacacaccgcccgtcacaccatgggagtcggctgcaccagaagtcggtagtctaaccttc

SEQ ID NO: 2218 - DNA, 1467 bp, Nitrosococcus halophilus
attgaacgctggcggcatgcttaacacatgcaagtcggacggcagcagcgcttaagcttgcttaggcggctggcgagtggcggacgggtgagtaacgcgtaggaatctggcctctagagggggataacccggggaaactcgggctaataccgcatatactctgaggaggaaagcgggggactttcgggcctcgcgctaggggatgagcctgcgtccgattagctagttggtggggtaagggcctaccaaggcgacgatcggtagctggtctgagaggacgatcagccacactgggactgagacacggcccagactcctacgggaggcagcagtggggaatattggacaatgggcgcaagcctgatccagcaatgccgcgtgggtgaagaaggccttcgggttgtaaagccctttcagtggggaagaaaagcggtgtgtgaatagcgcatcgtattgacgttacccacagaagaagcaccggctaactccgtgccagcagccgcggtaatacggagggtgcgagcgttaatcggaattactgggcgtaaagggcgcgtaggcggcttagtaagttgggtgtgaaagccctgggctcaacctgggaattgcacttgatactgctgagctagagtgtggtagagggaggcggaatttccggtgtagcggtgaaatgcgtagatatcggaaggaacaccagtggcgaaggcggcctcctggaccataactgacgctgaggtgcgaaagcgtggggagcgaacaggattagataccctggtagtccacgccctaaacgatgagaactagacgttgggagggtaagcctttcagtgttgtagccaacgcgataagttctccgcctggggagtacggccgcaaggttgaaactcaaatgaattgacgggggcccgcacaagcggtggagcatgtggtttaattcgatgcaacgcgaagaaccttacctggttttgacatcctcggaaccctgcagagatgcgggggtgccttcgggagccgggagacaggtgctgcatggctgtcgtcagctcgtgtcgtgagatgttgggttaagtcccgcaacgagcgcaacccttacctctagttgccagcggttaggccgggcactctagggggactgccgttgacaaaacggaggaaggtggggatgacgtcaagtcatcatggcccttatggccagggctacacacgtgctacaatggccggtacagagggtggccaagcagcgatgcggagctaatctcagaaagccggtcgtagtccggattgcagtctgcaactcgactgcatgaagtcggaatcgctagtaatcgcggatcagcaatgccgcggtgaatacgttcccgggccttgtacacaccgcccgtcacaccatgggagttggctgcaccagaagtaggtggcttaaccttcgggggggcgcttaccacggtgtggtcaatgactggggtg

SEQ ID NO: 2219 - DNA, 1467 bp, Nitrosococcus oceani
attgaacgctggcggcatgcttaacacatgcaagtcgaacggcagcagcacctaagcttgcttaggtggctggcgagtggcggacgggtgagtaacgcgtgggaatctggcctctagagggggataactcggggaaactcgggctaataccgcataatctctaaggaggaaagcgggggaccgaaaggcctcgcgctgggggatgagcctgcgtccgattagctagttggtggggtaagggcctaccaaggcgatgatcggtagctggtctgagaggacgatcagccacactgggactgagacacggcccagactcctacgggaggcagcagtggggaatattggacaatgggggcaaccctgatccagcaatgccgcgtgggtgaagaaggctttcgggttgtaaagccctttcagtggggaagaaaagcgatgtgtgaatagcacatcgtgttgacgttacctacagaagaagcaccggctaactccgtgccagcagccgcggtaatacggagggtgcgagcgttaatcggaattactgggcgtaaagggcgcgtaggcggtttggtaagttgggtgtgaaagccccgggctcaacctgggaatggcacttgatactgcctggctagagtatggtagagggaggcggaatttccggtgtagcggtgaaatgcgtagatatcggaaggaacaccagtggcgaaggcggcctcctggaccactactgacgctgaggtgcgaaagcgtggggagcaaacaggattagataccctggtagtccacgccctaaacgatgagaactagacgttgggagggatagcctttcagtgttgcagctaacgcgttaagttctccgcctggggagtacggccgcaaggttgaaactcaaatgaattgacgggggcccgcacaagcggtggagcatgtggtttaattcgatgcaacgcgaagaaccttacctggccttgacatccccggaactttgctgagaggcgaaggtgccttcgggagccgggagacaggtgctgcatggctgtcgtcagctcgtgtcgtgagatgttgggttaagtcccgcaacgagcgcaacccttatctctagttgccagcggttcggccgggcactctagagggactgccgttgacaaaacggaggaaggtggggatgacgtcaagtcatcatggcccttatggccagggctacacacgtgctacaatggccggtacagagggtggccaagcagcgatgcggagctaatctcagaaaaccggtcgtagtccggattgcagtctgcaactcgactgcatgaagtcggaatcgctagtaatcgcggatcagcaatgccgcggtgaatacgttcccgggccttgtacacaccgcccgtcacaccatgggagttggttgcaccagaagtgggtagtttaaccttcgggaggacgcttactacggtgtggtcaatgactggggtg

SEQ ID NO: 2220 - DNA, 1467 bp, Nitrosococcus watsoni
attgaacgctggcggcatgcttaacacatgcaagtcgaacggcagcagcacttaagcttgcttaggtggctggcgagtggcggacgggtgagtaacgcgtgggaatctagcctctagagggggataactcggggaaactcgggctaataccgcataatctctaaggaggaaagcgggggaccgaaaggcctcgcgctggaggatgagcctgcgtccgattagctagttggtggggtaagggcctaccaaggcgatgatcggtagctggtctgagaggacgatcagccacactgggactgagacacggcccagactcctacgggaggcagcagtggggaatattggacaatgggggcaaccctgatccagcaatgccgcgtgggtgaagaaggctttcgggttgtaaagccctttcagtagggaagaaaagcgatgtgtgaatagcccatcgtgttgacgttacctacagaagaagcaccggctaactccgtgccagcagccgcggtaatacggagggtgcgagcgttaatcggaattactgggcgtaaagggcgcgtaggcggtttggtaagttgggtgtgaaagccccgggctcaacctgggaatggcacttgatactgcctggctagagtatggtagagggaggcggaatttccggtgtagcggtgaaatgcgtagatatcggaaggaacaccagtggcgaaggcggcctcctggaccactactgacgctgaggtgcgaaagcgtggggagcaaacaggattagataccctggtagtccacgccctaaacgatgagaactagacgttgggagggatagcctttcagtgttgcagctaacgcgttaagttctccgcctggggagtacggccgcaaggttgaaactcaaatgaattgacgggggcccgcacaagcggtggagcatgtggtttaattcgatgcaacgcgaagaaccttacctggccttgacatccccggaactttgctgagaggcgaaggtgccttcgggagccgggagacaggtgctgcatggctgtcgtcagctcgtgtcgtgagatgttgggttaagtcccgcaacgagcgcaacccttatctctagttgccagtggttcggccgggcactctagagagactgccgttgacaaaacggaggaaggtggggatgacgtcaagtcatcatggcccttatggccagggctacacacgtgctacaatggccggtacagagggtggccaagcagcgatgcggagctaatctcagaaagccggtcgtagtccggattgcagtctgcaactcgactgcatgaagtcggaatcgctagtaatcgcggatcagcaatgccgcggtgaatacgttcccgggccttgtacacaccgcccgtcacaccatgggagttggttgcaccagaagtgggtggtttaaccttcgggaggacgcttactacggtgtggtcaatgactggggtg

SEQ ID NO: 2221 - DNA, 1450 bp, Nitrosomonas aestuarii
ttgaacgctggcggcatgctttacacatgcaagtcgaacggcagcacgggtgcttgcacctggtggcgagtggcggacgggtgagtaatgcatcggaacgtgtccagaagtgggggataacgcatcgaaagatgtgctaataccgcatattctctacggaggaaagcaggggatcgaaagaccttgtgcttttggagcggccgatgcctgattagctagttggtggggtaaaggcctaccaaggcaacgatcagtagttggtctgagaggacgaccagccacactgggactgagacacggcccagactcctacgggaggcagcagtggggaattttggacaatgggcgaaagcctgatccagcaatgccgcgtgagtgaagaaggccttcgggttgtaaagctctttcagtcgagaagaaaaggttgtgactaataatcacaacttatgacggtaccgacagaagaagcaccggctaactacgtgccagcagccgcggtaatacgtagggtgcaagcgttaatcggaattactgggcgtaaagggtgcgcaggcggctttgtaagtcagatgtgaaatccccgggcttaacctgggaattgcgtttgaaactacaaagctagagtgtagcagaggggggtggaattccatgtgtagcagtgaaatgcgtagagatatggaagaacatcgatggcgaaggcagccccctgggttaacactgacgctcatgcacgaaagcgtggggagcaaacaggattagataccctggtagtccacgccctaaacgatgtcaactagttgttgggccttactaggcttggtaacgtagctaacgcgtgaagttgaccgcctggggagtacggtcgcaagattaaaactcaaaggaattgacggggacccgcacaagcggtggattatgtggattaattcgatgcaacgcgaaaaaccttacctacccttgacatgtagcgaatattttagagataaaatagtgccttcgggaacgctaacacaggtgctgcatggctgtcgtcagctcgtgtcgtgagatgttgggttaagtcccgcaacgagcgcaacccttgtcattaattgccatcatttagttgggcactttaatgagactgccggtgacaaaccggaggaaggtggggatgacgtcaagtcctcatggcccttatgggtagggcttcacacgtaatacaatggcgcgtacagagggttgccaacccgcgagggggagctaatctcagaaagcgcgtcgtagtccggatcggagtctgcaactcgactccgtgaagtcggaatcgctagtaatcgcggatcagcatgtcgcggtgaatacgttcccgggtcttgtacacaccgcccgtcacaccatgggagtgggtttcaccagaagcagatagtctaaccgtaaggagggcgtttgccacggtgagattcatgac

SEQ ID NO: 2222 - DNA, 1460 bp, Nitrosomonas communis
attgaacgctggcggcatgctttacacatgcaagtcgaacggcagcacgggggcaaccctggtggcgagtggcgaacgggtgagtaatacatcggaacgtgtcttaaagtgggggataacgcatcgaaagatgtgctaataccgcataatctctaaggaggaaagcaggggatcgaaagaccttgtgcttttagagcggccgatgcctgattagctagttggtaaggtaaaggcttaccaaggcaacgatcagtagctggtctgagaggacgaccagccacactgggactgagacacggcccagcctcctacgggaggcagcagtggggaattttggacaatgggcgcaagcctgatccagccatgccgcgtgagtgaagaaggccttcgggttgtaaagctctttcggtcgggaagaaatagttatggctaatatccataatgaatgacggtaccgacataagaagcaccggctaactacgtgccagcagccgcggtaatacgtagggtgcaagcgttaatcggaattattgggcgtaaagggtgcgcaggcggatgtataagtcagatgtgaaatccccgggcttaacctgggaattgcgtttgaaactatatgactagagtgtgatagaggggagtggaattccatgtgtagcagtgaaatgcgtagagatgtggaagaacaccgatggcgaaggcagctccctggattaacactgacgctcatgcacgaaagcgtggggagcaaacaggattagataccctggtagtccacgccctaaacgatgtcaactagttgtcggatctgttaaaagatttggtaacgtagctaacgcgtgaagttgaccgcctgggaagtacggtcgcaagattaaaactcaaaggaattgacggggacccgcacaagcggtggattatgtggattaattcgatgcaacgcgaaaaaccttacctacccttgacatgctcgaaattccacagagatgtggaagtgcccgaaagggaatcgaggcacaggtgctgcatggctgtcgtcagctcgtgtcgtgagatgttgggttaagtcccgcaacgagcgcaacccttgtcactaattgccatcattcagttgggcactttagtgagactgccggtgacaaaccggaggaaggtggggatgacgtcaagtcctcatggcccttatgggtagggcttcacacgtaatacaatggcgcgtacagagggttgccaacccgcgagggggagctaatctcagaaagcgcgtcgtagtccggatcggagtctgcaactcgactccgtgaagtcggaatcgctagtaatcgcggatcagcatgtcgcggtgaatacgttcccgggtcttgtacacaccgcccgtcacaccatgggagtagttttcaccagaagcagatagtctaaccgcaaggagggcgtttgccacggtgagagttatgactggggtg

SEQ ID NO: 2223 - DNA, 1460 bp, Nitrosomonas cryotolerans
attgaacgctggcggcatgctttacacatgcaagtcgaacggcagcacgggagcttgctcctggtggcgagtggcggacgggtgagtaatacatcggaacgtgtccttaagtgggggataacgcatcgaaagatgtgctaataccgcataatctctgaggagaaaagcaggggatcgtaagaccttgtgcttttggagcggccgatgtctgattagctagttggtgaggtaatggctcaccaaggcgacgatcagtagttggtctgagaggacgaccagccacactgggactgagacacggcccagactcctacgggaggcagcagtggggaattttggacaatgggcgaaagcctgatccagccatgccgcgtgagtgaagaaggccttcgggttgtaaagctctttcagtcgagaagaaaaggttgcgactaataatcgtaactaatgacggtatcgacagaagaagcaccggctaactacgtgccagcagccgcggtaatacgtagggtgcgagcgttaatcggaattactgggcgtaaagggtgcgcaggcggttttgtaagtcagatgtgaaatccccgggcttaacctgggaactgcgtttgaaactacaaagctagagtgtagcagaggggggtggaattccatgtgtagcagtgaaatgcgtagagatatggaggaacaccgatggcgaaggcagccccctgggttaacactgacgctcaggcacgaaagcgtggggagcaaacaggattagataccctggtagtccacgccctaaactatgtcaactagttgtcggatcttaataggtttggtaacgtagctaacgcgtgaagttgaccgcctggggagtacggtcgcaagattaaaactcaaaggaattgacggggacccgcacaagcggtggattatgtggattaattcgatgcaacgcgaaaaaccttacctacccttgacatgtatctaagctcgctgagaggtgagtgtgcccgaaagggaaagataacacaggtgctgcatggctgtcgtcagctcgtgtcgtgagatgttgggttaagtcccgcaacgagcgcaacccttgtcattaattgccatcatttagttgggcactttaatgagactgccggtgacaaaccggaggaaggtggggatgacgtcaagtcctcatggcccttatgggtagggcttcacacgtaatacaatggcgcgtacagagggttgccaacccgcgagggggagctaatctcagaaagcgcgtcgtagtccggatcggagtctgcaactcgactccgtgaagtcggaatcgctagtaatcgcggatcagcatgtcgcggtgaatacgttcccgggtcttgtacacaccgcccgtcacaccatgggagtgggtttcaccagaagcaggtagtctaaccgcaaggagggcgcttgccacggtgagattcatgactggggtg

SEQ ID NO: 2224 - DNA, 1460 bp, Nitrosomonas europaea
attgaacgctggcggcatgctttacacatgcaagtcgaacggcagcgggggcttcggcctgccggcgagtggcgaacgggtgagtaatacatcggaacgtgtccttaagtggggaataacgcatcgaaagatgtgctaataccgcatatctctgaggagaaaagcaggggatcgcaagaccttgcgctaaaggagcggccgatgtctgattagctagttggtggggtaaaggcttaccaaggcaacgatcagtagttggtctgagaggacggccaaccacactgggactgagacacggcccagactcctacgggaggcagcagtggggaattttggacaatgggcgaaagcctgatccagccatgccgcgtgagtgaagaaggccttcgggttgtaaagctcttttagtcggaaagaaagagttgcaatgaataattgtgatttatgacggtaccgacagaaaaagcaccggctaactacgtgccagcagccgcggtaatacgtagggtgcgagcgttaatcggaattactgggcgtaaagggtgcgcaggcggtcttgcaagtcagatgtgaaagccccgggcttaacctgggaattgcgtttgaaactacaaggctagagtgcagcagaggggagtggaattccatgtgtagcagtgaaatgcgtagagatgtggaagaacaccgatggcgaaggcagctccctgggttgacactgacgctcatgcacgaaagcgtggggagcaaacaggattagataccctggtagtccacgccctaaacgatgtcaactagttgtcggatctaattaaggatttggtaacgtagctaacgcgtgaagttgaccgcctggggagtacggtcgcaagattaaaactcaaaggaattgacggggacccgcacaagcggtggattatgtggattaattcgatgcaacgcgaaaaaccttacctacccttgacatgcttggaatctaatggagacataagagtacccgaaagggagccaagacacaggtgctgcatggctgtcgtcagctcgtgtcgtgagatgttgggttaagtcccgcaacgagcgcaacccttgtcactaattgctatcatttttaatgagcactttagtgagactgccggtgacaaaccggaggaaggtggggatgacgtcaagtcctcatggcccttatgggtagggcttcacacgtaatacaatggcgtgtacagagggttgccaacccgcgagggggagccaatctcagaaagcacgtcgtagtccggatcggagtctgcaactcgactccgtgaagtcggaatcgctagtaatcgcggatcagcatgccgcggtgaatacgttcccgggtcttgtacacaccgcccgtcacaccatgggagtggttttcaccagaagcaggtagcttaaccgtaaggagggcgcttgccacggtgggggtcatgactggggtg

SEQ ID NO: 2225 - DNA, 1459 bp, Nitrosomonas eutropha
attgaacgctggcggcatgctttacacatgcaagtcgaacggcagcgggggcttcggcctgccggcgagtggcgaacgggtgagtaatacatcggaacgtgtccttaagtggggaataacgcatcgaaagatgtgctaataccgcatatctctcaggaggaaagcaggggatcgaaagaccttgcgctaaaggagcggctgatgtctgattagctagttggtggggtaaaggcttaccaaggcaacgatcagtagctggtctgagaggacgaccagccacactgggactgagacacggcccagactcctacgggaggcagcagtggggaattttggacaatgggcgaaagcctgatccagccatgccgcgtgagtgaagaaggccttcgggttgtaaagctcttttagtcggaaagaaagagtcatagtaaatagctatgatttatgacggtaccgacagaaaaagcaccggctaactacgtgccagcagccgcggtaatacgtagggtgcgagcgttaatcggaattactgggcgtaaagggtgcgcaggcggccttgtaagtcagatgtgaaagccccgggcttaacctgggaattgcgtttgaaactacaaagctagagtgcagcagaggggagtggaattccatgtgtagcagtgaaatgcgtagagatgtggaagaacaccgatggcgaaggcagctccctgggttgacactgacgctcatgcacgaaagcgtggggagcaaacaggattagataccctggtagtccacgccctaaactatgtcaactagttgtcggatctaattaaggatttggtaacgtagctaacgcgtgaagttgaccgcctggggagtacgatcgcaagattaaaactcaaaggaattgacggggacccgcacaagcggtggattatgtggattaattcgatgcaacgcgaaaaaccttacctacccttgacatgcttggaatctaatggagacataagagtgcccgaaagggagccaagacacaggtgctgcatggctgtcgtcagctcgtgtcgtgagatgttgggttaagtcccgcaacgagcgcaacccttgtcgctaattgctatcattttaatgagcactttagcgagactgccggtgacaaaccggaggaaggtggggatgacgtcaagtcctcatggcccttatgggtagggcttcacacgtaatacaatggcgcgtacagagggttgccaatccgcgaggaggagccaatctcagaaagcgcgtcgtagtccggatcggagtctgcaactcgactccgtgaagtcggaatcgctagtaatcgcggatcagcatgccgcggtgaatacgttcccgggtcttgtacacaccgcccgtcacaccatgggagtgattttcaccagaagcaggtagtttaaccgcaaggagggcgcttgccacggtgggggtcatgactggggtg

SEQ ID NO: 2226 - DNA, 1460 bp, Nitrosomonas halophila
attgaacgctggcggcatgctttacacatgcaagtcgaacggcagcacgggggcaaccctggtggcgagtggcgaacgggtgagtaatgcatcggaacgtatccttaagtggggaataacgcatcgaaagatgtgctaataccgcataaactctgaggagaaaagcaggggatcgcaagaccttgcgctaaaggagcggccgatgtctgattagctagttggtggggtaaaggcctaccaaggcgacgatcagtagttggtctgagaggacgaccaaccacactgggactgagacacggcccagactcctacgggaggcagcagtggggaattttggacaatgggcgaaagcctgatccagccatgccgcgtgagtgaagaaggccttcgggttgtaaagctctttcagtcggaaagaaacgattgtgattaatactcacaattaatgacggtaccgacagaagaagcaccggctaactacgtgccagcagccgcggtaatacgtagggtgcgagcgttaatcggaattactgggcgtaaagggtgcgcaggcggtcttgtaagtcagatgtgaaatccccgggcttaacctgggaattgcgtttgaaactgcagggctagagtgcagcagaggggagtggaattccacgtgtagcagtgaaatgcgtagagatgcggaagaacaccgatggcgaaggcagctccctgggctgacactgacgctcatgcacgaaagcgtggggagcaaacaggattagataccctggtagtccacgccctaaacgatgtcaactagttgtcggatctaattaaggatttggtaacgtagctaacgcgtgaagttgaccgcctggggagtacggtcgcaagattaaaactcaaaggaattgacggggacccgcacaagcggtggattatgtggattaattcgatgcaacgcgaaaaaccttacctacccttgacatgcttggaatcctgtggagacatgggagtgcccgaaagggagccaagacacaggtgctgcatggctgtcgtcagctcgtgtcgtgagatgttgggttaagtcccgcaacgagcgcaacccttgtcactaattgctatcattcacttgagcactttagtgagactgccggtgacaaaccggaggaaggtggggatgacgtcaagtcctcatggcccttatgggtagggcttcacacgtaatacaatggcgtgtacagagggttgccaacccgcgagggggagccaatcccagaaagcacgtcgtagtccggatcggagtctgcaactcgactccgtgaagtcggaatcgctagtaatcgcggatcagcatgccgcggtgaatacgttcccgggtcttgtacacaccgcccgtcacaccatgggagtggttttcaccagaagcaggtagtttaaccgcaaggagggcgcttgccacggtggggatcatgactggggtg

SEQ ID NO: 2227 - DNA, 1458 bp, Nitrosomonas marina
attgaacgctggcggcatgctttacacatgcaagtcgaacggcagcacgggtgcttgcacctggtggcgagtggcgaacgggtgagtaatgcatcggaacgtgtccaagagtgggggataacgcatcgaaagatgtgctaataccgcatattctctaaggagaaaagcaggggatcgtaagaccttgcgcttttggagtggccgatgcctgattagctagttggtggggtaaaggcctaccaaggcgacgatcagtagttggtctgagaggacgaccagccacactgggactgagacacggcccagactcctacgggaggcagcagtggggaattttggacaatgggcgaaagcctgatccagcaatgccgcgtgagtgaagaaggccttcgggttgtaaagctctttcagtcgagaagaaaagattgtgatgaataatcacaattcatgacggtatcgacagaagaagcaccggctaactacgtgccagcagccgcggtaatacgtagggtgcaagcgttaatcggaattactgggcgtaaagggtgcgcaggcggctttgtaagtcagatgtgaaatccccgggcttaacctgggaattgcgtttgaaactacaaagctagagtgtagcagaggggagtggaattccatgtgtagcagtgaaatgcgtagagatatggaagaacatcgatggcgaaggcagctccctgggttaacactgacgctcatgcacgaaagcgtggggagcaaacaggattagataccctggtagtccacgccctaaacgatgtcaactagttgttgggccttactaggcttagtaacgtagctaacgcgtgaagttgaccgcctggggagtacggtcgcaagattaaaactcaaaggaattgacggggacccgcacaagcggtggattatgtggattaattcgatgcaacgcgaaaaaccttacctacccttgacatgtagcgaattttctagagatagattagtgccttcgggaacgctaacacaggtgctgcatggctgtcgtcagctcgtgtcgtgagatgttgggttaagtcccgcaacgagcgcaacccttgtcattaattgccatcattaggttgggcactttaatgagactgccggtgacaaaccggaggaaggtggggatgacgtcaagtcctcatggcccttatgggtagggcttcacacgtaatacaatggcgcgtacagagggttgccaacccgcgagggggagctaatcccagaaagcgcgtcgtagtccggatcggagtctgcaactcgactccgtgaagtcggaatcgctagtaatcgcggatcagcatgtcgcggtgaatacgttcccgggtcttgtacacaccgcccgtcacaccatgggagtgggttccaccagaagcagatagtctaaccgcaaggagggcgtttgccacggtgagattcatgactggggtg

SEQ ID NO: 2228 - DNA, 1460 bp, Nitrosomonas nitrosa
attgaacgctggcggcatgctttacacatgcaagtcgaacggcagcacgggggcaaccctggtggcgagtggcgaacgggtgagtaatacatcggaacgtgtcttaaagagggggataacgcatcgaaagatgtgctaataccgcatattctctacggaggaaagcaggggatcgcaagaccttgcgctttttgagcggccgatgcctgattagctagttggtaaggtaatggcttaccaaggcaacgatcagtagctggtctgagaggacgaccagccacactgggactgagacacggcccagactcctacgggaggcagcagtggggaattttggacaatgggcgaaagcctgatccagccatgccgcgtgagtgaagaaggccttcgggttgtaaagctctttcggtcgggaagaaatagttgtggctaatatccacaatgaatgacggtaccgacataagaagcaccggctaactacgtgccagcagccgcggtaatacgtagggtgcaagcgttaatcggaattattgggcgtaaagggtgcgcaggcggttgtataagtcagatgtgaaatccctgggcttaacctaggaattgcgtttgaaactatatgactagagtgtgacagaggggagtggaattccatgtgtagcagtgaaatgcgtagagatgtggaagaacaccgatggcgaaggcagctccctgggttaacactgacgctcatgcacgaaagcgtggggagcaaacaggattagataccctggtagtccacgccctaaacgatgtcaactagttgtcggatctatataaagattaggtaacgtagctaacgcgtgaagttgaccgcctgggaagtacggtcgcaagattaaaactcaaaggaattgacggggacccgcacaagcggtggattatgtggattaattcgatgcaacgcgaaaaaccttacctacccttgacatgctcgaaatttcgcagagatgcgaaagtgcccgaaagggaatcgagacacaggtgctgcatggctgtcgtcagctcgtgtcgtgagatgttgggttaagtcccgcaacgagcgcaacccttgtcactaattgccatcatttagttgggcactttagtgagactgccggtgacaaaccggaggaaggtggggatgacgtcaagtcctcatggcccttatgggtagggcttcacacgtaatacaatggcgcgtacagagggttgccaacctgcgaaggggagctaatctcataaagcgcgtcgtagtccggatcggagtctgcaactcgactccgtgaagtcggaatcgctagtaatcgcggatcagcatgtcgcggtgaatacgttcccgggtcttgtacacaccgcccgtcacaccatgggagtaattttcaccagaagcaaatagtctaaccgcaaggagggcgtttgccacggtgagagttatgactggggtg

SEQ ID NO: 2229 - DNA, 1460 bp, Nitrosomonas oligotropha
attgaacgctggcggcatgctttacacatgcaagtcgaacggcagcacgggtgcttgcatctggtggcgagtggcggacgggtgagtaatacatcggaacgtgtcctgaagtgggggataacgcatcgaaagatgtgctaataccgcatattctctgaggagaaaagtaggggatcgaaagaccttatgcttttggagcggccgatgtctgattagctagttggtagggtaatggcttaccaaggcaacgatcagtagttggtctgagaggacggccagccacactgggactgagacacggcccagactcctacgggaggcagcagtggggaattttggacaatgggcgcaagcctgatccagcaatgccgcgtgagtgaagaaggccttcgggttgtaaagctctttcagttgaaaagaaaaaattgtgactaataatcataattcatgacggtatcaacagaagaagcaccggctaactacgtgccagcagccgcggtaatacgtagggtgcaagcgttaatcggaattactgggcgtaaagggtgcgcaggcggttctgtaagtcagatgtgaaatccccgggcttaacctgggaactgcgtttgaaactgcagagctagagtgcagcagagggaggtggaattccatgtgtagcagtgaaatgcgtagagatatggaagaacatcgatggcgaaggcaacctcctgggctagcactgacgctcatgcacgaaagcgtggggagcaaacaggattagataccctggtagtccacgccctaaactatgtcaactagttgtcgggtcttattagacttggtaacgtagctaacgcgtgaagttgaccgcctggggagtacggtcgcaagattaaaactcaaaggaattgacggggacccgcacaagcggtggattatgtggattaattcgatgcaacgcgaaaaaccttacctacccttgacatgtcagaaaattttcagagatggatttgtgcccgaaagggaatctgaacacaggtgctgcatggctgtcgtcagctcgtgtcgtgagatgttgggttaagtcccgcaacgagcgcaacccttgtcattaattgccatcatttagttgggcactttaatgagactgccggtgataaaccggaggaaggtggggatgacgtcaagtcctcatggcccttatgggtagggcttcacacgtaatacaatggcgcgtacagagggttgccaacccgcgagggggagctaatctcagaaagcgcgtcgtagtccggatcggagtctgcaactcgactccgtgaagttggaatcgctcgtaatcgcggatcagcatgtcgcggtgaatacgttcccgggtcttgtacacaccgcccgtcacaccatgggagtgggtttcaccagaagcaggtagtctaaccgtaaggagggcgcttgccacggtgaggttcatgactggggtg

SEQ ID NO: 2230 - DNA, 1462 bp, Nitrosomonas stercoris
attgaacgctggcgcagctttacacatgcaagtcgaacggcagcgcggagagcttgctctctggcggcgagtggcgaacgggtgagtaatgcatcggaacgtgtccttaagtggggaataacgcatcgaaagatgtgctaataccgcatatctctcaggaggaaagcaggggatcgcaagaccttgcgctaaaggagcggccgatgtctgattagttagttggtggggtaaaggcctaccaaggcaacgatcagtagctggtctgagaggacgatcagccacactgggactgagacacggcccagactcctacgggaggcagcagtggggaattttggacaatgggcgaaagcctgatccagccatgccgcgtgaatgaagaaggccttcgggttgtaaagttcttttagttggaaagaaaaaattatgatgaataatcataattcatgacggtaccgacagaaaaagcaccggctaactacgtgccagcagccgcggtaatacgtagggtgcaagcgttaatcggaattactgggcgtaaagggtgtgcaggcggccttgtaagtcagatgtgaaagccccgggcttaacctgggaattgcgtttgaaactacagggctagagtgcagcagaggggagtggaattccatgtgtagcagtgaaatgcgtagagatatggaagaacaccgatggcgaaggcagctccctgggctgacactgacgctcatacacgaaagcggggggagcaaacaggattagataccctggtagtccacgccctaaactatgtcaactagttgtcggatctaattggggatttggtaacgtagctaacgcgtgaagttgaccgcctggggactacggccgcaaggctaaaactcaaaggaattgacggggacccgcacaagcggtggattatgtggattaattcgatgcaacgcgaaaaaccttacctacccttgacatgcttggaatctaatggagacataagagtgcccgaaagggagccaagacacaggtgctgcatggctgtcgtcagctcgtgtcgtgagatgttgggttaagtcccgcaacgagcgcaacccttgtcgttaattgctatcatttttaatgagcactttaacgagactgccggtgacaaaccggaggaaggtggggatgacgtcaagtcctcatggcccttatgggtagggcttcacacgtaatacaatggcgtgtacagagggttgccaatccgtgaggaggagctaatctcagaaagcacgtcgtagtccggatcggagtctgcaattcgactccgtgaagtcggaatcgctagtaatcgcggatcagaatgtcgcggtgaatacgttcccgggtcttgtacacaccgcccgtcacaccatggaagtgattttcaccagaagcaggtagtttaaccgcaaggagggcgcttgccacggtgggggtcatgactggggtg

SEQ ID NO: 2231 - DNA, 1460 bp, Nitrosomonas ureae
attgaacgctggcggcatgctttacacatgcaagtcgaacggcagcacggatgcttgcatctggtggcgagtggcggacgggtgagtaatacatcggaacgtgtccttaagtgggggataacgcatcgaaagatgtgctaataccgcataatatctaaggaggaaagtgggggatcgaaagacctcatgcttttggagcggccgatgtctgattagctagttggtaaggtaatggcttaccaaggcaacgatcagtagttggtctgagaggacgaccagccacactgggactgagacacggcccagactcctacgggaggcagcagtggggaattttggacaatgggcgcaagcctgatccagcaatgccgcgtgagtgaagaaggccttcgggttgtaaagctctttcagttgagaagaaaaaattctggctaatacccagaattcatgacggtatcgacagaagaagcaccggctaactacgtgccagcagccgcggtaatacgtagggtgcaagcgttaatcggaattactgggcgtaaagggtgcgcaggtggttttgtaagtcagatgtgaaatccccgggcttaacctgggaattgcgtttgaaactacaagactagagtgtggcagaggggggtggaattccatgtgtagcagtgaaatgcgtagagatatggaagaacatcgatggcgaaggcagccccctgggttaacactgacactcaggcacgaaagcgtggggagcaaacaggattagataccctggtagtccacgccctaaactatgtcaactagttgttgggtcttattagacttggtaacgaagctaacgcgtgaagttgaccgcctggggagtacggtcgcaagattaaaactcaaaggaattgacggggacccgcacaagcggtggattatgtggattaattcgatgcaacgcgaaaaaccttacctacccttgacatgttagaaaatattcagagatgaatttgtgctcgaaagagaatctaaacacaggtgctgcatggctgtcgtcagctcgtgtcgtgagatgttgggttaagtcccgcaacgagcgcaacccttgtcattaattgccagcattaagttgggcactttaatgagactgccggtgataaaccggaggaaggtggggatgacgtcaagtcctcatggcccttatgggtagggcttcacacgtaatacaatggcgcgtacagagggttgccaactcgcgagagggagccaatctcaaaaagcgcgtcgtagtccggatcggagtctgcaactcgactccgtgaagtcggaatcgctagtaatcgcggatcagcatgtcgcggtgaatacgttcccgggtcttgtacacaccgcccgtcacaccatgggagtgggtttcaccagaagcaggtagtctaaccgtaaggagggcgcttgccacggtgaggttcatgactggggtg

SEQ ID NO: 2232 - DNA, 1458 bp, Nitrosospira briensis
attgaacgctggcggcatgctttacacatgcaagtcgaacggcagcacgggggcaaccctggtggcgagtggcgaacgggtgagtaatgcatcggaacgtatcttcaagtgggggataacgcaccgaaaggtgtgctaataccgcataatctctacggagaaaagcaggggatcgcaagaccttgcgcttttggagcggccgatgtctgattagctagttggtgaggtaaaggcttaccaaggcttcgatcagtagctggtctgagaggacgaccagccacactgggactgagacacggcccagactcctacgggaggcagcagtggggaattttggacaatgggggaaaccctgatccagccatgccgcgtgagtgaagaaggccttcgggttgtaaagctctttcagccggaacgaaacggtcacggttaatacccgtgatcactgacggtaccggaagaagaagcaccggctaactacgtgccagcagccgcggtaatacgtagggtgcgagcgttaatcggaattactgggcgtaaagcgtgcgcaggcggttttgtaagtcagatgtgaaatccccgggctcaacctgggaactgcgtttgaaactacaaggctagagtgtagcagaggggggtggaattccacgtgtagcagtgaaatgcgtagagatgtggaggaacaccgatggcgaaggcagccccctgggttaacactgacgctcaggcacgaaagcgtggggagcaaacaggattagataccctggtagtccacgccctaaacgatgtcaactagttgtcgggtcttaacgggcttggtaacgcagctaacgcgtgaagttgaccgcctggggagtacggtcgcaagattaaaactcaaaggaattgacggggacccgcacaagcggtggattatgtggattaattcgatgcaacgcgaaaaaccttacctacccttgacatgtaccgaagtccgctgagaggtggatgtgcccgaaagggaacggtaacacaggtgctgcatggctgtcgtcagctcgtgtcgtgagatgttgggttaagtcccgcaacgagcgcaacccttgtcattaattgccatcattcagttgggcactttaatgagactgccggtgacaaaccggaggaaggtggggatgacgtcaagtcctcatggcccttatgggtagggcttcacacgtaatacaatggcgcgtacagagggttgccaacccgcgagggggagctaatctcagaaagcgcgtcgtagtccggatcggagtctgcaactcgactccgtgaagtcggaatcgctagtaatcgcggatcagcatgtcgcggtgaatacgttcccgggtcttgtacacaccgcccgtcacaccatgggagtgggttccaccagaagcaggtagtctaaccgcaaggagggcgcctgccacggtgagattcatgactggggtg

SEQ ID NO: 2233 - DNA, 1458 bp, Nitrosospira lacus
attgaacgctggcggcatgctttacacatgcaagtcgaacggcagcacgggggcaaccctggtggcgagtggcgaacgggtgagtaatgcatcggaacgtatccttaagtgggggataacgcatcgaaagatgcgctaataccgcataatctctgaggagaaaagcaggggatcgcaagaccttgcgcttttggagcggccgatgtctgattagctagttggtgaggtaaaggcttaccaaggcttcgatcagtagctggtctgagaggacgaccagccacactgggactgagacacggcccagactcctacgggaggcagcagtggggaattttggacaatgggggaaaccctgatccagccatgccgcgtgagtgaagaaggccttcgggttgtaaagctctttcagccggaacgaaaaggttacggttaatacccgtgactaatgacggtaccggaagaagaagcaccggctaactacgtgccagcagccgcggtaatacgtagggtgcgagcgttaatcggaattactgggcgtaaagcgtgcgcaggcggttttgtaagtcagatgtgaaatccccgggctcaacctgggaactgcgtttgaaactacaaggctagagtgtggcagaggggggtggaattccacgtgtagcagtgaaatgcgtagagatgtggaggaacaccgatggcgaaggcagccccctgggttaacactgacgctcaggcacgaaagcgtggggagcaaacaggattagataccctggtagtccacgccctaaacgatgtcaactagttgtcgggtcttaacggacttggtaacgtagctaacgcgtgaagttgaccgcctggggagtacggtcgcaagattaaaactcaaaggaattgacggggacccgcacaagcggtggattatgtggattaattcgatgcaacgcgaaaaaccttacctacccttgacatgtaccgaagcttgccgagaggtgagcgtgcccgaaagggaacggtaacacaggtgctgcatggctgtcgtcagctcgtgtcgtgagatgttgggttaagtcccgcaacgagcgcaacccttgtcattaattgccatcattcagttgggcactttaatgaaactgccggtgacaaaccggaggaaggtggggatgacgtcaagtcctcatggcccttatgggtagggcttcacacgtaatacaatggcgcgtacagagggttgccaacccgcgagggggagctaatctcagaaagcgcgtcgtagtccggatcggagtctgcaactcgactccgtgaagtcggaatcgctagtaatcgcggatcagcatgtcgcggtgaatacgttcccgggtcttgtacacaccgcccgtcacaccatgggagtgggtttcaccagaagcaggtagtctaaccgcaaggagggcgcttgccacggtgagattcatgactggggtg

SEQ ID NO: 2234 - DNA, 1458 bp, Nitrosospira multiformis
attgaacgctggcggcatgctttacacatgcaagtcgaacggcagcacgggggcaaccctggtggcgagtggcgaacgggtgagtaatacatcggaacgtatccttaagtgggggataacgcaccgaaaggtgtgctaataccgcataatctccgaggagaaaagcaggggatcgcaagaccttgcgcttttggagcggccgatgtctgattagctagttggtgaggtaaaggcttaccaaggcgtcgatcagtagctggtctgagaggacgaccagccacactgggactgagacacggcccagactcctacgggaggcagcagtggggaattttggacaatgggggaaaccctgatccagccatgccgcgtgagtgaagaaggccttcgggttgtaaagctctttcagccggaacgaaacggtcacggttaatacccgtgactactgacggtaccggaagaagaagcaccggctaactacgtgccagcagccgcggtaatacgtagggtgcgagcgttaatcggaattactgggcgtaaagcgtgcgcaggcggttttgtaagtcagatgtgaaatccccgggcttaacctgggaactgcgtttgaaactacaaggctagagtgtggcagaggggggtggaattccacgtgtagcagtgaaatgcgtagagatgtggaggaacaccgatggcgaaggcagccccctgggttaacactgacgctcaggcacgaaagcgtggggagcaaacaggattagataccctggtagtccacgccctaaacgatgtcaactagttgtcgggtcttaacggacttggtaacgcagctaacgcgtgaagttgaccgcctggggagtacggtcgcaagattaaaactcaaaggaattgacggggacccgcacaagcggtggattatgtggattaattcgatgcaacgcgaaaaaccttacctacccttgacatgtgccggagcccgccgagaggtgggtgtgcccgaaagggaacggcaacacaggtgctgcatggctgtcgtcagctcgtgtcgtgagatgttgggttaagtcccgcaacgagcgcaacccttgtcattaattgccatcattcagttgggcactttaatgaaactgccggtgacaaaccggaggaaggtggggatgacgtcaagtcctcatggcccttatgggtagggcttcacacgtaatacaatggcgcgtacagagggttgccaacccgcgagggggagctaatctcagaaagcgcgtcgtagtccggatcggagtctgcaactcgactccgtgaagtcggaatcgctagtaatcgcggatcagcatgtcgcggtgaatacgttcccgggtcttgtacacaccgcccgtcacaccatgggagtgggttccaccagaagcaggtagtctaaccgcaaggagggcgcctgccacggtgagattcatgactggggtg

SEQ ID NO: 2235 - DNA, 1437 bp, Nitrospina gracilis
  misc_feature (55)..(55): n is a, c, g, or t
cgctggcggcgtgcctaacacatgcaagtcgaacgagaaagttccttcgggaatngtgaaagtggcgcaagggtgagtaacacgtgaataatctgcctttgagtttgggataacctgacgaaagttaggctaataccgaataagaccacgtctcacaagagatgcggtaaaaggagtctcaaactccactcaaagatgagttcgcggaccattagctagttggtgagataaaagctcaccaaggctacgatggttagccggcctgagagggtgatcggccacactggaactgagacacggtccagactcctacgggaggcagcagtggggaattttgcgcaatgggcgaaagcctgacgcagcaacgccgcgtgagcgatgaaggccttcgggtcgtaaagctctgtcgggtgggaagaacaaaatgacggtaccaccaaaggaagccccggctaactccgtgccagcagccgcggtaacacggagggggcgagcgttgttcggaatcattgggcgtaaagcgtatgtaggtggccggataagtcagacgtgtaagcccacggctcaaccgtggaattgcgtttgaaactattcggcttgagtgcagaagaggaaagcggaatttccagtgtagcggtgaaatgcgttgatattgggaagaacaccagtggcgaaggcggctttctggtctgcaactgacactgagatacgaaagccaggggagcgaacgggattagataccctggtagtcctggctgtaaacgatgggcactaggtgtaggaggtgttgatcccttctgtgccgtagctaacgcattaagtgccccgcctggggagtacggtcgcaaggctgaaactcaaaggaattgacgggggcccgcacaagcggtggagcatgtggtttaattcgacgcaacgcgaagaaccttacctggatttgacttgcttgggaccgccttggaaacaaggtttccttcggggcccttgcacaggtgctgcatggctgtcgtcagctcgtgtcgtgagatgttgggttaagttccgcaacgagcgcaacccctacctttagttgccagcgggtaatgccgggaactctaaaggaactgtcggtgataaaccggaggaaggtggggatgacgtcaagtcctcatggcctttatgtccagggctacacacgtgctacaatggccggtacaaagagttgcaataccgcgaggtggagctaatctcaaaaagccggtctcagttcggattggagtctgcaactcgactccatgaagctggaatcgctagtaatcgcggatcagcatgccgcggtgaatacgttcccgggccttgtacacaccgcccgtcacaccatgaaagccgactgtaccagaagtcacgatgctaaccttcggggagctactgcctaaggtatggttggtgatcggggtg

SEQ ID NO: 2236 - DNA, 1461 bp, Nitrospira defluvii
aacgaacgctggcggcgcgcctaatacatgcaagtcgagcgagaaggtgtagcaatacacttgtaaagcggcgaacgggtgaggaatacatgggtaatctaccatcgagtggggaataaccagccgaaaggttggctaataccgcgtacgcctccgaatcttcgggttcggagggaaagccacactgtgagtgcggcgctctttgatgagctcatgtcctatcagcttgttggtagggtaacggcctaccaaggctttgacgggtagctggtctgagaggacgatcagccacactggcactgcgacacgggccagactcctacgggaggcagcagtaaggaatattgcgcaatgggcgaaagcctgacgcagcgacgccgcgtgggggatgaaggtcttcggattgtaaacccctttcgggagggaagatggagcgagcaatcgttcggacggtacctccagaagcagccacggccaacttcgtgccagcagccgcggtaatacgaaggtggcaagcgttgttcggattcactgggcgtacagggtgtgtaggcggtttggtaagccttctgttaaagcttcgggcccaacccggaaagcgcagagggtactgccaggctagagggtgggagaggagcgcggaattcccggtgtagcggtgaaatgcgtagagatcgggaggaaggccggtggcgaaggcggcgctctggaacatacctgacgctgagacacgaaagcgtggggagcaaacaggattagataccctggtagtccacgccctaaactatggatactaagtgtcggcgggttaccgccggtgccgcagctaacgcattaagtatcccgcctgggaagtacggccgcaaggttgaaactcaaaggaattgacgggggcccgcacaagcggtggagcatgtggtttaattcgacgcaacgcgaagaaccttacccaggttggacatgcacgtagtagaaaggtgaaagcctgacgaggtagcaataccagcgtgctcaggtgctgcatggctgtcgtcagctcgtgccgtgaggtgttgggttaagtcccgcaacgagcgcaacccctgctttcagttgctaccgggtcatgccgagcactctgaaaggactgcccaggataacggggaggaaggtggggatgacgtcaagtcagcatggcctttatgcctggggccacacacgtgctacaatggccggtacaaagcgctgcaaacctgcaaaggggagccaatcgcaaaaaaccggcctcagttcagattgaggtctgcaactcgacctcatgaaggcggaatcgctagtaatcgcggatcagcacgccgcggtgaatacgttcccgggccttgtacacaccgcccgtcacaccacgaaagcctgttgtacctgaagtcgcccaagccaaccgcaaggaggcaggcgcccacggtatggccggtgattggggtg

SEQ ID NO: 2237 - DNA, 1463 bp, Nitrospira japonica
aacgaacgctggcggcgcgcctaatacatgcaagtcgaacgagaatgtgtagcaatacacatgtacagtggcgaacgggtgaggactacatgggtaacctaccctcgagtggggaataactagccgaaaggttagctaataccgcgtacgcctcccggactgcggttcgggggggaaagcgataccgtgggtatcgcgctcttggatgggctcatgccctatcagcttgttggtgaggtaacggctcaccaaggcatcgacgggtagctgatctgagaggatgatcagccacactggcactgcgacacgggccagactcctacgggaggcagcagtaaggaatattgcgcaatgggcgaaagcctgacgcagcgacgccgcgtgggggatgaaggtcttcggattgtaaacccctttcgggagggaagatgggatagggtaacctatccggacggtacctccagaagcagccacggctaacttcgtgccagcagccgcggtaatacgaaggtggcaagcgttgttcggatttactgggcgtacagggagcgtaggcggttggataagccctccgtgaaatctccaggcttaacctggaaagtgcagaggggactgttcagctagaggatgggagaggagcgcggaattcccggtgtagcggtgaaatgcgtagagatcgggaggaaggccggtggcgaaggcggcgctctggaacatttctgacgctgaggctcgaaagcgtggggagcaaacaggattagataccctggtagtccacgccttaaacgatggatactaagtgtcggcgggttaccgccggtgccgcagctaacgcagtaagtatcccgcctgggaagtacggccgcaaggttgaaactcaaaggaattgacgggggcccgcacaagcggtggagcatgtggtttaattcgacgcaacgcgaagaaccttacccaggctggacatgcaggtagtagaagggtgaaagcctaacgaggtagcaataccatcctgctcaggtgctgcatggctgtcgtcagctcgtgccgtgaggtgttgggttaagtcccgcaacgagcgcaacccctgtcttcagttactaacgggtcaagccgagaactctggagagactgcccaggagaacggggaggaaggtggggatgacgtcaagtcagcatggcctttatgcctggggccacacacgtgctacaatggccggtacaaagggctgcaaacccgtgagggggagccaatcccaaaaaaccggcctcagttcagatcgaggtctgcaactcgacctcgtgaaggcggaatcgctagtaatcccggatcagcacgccggggtgaatacgttcccgggccttgtacacaccgcccgtcacaccacgaaagtttgttgtacctgaagtcgttggcgccaaccgcaaggaggcagacgcccacggtatgaccgatgattggggtg

SEQ ID NO: 2238 - DNA, 1499 bp, Nitrospira lenta
agagtttgatcctggctcagaacgaacgctggcggcgcgcctaatacatgcaagtcgagcgagaaggtgtagcaatacacttgtaaagcggcgaacgggtgaggaatgcatgggtaacctaccctcgagtggggaataactagccgaaaggttagctaataccgcatacgtttccggaacttcggtttcggaaagaaagcaataccgtgggtattgcgctcatggatgggctcatgtcctatcagcttgttggtgaggtaacggctcaccaaggcttcgacgggtagctggtctgagaggacgatcagccacactggcactgcgacacgggccagactcctacgggaggcagcagtaaggaatattgcgcaatggacgaaagtctgacgcagcgacgccgcgtgggggatgaaggtcttcggattgtaaacccctttcgggagggaagatggagtgggtaaccacttggacggtacctccagaagcagccacggctaacttcgtgccagcagccgcggtaatacgaaggtggcaagcgttgttcggattcactgggcgtacagggagcgtaggcggttgggtaagccctccgtgaaatctccgggcctaacccggaaagtgcagaggggactgctcagctagaggatgggagaggagcgcggaattcccggtgtagcggtgaaatgcgtagagatcgggaggaaggccggtggcgaaggcggcgctctggaacatttctgacgctgaggctcgaaagcgtggggagcaaacaggattagataccctggtagtccacgccttaaactatggatactaagtgtcggcggtttaccgccggtgccgcagctaacgcaataagtatcccgcctgggaagtacggccgcaaggttgaaactcaaaggaattgacgggggcccgcacaagcggtggagcatgtggtttaattcgacgcaacgcgaagaaccttacccaggctggacatgcaggtagtagaagggtgaaagcccaacgaggtagaaataccatcctgctcaggtgctgcatggctgtcgtcagctcgtgccgtgaggtgttgggttaagtcccgcaacgagcgcaacccctgtcttcagttactaacaggtcaagctgagaactctggagagactgcccaggagaacggggaggaaggtggggatgacgtcaagtcagcatggcctttatgcctggggctacacacgtgctacaatggccggtacaaagggctgcaaacccgcaagggggagccaatcccaaaaaaccggcctcagttcagattggggtctgcaactcgaccccatgaaggcggaatcgctagtaatcgcggatcagaacgccgcggtgaatacgttcccgggccttgtacacaccgcccgtcacaccacgaaagtttgttgtacctgaagtcgttgcgccaaccgcaaggaggcaggcgcccacggtatgaccgatgattggggtgaagtcgtaacaaggtaacc

SEQ ID NO: 2239 - DNA, 1461 bp, Nitrospira moscoviensis
aacgaacgctggcggcgcgcctaatacatgcaagtcgagcgagaaggcgtagcaatacgcttgtaaagcggcgaacgggtgaggaatacatgggtaacctaccctcgagtggggaataaccagccgaaaggttggctaataccgcatacgattcccggactgcggttcgggaaagaaagcgttaccgtgggtagcgcgctcttggatgggctcatgtcctatcagcttgttggtgaggtaacggctcaccaaggcttcgacgggtagctggtctgagaggacgatcagccacactggcactgcgacacgggccagactcctacgggaggcagcagtaaggaatattgcgcaatgggcgaaagcctgacgcagcgacgccgcgtgggggatgaaggtcttcggattgtaaacccctttcgggagggaagatggaacgggtaaccgttcggacggtacctccagaagcagccacggctaacttcgtgccagcagccgcggtaatacgaaggtggcaagcgttgttcggattcactgggcgtacagggagcgtaggcggttgggtaagccctccgtgaaatctccgggcctaacccggaaagtgcagaggggactgctcggcttgaggatgggagaggagcgcggaattcccggtgtagcggtgaaatgcgtagagatcgggaggaaggccggtggcgaaggcggcgctctggaacatttctgacgctgaggctcgaaagcgtggggagcaaacaggattagataccctggtagtccacgccttaaactatggatactaagtgtcggcgggttaccgccggtgccgcagctaacgcagtaagtatcccgcctgggaagtacggccgcaaggttgaaactcaaaggaattgacgggggcccgcacaagcggtggagcatgtggtttaattcgacgcaacgcgaagaaccttacccaggctggacatgcacgtagtaggaggatgaaagtccgacgaggtagcaataccagcgtgctcaggtgctgcatggctgtcgtcagctcgtgccgtgaggtgttgggttaagtcccgcaacgagcgcaacccctgtcttcagttaccaccgggtcatgccgggaactctggagagactgcccaggagaacggggaggaaggtggggatgacgtcaagtcagcatggcctttatgcctggggccacacacgtgctacaatggccggcacaaagagctgcaaacccgtgagggggagccaatctcaaaaaaccggcctcagttcagattgaggtctgcaactcgacctcatgaaggcggaatcgctagtaatcgcggatcagcacgccgcggtgaatacgttcccgggccttgtacacaccgcccgtcacaccacgaaagtttgttgtacctgaagtcgtcgacgccaaccgcaagggggcaggcgcccacggtatgaccgatgattggggtg

SEQ ID NO: 2240 - DNA, 1441 bp, Nocardia brasiliensis
gacgaacgctggcggcgtgcttaacacatgcaagtcgagcggtaaggcccttcggggtacacgagcggcgaacgggtgagtaacacgtgggtgatctgcctcgcacttcgggataagcctgggaaactgggtctaataccggatatgacctttcagtgcatgctgttgggtggaaagatttatcggtgcgagatgggcccgcggcctatcagcttgttggcggggtaacggcccaccaaggcgacgacgggtagccgacctgagagggtgaccggccacactgggactgagacacggcccagactcctacgggaggcagcagtggggaatattgcacaatgggcggaagcctgatgcagcgacgccgcgtgagggatgacggccttcgggttgtaaacctctttcgacagggacgaagcgcaagtgacggtacctgtagaagaagcaccggccaactacgtgccagcagccgcggtaatacgtagggtgcgagcgttgtccggaattactgggcgtaaagagcttgtaggcggtttgtcgcgtcgtccgtgaaaacttggggctcaaccccaagcttgcgggcgatacgggcagacttgagtacttcaggggagactggaattcctggtgtagcggtgaaatgcgcagatatcaggaggaacaccggtggcgaaggcgggtctctgggaagtaactgacgctgagaagcgaaagcgtgggtagcgaacaggattagataccctggtagtccacgccgtaaacggtgggtactaggtgtgggtttccttccacgggatccgtgccgtagctaacgcattaagtaccccgcctggggagtacggccgcaaggctaaaactcaaaggaattgacgggggcccgcacaagcggcggagcatgtggattaattcgatgcaacgcgaagaaccttacctgggtttgacatacaccggaaacctgcagagatgtaggcccccttgtggtcggtgtacaggtggtgcatggctgtcgtcagctcgtgtcgtgagatgttgggttaagtcccgcaacgagcgcaacccttgtcctgtgttgccagcggattatgccggggactcgcaggagactgccggggtcaactcggaggaaggtggggacgacgtcaagtcatcatgccccttatgtccagggcttcacacatgctacaatggccggtacagagggctgcgataccgtgaggtggagcgaatcccttaaagccggtctcagttcggatcggggtctgcaactcgaccccgtgaagttggagtcgctagtaatcgcagatcagcaacgctgcggtgaatacgttcccgggccttgtacacaccgcccgtcacgtcatgaaagtcggtaacacccgaagccggtggcctaaccccttgtgggagggagccgtcgaaggtgggattggcgattgggacg

SEQ ID NO: 2241 - DNA, 1412 bp, Nodularia spumigena
  misc_feature (89)..(89): n is a, c, g, or t
  misc_feature (112)..(112): n is a, c, g, or t
  misc_feature (119)..(119): n is a, c, g, or t
  misc_feature (531)..(531): n is a, c, g, or t
  misc_feature (538)..(538): n is a, c, g, or t
  misc_feature (545)..(545): n is a, c, g, or t
  misc_feature (756)..(756): n is a, c, g, or t
  misc_feature (767)..(767): n is a, c, g, or t
gatgaacgctggcggtatgcttaacacatgcaagtcgaacggtctcttcggagatagtggcggacgggtgagtaacgcgtgagaatctngcttcaggtcggggacaaccacnggaaacngtggctaataccggatatgccgagaggtgaaaggcttgctgcctgaagatgagctcgcgtctgattagctagtaggtgtggtaaaagcgcacctaggcgacgatcagtagctggtctgagaggatgatcagccacactgggactgagacacggcccagactcctacgggaggcagcagtggggaattttccgcaatgggcgaaagcctgacggagcaataccgcgtgagggaggaaggctcttgggttgtaaacctcttttctcagggaagaaaaaaatgacggtacttgaggaataagcatcggctaactccgtgccagcagccgcggtaatacggaggatgcaagcgttatccggaatgattgggcgtaaagggtccgcaggtggctatgtaagtctgctgttaaagaanctagctnaactagntaaaagcagtggaaactacaaggctagagtgcgttcggggtagagggaattcctggtgtagcggtgaaatgcgtagatatcaggaagaacaccagtggcgaaggcgctctactaggccgcaactgacactgagggacgaaagctaggggagcgaatgggattagataccccagtagtcctagccgtaaacgatggatactaggcgtggctngtatcgacccnagccgtgccggagctaacgcgttaagtatcccgcctggggagtacgcacgcaagtgtgaaactcaaaggaattgacgggcgcccgcacaagcggtggagtatgtggtttaattcgatgcaacgcgaagaaccttaccaagacttgacatgtcgcgaatctctctgaaaggagagagtgccttcgggagcgcgaacacaggtggtgcatggctgtcgtcagctcgtgtcgtgagatgttgggttaagtcccgcaacgagcgcaaccctcgtttttagttgccagcattaagttgggcactctagagagactgccggtgacaaaccggaggaaggtggggatgacgtcaagtcagcatgccccttacgtcttgggctacacacgtactacaatgctacggacaaagggcagctacacagcaatgtgatgcaaatctcacaaaaccgtagctcagttcagatcgcaggctgcaactcgcctgcgtgaagtcggaatcgctagtaattgcaggtcagcatactgcagtgaattcgttcccgggccttgtacacaccgcccgtcacaccatggaagctggtcacgcccgaagtcgttaccccaactgttcgcagagggggatgccgaaggcaggactggtgactggggtg

SEQ ID NO: 2242 - DNA, 1412 bp, Nostoc azollae
gatgaacgctggcggtatgcttaacacatgcaagtcgaacgaagttcttaggaacttagtggcggacgggtgagtaacgcgtgagaatttggctttaggtcggggacaaccactggaaacggtggctaataccggatatgccgagaggtgaaagatttattgcctgaagataagctcgcgtctgattagctagttggtggggtaagagcctaccaaggcgacgatcagtagctggtctgagaggatgatcagccacactgggactgagacacggcccagactcctacgggaggcagcagtggggaattttccgcaatgggcgaaagcctgacggagcaataccgcgtgagggaggaaggctcttgggtcgtaaacctcttttctcagggaagaaaaaaatgacggtacctgaggaataagcatcggctaactccgtgccagcagccgcggtaatacggaggatgcaagcgttatccggaatgattgggcgtaaagggtccgtaggtggtactgtaagtctgctgttaaagagcaaggctcaaccttgtaaaagcagtggaaactacagaactagagtgcgttcggggcagaagggaattcctggtgtagcggtgaaatgcgtagatatcaggaagaacaccggtggcgaaagcgttctgctaggccgcaactgacactgagggacgaaagctaggggagcgaatgggattagataccccagtagtcctagccgtaaacgatggatactaggcgtggcttgtatcgacccgagccgtgccggagctaacgcgttaagtatcccgcctggggagtacgcacgcaagtgtgaaactcaaaggaattgacgggggcccgcacaagcggtggagtatgtggtttaattcgatgcaacgcgaagaaccttaccaagacttgacatgtcgcgaatttcggtgaaagctgagagtgccttcgggagcgcgaacacaggtggtgcatggctgtcgtcagctcgtgtcgtgagatgttgggttaagtcccgcaacgagcgcaaccctcgtttttagttgccagcattaagttgggcactctaaagagactgccggtgacaaaccggaggaaggtgaggatgacgtcaagtcagcatgccccttacgttttgggctacacacgtactacaatgctacggacaaagggcagcaagctagcaatagcaagcaaatctcataaaccgtagctcagttcagatcgaaggctgcaactcgccttcgtgaaggaggaatcgctagtaattgcaggtcagcatactgcagtgaattcgttcccgggccttgtacacaccgcccgtcacaccatggaagttggtcacgcccgaagtcattaccccaaccttttggagggggatgcctaaggtaggactggtgactggggtg

SEQ ID NO: 2243 - DNA, 1411 bp, Nostoc calcicola
  misc_feature (1364)..(1364): n is a, c, g, or t
gatgaacgctggcggtatgcttaacacatgcaagtcgaacggtgtcttcggacacagtggcggacgggtgagtaacgcgtgagaatctggctttaggtctgggacaaccactggaaacggtggctaataccggatgtgccgagaggtgaaaggttaactgcctgaagatgagctcgcgtctgattagctagtaggtagtgtaatggactacctaggcgacgatcagtagctggtctgagaggacgatcagccacactgggactgagacacggcccagactcctacgggaggcagcagtggggaattttccgcaatgggcgaaagcctgacggagcaataccgcgtgagggaggaaggctcttgggtcgtaaacctcttttctcagggaagaacacaatgacggtacctgaggaataagcatcggctaactccgtgccagcagccgcggtaatacggaggatgcaagcgttatccggaatgattgggcgtaaagcgtccgcaggtggctatgtaagtctgctgttaaagagtctagctcaactagataagagcagtggaaactacatggctagagtgcgttcggggcagagggaattcctggtgtagcggtgaaatgcgtagagatcaggaagaacaccggtggcgaaggcgctctgctaggccgcaactgacactgagggacgaaagctaggggagcgaatgggattagataccccagtagtcctagccgtaaacgatggatactaggcgtggcttgtatcgacccgagccgtgccgtagctaacgcgttaagtatcccgcctggggagtacgccggcaacggtgaaactcaaaggaattgacgggggcccgcacaagcggtggagtatgtggtttaattcgatgcaacgcgaagaaccttaccaaggcttgacatgtcgcgaatcttcttgaaagggaagagtgccttcgggagcgcgaacacaggtggtgcatggctgtcgtcagctcgtgtcgtgagatgttgggttaagtcccgcaacgagcgcaaccctcgtttttagttgccagcattaagttgggcactctagagagactgccggtgacaaaccggaggaaggtggggatgacgtcaagtcagcatgccccttacgccttgggctacacacgtactacaatgctccggacagagggcagcaagcatgcgaatgcaagcaaatcccgtaaaccggagctcagttcagatcgcaggctgcaactcgcctgcgtgaaggaggaatcgctagtaattgcaggtcagcatactgcagtgaattcgttcccgggccttgtacacaccgcccgtcacaccatggaagctggtagtgcccgaagtcattactccnacctttcgggggggaggatgcctaaggcaggactggtgactggggtg

SEQ ID NO: 2244 - DNA, 1411 bp, Nostoc carneum
  misc_feature (153)..(153): n is a, c, g, or t
gatgaacgctggcggtatgcttaacacatgcaagtcgaacggtctcttcggagatagtggcggacgggtgagtaacgcgtgagaatctagcttcaggtcggggacaaccactggaaacggtggctaataccggatgtgccgaaaggtgaaagncttgctgcctgaagatgagctcgcgtctgattagctagtaggtgtggtaagagcgcacctaggcgacgatcagtagctggtctgagaggatgatcagccacactgggactgagacacggcccagactcctacgggaggcagcagtggggaattttccgcaatgggcgaaagcctgacggagcaataccgcgtgagggaggaaggctcttgggttgtaaacctcttttctcagggaagaaaaaaatgacggtacctgaggaataagcatcggctaactccgtgccagcagccgcggtaatacggaggatgcaagcgttatccggaatgattgggcgtaaagcgtccgcaggtggcaatgtaagtctgctgttaaagagtgaggctcaacctcataagagcagtggaaactacatagctagagtgcgttcggggcagagggaattcctggtgtagcggtgaaatgcgtagagatcaggaagaacaccggtggcgaaagcgctctgctaggccgcaactgacactgagggacgaaagctaggggagcgaatgggattagataccccagtagtcctagccgtaaacgatggatactaggcgtggcttgtatcgacccgagccgtgccggagctaacgcgttaagtatcccgcctggggagtacgcacgcaagtgtgaaactcaaaggaattgacgggggcccgcacaagcggtggagtatgtggtttaattcgatgcaacgcgaagaaccttaccaagacttgacatgtcgcgaacttttctgaaaggaagaggtgccttcgggagcgcgaacacaggtggtgcatggctgtcgtcagctcgtgtcgtgagatgttgggttaagtcccgcaacgagcgcaaccctcgtttttagttgccagcattaagttgggcactctagagagactgccggtgacaaaccggaggaaggtggggatgacgtcaagtcagcatgccccttacgtcttgggctacacacgtactacaatgctacggacaaagggcagcgagctagtgatagcaagcaaatctcataaaccgtggctcagttcagatcgcaggctgcaactcgcctgcgtgaaggaggaatcgctagtaattgcaggtcagcatactgcagtgaattcgttcccgggccttgtacacaccgcccgtcacaccatggaagctggcaacgcccgaagtcattactccaaccattcgtgggggaggatgccgaaggcagtgctggtgactggggtg

SEQ ID NO: 2245 - DNA, 1415 bp, Nostoc commune
gatgaacgctggcggtatgcttaacacatgcaagtcgaacggtgtcttcggacacagtggcggacgggtgagtaacgcgtgagaatctggctttaggtctgggacaaccactggaaacggtggctaataccggatgtgcccgtaattgggtgaaaggttaactgcctgaagatgagctcgcgtctgattagctagtaggtagtgtaatggactacctaggcgacgatcagtagctggtctgagaggacgatcagccacactgggactgagacacggcccagactcctacgggaggcagcagtggggaattttccgcaatgggcgaaagcctgacggagcaataccgcgtgagggaggaaggctcttgggtcgtaaacctcttttctcagggaagaacacaatgacggtacctgaggaataagcatcggctaactccgtgccagcagccgcggtaatacggaggatgcaagcgttatccggaatgattgggcgtaaagcgtccgcaggtggcgatgtaagtctgctgttaaagagtctagctcaactagataagagcagtggaaactacatagctagagtacgttcggggcagagggaattcctggtgtagcggtgaaatgcgtagagatcaggaagaacaccagtggcgaaggcgctctgctaggccgtaactgacactgagggacgaaagctaggggagcgaatgggattagataccccagtagtcctagccgtaaacgatggatactaggcgtggcttgtatcgacccgagccgtgccgtagctaacgcgttaagtatcccgcctggggagtacgccggcaacggtgaaactcaaaggaattgacgggggcccgcacaagcggtggagtatgtggtttaattcgatgcaacgcgaagaaccttaccaaggcttgacatgtcgcgaatcctggtgaaagccgggagtgccttcgggagcgcgaacacaggtggtgcatggctgtcgtcagctcgtgtcgtgagatgttgggttaagtcccgcaacgagcgcaaccctcgtttttagttgccagcattaagttgggcactctagagagactgccggtgacaaaccggaggaaggtggggatgacgtcaagtcagcatgccccttacgccttgggctacacacgtactacaatgctccggacagagggcagcaagcgggcgaccgcaagcaaatcccggaaaccggagctcagttcagatcgcaggctgcaactcgcctgcgtgaaggaggaatcgctagtaattgcaggtcagcatactgcagtgaattcgttcccgggccttgtacacaccgcccgtcacaccatggaagctggtagtgcccgaagtcattactccaaccattcgtggaggaggatgcctaaggcaggactggtgactggggtg

SEQ ID NO: 2246 - DNA, 1411 bp, Nostoc flagelliforme
gatgaacgctggcggtatgcttaacacatgcaagtcgaacggtgtcttcggacacagtggcggacgggtgagtaacgcgtgagaatctggctttaggtctgggacaaccactggaaacggtggctaataccggatgtgccgaaaggtgaaaggttaactgcctgaagatgagctcgcgtctgattagctagtaggtgtggtaaaggcgcacctaggcgacgatcagtagctggtctgagaggacgatcagccacactgggactgagacacggcccagactcctacgggaggcagcagtggggaattttccgcaatgggcgaaagcctgacggagcaataccgcgtgagggaggaaggctcttgggtcgtaaacctcttttctcagggaagaacacaatgacggtacctgaggaataagcatcggctaactccgtgccagcagccgcggtaatacggaggatgcaagcgttatccggaatgattgggcgtaaagcgtccgcaggtggcgatgtaagtctgctgttaaagagtctagctcaactagataagagcagtggaaactacatagctagagtacgttcggggcagagggaattcctggtgtagcggtgaaatgcgtagagatcaggaagaacaccagtggcgaaggcgctctgctaggccgtaactgacactgagggacgaaagctaggggagcgaatgggattagataccccagtagtcctagccgtaaacgatggatactaggcgtggcttgtatcgacccgagccgtgccgtagctaacgcgttaagtatcccgcctggggagtacgccggcaacggtgaaactcaaaggaattgacgggggcccgcacaagcggtggagtatgtggtttaattcgatgcaacgcgaagaaccttaccaaggcttgacatgtcgcgaatcctggtgaaagctgggagtgccttcgggagcgcgaacacaggtggtgcatggctgtcgtcagctcgtgtcgtgagatgttgggttaagtcccgcaacgagcgcaaccctcgtttttagttgccagcattaagttgggcactctagagagactgccggtgacaaaccggaggaaggtggggatgacgtcaagtcagcatgccccttacgccttgggctacacacgtactacaatgctccggacagagggcagcaagcatgcgaatgcaagcaaatcccgtaaaccggagctcagttcagatcgcaggctgcaactcgcctgcgtgaaggaggaatcgctagtaattgcaggtcagcatactgcagtgaattcgttcccgggccttgtacacaccgcccgtcacaccatggaagctggtagtgcccgaagtcattactccaacctttcgggggggaggatgcctaaggcaggactggtgactggggtg

SEQ ID NO: 2247 - DNA, 1411 bp, Nostoc linckia
gatgaacgctggcggtatgcttaacacatgcaagtcgaacgaactcttcggagttagtggcggacgggtgagtaacgcgtgagaatctagcttcaggtctgggacaaccactggaaacggtggctaataccggatgtgccgaaaggtgaaaggcttgctgcctgaagatgagctcgcgtctgattagctagtaggtggggtaagagcctacctaggcgacgatcagtagctggtctgagaggacgatcagccacactgggactgagacacggcccagactcctacgggaggcagcagtggggaattttccgcaatgggcgaaagcctgacggagcaataccgcgtgagggaggaaggctcttgggttgtaaacctcttttctcagggaagaacacaatgacggtacctgaggaatcagcatcggctaactccgtgccagcagccgcggtaatacggaggatgcaagcgttatccggaatgattgggcgtaaagcgtccgcaggtggctgtgtaagtctgctgtcaaagagcgaagctcaacttcgtaaaggcagtggaaactacacggctagagtgcgttcggggcagagggaattcctggtgtagcggtgaaatgcgtagagatcaggaagaacaccggtggcgaaggcgctctgctaggccgcaactgacactgagggacgaaagctaggggagcgaatgggattagataccccagtagtcctagctgtaaacgatggatactaggcgtggcttgtatcgacccgagccgtgccgtagctaacgcgttaagtatcccgcctggggagtacgcacgcaagtgtgaaactcaaaggaattgacgggggcccgcacaagcggtggagtatgtggtttaattcgatgcaacgcgaagaaccttaccaaggcttgacatgtcgcgaaccttcttgaaagagaagggtgccttcgggagcgcgaacacaggtggtgcatggctgtcgtcagctcgtgtcgtgagatgttgggttaagtcccgcaacgagcgcaaccctcgtttttagttgccagcattaagttgggcactctagagagactgccggtgacaaaccggaggaaggtggggatgacgtcaagtcagcatgccccttacgccttgggctacacacgtactacaatgctacggacagagggcagcaagctagcgatagcaagctaatcccataaaccgtggctcagttcagatcgaaggctgcaactcgccttcgtgaaggaggaatcgctagtaattgcaggtcagcatactgcagtgaattcgttcccgggccttgtacacaccgcccgtcacaccatggaagctggcaacgcccgaagtcattactccaaccattcgtgggggaggatgcctaaggcagtgctggtgactggggtg

SEQ ID NO: 2248 - DNA, 1387 bp, Nostoc piscinale
atgaacgctggcggtatgcttaacacatgcaagtcgaacggaatcttaggattcagtggcggacgggtgagtaacgcgtgagaatctagcttcaggtcggggataactactggaaacggtggctaataccggatgtgccgagaggtgaaaggctagctgcctgaagatgagctcgcgtctgattagctagttggtgtggtaagagcgcaccaaggcgacgatcagtagctggtctgagaggatgatcagccacactgggactgagacacggcccagactcctacgggaggcagcagtggggaattttccgcaatgggcgaaagcctgacggagcaataccgggtgagggaggaaggctcttgggttgtaaacctcttttctcaaggaagaaaaaatgacggtacttgaggaataagcatcggctaactccgtgccagcagccgcggtaatacggaggatgcaagcgttatccggaatgattgggcgtaaagcgtccgcaggtggcgatgtaagtctgctgttaaagagtctagcttaactagataaaagcagtggaaactacatagctagagtgcgttcggggtagagggaattcctggtgtagcggtgaaatgcgtagagatcaggaagaacgccggtggcgaaggcgctctactaggccgcaactaacactgagggacgaaagctaggggagcgaatgggattagatgccccagtagtcctagccgtaaacgatggatactagcgttgctgatcgtcacacgcagtgccggagccaacgcgttaagtatcccgcctggggagtacgcacgcaagtgtgaaactcaaaggaattgacgggggcccgcacaagcggtggagtatgtggtttaattcgatgcaacgcgaagaaccttaccaagacttgacatgtcgcgaatccttgtgaaagcagggagtgccttcgggagcgcgaacacaggtggtgcatggctgtcgtcagctcgtgtcgtgagatgttgggttaagtcccgcaacgagcgcaaccctcgtttttagttgccagcattaagttgggcactctagagagactgccggtgacaaaccggaggaaggtggggatgacgtcaagtcagcatgccccttacgtcttgggctacacacgtactacaatgctccgaacagagggcagcgagctagcgatagcaagcaaatcccggaaatcggagctcagttcagatcgaaggctgcaactcgccttcgtgaaggaggaatcgctagtaattgcaggtcagcatactgcagtgaattcgttcccgggccttgtacacaccgcccgtcacaccatggaagctggcaacgcccgaagtcattaccccaaccgtgaggagggggatgcctaaggcag

SEQ ID NO: 2249 - DNA, 1411 bp, Nostoc punctiforme
gatgaacgctggcggtatgcttaacacatgcaagtcgaacggtgtcttcggacacagtggcggacgggtgagtaacgcgtgagaatctggctctaggtctgggacaaccactggaaacggtggctaataccggatgtgccgagaggtgaaaggttaactgcctagagatgagctcgcgtctgattagctagtaggtagtgtaatggactacctaggcgacgatcagtagctggtttgagaagacgatcagccacactgggactgagacacggcccagactcctacgggaggcagcagtggggaattttccgcaatgggcgaaagcctgacggagcaataccgcgtgagggaggaaggctcttgggtcgtaaacctcttttctcagggaagaacacaatgacggtacctgaggaataagcatcggctaactccgtgccagcagccgcggtaatacggaggatgcaagcgttatccggaatgattgggcgtaaagcgtccgcaggtggcaatgtaagtctgctgttaaagagtctagctcaactagatacaagcagtggaaactacatagctagagtacgttcggggcagagggaattcctggtgtagcggtgaaatgcgtagagatcaggaagaacaccggtggcgaaggcgctctgctaggccgtaactgacactgagggacgaaagctaggggagcgaatgggattagataccccagtagtcctagccgtaaacgatggatactaggcgtggcttgtatcgacccgagccgtgccgtagctaacgcgttaagtatcccgcctggggagtacgccggcaacggtgaaactcaaaggaattgacgggggcccgcacaagcggtggagtatgtggtttaattcgatgcaacgcgaagaaccttaccaaggcttgacatgtcgcgaatcctggtgaaagccgggagtgccttcgggagcgcgaacacaggtggtgcatggctgtcgtcagctcgtgtcgtgagatgttgggttaagtcccgcaacgagcgcaaccctcgtttttagttgccagcattaagttgggcactctagagagactgccggtgacaaaccggaggaaggtggggatgacgtcaagtcagcatgccccttacgccttgggctacacacgtactacaatgctccggacagagggcagcaagcatgcgaatgcaagcaaatcccgtaaaccggagctcagttcagatcgcaggctgcaactcgcctgcgtgaaggaggaatcgctagtaattgcaggtcagcatactgcagtgaattcgttcccgggccttgtacacaccgcccgtcacaccatggaagctggtagtgcccgaagtcattactccaacctttcggggaggaggatgcctaaggcaggactggtgactggggtg

SEQ ID NO: 2250 - DNA, 1413 bp, Notoacmeibacter marinus
aacgaacgctggcggcaggcttaacacatgcaagtcgaacgatcccttcggggatagtggcagacgggtgagtaacgcgtgggaatctaccccaaggtacgggataacagttggaaacgactgctaataccgtatgtgtcctccgggacaaagatttatcgccttgggacgagcccgcgttggattagctagttggtggggtaatggcccaccaaggcgacgatccatagctggtctgagaggatgatcagccacattgggactgagacacggcccaaactcctacgggaggcagcagtggggaatattggacaatgggggaaaccctgatccagccatgccgcgtgagtgatgaaggccctagggttgtaaagctctttcgccggagaagataatgacggtatccggtaaagaagccccggctaacttcgtgccagcagccgcggtaatacgaagggggctagcgttgttcggaattactgggcgtaaagcgcacgtaggcggaccatttagtcaggggtgaaatcccggggctcaaccccggaactgcctttgatactgatggtcttgaggtcgagagaggtgagtggaattgcgagtgtagaggtgaaattcgtagatattcgcaggaacaccagtggcgaaggcggctcactggctcgatactgacgctgaggtgcgaaagcgtggggagcaaacaggattagataccctggtagtccacgccgtaaacgatgaatgccagccgtcggagggtttacccttcggtggcgcagttaacgctttgagcattccgcctggggagtacggtcgcaagattaaaactcaaaggaattgacgggggcccgcacaagcggtggagcatgtggtttaattcgaagcaacgcgcagaaccttaccagctcttgacataccgatcgcggattggggagaccctttccttcagttaggctggatcggatacaggtgctgcatggctgtcgtcagctcgtgtcgtgagatgttgggttaagtcccgcaacgagcgcaaccctcgcccttagttgccatcattcagttgggcactctaaggggactgccggtgataagccgagaggaaggtggggatgacgtcaagtcctcatggcccttacgggctgggctacacacgtgctacaatggtggtgacagtgggcagcgagaccgcgaggtcgagctaatctccaaaagccatctcagttcggattgcactctgcaactcgagtgcatgaagttggaatcgctagtaatcgcggatcagcatgccgcggtgaatacgttcccgggccttgtacacaccgcccgtcacaccatgggagttgggtctgcccgaaggcggtgcgccaacctcgcaagaggaggcagccgaccacggtaggctcagcgactggggtg

SEQ ID NO: 2251 - DNA, 1453 bp, Noviherbaspirillum autotrophicum
attgaacgctggcggcatgccttacacatgcaagtcgaacggcagcgcgggagcaatcctggcggcgagtggcgaacgggtgagtaatatatcggaacgtgccttagagtgggggataactagtcgaaagactagctaataccgcatacgacctacgggtgaaagtgggggatcgcaagacctcatgctcttagagcggccgatatctgattagctagttggtggggtaaaagcctaccaaggcgacgatcagtagctggtctgagaggacgaccagccacactgggactgagacacggcccagactcctacgggaggcagcagtggggaattttggacaatgggggcaaccctgatccagcaatgccgcgtgtgtgaagaaggccttcgggttgtaaagcacttttgttcgggaagaaatcccttgggctaataccccggggggatgacggtaccggaagaataagcaccggctaactacgtgccagcagccgcggtaatacgtagggtgcaagcgttaatcggaattactgggcgtaaagcgtgcgcaggcggttgtgcaagacagatgtgaaatccccgggcttaacctgggaactgcatttgtgactgcacggctagagtgtgtcagaggggggtagaattccacgtgtagcagtgaaatgcgtagatatgtggaggaataccgatggcgaaggcagccccctgggataacactgacgctcatgcacgaaagcgtggggagcaaacaggattagataccctggtagtccacgccctaaacgatgtcaactagttgtcgggtcttaattgacttggtaacgcagctaacgcgtgaagttgaccgcctggggagtacggtcgcaagattaaaactcaaaggaattgacggggacccgcacaagcggtggatgatgtggattaattcgatgcaacgcgaaaaaccttacctacccttgacatggaaggaatcctcgagagatcggggagtgcccgaaagggagccttcacacaggtgctgcatggctgtcgtcagctcgtgtcgtgagatgttgggttaagtcccgcaacgagcgcaacccttgtcattagttgctacgaaagggcactctaatgagactgccggtgacaaaccggaggaaggtggggatgacgtcaagtcctcatggcccttatgggtagggcttcacacgtcatacaatggtacatacagagggctgccaacccgcgagggggagctaatcccagaaagtgtatcgtagtccggattgtagtctgcaactcgactacatgaagttggaatcgctagtaatcgcggatcagcatgtcgcggtgaatacgttcccgggtcttgtacacaccgcccgtcacaccatgggagcgggttttaccagaagtaggtagcctaaccgcaaggagggcgcttaccacggtaggattcgtgactggggtg

SEQ ID NO: 2252 - DNA, 1453 bp, Noviherbaspirillum humi
attgaacgctggcggcatgccttacacatgcaagtcgaacggcagcacgggggcaaccctggtggcgagtggcgaacgggtgagtaacatatcggaacgtgccctggagtgggggataactagtcgaaagactagctaataccgcatacgacccaagggtgaaagtgggggaccgcaaggcctcatgctcgtggagcggccgatatctgattagctagttggcggggtaagagcccaccaaggcgacgatcagtagctggtctgagaggacgaccagccacactgggactgagacacggcccagactcctacgggaggcagcagtggggaattttggacaatgggggcaaccctgatccagcaatgccgcgtgagtgaagaaggccttcgggttgtaaagctcttttgtccgggaagaaatcccatttcctaataggggatggggatgacggtactggaagaataagcaccggctaactacgtgccagcagccgcggtaatacgtagggtgcaagcgttaatcggaattactgggcgtaaagcgtgcgcaggcggttgtgcaagacagatgtgaaagccccgggctcaacctgggaatggcatttgtgactgcacggctagagtgtgtcagaggggggtagaattccacgtgtagcagtgaaatgcgtagagatgtggaggaataccgatggcgaaggcagccccctgggataacactgacgctcatgcacgaaagcgtggggagcaaacaggattagataccctggtagtccacgccctaaacgatgtcaactagttgtcggggattcatttccttggtaacgcagctaacgcgtgaagttgaccgcctggggagtacggtcgcaagattaaaactcaaaggaattgacggggacccgcacaagcggtggatgatgtggattaattcgatgcaacgcgaaaaaccttacctacccttgacatggcaggaacccttcagagatggaggggtgctcgaaagagaacctgcacacaggtgctgcatggctgtcgtcagctcgtgtcgtgagatgttgggttaagtcccgcaacgagcgcaacccttgtcattagttgctacgaaagggcactctaatgagactgccggtgacaaaccggaggaaggtggggatgacgtcaagtcctcatggcccttatgggtagggcttcacacgtcatacaatggtacatacagagggccgccaacccgcgagggggagccaatcccagaaagtgtatcgtagtccggattgcagtctgcaactcgactgcatgaagttggaatcgctagtaatcgcggatcagcatgtcgcggtgaatacgttcccgggtcttgtacacaccgcccgtcacaccatgggagcgggttttaccagaagtgggtagcctaaccgcaaggagggcgcttaccacggtaggattcgtgactggggtg

SEQ ID NO: 2253 - DNA, 1431 bp, Novimethylophilus kurashikiensis
attgaacgctggcggcatgctttacacatgcaagtcgaacggcagcatgacctagcttgctaggttgatggcgagtggcgaacgggtgagtaatgcatcggaacgtaccgtgtaatgggggataacgcagcgaaagttgtgctaataccgcatacgtcctacgggagaaagcaggggatcttcggaccttgcgttatacgagcggccgatgtcagattagctagttggtagggtaaaggcctaccaaggcgacgatctgtagctggtctgagaggatgatcagccacactgggactgagacacggcccagactcctacgggaggcagcagtggggaattttggacaatgggggcaaccctgatccagccatgccgcgtgagtgaagaaggccttcgggttgtaaagctctttcgtgagggaagaaacggcggactctaacatagttcgctaatgacggtacctcaagaagaagcaccggctaactacgtgccagcagccgcggtaatacgtagggtgcgagcgttaatcggaattactgggcgtaaagcgtgcgcaggcggtttgacaagtctgatgtgaaagccccgggctcaacctgggaactgcgttggaaactgtcaggctagagtgtgtcagagggaggtagaattccacgtgtagcagtgaaatgcgtagagatgtggaggaataccgatggcgaaggcagcctcctgggataacactgacgctcatgcacgaaagcgtggggagcaaacaggattagataccctggtagtccacgccctaaacgatgtctactagttgttggaggagtgaaatccttcagtaacgcagctaacgcgtgaagtagaccgcctggggagtacggtcgcaagattaaaactcaaaggaattgacgggggcccgcacaagcggtggattatgtggattaattcgatgcaacgcgaaaaaccttacctggccttgacatgccactaacgaagcagagatgcattaggtgcccgaaagggaaagtggacacaggtgctgcatggctgtcgtcagctcgtgtcgtgagatgttgggttaagtcccgcaacgagcgcaacccttgccaataattgccatcatttagttgggcactttattgggactgccggtgacaaaccggaggaaggtggggatgacgtcaagtcctcatggcccttatggccagggcttcacacgtaatacaatggtcggtacagagggttgccaacccgcgagggggagccaatcccagaaagccgatcgtagtccggattgttctctgcaactcgagagcatgaagtcggaatcgctagtaatcgcggatcagcatgtcgcggtgaatacgttcccgggccttgtacacaccgcccgtcacaccatgggagtgggttccaccagaagtagttagcctaaccgcaagg

SEQ ID NO: 2254 - DNA, 1409 bp, Novispirillum itersonii
  misc_feature (169)..(169): n is a, c, g, or t
aacgaacgctggcggcaggcctaacacatgcaagtcgagcgctcaccttcgggtgggagcggcgcacgggtgagtaacacgtgggaacctaccttgaagtacggaataactgagggaaacttcagctaataccgtatacgccctacgggggaaagatttatcgcttcangacgggcccgcgttggattagctagttggtgaggtaatggctcaccaaggcaacgatccatagctgatttgagagaatgatcagccacactgggactgagacacggcccagactcctacgggaggcagcagtggggaatattggacaatgggcggaagcctgatccagccatgccgcgtgagtgatgaaggccttcgggttgtaaagctctttcagatgggacgatgatgacggtaccatcagaagaagccccggctaacttcgtgccagcagccgcggtaatacgaagggggctagcgttgttcggaattactgggcgtaaagcgcgcgtaggcggctttgtcagtcaggggtgaaatcccggggcttaacctcggaactgcccttgatactgcaaggcttgagtctgtgagaggatggtggaatacccagtgtagaggtgaaattcgtagatattgggtggaacaccagtggcgaaggcggccatctggcacagtactgacgctgaggtgcgaaagcgtggggagcaaacaggattagataccctggtagtccacgccgtaaacgatgagtgctagctgtcgggttgcatgcaactcggtggcgcagctaacgcattaagcactccgcctggggagtacggtcgcaagattaaaactcaaaggaattgacgggggcccgcacaagcggtggagcatgtggtttaattcgaagcaacgcgcagaaccttaccagcccttgacatggggatcaccgctgccagagatggcggcttcagttcggctggatcccacacaggtgctgcatggctgtcgtcagctcgtgtcgtgagatgttgggttaagtcccgcaacgagcgcaaccctcgtccttagttgccatcattcagttgggcactctagggaaactgccggtgacaagccggaggaaggtggggatgacgtcaagtcctcatggcccttacgggctgggctacacacgtgctacaatggcgactacagtgggcagcgacctcgcgagaggaagcaaatctccaaaagtcgtctcagttcggattgcactctgcaactcgagtgcatgaagtcggaatcgctagtaatcgtggatcagcacgccacggtgaatacgttcccgggccttgtacacaccgcccgtcacaccatgggagttggttctacccgaagatggttcgctaaccgcaaggaggcagccagccacggtagggtcagcgactggggtg

SEQ ID NO: 2255 - DNA, 1407 bp, Novosphingobium aromaticivorans
aacgaacgctggcggcatgcctaacacatgcaagtcgaacgaacccttcggggttagtggcgcacgggtgcgtaacgcgtgggaatctgccctttgcttcggaataacagttagaaatgactgctaataccggatgatgtcttcggaccaaagatttatcggcaagggatgagcccgcgtaggattaggtagttggtggggtaaaggcctaccaagccgacgatccttagctggtctgagaggatgatcagccacactgggactgagacacggcccagactcctacgggaggcagcagtggggaatattggacaatgggcgcaagcctgatccagcaatgccgcgtgagtgatgaaggccttcgggtcgtaaagctcttttaccagggatgataatgacagtacctggagaataagctccggctaactccgtgccagcagccgcggtaatacggagggagctagcgttgttcggaattactgggcgtaaagcgcacgtaggcggctactcaagtcagaggtgaaagcccggggctcaaccccggaactgcctttgaaactaggtagctggaatcttggagaggtcagtggaattccgagtgtagaggtgaaattcgtagatattcggaagaacaccagtggcgaaggcgactgactggacaagtattgacgctgaggtgcgaaagcgtggggagcaaacaggattagataccctggtagtccacgccgtaaacgatgataactagctgtccggtcacttggtgattgggtggcgcagctaacgcattaagttatccgcctggggagtacggtcgcaagattaaaactcaaaggaattgacgggggcctgcacaagcggtggagcatgtggtttaattcgaagcaacgcgcagaaccttaccagcgtttgacatcccgcgctacttccagagatggaaggttcccttcggggacgcggtgacaggtgctgcatggctgtcgtcagctcgtgtcgtgagatgttgggttaagtcccgcaacgagcgcaaccctcgtccttagttgccatcatttagttgggcactctaaggaaaccgccggtgataagccggaggaaggtggggatgacgtcaagtcctcatggcccttacacgctgggctacacacgtgctacaatggcggtgacagtgggcagcaagcacgcgagtgtgagctaatctccaaaagccgtctcagttcggattgttctctgcaactcgagagcatgaaggcggaatcgctagtaatcgcggatcagcatgccgcggtgaatacgttcccaggccttgtacacaccgcccgtcacaccatgggagttgggttcacccgaaggcgttgcgctaactcgcaagagaggcaggcgaccacggtgggcttagcgactggggtg

SEQ ID NO: 2256 - DNA, 1411 bp, Novosphingobium barchaimii
aacgaacgctggcggcatgcctaacacatgcaagtcgaacgagaccttcgggtctagtggcgcacgggtgcgtaacgcgtgggaatctgcccttgggttcggaataacagtgagaaattactgctaataccggatgatgtcttcggaccaaagatttatcgcccagggatgagcccgcgtaggattaggtagttggtggggtaatggcctaccaagccgacgatccttagctggtctgagaggatgatcagccacactgggactgagacacggcccagactcctacgggaggcagcagtggggaatattggacaatgggcgaaagcctgatccagcaatgccgcgtgagtgatgaaggccttagggttgtaaagctcttttaccagggatgataatgacagtacctggagaataagctccggctaactccgtgccagcagccgcggtaatacggagggagctagcgttgttcggaattactgggcgtaaagcgcgcgtaggcggttactcaagtcagaggtgaaagcccggggctcaaccccggaactgcctttgaaactaggtaactagaatcttggagaggtcagtggaattccgagtgtagaggtgaaattcgtagatattcggaagaacaccagtggcgaaggcgactgactggacaagtattgacgctgaggtgcgaaagcgtggggagcaaacaggattagataccctggtagtccacgccgtaaacgatgataactagctgtccgggtacttggtacttgggtggcgcagctaacgcattaagttatccgcctggggagtacggtcgcaagattaaaactcaaaggaattgacgggggcctgcacaagcggtggagcatgtggtttaattcgaagcaacgcgcagaaccttaccagcgtttgacatcctcatcgcggattagagagatcttttccttcagttcggctggatgagtgacaggtgctgcatggctgtcgtcagctcgtgtcgtgagatgttgggttaagtcccgcaacgagcgcaaccctcgtccttagttgccatcatttagttgggcactctaaggaaactgccggtgataagccggaggaaggtggggatgacgtcaagtcctcatggcccttacacgctgggctacacacgtgctacaatggcggtgacagtgggcagcaagcacgcgagtgtgagctaatctccaaaagccgtctcagttcggattgttctctgcaactcgagagcatgaaggcggaatcgctagtaatcgcggatcagcatgccgcggtgaatacgttcccaggccttgtacacaccgcccgtcacaccatgggagttggattcactcgaaggcgttgagctaacccgcaagggaggcaggcgaccacagtgggtttagcgactggggtg

SEQ ID NO: 2257 - DNA, 1405 bp, Novosphingobium fuchskuhlense
aacgaacgctggcggcatgcctaacacatgcaagtcgaacgagaccttcgggtctagtggcgcacgggtgcgtaacgcgtgggaatctgccctttgcttcggaataacagttagaaatgactgctaataccggatgatgtcttcggaccaaagatttatcggcaaaggatgagcccgcgtaggattaggtagttggtggggtaaaggcctaccaagccgacgatccttagctggtctgagaggatgatcagccacactgggactgagacacggcccagactcctacgggaggcagcagtggggaatattggacaatgggcgaaagcctgatccagcaatgccgcgtgagtgatgaaggccttcgggtcgtaaagctcttttaccagggatgataatgacagtacctggagaataagctccggctaactccgtgccagcagccgcggtaatacggagggagctagcgttgttcggaattactgggcgtaaagagtacgtaggcggttattcaagtcagaggtgaaagcccggggctcaaccccggaactgcctttgaaactagataactagagtcttggagaggttagtggaattccgagtgtagaggtgaaattcgtagatattcggaagaacaccagtggcgaaggcgactaactggacaagtactgacgctgaggtacgaaagcgtggggagcaaacaggattagataccctggtagtccacgccgtaaacgatgataactagttgttcggtcacttggtgactgagtgacgcagctaacgcattaagttatccgcctggggagtacggtcgcaagattaaaactcaaaggaattgacgggggcctgcacaagcggtggagcatgtggtttaattcgaagcaacgcgcagaaccttaccagcgtttgacatcccgcgctacccagagagatttggggttcccttcggggacgcggtgacaggtgctgcatggctgtcgtcagctcgtgtcgtgagatgttgggttaagtcccgcaacgagcgcaaccctcgtccttagttgccatcattcagttgggcactctaaggaaaccgccggtgataagccggaggaaggtggggatgacgtcaagtcctcatggcccttacacgctgggctacacacgtgctacaatggcggtgacagtgggcagcaaactcgcgagggtgagctaatctccaaaagccgtctcagttcggattgttctctgcaactcgagagcatgaaggcggaatcgctagtaatcgcggatcagcatgccgcggtgaatacgttcccaggccttgtacacaccgcccgtcacaccatgggagttggtttcacccgaaggcagtgcgctaaccgcaaggaggcagctgaccacggtgggatcagcgactggggtg

SEQ ID NO: 2258 - DNA, 1407 bp, Novosphingobium ginsenosidimutans
aacgaacgctggcggcatgcctaacacatgcaagtcgaacgaacccttcggggttagtggcgcacgggtgcgtaacacgtgggaatctgccctttgcttcggaataacagttagaaatgactgctaataccggatgatgtcgaaagaccaaagatttatcggcaaaggatgagcccgcgtaggattaggtagttggtggggtaaaggcctaccaagccgacgatccttagctggtctgagaggatgatcagccacactgggactgagacacggcccagactcctacgggaggcagcagtggggaatattggacaatgggcgaaagcctgatccagcaatgccgcgtgagtgatgaaggccttagggttgtaaagctcttttaccagggatgataatgacagtacctggagaataagctccggctaactccgtgccagcagccgcggtaatacggagggagctagcgttgttcggaattactgggcgtaaagcgcacgtaggcggctactcaagtcagaggtgaaagcccggggctcaaccccggaactgcctttgaaactaggtagctagaatcttggagaggtcagtggaattccgagtgtagaggtgaaattcgtagatattcggaagaacaccagtggcgaaggcgactgactggacaagtattgacgctgaggtgcgaaagcgtggggagcaaacaggattagataccctggtagtccacgccgtaaacgatgataactagctgtccgggcacttggtgcttgggtggcgcagctaacgcattaagttatccgcctggggagtacggtcgcaagattaaaactcaaaggaattgacgggggcctgcacaagcggtggagcatgtggtttaattcgaagcaacgcgcagaaccttaccagcctttgacatcccgcgctacaaccagagatggttggttcccttcggggacgcggtgacaggtgctgcatggctgtcgtcagctcgtgtcgtgagatgttgggttaagtcccgcaacgagcgcaaccctcgtccttagttgccatcattcagttgggcactctaaggaaaccgccggtgataagccggaggaaggtggggatgacgtcaagtcctcatggcccttacaggctgggctacacacgtgctacaatggcggtgacagtgggcagccacctcgcgagagggagctaatcccaaaaagccgtctcagttcggattgttctctgcaactcgagagcatgaaggcggaatcgctagtaatcgcggatcagcatgccgcggtgaatacgttcccaggccttgtacacaccgcccgtcacaccatgggagttgggttcacccgaaggcgttgcgctaactcgcaagagaggcaggcgaccacggtgggcttagcgactggggtg

SEQ ID NO: 2259 - DNA, 1411 bp, Novosphingobium guangzhouense
aacgaacgctggcggcatgcctaacacatgcaagtcgaacgatcccttcggggatagtggcgcacgggtgcgtaacgcgtgggaatctgccctttgcttcggaataacagtgagaaattactgctaataccggatgatgtcttcggaccaaagatttatcggcaagggatgagcccgcgtaggattaggtagttggtggggtaatggcctaccaagccgacgatccttagctggtctgagaggatgatcagccacactgggactgagacacggcccagactcctacgggaggcagcagtggggaatattggacaatgggcgcaagcctgatccagcaatgccgcgtgagtgatgaaggccttagggttgtaaagctcttttaccagggatgataatgacagtacctggagaataagctccggctaactccgtgccagcagccgcggtaatacggagggagctagcgttgttcggaattactgggcgtaaagcgcgcgtaggcggttactcaagtcagaggtgaaagcccggggctcaaccccggaactgcctttgaaactaggtgactagaatcttggagaggtcagtggaattccgagtgtagaggtgaaattcgtagatattcggaagaacaccagtggcgaaggcgactgactggacaagtattgacgctgaggtgcgaaagcgtggggagcaaacaggattagataccctggtagtccacgccgtaaacgatgataactagctgtccggggacttggtctttgggtggcgcagctaacgcattaagttatccgcctggggagtacggtcgcaagattaaaactcaaaggaattgacgggggcctgcacaagcggtggagcatgtggtttaattcgaagcaacgcgcagaaccttaccagcgtttgacatcctcatcgcggattagagagatcttttccttcagttcggctggatgagtgacaggtgctgcatggctgtcgtcagctcgtgtcgtgagatgttgggttaagtcccgcaacgagcgcaaccctcgtccttagttgccagcatttagttgggcactctaaggaaactgccggtgataagccggaggaaggtggggatgacgtcaagtcctcatggcccttacacgctgggctacacacgtgctacaatggcggtgacagtgggcagcaagcaggcgactgcaagctaatctccaaaagccgtctcagttcggattgttctctgcaactcgagagcatgaaggcggaatcgctagtaatcgcggatcagcatgccgcggtgaatacgttcccaggccttgtacacaccgcccgtcacaccatgggagttggattcactcgaaggcgttgagctaacccgcaagggaggcaggcgaccacagtgggtttagcgactggggtg

SEQ ID NO: 2260 - DNA, 1409 bp, Novosphingobium kunmingense
aacgaacgctggcggcatgcctaacacatgcaagtcgaacgaagccttcgggcttagtggcgcacgggtgcgtaacgcgtgggaacctgcctttcggttcggaataacagttagaaatgactgctaataccggatgatgtcttcggaccaaagatttatcgccgaaagatgggcccgcgtaggattagctagttggtggggtaaaggctcaccaaggcgacgatccttagctggtctgagaggatgatcagccacactgggactgagacacggcccagactcctacgggaggcagcagtggggaatattggacaatgggcgaaagcctgatccagcaatgccgcgtgagtgatgaaggccttagggttgtaaagctcttttaccagggatgataatgacagtacctggagaataagctccggctaactccgtgccagcagccgcggtaatacggagggagctagcgttgttcggaattactgggcgtaaagcgcacgtaggcggcgactcaagtcagaggtgaaagcccggggctcaaccccggaactgcctttgaaactaggtcgctagaatcttggagaggtcagtggaattccgagtgtagaggtgaaattcgtagatattcggaagaacaccagtggcgaaggcgactgactggacaagtattgacgctgaggtgcgaaagcgtggggagcaaacaggattagataccctggtagtccacgccgtaaacgatgataactagctgtccgggcacttggtgcttgggtggcgcagctaacgcattaagttatccgcctggggagtacggtcgcaagattaaaactcaaaggaattgacgggggcctgcacaagcggtggagcatgtggtttaattcgaagcaacgcgcagaaccttaccagcctttgacatcctaggacgacttctggagacagatttcttcccttcggggacctagtgacaggtgctgcatggctgtcgtcagctcgtgtcgtgagatgttgggttaagtcccgcaacgagcgcaaccctcgtccttagttgccatcattcagttgggcactctaaggaaaccgccggtgataagccggaggaaggtggggatgacgtcaagtcctcatggcccttacaggctgggctacacacgtgctacaatggcggtgacagtgggcagccactacgcgagtaggagctaatcccaaaaagccgtctcagttcggattgttctctgcaactcgagagcatgaaggcggaatcgctagtaatcgcggatcagcatgccgcggtgaatacgttcccaggccttgtacacaccgcccgtcacaccatgggagttgggttcacccgaaggcgttgcgctaactcgcaagagaggcaggcgaccacggtgggcttagcgactggggtg

SEQ ID NO: 2261 - DNA, 1411 bp, Novosphingobium lindaniclasticum
aacgaacgctggcggcatgcctaacacatgcaagtcgaacgagaccttcgggtctagtggcgcacgggtgcgtaacgcgtgggaatctgcccttgggttcggaataacagtgagaaattactgctaataccggatgatgtcttcggaccaaagatttatcgcccagggatgagcccgcgtaggattagctagttggtggggtaatggcctaccaaggcgacgatccttagctggtctgagaggatgatcagccacactgggactgagacacggcccagactcctacgggaggcagcagtggggaatattggacaatgggcgcaagcctgatccagcaatgccgcgtgagtgatgaaggccttagggttgtaaagctcttttacccgggatgataatgacagtaccgggagaataagctccggctaactccgtgccagcagccgcggtaatacggagggagctagcgttgttcggaattactgggcgtaaagcgcgcgtaggcggctgctcaagtcagaggtgaaagcccggggctcaaccccggaactgcctttgaaactaggtagctagaatcttggagaggtcagtggaattccgagtgtagaggtgaaattcgtagatattcggaagaacaccagtggcgaaggcgactgactggacaagtattgacgctgaggtgcgaaagcgtggggagcaaacaggattagataccctggtagtccacgccgtaaacgatgataactagctgtccgggcacttggtgcttgggtggcgcagctaacgcattaagttatccgcctggggagtacggtcgcaagattaaaactcaaaggaattgacgggggcctgcacaagcggtggagcatgtggtttaattcgaagcaacgcgcagaaccttaccagcgtttgacatcctcatcgcggatttgagagatcatttccttcagttcggctggatgagtgacaggtgctgcatggctgtcgtcagctcgtgtcgtgagatgttgggttaagtcccgcaacgagcgcaaccctcgtccttagttgccagcatttggttgggcactctaaggaaactgccggtgataagccggaggaaggtggggatgacgtcaagtcctcatggcccttacacgctgggctacacacgtgctacaatggcggtgacagtgggcagcaagcaggcgactgcaagctaatctccaaaagccgtctcagttcggattgttctctgcaactcgagagcatgaaggcggaatcgctagtaatcgcggatcagcatgccgcggtgaatacgttcccaggccttgtacacaccgcccgtcacaccatgggagttggattcactcgaaggcgttgagctaactcgcaagagaggcaggcgaccacagtgggtttagcgactggggtg

SEQ ID NO: 2262 - DNA, 1411 bp, Novosphingobium malaysiense
aacgaacgctggcggcatgcctaacacatgcaagtcgaacgaacccttcggggttagtggcgcacgggtgcgtaacgcgtgggaatctgcccttcggttcggaataactcagggaaacttgagctaataccggatgatgtcttcggaccaaagatttatcgccgaaggatgagcccgcgttagattaggtagttggtggggtaatggcctaccaagccgacgatctatagctggtctgagaggatgatcagccacactgggactgagacacggcccagactcctacgggaggcagcagtggggaatattggacaatgggcgaaagcctgatccagcaatgccgcgtgagtgatgaaggccctagggttgtaaagctcttttaccagggatgataatgacagtacctggagaataagctccggctaactccgtgccagcagccgcggtaatacggagggagctagcgttgttcggaattactgggcgtaaagcgcgcgtaggcggtttttcaagtcagaggtgaaagcccggggctcaaccccggaactgcctttgaaactggatgactagaatcttggagaggcgagtggaattccgagtgtagaggtgaaattcgtagatattcggaagaacaccagtggcgaaggcgactcgctggacaagtattgacgctgaggtgcgaaagtgtggggagcaaacaggattagataccctggtagtccacaccgtaaacgatgataactagctgtccgggctcttggagtttgggtggcgcagctaacgcattaagttatccgcctggggagtacggtcgcaagattaaaactcaaaggaattgacgggggcctgcacaagcggtggagcatgtggtttaattcgaagcaacgcgcagaaccttaccagcctttgacatcctggtcgcgattggcagagatgcctttcttcagttcggctggaccagtgacaggtgctgcatggctgtcgtcagctcgtgtcgtgagatgttgggttaagtcccgcaacgagcgcaaccctcgtccttagttgccaccatttagttgggcactctaaggaaactgccggtgataagccggaggaaggtggggatgacgtcaagtcctcatggcccttacaggctgggctacacacgtgctacaatggcggtgacagtgggcagcgagcacgcgagtgtgagctaatctccaaaagccgtctcagttcggattgttctctgcaactcgagagcatgaaggcggaatcgctagtaatcgcggatcagcatgccgcggtgaatacgttcccaggccttgtacacaccgcccgtcacaccatgggagttggtttcacccgaaggcgctgcgttaacccgcaagggagacaggcgaccacggtgggatcagcgactggggtg

SEQ ID NO: 2263 - DNA, 1411 bp, Novosphingobium mathurense
aacgaacgctggcggcatgcctaacacatgcaagtcgaacgagaccttcgggtctagtggcgcacgggtgcgtaacgcgtgggaatctgccctttgcttcggaataacagtgagaaattactgctaataccggatgatgtcttcggaccaaagatttatcggcaagggatgagcccgcgtaggattagctagttggtggggtaatggcctaccaaggcgacgatccttagctggtctgagaggatgatcagccacactgggactgagacacggcccagactcctacgggaggcagcagtggggaatattggacaatgggcgaaagcctgatccagcaatgccgcgtgagtgatgaaggccttagggttgtaaagctcttttaccagggatgataatgacagtacctggagaataagctccggctaactccgtgccagcagccgcggtaatacggagggagctagcgttgttcggaattactgggcgtaaagcgcgcgtaggcggttactcaagtcagaggtgaaagcccggggctcaaccccggaactgcctttgaaactaggtgactagaatcttggagaggtcagtggaattccgagtgtagaggtgaaattcgtagatattcggaagaacaccagtggcgaaggcgactgactggacaagtattgacgctgaggtgcgaaagcgtggggagcaaacaggattagataccctggtagtccacgccgtaaacgatgataactagctgtccgggcacatggtgtttgggtggcgcagctaacgcattaagttatccgcctggggagtacggtcgcaagattaaaactcaaaggaattgacgggggcctgcacaagcggtggagcatgtggtttaattcgaagcaacgcgcagaaccttaccagcgtttgacatcctgatcgcggattagagagatcttttccttcagttcggctggatcagtgacaggtgctgcatggctgtcgtcagctcgtgtcgtgagatgttgggttaagtcccgcaacgagcgcaaccctcgtccttagttgccatcatttggttgggcactctaaggaaactgccggtgataagccggaggaaggtggggatgacgtcaagtcctcatggcccttacacgctgggctacacacgtgctacaatggcggtgacagtgggcagcaagtgcgcgagcacaagctaatctccaaaagccgtctcagttcggattgttctctgcaactcgagagcatgaaggcggaatcgctagtaatcgcggatcagcatgccgcggtgaatacgttcccaggccttgtacacaccgcccgtcacaccatgggagttggtttcacccgaaggtagtgcgctaaccggcaacggaggcagctaaccacggtgggatcagcgactggggtg

SEQ ID NO: 2264 - DNA, 1384 bp, Novosphingobium nitrogenifigens
aacgaacgctggcggcatgcctaacacatgcaagtcgaacgatgccttcgggcatagtggcgcacgggtgcgtaacgcgtgggaatctgcctttgggtctgggataactcagggaaacttgagctaataccggatgatgactttggtccaaagatttatcgcccaaagatgagcccgcgtaggattagctagttggtggggtaaaggcctaccaaggcgacgatccttagctggtctgagaggatgatcagccacactgggactgagacacggcccagactcctacgggaggcagcagtggggaatattggacaatgggcgaaagcctgatccagcaatgccgcgtgagtgatgaaggccttcgggtcgtaaagctcttttacccgggatgataatgacagtaccgggagaataagctccggctaactccgtgccagcagccgcggtaatacggagggagctagcgttgttcggaattactgggcgtaaagcgcacgtaggcggctactcaagtcagaggtgaaagcccggggctcaaccccggaactgcctttgaaactaggtggctagaatcttggagaggcgagtggaattccgagtgtagaggtgaaattcgtagatattcggaagaacaccagtggcgaaggcgactcgctggacaagtattgacgctgaggtgcgaaagcgtggggagcaaacaggattagataccctggtagtccacgccgtaaacgatgataactagctgtccgggcacatggtgtttgggtggcgcagctaacgcattaagttatccgcctggggagtacggtcgcaagattaaaactcaaaggaattgacgggggcctgcacaagcggtggagcatgtggtttaattcgaagcaacgcgcagaaccttaccagcgtttgacatcctacgctacccagagagatttggggttcccttcggggacgtagagacaggtgctgcatggctgtcgtcagctcgtgtcgtgagatgttgggttaagtcccgcaacgagcgcaaccctcgtccttagttgccatcatttagttgggcactctaaggaaaccgccggtgataagccggaggaaggtggggatgacgtcaagtcctcatggcccttacacgctgggctacacacgtgctacaatggcggtgacagtgggaaaatccccaaaaaccgtctcagttcggattgtcctctgcaactcgagggcatgaaggcggaatcgctagtaatcgcggatcagcatgccgcggtgaatacgttcccaggccttgtacacaccgcccgtcacaccatgggagttggtttcacccgaaggcagtgcgctaaccgcaaggaggcagctgaccacggtgggatcagcgactggggtg

SEQ ID NO: 2265 - DNA, 1411 bp, Novosphingobium pentaromativorans
aacgaacgctggcggcatgcctaacacatgcaagtcgaacgagaccttcgggtctagtggcgcacgggtgcgtaacgcgtgggaatctgcccttcggttcggaataactcagggaaacttgagctaataccggataatgacttcggtccaaagatttattgccgagggatgagcccgcgtaggattagctagttggtggggtaatggcctaccaaggcgacgatccttagctggtctgagaggatgatcagccacactgggactgagacacggcccagactcctacgggaggcagcagtggggaatattggacaatgggcgaaagcctgatccagcaatgccgcgtgagtgatgaaggccttagggttgtaaagctcttttaccagggatgataatgacagtacctggagaataagctccggctaactccgtgccagcagccgcggtaatacggagggagctagcgttgttcggaattactgggcgtaaagcgcgcgtaggcggttactcaagtcagaggtgaaagcccggggctcaaccccggaactgcctttgaaactaggtgactagaatcttggagaggtcagtggaattccgagtgtagaggtgaaattcgtagatattcggaagaacaccagtggcgaaggcgactgactggacaagtattgacgctgaggtgcgaaagcgtggggagcaaacaggattagataccctggtagtccacgccgtaaacgatgataactagctgtccgggcacatggtgtttgggtggcgcagctaacgcattaagttatccgcctggggagtacggtcgcaagattaaaactcaaaggaattgacgggggcctgcacaagcggtggagcatgtggtttaattcgaagcaacgcgcagaaccttaccagcgtttgacatcctgatcgcggattagagagatcttttccttcagttcggctggatcagtgacaggtgctgcatggctgtcgtcagctcgtgtcgtgagatgttgggttaagtcccgcaacgagcgcaaccctcgtccttagttgccatcatttggttgggcactctaaggaaactgccggtgataagccggaggaaggtggggatgacgtcaagtcctcatggcccttacacgctgggctacacacgtgctacaatggcggtgacagtgggcagcgagtgcgcgagcacaagctaatctccaaaagccgtctcagttcggattgttctctgcaactcgagagcatgaaggcggaatcgctagtaatcgcggatcagcatgccgcggtgaatacgttcccaggccttgtacacaccgcccgtcacaccatgggagttggtttcacccgaaggtagtgcgctaaccggcaacggaggcagctaaccacggtgggatcagcgactggggtg

SEQ ID NO: 2266 - DNA, 1411 bp, Novosphingobium resinovorum
aacgaacgctggcggcatgcctaacacatgcaagtcgaacgagatcttcggatctagtggcgcacgggtgcgtaacgcgtgggaatctgcccttgggttcggaataacagtgagaaattactgctaataccggatgatgtcttcggaccaaagatttatcgcccagggatgagcccgcgtaggattaggtagttggtggggtaatggcctaccaagccgacgatccttagctggtctgagaggatgatcagccacactgggactgagacacggcccagactcctacgggaggcagcagtggggaatattggacaatgggcgaaagcctgatccagcaatgccgcgtgagtgatgaaggccttagggttgtaaagctcttttaccagggatgataatgacagtacctggagaataagctccggctaactccgtgccagcagccgcggtaatacggagggagctagcgttgttcggaattactgggcgtaaagcgcgcgtaggcggttactcaagtcagaggtgaaagcccggggctcaaccccggaactgcctttgaaactaggtgactagaatcttggagaggtcagtggaattccgagtgtagaggtgaaattcgtagatattcggaagaacaccagtggcgaaggcgactgactggacaagtattgacgctgaggtgcgaaagcgtggggagcaaacaggattagataccctggtagtccacgccgtaaacgatgataactagctgtccgggtacttggtacttgggtggcgcagctaacgcattaagttatccgcctggggagtacggtcgcaagattaaaactcaaaggaattgacgggggcctgcacaagcggtggagcatgtggtttaattcgaagcaacgcgcagaaccttaccagcgtttgacatgccggtcgcggatttgggagaccatttccttcagttcggctggaccgtgcacaggtgctgcatggctgtcgtcagctcgtgtcgtgagatgttgggttaagtcccgcaacgagcgcaaccctcgtccttagttgccagcattgagttgggcactctaaggaaactgccggtgataagccggaggaaggtggggatgacgtcaagtcctcatggcccttacacgctgggctacacacgtgctacaatggcggtgacagtgggcagcaagcacgcgagtgtgagctaatctccaaaagccgtctcagttcggattgttctctgcaactcgagagcatgaaggcggaatcgctagtaatcgcggatcagcatgccgcggtgaatacgttcccaggccttgtacacaccgcccgtcacaccatgggagttggattcactcgaaggcgttgagctaacccgcaagggaggcaggcgaccacagtgggtttagcgactggggtg

SEQ ID NO: 2267 - DNA, 1363 bp, Novosphingobium sediminis
ggcggcatgcctaacacatgcaagtcgaacgagaccttcgggtctagtggcgcacgggtgcgtaacgcgtgggaatctgccctttgcttcggaataacagttagaaatgactgctaataccggatgatgtcttcggaccaaagatttatcggcaaaggatgagcccgcgtaggattaggtagttggtggggtaaaggcctaccaagccgacgatccttagctggtctgagaggatgatcagccacactgggactgagacacggcccagactcctacgggaggcagcagtggggaatattggacaatgggcgaaagcctgatccagcaatgccgcgtgagtgatgaaggccttcgggtcgtaaagctcttttaccagggatgataatgacagtacctggagaataagctccggctaactccgtgccagcagccgcggtaatacggagggagctagcgttgttcggaattactgggcgtaaagagtacgtaggcggttattcaagtcagaggtgaaagcccggggctcaaccccggaactgcctttgaaactagataactagagtcttggagaggttagtggaattccgagtgtagaggtgaaattcgtagatattcggaagaacaccagtggcgaaggcgactaactggacaagtactgacgctgaggtacgaaagcgtggggagcaaacaggattagataccctggtagtccacgccgtaaacgatgataactagttgttcggtcacttggtgactgagtgacgcagctaacgcattaagttatccgcctggggagtacggtcgcaagattaaaactcaaaggaattgacgggggcctgcacaagcggtggagcatgtggtttaattcgaagcaacgcgcagaaccttaccagcgtttgacatcccgcgctacttccagagatggaaggttcccttcggggacgcggtgacaggtgctgcatggctgtcgtcagctcgtgtcgtgagatgttgggttaagtcccgcaacgagcgcaaccctcgtccttagttgccatcattaagttgggcactctaaggaaaccgccggtgataagccggaggaaggtggggatgacgtcaagtcctcatggcccttacacgctgggctacacacgtgctacaatggcggtgacagtgggcagcaaactcgcgagggtgagctaatctccaaaagccgtctcagttcggattgttctctgcaactcgagagcatgaaggcggaatcgctagtaatcgcggatcagcatgccgcggtgaatacgttcccaggccttgtacacaccgcccgtcacaccatgggagttggtttcacccgaaggcagtgcgctaaccgcaaggaggc

SEQ ID NO: 2268 - DNA, 1407 bp, Novosphingobium subterraneum
aacgaacgctggcggcatgcctaacacatgcaagtcgaacgaacccttcggggttagtggcgcacgggtgcgtaacgcgtgggaatctgccctttgcttcggaataacagttagaaatgactgctaataccggatgatgtcttcggaccaaagatttatcggcaagggatgagcccgcgtaggattaggtagttggtggggtaaaggcctaccaagccgacgatccttagctggtctgagaggatgatcagccacactgggactgagacacggcccagactcctacgggaggcagcagtggggaatattggacaatgggcgcaagcctgatccagcaatgccgcgtgagtgatgaaggccttcgggtcgtaaagctcttttaccagggatgataatgacagtacctggagaataagctccggctaactccgtgccagcagccgcggtaatacggagggagctagcgttgttcggaattactgggcgtaaagcgcacgtaggcggcgacacaagtcagaggtgaaagcccggggctcaaccccggaactgcctttgaaactaggttgctagaatcttggagaggtcagtggaattccgagtgtagaggtgaaattcgtagatattcggaagaacaccagtggcgaaggcgactgactggacaagtattgacgctgaggtgcgaaagcgtggggagcaaacaggattagataccctggtagtccacgccgtaaacgatgataactagctgtccgggcacttggtgtttgggtggcgcagctaacgcattaagttatccgcctggggagtacggtcgcaagattaaaactcaaaggaattgacgggggcctgcacaagcggtggagcatgtggtttaattcgaagcaacgcgcagaaccttaccagcgtttgacatcccgcgctatcacaagagattgtgagttcccttcggggacgcggtgacaggtgctgcatggctgtcgtcagctcgtgtcgtgagatgttgggttaagtcccgcaacgagcgcaaccctcgtccttagttgccatcattcagttgggcactctaaggaaaccgccggtgataagccggaggaaggtggggatgacgtcaagtcctcatggcccttacacgctgggctacacacgtgctacaatggcggtgacagtgggcagcaagcacgcgagtgtgagctaatctccaaaagccgtctcagttcggattgttctctgcaactcgagagcatgaaggcggaatcgctagtaatcgcggatcagcatgccgcggtgaatacgttcccaggccttgtacacaccgcccgtcacaccatgggagttgggttcacccgaaggcgttgcgctaactcgcaagagaggcaggcgaccacggtgggcttagcgactggggtg

SEQ ID NO: 2269 - DNA, 1340 bp, Novosphingobium taihuense
ctaacacatgcaagtcgaacgaacccttcggggttagtggcgcacgggtgcgtaacgcgtgggaatctgccctttggttcggaataacagttagaaatgactgctaataccggatgatgacttcggtccaaagatttatcgccagaggatgagcccgcgtaggattaggtagttggtggggtaaaggcctaccaagccgacgatccttagctggtctgagaggatgatcagccacactgggactgagacacggcccagactcctacgggaggccgcagtggggaatattggacaatgggcgaaagcctgatccagcaatgccgcgtgagtgatgaaggccttcgggtcgtaaagctcttttacccgggatgataatgacagtaccgggagaataagctccggctaactccgtgccagcagccgcggtaatacggagggagctagcgttgttcggaattactgggcgtaaagcgcacgtaggcggttattcaagtcagaggtgaaagcccggggctcaaccccggaactgcctttgaaactagatgactggaatcttggagaggtcagtggaattccgagtgtagaggtgaaattcgtagatattcggaagaacaccagtggcgaaggcgactgactggacaagtattgacgctgaggtgggaaagcgtggggagcaaacaggattagataccctggtagtccacgccgtaaacgatgataactagctgtccgggtacttggtatttgggtggcgcagctaacgcattaagttatccgcctgggagtacggtcgcaagattaaactcaaaggaattgacgggggcctgcacaagcggtggagcatgtggtttaattcgaagcaacgcgcagaaccttaccagcgtttgacatcccgcgctatccagagagatttggagttcccttcggggacgcggtgacaggtgctgcatggctgtcgtcagctcgtgtcgtgagatgttgggttaagtcccgcaacgagcgcaaccctcgtccttagttgccatcattcagttgggcactctaaggaaaccgccggtgataagccggaggaaggtggggatgacgtcaagtcctcatggcccttacacgctgggctacacacgtgctacaatggcggtgacagtgggcagcaagcacgcgagtgtgagctaatctccaaaagccgtctcagttcggattgttctctgcaactcgagagcatgaaggcggaatcgctagtaatcgcggatcagcatgccgcggtgaatacgttcccaggccttgtacacaccgcccgtcacaccatgggagttggtttcacccgaaggcagtgcgctaac

SEQ ID NO: 2270 - DNA, 1407 bp, Novosphingobium tardaugens
aacgaacgctggcggcatgcctaacacatgcaagtcgaacgaacccttcggggttagtggcgcacgggtgcgtaacgcgtgggaacctgcctttaggttcggaataacagttagaaatgactgctaataccggatgatgtcttcggaccaaagatttatcgcctttagatgggcccgcgttggattagctagttggtggggtaaaggcctaccaaggcgacgatccatagctggtctgagaggatgatcagccacactgggactgagacacggcccagactcctacgggaggcagcagtggggaatattggacaatgggcgaaagcctgatccagcaatgccgcgtgagtgatgaaggccttagggttgtaaagctcttttaccagggatgataatgacagtacctggagaataagctccggctaactccgtgccagcagccgcggtaatacggagggagctagcgttgttcggaattactgggcgtaaagcgcgcgtaggcggctatttaagtcaggggtgaaatcccggggctcaaccccggaactgcctttgaaactggatagctagaatcttggagaggtcagtggaattccgagtgtagaggtgaaattcgtagatattcggaagaacaccagtggcgaaggcgactgactggacaagtattgacgctgaggtgcgaaagcgtggggagcaaacaggattagataccctggtagtccacgccgtaaacgatgataactagctgtccgggctcatggagtttgggtggcgcagctaacgcattaagttatccgcctggggagtacggtcgcaagattaaaactcaaaggaattgacgggggcctgcacaagcggtggagcatgtggtttaattcgaagcaacgcgcagaaccttaccagcgtttgacatcccgcgctaacccaagagattgggtgttcccttcggggacgcggtgacaggtgctgcatggctgtcgtcagctcgtgtcgtgagatgttgggttaagtcccgcaacgagcgcaaccctcgtccttagttgccatcattaagttgggcactctaaggaaaccgccggtgataagccggaggaaggtggggatgacgtcaagtcctcatggcccttacacgctgggctacacacgtgctacaatggcggtgacagtgggcagcaacctcgcgaggggtagctaatctccaaaaaccgtctcagttcggattgttctctgcaactcgagagcatgaaggcggaatcgctagtaatcgcggatcagcatgccgcggtgaatacgttcccaggccttgtacacaccgcccgtcacaccatgggagttgggttcacccgaaggcgttgcgctaactcgcaagagaggcaggcgaccacggtgggcttagcgactggggtg

SEQ ID NO: 2271 - DNA, 1468 bp, Oblitimonas alkaliphila
attgaacgctggcggcaggcctaacacatgcaagtcgagcggtaacagagagaagcttgcttctctgctgacgagcggcggacgggtgagtaaagcctaggaatctgcctagtagtgggggataacttgccgaaaggtaagctaataccgcgtacgtcctacgggagaaagcaggggcctcttcggagccttgcgctattagatgagcctaggtcagattagctagttggtgaggtaaaggctcaccaaggcgacgatctgtaactggtctgagaggatgatcagtcacactggaactgagacacggtccagactcctacgggaggcagcagtggggaatattggacaatgggggaaaccctgatccagccatgccgcgtgtgtgaagaaggtcttcggattgtaaagcactttaagttgggaggaagggcttacggttaatacccgctaagttttgacgttaccaacagaataagcaccggctaacttcgtgccagcagccgcggtaatacgaagggtgcaagcgttaatcggaattactgggcgtaaagcgcgcgtaggtggtttgttaagttggaagtgaaagccccgggctcaacctgggaattgctttcaaaactagcaggctagagtacagtagagggtagtggaatttcctgtgtagcggtgaaatgcgtagatataggaaggaacatcagtggcgaaggcgactacctggactgatactgacactgaggtgcgaaagcgtggggagcaaacaggattagataccctggtagtccacgccgtaaacgatgtcaactagttgttgggttccttgagaacttagtaacgcagctaacgcattaagttgaccgcctggggagtacggccgcaaggttaaaactcaaatgaattgacgggggcccgcacaagcggtggagcatgtggtttaattcgaagcaacgcgaagaaccttacctggccttgacatgtagcgaactttctagagatagatgggtgccttcgggaacgctaacacaggtgctgcatggctgtcgtcagctcgtgtcgtgagatgttgggttaagtcccgtaacgagcgcaacccttgtccttagttaccagcacgttatggtgggcactctaaggagactgccggtgacaaaccggaggaaggtggggatgacgtcaagtcatcatggcccttacggccagggctacacacgtgctacaatggtcggtacaacgggttgccaagccgcgaggtggagctaatctcataaagccgatcgtagtccggatcgcagtctgcaactcgactgcgtgaagtcggaatcgctagtaatcgcggatcagaatgccgcggtgaatacgttcccgggccttgtacacaccgcccgtcacaccatgggagtgggttgcaccagaagtagctagtctaactttcgagaggacggttaccacggtgtgattcatgactggggtg

SEQ ID NO: 2272 - DNA, 1410 bp, Oceanibaculum indicum
aacgaacgctggcggcatgcttaacacatgcaagtcgaacgatctcttcggagatagtggcggacgggtgagtaacgcgtgggaacctgccccgaggtacggaataactcatggaaacgtgagctaataccgtatgtgacctgagggtgaaagatttatcgccttgggaggggcccgcgtcggattaggtagttggtggggtaatggcctaccaagcctgcgatccgtagctggtctgagaggatgatcagccacactggaacttagacacggtccagactcctacgggaggcagcagtggggaatattggacaatgggggcaaccctgatccagcaatgccgcgtgcgtgatgaaggccttagggttgtaaagcgctttcggcggggaagatgatgacggtacccgcagaagaagccccggctaactccgtgccagcagccgcggtaatacggagggggctagcgttgttcggaattactgggcgtaaagggcgcgtaggcggcgatttaagttaggcgtgaaagccccgggcttaacctgggaactgcgcttgatactggattgcttgaggacgggagagggtagtggaattcccagtgtagaggtgaaattcgtagatattgggaagaacaccagtggcgaaggcgactgcctggcccgttactgacgctgaggcgcgaaagcgtggggagcaaacaggattagataccctggtagtccacgccgtaaacgatgagtgctagacgttggggaacatggtttctcggtgtcgcagctaacgcattaagcactccgcctggggagtacggccgcaaggttaaaactcaaaggaattgacgggggcccgcacaagcggtggagcatgtggtttaattcgaagcaacgcgcagaaccttaccagcccttgacatggggagtttgggtcctggagacaggatccttcagttcggctggctcccgcacaggtgctgcatggctgtcgtcagctcgtgtcgtgagatgttgggttaagtcccgcaacgagcgcaacccccatctttagttgccatcggttcggccgggcactctagagaaactgccggtgacaagccggaggaaggcggggatgacgtcaagtcctcatggcccttatgggctgggctacacacgtgctacaatggcggtgacagagggcagcgagagggcgacctcaagctaatccctaaaaaccgtctcagttcggattgtactctgcaactcgagtgcatgaaggtggaatcgctagtaatcgcggatcagcatgccgcggtgaatacgttcccgggccttgtacacaccgcccgtcacaccatgggagttggttttacccgaagccggtgcgctaaccgcaaggaggcagccgaccacggtaaggtgagcgactggggtg

SEQ ID NO: 2273 - DNA, 1379 bp, Oceanibulbus indolifex
ctcagaacgaacgctggcggcaggcctaacacatgcaagtcgagcgagaccttcgggtctagcggcggacgggttagtaacgcgtgggaacgtacccttctctgcggaatagccactggaaacggtgagtaataccgcatacgcccttcgggggaaagatttatcggagaaggatcggcccgcgttagattagatagttggtggggtaatggcctaccaagtctacgatctatagctggttttagaggatgatcagcaacactgggactgagacacggcccagactcctacgggaggcagcagtggggaatcttagacaatgggcgcaagcctgatctagccatgccgcgtgtgtgatgaaggtcttaggatcgtaaagcactttcgccagggatgataatgacagtccctggtaaagaaaccccggctacctccgtgccagcagccgcggtaatacggagggggttagcgttgttcggaattactgggcgtaaagcgtacgtaggcggatcagaaagtaaggggtgaaatcccagggctcaaccctggaactgcctcttaaactcctggtcttgagttcgagagaggtgagtggaattccaagtgtagaggtgaaattcgtagatatttggaggaacaccagtggcgaaggcggctcactggctcgatactgacgctgaggtacgaaagtgtggggagcaaacaggattagataccctggtagtccacaccgtaaacgatgaatgccagtcgtcgggcagtatactgttcggtgacacacctaacggattaagcattccgcctggggagtacggtcgcaagattaaaactcaaaggaattgacgggggcccgcacaagcggtggagcatgtggtttaattcgaagcaacgcgcagaaccttaccaacccttgacatcctgtgctaacccgagagatcgggcgttcacttcggtgacgcagtgacaggtgctgcatggctgtcgtcagctcgtgtcgtgagatgttcggttaagtccggcaacgagcgcaacccacatccttagttgccagcagttcggctgggcactctaaggaaactgcccgtgataagcgggaggaaggtgtggatgacgtcaagtcctcatggcccttacgggttgggctacacacgtgctacaatggcagtgacaatgggttaatccccaaaagctgtctcagttcggattggggtctgcaactcgaccccatgaagtcggaatcgctagtaatcgtggaacagcatgccacggtgaatacgttcccgggccttgtacacaccgcccgtcacaccatgggagttggttctacccgacggccgtgcgccaacctttcgaggaggcagcggaccacggtaggatca

SEQ ID NO: 2274 - DNA, 1389 bp, Oceanicaulis alexandrii
aacgaacgctggcggaaggcttaacacatgcaagtcgagcgcacccttcggggtgagcggcagacgggtgagtaacgcgtgggaacgtgccctttggttcggaatagcccttggaaacgaggagtaatgccgaatgtgcccttcgggggaaagatttatcgccaaaggatcggcccgcgttagattagcttgttggtgaggtaacggctcaccaaggcgacgatctatagctggtctgagaggatgatcagccacactgggactgagacacggcccagactcctacgggaggcagcagtggggaatcttggacaatgggcgaaagcctgatccagccattccgcgtggatgatgaaggccctagggttgtaaaatcctttcggcagggaagataatgacggtacctgctaaagaagccccggctaactccgtgccagcagccgcggtaatacggagggggctagcgttgttcggaattactgggcgtaaagcgcacgtaggcggatcagtcagtcagaggtgaaatcccggagctcaacttcggaactgcctttgatactgctgatctagagtccgggagaggtgcatggaattccgagtgtagaggtgaaattcgtagatattcggaggaacaccagaggcgaaggcgatgcactggaccggtactgacgctgaggtgcgaaagcgtggggagcaaacaggattagataccctggtagtccacgccgtaaacgatgagagctagttgtctggcagcatgctgtcaggtgacgcagctaacgcattaagctctccgcctggggagtacggccgcaaggttaaaactcaaagaaattgacgggggcccgcacaagcggtggagcatgtggtttaattcgaagcaacgcgaagaaccttacctgcgcttgacatccctatcgcggattagagagatcttttccttcagctcggctggataggtgacaggtgctgcatggctgtcgtcagctcgtgtcgtgagatgttgggttaagtcccgcaacgagcgcaaccctcgccgttagttgccagcacgtttgggtgggcactctaacgggactgccggtgtcaaaccggaggaaggtggggatgacgtcaagtcatcatggcccttacgcgcagggctacacacgtgctacaatggcagtgacaatgagttaatctctaaaagctgtctcagttcgaattggggtctgcaactcgaccccatgaagtcggaatcgctagtaatcgtggatcagcatgccacggtgaatacgttcccgggccttgtacacaccgcccgtcacaccatgggagttggttctacccgacgacgctgcgctaaccttcgggaggcaggcggccacggtaggatcagcgactggggtg

SEQ ID NO: 2275 - DNA, 1458 bp, Oceanicoccus sagamiensis
attgaacgctggcggtaggcttaacacatgcaagtcgaacgtgaaagctcttcggagtgagtagagtggcggacgggtgagtaacgcgtaggaatctacctagtagtgggggacaacatgtggaaacgcatgctaataccgcatacgccctatgggggaaagtgtgggaccttcgggccacacgctattagatgagcctgcgtaagattagctagttggtgaggtaaaggctcaccaaggcgacgatctttagctggtctgagaggatgatcagccacactgggactgagacacggcccagactcctacgggaggcagcagtggggaatattgcgcaatgggggaaaccctgacgcagccataccgcgtgtgtgaagaaggccttagggttgtaaagcactttcagcgaggaggaaaggttgtacgttaatagcgtgcagctgtgacgttactcgcagaagaagcaccggctaattcagtgccagcagccgcggtaatactgaaggtgcaagcgttaatcggaattactgggcgtaaagcgcgcgtaggcggcttgttaagtcggatgtgaaagccctgggctcaacctgggaactgcatacgatactggcaagctagagtatgggagagggctgtggaatttctagtgtagcggtgaaatgcgtagatattagaaggaacatcagtggcgaaggcggcagcctggcccaatactgacgctgaggtgcgaaagcgtggggagcaaacaggattagataccctggtagtccacgccgtaaacgatgtctactagccgttggggaacttgattccttagtggcgcagctaacgcactaagtagaccgcctggggagtacggccgcaaggttaaaactcaaatgaattgacgggggcccgcacaagcggtggagcatgtggtttaattcgatgcaacgcgaagaaccttaccaggtcttgacatcccgagaagttactagagatagtttcgtgccttcgggaactcggtgacaggtgctgcatggctgtcgtcagctcgtgtcgtgagatgttgggttaagtcccgtaacgagcgcaacccttgtccttagttgctaacaggttaagctgagaactctaaggagactgccggtgacaaaccggaggaaggtggggacgacgtcaagtcatcatggcccttacgacctgggctacacacgtgctacaatggccagtacaaagggctgcaaaaccgcgaggtggagctaatcccataaaactggtcgtagtccggattggagtctgcaactcgactccatgaagtcggaatcgctagtaatcgtgaatcagaatgtcacggtgaatacgttcccgggccttgtacacaccgcccgtcacaccatgggagtgggttgctccagaagtggctagtctaactgcttgcagaggacggtcaccacggagtgattcatgactggggtg

SEQ ID NO: 2276 - DNA, 1465 bp, Oceanimonas baumannii
attgaacgctggcggcaggcctaacacatgcaagtcgagcggtaacagagagtagcttgctactttgctgacgagcggcggacgggtgagtaatgcttggggatctgcccggtcgagggggataaccgttggaaacgacggctaataccgcatacgccctacgggggaaagcaggggaccttcgggccttgcgcgattggatgaacccaagtgagattagcttgttggtgaggtaacggctcaccaaggcgacgatctctagctggtctgagaggatgaccagtcacactgggactgagacacggcccagactcctacgggaggcagcagtggggaatattgcacaatgggggaaaccctgatgcagccatgccgcgtgtgtgaagaaggccttcgggttgtaaagcactttcagtggtgaggaaaggaggttggctaatacctgacctctgtgacgttaaccacagaagaagcaccggctaactccgtgccagcagccgcggtaatacggagggtgcaagcgttaatcggaataactgggcgtaaagcgcacgcaggcggtttgttaagccagatgtgaaagccccgggctcaacccgggaactgcatttggaactggcagactagagtcttggagaggggggtagaatttccggtgtagcggtgaaatgcgtagagatcggaaggaataccagtggcgaaggcggccccctggccaaagactgacgctcaggtgcgaaagcgtggggagcaaacaggattagataccctggtagtccacgccgtaaacgatgtcaacttggagtctgtgccatttgagcgcgggttccggagctaacgcgttaagttgaccgcctggggagtacggccgcaaggttaaaactcaaatgaattgacgggggcccgcacaagcggtggagcatgtggtttaattcgatgcaacgcgaagaaccttacctacccttgacatacagcgaacttggcagagatgccttggtgccttcgggaacgctgatacaggtgctgcatggctgtcgtcagctcgtgtcgtgagatgttgggttaagtcccgcaacgagcgcaacccttgtccttttttgccagcgggtgatgccgggaactcaaaggagactgccggtgataaaccggaggaaggtggggacgacgtcaagtcatcatggcccttacgggtagggctacacacgtgctacaatggcgcgtacagagggctgcaaactcgcgagagtaagcgaatcccaaaaagcgcgtcgtagtccggatcggagtctgcaactcgactccgtgaagtcggaatcgctagtaatcgtggatcagaatgccacggtgaatacgttcccgggccttgtacacaccgcccgtcacaccatgggagtgggttgctccagaagtagatagcttaaccttcgggagggcgtttaccacggagtgattcatgactggggtg

SEQ ID NO: 2277 - DNA, 1463 bp, Oceanimonas doudoroffii
gaacgctggcggcaggcctaacacatgcaagtcgagcggcagcgggaaagtagcttgctacttttgccggcgagcggcggacgggtgagtaatgcttggggatctgcccggtcgagggggataaccgttggaaacgacggctaataccgcatacgccctacgggggaaagcaggggaccttcgggccttgcgcgattggatgaacccaagtgagattagctagttggtgaggtaacggctcaccaaggcgacgatctctagctggtctgagaggatgaccagtcacactgggactgagacacggcccagactcctacgggaggcagcagtggggaatattgcacaatgggggaaaccctgatgcagccatgccgcgtgtgtgaagaaggccttcgggttgtaaagcactttcagtggtgaggaaaggaggttggctaatacctggcctctgtgacgttaaccacagaagaagcaccggctaactccgtgccagcagccgcggtaatacggagggtgcaagcgttaatcggaataactgggcgtaaagcgcacgcaggcggtttgttaagccagatgtgaaagccccgggctcaacccgggaactgcatttggaactggcagactagagtcttggagaggggggtagaatttccggtgtagcggtgaaatgcgtagagatcggaaggaataccagtggcgaaggcggccccctggccaaagactgacgctcaggtgcgaaagcgtggggagcaaacaggattagataccctggtagtccacgccgtaaacgatgtcaacttgaagtctgtgccatttgagcgcgggtttcggagctaacgcgttaagttgaccgcctggggagtacggccgcaaggttaaaactcaaatgaattgacgggggcccgcacaagcggtggagcatgtggtttaattcgatgcaacgcgaagaaccttacctacccttgacatacagcgaacttggcagagatgccttggtgccttcgggaacgctgatacaggtgctgcatggctgtcgtcagctcgtgtcgtgagatgttgggttaagtcccgcaacgagcgcaacccttgtcctttgttgccagcgattcggtcgggaactcaaaggagactgccggtgataaaccggaggaaggtggggacgacgtcaagtcatcatggcccttacgggtagggctacacacgtgctacaatggcgcgtacagagggcggcgaaccagtgatggtaagcgaatcccaaaaagcgcgtcgtagtccggatcggagtctgcaactcgactccgtgaagtcggaatcgctagtaatcgtggatcagaatgccacggtgaatacgttcccgggccttgtacacaccgcccgtcacaccatgggagtgggttgctccagaagtagatagcttaaccttcgggagggcgtttaccacggagtgattcatgactggggtg

SEQ ID NO: 2278 - DNA, 1467 bp, Oceanimonas smirnovii
  misc_feature (975)..(975): n is a, c, g, or t
  misc_feature (981)..(981): n is a, c, g, or t
  misc_feature (983)..(983): n is a, c, g, or t
  misc_feature (985)..(985): n is a, c, g, or t
  misc_feature (994)..(994): n is a, c, g, or t
  misc_feature (998)..(998): n is a, c, g, or t
  misc_feature (1011)..(1011): n is a, c, g, or t
  misc_feature (1015)..(1015): n is a, c, g, or t
  misc_feature (1112)..(1112): n is a, c, g, or t
  misc_feature (1250)..(1250): n is a, c, g, or t
attgaacgctggcggcaggcctaacacatgcaagtcgagcggtaacaggagagtagcttgctacttttgctgacgagcggcggacgggtgagtaatgcttggggatctgcccggtcgagggggataaccgttggaaacgacggctaataccgcatacgccctacgggggaaagcaggggaccttcgggccttgcgcgattggatgaacccaagtgagattagcttgttggtgaggtaacggctcaccaaggcgacgatctctagctggtctgagaggatgaccagtcacactgggactgagacacggcccagactcctacgggaggcagcagtggggaatattgcacaatgggggaaaccctgatgcagccatgccgcgtgtgtgaagaaggccttcgggttgtaaagcactttcagtggtgaggaaaggcggttggctaatacccgaccgctgtgacgttaaccacagaagaagcaccggctaactccgtgccagcagccgcggtaatacggagggtgcaagcgttaatcggaataactgggcgtaaagcgcacgcaggcggtttgttaagccagatgtgaaagccccgggctcaacccgggaactgcatttggaactggcagactagagtcttggagaggggggtagaatttccggtgtagcggtgaaatgcgtagagatcggaaggaataccagtggcgaaggcggccccctggccaaagactgacgctcaggtgcgaaagcgtggggagcaaacaggattagataccctggtagtccacgccgtaaacgatgtcaacttgaagtctgtgccatttgagcgcgggtttcggagctaacgcgttaagttgaccgcctggggagtacggccgcaaggttaaaactcaaatgaattgacgggggcccgcacaagcggtggagcatgtggtttaattcgatgcaacgcgaagaaccttacctacccttgacatagnaagaantntncagagatgnattngtgccttcgggancttncatacaggtgctgcatggctgtcgtcagctcgtgtcgtgagatgttgggttaagtcccgcaacgagcgcaacccttgtccttttttgccagcgggtnatgccgggaactcaaaggagactgccggtgataaaccggaggaaggtggggacgacgtcaagtcatcatggcccttacgggtagggctacacacgtgctacaatggcgcgtacagagggcagcgaacttgcgagagtnagcgaatcccaaaaagcgcgtcgtagtccggatcggagtctgcaactcgactccgtgaagtcggaatcgctagtaatcgtggatcagaatgccacggtgaatacgttcccgggccttgtacacaccgcccgtcacaccatgggagtgggttgctccagaagtagatagcttaaccttcgggagggcgtttaccacggagtgattcatgactggggtg

SEQ ID NO: 2279 - DNA, 1463 bp, Oceanisphaera arctica
attgaacgctggcggcaggcctaacacatgcaagtcgagcggtaacacaagggagcttgctcctgaggtgacgagcggcggacgggtgagtaaggcttgggtatctgcccagtcgtgggggataaccattggaaacgatggctaataccgcatacgccctacgggggaaaggaggggatcttcggacctttcgcgattggatgagcccaagtgagattagctagttggtggggtaatggctcaccaaggcaacgatctctagctggtctgagaggatgaccagccacactgggactgagacacggcccagactcctacgggaggcagcagtggggaatattgcacaatgggggaaaccctgatgcagccatgccgcgtgtgtgaagaaggccttcgggttgtaaagcactttcagtggtgaggaaaggtgaacggcgaatacccgtttactgtgacgttaaccacagaagaagcaccggctaactccgtgccagcagccgcggtaatacggagggtgcaagcgttaatcggaatgactgggcgtaaagcgcacgcaggcggtttgttaagccagatgtgaaagccccgagctcaactcgggaactgcatttggaactggcaaactagagtcttggagaggggggtagaatttccggtgtagcggtgaaatgcgtagagatcggaaggaataccagtggcgaaggcggccccctggccaaagactgacgctcaggtgcgaaagcgtggggagcaaacaggattagataccctggtagtccacgctgtaaacgatgtcaacttgaagtctgtgccttagagcgtgggtttcggagctaacgcgttaagttgaccgcctggggagtacggccgcaaggttaaaactcaaatgaattgacgggggcccgcacaagcggtggagcatgtggtttaattcgatgcaacgcgaagaaccttacctacccttgacatacagcgaactttccagagatggattggtgccttcgggaacgctgatacaggtgctgcatggctgtcgtcagctcgtgtcgtgagatgttgggttaagtcccgcaacgagcgcaacccttatcctttgttgccagcgattcggtcgggaactcaaaggagactgccggtgataaaccggaggaaggtggggacgacgtcaagtcatcatggcccttacgggtagggctacacacgtgctacaatggcgcgtacagagggctgccaaccagcgatggtgagcgaatcccaaaaagcgcgtcgtagtccggatcggagtctgcaactcgactccgtgaagtcggaatcgctagtaatcgtggatcagaatgccacggtgaatacgttcccgggccttgtacacaccgcccgtcacaccatgggagtgggttgctccagaagtagatagcttaaccttcgggggggcgtttaccacggagtgattcatgactggggtg

SEQ ID NO: 2280 - DNA, 1465 bp, Oceanisphaera profunda
attgaacgctggcggcaggcctaacacatgcaagtcgagcggtaacagagagtagcttgctactttgctgacgagcggcggacgggtgagtaatgcttggggatctgcccagtcgtgggggataaccattggaaacgatggctaataccgcatacgccctacgggggaaaggaggggaccttcgggcctttcgcgattggatgaacccaagtgagattagcttgttggtgaggtaatggctcaccaaggcgacgatctctaactggtctgagaggatgaccagtcacactgggactgagacacggcccagactcctacgggaggcagcagtggggaatattgcacaatgggggaaaccctgatgcagccatgccgcgtgtgtgaagaaggccttcgggttgtaaagcactttcagtggtgaggaaaggtgtgagcttaatacgtttacactgtgacgttaaccacagaagaagcaccggctaacttcgtgccagcagccgcggtaatacgaggggtgcaagcgttaatcggaataactgggcgtaaagcgcacgcaggcggtttgttaagccagatgtgaaagccccgagctcaactcgggaactgcatttggaactggcaaactagagtcttgtagaggggggtagaatttccagtgtagcggtgaaatgcgtagagattggaaggaataccagtggcgaaggcggccccctggacaaagactgacgctcatgtgcgaaagcgtggggagcaaacaggattagataccctggtagtccacgctgtaaacgatgtcaacttgaagtctgtgtccttgtgacgtgggtttcggagctaacgcattaagttgaccgcctggggagtacggccgcaaggttaaaactcaaatgaattgacgggggcccgcacaagcggtggagcatgtggtttaattcgatgcaacgcgaagaaccttacctacccttgacatacagcgaattttccagagatggattagtgccttcgggaacgctgatacaggtgctgcatggctgtcgtcagctcgtgtcgtgagatgttgggttaagtcccgcaacgagcgcaacccttatcctttgttgccagcgcgtaatggcgggaactcaagggagactgccggtgataaaccggaggaaggtggggacgacgtcaagtcatcatggcccttacgggtagggctacacacgtgctacaatggcgcgtacagagggaagccaaccagcgatggtgagcggatcccagaaagcgcgtcgtagtccggattggagtctgcaactcgactccatgaagtaggaatcgctagtaatcgtggatcagaatgccacggtgaatacgttcccgggccttgtacacaccgcccgtcacaccatgggagtgggttgcaaaagaagtaggtagcttaaccttcgggagggcgcttaccactttgtgattcacgactggggtg

SEQ ID NO: 2281 - DNA, 1413 bp, Oceanisphaera psychrotolerans
gcgctaccatgcagtcgagcggtaacacaagggagcttgctcctgaggtgacgagcggcggacgggtgagtaaggcttgggtatctgcccagtcgagggggataaccattggaaacgatggctaataccgcatacgccctacgggggaaagcaggggaccttcgggccttgcgcgattggatgagcccaagtgagattagctagttggtgaggtaatggctcaccaaggcgacgatctctagctggtctgagaggatgaccagccacactgggactgagacacggcccagactcctacgggaggcagcagtggggaatattgcacaatgggggaaaccctgatgcagccatgccgcgtgtgtgaagaaggccttcgggttgtaaagcactttcagtggtgaggaaaggtgaacggcgaatacccgtttactgtgacgttaaccacagaagaagcaccggctaactccgtgccagcagccgcggtaatacggagggtgcaagcgttaatcggaatgactgggcgtaaagcgcacgcaggcggtttgttaagccagatgtgaaagccccgagctcaactcgggaactgcatttggaactggcaaactagagtcttgtagaggggggtagaatttccagtgtagcggtgaaatgcgtagagattggaaggaataccagtggcgaaggcggccccctggacaaagactgacgctcaggtgcgaaagcgtggggagcaaacaggattagataccctggtagtccacgctgtaaacgatgtcaacttggagtctgtgccttagagcgtgggttccggagctaacgcattaagttgaccgcctggggagtacggccgcaaggttaaaactcaaatgaattgacgggggcccgcacaagcggtggagcatgtggtttaattcgatgcaacgcgaagaaccttacctacccttgacatacagcgaacttggcagagatgccttggtgccttcgggaacgctgatacaggtgctgcatggctgtcgtcagctcgtgtcgtgagatgttgggttaagtcccgcaacgagcgcaacccttatcctttgttgccagcgattcggtcgggaactcaaaggagactgccggtgataaaccggaggaaggtggggacgacgtcaagtcatcatggcccttacgggtagggctacacacgtgctacaatggcgcgtacagagggcagccaactcgcgagagtgagcgaatcccaaaaagcgcgtcgtagtccggatcggagtctgcaactcgactccgtgaagtcggaatcgctagtaatcgtggatcagaatgccacggtgaatacgttcccgggccttgtacacaccgcccgtcacaccatgggagtgggttgctccagaagtagatagcttaacctgtggtggggcg

SEQ ID NO: 2282 - DNA, 1488 bp, Oceanobacillus caeni
gacgaacgctggcggcgtgcctaatacatgcaagtcgagcgctggaagctaatttcatcccttcgggatgaaattagtggaaagagcggcggacgggtgagtaacacgtgggcaacctacctataagactgggataactcgcggaaacgtgagctaataccggataatactttttattgcataataaggagtttgaaaggcggcgtaagctgtcacttatagatgggcccgcggcgcattagctagttggtgaggtaaaggctcaccaaggcaacgatgcgtagccgacctgagagggtgatcggccacactgggactgagacacggcccagactcctacgggaggcagcagtagggaatcttccgcaatggacgaaagtctgacggaacaacgccgcgtgagtgaagaaggttttcggatcgtaaaactctgttgttagggaagaacaagtcaggtagtaactgacctgaccttgacggtacctaaccagaaagccacggctaactacgtgccagcagccgcggtaatacgtaggtggcaagcgttgtccggatttattgggcgtaaagcgctcgcaggcggtcttttaagtctgatgtgaaagcccacggcttaaccgtggagggtcattggaaactggaggacttgagtgcagaagaggagagtggaattccatgtgtagcggtgaaatgcgtagagatatggaggaacaccagtggcgaaggcgactctctggtctgtaactgacgctgaggagcgaaagcgtgggtagcgaacaggattagataccctggtagtccacgccgtaaacgatgagtgctaggtgttagggggtttccgccccttagtgctgaagttaacgcattaagcactccgcctggggagtacggccgcaaggctgaaactcaaaagaattgacggggacccgcacaagcggtggagcatgtggtttaattcgaagcaacgcgaagaaccttaccaggtcttgacatcctttcgacctccctagagatagggatttcccttcggggacgaaagtgacaggtggtgcatggttgtcgtcagctcgtgtcgtgagatgttgggttaagtcccgcaacgagcgcaacccttgatcttagttgccagcattaagttgggcactctaaggtgactgccggtgacaaaccggaggaaggtggggatgacgtcaaatcatcatgccccttatgacctgggctacacacgtgctacaatggatggtacaaagggcagcgaaaccgcaaggtcaagcaaatcccataaaaccattctcagttcggattgtaggctgcaactcgcctacatgaagccggaatcgctagtaatcgcggatcagcatgccgcggtgaatacgttcccgggtcttgtacacaccgcccgtcacaccacgagagttggtaacacccgaagtcggtgaggtaaccttttggagccagccgccgaaggtgggaccaatgattggggtg

SEQ ID NO: 2283 - DNA, 1487 bp, Oceanobacillus kimchii
gacgaacgctggcggcgtgcctaatacatgcaagtcgagcgcaggaagttatctgatcctcttttagaggtgacgataatggaatgagcggcggacgggtgagtaacacgtaggcaacctgcctgtaagactgggataactcgtggaaacgcgagctaataccggataacacttttcatctcctgatgagaagttgaaaggcggcttttgctgtcacttacagatgggcctgcggcgcattagctagttggtaaggtaatggcttaccaaggcgacgatgcgtagccgacctgagagggtgatcggccacactgggactgagacacggcccagactcctacgggaggcagcagtagggaatcttccgcaatggacgaaagtctgacggagcaacgccgcgtgagtgatgaaggttttcggatcgtaaaactctgttgttagggaagaacaagtgccatagtaactgatggcaccttgacggtacctaaccagaaagccacggctaactacgtgccagcagccgcggtaatacgtaggtggcaagcgttgtccggaattattgggcgtaaagcgctcgcaggcggttctttaagtctgatgtgaaatcttacggctcaaccgtaaacgtgcattggaaactggggaacttgagtgcagaagaggagagtggaattccacgtgtagcggtgaaatgcgtagagatgtggaggaacaccagtggcgaaggcgactctctggtctgtaactgacgctgaggagcgaaagcgtggggagcgaacaggattagataccctggtagtccacgccgtaaacgatgagtgctaggtgttagggggtttccgccccttagtgctgaagttaacgcattaagcactccgcctggggagtacggccgcaaggctgaaactcaaaagaattgacgggggcccgcacaagcggtggagcatgtggtttaattcgaagcaacgcgaagaaccttaccaggtcttgacatcctctgaacactctagagatagagttttcccttcggggacagagtgacaggtggtgcatggttgtcgtcagctcgtgtcgtgagatgttgggttaagtcccgcaacgagcgcaacccttgatcttagttgccagcattcagttgggcactctaaggtgactgccggtgacaaaccggaggaaggtggggacgacgtcaaatcatcatgccccttatgacctgggctacacacgtgctacaatggatggaacaaagggaagcgaacccgcgaggtcaagcaaatcccacaaaaccattctcagttcggattgtaggctgcaactcgcctacatgaagccggaatcgctagtaatcgcggatcagcatgccgcggtgaatacgttcccgggccttgtacacaccgcccgtcacaccacgagagttggtaacacccgaagtcggtgaggtaaccttttggagccagccgccgaaggtgggactaatgattggggtg

SEQ ID NO: 2284 - DNA, 1354 bp, Oceanobacillus profundus
cggacgggtgagtaacacgtgggcaacctgcctgtaagatcgggataactcgcggaaacgtgagctaataccggataacacttttcatctcatggtgagaagataaaagacggtttcggctgtcacttacagatgggcccgcggcgcattagctagttggtgaggtaacggctcaccaaggcgacgatgcgtagccgacctgagagggtgatcggccacactgggactgagacacggcccagactcctacgggaggcagcagtagggaatcttccgcaatggacgaaagtctgacggagcaacgccgcgtgagtgatgaaggttttcggatcgtaaaactctgttgttagggaagaacaagttgggtagtaactgacccaaccttgacggtacctaaccagaaagccacggctaactacgtgccagcagccgcggtaatacgtaggtggcaagcgttgtccggaattattgggcgtaaagcgctcgcaggcggtcttttaagtctgatgtgaaagcccacggcttaaccgtggagggtcattggaaactggaggacttgagtacagaagaggagagtggaattccacgtgtagcggtgaaatgcgtagagatgtggaggaacaccagtggcgaaggcgactctctggtctgtaactgacgctgaggagcgaaagcgtgggtagcgaacaggattagataccctggtagtccacgccgtaaacgatgagtgctaggtgttagggggtttccgccccttagtgctgaagttaacgcattaagcactccgcctggggagtacggccgcaaggctgaaactcaaaagaattgacgggggcccgcacaagcggtggagcatgtggtttaattcgaagcaacgcgaagaaccttaccaggtcttgacatcctctgatacctctagagatagagttttcccttcggggacagagtgacaggtggtgcatggttgtcgtcagctcgtgtcgtgagatgttgggttaagtcccgcaacgagcgcaacccttgatcttagttgccagcattcagttgggcactctaaggtgactgccggtgacaaaccggaggaaggtggggatgacgtcaaatcatcatgccccttatgacctgggctacacacgtgctacaatggatggaacaaagggaagcgaacccgtgaggtcaagccaatcccataaaaccattctcagttcggattgtaggctgcaactcgcctacatgaagccggaatcgctagtaatcgcggatcagcatgccgcggtgaatacgttcccgggccttgtacacaccgcccgtcacaccacgagagttggtaacacccgaagtcggtgaggtaacc

SEQ ID NO: 2285 - DNA, 1462 bp, Oceanococcus atlanticus
attgaacgctggcggcaggcttaacacatgcaagtcgagcggtaacaggggtagcttgctacccgctgacgagcggcggacgggtgagtaatgcctaagaatctgcctagtagtgggggatagcccggggaaacccggattaataccgcatacgccctacgggggaaagcgggggatcttcggacctcgcgctattagatgagcttaggtcggattagcttgttggtgaggtaatggctcaccaaggcgacgatccgtagctggtctgagaggatgatcagccacactgggactgagacacggcccagactcctacgggaggcagcagtggggaatattggacaatgggcgaaagcctgatccagccatgccgcgtgtgtgaagaaggctctagggttgtaaagcactttaagcagggaagatagtgcgttggttaatactcctacgtatggacggtacctgcagaataagcaccggctaactccgtgccagcagccgcggtaatacggagggtgcaagcgttaatcggatttactgggcgtaaagcgtgcgtaggtggtttgttaagtcagttgtgaaatcccagggctcaaccttggaattgcatctgatactggcagactagagatcggtagaggttagtggaattccaggtgtagcggtgaaatgcgtagatatctggaggaacatcgatggcgaaggcaactgactgggcctgatctgacactgaggtacgaaagcgtggggagcaaacaggattagataccctggtagtccacgccgtaaacgatgagaacttgatgttgggatgcttagcatttcagtgtcgaagctaacgcgataagttctccgcctggggagtacgccggcaacggtaaaactcaaaggaattgacgggggcccgcacaagcggtggagcatgtggtttaattcgatgcaacgcgaagaaccttacctgcccttgacatcctcggaacttgtcagagatgacttggtgccttcgggaaccgagtgacaggtgctgcatggctgtcgtcagctcgtgtcgtgagatgttgggttaagtcccgcaacgagcgcaacccctatccttagttgccagcatttggttgggcactctaaggagactgccggtgacaaaccggaggaaggtggggatgacgtcaagtcatcatggcccttatgggcagggctacacacgtgctacaatggtcggtacaaagggttgccaacccgcgagggggagctaatcccataaagccgatcgtagtccggattgcagtctgcaactcgactgcatgaagtcggaatcgctagtaatcgtggatcagcattgccacggtgaatacgttcccgggccttgtacacaccgcccgtcacaccatgggagttggttgcaccagaagtagctagactaaccttcgggaggtcggttaccacggtgtgatcaatgactggggtg

SEQ ID NO: 2286 - DNA, 1458 bp, Oceanospirillum multiglobuliferum
attgaacgctggcggcaggcctaacacatgcaagtcgagcggtagagagaagcttgcttctcttgagagcggcggacgggtgagtaacgcgtaggaatctgcccgatagtgggggatagcccagagaaatttggattaataccgcatacgccctaagggggaaagcaggggatcttcggaccttgcgctatcggatgagcctgcgtgagattagcttgttggtgaggtaatggctcaccaaggcgacgatctctagctggtctgagaggatgatcagccacaccggaactgagacacggtccggactcctacgggaggcagcagtggggaatattggacaatgggcgcaagcctgatccagccatgccgcgtgtgtgaagaaggccttcgggttgtaaagcactttcagtagggaggaaaggttgtaagctaataccttgcagctgtgacgttacctacagaagaaggaccggctaactccgtgccagcagccgcggtaatacggagggtccaagcgttaatcggaattactgggcgtaaagcgcgcgtaggcggcttgttaagccagatgtgaaagccctgggctcaacctaggaattgcatttggaactggctcgctagagtacagaagagggtggtggaatttcctgtgtagcggtgaaatgcgtagatataggaaggaacatcagtggcgaaggcggccacctggtctgatactgacgctgaggtgcgaaagcgtggggagcaaacaggattagataccctggtagtccacgccgtaaacgatgtcaactagccgttgggtcccttgaggacttagtggcgcagctaacgcaataagttgaccgcctggggagtacggtcgcaagattaaaactcaaatgaattgacgggggcccgcacaagcggtggagcatgtggtttaattcgaagcaacgcgaagaaccttacctactcttgacatccagagaattcggcagagatgccttagtgccttcgggagctctgagacaggtgctgcatggctgtcgtcagctcgtgttgtgaaatgttgggttaagtcccgtaacgagcgcaacccttatccttatttgccagcacttcgggtgggaactctaaggagactgccggtgacaaaccggaggaaggtggggacgacgtcaagtcatcatggcccttacgagtagggctacacacgtgctacaatggccggtacagagggttgcaataccgcgaggtggagctaatctcacaaaaccggtcgtagtccggattggagtctgcaactcgactccatgaagtcggaatcgctagtaatcgtgaatcagaatgtcacggtgaatacgttcccgggccttgtacacaccgcccgtcacaccatgggagtgggttgctccagaagtggctagtctaaccttcggggggacggtcaccacggagtgattcatgactggggtg

SEQ ID NO: 2287 - DNA, 1405 bp, Ochrobactrum cytisi; identical to SEQ ID NO: 250

SEQ ID NO: 2288 - DNA, 1406 bp, Ochrobactrum gallinifaecis
aacgaacgctggcggcaggcttaacacatgcaagtcgagcgcccttttcggagggagcggcagacgggtgagtaacgcgtgggaatctaccaatcactagggaataactcagggaaacttgtgctaataccctatacgaccgagaggtgaaagatttatcggtgattgatgagcccgcgttggattagctagttggtggggtaaaggcctaccaaggcgacgatccatagctggtctgagaggatgatcagccacactgggactgagacacggcccagactcctacgggaggcagcagtggggaatattggacaatgggcgcaagcctgatccagccatgccgcgtgagtgatgacggtcttaggattgtaaagctctttcaccggtgaagataatgacggtaaccggagaagaagccccggctaacttcgtgccagcagccgcggtaatacgaagggggctagcgttgttcggatttactgggcgtaaagcgcacgtaggcggattggtcagttaggggtgaaatcccagggcttaaccctggaactgcctttaatactgccagtcttgagtatggtagaggtgagtggaattccgagtgtagaggtgaaattcgtagatattcggaggaacaccagtggcgaaggcggctcactggaccattactgacgctgaggtgcgaaagcgtggggagcaaacaggattagataccctggtagtccacgccgtaaacgatgaatgttagccgtcgggggatttatctttcggtggcgcagctaacgcattaaacattccgcctggggagtacggtcgcaagattaaaactcaaaggaattgacgggggcccgcacaagcggtggagcatgtggtttaattcgaagcaacgcgcagaaccttaccagcccttgacataccggtcgcggacacagagatgtgtctttcagtttggctggaccggatacaggtgctgcatggctgtcgtcagctcgtgtcgtgagatgttgggttaagtcccgcaacgagcgcaaccctcgcctttagttgccatcatttagttgggcactctaaagggactgccagtgataagctggaggaaggtggggatgacgtcaagtcctcatggcccttacgggctgggctacacacgtgctacaatggtggtgacagtgggcagcgaacacgcgagtgtaagctaatctccaaaagccatctcagttcggattgcactctgcaactcgagtgcatgaagttggaatcgctagtaatcgcggatcagcatgccgcggtgaatacgttcccgggccttgtacacaccgcccgtcacaccatgggagttggttttacccgaaggcgctgtgctaaccgcaaggaggcaggcgaccacggtagggtcagcgactggggtg

SEQ ID NO: 2289 - DNA, 1404 bp, Ochrobactrum grignonense
aacgaacgctggcggcaggcttaacacatgcaagtcgagcgcctcgcaagaggagcggcagacgggtgagtaacgcgtgggaatctaccttttgctacggaataactcagggaaacttgtgctaataccgtatgtgcccttttggggaaagatttatcggcaaaggatgagcccgcgttggattagctagttggtagggtaatggcctaccaaggcgacgatccatagctggtctgagaggatgatcagccacactgggactgagacacggcccagactcctacgggaggcagcagtggggaatattggacaatgggcgcaagcctgatccagccatgccgcgtgagtgatgaaggccctagggttgtaaagctctttcaccggtgaagataatgacggtaaccggagaagaagccccggctaacttcgtgccagcagccgcggtaatacgaagggggctagcgttgttcggatttactgggcgtaaagcgcacgtaggcggacttttaagtcaggggtgaaatcccggggctcaaccccggaactgcctttgatactggaagtcttgagtatggtagaggtgagtggaattccgagtgtagaggtgaaattcgtagatattcggaggaacaccagtggcgaaggcggctcactggaccattactgacgctgaggtgcgaaagcgtggggagcaaacaggattagataccctggtagtccacgccgtaaacgatgaatgttagccgtcggggagtttactcttcggtggcgcagctaacgcattaaacattccgcctggggagtacggtcgcaagattaaaactcaaaggaattgacgggggcccgcacaagcggtggagcatgtggtttaattcgaagcaacgcgcagaaccttaccagcccttgacataccggtcgcggacacagagatgtgtctttcagttcggctggaccggatacaggtgctgcatggctgtcgtcagctcgtgtcgtgagatgttgggttaagtcccgcaacgagcgcaaccctcgcctttagttgccatcatttagttgggcactctaaagggactgccagtgataagctggaggaaggtggggatgacgtcaagtcctcatggcccttacgggctgggctacacacgtgctacaatggtggtgacagtgggcagcaagcacgcgagtgtgagctaatctccaaaagccatctcagttcggattgcactctgcaactcgagtgcatgaagttggaatcgctagtaatcgcggatcagcatgccgcggtgaatacgttcccgggccttgtacacaccgcccgtcacaccatgggagttggttctgcccgaaggcactgtgctaaccgtaaggaggcaggtgaccacggtagggtcagcgactggggtg

SEQ ID NO: 2290 - DNA, 1388 bp, Ochrobactrum haematophilum
caggcttaacacatgcaagtcgagcgccccgcaaggggagcggcagacgggtgagtaacgcgtgggaatctaccatttgctacggaacaactccgggaaactggagctaataccgtatgtgccctaacggggaaagatttatcggcaaatgatgagcccgcgttggattagctagttggtggggtaaaggcctaccaaggcgacgatccatagctggtctgagaggatgatcagccacactgggactgagacacggcccagactcctacgggaggcagcagtggggaatattggacaatgggcgcaagcctgatccagccatgccgcgtgagtgatgaaggccctagggttgtaaagctctttcaccggtgaagataatgacggtaaccggagaagaagccccggctaacttcgtgccagcagccgcggtaatacgaagggggctagcgttgttcggatttactgggcgtaaagcgcacgtaggcggacttttaagtcaggggtgaaatcccggggctcaaccccggaactgcctttgatactggaagtcttgagtatggtagaggtgagtggaattccgagtgtagaggtgaaattcgtagatattcggaggaacaccagtggcgaaggcggctcactggaccattactgacgctgaggtgcgaaagcgtggggagcaaacaggattagataccctggtagtccacgccgtaaacgatgaatgttagccgtcggggagtttactcttcggtggcgcagctaacgcattaaacattccgcctggggagtacggtcgcaagattaaaactcaaaggaattgacgggggcccgcacaagcggtggagcatgtggtttaattcgaagcaacgcgcagaaccttaccagcccttgacataccggtcgcggacacagagatgtgtctttcagttcggctggaccggatacaggtgctgcatggctgtcgtcagctcgtgtcgtgagatgttgggttaagtcccgcaacgagcgcaaccctcgcccttagttgccagcatttagttgggcactctaaggggactgccggtgataagccgagaggaaggtggggatgacgtcaagtcctcatggcccttacgggctgggctacacacgtgctacaatggtggtgacagtgggcagcgagcacgcgagtgtgagctaatctccaaaagccatctcagttcggattgcactctgcaactcgagtgcatgaagttggaatcgctagtaatcgcggatcagaatgccgcggtgaatacgttcccgggccttgtacacaccgcccgtcacaccatgggagttggttttacccgaaggcgctgtgctaaccgcaaggaggcaggcgaccacggtagggtcagcgactgggg

SEQ ID NO: 2291 - DNA, 1407 bp, Ochrobactrum intermedium
aacgaacgctggcggcaggcttaacacatgcaagtcgagcgccccgcaaggggagcggcagacgggtgagtaacgcgtgggaacgtaccatttgctacggaataactcagggaaacttgtgctaataccgtatgtgcccgaaaggggaaagatttatcggcaaatgatcggcccgcgttggattagctagttggtggggtaaaggcctaccaaggcgacgatccatagctggtctgagaggatgatcagccacactgggactgagacacggcccagactcctacgggaggcagcagtggggaatattggacaatgggcgcaagcctgatccagccatgccgcgtgagtgatgaaggccctagggttgtaaagctctttcaccggtgaagataatgacggtaaccggagaagaagccccggctaacttcgtgccagcagccgcggtaatacgaagggggctagcgttgttcggatttactgggcgtaaagcgcacgtaggcgggctaataagtcaggggtgaaatcccggggctcaaccccggaactgcctttgatactgttagtcttgagtatggtagaggtgagtggaattccgagtgtagaggtgaaattcgtagatattcggaggaacaccagtggcgaaggcggctcactggaccattactgacgctgaggtgcgaaagcgtggggagcaaacaggattagataccctggtagtccacgccgtaaacgatgaatgttagccgttggggagtttactcttcggtggcgcagctaacgcattaaacattccgcctggggagtacggtcgcaagattaaaactcaaaggaattgacgggggcccgcacaagcggtggagcatgtggtttaattcgaagcaacgcgcagaaccttaccagcccttgacatcccgatcgcggttagtggagacactatccttcagttcggctggatcggagacaggtgctgcatggctgtcgtcagctcgtgtcgtgagatgttgggttaagtcccgcaacgagcgcaaccctcgcccttagttgccagcattcagttgggcactctaaggggactgccggtgataagccgagaggaaggtggggatgacgtcaagtcctcatggcccttacgggctgggctacacacgtgctacaatggtggtgacagtgggcagcgagcacgcgagtgtgagctaatctccaaaagccatctcagttcggattgcactctgcaactcgagtgcatgaagttggaatcgctagtaatcgcggatcagcatgccgcggtgaatacgttcccgggccttgtacacaccgcccgtcacaccatgggagttggttttacccgaaggcgctgtgctaaccgcaaggaggcaggcgaccacggtagggtcagcgactggggtg

SEQ ID NO: 2292 - DNA, 1405 bp, Ochrobactrum lupini; identical to SEQ ID NO: 250

SEQ ID NO: 2293 - DNA, 1409 bp, Ochrobactrum oryzae
aacgaacgctggcggcaggcttaacacatgcaagtcgagcgcccttttcggagggagcggcagacgggtgagtaacgcgtgggaatctacctatctctagggaataactcagggaaacttgtgctaataccctatacgtccttcgggagaaagatttatcggagatggatgagcccgcgttggattagctagttggtggggtaaaggcctaccaaggcgacgatccatagctggtctgagaggatgatcagccacactgggactgagacacggcccagactcctacgggaggcagcagtggggaatattggacaatgggcgcaagcctgatccagccatgccgcgtgagtgatgaaggccctagggttgtaaagctctttcaccggtgaagataatgacggtaaccggagaagaagccccggctaacttcgtgccagcagccgcggtaatacgaagggggctagcgttgttcggatttactgggcgtaaagcgcacgtaggcggattggtcagttaggggtgaaatcccagggctcaaccctggaactgcctttaatactgccagtcttgagtatggaagaggtgagtggaattccgagtgtagaggtgaaattcgtagatattcggaggaacaccagtggcgaaggcggctcactggtccattactgacgctgaggtgcgaaagcgtggggagcaaacaggattagataccctggtagtccacgccgtaaacgatgaatgttagccgttggggagtttactcttcggtggcgcagctaacgcattaaacattccgcctggggagtacggtcgcaagattaaaactcaaaggaattgacgggggcccgcacaagcggtggagcatgtggtttaattcgaagcaacgcgcagaaccttaccagcccttgacatcccgatcgcggttagtggagacactatccttcagtttggctggatcggagacaggtgctgcatggctgtcgtcagctcgtgtcgtgagatgttgggttaagtcccgcaacgagcgcaaccctcgcccttagttgccagcattgagttgggcactctaaggggactgccggtgataagccgagaggaaggtggggatgacgtcaagtcctcatggcccttacgggctgggctacacacgtgctacaatggtggtgacagtgggcagcgagcacgcgagtgtgagctaatctccaaaagccatctcagttcggattgcactctgcaactcgagtgcatgaagttggaatcgctagtaatcgcggatcagcatgccgcggtgaatacgttcccgggccttgtacacaccgcccgtcacaccatgggagttggttttacccgaaggcgctgtgctaaccgcaaggaggcaggcgaccacggtagggtcagcgactggggtg

SEQ ID NO: 2294 - DNA, 1386 bp, Ochrobactrum pecoris
caggcttaacacatgcaagtcgaacggtctcttcggaggcagtggcagacgggtgagtaacgcgtgggaatctaccttttgctacggaacaacagttggaaacgactgctaataccgtatgtgcccgaaaggggaaagatttatcggcaaaggatgagcccgcgttggattagctagttggtagggtaaaggcctaccaaggcgacgatccatagctggtctgagaggatgatcagccacactgggactgagacacggcccagactcctacgggaggcagcagtggggaatattggacaatgggcgcaagcctgatccagccatgccgcgtgagtgatgaaggccctagggttgtaaagctctttcaccggtgaagataatgacggtaaccggagaagaagccccggctaacttcgtgccagcagccgcggtaatacgaagggggctagcgttgttcggatttactgggcgtaaagcgcacgtaggcggacttttaagtcaggggtgaaatcccggggctcaaccccggaactgcctttgatactggaagtcttgagtatggtagaggtgagtggaattccgagtgtagaggtgaaattcgtagatattcggaggaacaccagtggcgaaggcggctcactggaccattactgacgctgaggtgcgaaagcgtggggagcaaacaggattagataccctggtagtccacgccgtaaacgatgaatgttagccgttggggagtttactcttcggtggcgcagctaacgcattaaacattccgcctggggagtacggtcgcaagattaaaactcaaaggaattgacgggggcccgcacaagcggtggagcatgtggtttaattcgaagcaacgcgcagaaccttaccagcccttgacataccggtcgcggacacagagatgtgtctttcagttaggctggaccggatacaggtgctgcatggctgtcgtcagctcgtgtcgtgagatgttgggttaagtcccgcaacgagcgcaaccctcgcccttagttgccagcatttagttgggcactctaaggggactgccagtgataagctggaggaaggtggggatgacgtcaagtcctcatggcccttacgggctgggctacacacgtgctacaatggtggtgacagtgggcagcgagcacgcgagtgtgagctaatctccaaaagccatctcagttcggatcgcactctgcaactcgagtgcgtgaagttggaatcgctagtaatcgcggatcagcatgccgcggtgaatacgttcccgggccttgtacacaccgcccgtcacaccatgggagttggttttacccgaaggcgctgtgctaaccgcaaggaggcaggcgaccacggtagggtcagcgactg

SEQ ID NO: 2295 - DNA, 1404 bp, Ochrobactrum pseudogrignonense
aacgaacgctggcggcaggcttaacacatgcaagtcgagcgccccgcaaggggagcggcagacgggtgagtaacgcgtgggaatctaccttttgctacggaataactcagggaaacttgtgctaataccgtatgtgcccttcgggggaaagatttatcggcaaaggatgagcccgcgttggattagctagttggtggggtaaaggcccaccaaggcgacgatccatagctggtctgagaggatgatcagccacactgggactgagacacggcccagactcctacgggaggcagcagtggggaatattggacaatgggcgcaagcctgatccagccatgccgcgtgagtgatgaaggccctagggttgtaaagctctttcaccggtgaagataatgacggtaaccggagaagaagccccggctaacttcgtgccagcagccgcggtaatacgaagggggctagcgttgttcggatttactgggcgtaaagcgcacgtaggcggacttttaagtcaggggtgaaatcccagagctcaactctggaactgcctttgatactggaagtcttgagtatggtagaggtgagtggaattccgagtgtagaggtgaaattcgtagatattcggaggaacaccagtggcgaaggcggctcactggaccattactgacgctgaggtgcgaaagcgtggggagcaaacaggattagataccctggtagtccacgccgtaaacgatgaatgttagccgtcggggtgtttacacttcggtggcgcagctaacgcattaaacattccgcctggggagtacggtcgcaagattaaaactcaaaggaattgacgggggcccgcacaagcggtggagcatgtggtttaattcgaagcaacgcgcagaaccttaccagcccttgacataccggtcgcggacacagagatgtgtctttcagttcggctggaccggatacaggtgctgcatggctgtcgtcagctcgtgtcgtgagatgttgggttaagtcccgcaacgagcgcaaccctcgcctttagttgccatcatttagttgggcactctaaagggactgccagtgataagctggaggaaggtggggatgacgtcaagtcctcatggcccttacgggctgggctacacacgtgctacaatggtggtgacagtgggcagcaagcacgcgagtgtgagctaatctccaaaagccatctcagttcggattgcactctgcaactcgagtgcatgaagttggaatcgctagtaatcgcggatcagcatgccgcggtgaatacgttcccgggccttgtacacaccgcccgtcacaccatgggagttggttctgcccgaaggcactgtgctaaccgtaaggaggcaggtgaccacggtagggtcagcgactggggtg

SEQ ID NO: 2296 - DNA, 1404 bp, Ochrobactrum rhizosphaerae
aacgaacgctggcggcaggcttaacacatgcaagtcgagcgccccgcaaggggagcggcagacgggtgagtaacgcgtgggaatctaccttttgctacggaacaacagttggaaacgactgctaataccgtatgtgcccttcgggggaaagatttatcggcaaaggatgagcccgcgttggattagctagttggtgaggtaaaggctcaccaaggcgacgatccatagctggtctgagaggatgatcagccacactgggactgagacacggcccagactcctacgggaggcagcagtggggaatattggacaatgggcgcaagcctgatccagccatgccgcgtgagtgatgaaggccctagggttgtaaagctctttcaccggtgaagataatgacggtaaccggagaagaagccccggctaacttcgtgccagcagccgcggtaatacgaagggggctagcgttgttcggatttactgggcgtaaagcgcacgtaggcggatttttaagtcaggggtgaaatcccggggctcaaccccggaactgcctttgatactggaagtcttgagtatggtagaggtgagtggaattccgagtgtagaggtgaaattcgtagatattcggaggaacaccagtggcgaaggcggctcactggaccattactgacgctgaggtgcgaaagcgtggggagcaaacaggattagataccctggtagtccacgccgtaaacgatgaatgttagccgtcggggggtttacctttcggtggcgcagctaacgcattaaacattccgcctggggagtacggtcgcaagattaaaactcaaaggaattgacgggggcccgcacaagcggtggagcatgtggtttaattcgaagcaacgcgcagaaccttaccagcccttgacataccggtcgcggacacagagatgtgtctttcagttcggctggaccggatacaggtgctgcatggctgtcgtcagctcgtgtcgtgagatgttgggttaagtcccgcaacgagcgcaaccctcgcctttagttgccagcatttagttgggcactctaaagggactgccagtgataagctggaggaaggtggggatgacgtcaagtcctcatggcccttacgggctgggctacacacgtgctacaatggtggtgacagtgggcagcaagcacgcgagtgtgagctaatctccaaaagccatctcagttcggattgcactctgcaactcgagtgcatgaagttggaatcgctagtaatcgcggatcagcatgccgcggtgaatacgttcccgggccttgtacacaccgcccgtcacaccatgggagttggttttacccgaaggcactgtgctaaccgcaaggaggcaggtgaccacggtagggtcagcgactggggtg

SEQ ID NO: 2297 - DNA, 1404 bp, Ochrobactrum thiophenivorans
aacgaacgctggcggcaggcttaacacatgcaagtcgagcgccccgcaaggggagcggcagacgggtgagtaacgcgtgggaatctaccttttgctacggaataactcagggaaacttgtgctaataccgtatgtgcccttttggggaaagatttatcggcaaaggatgagcccgcgttggattagctagttggtgaggtaaaggctcaccaaggcgacgatccatagctggtctgagaggatgatcagccacactgggactgagacacggcccagactcctacgggaggcagcagtggggaatattggacaatgggcgcaagcctgatccagccatgccgcgtgagtgatgaaggccctagggttgtaaagctctttcaccggtgaagataatgacggtaaccggagaagaagccccggctaacttcgtgccagcagccgcggtaatacgaagggggctagcgttgttcggatttactgggcgtaaagcgcacgtaggcggacttttaagtcaggggtgaaatcccggggctcaaccccggaactgcctttgatactggaagtcttgagtatggtagaggtgagtggaattccgagtgtagaggtgaaattcgtagatattcggaggaacaccagtggcgaaggcggctcactggaccattactgacgctgaggtgcgaaagcgtggggagcaaacaggattagataccctggtagtccacgccgtaaacgatgaatgttagccgtcggggtgtttacacttcggtggcgcagctaacgcattaaacattccgcctggggagtacggtcgcaagattaaaactcaaaggaattgacgggggcccgcacaagcggtggagcatgtggtttaattcgaagcaacgcgcagaaccttaccagcccttgacataccggtcgcggacacagagatgtgtctttcagtttggctggaccggatacaggtgctgcatggctgtcgtcagctcgtgtcgtgagatgttgggttaagtcccgcaacgagcgcaaccctcgcctttagttgccatcatttagttgggcactctaaagggactgccagtgataagctggaggaaggtggggatgacgtcaagtcctcatggcccttacgggctgggctacacacgtgctacaatggtggtgacagtgggcagcaagcacgcgagtgtgagctaatctccaaaagccatctcagttcggattgcactctgcaactcgagtgcatgaagttggaatcgctagtaatcgcggatcagcatgccgcggtgaatacgttcccgggccttgtacacaccgcccgtcacaccatgggagttggttctgcccgaaggcactgtgctaaccgcaaggaggcaggtgaccacggtagggtcagcgactggggtg

SEQ ID NO: 2298 - DNA, 1258 bp, Okeania hirsuta
aggtctgggacaacagaaggaaacttccgctaatcccggatgagcctaatggtaaaagataaattgcctggagatgagctcgcgtctgactagctagttggtggggtaaaagcctaccaaggcaacgatcagtagctggtctgagaggatgagcagccacactgggactgagacacggcccagactcctacgggaggcagcagtggggaattttccgcaatgggcgaaagcctgacggagcaagaccgcgtgggggaggaaggctttagggttgtaaaccccttttctttgggaagaagttctgacggtaccaaaggaatcagcctcggctaactccgtgccagcagccgcggtaatacggaggaggcaagcgttatccggaatgattgggcgtaaagcgtccgcaggtggccatgtaagtctgctgtcaaaacccagggctcaactctggtcaggcagtggaaactacaaagctagagtctggtaggggcaaagggaattcccggcgtagcggtgaaatgcgtagatttcgggaagaacatcggtggcgaaagcgctttgctagaccagaactgacactcagggacgaaagctaggggagcgaatgggattagataccccggtagtcctagccgtaaacgatggatactaggtgttgcctgtatcgacccaggcagtgccgtagctaacgcgttaagtatcccgcctggggagtacgcacgcaagtgtgaaactcaaaggaattgacgggggcccgcacaagcggtggagtatgtggtttaattcgatgcaacgcgaagaaccttaccaggactcgacatgtcgcgaatctcagggaaacttgagagtgccttcgggagcgcgaacacaggtggtgcatggctgtcgtcagctcgtgtcgtgagatgttgggttaagtcccgcaacgagcgcaaccctcgtttttagttgccatcattaagttgggcactctaaagagactgccggtgacaaaccggaggaaggtggggatgacgtcaagtcagcatgccccttacgtcctgggctacacacgtactacaatggtctggacagagggtagccaacccgcgagggcgagccaatctcaaaaaccaggcctcagttcagattgcaggctgcaactcgcctgcatgaaggaggaatcgctagtaatcgcaggtcagcatactgcggtgaatccgttcccgggccttgtacacaccgcccgtcacaccatggaagttggccacgcccgaag

SEQ ID NO: 2299 - DNA, 1469 bp, Oleiagrimonas soli
attgaacgctggcggcatgcctaacacatgcaagtcgaacggcagcatgagagagcttgctctcttgatggcgagtggcggacgggtgagtaaggcatcgggatctaccctgtcgtgggggacaacctagggaaacttaggctaataccgcatacgtcctacgggagaaagtgggggacccttcggggcctcacgcgattggatgaaccgatgttcgattagctagttggtggggtaatggcctaccaaggcgacgatcgatagctggtctgagaggatgatcagccacactgggactgagacacggcccagactcctacgggaggcagcagtggggaatattggacaatgggcgaaagcctgatccagcaatgccgcgtgtgtgaagaaggccctcgggttgtaaagcacttttatcaggaacgaaataccaccggccaatacccggtggggctgacggtacctgaggaataagcaccggctaactccgtgccagcagccgcggtaatacggagggtgcaagcgttaatcggaattactgggcgtaaagcgtgcgtaggcggttcgttaagtctgctgtgaaagccccgggctcaacctgggaatggcagtggatactggcgagctagagtgtggtagaggaaggtggaattcccggtgtagcggtgaaatgcgtagagatcgggaggaacatcagtggcgaaggcggccttctggaccaacactgacgctcaggcacgaaagcgtggggagcaaacaggattagataccctggtagtccacgccctaaacgatgcgaactggacgttggccacacttcggtggtcagtgtcgaagctaacgcgttaagttcgccgcctggggagtacggtcgcaagactgaaactcaaaggaattgacgggggcccgcacaagcggtggagtatgtggtttaattcgatgcaacgcgaagaaccttacctggtcttgacatgtccggaacttggcagaaatgccttggtgccttcgggaaccggaacacaggtgctgcatggctgtcgtcagctcgtgtcgtgagatgttgggttaagtcccgcaacgagcgcaacccttgtccttagttgccagcacgtaatggtgggaactctagggagactgccggtgacaaaccggaggaaggtggggatgacgtcaagtcatcatggcccttacgaccagggctacacacgtactacaatggtcggtacagagggttgccaagccgcgaggtggagccaatcccacaaagccgatcccagtccggatcgcagtctgcaactcgactgcgtgaagtcggaatcgctagtaatcgtggatcagctatgccacggtgaatacgttcccgggccttgtacacaccgcccgtcacaccatgggagtgggctgctccagaagccgttagtctaaccttcgggaggacgacgaccacggagtggttcatgactggggtg

SEQ ID NO: 2300 - DNA, 1455 bp, Oleibacter marinus
attgaacgctggcggcaggcttaacacatgcaagtcgagcggtaacagagatagcttgctatctgctgacgagcggcggacgggtgagtaacgcgtaggaaactacccggtagtgggggacaaccattggaaacgatggctaataccgcatacgctctacggaggaaagggggcttcggctctcgctatcggatgtgcctgcgtgagattagctagttggtggggtaaaggcctaccaaggcgacgatctctagctggtctgagaggatgatcagccacactgggactgagacacggcccagactcctacgggaggcagcagtggggaatattggacaatgggcgcaagcctgatccagccatgccgcgtgtgtgaagaaggctttcgggttgtaaagcactttcatcagtgaggaaagggtagtagttaatacctgctatctgtgacgttaactgaagaagaagcaccggctaactccgtgccagcagccgcggtaatacggagggtgcaagcgttaatcggaattactgggcgtaaagcgcgcgtaggttgtttgttaagcgagatgtgaaagccccgggcttaacctgggaactgcatttcgaactggcagactagagtacagtagagggtggcggaatttcctgtgtagcggtgaaatgcgtagagatgggaaggaacatcagtggcgaaggcggccacctggactgatactgacactgaggtgcgaaagcgtggggagcaaacaggattagataccctggtagtccacgccgtaaacgatgtctactagttgtcgggagacttgatcttttggtaacgaagctaacgcgataagtagaccgcctggggagtacggccgcaaggttaaaactcaaatgaattgacgggggcccgcacaagcggtggagcatgtggtttaattcgaagcaacgcgaagaaccttacctactcttgacatcctgcgaacttggtagagataccttggtgccttcgggaacgcagagacaggtgctgcatggctgtcgtcagctcgtgttgtgaaatgttgggttaagtcccgtaacgagcgcaacccttgtccttagttgccatcatttagttggggactctaaggagactgccggtgacaaaccggaggaaggcggggacgacgtcaagtcatcatggcccttacgagtagggctacacacgtgctacaatggcaagtacagagggccgcgaagccgcgaggtggagctaatctcacaaagcttgtcgtagtccggattggagtctgcaactcgactccatgaagtcggaatcgctagtaatcgcaaatcagaatgttgcggtgaatacgttcccgggccttgtacacaccgcccgtcacaccatgggagtgggttgctccagaagtagatagcttaaccttcgggagagcgtttaccacggagtgattcatgactggggtg

SEQ ID NO: 2301 - DNA, 1452 bp, Oleiphilus messinensis
attgaacgctggcggcaggcctaacacatgcaagtcgagcggtaacgaccacttcggtggggcgacgagcggcggacgggtgagtaacgcgtaggaatctacccagcagagggggatagcccggggaaacccggattaataccgcatattctctaaggaggaaagggggcttcggctctcgctgttggatgagcctgcgtaggattagctagttggtggggtaaaggcctaccaaggcgacgatctttagctggtctgagaggatgatcagccacactgggactgagacacggcccagactcctacgggaggcagcagtggggaatattgcacaatgggggaaaccctgatgcagccatgccgcgtgtgtgaagaaggccttcgggttgtaaagcactttcagtggtgaggaaggccataaggttaatacccttatggattgacgttaaccacagaagaagcaccggctaactccgtgccagcagccgcggtaatacggagggtgcaagcgttaatcggaattactgggcgtaaagcgcgcgtaggcggtttgctaagcgagatgtgaaagccccgggcttaacctgggaactgcatttcgaactggcagactagagtacagtagagggtggtggaatttccagtgtagcggtgaaatgcgtagagattggaaggaacatcagtggcgaaggcggccacctggactgatactgacgctgaggtgcgaaagcgtggggagcaaacaggattagataccctggtagtccacgccgtaaacgatgagaactagccgttgggatacttgatatcttagtggcgcagctaacgcgataagttctccgcctggggagtacggccgcaaggttaaaactcaaatgaattgacgggggcccgcacaagcggtggagcatgtggtttaattcgatgcaacgcgaagaaccttacctggccttgacatcctgcgaactttcgagagatcgattggtgccttcgggaacgcagagacaggtgctgcatggctgtcgtcagctcgtgttgtgaaatgttgggttaagtcccgtaacgagcgcaacccttatccctatttgccagcacttcgggtgggaactctagggagactgccggtgacaaaccggaggaaggtggggacgacgtcaagtcatcatggcccttacggccagggctacacacgtgctacaatgggacatacagagggtcgcgaagccgcgaggtggagccaatctcagaaaatgtctcgtagtccggattggagtctgcaactcgactccatgaagtcggaatcgctagtaatcgcgaatcagaatgtcgcggtgaatacgttcccgggccttgtacacaccgcccgtcacaccatgggagtggattgcaccagaagtaggtagcttaaccttcgggagggcgcttaccacggtgtggttcatgactggggtg

SEQ ID NO: 2302 - DNA, 1461 bp, Oleispira antarctica
attgaacgctggcggcaggcttaacacatgcaagtcgagcggaaacgaaggtagcttgctaccagacgtcgagcggcggacgggtgagtaatgcttaggaatctaccgagtagtgggggatagccattggaaacgatgattaataccgcatatatcctacgggggaaagcaggggaccttcgggccttgcgctattcgatgagcctgagtgagattagctagttggtggggtaaaggcctaccaaggcgacgatctctagctggtctgagaggatgatcagccacactgggactgagacacggcccagactcctacgggaggcagcagtggggaatattgcacaatggacgaaagtctgatgcagccatgccgcgtgtgtgaagaaggccttcgggttgtaaagcactttcagcgaggaggaaaggtcagtaagtaatatttgctggctgtgacgttactcgcagaagaagcaccggctaatttagtgccagcagccgcggtaatactaaaggtgcaagcgttaatcggaattactgggcgtaaagcgcgcgtaggtggtttgttaagttggatgtgaaagcccagggctcaaccttggaactgcattcaaaactgactcactagagtacgagagaggttagtggaatttcctgtgtagcggtgaaatgcgtagagatgggaaggaacaccagtggcgaaggcgactgactggctcgatactgacactgaggtgcgaaagcgtggggagcaaacgggattagataccccggtagtccacgccgtaaacgatgtctactagccgttggaggacttgatcctttagtggcgcagctaacgcgataagtagaccgcctggggagtacggtcgcaagattaaaactcaaatgaattgacgggggcccgcacaagcggtggagcatgtggtttaattcgaagcaacgcgaagaaccttacctactcttgacatccagtgaacttttgagagatcaattggtgccttcgggaacactgagacaggtgctgcatggctgtcgtcagctcgtgttgtgaaatgttgggttaagtcccgtaacgagcgcaacccttgtccttagttaccatcattaagttggggactctaaggagactgccggtgacaaaccggaggaaggcggggacgacgtcaagtcatcatggcccttacgagtagggctacacacgtgctacaatggcatgtacaaagggttgccaagccgcgaggtggagctaatcccataaagcatgtcgtagtccggattggagtctgcaactcgactccatgaagtcggaatcgctagtaatcgtgaatcagaatgtcacggtgaatacgttcccgggccttgtacacaccgcccgtcacaccatgggagtgggttgctccagaagtagatagcttaaccttcgggagggcgtttaccacggagtgattcatgactggggtg

SEQ ID NO: 2303 - DNA, 1459 bp, Oligella ureolytica
attgaacgctagcgggatgctttacacatgcaagtcgaacggcagcacagaggaacttgttccttgggtggcgagtggcggacgggtgagtaatgtatcggaacgtgcccagtagtgggggataactacgcgaaagcgtggctaataccgcatattctctacggaggaaagggggggatcatttgacctctcgctattggagcggccgatattagattagctagttggtggggtaacggcctaccaaggcagtgatctatagctggtttgagaggacgaccagccacactgggactgagacacggcccagactcctacgggaggcagcagtggggaattttcgacaatggggggaaccctgatcgagccatcccgcgtgtgggacgaaggccttcgggttgtaaaccacttttctcaacgaagaaaagtcttaggctaataccttaagatgctgacggtagttgaggaataagcaccggctaactatgtgccagcagccgcggtaatacatagggtgcaagcgttaatcggaattactgggcgtaaagggtgcgcaggcggcttggaaagaacggtgtgaaatcccggggctcaacctcggaactgcactattaactatcaagctagagtatgtcagaggggggtggaattccgcgtgtagcagtgaaatgcgtagatatgcggaggaacaccaatggcgaaggcagccccctgggataatactgacgctcaggcacgaaagcgtgggtagcaaacaggattagataccctggtagtccacgccctaaacgatgtcaactagctgttgggccggttacggcttagtagcgcagctaacgcgtgaagttgaccgcctggggactacggtcgcaagactaaaactcaaaggaattgacggggacccgcacaagcggtggatgatgtggattaattcgatgcaacgcgaaaaaccttacctacccttgacatgcctggaagctttaagagattaaagtgtgctcgcaagagaaccggtgcacaggtgctgcatggctgtcgtcagctcgtgtcgtgagatgttgggttaagtcccgcaacgagcgcaacccttgtcattagttgctacgtaagagcactctagtgagactgccggtgacaaaccggaggaaggtggggatgacgtcaagtcctcatggcccttatgggtagggcttcacacgtcatacaatggtcgggacagagggttgccaagccgcgaggtggagctaatctcttaaacccgatcgtagtccggattgcaggctgcaactcgcctgcatgaagtcggaatcgctagtaatcgcagatcagaatgctgcggtgaatacgttcccgggtcttgtacacaccgcccgtcacaccatgggagtgggttttaccagaagtagttagtctaaccgcaagggggacgattaccacggtaggattcatgactggggtg

SEQ ID NO: 2304 - DNA, 1411 bp, Oligotropha carboxidovorans
agcgaacgctggcggcaggcttaacacatgcaagtcgaacgggcgtagcaatacgtcagtggcagacgggtgagtatcgcgtgggaacgtaccttttggttcggaacaacacagggaaacttgtgctaataccgaataagcccttacggggaaagatttatcgccgaaagatcggcccgcgtctgattagcttgttggtgaggtaacggctcaccaaggcgacgatcagtagctggtctgagaggatgatcagccacattgggactgagacacggcccaaactcctacgggaggcagcagtggggaatattggacaatgggcgaaagcctgatccagccatgccgcgtgagtgatgaaggccctagggttgtaaagctcttttgtgcgggaagataatgacggtaccgcaagaataagccccggctaacttcgtgccagcagccgcggtaatacgaagggggctagcgttgctcggaatcactgggcgtaaagggtgcgtaggcggatctttaagtcagaggtgaaagcctggagctcaactccagaactgcctttgatactgaggatctcgagttcgggagaggtgagtggaactgcgagtgtagaggtgaaattcgtagatattcgcaagaacaccagtggcgaaggcggctcactggcccgatactgacgctgaggcacgaaagcgtggggagcaaacaggattagataccctggtagtccacgccgtaaacgatgaatgccagccgttggagggtttactcttcagtggcgcagttaacgctttaagcattccgcctggggagtacggtcgcaagattaaaactcaaaggaattgacgggggcccgcacaagcggtggagcatgtggtttaattcgacgcaacgcgcagaaccttaccagcccttgacatgtccaggaccggtcgcagagatgtgaccttctcttcggagcctggagcacaggtgctgcatggctgtcgtcagctcgtgtcgtgagatgttgggttaagtcccgcaacgagcgcaacccccgtccttagttgctaccatttagttgagcactctaaggagactgccggtgataagccgcgaggaaggtggggatgacgtcaagtcctcatggcccttacgggctgggctacacacgtgctacaatggcggtgacaatgggatgcaaaggcgcgagccctagcaaatctcaaaaagccgtctcagttcggattgggctctgcaactcgagcccatgaagttggaatcgctagtaatcgtggatcagcacgccacggtgaatacgttcccgggccttgtacacaccgcccgtcacaccatgggagttggttttacctgaagacggtgcgctaacccgcaagggaggcagccggccacggtagggtcagcgactggggtg

SEQ ID NO: 2305 - DNA, 1440 bp, Olleya namhaensis
gatgaacgctagcggcaggcttaacacatgcaagtcgaggggtaacattgtgcttgcacagatgacgaccggcgaacgggtgcgtaacgcgtatagaatctacctcttactaagggatagcccagagaaatttggattaataccttatagtatgcagacttggcatcaagactgcattaaagattacggtaggagatgactatgcgtcctattagctagatggtgtggtaacggcacaccatggcaacgataggtaggggccctgagagggggatcccccacactggtactgagacacggaccagactcctacgggaggcagcagtgaggaatattggacaatggaggcaactctgatccagccatgccgcgtgcaggaagactgccctatgggttgtaaactgcttttatacaggaagaaacactgctacgtgtagcagcttgacggtactgtaagaataaggatcggctaactccgtgccagcagccgcggtaatacggaggatccaagcgttatccggaatcattgggtttaaagggtccgtaggtggataattaagtcagaggtgaaatcctgcagctcaactgtagaattgcctttgatactggttatcttgagttattatgaagtagttagaatatgtagtgtagcggtgaaatgcatagatattacatagaataccaattgcgaaggcagattactaataatatactgacactgatggacgaaagcgtggggagcgaacaggattagataccctggtagtccacgccgtaaacgatggtcactagctgttcgaacttcggtttgagtggctaagcgaaagtgataagtgacccacctggggagtacgttcgcaagaatgaaactcaaaggaattgacgggggcccgcacaagcggtggagcatgtggtttaattcgatgatacgcgaggaaccttaccagggcttaaatgtagattgacaggactagagatagttttttcttcggacaatttacaaggtgctgcatggttgtcgtcagctcgtgccgtgaggtgtcaggttaagtcctataacgagcgcaacccctgttgttagttgccagcgagtcatgtcgggaactctaacaagactgccagtgcaaactgtgaggaaggtggggatgacgtcaaatcatcacggcccttacgtcctgggctacacacgtgctacaatggtagggacagagagcagccactgggcgaccaggagcgaatctataaaccctatcacagttcggatcggagtctgcaactcgactccgtgaagctggaatcgctagtaatcgcatatcagccatgatgcggtgaatacgttcccgggccttgtacacaccgcccgtcaagccatggaagctgggagtgcctgaagtccgtcgccgtaaggagcggcctagggtaaaatcggtaactagggct

SEQ ID NO: 2306 - DNA, 1437 bp, Olsenella umbonata
gatgaacgctggcggcgcgcctaacacatgcaagtcgaacggttaaagcaccttcgggtgtgtataaagtggcgaacggctgagtaacacgtgggcaacctgcccctcgcaccgggatagcctcgggaaaccgtggttaataccggatactccgggacccccgcatgggggtgccgggaaagccctgacggcgagggatgggcccgcggcctgttagcttgttggcggggtaacggcccaccaaggcgattatgggtagccgggttgagagaccgaccggccagattgggactgagacacggcccagactcctacgggaggcagcagtggggaatcttgcacaatgggcgaaagcctgatgcagcgacgccgcgtgcgggacgaaggccttcgggttgtaaaccgctttcagcagggacgaggccgcaaggtgacggtacctgcagaagaagccccggctaactacgtgccagcagccgcggtaatacgtagggggcgagcgttatccggattcattgggcgtaaagcgcgcgtaggcggcctgctaggtcgggactcaaatccgggggctcaacccccgcccggtcccgataccgacaggcttgagtctggtaggggaaggcggaattccaagtgtagcggtggaatgcgcagatatttggaagaacaccggtggcgaaggcggccttctgggccacgactgacgctgaggcgcgaaagctaggggagcgaacaggattagataccctggtagtcctagccgtaaacgatggacactaggtgtggggggatgtgccctccgtgccgcagccaacgcattaagtgtcccgcctggggagtacggccgcaaggctaaaactcaaaggaattgacgggggcccgcacaagcagcggagcatgtggcttaattcgaagcaacgcgaagaaccttaccagggcttgacattcaggtgaagcggcggaaacgccgtggccgagaggagcctgaacaggtggtgcatggctgtcgtcagctcgtgtcgtgagatgttgggttaagtcccgcaacgagcgcaaccctcgtcgcatgttgccagcggttcggccgggcacccatgcgagaccgccggcgtcaagccggaggaaggtggggacgacgtcaagtcatcatgccccttatgtcctgggctgcacacgtgctacaatgaccggcacaatgggctgccactgcgcgagcaggagcgaatccccaaagccggccccagttcggattggaggctgcaacccgcctccatgaagtcggagttgctagtaatcgcggatcagcacgccgcggtgaatgcgttcccgggccttgtacacaccgcccgtcacaccacccgagtcgtctgcacccgaagtcgtcggcccaacccgcaagggagggaggcgccgaaggtgtggagggtaaggggggtg

SEQ ID NO: 2307 - DNA, 1480 bp, Opitutus terrae
aatgaacgctggcggcgtggttaagacatgcaagtcgaacggtttttccggtgtagcaatacatcggaaagacagtggcgaacgggtgcgtaacacgtgaacaatctacctccaaatggggaatagctcggcgaaagccggattaataccgcatgtggttgcttctcgcatgagaggtataccaaagtcggggaccgcaaggcctgacgttaggagaggagttcgcggcctatcagctagttggcgaggtaacggctcaccaaggcaaagacgggtagctggtctgagaggatgatcagccacactggaactgagacacggtccagacacctacgggtggcagcagtttcgaatcattcacaatgggcgaaagcctgatggtgcgacgccgcgtgagggatgaaggtcttcggattgtaaacctctgtcaccggggaagaaacgctttatattaatcgtataaagcctgacttaacccggagaggaagcagtggctaactctgtgccagcagccgcggtaatacagagactgcgagcgttattcggattcactgggcgtaaagggtgcgcaggcggccgggtgtgtggggcgtgaaagcctggagcttaactccagaattgcgcctcaaactacacggctagagcattggagagggtagcggaattcacggtgtagcagtgaaatgcgtagatatcgtgaggaacaccagaggcgaaggcggctacctggacaattgctgacgctcaggcacgaaagcgtggggagcaaaagggattagatacccctgtagtccacgccctaaacggtgcacactaggtcttggcggattcgacccctccagggccccagctaacgcgttaagtgtgccgcctgaggactacggccgcaaggctaaaactcaaaggaattgacgggggcccgcacaagcggtggagtatgtggctcaattcgatgcaacgcgaagaaccttaccaagccttgacatgcattggacaggcgctgaaaggcgccctcccttcggggccggtgcacaggtgctgcatggctgtcgtcagctcgtgtcgtgagatgttgcgttaagtcgcgcaacgagcgcaacccctgtccttagttgccatcattcagttgggcactctagggagacaaaccctctttgagggtgggaaggtggggatgacgtcaagtcaggatggcccttacggcttgggctgcacacgtactacaatgcccggtacagagggacgcaataccgcgaggtggagcaaatcctcaaaaccgggcccagttcagattgtagtctgcaactcgactacatgaagttggaatcgctagtaatggcgcatcagctacggcgccgtgaatacgttcccgggccttgtacacaccgcccgtcacgtcatgaaagccggtttcgcccgaagtgcgtttgccaaccagcaatggaggcggcgccctaaggtgaggctggtgattgggacg

SEQ ID NO: 2308 - DNA, 1463 bp, Orenia marismortui
gacgaacgctggcggcgtgcttaacacatgcaagttgaacgcgaaagttaccttcgggtaatgagtagagtagcggacgggtgagtaacgcgtgggttatctacctttaagttagggataacctctcgaaagaggggctaatacctgataatctcttacgagcaaagatggcttcttcttagctatcgcttaaagatgagcctgcgtcccattagctagttggtgaggtaagagctcaccaaggcgacaatgggtagccgacctgagagggtgatcggccacactgggactgagacacggcccagactcctacgggaggctgcagtggggaatcttccgcaatggacgaaagtctgacggagcaacgccgcgtgaatgatgaaggccttcgggtcgtaaaattctgtccttagggaagaatattttggttgttaataacagctgaagttgacggtacctttggaggaagccctggctaactacgtgccagcagccgcggtaatacgtagagggcaagcgttgtccggaatcattgggcgtaaagggtacgcaggcggtctagtaagtcagaggtgaaatccaccggctcaaccggtgaactgcctttgatactgctagacttgaggataagagaagaaagcggaattcctagtgtagtggtgaaatacgtagatattaggaagaataccaatggcgaaagcagctttctaacttactcctgacgctcaggtacgaaagctagggtagcaaacgggattagataccccggtagtcctagccgtaaacgatggatactaggtgttggaggttcgattccttcggcgccgcagttaacgcattaagtatcccgcctggggattacgaccgcaaggttgaaactcaaaggaattgacgggggcccgcacaagcggtggagcatgtggtttaattcgatgcaacgcgaagaaccttaccagaacttgacatccctgtgactatttcttaaccgaaagtctcctctttgaggacacagaagacaggtggtgcatggctgtcgtcagctcgtgtcgtgagatgttgggttaagtcccgtaacgagcgcaacccctatccttagttgccagcacgtaatggtggggactctaaggagactgccgcggaaaaacgcggaggaaggtggggatgacgtcaagtcatcatgccccttatgttctgggctacacacgtgctacaatggtctatacagagggtggctacaccgcgaggtgatgctaatctctaaagtagatctcagttcggattgcaggctgaaactcgcctgcatgaagctggaatcgctagtaatcgcggatcagaatgccgcggtgaatacgttcccgggccttgtacacaccgcccgtcacaccacccgagtcgggggcaccagaagtcatcggcccaacttagtgagggagatgccgaaggtgtgcctggtaaggggggtg

SEQ ID NO: 2309 - DNA, 1466 bp, Orenia metallireducens
gacgaacgctggcggcgtgcttaacacatgcaagttgaacgcgaaagttttcttcggaaaacaagtagagtagcggacgggtgagtaacgcgtgggtaatctacctttaagttaggaataacttttcgaaagaggagctaatacctaataatctcttacgagcaaagatggcttcttcttagctatcgcttaaagatgagcctgcgtcccattagcttgttggtgaggtaaaagctcaccaaggcaacaatgggtagccgacctgagagggtgatcggccacactgggactgagacacggcccagactcctacgggaggctgcagtggggaatcttccgcaatggacgaaagtctgacggagcaacgccgcgtgaacgatgaaggccttcgggtcgtaaagttctgtcctttgggaagaatactttagttgctaataccagctatagttgacggtacctttggaggaagctctggctaactacgtgccagcagccgcggtaatacgtagagagcaagcgttgtccggaatcattgggcgtaaagggtacgcaggcggtctattaagtcagaggtgaaatccaacagctcaactgttgaactgcctttgatactggtagacttgaggataagagaagaaaacggaattcctagtgtagcggtgaaatgcgtagatattaggaagaataccaatggcgaaagcagttttctaacttactcctgacgctcaggtacgaaagctagggtagcaaacgggattagataccccggtagtcctagccgtaaacgatggatactaggtggttggggggttcgaccccctcggtgccgcagttaacgcattaagtatcccgcctggggattacgaccgcaaggttgaaactcaaaggaattgacgggggcccgcacaagcggtggagcatgtggtttaattcgatgcaacgcgaagaaccttaccagaacttgacatccctgtgactatttcttaatcgaaagtcttcccttttgggaacacaggtgacaggtggtgcatggctgtcgtcagctcgtgtcgtgagatgttgggttaagtcccgtaacgagcgcaacccctatccttagttgccagcacataatggtggggactctaaggagactgccgcggaaaaacgcggaggaaggtggggatgacgtcaagtcatcatgccccttatgttctgggctacacacgtgctacaatggcttatacagagggttgctacactgtgaagtgatgctaatctctaaagtaagtctcagttcggattgcaggctgcaactcgcctgcatgaagctggaatcgctagtaatcgtggatcagaatgccacggtgaatacgttcccgggccttgtacacaccgcccgtcacaccacccgagtcgggggcaccagaagtcgtcggcctaacttttagaaggagacgccgaaggtgcgttcggtaaggggggtg

SEQ ID NO: 2310 - DNA, 1410 bp, Oricola cellulosilytica
aacgaacgctggcggcaggcttaacacatgcaagtcgagcgccctgcttgcagggagcggcagacgggtgagtaacgcgtgggaatctacccatccctacggaatagctccgggaaactggaattaataccgtatacgcccttcgggggaaagatttatcggggatggatgagcccgcgttggattagctagttggtggggtaatggcctaccaaggcgacgatccatagctggtctgagaggatgatcagccacactgggactgagacacggcccagactcctacgggaggcagcagtggggaatattggacaatgggcgaaagcctgatccagccatgccgcgtgagtgatgaaggccctagggttgtaaagctctttcaacggtgaagataatgacggtaaccgtagaagaagccccggctaacttcgtgccagcagccgcggtaatacgaagggggctagcgttgttcggaattactgggcgtaaagcgcacgtaggcggattgatcagtcagaggtgaaatcccagggctcaaccctggaactgcctttgatactgtctgtctagaggtcgagagaggtgagtggaattccgagtgtagaggtgaaattcgtagatattcggaggaacaccagtggcgaaggcggctcactggctcgatactgacgctgaggtgcgaaagcgtggggagcaaacaggattagataccctggtagtccacgccgtaaacgatggaagctagccgtcgggcagtatactgttcggtggcgcagttaacgcattaagcttcccgcctggggagtacggtcgcaagattaaaactcaaaggaattgacgggggcccgcacaagcggtggagcatgtggtttaattcgaagcaacgcgcagaaccttaccagcccttgacatcccggtcgcggtttccagagatggattccttcagttcggctggaccggtgacaggtgctgcatggctgtcgtcagctcgtgtcgtgagatgttgggttaagtcccgcaacgagcgcaaccctcgcccttagttgccagcattcagttgggcactctaaggggactgccggtgataagccgagaggaaggtggggatgacgtcaagtcctcatggcccttacgggctgggctacacacgtgctacaatggtggtgacagtgggcagcgagactgcaaagtcgagctaatctccaaaagccatctcagttcggattgcactctgcaactcgggtgcatgaagttggaatcgctagtaatcgtggatcagcatgccacggtgaatacgttcccgggccttgtacacaccgcccgtcacaccatgggagttggttctacccgaagatggtgcgctaaccgcaagggaggcagccagccacggtagggtcagcgactggggtg

SEQ ID NO: 2311 - DNA, 1453 bp, Orrella dioscoreae
attgaacgctagcgggatgctttacacatgcaagtcgaacggcagcacggacttcggtctggtggcgagtggcgaacgggtgagtaatgtatcggaacgtgcccagtagcgggggataactacgcgaaagcgtagctaataccgcatacgccctacgggggaaagggggggatcgcaagacctctcactattggagcggccgatatcggattagctagttggtggggtaaaggcctaccaaggcaacgatccgtagctggtttgagaggacgaccagccacactgggactgagacacggcccagactcctacgggaggcagcagtggggaattttggacaatgggggaaaccctgatccagccatcccgcgtgtgcgatgaaggccttcgggttgtaaagcacttttggcaggaaagaaattgcgcatattaataccatgcgtagatgacggtacctgcagaataagcaccggctaactacgtgccagcagccgcggtaatacgtagggtgcaagcgttaatcggaattactgggcgtaaagcgtgcgcaggcggttcggaaagaaagatgtgaaatcccagggcttaaccttggaactgcatttttaactaccgggctagagtgtgtcagaggggggtggaattccgcgtgtagcagtgaaatgcgtagatatgcggaggaacaccgatggcgaaggcagccccctgggataacactgacgctcatgcacgaaagcgtggggagcaaacaggattagataccctggtagtccacgccctaaacgatgtcaactagctgttggggccttcgggccttagtagcgcagctaacgcgtgaagttgaccgcctggggagtacggtcgcaagattaaaactcaaaggaattgacggggacccgcacaagcggtggatgatgtggattaattcgatgcaacgcgaaaaaccttacctacccttgacatgtctggaatcctgaagagatttaggagtgctcgcaagagaaccggaacacaggtgctgcatggctgtcgtcagctcgtgtcgtgagatgttgggttaagtcccgcaacgagcgcaacccttgtcattagttgctacgaaagggcactctaatgagactgccggtgacaaaccggaggaaggtggggatgacgtcaagtcctcatggcccttatgggtagggcttcacacgtcatacaatggtcgggacagagggtcgccaacccgcgagggggagccaatcccagaaacccgatcgtagtccggattgtagtctgcaactcgactgcatgaagtcggaatcgctagtaatcgcggatcagcatgtcgcggtgaatacgttcccgggtcttgtacacaccgcccgtcacaccatgggagtgggttctaccagaagtagttagcctaaccgtaaggggggcgattaccacggtagggttcatgactggggtg

SEQ ID NO: 2312 - DNA, 1466 bp, Oryzomicrobium terrae
aatgaacgctggcggcatgccttacacatgcaagtcgaacggcagcatgacctagcttgctaggttgatggcgagtggcgaacgggtgagtaatgcatcggaacgtgccttttagtgggggataacgtagcgaaagttacgctaataccgcatattctccgaggaggaaagcaggggaccttcgggccttgcgctagaagagcggccgatgtcggattagctagttggtgaggtaaaggctcaccaaggcaacgatccgtagcgggtctgagaggatgatccgccacactgggactgagacacggcccagactcctacgggaggcagcagtggggaattttggacaatgggcgaaagcctgatccagccatgccgcgtgagtgaagaaggccttcgggttgtaaagctctttcggccgggacgaaatcgcattctctaatacaggatgtggatgacggtaccggaataagaagcaccggctaactacgtgccagcagccgcggtaatacgtagggtgcgagcgttattcggaattactgggcgtaaagcgtgcgcaggcggttgtgtaagacagacgtgaaatccccgggctcaacctgggaactgcgtttgtgactgcacggctagagtacggcagaggggggtggaattccacgtgtagcagtgaaatgcgtagagatgtggaggaacaccgatggcgaaggcagccccctgggccagtactgacgctcatgcacgaaagcgtggggagcaaacaggattagataccctggtagtccacgccctaaacgatgtcaactagctgttggtggggttaaacccattagtagcgtagctaacgcgtgaagttgaccgcctggggagtacggccgcaaggttaaaactcaaaggaattgacggggacccgcacaagcggtggatgatgtggattaattcgatgcaacgcgaaaaaccttacctacccttgacatgccaggaacttgccagagatggcttggtgcccgaaagggagcctggacacaggtgctgcatggctgtcgtcagctcgtgtcgtgagatgttgggttaagtcccgcaacgagcgcaacccttgtcattagttgccatcattcagttgggcactctaatgagactgccggtgacaaaccggaggaaggtggggatgacgtcaagtcctcatggcccttatgggtagggcttcacacgtcatacaatggtcggtccagagggttgccaacccgcgagggggagctaatcccagaaagccgatcgtagtccggatcgcagtctgcaactcgactgcgtgaagtcggaatcgctagtaatcgcggatcagcatgccgcggtgaatacgttcccgggtcttgtacacaccgcccgtcacaccatgggagcgggttccgccagaagtaggtagcctaaccgcaaggagggcgcttaccacggcggggttcgtgactggggtg

SEQ ID NO: 2313 - DNA, 1412 bp, Oscillatoria acuminata
gatgaacgctggcggtctgcttaacacatgcaagtcgaacggtgaactttagggttcatagtggcggacgggtgagtaacacgtgagaatctgcctccaggtcggggacaacagtgggaaactgctgctaatacccgatgtgcctacgggtgaaagattaattgcctggagatgagctcgcgtccgattagctagttggtaaggtaaaggcttaccaaggctccgatcggtagctggtctgagaggatgagcagccacactgggactgagacacggcccagactcctacgggaggcagcagtggggaattttccgcaatgggcgaaagcctgacggagcaagaccgcgtgggggatgaaggctcttgggttgtaaaccccttttctcagggaagaataactgacggtacctgaggaataagcatcggctaactccgtgccagcagccgcggtaagacggaggatgcaagcgttatccggaattattgggcgtaaagcgttcgtaggtggctgttcaagtctgccgttaaagaccggggcttaactccggaaaaactgtggaaactgaacagctagagtatggtaggggtaaggggaattcccggtgtagcggtgaaatgcgtagatatcgggaagaacaccggtggcgaaggcgccttactgggccataactgacactgagggacgaaagctaggggagcgaaagggattagatacccctgtagtcctagctgtaaacgatggatactaggtgttgcccgtatcgacccgggcagtgccgtagctaacgcgttaagtatcccgcctggggagtacgcacgcaagtgtgaaactcaaaggaattgacgggggcccgcacaagcggtggagtatgtggtttaattcgatgcaacgcgaagaaccttaccagggcttgacatgtccagaatcttggggaaacctaagagtgccttcgggagctggaacacaggtggtgcatggctgtcgtcagctcgtgtcgtgagatgttgggttaagtcccgcaacgagcgcaaccctcgtccttagttgccatcattaagttgggcactttagggagactgccggtgacaaaccggaggaaggtggggatgacgtcaagtcagcatgccccttacgtcctgggctacacacgtactacaatgggaaggacagagggtagcaagcgcgcgagtgcaagccaatcccataaacctttcctcagttcagattgaagtttgcaactcaacttcatgaaggcggaatcgctagtaatcgcaggtcagcatactgcggtgaatacgttcccgggccttgtacacaccgcccgtcacaccatggaagttggccatgcccgaagtcattaccctaaccgcaaggagggggatgccgaaggcagggctgatgactggggtg

SEQ ID NO: 2314 - DNA, 1452 bp, Oscillatoria nigroviridis
gatgaacgctggcggtctgcttaacacatgcaagtcgaacggagtagaaatacttagtggcggacgggtgagtaacgcgtgagaatctgccttcaggacggagacaacagttggaaacgactgctaagccccgatgaaccgaaagggaaaatatttatagcctgaagatgagctcgcgtccgattagctagttggcggagtaaaagcccaccaaggcgacgatcggtagctggtctgagaggacgatcagccacactgggactgagacacggcccagactcctacgggaggcagcagtggggaattttccgcaatgggcgaaagcctgacggagcaagaccgcgtgggggaagaaggctcttgggttgtaaaccccttttctctgggaagaaagttgtgaaagcaacctgacggtaccagaggaatcagcatcggctaactccgtgccagcagccgcggtaagacggaggatgcaagcgttatccggaatgattgggcgtaaagcgtccgcaggtggcagttcaagtctgctgtcaaagaccggggcttaacttcggaaaggcagtggaaactgaacagctagagtatggtaggggcagagggaattcctggtgtagcggtgaaatgcgtagagatcaggaagaacatcggtggcgaaggcgctctgctggaccataactgacactcagggacgaaagctaggggagcgaatgggattagataccccagtagtcctagccgtaaacgatggatactaggtgttgtctgtatcgacccggacagtgccgtagctaacgcgttaagtatcccgcctggggagtacgcacgcaagtgtgaaactcaaaggaattgacgggggcccgcacaagcggtggagtatgtggtttaattcgatgcaacgcgaagaaccttaccaggacttgacatgtcgcgaatcttctggaaacagaggagtgccttcgggagcgcgaacacaggtggtgcatggctgtcgtcagctcgtgtcgtgagatgttgggttaagtcccgcaacgagcgcaaccctcgtgtttagttgccatcattaagttgggcactctaaacagactgccggtgacaaaccggaggaaggtggggatgacgtcaagtcagcatgccccttacgttctgggctacacacgtactacaatggtagggacagagggcagccaacccgcgagggcgagctaatcccgtaaaccctgcctcagttcagattgcaggctgcaactcgcctgcatgaaggcggaatcgctagtaatcgcaggtcagcatactgcggtgaatccgttcccgggccttgtacacaccgcccgtcacaccatggaagttggccacgcccgaagtcattactctaacctttcgaggaggaggatgccgaaggcagggctgatgactggggtgaagtcgtaacaaggtagccgtaccggaagg

SEQ ID NO: 2315 - DNA, 1410 bp, Otariodibacter oris
aagcttgcttttctgctgacgagtggcggacgggtgagtaatgcttgggaatctggcttatggagggggataactacgggaaactgtagctaataccgcgtaatatctacggattaaagtgtgggaccgcaaggccacatgccataagatgagcccaagtgggattaggtagttggtggggtaaaggcctaccaagccgacgatctctagctggtctgagaggatgaccagccacactggaactgagacacggtccagactcctacgggaggcagcagtggggaatattgcacaatggggggaaccctgatgcagccatgccgcgtgaatgaagaaggccttcgggttgtaaagttctttcggtgatgaggaaggctattgttttaatagaacagtagattgacgttagtcacagaagaagcaccggctaactccgtgccagcagccgcggtaatacggagggtgcgagcgttaatcggaatgactgggcgtaaagggtacgcaggcggtgacttaagtgaggtgtgaaatccctgggctcaacctaggaattgcacttcatactgggtcgctagagtattttagggaggggtagaattccacgtgtagcggtgaaatgcgtagagatgtggaggaataccgaaggcgaaggcagccccttgggaatatactgacgctcaagtacgaaagcgtggggagcaaacaggattagataccctggtagtccacgccgtaaacgatgtcgatttggggattgggctataagcttggtgcccgtagctaacgtgataaatcgaccgcctggggagtacggccgcaaggttaaaactcaaatgaattgacgggggcccgcacaagcggtggagcatgtggtttaattcgatgcaacgcgaagaaccttacctactcttgacatccatagaagaacgcagagatgtgtttgtgccttcgggaactatgagacaggtgctgcatggctgtcgtcagctcgtgttgtgaaatgttgggttaagtcccgcaacgagcgcaacccttatcctttgttgctagcaggtaatgctgagaactcaaaggagactgccagtgataaactggaggaaggtggggatgacgtcaagtcatcatggcccttacgagtagggctacacacgtgctacaatggcgtatacagagggaagcgatatagcgatatggagcgaatctcagaaagtacgtctaagtccggattggagtctgcaactcgactccatgaagtcggaatcgctagtaatcgcgaatcagaatgtcgcggtgaatacgttcccgggccttgtacacaccgcccgtcacaccatgggagtgggttgtaccagaagtagatagcttaaccttcgggggggcgtttaccacggtatgattcatgactggggt

SEQ ID NO: 2316 - DNA, 1392 bp, Pacificibacter maritimus
aacgaacgctggcggcaggcctaacacatgcaagtcgagcgctttccttcgggaaggagcggcggacgggttagtaacgcgtgggaatgtacccttctctatggaatagcctttggaaacgaagagtaataccatatacgcccttcgggggaaagatttatcggagaaggatcagcccgcgtaagattagatagttggtggggtaatggcctaccaagtctacgatctttagctggtttgagaggatgatcagcaacactgggactgagacacggcccagactcctacgggaggcagcagtggggaatcttagacaatgggcgcaagcctgatctagccatgccgcgtgagtgatgaaggccttagggtcgtaaagctctttcacctgtgaagataatgacggtagcaggaaaagaaaccccggctaactccgtgccagcagccgcggtaatacggagggggttagcgttgttcggaattactgggcgtaaagcgtacgtaggcggattagtaagttagaggtgaaatcccatggctcaaccatggaactgcctttaaaactgctagtcttgagttcgagagaggtgagtggaattccaagtgtagaggtgaaattcgtagatatttggaggaacaccagtggcgaaggcggctcactggctcgatactgacgctgaggtacgaaagtgtggggagcaaacaggattagataccctggtagtccacaccgtaaacgatgaatgccagtcgtcgggtagcatgctgctcggtgacacacctaacggattaagcattccgcctggggagtacggtcgcaagattaaaactcaaaggaattgacgggggcccgcacaagcggtggagcatgtggtttaattcgaagcaacgcgcagaaccttaccaacccttgacatacttgtcgcggatcgtagagatactttccttcagttcggctggacaatgtacaggtgctgcatggctgtcgtcagctcgtgtcgtgagatgttcggttaagtccggcaacgagcgcaacccacatccttagttgccagcagttcggctgggcactctagggaaactgcccgtgataagcgggaggaaggtgtggatgacgtcaagtcctcatggcccttacgggttgggctacacacgtgctacaatggcagtgacaatgggttaatcccaaaaagctgtctcagttcggattggggtctgcaactcgaccccatgaagtcggaatcgctagtaatcgcgtaacagcatgacgcggtgaatacgttcccgggccttgtacacaccgcccgtcacaccatgggagttggttctacccgacgacgctgcgctaacccttcggggaggcaggcggccacggtaggatcagcgactggggtg

SEQ ID NO: 2317 - DNA, 1411 bp, Pacificimonas flava
aacgaacgctggcggcatgcctaacacatgcaagtcgaacgagaccttcgggtctagtggcgcacgggtgcgtaacacgtgggaatgtacccaggggtacggaataactcagagaaatttgagctaataccgtataatgacttcggtccaaagatttatcgcccctggatcagcccgcgccggattagcttgttggtggggtaaaggcctaccaaggcgacgatccgtagctggtctgagaggatgatcagccacactgggactgagacacggcccagactcctacgggaggcagcagtggggaatattggacaatgcacgaaagtgtgatccagcaatgccgcgtgagtgaagaaggccttagggttgtaaagctcttttaccagggatgataatgacagtacctggagaataagctccggctaactccgtgccagcagccgcggtaatacggagggagctagcgttgttcggaattactgggcgtaaagcgcgcgtaggcggcttttcaagtcagaggtgaaatcccggggcttaaccccggaactgcctttgaaactggatggctagaatcttggagaggtgagtggaattccgagtgtagaggtgaaattcgtagatattcggaagaacaccagtggcgaaggcgactcactggacaagtattgacgctgaggtgcgaaagcgtggggagcaaacaggattagataccctggtagtccacgccgtaaacgatgacaactagctgtcagggccattgtggctttggtggcgcagctaacgcattaagttgtccgcctggggagtacggtcgcaagattaaaactcaaaggaattgacgggggcctgcacaagcggtggagcatgtggtttaattcgaagcaacgcgcagaaccttaccagcgtttgacatccgggtcgcggatcgcagagatgctttccttcagttcggctggacccgtgacaggtgctgcatggctgtcgtcagctcgtgtcgtgagatgttgggttaagtcccgcaacgagcgcaaccctcatccttagttgctaccatttagttgggcactctagggaaactgccggtgataagccggaggaaggtggggatgacgtcaagtcctcatggcccttatgcgctgggctacacacgtgctacaatggcggtgacagtgagcagcgatcccgcaagggtcagctaatctccaaaaaccgtctcagttcggattgttctctgcaactcgagagcatgaaggcggaatcgctagtaatcgcggatcagcatgccgcggtgaatacgttcccaggccttgtacacaccgcccgtcacatcatgggagttggtttcacccgaaggcagtgcgctaacccgcaagggaggcagctgaccacggtgggatcagcgactgggatg

SEQ ID NO: 2318 - DNA, 1476 bp, Paenibacillus agaridevorans
gacgaacgctggcggcgtgcctaatacatgcaagtcgagcggagttgatgaggtgcttgcacctctgatgcttagcggcggacgggtgagtaacacgtaggtaacctgcccgacagaccgggataacattcggaaacgaatgctaataccggatacgcgatttggtcgcatggccgaatcgggaaagacggagcaatctgtcactgttggatggacctgcggcgcattagctagttggtgaggtaacggctcaccaaggcgacgatgcgtagccgacctgagagggtgatcggccacactgggactgagacacggcccagactcctacgggaggcagcagtagggaatcttccgcaatgggcgaaagcctgacggagcaacgccgcgtgagtgatgaaggttttcggatcgtaaagctctgttgccagggaagaacgcttgggagagtaactgctcccaaggtgacggtacctgagaagaaagccccggctaactacgtgccagcagccgcggtaatacgtagggggcaagcgttgtccggaattattgggcgtaaagcgcgcgcaggcggttcattaagtctggtgtttaaggctggggctcaaccctggttcgcactggaaactggtggacttgagtgcagaagaggaaagtggaattccacgtgtagcggtgaaatgcgtagagatgtggaggaacaccagtggcgaaggcgactttctgggctgtaactgacgctgaggcgcgaaagcgtggggagcaaacaggattagataccctggtagtccacgccgtaaacgatgaatgctaggtgttaggggtttcgatacccttggtgccgaagttaacacattaagcattccgcctggggagtacggtcgcaagactgaaactcaaaggaattgacggggacccgcacaagcagtggagtatgtggtttaattcgaagcaacgcgaagaaccttaccaggtcttgacatccctctgaccgtcctagagatagggctttccttcgggacagaggagacaggtggtgcatggttgtcgtcagctcgtgtcgtgagatgttgggttaagtcccgcaacgagcgcaacccttgatcttagttgccagcatttcggatgggcactctaaggtgactgccggtgacaaaccggaggaaggtggggatgacgtcaaatcatctagccccttatgacctgggctacacacgtactacaatggccagtacaacgggaagcgaaaccgcgaggtggagccaatcctatcaaagctggtctcagttcggattgcaggctgcaactcgcctgcatgaagtcggaattgctagtaatcgcggatcagcatgccgcggtgaatacgttcccgggtcttgtacacaccgcccgtcacaccacgagagtttacaacacccgaagtcggtggggtaacccgcaagggagccagccgccgaaggtgggtagatgattggggtg

SEQ ID NO: 2319 - DNA, 1476 bp, Paenibacillus algorifonticola
gacgaacgctggcggcgtgcctaatacatgcaagtcgagcggagttgatagagtgcttgcactcttgatgcttagcggcggacgggtgagtaacacgtaggtaacctgcccgtaagactgggataacattcggaaacgaatgctaataccggatacacaacttggtcgcatgatcgagttgggaaagacggagcaatctgtcacttacggatggacctgcggcgcattagctagttggtgaggtaacggctcaccaaggcgacgatgcgtagccgacctgagagggtgatcggccacactgggactgagacacggcccagactcctacgggaggcagcagtagggaatcttccgcaatggacgaaagtctgacggagcaacgccgcgtgagtgatgaaggttttcggatcgtaaagctctgttgccagggaagaacgctaaggagagtaactgctccttaggtgacggtacctgagaagaaagccccggctaactacgtgccagcagccgcggtaatacgtagggggcaagcgttgtccggaattattgggcgtaaagcgcgcgcaggcggccttgtaagtctgttgtttcaggcacaagctcaacttgtgttcgcaatggaaactgcaaagcttgagtgcagaagaggaaagtggaattccacgtgtagcggtgaaatgcgtagagatgtggaggaacaccagtggcgaaggcgactttctgggctgtaactgacgctgaggcgcgaaagcgtggggagcaaacaggattagataccctggtagtccacgccgtaaacgatgaatgctaggtgttaggggtttcgatacccttggtgccgaagttaacacattaagcattccgcctggggagtacggtcgcaagactgaaactcaaaggaattgacggggacccgcacaagcagtggagtatgtggtttaattcgaagcaacgcgaagaaccttaccaggtcttgacatccctctgaccggtacagagatgtacctttccttcgggacagaggagacaggtggtgcatggttgtcgtcagctcgtgtcgtgagatgttgggttaagtcccgcaacgagcgcaacccttgatcttagttgccagcaggtagagctgggcactctaggatgactgccggtgacaaaccggaggaaggtggggatgacgtcaaatcatcatgccccttatgacctgggctacacacgtactacaatggccgatacaacgggaagcgaaaccgcgaggtggagccaatcctatcaaagtcggtctcagttcggattgcaggctgcaactcgcctgcatgaagtcggaattgctagtaatcgcggatcagcatgccgcggtgaatacgttcccgggtcttgtacacaccgcccgtcacaccacgagagtttacaacacccgaagccggtggggtaaccgcaaggagccagccgtcgaaggtggggtagatgattggggtg

SEQ ID NO: 2320 - DNA, 1480 bp, Paenibacillus antarcticus
gacgaacgctggcggcatgcctaatacatgcaagtcgagcggagttgttttggaagcttgcttccaaaacaacttagcggcggacgggtgagtaacacgtaggtaacctgcctataagactgggataactaccggaaacggtagctaataccggataatttgtttcttctcatgaagaggcactgaaaggcggagtaatctgccacttatagatgggcctgcggcgcattagctagttggtgaggtaacggctcaccaaggcgacgatgcgtagccgacctgagagggtgaacggccacactgggactgagacacggcccagactcctacgggaggcagcagtagggaatcttccgcaatggacgaaagtctgacggagcaatgccgcgtgagtgatgaaggttttcggatcgtaaagctctgttgccagggaagaatgcttgggagagtaactgctctcaaggtgacggtacctgagaagaaagccccggctaactacgtgccagcagccgcggtaatacgtagggggcaagcgttgtccggaattattgggcgtaaagcgcgcgcaggcggtcatttaagtctggtgtttaatcccggggctcaaccccgggtcgcactggaaactggatgacttgagtacagaagaggagagtggaattccacgtgtagcggtgaaatgcgtagatatgtggaggaacaccagtggcgaaggcgactctctgggctgtaactgacgctgaggcgcgaaagcgtggggagcaaacaggattagataccctggtagtccacgccgtaaacgatgagtgctaggtgttaggggtttcgatacccttggtgccgaagttaacacattaagcactccgcctggggagtacggtcgcaagactgaaactcaaaggaattgacggggacccgcacaagcagtggagtatgtggtttaattcgaagcaacgcgaagaaccttaccaggtcttgacatccctctgaatccactagagatagtggcggccttcgggacagaggagacaggtggtgcatggttgtcgtcagctcgtgtcgtgagatgttgggttaagtcccgcaacgagcgcaacccttatatttagttgccagcacattatggtgggcactctagatagactgccggtgacaaaccggaggaaggtggggatgacgtcaaatcatcatgccccttatgacctgggctacacacgtactacaatggccggtacaacgggctgcgaaatcgcgagatggagccaatcccaacaaagccggtctcagttcggattgcaggctgcaacccgcctgcatgaagtcggaattgctagtaatcgcggatcagcatgccgcggtgaatacgttcccgggtcttgtacacaccgcccgtcacaccacgagagtttacaacacccgaagtcggtggggtaacccgcaagggagccagccgccgaaggtggggtagatgattggggtg

SEQ ID NO: 2321 - DNA, 1465 bp, Paenibacillus aquistagni
  misc_feature (11)..(11): n is a, c, g, or t
  misc_feature (1459)..(1459): n is a, c, g, or t
ggcggcgtgcntaatacatgcaagtcgagcggagtcttacactttcttcggaaagtgtttggcttagcggcggacgggtgagtaacacgtaggtaacctgcccataagactgggataacccacggaaacgtgagctaataccagataggcatcttcttcgcatgaaggagatgagaaagacggtttcggctgtcacttatggatggacctgcggcgcattagctagttggtgaggtaacggctcaccaaggcgacgatgcgtagccgacctgagagggtgatcggccacactgggactgagacacggcccagactcctacgggaggcagcagtagggaatcttccgcaatgggcgaaagcctgacggagcaacgccgcgtgagtgatgaaggttttcggatcgtaaagctctgttgccaaggaagaacgctcaggagagtaactgctcttgaggtgacggtacttgagaagaaagccccggctaactacgtgccagcagccgcggtaatacgtagggggcaagcgttgtccggaattattgggcgtaaagcgcgcgcaggcggcgatgtaagttgggtgtttaaacctagggctcaaccttgggtcgcacccaaaactgcatggcttgagtgcagcagaggaaagtggaattccacgtgtagcggtgaaatgcgtagagatgtggaggaacaccagtggcgaaggcgactttctgggctgtaactgacgctgaggcgcgaaagcgtggggagcaaacaggattagataccctggtagtccacgccgtaaacgatgaatgctaggtgttaggggtttcgatacccttggtgccgaagttaacacattaagcattccgcctggggagtacggtcgcaagactgaaactcaaaggaattgacggggacccgcacaagcagtggagtatgtggtttaattcgaagcaacgcgaagaaccttaccaggtcttgacatctgaatgaccgtcctagagataggactttccttcgggacattcaagacaggtggtgcatggttgtcgtcagctcgtgtcgtgagatgttgggttaagtcccgcaacgagcgcaacccttaactttagttgccagcattaagttgggcactctagagtgactgccggtgacaaaccggaggaaggtggggatgacgtcaaatcatcatgccccttatgacctgggctacacacgtactacaatggtcggtacaacgggaagcgaagccgcgaggtggagccaatcctaaaaagccgatctcagttcggattgcaggctgcaactcgcctgcatgaagtcggaattgctagtaatcgcggatcagcatgccgcggtgaatacgttcccgggtcttgtacacaccgcccgtcacaccacgagagtttacaacacccgaagtcggtgaggtaaccgcaaggggccagccgccgaaggtggggtagatgatnggggtg

SEQ ID NO: 2322 - DNA, 1468 bp, Paenibacillus baekrokdamisoli
gacgaacgctggcggcgtgcctaatacatgcaagtcgagcggatttaagaggaagcttgcttccgattaaattagcggcggacgggtgagtaacacgtaggcaacctgcctacaagatcgggataacattcggaaacgaatgctaataccggatacacaatttggctgcatggccgaattgggaaaggcggagcaatctgccgcttgtagatgggcctgcggcgcattagctagttggtgaggtaacggctcaccaaggcgacgatgcgtagccgacctgagagggtgatcggccacactgggactgagacacggcccagactcctacgggaggcagcagtagggaatcttccgcaatggacgaaagtctgacggagcaacgccgcgtgagtgatgaaggttctcggatcgtaaagctctgttgccagggaagaacagcgaggagagtaactgctcctcgtgtgacggtacctgagaagaaagccccggctaactacgtgccagcagccgcggtaatacgtagggggcaagcgttgtccggaattattgggcgtaaagcgcgcgcaggcggccttgtaagtctagtgtttaatctcggagctcaactccgattcgcactggaaactgcaaagcttgagtacagaagaggaaagtggaattccacgtgtagcggtgaaatgcgtagagatgtggaggaacaccagtggcgaaggcgactttctgggctgtaactgacgctgaggcgcgaaagcgtggggagcaaacaggattagataccctggtagtccacgccgtaaacgatgaatgctaggtgttaggggtttcaatacccttggtgccgaagttaacacattaagcattccgcctggggagtacgctcgcaagagtgaaactcaaaggaattgacggggacccgcacaagcagtggagtatgtggtttaattcgaagcaacgcgaagaaccttaccagctcttgacatcccgatgtaagcattagagatagtgcccctcttcggagcatcggagacaggtggtgcatggttgtcgtcagctcgtgtcgtgagatgttgggttaagtcccgcaacgagcgcaacccttgatcttagttgccagcaggttaagctgggcactctaaggtgactgccggtgacaaaccggaggaaggtggggatgacgtcaaatcatcatgccccttatgagctgggctacacacgtactacaatggccggtacaacgggcagcgataccgcgaggtggagcgaatccttaaaagccggtctcagttcggattgcaggctgcaactcgcctgcatgaagtcggaattgctagtaatcgcggatcagcatgccgcggtgaatacgttcccgggtcttgtacacaccgcccgtcacaccacgagagtttacaacacccgaagtcggtggggtaacccgcaagggagccagccgccgaaggtggggtagatg

SEQ ID NO: 2323 - DNA, 1473 bp, Paenibacillus beijingensis
gacgaacgctggcggcgtgcctaatacatgcaagtcgagcggacttgaagggagcttgctcccggatagttagcggcggacgggtgagtaacacgtaggcaacctgcctgtaagaccgggataaccttcggaaacgaaagctaataccggataagcggttcctttgcatagaggaaccgggaaagacggcgcaagctgtcacttgcagatgggcctgcggcgcattagctagttggtggggtaacggctcaccaaggcgacgatgcgtagccgacctgagagggtgatcggccacactgggactgagacacggcccagactcctacgggaggcagcagtagggaatcttccgcaatggacgaaagtctgacggagcaacgccgcgtgagtgaggaaggccttcgggtcgtaaagctctgttgccagggaagaatgtcgcggagagtaactgctctgcgaatgacggtacctgagaagaaagccccggctaactacgtgccagcagccgcggtaatacgtagggggcaagcgttgtccggaattattgggcgtaaagcgcgcgcaggcggctttgtaagtctggtgtttaaccctcgggctcaacctgaggtcgcatcggaaactgcaaggcttgagtacagaagaggaaagtggaattccacgtgtagcggtgaaatgcgtagagatgtggaggaacaccagtggcgaaggcgactttctgggctgtaactgacgctgaggcgcgaaagcgtggggagcaaacaggattagataccctggtagtccacgccgtaaacgatgaatgctaggtgttaggggtttcgatacccttggtgccgaagttaacacagtaagcattccgcctggggagtacgctcgcaagagtgaaactcaaaggaattgacggggacccgcacaagcagtggagtatgtggtttaattcgaagcaacgcgaagaaccttaccaggtcttgacatccccctgaatccgctagagatagcggcggccttcgggacaggggagacaggtggtgcatggttgtcgtcagctcgtgtcgtgagatgttgggttaagtcccgcaacgagcgcaacccttaggttcagttgccagcacgtaatggtgggcactctgaaacgactgccggtgacaaaccggaggaaggtggggatgacgtcaaatcatcatgccccttatgacctgggctacacacgtactacaatggccggtacaacgggctgcgaagccgcgaggcggagccaatcctataaagccggtctcagttcggattgcaggctgcaactcgcctgcatgaagtcggaattgctagtaatcgcggatcagcatgccgcggtgaatacgttcccgggtcttgtacacaccgcccgtcacaccacgagagtttacaacacccgaagtcggtggggtaaccgcaaggagccagccgccgaaggtggggtagatgattggggtg

SEQ ID NO: 2324 - DNA, 1480 bp, Paenibacillus borealis
gacgaacgctggcggcgtgcctaatacatgcaagtcgagcggagtttgaatggaagcttgcttccattcctgcttagcggcggacgggtgagtaacacgtaggcaacctgccctcaagactgggataactaccggaaacggtagctaataccggataatttctttcctctcctgaagagagaatgaaaggcggagcaatctgtcgcttggggatgggcctgcggcgcattagctagttggtggggtaacggctcaccaaggcgacgatgcgtagccgacctgagagggtgaacggccacactgggactgagacacggcccagactcctacgggaggcagcagtagggaatcttccgcaatgggcgaaagcctgacggagcaacgccgcgtgagtgatgaaggttttcggatcgtaaagctctgttgccagggaagaacgtccggtagaataactgctaccggagtgacggtacctgagaagaaagccccggctaactacgtgccagcagccgcggtaatacgtagggggcaagcgttgtccggaattattgggcgtaaagcgcgcgcaggcggtcatttaagtctggtgtttaaaccttgggctcaacctgaggtcgcactggaaactgggtgacttgagtacagaagaggaaagtggaattccacgtgtagcggtgaaatgcgtagatatgtggaggaacaccagtggcgaaggcgactttctgggctgtaactgacgctgaggcgcgaaagcgtggggagcaaacaggattagataccctggtagtccacgccgtaaacgatgagtgctaggtgttaggggtttcgatacccttggtgccgaagttaacacagtaagcactccgcctggggagtacggtcgcaagactgaaactcaaaggaattgacggggacccgcacaagcagtggagtatgtggtttaattcgaagcaacgcgaagaaccttaccaggtcttgacatccctctgaatccgctagagatagcggcggccttcgggacagaggagacaggtggtgcatggttgtcgtcagctcgtgtcgtgagatgttgggttaagtcccgcaacgagcgcaacccttgactttagttgccagcaggttaagctgggcactctagagtgactgccggtgacaaaccggaggaaggtggggatgacgtcaaatcatcatgccccttatgacctgggctacacacgtactacaatggccggtacaacgggaagcgaaaccgcgaggtggagccaatcccagcaaagccggtctcagttcggattgcaggctgcaactcgcctgcatgaagtcggaattgctagtaatcgcggatcagcatgccgcggtgaatacgttcccgggtcttgtacacaccgcccgtcacaccacgagagtttacaacacccgaagtcggtggggtaacccgcaagggagccagccgccgaaggtggggtagatgattggggtg

SEQ ID NO: 2325 - DNA, 1477 bp, Paenibacillus bovis
gacgaacgctggcggcgtgcctaatacatgcaagtcgagcggagttaataggaagcttgcttccttgagacttagcggcggacgggtgagtaacacgtaggcaacctgcccctcagactgggataactaccggaaacggtagctaataccggataatcgatttcttctcctgaagagaccgggaaagacggagcaatctgtcactgagggatgggcctgcggcgcattagctagttggtggggtaacggctcaccaaggcgacgatgcgtagccgacctgagagggtgatcggccacactgggactgagacacggcccagactcctacgggaggcagcagtagggaatcttccgcaatggacgaaagtctgacggagcaacgccgcgtgagtgatgaaggttttcggatcgtaaagctctgttgccagggaagaacgtcttctagagtaactgctagaagagtgacggtacctgagaagaaagccccggctaactacgtgccagcagccgcggtaatacgtagggggcaagcgttgtccggaattattgggcgtaaagcgcgcgcaggcggtcatttaagtctggtgtttaatcccgaagctcaacttcgggtcgcatcggaaactggatgacttgagtgcagaagaggagagtggaattccacgtgtagcggtgaaatgcgtagagatgtggaggaacaccagtggcgaaggcgactctctgggctgtaactgacgctgaggcgcgaaagcgtggggagcaaacaggattagataccctggtagtccacgccgtaaacgatgaatgctaggtgttaggggtttcgatacccttggtgccgaagttaacacattaagcattccgcctggggagtacggtcgcaagactgaaactcaaaggaattgacggggacccgcacaagcagtggagtatgtggtttaattcgaagcaacgcgaagaaccttaccaggtcttgacatctgaatgaccggtgcagagatgtaccttttcttcggaacattcaagacaggtggtgcatggttgtcgtcagctcgtgtcgtgagatgttgggttaagtcccgcaacgagcgcaacccttatgcttagttgccagcacattatggtgggcactctaagcagactgccggtgacaaaccggaggaaggtggggatgacgtcaaatcatcatgccccttatgacctgggctacacacgtactacaatggtcggtacaacgggaagcgaagccgcgaggtggagcgaatcctaaaaagccgatctcagttcggattgcaggctgcaactcgcctgcatgaagtcggaattgctagtaatcgcggatcagcatgccgcggtgaatacgttcccgggtcttgtacacaccgcccgtcacaccacgagagtttgcaacacccgaagtcggtggggtaacccgcaagggagccagccgccgaaggtggggtagatgattggggtg

SEQ ID NO: 2326 - DNA, 1467 bp, Paenibacillus catalpae
gacgaacgctggcggcgtgcctaacacatgcaagtcgagcggatcttgttcttcgggacaaggttagcggcggacgggtgagtaacacgtgggtaacctgcccataagactgggataacattcggaaacgaatgctaataccggatacgcgaatcggtcgcatggccgaatcgggaaaggcggagcaatctgccacttatggatggacccgcggcgcattagctagttggtggggtaacggctcaccaaggcgacgatgcgtagccgacctgagagggtgatcggccacactgggactgagacacggcccagactcctacgggaggcagcagtagggaatcttccgcaatggacgaaagtctgacggagcaacgccgcgtgagtgatgaaggttttcggatcgtaaagctctgttgccagggaagaacgcttacgagagtaactgctcgtaaggtgacggtacctgagaagaaagccccggctaactacgtgccagcagccgcggtaatacgtagggggcaagcgttgtccggaattattgggcgtaaagcgcgcgcaggcggccttgtaagtctgtcgtttaaactcggagctcaacttcgagtcgcgatggaaactgcaaagcttgagtgcagaagaggaaagtggaattccacgtgtagcggtgaaatgcgtagagatgtggaggaacaccagtggcgaaggcgactttctgggctgtaactgacgctgaggcgcgaaagcgtggggagcaaacaggattagataccctggtagtccacgccgtaaacgatgaatgctaggtgttaggggtttcgatacccttggtgccgaagttaacacattaagcattccgcctggggagtacggtcgcaagactgaaactcaaaggaattgacggggacccgcacaagcagtggagtatgtggtttaattcgaagcaacgcgaagaaccttaccaggtcttgacatccctctgaccgtcctagagatagggctttccttcgggacagaggagacaggtggtgcatggttgtcgtcagctcgtgtcgtgagatgttgggttaagtcccgcaacgagcgcaacccttgatcttagttgccagcactttgggtgggcactctaggatgactgccggtgacaaaccggaggaaggtggggatgacgtcaaatcatcatgccccttatgacctgggctacacacgtactacaatggccgatacaacgggaagcgaaaccgcgaggtggagccaatcctatcaaagtcggtctcagttcggattgcaggctgcaactcgcctgcatgaagtcggaattgctagtaatcgcggatcagcatgccgcggtgaatacgttcccgggtcttgtacacaccgcccgtcacaccacgagagtttacaacacccgaagccggtggggtaaccgcatggagccagccgtcgaaggtggggtagatgattggggtg

SEQ ID NO: 2327 - DNA, 1474 bp, Paenibacillus cellulosilyticus
gacgaacgctggcggcgtgcctaatacatgcaagtcgagcggagttgatgaggtgcttgcacctctgatgcttagcggcggacgggtgagtaacacgtaggcaacctgcctgcaggactgggataacattcggaaacgaatgctaataccggataatcgatttcctcgcatggggagatcgggaaagacggagcaatctgtcacctgtggatgggcctgcggcgcattagctagttggtggggtaacggcctaccaaggcgacgatgcgtagccgacctgagagggtgatcggccacactgggactgagacacggcccagactcctacgggaggcagcagtagggaatcttccgcaatggacgaaagtctgacggagcaacgccgcgtgagtgatgaaggctttcgggtcgtaaagctctgttgccagggaagaacacttgggagagtaactgctcttaaggtgacggtacctgagaagaaagccccggctaactacgtgccagcagccgcggtaatacgtagggggcaagcgttgtccggaattattgggcgtaaagcgcgcgcaggcggctttgtaagtctgtcgtttaagttcggggctcaaccccgtatcgcgatggaaactgcaaggcttgagtgcagaagaggaaagtggaattccacgtgtagcggtgaaatgcgtagagatgtggaggaacaccagtggcgaaggcgactttctgggctgtaactgacgctgaggcgcgaaagcgtggggagcaaacaggattagataccctggtagtccacgccgtaaacgatgaatgctaggtgttaggggtttcaatacccttggtgccgaagttaacacattaagcattccgcctggggagtacgctcgcaagagtgaaactcaaaggaattgacggggacccgcacaagcagtggagtatgtggtttaattcgaagcaacgcgaagaaccttaccaggtcttgacatccctctgaccggtctggagacaggccttcccttcgggacagaggagacaggtggtgcatggttgtcgtcagctcgtgtcgtgagatgttgggttaagtcccgcaacgagcgcaacccttgattttagttgccagcacttcggatgggcactctagaatgactgccggtgacaaaccggaggaaggcggggatgacgtcaaatcatcatgccccttatgacctgggctacacacgtactacaatggccggtacaacgggctgcgaaggagcgatccggagcgaatcctataaagccggtctcagttcggattggaggctgcaactcgcctccatgaagtcggaattgctagtaatcgcggatcagcatgccgcggtgaatacgttcccgggtcttgtacacaccgcccgtcacaccacgagagtttacaacacccgaagccggtggggtaaccgcaaggagccagccgtcgaaggtggggtagatgattggggtg

SEQ ID NO: 2328 - DNA, 1476 bp, Paenibacillus chitinolyticus
gacgaacgctggcggcgtgcctaatacatgcaagtcgagcggacttgatgagaagcttgcttctctgatggttagcggcggacgggtgagtaacacgtaggcaacctgcctgtaagatcgggataactaccggaaacggtagctaagaccggataaccggtttctccgcatggagagatcgtgaaacacggagcaatctgtggcttacggatgggcctgcggcgcattagctagttggtgaggtaacggctcaccaaggcgacgatgcgtagccgacctgagagggtgaacggccacactgggactgagacacggcccagactcctacgggaggcagcagtagggaatcttccgcaatggacgcaagtctgacggagcaacgccgcgtgagtgatgaaggttttcggatcgtaaagctctgttgccagggaagaacgccaaggagagtaactgctctttgggtgacggtacctgagaagaaagccccggctaactacgtgccagcagccgcggtaatacgtagggggcaagcgttgtccggaattattgggcgtaaagcgcgcgcaggcggttttttaagtctggtgtttaatcccgaggctcaacctcggttcgcaccggaaactgggagactggagtgcaggagaggaaagtggaattccacgtgtagcggtgaaatgcgtagagatgtggaggaacaccagtggcgaaggcgactttctggcctgtaactgacgctgaggcgcgaaagcgtggggagcaaacaggattagataccctggtagtccacgccgtaaacgatgcatgctaggtgttaggggtttcgatacccttggtgccgaagttaacacagtaagcatgccgcctggggagtacgctcgcaagagtgaaactcaaaggaattgacggggacccgcacaagcagtggagtatgtggtttaattcgaagcaacgcgaagaaccttaccaggtcttgacatccctctgaccggcttagagataagcctttccttcgggacagaggtgacaggtggtgcatggttgtcgtcagctcgtgtcgtgagatgttgggttaagtcccgcaacgagcgcaacccttgaacttagttgccagcaggtgaagctgggcactctaagttgactgccggtgacaaaccggaggaaggcggggatgacgtcaaatcatcatgccccttatgacctgggctacacacgtactacaatggccggtacaacgggaagcgaagccgcgaggtggagccaatcctacaaaagccggtctcagttcggattgcaggctgcaactcgcctgcatgaagtcggaattgctagtaatcgcggatcagcatgccgcggtgaatacgttcccgggtcttgtacacaccgcccgtcacaccacgagagtttacaacacccgaagtcggtgaggtaaccgcaaggggccagccgccgaaggtggggtagatgattggggtg

SEQ ID NO: 2329 - DNA, 1453 bp, Paenibacillus contaminans
ggcggcgtgcctaatacatgcaagtcgagcggatctttccttcgggaaaggttagcggcggacgggtgagtaacacgtaggcaacctgcctgtaagatcgggataactcacggaaacgtgtgctaaaaccggataggtggtttctcctcctggagagatcaggaaagacggcgcaagctgtcacttacagatgggcctgcggcgcattagctagttggtgaggtaacggctcaccaaggcgacgatgcgtagccgacctgagagggtgaacggccacactgggactgagacacggcccagactcctacgggaggcagcagtagggaatcttcggcaatggacgaaagtctgaccgagcaacgccgcgtgagtgatgaaggttttcggatcgtaaaactctgttgccagggaagaaggatgaggagagtaactgctcttcatttgacggtacctgagaagaaagccccggctaactacgtgccagcagccgcggtaatacgtagggggcaagcgttgtccggaattattgggcgtaaagcgcgcgcaggcggtcttttaagttcggtgtttaaacccagggctcaaccttgggtcgcactggaaactgggagactggagtgtaggagaggaaagtggaattccacgtgtagcggtgaaatgcgtagagatgtggaggaacaccagtggcgaaggcgactttctggcctataactgacgctgaggcgcgaaagcgtggggagcaaacaggattagataccctggtagtccacgccgtaaacgatgcatgctaggtgttaggggtttcgatacccttggtgccgaagtaaacacattaagcatgccgcctggggagtacgctcgcaagagtgaaactcaaaggaattgacggggacccgcacaagcagtggagtatgtggtttaattcgaagcaacgcgaagaaccttaccaggtcttgacatctggatgcaagcactagagatagtgccctccttcgggacatccaagacaggtggtgcatggttgtcgtcagctcgtgtcgtgagatgttgggttaagtcccgcaacgagcgcaacccttgatcttagttgccagcattgagttgggcactctaggatgactgccggtgacaaaccggaggaaggtggggatgacgtcaaatcatcatgccccttatgacctgggctacacacgtactacaatggccggtacaacgggctgcgaagccgcgaggtggagccaatcctaaaaagccggtctcagttcggattgcaggctgcaactcgcctgcatgaagtcggaattgctagtaatcgcggatcagcatgccgcggtgaatacgttcccgggtcttgtacacaccgcccgtcacaccacgagagtttacaacacccgaagtcggtgaggtaaccgcaaggagccagccgccgaaggtggggtagatgattggggtg

SEQ ID NO: 2330 - DNA, 1478 bp, Paenibacillus crassostreae
gacgaacgctggcggcgtgcctaatacatgcaagtcgagcggagtgatttgaaagcttgctttcaaatcacttagcggcggacgggtgagtaacacgtaggtaacctgcctgtaagactgggataactaccggaaacggtagctaataccggataacttgtttcctctcctggggagacactgaaaggcggagcaatctgccacttacagatgggcctgcggcgcattagctagttggtgaggtaacggctcaccaaggcgacgatgcgtagccgacctgagagggtgaacggccacactgggactgagacacggcccagactcctacgggaggcagcagtagggaatcttccgcaatggacgaaagtctgacggagcaacgccgcgtgagtgatgaaggttttcggatcgtaaagctctgttgccagggaagaacgcttgggagagtaactgctctcaaggtgacggtacctgagaagaaagccccggctaactacgtgccagcagccgcggtaatacgtagggggcaagcgttgtccggaattattgggcgtaaagcgcgcgcaggcggtcatttaagtttggtgtttaattccagggctcaaccctgggtcgcactgaaaactgggtgacttgagtacagaagaggagagtggaattccacgtgtagcggtgaaatgcgtagatatgtggaggaacaccagtggcgaaggcgactctctgggctgtaactgacgctgaggcgcgaaagcgtggggagcaaacaggattagataccctggtagtccacgccgtaaacgatgagtgctaggtgttaggggtttcgatacccttggtgccgaagttaacacattaagcactccgcctggggagtacggtcgcaagactgaaactcaaaggaattgacggggacccgcacaagcagtggagtatgtggtttaattcgaagcaacgcgaagaaccttaccaggtcttgacatccctctgaatccactagagatagtggcggccttcgggacagaggagacaggtggtgcatggttgtcgtcagctcgtgtcgtgagatgttgggttaagtcccgcaacgagcgcaacccttatgcttagttgccagcacattatggtgggcactctaagcagactgccggtgacaaaccggaggaaggtggggatgacgtcaaatcatcatgccccttatgacctgggctacacacgtactacaatggccagtacaacgggctgcgaaaccgcgaggtggagccaatcccaacaaagctggtctcagttcggattgtaggctgcaacccgcctacatgaagtcggaattgctagtaatcgcggatcagcatgccgcggtgaatacgttcccgggtcttgtacacaccgcccgtcacaccacgagagtttacaacacccgaagtcggtggggtaacccgcaagggagccagccgccgaaggtggggtagatgattggggtg

SEQ ID NO: 2331 - DNA, 1475 bp, Paenibacillus curdlanolyticus
gacgaacgctggcggcgtgcctaatacatgcaagtcgagcggacttgatggagtgcttgcactcctgaaagttagcggcggacgggtgagtaacacgtaggcaacctgcccgtaagactgggataacattcggaaacgaatgctaataccggataggcgattttctcgcatgagagaatcgggaaagaaggagcaatctttcacttacggatgggcctgcggcgcattagctagttggtggggtaatggctcaccaaggcgacgatgcgtagccgacctgagagggtgatcggccacactgggactgagacacggcccagactcctacgggaggcagcagtagggaatcttccgcaatggacgaaagtctgacggagcaacgccgcgtgagtgaagaaggctttcgggtcgtaaagctctgttgccagggaagaacacttgagagagtaactgctcttgagttgacggtacctgagaagaaagccccggctaactacgtgccagcagccgcggtaatacgtagggggcaagcgttgtccggaattattgggcgtaaagcgcgcgcaggcggctttgtaagtctgtcgtttaagttcggggctcaaccccgtgtcgcgatggaaactgcaaggcttgagtacagaagaggaaagtggaattccacgtgtagcggtgaaatgcgtagagatgtggaggaacaccagtggcgaaggcgactttctgggctgtaactgacgctgaggcgcgaaagcgtggggagcaaacaggattagataccctggtagtccacgccgtaaacgatgaatgctaggtgttaggggtttcaatacccttggtgccgaagttaacacattaagcattccgcctggggagtacgctcgcaagagtgaaactcaaaggaattgacggggacccgcacaagcagtggagtatgtggtttaattcgaagcaacgcgaagaaccttaccaggtcttgacatccctctgaccgtcgcagagatgtgacttcccttcggggcagaggagacaggtggtgcatggttgtcgtcagctcgtgtcgtgagatgttgggttaagtcccgcaacgagcgcaacccttgattttagttgccagcactttaaggtgggcactctagaatgactgccggtgacaaaccggaggaaggcggggatgacgtcaaatcatcatgccccttatgacctgggctacacacgtactacaatggccggtacaacgggctgcgaaagagcgatctggagcgaatcctataaagccggtctcagttcggattgcaggctgcaactcgcctgcatgaagtcggaattgctagtaatcgcggatcagcatgccgcggtgaatacgttcccgggtcttgtacacaccgcccgtcacaccacgagagtttacaacacccgaagccggtggggtaaccgcaaggagccagccgtcgaaggtggggtagatgattggggtg

SEQ ID NO: 2332 - DNA, 1434 bp, Paenibacillus darwinianus
gacgaacgctggcggcgtgcctaatacatgcaagtcgagcggatttagtcgggagcttgctcctgactgagttagcggcggacgggtgagtaacacgtaggtaacctgcccgtaagaccgggataacattcggaaacggatgctaatagcggatacgcaataccctcgcatgggggaattgggaaaggcggagcaatctgccgcttacggatggacctgcggcgcattagctagttggtgaggtaacggctcaccaaggcgacgatgcgtagccgacctgagagggtgatcggccacactgggactgagacacggcccagactcctacgggaggcagcagtagggaatcttccgcaatggacgaaagtctgacggagcaacgccgcgtgagtgaggaaggccttcgggtcgtaaagctctgttgccagggaagaacgggtaggagagtaactgctcttgccatgacggtacctgagaagaaagccccggctaactacgtgccagcagccgcggtaatacgtagggggcaagcgttgtccggaattattgggcgtaaagcgcgcgcaggcggctttgtaagtcttgtgtttaaacgtggggctcaactccaggtcgcatgggaaactgcaaggcttgagtgcagaagaggaaagtggaattccacgtgtagcggtgaaatgcgtagagatgtggaggaacaccagtggcgaaggcgactttctgggctgtaactgacgctgaggcgcgaaagcgtggggagcaaacaggattagataccctggtagtccacgccgtaaacgatgaatgctaggtgttaggggtttcgatacccttggtgccgaagttaacacattaagcattccgcctggggagtacggtcgcaagactgaaactcaaaggaattgacggggacccgcacaagcagtggagtatgtggtttaattcgaagcaacgcgaagaaccttaccaggtcttgacatccccctgaccgcatcagagatggtgttttccttcgggacaggggagacaggtggtgcatggttgtcgtcagctcgtgtcgtgagatgttgggttaagtcccgcaacgagcgcaacccttgatgttagttgccagcaggtaaagctgggcactctaagatgactgccggtgacaaaccggaggaaggtggggatgacgtcaaatcatcatgccccttatgacctgggctacacacgtactacaatggccggtacaacgggaagcgaagtcgcgagatggagccaatcctatcaaagccggtctcagttcggattgcaggctgcaactcgcctgcatgaagtcggaattgctagtaatcgcggatcagcatgccgcggtgaatacgttcccgggtcttgtacacaccgcccgtcacaccacgagagtttacaacacccgaagccggtggggtaacc

SEQ ID NO: 2333 - DNA, 1480 bp, Paenibacillus donghaensis
gacgaacgctggcggcatgcctaatacatgcaagtcgagcggagttcaatcggaagcttgcttccgattggattcagcggcggacgggtgagtaacacgtaggcaacctgccccttagcctgggataactaccggaaacggtagctaataccggataattccttggttctcctgaaccgaggatgaaaggcggagcaatctgcccttaagggatgggcctgcggcgcattagctagttggtgaggtaacggctcaccaaggcgacgatgcgtagccgacctgagagggtgaacggccacactgggactgagacacggcccagactcctacgggaggcagcagtagggaatcttccgcaatgggcgaaagcctgacggagcaatgccgcgtgagtgatgaaggttttcggatcgtaaagctctgttgccagggaagaacgtccggtagagtaactgctatcggagtgacggtacctgagaagaaagccccggctaactacgtgccagcagccgcggtaatacgtagggggcaagcgttgtccggaattattgggcgtaaagcgcgcgcaggcggctatttaagtctggtgtttaaaccttgggctcaacctaaggtcgcactggaaactgggtggcttgagtacagaagaggaaagtggaattccacgtgtagcggtgaaatgcgtagatatgtggaggaacaccagtggcgaaggcgactttctgggctgtaactgacgctgaggcgcgaaagcgtggggagcaaacaggattagataccctggtagtccacgccgtaaacgatgagtgctaggtgttaggggtttcgatacccttggtgccgaagttaacacagtaagcactccgcctggggagtacggtcgcaagactgaaactcaaaggaattgacggggacccgcacaagcagtggagtatgtggtttaattcgaagcaacgcgaagaaccttaccaggtcttgacatccctctgaatctgctagagatagcagcggccttcgggacagaggagacaggtggtgcatggttgtcgtcagctcgtgtcgtgagatgttgggttaagtcccgcaacgagcgcaacccttatgcttagttgccagcacgtgatggtgggcactctaagcagactgccggtgacaaaccggaggaaggtggggatgacgtcaaatcatcatgccccttatgacctgggctacacacgtactacaatggccggtacaaagggctgcgaaaccgcgaggtggagcgaatcccaacaaagccggtctcagttcggattgcaggctgcaactcgcctgcatgaagtcggaattgctagtaatcgcggatcagcatgccgcggtgaatacgttcccgggtcttgtacacaccgcccgtcacaccacgagagtttacaacacccgaagtcggtggggtaacccgcaagggagccagccgccgaaggtggggtagataattggggtg

SEQ ID NO: 2334 - DNA, 1477 bp, Paenibacillus durus
gacgaacgctggcggcgtgcctaatacatgcaagtcgagcggagtttcatcggaagcttgcttccgatgaggcttagcggcggacgggtgagtaacacgtaggcaacctgccccttggactgggataactaccggaaacggtagctaataccggataattcctcttagctcctgctaggaggctgaaaggcggagcaatctgtcaccaagggatgggcctgcggcgcattagctagttggtggggtaacggctcaccaaggcgacgatgcgtagccgacctgagagggtgaacggccacactgggactgagacacggcccagactcctacgggaggcagcagtagggaatcttccgcaatgggcgaaagcctgacggagcaacgccgcgtgagtgatgaaggttttcggatcgtaaagctctgttgccagggaagaacgttcttaagagtaactgcttaaggagtgacggtacctgagaagaaagccccggctaactacgtgccagcagccgcggtaatacgtagggggcaagcgttgtccggaattattgggcgtaaagcgcgcgcaggcggctgtttaagtctggtgtttaaaccatgggctcaacctgtggtcgcactggaaactggacagcttgagtgcagaagaggaaagtggaattccacgtgtagcggtgaaatgcgtagagatgtggaggaacaccagtggcgaaggcgactttctgggctgtaactgacgctgaggcgcgaaagcgtggggagcaaacaggattagataccctggtagtccacgccgtaaacgatgagtgctaggtgttaggggtttcgatacccttggtgccgaagttaacacagtaagcactccgcctggggagtacggtcgcaagactgaaactcaaaggaattgacggggacccgcacaagcagtggagtatgtggtttaattcgaagcaacgcgaagaaccttaccaggtcttgacatccctctgaatcgtctagagataggcgcggccttcgggacagaggagacaggtggtgcatggttgtcgtcagctcgtgtcgtgagatgttgggttaagtcccgcaacgagcgcaacccttgactttagttgccagcaggtgaagctgggcactctagagtgactgccggtgacaaaccggaggaaggtggggatgacgtcaaatcatcatgccccttatgacctgggctacacacgtactacaatggccggtacaacgggaagcgaagccgcgaggcggagccaatcttagaaagccggtctcagttcggattgcaggctgcaactcgcctgcatgaagtcggaattgctagtaatcgcggatcagcatgccgcggtgaatacgttcccgggtcttgtacacaccgcccgtcacaccacgagagtttacaacacccgaagtcggtggggtaaccgcaaggagccagccgccgaaggtggggtagatgattggggtg

SEQ ID NO: 2335 - DNA, 1454 bp, Paenibacillus elgii
cgaacgctggcggcgtgcctaatacatgcaagtcgagcggacccttcggggttagcggcggacgggtgagtaacacgtaggcaacctgcctgtaagactgggataactaccggaaacggtagctaagaccggataagtgattctttcgcatgagaggatcaagaaacacggggcaacctgtgacttacagatgggcctgcggcgcattagctagttggtggggtaacggctcaccaaggcgacgatgcgtagccgacctgagagggtgatcggccacactgggactgagacacggcccagactcctacgggaggcagcagtagggaatcttccgcaatggacgcaagtctgacggagcaacgccgcgtgagtgatgaaggttttcggatcgtaaagctctgttgccagggaagaacgtcgtggagagtaactgctctgcgaatgacggtacctgagaagaaagccccggctaactacgtgccagcagccgcggtaatacgtagggggcaagcgttgtccggaattattgggcgtaaagcgcgcgcaggcggccgcttaagtctggtgtttaagcccgaggctcaacctcggttcgcactggaaactgggtggcttgagtgcaggagaggaaagcggaattccacgtgtagcggtgaaatgcgtagagatgtggaggaacaccagtggcgaaggcggctttctggcctgtaactgacgctgaggcgcgaaagcgtggggagcaaacaggattagataccctggtagtccacgccgtaaacgatgagtgctaggtgttaggggtttcgatacccttggtgccgaagtaaacacaataagcactccgcctggggagtacgctcgcaagagtgaaactcaaaggaattgacggggacccgcacaagcagtggagtatgtggtttaattcgaagcaacgcgaagaaccttaccaggtcttgacatccctctgaatatcctagagatagggtaggccttcgggacagaggagacaggtggtgcatggttgtcgtcagctcgtgtcgtgagatgttgggttaagtcccgcaacgagcgcaacccttgaacttagttgccagcattgagttgggcactctaagttgactgccggtgacaaaccggaggaaggtggggatgacgtcaaatcatcatgccccttatgacctgggctacacacgtactacaatggccggtacaacgggaagcgaagtcgcgagatggagccaatcctaagaaagccggtctcagttcggattgcaggctgcaactcgcctgcatgaagtcggaattgctagtaatcgcggatcagcatgccgcggtgaatacgttcccgggtcttgtacacaccgcccgtcacaccacgagagtttacaacacccgaagtcggtggggtaaccgcaaggagccagccgccgaaggtggggtagatgattggggtg

SEQ ID NO: 2336 - DNA, 1335 bp, Paenibacillus etheri
tcgagcggagttactttgaaagcttgctttcaaagtaacttagcggcggacgggtgagtaacacgtaggcaacctgccccttagactgggataactaccggaaacggtagctaataccggataatttctttcttctcctgaagaaagaatgaaagacggagcaatctgtcactgagggatgggcctgcggcgcattagctagttggtggggtaacggcccaccaaggcgacgatgcgtagccgacctgagagggtgaacggccacactgggactgagacacggcccagactcctacgggaggcagcagtagggaatcttccgcaatggacgaaagtctgacggagcaacgccgcgtgagtgatgaaggttttcggatcgtaaagctctgttgccagggaagaacgtccggtagagtaactgctaccggagtgacggtacctgagaagaaagccccggctaactacgtgccagcagccgcggtaatacgtagggggcaagcgttgtccggaattattgggcgtaaagcgcgcgcaggcggtcatttaagtctggtgtttaaaccttgggctcaacctaaggtcgcactggaaactgggtgacttgagtacagaagaggaaagtggaattccacgtgtagcggtgaaatgcgtagatatgtggaggaacaccagtggcgaaggcgactttctgggctgtaactgacgctgaggcgcgaaagcgtggggagcaaacaggattagataccctggtagtccacgccgtaaacgatgagtgctaggtgttaggggtttcgatacccttggtgccgaagttaacacagtaagcactccgcctggggagtacggtcgcaagactgaaactcaaaggaattgacggggacccgcacaagcagtggagtatgtggtttaattcgaagcaacgcgaagaaccttaccaggtcttgacatccctctgaatccgctaaagatagtggcggccttcgggacagaggagacaggtggtgcatggttgtcgtcagctcgtgtcgtgagatgttgggttaagtcccgcaacgagcgcaacccttaactttagttgccagcaagtaatgttgggcactctagagtgactgccggtgacaaaccggaggaaggtggggatgacgtcaaatcatcatgccccttatgacctgggctacacacgtactacaatggccggtacaacgggaagcgaagccgcgaggtgaagccaatcccatcaaagccggtctcatttcggattgcaggctgcaactcgcctgcatgaagttcggaattgctagtaatcgcggatcagcatgccgcggtgaatacgtt

SEQ ID NO: 2337 - DNA, 1451 bp, Paenibacillus faecis
tacatgcaagtcgagcggagttaatcgggagcttgctcctggttgacttagcggcggacgggtgagtaacacgtaggcaacctgcccgtaagaccgggataactagcggaaacgttagctaataccggataatcaagtttctcgcatgggggacttgggaaaggcggagcaatctgtcacttacggatgggcctgcggcgcattagctagttggtggggtaacggctcaccaaggcgacgatgcgtagccgacctgagagggtgaacggccacactgggactgagacacggcccagactcctacgggaggcagcagtagggaatcttccgcaatggacgaaagtctgacggagcaacgccgcgtgagtgaagaaggttttcggatcgtaaagctctgttgccagggaagaacgtccgctagagtaactgctagcggagtgacggtacctgagaagaaagccccggctaactacgtgccagcagccgcggtaatacgtagggggcaagcgttgtccggaattattgggcgtaaagcgcgcgcaggcggctatttaagtctggtgtttaatcctggggctcaaccccgggtcgcactggaaactgggtggcttgagtgcagaagaggagagtggaattccacgtgtagcggtgaaatgcgtagagatgtggaggaacaccagtggcgaaggcgactctctgggctgtaactgacgctgaggcgcgaaagcgtggggagcaaacaggattagataccctggtagtccacgccgtaaacgatgaatgctaggtgttaggggtttcgatacccttggtgccgaagttaacacattaagcattccgcctggggagtacggtcgcaagactgaaactcaaaggaattgacggggacccgcacaagcagtggagtatgtggtttaattcgaagcaacgcgaagaaccttaccaggtcttgacatccccctgaccggtacagagatgtacctttccttcgggacaggggagacaggtggtgcatggttgtcgtcagctcgtgtcgtgagatgttgggttaagtcccgcaacgagcgcaacccttgactttagttgccagcaggtcaagctgggcactctagagtgactgccggtgacaaaccggaggaaggtggggatgacgtcaaatcatcatgccccttatgacctgggctacacacgtactacaatggctggtacaacgggaagcgaaggagcgatccggagcgaatcctaaaaagccagtctcagttcggattgcaggctgcaactcgcctgcatgaagtcggaattgctagtaatcgcggatcagcatgccgcggtgaatacgttcccgggtcttgtacacaccgcccgtcacaccacgagagtttacaacacccgaagtcggtgaggtaaccgcaaggagccagccgccgaaggtggggtagatgattggggtg

SEQ ID NO: 2338 - DNA, 1466 bp, Paenibacillus ferrarius
gacgaacgctggcggcgtgcctaatacatgcaagtcgagcggagcatttccttcggggaatgcttagcggcggacgggtgagtaacacgtaggtaacctgcctatcagatcgggataactatcggaaacgatagctaagaccggataactggttttctcgcatgagagaattatgaaacacggagcaatctgtggctgatagatgggcctgcggcgcattagctagttggtggggtaacggctcaccaaggcgacgatgcgtagccgacctgagagggtgaacggccacactgggactgagacacggcccagactcctacgggaggcagcagtagggaatcttccgcaatggacgcaagtctgacggagcaacgccgcgtgagtgatgaaggttttcggatcgtaaagctctgttgccctagacgaacagcatgaggagtaactgccttgtgtgtgacggtataggagaagaaagccccggctaactacgtgccagcagccgcggtaatacgtagggggcaagcgttgtccggaattattgggcgtaaagcgcgcgcaggcggttaattaagttgggtgtttaagcccggggctcaaccccggttcgcatccaaaactggttgacttgagcgtaggaaaggaaagtggaattccacgtgtagcggtgaaatgcgtagagatgtggaggaacaccagtggcgaaggcgactttctggcctataactgacgctgaggcgcgaaagcgtggggagcaaacaggattagataccctggtagtccacgccgtaaacgatgcatactaggtgtcggggattcgatttctcggtgccgaagttaacacagtaagtatgccgcctggggagtacgctcgcaagagtgaaactcaaaggaattgacggggacccgcacaagcagtggagtatgtggtttaattcgaagcaacgcgaagaaccttaccaggtcttgacatcccaatgtaacgcctagagataggcgccctcttcggagcattggagacaggtggtgcatggttgtcgtcagctcgtgtcgtgagatgttgggttaagtcccgcaacgagcgcaacccttgatcttagttgccagcacttcgggtgggcactctaagatgactgccggtgacaaaccggaggaaggtggggatgacgtcaaatcatcatgccccttatgacctgggctacacacgtactacaatggtcggtacaacgggaagcgaagccgcgaggcggagcaaatccttataagccgatctcagttcggattgcaggctgcaactcgcctgcatgaagtcggaattgctagtaatcgcggatcagcatgccgcggtgaatacgttcccgggtcttgtacacaccgcccgtcacaccacgagagtttacaacacccgaagtcggtggggtaacccgcaagggagccagccgccgaaggtggggtagatgattggggtg

SEQ ID NO: 2339 - DNA, 1449 bp, Paenibacillus fonticola
tgcaagtcgagcgaggttattttggaagcttgcttccgaaataacctagcggcggacgggtgagtaatacgtaggcaacctgcccctatgctcgggataactagcggaaacgttagctaataccggataatttgctttctcgcatgagggagcaatgaaagacggagcaatctgtcacaaagggatgggcctacggcgcattagctagttggtaaggtaaaggcttaccaaggcgacgatgcgtagccgacctgagagggtgaacggccacactgggactgagacacggcccagactcctacgggaggcagcagtagggaatcttccgcaatggacgcaagtctgacggagcaacgccgcgtgagtgatgaaggttttcggatcgtaaagctctgttgccagggaagaacgtccgtgagagtaactgctcacggagtgacggtacctgagaagaaagccccggctaactacgtgccagcagccgcggtaatacgtagggggcaagcgttgtccggaattattgggcgtaaagcgcgcgcaggcggtcatttaagtctggtgtataatcccggggctcaactccgggccgcactggaaactgggtggcttgagtgcagaagaggagagtggaattccacgtgtagcggtgaaatgcgtagagatgtggaggaacaccagtggcgaaagcgactctctgggctgtaactgacgctgaggcgcgaaagcgtgggtagcaaacaggattagataccctggtagtccacgccgtaaacgatgaatgctaggtgttaggggtttcgatacccttggtgccgaagtaaacacattaagcattccgcctggggagtacggtcgcaagactgaaactcaaaggaattgacggggacccgcacaagcagtggagtatgtggtttaattcgaagcaacgcgaagaaccttaccaggtcttgacatgcctctgaccgctctagagatagagcttctcttcggagcaggggacacaggtggtgcatggttgtcgtcagctcgtgtcgtgagatgttgggttaagtcccgcaacgagcgcaacccttaactttagttgccagcatttcggatgggcactctagagtgactgccggtgacaaaccggaggaaggtggggatgacgtcaaatcatcatgccccttatgacctgggctacacacgtactacaatggccagtacaacgggaagcgaagccgcgaggtggagcgaatcctatcaaagctggtctcagttcggattgcaggctgcaactcgcctgcatgaagtcggaattgctagtaatcgcggatcagcatgccgcggtgaatacgttcccgggtcttgtacacaccgcccgtcacaccacgagagtttacaacacccgaagtcggtgaggtaaccgcaaggagccagccgccgaaggtggggtagatgacaggggtg

SEQ ID NO: 2340 - DNA, 1456 bp, Paenibacillus ginsengarvi
  misc_feature (149)..(149): n is a, c, g, or t
  misc_feature (975)..(975): n is a, c, g, or t
gacgaacgctggcggcgtgcctaatacatgcaagtcgagcgaatccttcggggttagcggcggacgggtgagtaacacgtaggcaacctgcccgtaagtctgggataactatcggaaacgatagctaataccggatacgaagagagaangcatgttctcttttggaaaggcggagcaatctgccacttacggatgggcctgcggcgcattagctagtaggcggggtaacggcccacctaggcgacgatgcgtagccgacctgagagggtgatcggccacactgggactgagacacggcccagactcctacgggaggcagcagtagggaatcttccgcaatgggcgaaagcctgacggagcaacgccgcgtgagtgatgaaggttttcggatcgtaaagctctgttgccagagaagaacgccgaggagagtaactgctcttcgggtgacggtatctgagaagaaagccccggctaactacgtgccagcagccgcggtaatacgtagggggcaagcgttgtccggaattattgggcgtaaagcgcgcgcaggcggctgtttaagtctggtgtttaagcccggggctcaaccccggttcgcactggaaactggatggcttgagtgcaggagagggaagtggaattccacgtgtagcggtgaaatgcgtagagatgtggaggaacaccagtggcgaaggcgacttcctggcctgtaactgacgctgaggcgcgaaagcgtggggagcaaacaggattagataccctggtagtccacgccgtaaacgatgagtgctaggtgttaggggtttcgatacccttggtgccgaagtaaacacagtaagcactccgcctggggagtacggtcgcaagactgaaactcaaaggaattgacggggacccgcacaagcagtggagtatgtggtttaattcgaagcaacgcgaagaaccttaccaggtcttgacatccccctgaatatnctagagatagggtaggccttcgggacaggggagacaggtggtgcatggttgtcgtcagctcgtgtcgtgagatgttgggttaagtcccgcaacgagcgcaacccttgattttagttgccagcacttcgggtgggcactctagaatgactgccggtgacaaaccggaggaaggcggggatgacgtcaaatcatcatgccccttatgacctgggctacacacgtactacaatggccggtacaacgggccgcgaagccgcgaggtggagccaatcctaaaaagccggtctcagttcggattgcaggctgcaactcgcctgcatgaagtcggaattgctagtaatcgcggatcagcatgccgcggtgaatacgttcccgggtcttgtacacaccgcccgtcacaccacgagagtttacaacacccgaagtcggtgaggtaaccgcaaggagccagccgccgaaggtggggtagatgattggggtg

SEQ ID NO: 2341 - DNA, 1472 bp, Paenibacillus ginsengihumi
  misc_feature (49)..(49): n is a, c, g, or t
  misc_feature (1432)..(1432): n is a, c, g, or t
gacgaacgctggcggcgtgcctaatacatgcaagtcgagcgctggatgntttccttcggggaattatccggagcggcggacgggtgagtaacacgtaggcaacctgcccggaagaccgggataactaccggaaacggtagctaataccggataggtggcttcttcgcatgggggagccaagaaacgcggagcaatctgcggcttacggatgggcctgcggcgcattagctagttggcagggtaacggcctaccaaggcgacgatgcgtagccgacctgagagggtgatcggccacactgggactgagacacggcccagactcctacgggaggcagcagtagggaatcttccgcaatgggcgaaagcctgacggagcaacgccgcgtgagtgaggaaggtcttcggatcgtaaagctctgttgccaaggaagaacggcccggagagtcactgctccgggagtgacggtacttgagaagaaagccccggctaactacgtgccagcagccgcggtaatacgtagggggcaagcgttgtccggaattattgggcgtaaagcgcgcgcaggcggtctgttaagtcttgtgtttaagcccggggctcaaccccggttcgcatgggaaactggcagacttgagtgcaggagaggaaagcggaattccacgtgtagcggtgaaatgcgtagagatgtggaggaacaccagtggcgaaggcggctttctggactgtaactgacgctgaggcgcgaaagcgtggggagcaaacaggattagataccctggtagtccacgccgtaaacgatgagtgctaggtgtcgggggtttcgatacccgcggtgccgaagttaacgcaataagcactccgcctggggagtacgctcgcaagagtgaaactcaaaggaattgacggggacccgcacaagcagtggagtatgtggtttaattcgaagcaacgcgaagaaccttaccaggtcttgacatccctctgaccggtgcagagatgtgcctttccttcgggacagaggagacaggtggtgcatggttgtcgtcagctcgtgtcgtgagatgttgggttaagtcccgcaacgagcgcaacccttagctttagttgccagcatgagagatgggcactctagagcgactgccggtgacaaaccggaggaaggtggggatgacgtcaaatcatcatgccccttatgacctgggctacacacgtactacaatggccggtacagagggaagcgaaggagcgatctggagcgaatcccaaaaaagcggtctcagttcggattgcaggctgcaactcgcctgcatgaagtcggaattgctagtaatcgcggatcagcatgccgcggtgaatacgttcccgggtcttgtacacaccgcccgtcacaccacgagagtttacaacacccgaagtcggtgaggtaaccgnaaggagccagccgccgaaggtggggtagatgattggggtg

SEQ ID NO: 2342 - DNA, 1480 bp, Paenibacillus glacialis
gacgaacgctggcggcatgcctaatacatgcaagtcgagcggagtcattttggaagcttgcttccaaaatgacttagcggcggacgggtgagtaacacgtaggtaacctgcctataagactgggataactaccggaaacggtagctaataccggataatttatttcttctcatgaagagatactgaaaggcggagtaatctgccacttatagatgggcctgcggcgcattagctagttggtgaggtaacggctcaccaaggcgacgatgcgtagccgacctgagagggtgaacggccacactgggactgagacacggcccagactcctacgggaggcagcagtagggaatcttccgcaatggacgaaagtctgacggagcaatgccgcgtgagtgatgaaggttttcggatcgtaaagctctgttgccagggaagaacgcttgggagagtaactgctctcaaggtgacggtacctgagaagaaagccccggctaactacgtgccagcagccgcggtaatacgtagggggcaagcgttgtccggaattattgggcgtaaagcgcgcgcaggcggtcatttaagtctggtgtttaatcctggggctcaaccccaggtcgcactggaaactggatgacttgagtacagaagaggagagtggaattccacgtgtagcggtgaaatgcgtagatatgtggaggaacaccagtggcgaaggcgactctctgggctgtaactgacgctgaggcgcgaaagcgtggggagcaaacaggattagataccctggtagtccacgccgtaaacgatgagtgctaggtgttaggggtttcgatacccttggtgccgaagttaacacattaagcactccgcctggggagtacggtcgcaagactgaaactcaaaggaattgacggggacccgcacaagcagtggagtatgtggtttaattcgaagcaacgcgaagaaccttaccaggtcttgacatccctctgaatccactagagatagtggcggccttcgggacggaggagacaggtggtgcatggttgtcgtcagctcgtgtcgtgagatgttgggttaagtcccgcaacgagcgcaacccttatgcttagttgccagcacattatggttggcactctaagcagactgccggtgacaaaccggaggaaggtggggatgacgtcaaatcaccatgccccttatgacctgggctacacacgtactacaatggccggtacaacgggctgcgaaatcgcgagatggagccaatcccaccaaagccggtctcagttcggattgcaggctgcaacccgcctgcatgaagtcggaattgctagtaatcgcggatcagcatgccgcggtgaatacgttcccgggtcttgtacacaccgcccgtcacaccacgagagtttacaacacccgaagtcggtggggtaacccgcaagggagccagccgccgaaggtggggtagatgattggggtg

SEQ ID NO: 2343 - DNA, 1481 bp, Paenibacillus graminis
gacgaacgctggcggcgtgcctaatacatgcaagtcgagcggatttactggagtgcttgcactccagtaggttagcggcggacgggtgagtaacacgtaggcaacctaccctctagactgggataactaccggaaacggtagctaataccggataattccctgacccccctgggctagggatgaaaggcggagcaatctgctgctagaggatgggcctgcggcgcattagctagttggtggggtaacggcctaccaaggcgacgatgcgtagccgacctgagagggtgaacggccacactgggactgagacacggcccagactcctacgggaggcagcagtagggaatcttccgcaatgggcgaaagcctgacggagcaacgccgcgtgagtgatgaaggttttcggatcgtaaagctctgttgccagggaagaacgtccggtagagtaactgctgccggagtgacggtacctgagaagaaagccccggctaactacgtgccagcagccgcggtaatacgtagggggcaagcgttgtccggaattattgggcgtaaagcgcgcgcaggcggctatttaagtctggtgtttaaaccttgggctcaacctggggtcgcactggaaactgggtggcttgagtacagaagaggaaagtggaattccacgtgtagcggtgaaatgcgtagagatgtggaggaacaccagtggcgaaggcgactttctgggctgtaactgacgctgaggcgcgaaagcgtggggagcaaacaggattagataccctggtagtccacgccgtaaacgatgagtgctaggtgttaggggtttcgatacccttggtgccgaagttaacacagtaagcactccgcctggggagtacggtcgcaagactgaaactcaaaggaattgacggggacccgcacaagcagtggagtatgtggtttaattcgaagcaacgcgaagaaccttaccaggtcttgacatccaactaacgaagcagagatgcattaggtgcccttcggggaaagttgagacaggtggtgcatggttgtcgtcagctcgtgtcgtgagatgttgggttaagtcccgcaacgagcgcaacccttgactttagttgccagcaggtaaggctgggcactctagagtgactgccggtgacaaaccggaggaaggtggggatgacgtcaaatcatcatgccccttatgacctgggctacacacgtactacaatggccggtacaacgggaagcgaagccgcgaggtggagccaatcccagcaaagccggtctcagttcggattgcaggctgcaactcgcctgcatgaagtcggaattgctagtaatcgcggatcagcatgccgcggtgaatacgttcccgggtcttgtacacaccgcccgtcacaccacgagagtttacaacacccgaagtcggtggggtaacccgcaagggggccagccgccgaaggtggggtagatgattggggtg

SEQ ID NO: 2344 - DNA, 1453 bp, Paenibacillus hemerocallicola
gacgaacgctggcggcgtgcctaatacatgcaagtcgagcgaggccttcgggcctagcggcggacgggtgagtaacacgtaggcaacctgcctgtaagcttgggataactatcggaaacgatagctaataccgaatagatggaggaagggcatccttactcttggaaaggcggagcaatctgccacttacggatgggcctgcggcgcattagctagttggcggggtaacagcccaccaaggcgacgatgcgtagccgacctgagagggtgatcggccacactgggactgagacacggcccagactcctacgggaggcagcagtagggaatcttccgcaatgggcgaaagcctgacggagcaacgccgcgtgagtgacgaaggtcttcggatcgtaaagctctgttgccaaagaagaacggcttggagagtaactgctctgagtttgacggtatttgagaagaaagccccggctaactacgtgccagcagccgcggtaatacgtagggggcaagcgttgttcggattattgggcgtaagcgcgcgcaggcggctgtttaagtctggtgtttaagcccggggctcaaccccggttcgcaccggaaactggatggcttgagtgcaggagagggaagtggaattccacgtgtagcggtgaaatgcgtagagatgtggaggaacaccagtggcgaaggcgacttcctggcctgtaactgacgctgaggcgcgaaagcgtggggagcaaacaggattagataccctggtagtccacgccgtaaacgatgagtgctaggtgttaggggtttcgatacccttggtgccgaagttaacacagtaagcactccgcctggggagtacggtcgcaagactgaaactcaaaggaattgacggggacccgcacaagcagtggagtatgtggtttaattcgaagcaacgcgaagaaccttaccaggtcttgacatccctctgaaatctctagagatagaggcttccttcgggacagaggagacaggtggtgcatggttgtcgtcagctcgtgtcgtgagatgttgggttaagtcccgcaacgagcgcaacccttgatcttagttgccagcacctcgggtgggcactctaggatgactgccggtgacaaaccggaggaaggcggggatgacgtcaaatcatcatgccccttatgacctgggctacacacgtactacaatggccggtacaacgggccgcgaagccgcgaggtggagccaatcctagaaagccggtctcagttcggattgcaggctgcaactcgcctgcatgaagtcggaattgctagtaatcgcggatcagcatgccgcggtgaatacgttcccgggtcttgtacacaccgcccgtcacaccacgagagtttacaacacccgaagtcggtgaggtaaccgcaaggagccagccgccgaagtggggtagatgattggggtg

SEQ ID NO: 2345 - DNA, 1477 bp, Paenibacillus herberti
gacgaacgctggcggcgtgcctaatacatgcaagtcgagcggattgatgagggagcttgcttccgattcagttagcggcggacgggtgagtaacacgtaggcaacctgccctcaagactgggataaccttcggaaacggatgctaataccagataggcggtttctccacctggagagatcgagaaagacggagcaatctgttacttggggatgggcctgcggcgcattagctagttggtgaggtaacggctcaccaaggcgacgatgcgtagccgacctgagagggtgatcggccacactgggactgagacacggcccagactcctacgggaggcagcagtagggaatcttccgcaatggacgaaagtctgacggagcaacgccgcgtgagtgaggaaggccttcgggtcgtaaagctctgttgccagggaagaacgggtagaggagtaactgcctttgccatgacggtacctgagaagaaagccccggctaactacgtgccagcagccgcggtaatacgtagggggcaagcgttgtccggaattattgggcgtaaagcgcgcgcaggcggctttgtaagtctggtgtttaatcttggggctcaaccccaagtcgcacgagaaactgcaaggcttgagtgcagaagaggaaagtggaattccacgtgtagcggtgaaatgcgtagagatgtggaggaacaccagtggcgaaggcgactttctgggctgtaactgacgctgaggcgcgaaagcgtggggagcaaacaggattagataccctggtagtccacgccgtaaacgatgaatgctaggtgttaggggtttcgatacccttggtgccgaagttaacacaataagcattccgcctggggagtacgctcgcaagagtgaaactcaaaggaattgacggggacccgcacaagcagtggagtatgtggtttaattcgaagcaacgcgaagaaccttaccaggtcttgacatccctctgaatctgctagagatagcagcggccttcgggacagaggagacaggtggtgcatggttgtcgtcagctcgtgtcgtgagatgttgggttaagtcccgcaacgagcgcaacccttgaattcagttgccagcacatcatggtgggcactctgaattgactgccggtgacaaaccggaggaaggcggggatgacgtcaaatcatcatgccccttatgacctgggctacacacgtactacaatggccggtacaacgggccgcgaaaccgcgaggtggagccaatcctaaaaagccggtctcagttcggattgcaggctgcaactcgcctgcatgaagtcggaattgctagtaatcgcggatcagcatgccgcggtgaatacgttcccgggtcttgtacacaccgcccgtcacaccacgagagtttacaacacccgaagtcggtggggtaacccgcaagggagccagccgccgaaggtggggtagatgattggggtg

SEQ ID NO: 2346 - DNA, 1477 bp, Paenibacillus ihbetae
gacgaacgctggcggcgtgcctaatacatgcaagtcgagcggagcaacggtttccttcgggaaaccattagcttagcggcggacgggtgagtaacacgtaggcaacctgccctcaagactgggataactaccggaaacggtagctaataccggataattaaatccgctgcatggcggggttatgaaaggcggagcaatctgtcacttgaggatgggcctgcggcgcattagctagttggtgaggtaacggctcaccaaggcgacgatgcgtagccgacctgagagggtgaacggccacactgggactgagacacggcccagactcctacgggaggcagcagtagggaatcttccgcaatgggcgaaagcctgacggagcaacgccgcgtgagtgatgaaggttttcggatcgtaaagctctgttgccagggaagaacgtctcatagagtaactgctatgagagtgacggtacctgagaagaaagccccggctaactacgtgccagcagccgcggtaatacgtagggggcaagcgttgtccggaattattgggcgtaaagcgcgcgcaggcggttctttaagtctggtgtttaaacccgaggctcaacttcgggacgcactggaaactggggaacttgagtgcagaagaggagagtggaattccacgtgtagcggtgaaatgcgtagatatgtggaggaacaccagtggcgaaggcgactctctgggctgtaactgacgctgaggcgcgaaagcgtggggagcgaacaggattagataccctggtagtccacgccgtaaacgatgaatgctaggtgttaggggtttcgatacccttggtgccgaagttaacacattaagcattccgcctggggagtacggtcgcaagactgaaactcaaaggaattgacggggacccgcacaagcagtggagtatgtggtttaattcgaagcaacgcgaagaaccttaccaagtcttgacatccctctgaatcctctagagatagaggcggccttcgggacagaggagacaggtggtgcatggttgtcgtcagctcgtgtcgtgagatgttgggttaagtcccgcaacgagcgcaacccttgatcttagttgccagcacttaaggtgggcactctaaggtgactgccggtgacaaaccggaggaaggtggggatgacgtcaaatcatcatgccccttatgacttgggctacacacgtactacaatggctggtacaacgggaagcgaaggagcgatctggagccaatcctaaaaagccagtctcagttcggattgcaggctgcaactcgcctgcatgaagtcggaattgctagtaatcgcggatcagcatgccgcggtgaatacgttcccgggtcttgtacacaccgcccgtcacaccacgagagtttacaacacccgaagtcggtggggtaacccttacgggagccagccgccgaaggtggggtagatgattggggtg

SEQ ID NO: 2347 - DNA, 1467 bp, Paenibacillus jilunlii
ggcggcgtgcctaatacatgcaagtcgagcggagtcttgttggaagcttgcttccaacctggcttagcggcggacgggtgagtaacacgtaggcaacctaccctctagactgggataactaccggaaacggtagctaataccggataattccttggccctcctgggcttgggatgaaaggcggagcaatctgctgctagaggatgggcctgcggcgcattagctagttggtggggtaacggcccaccaaggcgacgatgcgtagccgacctgagagggtgaacggccacactgggactgagacacggcccagactcctacgggaggcagcagtagggaatcttccgcaatgggcgaaagcctgacggagcaacgccgcgtgagtgatgaaggttttcggatcgtaaagctctgttgccagggaagaacgtccggtagagtaactgctgccggagtgacggtacctgagaagaaagccccggctaactacgtgccagcagccgcggtaatacgtagggggcaagcgttgtccggaattattgggcgtaaagcgcgcgcaggcggcgacttaagtctggtgtttaaaccttgggctcaacctggggtcgcactggaaactgggtggcttgagtacagaagaggaaagtggaattccacgtgtagcggtgaaatgcgtagagatgtggaggaacaccagtggcgaaggcgactttctgggctgtaactgacgctgaggcgcgaaagcgtggggagcaaacaggattagataccctggtagtccacgccgtaaacgatgagtgctaggtgttaggggtttcgatacccttggtgccgaagttaacacagtaagcactccgcctggggagtacggtcgcaagactgaaactcaaaggaattgacggggacccgcacaagcagtggagtatgtggtttaattcgaagcaacgcgaagaaccttaccaggtcttgacatccaactaacgaagcagagatgcattaggtgcccttcggggaaagttgagacaggtggtgcatggttgtcgtcagctcgtgtcgtgagatgttgggttaagtcccgcaacgagcgcaacccttgactttagttgccagcaggttgagctgggcactctagagtgactgccggtgacaaaccggaggaaggtggggatgacgtcaaatcatcatgccccttatgacctgggctacacacgtactacaatggccggtacaacgggaagcgaagccgcgaggtggagccaatcccagcaaagccggtctcagttcggattgcaggctgcaactcgcctgcatgaagtcggaattgctagtaatcgcggatcagcatgccgcggtgaatacgttcccgggtcttgtacacaccgcccgtcacaccacgagagtttacaacacccgaagtcggtggggtaacccgcaagggggccagccgccgaaggtggggtagatgatt

SEQ ID NO: 2348 - DNA, 1478 bp, Paenibacillus kribbensis
gacgaacgctggcggcgtgcctaatacatgcaagtcgagcggggtcatgtagaagcttgcttctacatgacctagcggcggacgggtgagtaacacgtaggcaacctgcccacaagacagggataactaccggaaacggtagctaatacccgatacatccttttcctgcatgggagaaggaggaaagacggagcaatctgtcacttgtggatgggcctgcggcgcattagctagttggtggggtaaaggcctaccaaggcgacgatgcgtagccgacctgagagggtgatcggccacactgggactgagacacggcccagactcctacgggaggcagcagtagggaatcttccgcaatgggcgaaagcctgacggagcaacgccgcgtgagtgatgaaggttttcggatcgtaaagctctgttgccagggaagaacgcttgggagagtaactgctctcaaggtgacggtacctgagaagaaagccccggctaactacgtgccagcagccgcggtaatacgtagggggcaagcgttgtccggaattattgggcgtaaagcgcgcgcaggcggctctttaagtctggtgtttaatcccgaggctcaacttcgggtcgcactggaaactggagagcttgagtgcagaagaggagagtggaattccacgtgtagcggtgaaatgcgtagagatgtggaggaacaccagtggcgaaggcgactctctgggctgtaactgacgctgaggcgcgaaagcgtggggagcaaacaggattagataccctggtagtccacgccgtaaacgatgaatgctaggtgttaggggtttcgatacccttggtgccgaagttaacacattaagcattccgcctggggagtacggtcgcaagactgaaactcaaaggaattgacggggacccgcacaagcagtggagtatgtggtttaattcgaagcaacgcgaagaaccttaccaggtcttgacatccctctgaccggtctagagatagatctttccttcgggacagaggagacaggtggtgcatggttgtcgtcagctcgtgtcgtgagatgttgggttaagtcccgcaacgagcgcaacccttatgcttagttgccagcaggtgaagctgggcactctaagcagactgccggtgacaaaccggaggaaggtggggatgacgtcaaatcatcatgccccttatgacctgggctacacacgtactacaatggccggtacaacgggaagcgaaatcgcgaggtggagccaatcctagaaaagccggtctcagttcggattgtaggctgcaactcgcctacatgaagtcggaattgctagtaatcgcggatcagcatgccgcggtgaatacgttcccgggtcttgtacacaccgcccgtcacaccacgagagtttacaacacccgaagtcggtggggtaacccgcaagggagccagccgccgaaggtggggtagatgattggggtg

SEQ ID NO: 2349 - DNA, 1467 bp, Paenibacillus lentimorbus
  misc_feature (182)..(182): n is a, c, g, or t
tgcctaatacatgcaagtcgagcggagcgacggttcccttcggggaaccgttagcttagcggcggacgggtgagtaatacgtaggtaacctgcccttaagaccgggataactcacggaaacgtgggctaataccggataggcgatttcctcgcatgagggaatcgggaaaggcggttccgantaatcggggctgccacttatggatggacctacggcgcattagctagttggtggggtaacggctcaccaaggcgacgatgcgtagccgacctgagagggtgatcggccacactgggactgagacacggcccagactcctacgggaggcagcagtagggaatcttccgcaatggacgcaagtctgacggagcaacgccgcgtgagtgatgaaggttttcggatcgtaaagctctgttgccagggaagaacgctatggagagtaactgctctataggtgacggtacctgagaagaaagccccggctaactacgtgccagcagccgcggtaatacgtagggggcaagcgttgtccggaattattgggcgtaaagcgcgcgcaggcggtcatgtaagtctggtgtttaaacccggggctcaactccgggtcgcatcggaaactgtgtgacttgagtgcagaagaggaaagtggaattccacgtgtagcggtgaaatgcgtagagatgtggaggaacaccagtggcgaaggcgactttctgggctgtaactgacgctgaggcgcgaaagcgtggggagcaaacaggattagataccctggtagtccacgccgtaaacgatgaatgctaggtgttaggggtttcgatacccttggtgccgaagttaacacattaagcattccgcctggggagtacggtcgcaagactgaaactcaaaggaattgacggggacccgcacaagcagtggagtatgtggtttaattcgaagcaacgcgaagaaccttaccaggtcttgacatcccactgaccgctctagagatagagcttcccttcggggcagaggagacaggtggtgcatggttgtcgtcagctcgtgtcgtgagatgttgggttaagtcccgcaacgagcgcaacccttaactttagttgccagcattgagttgggcactctagagtgactgccggtgacaaaccggaggaaggtggggatgacgtcaaatcatcatgccccttatgacctgggctacacacgtactacaatggctggtacaacgggaggcgaagccgcgaggtggagcgaatcctaaaaagccagtctcagttcggattgcaggctgcaactcgcctgcatgaagtcggaattgctagtaatcgcggatcagcatgccgcggtgaatacgttcccgggtcttgtacacaccgcccgtcacaccacgagagtttacaacacccgaagtcggtggggtaaccgcaaggagccagccgccgaaggtggggtagatgattggggtg

SEQ ID NO: 2350 - DNA, 1477 bp, Paenibacillus lentus
  misc_feature (162)..(162): n is a, c, g, or t
  misc_feature (181)..(181): n is a, c, g, or t
gacgaacgctggcggcgtgcctaatacatgcaagtcgagcgggattattttggaagcttgcttccgaaatgatctagcggcggacgggtgagtaatacgtaggcaacctgcccctcagcctgggataactagcggaaacgttagctaataccggataatttntttcttcgcatgaaggaanaatgaaagacggagcaatctgtcactaagggatgggcctacggcgcattagctagttggtgaggtaatggctcaccaaggcgacgatgcgtagccgacctgagagggtgaacggccacactgggactgagacacggcccagactcctacgggaggcagcagtagggaatcttccgcaatggacgcaagtctgacggagcaacgccgcgtgagtgatgaaggttttcggatcgtaaagctctgttgccagggaagaacgtcttggagagtaactgctctaagagtgacggtacctgagaagaaagccccggctaactacgtgccagcagccgcggtaatacgtagggggcaagcgttgtccggaattattgggcgtaaagcgcgcgcaggcggtcatttaagtctggtgtttaatcccggggctcaactccgggtcgcactggaaactgggtggcttgagtgcagaagaggagagtggaattccacgtgtagcggtgaaatgcgtagatatgtggaggaacaccagtggcgaaggcgactctctgggctgtaactgacgctgaggcgcgaaagcgtgggtagcaaacaggattagataccctggtagtccacgccgtaaacgatgaatgctaggtgttaggggtttcgatacccttggtgccgaagtaaacacattaagcattccgcctggggagtacggtcgcaagactgaaactcaaaggaattgacggggacccgcacaagcagtggagtatgtggtttaattcgaagcaacgcgaagaaccttaccaggtcttgacatgcctctgaccgctctagagatagagcttctcttcggagcaggggacacaggtggtgcatggttgtcgtcagctcgtgtcgtgagatgttgggttaagtcccgcaacgagcgcaacccttgatcttagttgccagcatttcggatgggcactctaaggtgactgccggtgacaaaccggaggaaggtggggatgacgtcaaatcatcatgccccttatgacctgggctacacacgtactacaatggccagtacaacgggaagcgaaaccgcgaggtggagcgaatcctatcaaagctggtctcagttcggattgcaggctgcaactcgcctgcatgaagtcggaattgctagtaatcgcggatcagcatgccgcggtgaatacgttcccgggtcttgtacacaccgcccgtcacaccacgagagtttacaacacccgaagtcggtgaggtaaccgcaaggggccagccgccgaaggtggggtagatgattggggtg

SEQ ID NO: 2351 - DNA, 1480 bp, Paenibacillus macquariensis
gacgaacgctggcggcatgcctaatacatgcaagtcgagcggagttgttttgaaagcttgctttcaaaacaacttagcggcggacgggtgagtaacacgtaggtaacctgcctgtaagactgggataactaccggaaacggtagctaataccggataatttgtttcttctcatgaagagacactgaaaggcggagtaatctgccacttatagatgggcctgcggcgcattagctagttggtgaggtaacggctcaccaaggcgacgatgcgtagccgacctgagagggtgaacggccacactgggactgagacacggcccagactcctacgggaggcagcagtagggaatcttccgcaatggacgaaagtctgacggagcaatgccgcgtgagtgatgaaggttttcggatcgtaaagctctgttgccagggaagaacgcttgggagagtaactgctctcaaggtgacggtacctgagaagaaagccccggctaactacgtgccagcagccgcggtaatacgtagggggcaagcgttgtccggaattattgggcgtaaagcgcgcgcaggcggtcatttaagtctggtgtttaatcccggggctcaaccccgggtcgcactggaaactggatgacttgagtacagaagaggagagtggaattccacgtgtagcggtgaaatgcgtagatatgtggaggaacaccagtggcgaaggcgactctctgggctgtaactgacgctgaggcgcgaaagcgtggggagcaaacaggattagataccctggtagtccacgccgtaaacgatgagtgctaggtgttaggggtttcgatacccttggtgccgaagttaacacattaagcactccgcctggggagtacggtcgcaagactgaaactcaaaggaattgacggggacccgcacaagcagtggagtatgtggtttaattcgaagcaacgcgaagaaccttaccaggtcttgacatccctctgaatccactagagatagtggcggccttcgggacagaggagacaggtggtgcatggttgtcgtcagctcgtgtcgtgagatgttgggttaagtcccgcaacgagcgcaacccttatatttagttgccagcacattatggtgggcactctagatagactgccggtgacaaaccggaggaaggtggggatgacgtcaaatcatcatgccccttatgacctgggctacacacgtactacaatggccggtacaacgggctgcgaaatcgcgagatggagccaatcccaccaaagccggtctcagttcggattgcaggctgcaacccgcctgcatgaagtcggaattgctagtaatcgcggatcagcatgccgcggtgaatacgttcccgggtcttgtacacaccgcccgtcacaccacgagagtttacaacacccgaagtcggtggggtaacccgcaagggagccagccgccgaaggtggggtagatgattggggtg

SEQ ID NO: 2352 - DNA, 1474 bp, Paenibacillus massiliensis
  misc_feature (994)..(994): n is a, c, g, or t
  misc_feature (1004)..(1004): n is a, c, g, or t
gacgaacgctggcggcgtgcctaatacatgcaagtcgagcggacttgatggagagcttgctctcctgatggttagcggcggacgggtgagtaacacgtaggcaacctgccctttggactgggataactaccggaaacggtagctaataccagataattcacttcttcgcatggagaagtgaggaaagacggagcaatctgtcaccggaggatgggcctgcggcgcattagctagttggagaggtaacggctccccaaggcgacgatgcgtagccgacctgagagggtgatcggccacactgggactgagacacggcccagactcctacgggaggcagcagtagggaatcttccgcaatgggcgaaagcctgacggagcaacgccgcgtgagtgatgaaggttttcggatcgtaaagctctgttgccaaggaagaacgtccttaagagtaactgcttaaggagtgacggtacttgagaagaaagccccggctaactacgtgccagcagccgcggtaatacgtagggggcaagcgttgtccggaattattgggcgtaaagcgcgcgcaggcggtcatttaagtctggtgtttaagcccggggctcaaccccggatcgcacgggaaactggatgacttgagtgcagaagaggagagtggaattccacgtgtagcggtgaaatgcgtagagatgtggaggaacaccagtggcgaaggcgactctctgggctgtaactgacgctgaggcgcgaaagcgtggggagcaaacaggattagataccctggtagtccacgccgtaaacgatgagtgctaggtgttaggggtttcgatacccttggtgccgaagttaacacattaagcactccgcctggggagtacggtcgcaagactgaaactcaaaggaattgacggggacccgcacaagcagtggagtatgtggtttaattcgaagcaacgcgaagaaccttaccaggtcttgacatctgaatgaccggtncagagatgtncctttccttcgggacattcaagacaggtggtgcatggttgtcgtcagctcgtgtcgtgagatgttgggttaagtcccgcaacgagcgcaacccttgaccttagttgccagcacttcgggtgggcactctagggtgactgccggtgacaaaccggaggaaggtggggatgacgtcaaatcatcatgccccttatgacctgggctacacacgtactacaatggctggtacaacgggaagcgaagccgcgaggtggagccaatcctaaaaagccagtctcagttcggattgcaggctgcaactcgcctgcatgaagtcggaattgctagtaatcgcggatcagcatgccgcggtgaatacgttcccgggtcttgtacacaccgcccgtcacaccacgagagtttacaacacccgaagtcggtggggtaaccgcaaggagccagccgccgaaggtggggtagatgattggggtg

SEQ ID NO: 2353 - DNA, 1459 bp, Paenibacillus mucilaginosus
gacgaacgctggcggcgtgcctaatacatgcaagtcgagcggagcacttcggtgcttagcggcggacgggtgagtaacacgtaggcaacctgcctgtaagatcgggataactaccggaaacggtagctaagaccggatagctggtttcggtgcatgccggaatcatgaaacacggggcaacctgtggcttacggatgggcctgcggcgcattagctagttggcggggtaatggcccaccaaggcgacgatgcgtagccgacctgagagggtgatcggccacactgggactgagacacggcccagactcctacgggaggcagcagtagggaatcttccgcaatgggcgcaagcctgacggagcaacgccgcgtgagtgatgaaggttttcggatcgtaaagctctgttgccagggaagaatgtcgtggagagtaactgctctgcgaatgacggtacctgagaagaaagccccggctaactacgtgccagcagccgcggtaatacgtagggggcaagcgttgtccggaattattgggcgtaaagcgcgcgcaggcggtcttttaagtctggtgtttaagcccggggctcaaccccggttcgcaccggaaactggaagacttgagtgcaggagaggaaagcggaattccacgtgtagcggtgaaatgcgtagagatgtggaggaacaccagtggcgaaggcggctttctggactgtaactgacgctgaggcgcgaaagcgtggggagcaaacaggattagataccctggtagtccacgccgtaaacgatgagtgctaggtgttaggggtttcgatacccttggtgccgaagtaaacacaataagcactccgcctggggagtacgctcgcaagagtgaaactcaaaggaattgacggggacccgcacaagcagtggagtatgtggtttaattcgaagcaacgcgaagaaccttaccaggtcttgacatccctctgaaagccctagagatagggccctccttcgggacagaggtgacaggtggtgcatggttgtcgtcagctcgtgtcgtgagatgttgggttaagtcccgcaacgagcgcaacccttgactttagttgccagcattgagttgggcactctagagtgactgccggtgacaaaccggaggaaggtggggatgacgtcaaatcatcatgccccttatgacctgggctacacacgtactacaatggccggtacaacgggaagcgaagtcgcgagatggagcgaatccttagaagccggtctcagttcggattgcaggctgcaactcgcctgcatgaagtcggaattgctagtaatcgcggatcagcatgccgcggtgaatacgttcccgggtcttgtacacaccgcccgtcacaccacgagagtttacaacacccgaagccggtggggtaacccgtaagggagccagccgtcgaaggtggggtagatgattggggtg

SEQ ID NO: 2354 - DNA, 1459 bp, Paenibacillus nanensis
gacgaacgctggcggcgtgcctaatacatgcaagtcgagcggagctaagtagaagctcgctttcgcgatgcttagcggcggacgggtgagtaacacgtaggtaacctgcctgtaagactgggataacattcggaaacgaatgctaataccggatacgcgagttggtcgcatggccgactcgggaaagacggagcaatctgtcgcttacagatggacctgcggcgcattagctagttggtgaggtaacggctcaccaaggcgacgatgcgtagccgacctgagagggtgatcggccacactgggactgagacacggcccagactcctacgggaggcagcagtagggaatcttccgcaatgggcgaaagcctgacggagcaacgccgcgtgagtgatgaaggttttcggatcgtaaagctctgttgccagggaagaacgcttgggagagtaactgctcccaaggtgacggtacctgagaagaaagccccggctaactacgtgccagcagccgcggtaatacgtagggggcaagcgttgtccggaattattgggcgtaaagcgcgcgcaggcggttcattaagtctggtgtttaaggctggggctcaaccccggttcgcactggaaactggtgaacttgagtgcagaagaggaaagtggaattccacgtgtagcggtgaaatgcgtagagatgtggaggaacaccagtggcgaaggcgactttctgggctgtaactgacgctgaggcgcgaaagcgtggggagcaaacaggattagataccctggtagtccacgccgtaaacgatgaatgctaggtgttaggggtttcgatacccttggtgccgaagttaacacattaagcattccgcctggggagtacggtcgcaagactgaaactcaaaggaattgacggggacccgcacaagcagtggagtatgtggtttaattcgaagcaacgcgaagaaccttaccaggtcttgacatccctctgaccggtctagagataggcctttccttcgggacagaggagacaggtggtgcatggttgtcgtcagctcgtgtcgtgagatgttgggttaagtcccgcaacgagcgcaacccttatttttagttgccagcactttgggtgggcactctaaagagactgccggtgacaaaccggaggaaggtggggatgacgtcaaatcatcatgccccttatgacctgggctacacacgtactacaatggccagtacaacgggaagcgaaggagcgatctggagccaatcctatcaaagctggtctcagttcggattgcaggctgcaactcgcctgcatgaagtcggaattgctagtaatcgcggatcagcatgccgcggtgaatacgttcccgggtcttgtacacaccgcccgtcacaccacgagagtttacaacacccgaagtcggtggggtaacccgcaagggagccagccgccgaaggtg

SEQ ID NO: 2355 - DNA, 1423 bp, Paenibacillus oryzae
ctataatgcagtcgagcggattagattgaaagcttgctttcaatctggttagcggcggacgggtgagtaacacgtgggtaacctgcccgacagaccgggataacagtcggaaacgattgctaataccggatacgcgattctgttgcatgacggaatcgggaaaggcggagtaatctgccactgacggatggacctgcggcgcattagctagttggtgaggtaacggctcaccaaggcgacgatgcgtagccgacctgagagggtgatcggccacactgggactgagacacggcccagactcctacgggaggcagcagtagggaatcttccgcaatgggcgaaagcctgacggagcaacgccgcgtgagtgatgaaggttttcggatcgtaaagctctgttgccagggaagaacggctaggagagtaactgctcctggtttgacggtacctgagaagaaagccccggctaactacgtgccagcagccgcggtaatacgtagggggcaagcgttgtccggaattattgggcgtaaagcgcgcgcaggcggtttggaaagtctggtgtttaaggctgaggctcaacctcagttcgcactggaaactgtcagacttgagtgcagaagaggaaagtggaattccacgtgtagcggtgaaatgcgtagagatgtggaggaacaccagtggcgaaggcgactttctgggctgtaactgacgctgaggcgcgaaagcgtggggagcaaacaggattagataccctggtagtccacgccgtaaacgatgaatgctaggtgttaggggtttcgatacccttggtgccgaagttaacacattaagcattccgcctggggagtacggtcgcaagactgaaactcaaaggaattgacggggacccgcacaagcagtggagtatgtggtttaattcgaagcaacgcgaagaaccttaccaggtcttgacatctgaatgaccggtgcagagatgtgcctttccttcgggacattcaagacaggtggtgcatggttgtcgtcagctcgtgtcgtgagatgttgggttaagtcccgcaacgagcgcaacccttgatgttagttgccagcaggtgaagctgggcactctaacgtgactgccggtgacaaaccggaggaaggtggggatgacgtcaaatcatcatgccccttatgacctgggctacacacgtactacaatggccagtacaacgggaagcgaaaccgcgaggtggagcgaatccaatcaaagctggtctcagttcggattgcaggctgcaactcgcctgcatgaagtcggaattgctagtaatcgcggatcagcatgccgcggtgaatacgttcccgggtcttgtacacaccgcccgtcacaccacgagagtttacaacacccgaagtcggtggggtaacccgcaagggagcc

SEQ ID NO: 2356 - DNA, 1402 bp, Paenibacillus pectinilyticus
  misc_feature (169)..(169): n is a, c, g, or t
  misc_feature (971)..(971): n is a, c, g, or t
tgcaagtcgagcgggtttatccttcgggataagctagcggcggacgggtgagtaacacgtaggtaacctgcctttaagactgggataactatcggaaacgatagctaagaccggataaccggttttctcgcatgagagaatcgtaaaacacggagcaatctgtggcttnaagatgggcctgcggcgcattagctagttggtggggtaacggctcaccaaggcgacgatgcgtagccgacctgagagggtgaacggccacactgggactgagacacggcccagactcctacgggaggcagcagtagggaatcttccgcaatggacgcaagtctgacggagcaacgccgcgtgagtgatgaaggttttcggatcgtaaagctctgttgccctagacgaacagcatgaggagtaactgccttgtgtgtgacggtataggagaagaaagccccggctaactacgtgccagcagccgcggtaatacgtagggggcaagcgttgtccggaattattgggcgtaaagcgcgcgcaggcggtcatttaagtctggtgtttaatcctggggctcaaccccagttcgcatcggaaactggatgacttgagtgtaagagaggaaagtggaattccacgtgtagcggtgaaatgcgtagagatgtggaggaacaccagtggcgaaggcgactttctggcttataactgacgctgaggcgcgaaagcgtggggagcaaacaggattagataccctggtagtccacgccgtaaacgatgcatactaggtgtcggggattcgatttctcggtgccgaagttaacacagtaagtatgccgcctggggagtacgctcgcaagagtgaaactcaaaggaattgacggggacccgcacaagcagtggagtatgtggtttaattcgaagcaacgcgaagaaccttaccaggtcttgacatccctctgaatcctctagagatagaggcgtcnttcgggacagaggagacaggtggtgcatggttgtcgtcagctcgtgtcgtgagatgttgggttaagtcccgcaacgagcgcaacccttgatcttagttgccagcacttcgggtgggcactctaggatgactgccggtgacaaaccggaggaaggtggggatgacgtcaaatcatcatgccccttatgacctgggctacacacgtactacaatggtcggtacaacgggaagcgaagccgcgaggtggagccaatccttataagccgatctcagttcggattgcaggctgcaactcgcctgcatgaagtcggaattgctagtaatcgcggatcagcatgccgcggtgaatacgttcccgggtcttgtacacaccgcccgtcacaccacgagagtttacaacacccgaagtcggtggggtaacccgcaaggagc

SEQ ID NO: 2357 - DNA, 1469 bp, Paenibacillus peoriae
cgctggcggcgtgcgtaatacatgcaagtcgagcggggtttagaagcttgcttctaaacaacctagcggcggacgggtgagtaacacgtaggcaacctgcccacaagacagggataactaccggaaacggtagctaatacccgatacatccttttcctgcatgggagaaggaggaaagacggagcaatctgtcacttgtggatgggcctgcggcgcattagctagttggtggggtaaaggcctaccaaggcgacgatgcgtagccgacctgagagggtgatcggccacactgggactgagacacggcccagactcctacgggaggcagcagtagggaatcttccgcaatgggcgaaagcctgacggagcaacgccgcgtgagtgatgaaggttttcggatcgtaaagctctgttgccagggaagaacgtcttgtagagtaactgctacaagagtgacggtacctgagaagaaagccccggctaactacgtgccagcagccgcggtaatacgtagggggcaagcgttgtccggaattattgggcgtaaagcgcgcgcaggcggctctttaagtctggtgtttaatcccgaggctcaacttcgggtcgcactggaaactggggagcttgagtgcagaagaggagagtggaattccacgtgtagcggtgaaatgcgtagagatgtggaggaacaccagtggcgaaggcgactctctgggctgtaactgacgctgaggcgcgaaagcgtggggagcaaacaggattagataccctggtagtccacgccgtaaacgatgaatgctaggtgttaggggtttcgatacccttggtgccgaagttaacacattaagcattccgcctggggagtacggtcgcaagactgaaactcaaaggaattgacggggacccgcacaagcagtggagtatgtggtttaattcgaagcaacgcgaagaaccttaccaggtcttgacatccctctgatcggtctagagatagatctttccttcgggacagaggagacaggtggtgcatggttgtcgtcagctcgtgtcgtgagatgttgggttaagtcccgcaacgagcgcaacccttatgcttagttgccagcaggtcaagctgggcactctaagcagactgccggtgacaaaccggaggaaggtggggatgacgtcaaatcatcatgccccttatgacctgggctacacacgtactacaatggccggtacaacgggaagcgaaatcgcgaggtggagccaatcctagaaaagccggtctcagttcggattgtaggctgcaactcgcctacatgaagtcggaattgctagtaatcgcggatcagcatgccgcggtgaatacgttcccgggtcttgtacacaccgcccgtcacaccacgagagtttacaacacccgaagtcggtggggtaacccgcaagggagccagccgccgaaggtggggtagatgattggggtg

SEQ ID NO: 2358 - DNA, 1473 bp, Paenibacillus pini
gacgaacgctggcggcgtgcctaatacatgcaagtcgagcggacttgaagagaagcttgcttctcggatagttagcggcggacgggtgagtaacacgtaggtaacctgcctgtaagactgggataacattcggaaacgaatgctaataccggatacgcggtttgatcgcatggtcgaaccgggaaagacggagcaatctgtcacttacagatggacctgcggcgcattagctagttggtgaggtaacggctcaccaaggcgacgatgcgtagccgacctgagagggtgatcggccacactgggactgagacacggcccagactcctacgggaggcagcagtagggaatcttccgcaatggacgaaagtctgacggagcaacgccgcgtgagtgaggaaggccttcgggtcgtaaagctctgttgccagggaagaacgggtggaggagtaactgccttcatcatgacggtacctgagaagaaagccccggctaactacgtgccagcagccgcggtaatacgtagggggcaagcgttgtccggaattattgggcgtaaagcgcgcgcaggcggctttgtaagtcgggtgtttaaacttggggctcaacctcaagtcgcatccgaaactgcaaggcttgagtacagaagaggaaagtggaattccacgtgtagcggtgaaatgcgtagagatgtggaggaacaccagtggcgaaggcgactttctgggctgtaactgacgctgaggcgcgaaagcgtggggagcaaacaggattagataccctggtagtccacgccgtaaacgatgaatgctaggtgttaggggtttcgatacccttggtgccgaagttaacacattaagcattccgcctggggagtacggtcgcaagactgaaactcaaaggaattgacggggacccgcacaagcagtggagtatgtggtttaattcgaagcaacgcgaagaaccttaccaggtcttgacatccctctgaatcctctagagatagaggcggcctcgggacagaggagacaggtggtgcatggttgtcgtcagctcgtgtcgtgagatgttgggttaagtcccgcaacgagcgcaacccttgatcttagttgccagcactttgggtgggcactctaggatgactgccggtgacaaaccggaggaaggtggggatgacgtcaaatcatcatgccccttatgacctgggctacacacgtactacaatgggcagtacaacgggaagcgaagtcgcgaggcggagccaatccttaaaagctgctctcagttcggattgcaggctgcaactcgcctgcatgaagtcggaattgctagtaatcgcggatcagcatgccgcggtgaatacgttcccgggtcttgtacacaccgcccgtcacaccacgagagtttacaacacccgaagtcggtggggtaaccgcaaggagccagccgccgaaggtggggtagatgattggggtg

SEQ ID NO: 2359 - DNA, 1482 bp, Paenibacillus pinisoli
gacgaacgctggcggcgtgcctaatacatgcaagtcgagcggacttgatggagtgcttgcactcctgatagttagcggcggacgggtgagtaacacgtaggtaacctgcctgtaagactgggataacattcggaaacgaatgctaataccggatacgcgagttggtcgcatggccgactcgggaaagacggagcaatctgtcacttacagatggacctgcggcgcattagctagttggtgaggtaacggctcaccaaggcgacgatgcgtagccgacctgagagggtgatcggccacactgggactgagacacggcccagactcctacgggaggcagcagtagggaatcttccgcaatggacgaaagtctgacggagcaacgccgcgtgagtgatgaaggttttcggatcgtaaagctctgttgccagggaagaacgcttgggagagtaactgctcccaaggtgacggtacctgagaagaaagccccggctaactacgtgccagcagccgcggtaatacgtagggggcaagcgttgtccggaattattgggcgtaaagcgcgcgcaggcggtcaattaagtctggtgtttaaggctggggctcaaccccagttcgcactggaaactggttgacttgagtgcagaagaggaaagtggaattccacgtgtagcggtgaaatgcgtagagatgtggaggaacaccagtggcgaaggcgactttctgggctgtaactgacgctgaggcgcgaaagcgtggggagcaaacaggattagataccctggtagtccacgccgtaaacgatgaatgctaggtgttaggggtttcgatacccttggtgccgaagttaacacattaagcattccgcctggggagtacggtcgcaagactgaaactcaaaggaattgacggggacccgcacaagcagtggagtatgtggtttaattcgaagcaacgcgaagaaccttaccaggtcttgacatctgaatgaccggtgcagagatgtgcctttccttcgggacattcaagacaggtggtgcatggttgtcgtcagctcgtgtcgtgagatgttgggttaagtcccgcaacgagcgcaacccctatttttagttgccagcacttcgggtgggcactctaaagagactgccggtgacaaaccggaggaaggtggggatgacgtcaaatcatcatgccccttatgacctgggctacacacgtactacaatggccagtacaacgggaagcgaaaccgcgaggtggagccaatcctatcaaagctggtctcagttcggattgcaggctgcaactcgcctgcatgaagtcggaattgctagtaatcgcggatcacaatgccgcggtggaatacgtttcccgggtctttgtacacacccgcccgtcacaccacggagagtttacaacacccgaagtcggtggggtaacccgcaagggagccagccgccgaaggtggggtagatgattggggtg

SEQ ID NO: 2360 - DNA, 1455 bp, Paenibacillus polysaccharolyticus
gatggcggctgctatacatgcaagtcgagcggacttgaagagaagcttgcttctctgatggttagcggcggacgggtgagtaacacgtaggcaacctgccctcaagcttgggacaactaccggaaacggtagctaataccgaatacttgttttcttcgcctgaagagaactggaaagacggagcaatctgtcacttggggatgggcctgcggcgcattagctagttggtgaggtaacggctcaccaaggcgacgatgcgtagccgacctgagagggtgatcggccacactgggactgagacacggcccagactcctacgggaggcagcagtagggaatcttccgcaatgggcgaaagcctgacggagcaatgccgcgtgagtgatgaaggttttcggatcgtaaagctctgttgccagggaagaacgcttgggagagtaactgctctcaaggtgacggtacctgagaagaaagccccggctaactacgtgccagcagccgcggtaatacgtagggggcaagcgttgtccggaattattgggcgtaaagcgcgcgcaggcggtcatgtaagtctggtgtttaatcccggggctcaaccccggatcgcactggaaactgtgtgacttgagtgcagaagaggagagtggaattccacgtgtagcggtgaaatgcgtagagatgtggaggaacaccagtggcgaaggcgactctctgggctgtaactgacgctgaggcgcgaaagcgtggggagcaaacaggattagataccctggtagtccacgccgtaaacgatgagtgctaggtgttaggggtttcgatacccttggtgccgaagttaacacattaagcactccgcctggggagtacggtcgcaagactgaaactcaaaggaattgacggggacccgcacaagcagtggagtatgtggtttaattcgaagcaacgcgaagaaccttaccaggtcttgacatccaactaacgaggcagagatgcgtcaggtgcccttcggggaaagttgagacaggtggtgcatggttgtcgtcagctcgtgtcgtgagatgttgggttaagtcccgcaacgagcgcaacccttatatttagttgccagcatttcgggtgggcactctagatagactgccggtgacaaaccggaggaaggtggggatgacgtcaaatcatcatgccccttatgacctgggctacacacgtactacaatggccggtacaacgggcagcgaaatcgcgagatggagccaatcccaacaaagccggtctcagttcggattgcaggctgcaactcgcctgcatgaagtcggaattgctagtaatcgcggatcagcatgccgcggtgaatacgttcccgggtcttgtacacaccgcccgtcacaccacgagagtttataacacccgaagtcggtggggtaaccgcaaggagccagccgccgaaggtgcatga

SEQ ID NO: 2361 - DNA, 1458 bp, Paenibacillus popilliae
  misc_feature (104)..(104): n is a, c, g, or t
  misc_feature (132)..(132): n is a, c, g, or t
  misc_feature (226)..(226): n is a, c, g, or t
tgcctaatacatgcaagtcgagcggactcaactgtttccttcgggaaaccgttaggttagcggcggacgggtgagtaatacgtaggtaacctgcccttaagacngggataactcacggaaacgtgggctaanaccggataggcgatttgctcgcatgagggaatcgggaaaggcggagcaatctgccacttatggatggacctacggcgcattagctagttggtgnggtaacggctcaccaaggcgacgatgcgtagccgacctgagagggtgatcggccacactgggactgagacacggcccagactcctacgggaggcagcagtagggaatcttccgcaatggacgcaagtctgacggagcaacgccgcgtgagtgatgaaggttttcggatcgtaaagctctgttgccagggaagaacgctatggagagtaactgttccataggtgacggtacctgagaagaaagccccggctaactacgtgccagcagccgcggtaatacgtagggggcaagcgttgtccggaattattgggcgtaaagcgcgcgcaggcggtcatgtaagtctggtgtttaaacccggggctcaactccgggtcgcatcggaaactgtgtgacttgagtgcagaagaggaaagtggaattccacgtgtagcggtgaaatgcgtagagatgtggaggaacaccagtggcgaaggcgactttctgggctgtaactgacgctgaggcgcgaaagcgtggggagcaaacaggattagataccctggtagtccacgccgtaaacgatgaatgctaggtgttaggggtttcgatacccttggtgccgaagttaacacattaagcattccgcctggggagtacggtcgcaagactgaaactcaaaggaattgacggggacccgcacaagcagtggagtatgtggtttaattcgaagcaacgcgaagaaccttaccaggtcttgacatccctctgaccgcgctagagatagggcttcccttcggggcagaggagacaggtggtgcatggttgtcgtcagctcgtgtcgtgagatgttgggttaagtcccgcaacgagcgcaacccttaactttagttgccagcattgagttgggcactctagagtgactgccggtgacaaaccggaggaaggtggggatgacgtcaaatcatcatgccccttatgacctgggctacacacgtactacaatggctggtacaacgggaagcgaagccgcgaggtggagcgaatcctaaaaagccagtctcagttcggattgcaggctgcaactcgcctgcatgaagtcggaattgctagtaatcgcggatcagcatgccgcggtgaatacgttcccgggtcttgtacacaccgcccgtcacaccacgagagtttacaacacccgaagtcggtggggtaaccgcaaggagccagccgccgaaggtggggtagatgattggggtg

SEQ ID NO: 2362 - DNA, 1468 bp, Paenibacillus prosopidis
gacgaacgctggcggcgtgcctaatacatgcaagtcgagcggatcttatccttcgggataagattagcggcggacgggtgagtaacacgtaggtaacctgcccgtaagactgggataacattcggaaacgaatgctaataccggatacacagcttggtcgcatgaccttgctgggaaagatggagcaatctatcacttacggatggacctgcggcgcattagctagttggtgaggtaacggctcaccaaggcgacgatgcgtagccgacctgagagggtgatcggccacactgggactgagacacggcccagactcctacgggaggcagcagtagggaatcttccgcaatggacgaaagtctgacggagcaacgccgcgtgagtgatgaaggttttcggatcgtaaagctctgttgccagggaagaacgcttgggagagtaactgctctcaaggtgacggtacctgagaagaaagccccggctaactacgtgccagcagccgcggtaatacgtagggggcaagcgttgtccggaattattgggcgtaaagcgcgcgcaggcggccttgtaagtctgttgtttaaactcggggctcaaccccgagtcgcaatggaaactgcaaagcttgagtgcccaacattaaagtggaattccacgtgtagcggtgaaatgcgtagagatgtagaagaacaccagtggcggaggggattttctgggctgtaactgacgctgaggcgcgaaagcgtggggagcaaacaggattagataccctggtagtccacgccgtaaacgatgaatgctaggtgttaggggtttcgatacccttggtgccgaagttaacacattaagcattccgcctggggagtacggtcgcaagactgaaactcaaaggaattgacggggacccgcacaagcagtggagtatgtggtttaattcgaagcaacgcgaagaaccttaccaggtcttgacatccctctgaccgctctagagatagggctttccttcgggacagaggagacaggtggtgcatggttgtcgtcagctcgtgtcgtgagatgttgggttaagtcccgcaacgagcgcaacccttgatcttagttgccagcactttgggtgggcactctaagatgactgccggtgacaaaccggaggaaggtggggatgacgtcaaatcatcatgccccttatgacctgggctacacacgtactacaatggccgatacaacgggaagcgaaaccgcgaggtggagccaatcctatcaaagtcggtctcagttcggattgcaggctgcaactcgcctgcatgaagtcggaattgctagtaatcgcggatcagcatgccgcggtgaatacgttcccgggtcttgtacacaccgcccgtcacaccacgagagtttacaacacccgaagccggtggggtaacccgcaagggagctagccgtcgaaggtggggtagatgattggggg

SEQ ID NO: 2363 - DNA, 1465 bp, Paenibacillus rigui
gacgaacgctggcggcgtgcctaatacatgcaagtcgagcggatttcaccttcgggtgaagttagcggcggacgggtgagtaacacgtaggcaacctgcctgtaagactgggataactatcggaaacgatagctaagaccggatagctggttctctcgcatgagggaatcatgaaacacggagcaatctgtggcttacagatgggcctgcggcgcattagctagttggtgaggtaacggctcaccaaggcgacgatgcgtagccgacctgagagggtgatcggccacactgggactgagacacggcccagactcctacgggaggcagcagtagggaatcttccgcaatggacgcaagtctgacggagcaacgccgcgtgagtgatgaaggttttcggatcgtaaagctctgttgccagggaagaacgctcaggagagtaactgctcctgaggtgacggtacctgagaagaaagccccggctaactacgtgccagcagccgcggtaatacgtagggggcaagcgttgtccggaattattgggcgtaaagcgcgcgcaggcggttatttaagtttggtgtttaagcccggggctcaaccccggatcgcactgaaaactggatgacttgagtgcgggagaggaaagtggaattccacgtgtagcggtgaaatgcgtagagatgtggaggaacaccagtggcgaaggcgactttctggaccgtaactgacgctgaggcgcgaaagcgtggggagcaaacaggattagataccctggtagtccacgccgtaaacgatgagtgctaggtgttaggggtttcgatacccttggtgccgaagtaaacacagtaagcactccgcctggggagtacgctcgcaagagtgaaactcaaaggaattgacggggacccgcacaagcagtggagtatgtggtttaattcgaagcaacgcgaagaaccttaccaggtcttgacatccctctgcaagccatagagatatggccctccttcgggacagaggagacaggtggtgcatggttgtcgtcagctcgtgtcgtgagatgttgggttaagtcccgcaacgagcgcaacccttgactttagttgccagcattaagttgggcactctagagtgactgccggtgacaaaccggaggaaggtggggatgacgtcaaatcatcatgccccttatgacctgggctacacacgtactacaatggccggtacaacgggaagcgaagccgcgaggtggagcgaatctttagaagccggtctcagttcggattgcaggctgcaactcgcctgcatgaagtcggaattgctagtaatcgcggatcagcatgccgcggtgaatacgttcccgggtcttgtacacaccgcccgtcacaccacgagagtttacaacacccgaagtcggtggggtaacccgcaagggagccagccgccgaaggtggggtagatgattggggtg

SEQ ID NO: 2364 - DNA, 1473 bp, Paenibacillus riograndensis
gacgaacgctggcggcgtgcctaatacatgcaagtcgagcggagtttatccttcgggataagcttagcggcggacgggtgagtaacacgtaggcaacctaccctctagactgggataactaccggaaacggtagctaataccggataattccttaacccacctgggataaggatgaaaggcggagcaatctgctgctagaggatgggcctgcggcgcattagctagttggtggggtaacggcctaccaaggcgacgatgcgtagccgacctgagagggtgaacggccacactgggactgagacacggcccagactcctacgggaggcagcagtagggaatcttccgcaatgggcgaaagcctgacggagcaacgccgcgtgagtgatgaaggttttcggatcgtaaagctctgttgccagggaagaacgtccggtagagtaactgctaccggagtgacggtacctgagaagaaagccccggctaactacgtgccagcagccgcggtaatacgtagggggcaagcgttgtccggaattattgggcgtaaagcgcgcgcaggcggctgcttaagtctggtgtttaaaccttgggctcaacctggggtcgcactggaaactgggcagcttgagtacagaagaggaaagtggaattccacgtgtagcggtgaaatgcgtagagatgtggaggaacaccagtggcgaaggcgactttctgggctgtaactgacgctgaggcgcgaaagcgtggggagcaaacaggattagataccctggtagtccacgccgtaaacgatgagtgctaggtgttaggggtttcgatacccttggtgccgaagttaacacagtaagcactccgcctggggagtacggtcgcaagactgaaactcaaaggaattgacggggacccgcacaagcagtggagtatgtggtttaattcgaagcaacgcgaagaaccttaccaggtcttgacatccaactaacgaagcagagatgcattaggtgcccttcggggaaagttgagacaggtggtgcatggttgtcgtcagctcgtgtcgtgagatgttgggttaagtcccgcaacgagcgcaacccttgactttagttgccagcaggtaaggctgggcactctagagtgactgccggtgacaaaccggaggaaggtggggatgacgtcaaatcatcatgccccttatgacctgggctacacacgtactacaatggccggtacaacgggaagcgaagccgcgaggtggagccaatcccagcaaagccggtctcagttcggattgcaggctgcaactcgcctgcatgaagtcggaattgctagtaatcgcggatcagcatgccgcggtgaatacgttcccgggtcttgtacacaccgcccgtcacaccacgagagtttacaacacccgaagtcggtggggtaacccgcaagggggccagccgccgaaggtggggtagatgattggggtg

SEQ ID NO: 2365 - DNA, 1479 bp, Paenibacillus sabinae
gacgaacgctggcggcgtgcctaatacatgcaagtcgagcggagtattttgaagagcttgctcttcaaaatacttagcggcggacgggtgagtaacacgtaggcaacctgccccttggactgggataactaccggaaacggtagctaataccggataagaccttctggtgcataccggaaggcggaaaggcggagtaatctgtcaccaggggatgggcctgcggcgcattagctagttggtggggtaacggctcaccaaggcgacgatgcgtagccgacctgagagggtgaacggccacactgggactgagacacggcccagactcctacgggaggcagcagtagggaatcttccgcaatgggcgaaagcctgacggagcaacgccgcgtgagtgatgaaggttttcggatcgtaaagctctgttgccagggaagaacgtctcttagagtaactgctaagagagtgacggtacctgagaagaaagccccggctaactacgtgccagcagccgcggtaatacgtagggggcaagcgttgtccggaattattgggcgtaaagcgcgcgcaggcggctgtttaagtctggtgtttaaaccatgggctcaacctgtggtcgcactggaaactgggcagcttgagtgcagaagaggaaagtggaattccacgtgtagcggtgaaatgcgtagagatgtggaggaacaccagtggcgaaggcgactttctgggctgtaactgacgctgaggcgcgaaagcgtggggagcaaacaggattagataccctggtagtccacgccgtaaacgatgagtgctaggtgttaggggtttcgatacccttggtgccgaagttaacacagtaagcactccgcctggggagtacggtcgcaagactgaaactcaaaggaattgacggggacccgcacaagcagtggagtatgtggtttaattcgaagcaacgcgaagaaccttaccaggtcttgacatccctctgaccggactagagatagtcctttccttcgggacagaggagacaggtggtgcatggttgtcgtcagctcgtgtcgtgagatgttgggttaagtcccgcaacgagcgcaacccttgactttagttgccagcaggtaaagctgggcactctagagtgactgccggtgacaaaccggaggaaggtggggatgacgtcaaatcatcatgccccttatgacctgggctacacacgtactacaatggccggtacaacgggaagcgaagccgcgaggcggagccaatcttataaagccggtctcagttcggattgcaggctgcaactcgcctgcatgaagtcggaattgctagtaatcgcggatcagcatgccgcggtgaatacgttcccgggtcttgtacacaccgcccgtcacaccacgagagtttacaacacccgaagtcggtggggtaacccgcaagggagccagccgccgaaggtggggtagatgattggggtg

SEQ ID NO: 2366 - DNA, 1475 bp, Paenibacillus sanguinis
gacgaacgctggcggcgtgcctaatacatgcaagtcgagcggagtgattggggagcttgctcccggatcacttagcggcggacgggtgagtaacacgtaggcaacctgcctgtaagcctgggataactagcggaaacgttagctaataccggatagtcaagcctctcgcatgggagacttgggaaagacggagcaatctgtcacttatggatgggcctgcggcgcattagctagttggtagggtaatggcctaccaaggcgacgatgcgtagccgacctgagagggtgaacggccacactgggactgagacacggcccagactcctacgggaggcagcagtagggaatcttccgcaatggacgcaagtctgacggagcaacgccgcgtgagtgaagaaggttttcggatcgtaaagctctgttgccagggaagaacgaccctaagagtaactgcttagggagtgacggtacctgagaagaaagccccggctaactacgtgccagcagccgcggtaatacgtagggggcagcgttgtccggaattattgggcgtaaagcgcgcgcaggcggctgtttaagtctggtgtataaccttggggcttaacctcaagtggcactggaaactgggcagctggagtgcagaagaggagagtggaattccacgtgtagcggtgaaatgcgtagagatgtggaggaacaccagtggcgaaggcgactctctgggctgtaactgacgctgaggcgcgaaagcgtggggagcaaacaggattagataccctggtagtccacgccgtaaacgatgaatgctaggtgttaggggtttcgatacccttggtgccgaagttaacacattaagcattccgcctggggagtacggccgcaaggctgaaactcaaaggaattgacggggacccgcacaagcagtggagtatgtggtttaattcgaagcaacgcgaagaaccttaccaggtcttgacatctgaatgaccgctctagagatagggttttccttcgggacattcaagacaggtggtgcatggttgtcgtcagctcgtgtcgtgagatgttgggttaagtcccgcaacgagcgcaacccttgactttagttgccagcaggtaaagctgggcactctagagtgactgccggtgacaaaccggaggaaggtggggatgacgtcaaatcatcatgccccttatgacctgggctacacacgtactacaatggccggtacaacgggaagcgaagtcgcgagatggagcgaatcctagaaaagccggtctcagttcggattgcaggctgcaactcgcctgcatgaagtcggaattgctagtaatcgcggatcagcatgccgcggtgaatacgttcccgggtcttgtacacaccgcccgtcacaccacgagagtttacaacacccgaagtcggtgaggtaaccgcaaggagccagccgccgaaggtggggtagatgattggggtg

SEQ ID NO: 2367 - DNA, 1469 bp, Paenibacillus selenitireducens
gacgaacgctggcggcgtgcctaatacatgcaagtcgagcggagttattccttcgggagtaacttagcggcggacgggtgagtaacacgtaggcaacctgcctgtaagactgggataactaccggaaacggtagctaagaccggatacacgatttgatcgcatgatcgaattgggaaaagcggagcaatctgctacttacagatgggcctgcggcgcattagctagttggtgaggtaacggctcaccaaggcgacgatgcgtagccgacctgagagggtgaacggccacactgggactgagacacggcccagactcctacgggaggcagcagtagggaatcttccgcaatggacgcaagtctgacggagcaacgccgcgtgagtgatgaaggttttcggatcgtaaagctctgttgccagggaagaacgctatggagagtaactgctctgtaggtgacggtacctgagaagaaagccccggctaactacgtgccagcagccgcggtaatacgtagggggcaagcgttgtccggaattattgggcgtaaagcgcgcgcaggcggctttgtaagtctggtgtttaaacctagggctcaaccctgggtcgcattggaaactgcaaggcttgagtgcagaagaggagagtggaattccacgtgtagcggtgaaatgcgtagagatgtggaggaacaccagtggcgaaggcgactctctgggctgtaactgacgctgaggcgcgaaagcgtggggagcaaacaggattagataccctggtagtccacgccgtaaacgatgaatgctaggtgttaggggtttcgatacccttggtgccgaagttaacacattaagcattccgcctggggagtacggtcgcaagactgaaactcaaaggaattgacggggacccgcacaagcagtggagtatgtggtttaattcgaagcaacgcgaagaaccttaccaggtcttgacatctgaatgcaaacctctagagatagaagtccttcttcggaacattcaagacaggtggtgcatggttgtcgtcagctcgtgtcgtgagatgttgggttaagtcccgcaacgagcgcaacccttgatcttagttgccagcacttcgggtgggcactctaggatgactgccggtgacaaaccggaggaaggtggggatgacgtcaaatcatcatgccccttatgacctgggctacacacgtactacaatggtcgatacaacgggaagcgaagccgcgaggtggagccaatcctatcaaagtcgatctcagttcggattgcaggctgcaactcgcctgcatgaagtcggaattgctagtaatcgcggatcagcatgccgcggtgaatacgttcccgggtcttgtacacaccgcccgtcacaccacgagagtttacaacacccgaagccggtggggtaaccgcaaggagccagccgtcgaaggtggggtagatgattggggtg

SEQ ID NO: 2368 - DNA, 1421 bp, Paenibacillus silvae
gcaagtcgagcggagttgacggaaagcttgctttcctgatacttagcggcggacgggtgagtaacacgtaggcaacctgccctcaagcttgggacaactaccggaaacggtagctaataccgaatacttgttttcttcgcctgaagggaactggaaagacggagcaatctgtcacttgaggatgggcctgcggcgcattagctagttggtgaggtaacggctcaccaaggcgacgatgcgtagccgacctgagagggtgatcggccacactgggactgagacacggcccagactcctacgggaggcagcagtagggaatcttccgcaatgggcgaaagcctgacggagcaatgccgcgtgagtgatgaaggttttcggatcgtaaagctctgttgccagggaagaacgcttgggagagtaactgctctcaaggtgacggtacctgagaagaaagccccggctaactacgtgccagcagccgcggtaatacgtagggggcaagcgttgtccggaattattgggcgtaaagcgcgcgcaggcggtcatgtaagtctggtgtttaatcccggggctcaaccccggatcgcactggaaactgcgtgacttgagtgcagaagaggagagtggaattccacgtgtagcggtgaaatgcgtagagatgtggaggaacaccagtggcgaaggcgactctctgggctgtaactgacgctgaggcgcgaaagcgtggggagcaaacaggattagataccctggtagtccacgccgtaaacgatgaatgctaggtgttaggggtttcgatacccttggtgccgaagttaacacattaagcattccgcctggggagtacggtcgcaagactgaaactcaaaggaattgacggggacccgcacaagcagtggagtatgtggtttaattcgaagcaacgcgaagaaccttaccaggtcttgacatccaactaacgaggcagagatgcgttaggtgcccttcggggaaagttgagacaggtggtgcatggttgtcgtcagctcgtgtcgtgagatgttgggttaagtcccgcaacgagcgcaacccttatatttagttgccagcacttcgggtgggcactctaaatagactgccggtgacaaaccggaggaaggtggggatgacgtcaaatcatcatgccccttatgacctgggctacacacgtactacaatggccggtacaacgggcagtgaagccgcgaggtggaaccaatcctaaaaagccggtctcagttcggattgcaggctgcaactcgcctgcatgaagtcggaattgctagtaatcgcggatcagcatgccgcggtgaatacgttcccgggtcttgtacacaccgcccgtcacaccacgagagtttataacacccgaagtcggtggggtaaccgcaaggagccagccg

SEQ ID NO: 2369 - DNA, 1448 bp, Paenibacillus solani
gcagtcgagcggacttgatggagagcttgctctcctgagagttagcggcggacgggtgagtaacacgtaggtaacctgcccttaagactgggataactaccggaaacggtagctaataccggataatttattttgctgcatggcgaaataatgaaagacggagcaatctgtcacttgaggatggacctgcggcgcattagctagttggtggggtaacggctcaccaaggcgacgatgcgtagccgacctgagagggtgaacggccacactgggactgagacacggcccagactcctacgggaggcagcagtagggaatcttccgcaatggacgaaagtctgacggagcaacgccgcgtgagtgatgaaggttttcggatcgtaaagctctgttgccagggaagaacgcccgttagagtaactgctctcggagtgacggtacctgagaagaaagccccggctaactacgtgccagcagccgcggtaatacgtagggggcaagcgttgtccggaattattgggcgtaaagcgcgcgcaggcggttctttaagtctggtgtttaaacccgaggctcaacttcgggtcgcattggaaactgggggacttgagtgcagaagaggagagtggaattccacgtgtagcggtgaaatgcgtagatatgtggaggaacaccagtggcgaaggcgactctctgggctgtaactgacgctgaggcgcgaaagcgtggggagcaaacaggattagataccctggtagtccacgccgtaaacgatgaatgctaggtgttaggggtttcgatacccttggtgccgaagttaacacattaagcattccgcctggggagtacggtcgcaagactgaaactcaaaggaattgacggggacccgcacaagcagtggagtatgtggtttaattcgaagcaacgcgaagaaccttaccaagtcttgacatccctctgaatcctctagagatagaggcggccttcgggacagaggtgacaggtggtgcatggttgtcgtcagctcgtgtcgtgagatgttgggttaagtcccgcaacgagcgcaacccttgattttagttgccagcatgtaatgatgggcactctagaatgactgccggtgacaaaccggaggaaggcggggatgacgtcaaatcatcatgccccttatgacttgggctacacacgtactacaatggctggtacaacgggaagcgaagccgcgaggtgaagccaatcctataaaagccagtctcagttcggattgcaggctgcaactcgcctgcatgaagtcggaattgctagtaatcgcggatcagcatgccgcggtgaatacgttcccgggtcttgtacacaccgcccgtcacaccacgagagtttacaacacccgaagtcggtggggtaacccgcaagggagccagccgccgaaggtggggtagatgattggggtg

SEQ ID NO: 2370 - DNA, 1463 bp, Paenibacillus sophorae
ggcggcgtgcctaatacatgcaagtcgagcggagtatttttgagagcttgctctcaaaaatacttagcggcggacgggtgagtaacacgtaggcaacctgccccttgaactgggataactaccggaaacggtagctaataccggataattcctcttggcacctgctgggaggctgaaaggcggagcaatctgctgtcaagggatgggcctgcggcgcattagctagttggtggggtaacggctcaccaaggcgacgatgcgtagccgacctgagagggtgaacggccacactgggactgagacacggcccagactcctacgggaggcagcagtagggaatcttccgcaatgggcgaaagcctgacggagcaacgccgcgtgagtgatgaaggttttcggatcgtaaagctctgttgccagggaagaacgtctcttagagtaactgctaagagagtgacggtacctgagaagaaagccccggctaactacgtgccagcagccgcggtaatacgtagggggcaagcgttgtccggaattattgggcgtaaagcgcgcgcaggcggctgtttaagtctggtgtttaaaccatgggctcaacctgtggtcgcactggaaactgggcagcttgagtgcagaagaggaaagtggaattccacgtgtagcggtgaaatgcgtagagatgtggaggaacaccagtggcgaaggcgactttctgggctgtaactgacgctgaggcgcgaaagcgtggggagcaaacaggattagataccctggtagtccacgccgtaaacgatgagtgctaggtgttaggggtttcgatacccttggtgccgaagttaacacagtaagcactccgcctggggagtacggtcgcaagactgaaactcaaaggaattgacggggacccgcacaagcagtggagtatgtggtttaattcgaagcaacgcgaagaaccttaccaggtcttgacatccctctgaatcgcctagagataggcgcggccttcgggacagaggagacaggtggtgcatggttgtcgtcagctcgtgtcgtgagatgttgggttaagtcccgcaacgagcgcaacccttgactttagttgccagcaggtaaagctgggcactctagagtgactgccggtgacaaaccggaggaaggtggggatgacgtcaaatcatcatgccccttatgacctgggctacacacgtactacaatggccggtacaacgggaagcgaagccgcgaggtggagccaatcttataaagccggtctcagttcggattgcaggctgcaactcgcctgcatgaagtcggaattgctagtaatcgcggatcagcatgccgcggtgaatacgttcccgggtcttgtacacaccgcccgtcacaccacgagagtttacaacacccgaagtcggtggggtaacccgcaagggagccagccgccgaaggtggggtagatgatt

SEQ ID NO: 2371 - DNA, 1478 bp, Paenibacillus swuensis
gacgaacgctggcggcgtgcctaatacatgcaagtcgagcggagttgatgagaagcttgcttctctgatgctcagcggcggacgggtgagtaacacgtaggtaacctgcctgtaagatcgggataactaccggaaacggtagctaagaccggatacacggttctcttgcatgagaggattgggaaaagcggagcaatctgctgcttacagatgggcctgcggcgcattagctagttggtggggtaacggctcaccaaggcgacgatgcgtagccgacctgagagggtgatcggccacactgggactgagacacggcccagactcctacgggaggcagcagtagggaatcttccgcaatggacgaaagtctgacggagcaacgccgcgtgagtgatgaaggttttcggatcgtaaagctctgttgccagggaagaacgccgaggagagtaactgctcttcgggtgacggtacctgagaagaaagccccggctaactacgtgccagcagccgcggtaatacgtagggggcaagcgttgtccggaattattgggcgtaaagcgcgcgcaggcggttttgtaagtctagtgtttaattccagggctcaaccctggatcgcaccggaaactgcaagacttgagtgtaggagaggaaagtggaattccacgtgtagcggtgaaatgcgtagagatgtggaggaacaccagtggcgaaggcgactttctggcctataactgacgctgaggcgcgaaagcgtggggagcaaacaggattagataccctggtagtccacgccgtaaacgatgaatgctaggtgttaggggtttcgatacccttggtgccgaagttaacacattaagcattccgcctggggagtacgctcgcaagagtgaaactcaaaggaattgacggggacccgcacaagcagtggagtatgtggtttaattcgaagcaacgcgaagaaccttaccaggtcttgacatccctctgaatacgctggagacagcgtaggccttcgggacagaggagacaggtggtgcatggttgtcgtcagctcgtgtcgtgagatgttgggttaagtcccgcaacgagcgcaacccttgatcttagttgccagcgagtcaagtcgggcactctaggatgactgccggtgacaaaccggaggaaggtggggatgacgtcaaatcatcatgccccttatgacctgggctacacacgtactacaatggccggtacaacgggaagcgaagccgcgaggtggagccaatcttataaaagccggtctcagttcggattgcaggctgcaactcgcctgcatgaagtcggaattgctagtaatcgcggatcagcatgccgcggtgaatacgttcccgggtcttgtacacaccgcccgtcacaccacgagagtttacaacacccgaagtcggtggggtaacccgcaagggagccagccgccgaaggtggggtagatgattggggtg

SEQ ID NO: 2372 - DNA, 1474 bp, Paenibacillus taichungensis
  misc_feature (49)..(49): n is a, c, g, or t
gacgaacgctggcggcatgcctaatacatgcaagtcgagcggacttgangagaagcttgcttctctgatggttagcggcggacgggtgagtaacacgtaggcaacctgccctcaagcttgggacaactaccggaaacggtagctaataccgaatagttgttttcttctcctgaagagaactggaaagacggagcaatctgtcacttggggatgggcctgcggcgcattagctagttggtggggtaacggctcaccaaggcgacgatgcgtagccgacctgagagggtgatcggccacactgggactgagacacggcccagactcctacgggaggcagcagtagggaatcttccgcaatgggcgaaagcctgacggagcaatgccgcgtgagtgatgaaggttttcggatcgtaaagctctgttgccagggaagaacgcttgggagagtaactgctctcaaggtgacggtacctgagaagaaagccccggctaactacgtgccagcagccgcggtaatacgtagggggcaagcgttgtccggaattattgggcgtaaagcgcgcgcaggcggtcatttaagtctggtgtttaatcccggggctcaaccccggatcgcactggaaactgggtgacttgagtgcagaagaggagagtggaattccacgtgtagcggtgaaatgcgtagatatgtggaggaacaccagtggcgaaggcgactctctgggctgtaactgacgctgaggcgcgaaagcgtggggagcaaacaggattagataccctggtagtccacgccgtaaacgatgagtgctaggtgttaggggtttcgatacccttggtgccgaagttaacacattaagcactccgcctggggagtacggtcgcaagactgaaactcaaaggaattgacggggacccgcacaagcagtggagtatgtggtttaattcgaagcaacgcgaagaaccttaccaggtcttgacatccctctgaccggtacagagatgtacctttccttcgggacagaggagacaggtggtgcatggttgtcgtcagctcgtgtcgtgagatgttgggttaagtcccgcaacgagcgcaacccttgatcttagttgccagcacttcgggtgggcactctaaggtgactgccggtgacaaaccggaggaaggtggggatgacgtcaaatcatcatgccccttatgacctgggctacacacgtactacaatggccggtacaacgggctgtgaagccgcgaggtggaacgaatcctaaaaagccggtctcagttcggattgcaggctgcaactcgcctgcatgaagtcggaattgctagtaatcgcggatcagcatgccgcggtgaatacgttcccgggtcttgtacacaccgcccgtcacaccacgagagtttataacacccgaagtcggtggggtaaccgcaaggagccagccgccgaaggtgggatagatgattggggtg

SEQ ID NO: 2373 - DNA, 1469 bp, Paenibacillus taihuensis
gacgaacgctggcggcgtgcctaatacatgcaagtcgagcggatcttaccttcgggtaaggttagcggcggacgggtgagtaacacgtaggcaacctgcctgtaagaccgggataacattcggaaacgaatgctaataccggatatgcaacttggctgcatggtcgagttgggaaagacggtgcaagctgtcgcttacagatgggcctgcggtgcattagctagttggtgaggtaacggctcaccaaggcgacgatgcatagccgacctgagagggtgatcggccacactgggactgagacacggcccagactcctacgggaggcagcagtagggaatcttccgcaatggacgaaagtctgacggagcaacgccgcgtgagtgatgaaggttttcggatcgtaaagctcagttgccagggaagaacagccgagagagtaactgctcttggaatgacggtacctgagaagaaagccccggctaactacgtgccagcagccgcggtaatacgtagggggcaagcgttgtccggaattattgggcgtaaagcgcgcgcaggcggctttgtaagtttggtgtttaatctcagagctcaactctgattcgcatcgaaaactgcaaggcttgagtacagaagaggaaagtggaattccacgtgtagcggtgaaatgcgtagagatgtggaggaacaccagtggcgaaggcgactttctgggctgtaactgacgctgaggcgcgaaagcgtggggagcaaacaggattagataccctggtagtccacgccgtaaacgatgaatgctaggtgttaggggtttcgatacccttggtgccgaagttaacacattaagcattccgcctggggagtacgctcgcaagagtgaaactcaaaggaattgacggggacccgcacaagcagtggagtatgtggtttaattcgaagcaacgcgaagaaccttaccagctcttgacatccctctgaatcctctagagatagaggcggcccttcggggacggaggagacaggtggtgcatggttgtcgtcagctcgtgtcgtgagatgttgggttaagtcccgcaacgagcgcaacccttgatcttagttgccagcagttcggctgggcactctaaggtgactgccggtgacaaaccggaggaaggtggggatgacgtcaaatcatcatgccccttatgagctgggctacacacgtactacaatggccggtacaacgggaagcgaagccgcgaggtggagcgaatcctataaaagccggtctcagttcggattgcaggctgcaactcgcctgcatgaagtcggaattgctagtaatcgcggatcagcatgccgcggtgaatacgttcccgggtcttgtacacaccgcccgtcacaccacgagagtttacaacacccgaagtcggtggggtaacccgcaagggagccagccgccgaaggtggggtagatgattggggtg

SEQ ID NO: 2374 - DNA, 1480 bp, Paenibacillus terrae
gacgaacgctggcggcgtgcctaatacatgcaagtcgagcggggttatgttagaagcttgcttctaacataacctagcggcggacgggtgagtaacacgtaggcaacctgcccatgagactgggataactaccggaaacggtagctaataccggatacatcctttccctgcatggggagaggaggaaagacggagcaatctgtcactgatggatgggcctgcggcgcattagctagttggtggggtcaaggcctaccaaggcgacgatgcgtagccgacctgagagggtgatcggccacactgggactgagacacggcccagactcctacgggaggcagcagtagggaatcttccgcaatgggcgaaagcctgacggagcaacgccgcgtgagtgatgaaggttttcggatcgtaaagctctgttgccagggaagaacgtcttgtagagtaactgctacaagagtgacggtacctgagaagaaagccccggctaactacgtgccagcagccgcggtaatacgtagggggcaagcgttgtccggaattattgggcgtaaagcgcgcgcaggcggctctttaagtctggtgtttaatcccgaggctcaacttcgggtcgcactggaaactggggagcttgagtgcagaagaggagagtggaattccacgtgtagcggtgaaatgcgtagatatgtggaggaacaccagtggcgaaggcgactctctgggctgtaactgacgctgaggcgcgaaagcgtggggagcaaacaggattagataccctggtagtccacgccgtaaacgatgaatgctaggtgttaggggtttcgatacccttggtgccgaagttaacacattaagcattccgcctggggagtacggtcgcaagactgaaactcaaaggaattgacggggacccgcacaagcagtggagtatgtggtttaattcgaagcaacgcgaagaaccttaccaggtcttgacatccccctgaccggtctagagatagacctttccttcgggacaggggagacaggtggtgcatggttgtcgtcagctcgtgtcgtgagatgttgggttaagtcccgcaacgagcgcaacccttatgcttagttgccagcaggtcaagctgggcactctaagcagactgccggtgacaaaccggaggaaggtggggatgacgtcaaatcatcatgccccttatgacctgggctacacacgtactacaatggccggtacaacgggaagcgaaagagcgatctggagcgaatcctagaaaagccggtctcagttcggattgcaggctgcaactcgcctgcatgaagtcggaattgctagtaatcgcggatcagcatgccgcggtgaatacgttcccgggtcttgtacacaccgcccgtcacaccacgagagtttacaacacccgaagtcggtggggtaacccgcaagggagccagccgccgaaggtggggtagatgattggggtg

SEQ ID NO: 2375 - DNA, 1463 bp, Paenibacillus thermophilus
aaacgatggcggcgtgctatacatgcaagtcgagcggacctgatggagtgcttgcactcctgatggttagcggcggacgggtgagtaacacgtaggcaacctgcccgtaagaccgggataactaccggaaacggtagctaataccggataatcaagtcttccgcatgggaggcttgggaaaggcggagcaatctgtcacttacggatgggcctgcggcgcattagctagttggtggggtaacggctcaccaaggcgacgatgcgtagccgacctgagagggtgaacggccacactgggactgagacacggcccagactcctacgggaggcagcagtagggaatcttccgcaatggacgaaagtctgacggagcaacgccgcgtgagtgatgaaggttttcggatcgtaaagctctgttgccagggaagaacgtcttctggagtaactgccaggagagtgacggtacctgagaagaaagccccggctaactacgtgccagcagccgcggtaatacgtagggggcaagcgttgtccggaattattgggcgtaaagcgcgcgcaggcggctgtttaagtctggtgtataatcctggggctcaactccgggtcgcactggaaactggacggcttgagtgcagaagaggagagtggaattccacgtgtagcggtgaaatgcgtagagatgtggaggaacaccagtggcgaaggcgactctctgggctgtaactgacgctgaggcgcgaaagcgtggggagcaaacaggattagataccctggtagtccacgccgtaaacgatgagtgctaggtgttaggggtttcgatacccttggtgccgaagtaaacacattaagcactccgcctggggagtacggccgcaaggctgaaactcaaaggaattgacggggacccgcacaagcagtggagtatgtggtttaattcgaagcaacgcgaagaaccttaccaggtcttgacatccctctgaccgctgtagagatatggctttccttcgggacagaggagacaggtggtgcatggttgtcgtcagctcgtgtcgtgagatgttgggttaagtcccgcaacgagcgcaacccttgactttagttgccagcaagtgaagttgggcactctagagtgactgccggtgacaaaccggaggaaggtggggatgacgtcaaatcatcatgccccttatgacctgggctacacacgtactacaatggccggtacaacgggaagcgaaggagcgatctggagcgaatcctagaaaagccggtctcagttcggattgcaggctgcaactcgcctgcatgaagtcggaattgctagtaatcgcggatcagcatgccgcggtgaatacgttcccgggtcttgtacacaccgcccgtcacaccacgagagtttacaacacccgaagtcggtgaggtaaccgcaaggggccagccgccgaaggtgggtagatatt

SEQ ID NO: 2376 - DNA, 1484 bp, Paenibacillus tianmuensis
gacgaacgctggcggcgtgcctaatacatgcaagtcgagcgggttttaccttcgggtaaagctagcggcggacgggtgagtaacacgtaggtaacctgcctgtaagactgggataaccaccggaaacggtagctaagaccggataagtggccttctcgcatgaggagatcaagaaacacggggcaacctgtggcttacagatgggcctgcggcgcattagctagttggtggggtaacggctcaccaaggcgacgatgcgtagccgacctgagagggtgatcggccacactgggactgagacacggcccagactcctacgggaggcagcagtagggaatcttccgcaatggacgcaagtctgacggagcaacgccgcgtgagtgatgaaggttttcggatcgtaaagctctgttgccagggaagaatgtcgtggagagtaactgctctgcgaatgacggtacctgagaagaaagccccggctaactacgtgccagcagccgcggtaatacgtagggggcaagcgttgtccggagttattgggcgtaaagcgcgcgcaggcggccgtttaagtctggtgtttaagcccggggctcaaccccggttcgcactggaaactgggcggcttgagtgcaggagaggaaagcggaattccacgtgtagcggtgaaatgcgtagatatgtggaggaacaccagtggcgaaggcggctttctggcctgtaactgacgctgaggcgcgaaagcgtggggagcaaacaggattagataccctggtagtccacgccgtaaacgatgagtgctaggtgttaggggtttcgatacccttggtgccgaagtaaacacaataagcactccgcctggggagtacgctcgcaagagtgaaactcaaaggaattgacggggacccgcacaagcagtggagtatgtggtttaattcgaagcaacgcgaagaaccttaccaggtcttgacatccctctgaatatcctagagataggataggccttcgggacagaggagacaggtggtgcatggttgtcgtcagctcgtgtcgtgagatgttgggttaagtcccgcaacgagcgcaacccttgaacttagttgccagcattaagttgggcactctaagttgactgccggtgacaaaccggaggaaggtggggatgacgtcaaatcatcatgccccttatgacctgggctacacacgtactacaatggccggtacaacgggaagcaaagtcgcgagatggagccaatcctaagaaagccggtctcagttcggattgcaggctgcaactcgcctgcatgaagtcggaattgctagtaatcgcggatcagcatgccgcggtgaatacgttcccgggtcttgtacacaccgcccgtcacaccacgagagtttacaacacccgaagtcggtggggtaaccttggtgcaaacttgtttgcaccgtggagccagccgccgaaggtggggtagatgattggggtg

SEQ ID NO: 2377 - DNA, 1498 bp, Paenibacillus tyrfis
agagtttgatcctggctcaggacgaacgctggcggcgtgcctaatacatgcaagtcgagcggacccttcggggttagcggcggacgggtgagtaacacgtaggcaacctgcctgtaagactgggataactaccggaaacggtagctaagaccggataagtgattcttttgcatgagaggatcaagaaacacggggcaacctgtggcttacagatgggcctgcggcgcattagctagttggtggggtaacggctcaccaaggcgacgatgcgtagccgacctgagagggtgatcggccacactgggactgagacacggcccagactcctacgggaggcagcagtagggaatcttccgcaatggacgcaagtctgacggagcaacgccgcgtgagtgatgaaggttttcggatcgtaaagctctgttgccagggaagaacgtcgtggagagtaactgctctgcgaatgacggtacctgagaagaaagccccggctaactacgtgccagcagccgcggtaatacgtagggggcaagcgttgtccggaattattgggcgtaaagcgcgcgcaggcggccgcttaagtctggtgtttaagcccgaggctcaacctcggttcgcactggaaactgggtggcttgagtgcaggagaggaaagcggaattccacgtgtagcggtgaaatgcgtagagatgtggaggaacaccagtggcgaaggcggctttctggcctgtaactgacgctgaggcgcgaaagcgtggggagcaaacaggattagataccctggtagtccacgccgtaaacgatgagtgctaggtgttaggggtttcgatacccttggtgccgaagtaaacacaataagcactccgcctggggagtacgctcgcaagagtgaaactcaaaggaattgacggggacccgcacaagcagtggagtatgtggtttaattcgaagcaacgcgaagaaccttaccaggtcttgacatccctctgaatatcctagagatagggtaggccttcgggacagaggagacaggtggtgcatggttgtcgtcagctcgtgtcgtgagatgttgggttaagtcccgcaacgagcgcaacccttgaacttagttgccagcattaagttgggcactctaagttgactgccggtgacaaaccggaggaaggtggggatgacgtcaaatcatcatgccccttatgacctgggctacacacgtactacaatggccggtacaacgggaagcgaagtcgcgagatggagccaatcctaagaaagccggtctcagttcggattgcaggctgcaactcgcctgcatgaagtcggaattgctagtaatcgcggatcagcatgccgcggtgaatacgttcccgggtcttgtacacaccgcccgtcacaccacgagagtttacaacacccgaagtcggtggggtaaccgcaaggagccagccgccgaaggtggggtagatgattggggtgaagtcgtaacaaggtaaccgta

SEQ ID NO: 2378 - DNA, 1477 bp, Paenibacillus uliginis
  misc_feature (166)..(166): n is a, c, g, or t
  misc_feature (168)..(168): n is a, c, g, or t
  misc_feature (174)..(174): n is a, c, g, or t
  misc_feature (176)..(176): n is a, c, g, or t
gacgaacgctggcggcgtgcctaatacatgcaagtcgagcggacttgatgaggagcttgctcctctgatggttagcggcggacgggtgagtaacacgtaggcaacctgccctcaagactgggataactaccggaaacggtagctaataccggataatttattttgncncatggngnaataatgaaaggcggagcaatctgccacttgaggatgggcctgcggcgcattagctagttggtggggtaatggcccaccaaggcgacgatgcgtagccgacctgagagggtgaacggccacactgggactgagacacggcccagactcctacgggaggcagcagtagggaatcttccgcaatggacgaaagtctgacggagcaacgccgcgtgagtgatgaaggttttcggatcgtaaagctctgttgccagggaagaacgcttaggagagtaactgctcctgaggtgacggtacctgagaagaaagccccggctaactacgtgccagcagccgcggtaatacgtagggggcaagcgttgtccggaattattgggcgtaaagcgcgcgcaggcggttctttaagtctggtgtttaaacctggggctcaacttcaggtcgcactggaaactgggggacttgagtgcagaagaggagagtggaattccacgtgtagcggtgaaatgcgtagatatgtggaggaacaccagtggcgaaggcgactctctgggctgtaactgacgctgaggcgcgaaagcgtggggagcaaacaggattagataccctggtagtccacgccgtaaacgatgaatgctaggtgttaggggtttcgatacccttggtgccgaagttaacacattaagcattccgcctggggagtacggtcgcaagactgaaactcaaaggaattgacggggacccgcacaagcagtggagtatgtggtttaattcgaagcaacgcgaagaaccttaccaggtcttgacatccctctgaccggtacagagatgtacctttccttcgggacagaggagacaggtggtgcatggttgtcgtcagctcgtgtcgtgagatgttgggttaagtcccgcaacgagcgcaacccttgatcttagttgccagcaattcggttgggcactctaaggtgactgccggtgacaaaccggaggaaggtggggatgacgtcaaatcatcatgccccttatgacctgggctacacacgtactacaatggctggtacaacgggaagcgaagccgcgaggtggagccaatcctataaaagccagtctcagttcggattgcaggctgcaactcgcctgcatgaagtcggaattgctagtaatcgcggatcagcatgccgcggtgaatacgttcccgggtcttgtacacaccgcccgtcacaccacgagagtttacaacacccgaagtcggtggggtaacccgcaagggagccagccgccgaaggtggggtagatgattggggtg

SEQ ID NO: 2379 - DNA, 1480 bp, Paenibacillus wynnii
gacgaacgctggcggcatgcctaatacatgcaagtcgagcggagtgattttgaaagcttgctttcaaaatcatttagcggcggacgggtgagtaacacgtaggcaacctgccccttagactgggataactaccggaaacggtagctaataccggataatttctttcctcacctgaggagagaatgaaagacggagtaatctgtcactgagggatgggcctgcggcgcattagctagttggtgaggtaacggctcaccaaggcgacgatgcgtagccgacctgagagggtgaacggccacactgggactgagacacggcccagactcctacgggaggcagcagtagggaatcttccgcaatgggcgaaagcctgacggagcaatgccgcgtgagtgatgaaggttttcggatcgtaaagctctgttgccagggaagaacgtccggtagagtaactgctatcggagtgacggtacctgagaagaaagccccggctaactacgtgccagcagccgcggtaatacgtagggggcaagcgttgtccggaattattgggcgtaaagcgcgcgcaggcggctatttaagtctggtgtttaaaccttgggctcaacctgaggtcgcactggaaactgggtggcttgagtacagaagaggaaagtggaattccacgtgtagcggtgaaatgcgtagatatgtggaggaacaccagtggcgaaggcgactttctgggctgtaactgacgctgaggcgcgaaagcgtggggagcaaacaggattagataccctggtagtccacgccgtaaacgatgagtgctaggtgttaggggtttcgatacccttggtgccgaagttaacacattaagcactccgcctggggagtacggtcgcaagactgaaactcaaaggaattgacggggacccgcacaagcagtggagtatgtggtttaattcgaagcaacgcgaagaaccttaccaggtcttgacatcccgatgtaagcattagagatagtgcccctcttcggagcatcggagacaggtggtgcatggttgtcgtcagctcgtgtcgtgagatgttgggttaagtcccgcaacgagcgcaacccttatgcttagttgccagcacattatggtgggcactctaagcagactgccggtgacaaaccggaggaaggtggggatgacgtcaaatcatcatgccccttatgacctgggctacacacgtactacaatggccggtacaacgggctgcgaaatcgcaaggtggagcgaatcccaacaaagccggtctcagttcggattgcaggctgcaactcgcctgcatgaagtcggaattgctagtaatcgcggatcagcatgccgcggtgaatacgttcccgggtcttgtacacaccgcccgtcacaccacgagagtttacaacacccgaagtcggtggggtaacccgcaagggagccagccgccgaaggtggggtagatgattggggtg

SEQ ID NO: 2380 - DNA, 1475 bp, Paenibacillus xylanexedens
gacgaacgctggcggcatgcctaatacatgcaagtcgagcggagtggataggaagcttgcttccttgatacttagcggcggacgggtgagtaacacgtaggcaacctgccctcaagtttgggacaactaccggaaacggtagctaataccgaataattgttttcttcgcctgaaggaaactggaaagacggagcaatctgtcacttggggatgggcctgcggcgcattagctagttggtgaggtaacggctcaccaaggcgacgatgcgtagccgacctgagagggtgatcggccacactgggactgagacacggcccagactcctacgggaggcagcagtagggaatcttccgcaatgggcgaaagcctgacggagcaatgccgcgtgagtgatgaaggttttcggatcgtaaagctctgttgccagggaagaacgcttgggagagtaactgctctcaaggtgacggtacctgagaagaaagccccggctaactacgtgccagcagccgcggtaatacgtagggggcaagcgttgtccggaattattgggcgtaaagcgcgcgcaggcggtcatttaagtctggtgtttaatcccggggctcaaccccggatcgcactggaaactgggtgacttgagtgcagaagaggagagtggaattccacgtgtagcggtgaaatgcgtagatatgtggaggaacaccagtggcgaaggcgactctctgggctgtaactgacgctgaggcgcgaaagcgtggggagcaaacaggattagataccctggtagtccacgccgtaaacgatgagtgctaggtgttaggggtttcgatacccttggtgccgaagttaacacattaagcactccgcctggggagtacggtcgcaagactgaaactcaaaggaattgacggggacccgcacaagcagtggagtatgtggtttaattcgaagcaacgcgaagaaccttaccaggtcttgacatccctctgatcgatgcagagatgtatctttccttcgggacagaggagacaggtggtgcatggttgtcgtcagctcgtgtcgtgagatgttgggttaagtcccgcaacgagcgcaacccttatatttagttgccagcatttcggatgggcactctagatagactgccggtgacaaaccggaggaaggtggggatgacgtcaaatcatcatgccccttatgacctgggctacacacgtactacaatggccggtacaacgggctgcgaaatcgcgagatggagccaatcccaacaaagccggtctcagttcggattgcaggctgcaactcgcctgcatgaagtcggaattgctagtaatcgcggatcagcatgccgcggtgaatacgttcccgggtcttgtacacaccgcccgtcacaccacgagagtttataacacccgaagtcggtggggtaaccgcaaggagccagccgccgaaggtgggatagatgattggggtg

SEQ ID NO: 2381 - DNA, 1477 bp, Paenibacillus yonginensis
gacgaacgctggcggcgtgcctaatacatgcaagtcgagcggagtggatcgggagcttgctcctgatccacttagcggcggacgggtgagtaacacgtaggcaacctgcctgcaagactgggataactaccggaaacggtagctaataccggatacgcaagagagtcgcatgactttcttgggaaagacggagcaatctgtcgcttgtggatgggcctgcggcgcattagctagttggtgaggtaacggctcaccaaggcgacgatgcgtagccgacctgagagggtgaacggccacactgggactgagacacggcccagactcctacgggaggcagcagtagggaatcttccgcaatggacgaaagtctgacggagcaacgccgcgtgagtgatgaaggttttcggatcgtaaagctctgttgccagggaagaacgtcgggtagagtaactgctatccgagtgacggtacctgagaagaaagccccggctaactacgtgccagcagccgcggtaatacgtagggggcaagcgttgtccggaattattgggcgtaaagcgcgcgcaggcggtcatttaagtctggtgtttaatcccggggctcaactccgggtcgcactggaaactgggtgacttgagtgcagaagaggaaagtggaattccacgtgtagcggtgaaatgcgtagagatgtggaggaacaccagtggcgaaggcgactttctgggctgtaactgacgctgaggcgcgaaagcgtggggagcaaacaggattagataccctggtagtccacgccgtaaacgatgaatgctaggtgttaggggtttcgatacccttggtgccgaagttaacacattaagcattccgcctggggagtacggtcgcaagactgaaactcaaaggaattgacggggacccgcacaagcagtggagtatgtggtttaattcgaagcaacgcgaagaaccttaccaggtcttgacatccccctgaccggtctagagataggcctttccttcgggacaggggagacaggtggtgcatggttgtcgtcagctcgtgtcgtgagatgttgggttaagtcccgcaacgagcgcaacccttgactttagttgccagcaggtaaagctgggcactctagagtgactgccggtgacaaaccggaggaaggtggggatgacgtcaaatcatcatgccccttatgacctgggctacacacgtactacaatggccggtacaacgggaagcgaaggagcgatctggagcgaatctttagaagccggtctcagttcggattgcaggctgcaactcgcctgcatgaagtcggaattgctagtaatcgcggatcagcatgccgcggtgaatacgttcccgggtcttgtacacaccgcccgtcacaccacgagagtttacaacacccgaagtcggtggggtaacccgcaagggagccagccgccgaaggtggggtagacgattggggtg

SEQ ID NO: 2382 - DNA, 1446 bp, Paenisporosarcina antarctica
tacatgcaagtcgagcggagagaagaagcttgcttcttctcttagcggcggacgggtgagtaacacgtgggcaacctaccttgtagattgggataactccgggaaaccggggctaataccaaataatccattttgcttcatggcgaaatgttgaaaggcggcttcggctgtcactacaagatgggcccgcggcgtattagctagttggtagggtaatggcctaccaaggcgacgatacgtagccgacctgagagggtgatcggccacactgggactgagacacggcccagactcctacgggaggcagcagtagggaatcttccacaatggacgaaagtctgatggagcaacgccgcgtgagtgaagaaggttttcggatcgtaaaactctgttgtaagggaagaacacgtacgagagtaactgctcgtaccttgacggtaccttattagaaagccacggctaactacgtgccagcagccgcggtaatacgtaggtggcaagcgttgtccggaattattgggcgtaaagcgcgcgcaggcggtcctttaagtccgatgtgaaagcccacggctcaaccgtggagggtcattggaaactgggggacttgagtacagaagaggaaagcggaattccacgtgtagcggtgaaatgcgtagagatgtggaggaacaccagtggcgaaggcggctttctggtctgtaactgacgctgaggcgcgaaagcgtggggagcaaacaggattagataccctggtagtccacgccgtaaacgatgagtgctaagtgttagggggtttccgccccttagtgctgcagctaacgcattaagcactccgcctggggagtacggccgcaaggctgaaactcaaaggaattgacgggggcccgcacaagcggtggagcatgtggtttaattcgaagcaacgcgaagaaccttaccaggtcttgacatcccactgaccggtttagagataagcctttcccttcggggacagtggtgacaggtggtgcatggttgtcgtcagctcgtgtcgtgagatgttgggttaagtcccgcaacgagcgcaacccttgatcttagttgccagcattcagttgggcactctaaggtgactgccggtgataaaccggaggaaggtggggatgacgtcaaatcatcatgccccttatgacctgggctacacacgtgctacaatggacgatacaaagggctgcaaacccgcgagggggagccaatcccataaaatcgttctcagttcggattgtaggctgcaactcgcctacatgaagccggaatcgctagtaatcgcggatcagcatgccgcggtgaatacgttcccgggccttgtacacaccgcccgtcacaccacgagagtttgtaacacccgaagtcggtgaggtaacccttgtggagccagccgccgaaggtgggacagatgattggggt

SEQ ID NO: 2383 - DNA, 1450 bp, Paludibacter propionicigenes
gatgaacgctagcgacaggcctaacacatgcaagtcgaggggcagcataaaggtagcaatactttggtggcgaccggcgcacgggtgagtaacacgtatgcaacctacctgtaagaggggaataacccggagaaattcggactaataccgcataataccactgaactgcatggtttagtggttaaacatttatggcttacagatgggcatgcgtatgattagctagttggtgaggtaacggctcaccaaggcaacgatcattaggggttctgagaggaaggtcccccacactggtactgagacacggaccagactcctacgggaggcagcagtgaggaatattggtcaatgggcgagagcctgaaccagccaagtcgcgtgaaggaagaaggttctatggattgtaaacttcttttgtaagggaataaaaaagagtacgtgtactctattgtatgtactttacgaataaggatcggctaactccgtgccagcagccgcggtaatacggaggatccgagcgttatccggatttattgggtttaaagggtgcgtaggcggacccttaagtcagtggtgaaagtttgcggctcaaccgtaaaattgccattgaaactgagggtcttgagtgtaaatgaggtaggcggaatgtgttgtgtagcggtgaaatgcttagatataacacagaacaccaattgcgaaggcagcttactgggatacaactgacgctgaggcacgaaagcgtggggatcaaacaggattagataccctggtagtccacgcagtaaacgatgaatactagctgtatgcgatatactgtatgtggcaaagcgaaagcgttaagtattccacctggggagtacgttcgcaagaatgaaactcaaaggaattgacgggggcccgcacaagcggaggaacatgtggtttaattcgatgatacgcgaggaaccttacccgggcttgaaatgcatctgaccgacttggaaacaggtcttctagcaatagcagatgtgtaggtgctgcatggttgtcgtcagctcgtgccgtgaggtgtcggcttaagtgccataacgagcgcaacccctattgatagttactaacaggttaagctgaggactctattgagactgccaccgtaaggtgtgaggaaggtggggatgacgtcaaatcagcacggcccttacgtccggggcgacacacgtgttacaatggggggtacagagggttgctacttggtgacaagatgctaatctcttaaagcctctctcagttcggatcggagtctgcaactcgactccgtgaagctggattcgctagtaatcgcgcatcagccatggcgcggtgaatacgttcccgggccttgtacacaccgcccgtcaagccatggaagctggggggacctgaagtacgtaaccgcaaggagcgtcctagggtaaaactagtaactggggct

SEQ ID NO: 2384 - DNA, 1362 bp, Paludifilum halophilum
gacgaacgctggcggcgtgcctaatacatgcaagtcgagcggaccgaaggggagcttgctccctggaggtcagcggcggacgggtgagtaacacgtgggcaacctgcccgcaagtccgggataaccccgggaaaccggagctaataccggatattcccattgtctcacctggggcgatggggaaaggcggcttaggctgtcacttgcggatgggcccgcggcgcattagctggttggtggggtaacggcctaccaaggcgacgatgcgtagccgacctgagagggtgaccggccacactgggactgagacacggcccagactcctacgggaggcagcagtagggaattttccgcaatgggcgaaagcctgacggagcaacgccgcgtgagtgaggacggctttcgggttgtaaagctctgttctccgggaagaacggcgggaggttgaagaagccttttgcatgacggtaccggagaagaaagccccggctaactacgtgccagcagccgcggtaatacgtagggggcgagcgttgtccgggaattattgggcgtaaagcgcgcgcaggcggcctgttaagtctggtgtgaaagaccgcggctcaaccgtgggggtgcatcagaaactggcaggcttgagtgcaggagaggggagcggaattcccggtgtagcggtggaatgcgtagagatcgggaggaacaccagtggcgaaggcggctctctggcctgtaactgacgctgaggcgcgaaagcgtggggagcgaacaggattagataccctggtagtccacgccgtaaacgatgagtgctaggtgttgggggtttcacgccctctgtgccgaaggtaacccaataagcactccgcctggggagtacggccgcaaggctgaaactcaaaggaattgacgggggcccgcacaagcggtggagcatgtggtttaattcgaagcaacgcgaagaaccttaccagggcttgacatcccgctgaccggtgtagagatacaccttcccttcggggcagcggagacaggtggtgcatggttgtcgtcagctcgtgtcgtgagatgttgggttcagtcccgcaacgagcgcaacccttatctttagttgccagcacgtcaaggtgggcactctagagagacagccggtgaaagccggaggaaggtggggatgacgtcaaatcatcatgccccttatgccctgggcgacacacgtgctacaatggctggtacaacgggaagcgaagccgtgaggtgaagccaatccccaaaaaccagtctcagttcggatcgcaggctgcaacccgcctgcgtgaagctggaatcgctagtaatcgcggatcagcatgccgcggtgaatcc

SEQ ID NO: 2385 - DNA, 1443 bp, Paludisphaera borealis
aatgaacgttggcggcgtggattaggcatgcaagtcgaacgggtccggcttcggccgggccagtggcggaagggtgagtaaggcgacggcaaccaaccccgaggttgggtatagccgcgggaaactgcgggtaatccccagcgacgtgacgacgccggcatcggcgtttcaccaaaggcttcggccgccttgggacgggccgtcgtggtattaggtagttggcggggttacggcccaccaagccgatgatgcctaccgggcgtgcgagcgtggcccggcacactgggactgagacactgcccagactcttacgggaggctgcagtcgagaatcttcggcaatgggcgcaagcctgaccgagcgacgccgcgtggaggatgaaggccttcgggttgtaaactcctgtcgagggggaggaaggggcaaccttgaccgatccctggaggaagcacgggctaagttcgtgccagcagccgcggtaagacgaaccgtgcgaacgttattcggaatcactgggcttaaagcgcgtgtaggcggatgggtgcgtcggcttctgaaagcccccggctcaaccggggaagtggggccgaaacgacccgtctggagggacgtagggggatctggaacttccggtggagcggtgaaatgcgttgagatcggaaggaacgcccgtggcgaaagcgagatcctggacgttttctgacgctgagacgcgaaagctaggggagcaaacgggattagataccccggtagtcctagccgtaaacgatgagcactaggtagggggctcgccgatgggctctctgccgtagggaaaccgtgaagtgctccgcctggggagtatggtcgcaaggctgaaactcaaaggaattgacgggggctcacacaagcggtggagcatgtggcttaattcgaggctacgcgaaaaaccttatcctgggcttgacatgcagggattagccggcggaaacgtcggtgacgccgcaaggtggaacctgtgcaggtgctgcatggctgtcgtcagctcgtgccgtgaggtgttgggttaagtcccctaacgagcgcaacccctgtgactagttgccagcacgtaaaggtggggactctagtcagaccgccggcgtcaagccggaggaaggcggggacgacgtcaagtcatcatggcccttatgcccagggctgcacacgtgctacaatggggcggacaaagcgtcgccaggccgcaaggccgcgctaatcgcaaaaaccgctcctcagttcggattgcgggctgcaactcgcccgcatgaagctggaatcgctagtaatcgcggatcagcattgccgcggtgaatgtgttcctgagccttgtacacaccgcccgtcaagccaccaaagcggggggcatccgaagtcgtcggagccgaaaggcaggcgccgaagatgaaacccgtgatggggact

SEQ ID NO: 2386 - DNA, 1450 bp, Panacagrimonas perspica
attgaacgctggcggcatgcctaacacatgcaagtcgaacgggttgtagcaatacaactagtggcggacgggtgaggaatacataggaatttgcctttaggtgggggatagtccggggaaactcggtttaataccgcatgatgtcgcaagaccaaagcaggggatcgcaagaccttgcgcctttagagaagcctatgtcggattagctagttggtagggtaatggcctaccaaggcgacgatccgtaactggtctgagaggacgatcagtcacaccggaactgagacacggtccggactcctacgggaggcagcagtggggaatattggacaatgggcgaaagcctgatccagcaatgccgcgtgtgtgaagaaggccttcgggttgtaaagcactttaggctgggaagaaaaagcttcacctaatacgtggagccttgacggtaccagcggaataagcaccggctaactctgtgccagcagccgcggtaatacagagggtgctagcgttaatcggatttactgggcgtaaagcgtgtgtaggcggttcgttaagtcggatgtgaaagccctgggctcaacctaggaattgcattcgatactggcgggctagagtacggtagagggcggcggaattccgggtgtagcggtgaaatgcgtagatatccggaggaacaccgatggcgaaggcaaccgcctgggcctgtactgacgctgagacacgaaagcgtggggagcaaacaggattagataccctggtagtccacgccgtaaacgatgagaacttgacgtcggtttgctctgcgaatcggtgtcgtagctaacgcgctaagttctccgcctggggagtacggccgcaaggttgaaactcaaaggaattgacgggggcccgcacaagcggtggagtatgtggtttaattcgatgcaacgcgaagaaccttacctggtcttgacatgtcagaaaccctgcagagatgcgggggtgccttcgggaatctgaacacaggtgctgcatggctgtcgtcagctcgtgtcgtgagatgttgggttaagtcccgcaacgagcgcaacccttgcccttagttgccatcattcagttgggcactctaaggggaccgccggtgacaaaccggaggaaggtggggatgacgtcaagtcatcatggcccttatgaccagggctacacacgtactacaatggtcggtacagagggttgccaacccgcgagggggagctaatcccaaaaagccgatcgtagtccggattggagtctgcaactcgactccatgaagtcggaatcgctagtaatcgcggatcagcacttgtcgcggtgaatacgttcccgggccttgtacacaccgcccgtcacaccatggaagtctgctgcaccagaagtaggtagtctaaccgcaaggggggcgcctaccacggtgtggccgatgactggggtg

SEQ ID NO: 2387 - DNA, 1455 bp, Pandoraea apista
attgaacgctggcggcatgccttacacatgcaagtcgaacggcagcacgggtgcttgcacctggtggcgagtggcgaacgggtgagtaatacatcggaatgtaccttgtagtgggggatagctcggcgaaagccggattaataccgcatacgctctgaggaggaaagcgggggaccttcgggcctcgcgctacaagagcagccgatgtcagattagctagttggtgaggtaaaagctcaccaaggcgacgatctgtagctggtctgagaggacgaccagccacactgggactgagacacggcccagactcctacgggaggcagcagtggggaattttggacaatgggcgcaagcctgatccagcaatgccgcgtgtgtgaagaaggccttcgggttgtaaagcacttttgtccggaaagaaatcctctgggttaatacctcggggggatgacggtaccggaagaataagcaccggctaactacgtgccagcagccgcggtaatacgtagggtgcaagcgttaatcggaattactgggcgtaaagcgtgcgcaggcggttttgtaagacggatgtgaaatccccgggcttaacctgggaactgcattcgtgactgcaaggctagagtatggcagaggggggtagaattccacgtgtagcagtgaaatgcgtagagatgtggaggaataccgatggcgaaggcagccccctgggccaatactgacgctcatgcacgaaagcgtggggagcaaacaggattagataccctggtagtccacgccctaaacgatgtcaactagttgttggggattcatttccttagtaacgaagctaacgcgtgaagttgaccgcctggggagtacggtcgcaagattaaaactcaaaggaattgacggggacccgcacaagcggtggatgatgtggattaattcgatgcaacgcgaaaaaccttacctacccttgacatgtacggaatcctgctgagaggtgggagtgctcgaaagagaaccgtaacacaggtgctgcatggctgtcgtcagctcgtgtcgtgagatgttgggttaagtcccgcaacgagcgcaacccttgtccttagttgctacgcaagagcactctaaggagactgccggtgacaaaccggaggaaggtggggatgacgtcaagtcctcatggcccttatgggtagggcttcacacgtcatacaatggtcggtacagagggtcgccaagccgcgaggtggagctaaccccagaaaaccgatcgtagtccggatcgcagtctgcaactcgactgcgtgaagctggaatcgctagtaatcgcggatcagcatgtcgcggtgaatacgttcccgggtcttgtacacaccgcccgtcacaccatgggagtgggttttgccagaagtaggtagcctaaccgtaaggagggcgcttaccacggcaggattcatgactggggtg

SEQ ID NO: 2388 - DNA, 1455 bp, Pandoraea faecigallinarum
attgaacgctggcggcatgccttacacatgcaagtcgaacggcagcacgggtgcttgcacctggtggcgagtggcgaacgggtgagtaacatatcggaacgtaccttgtagtgggggatagctcggcgaaagccggattaataccgcatacgctctgaggaggaaagcgggggacctttgggcctcgcgctacaagagcggccgatatcagattagctagttggtgaggtaaaagctcaccaaggcgacgatctgtagctggtctgagaggacgaccagccacactgggactgagacacggcccagactcctacgggaggcagcagtggggaattttggacaatgggcgcaagcctgatccagcaatgccgcgtgtgtgaagaaggccttcgggttgtaaagcacttttgtccggaaagaaatcctctgggttaatacctcggggggatgacggtaccggaagaataagcaccggctaactacgtgccagcagccgcggtaatacgtagggtgcgagcgttaatcggaattactgggcgtaaagcgtgcgcaggcggttttgtaagacggatgtgaaatccccgggctcaacctgggaactgcattcgtgactgcaaggctagagtatggcagaggggggtagaattccacgtgtagcagtgaaatgcgtagagatgtggaggaataccgatggcgaaggcagccccctgggccaatactgacgctcatgcacgaaagcgtggggagcaaacaggattagataccctggtagtccacgccctaaacgatgtcaactagttgttggggattcatttccttagtaacgtagctaacgcgtgaagttgaccgcctggggagtacggtcgcaagattaaaactcaaaggaattgacggggacccgcacaagcggtggatgatgtggattaattcgatgcaacgcgaaaaaccttacctacccttgacatgtacggaatcctgctgagaggcgggagtgctcgaaagagagccgtaacacaggtgctgcatggctgtcgtcagctcgtgtcgtgagatgttgggttaagtcccgcaacgagcgcaacccttgtccttagttgctacgcaagagcactctaaggagactgccggtgacaaaccggaggaaggtggggatgacgtcaagtcctcatggcccttatgggtagggcttcacacgtcatacaatggtcggtacagagggctgccaaaccgcgaggtggagctaaccccagaaaaccgatcgtagtccggatcgcagtctgcaactcgactgcgtgaagctggaatcgctagtaatcgcggatcagcatgtcgcggtgaatacgttcccgggtcttgtacacaccgcccgtcacaccatgggagtgggttttgccagaagtaggtagcctaaccgcaaggagggcgcttaccacggcaggattcatgactggggtg

SEQ ID NO: 2389 - DNA, 1455 bp, Pandoraea norimbergensis
attgaacgctggcggcatgccttacacatgcaagtcgaacggcagcacgggtgcttgcacctggtggcgagtggcgaacgggtgagtaatacatcggaatgtaccttgtagtgggggatagctcggcgaaagccggattaataccgcatacgctctgaggaggaaagcgggggaccttcgggcctcgtgctacaagagcagccgatgtcagattagcttgttggtgaggtaaaagctcaccaaggcgacgatctgtagctggtctgagaggacgaccagccacactgggactgagacacggcccagactcctacgggaggcagcagtggggaattttggacaatgggcgaaagcctgatccagcaatgccgcgtgtgtgaagaaggccttcgggttgtaaagcacttttgtccggaaagaaatcctttgggttaatacctcggggggatgacggtaccggaagaataagcaccggctaactacgtgccagcagccgcggtaatacgtagggtgcaagcgttaatcggaattactgggcgtaaagcgtgcgcaggcggttttgtaagacggatgtgaaatccccgggcttaacctgggaactgcattcgtgactgcaaggctagagtatggcagaggggggtagaattccacgtgtagcagtgaaatgcgtagagatgtggaggaataccgatggcgaaggcagccccctgggccaatactgacgctcatgcacgaaagcgtggggagcaaacaggattagataccctggtagtccacgccctaaacgatgtcaactagttgttggggattcatttccttagtaacgaagctaacgcgtgaagttgaccgcctggggagtacggtcgcaagattaaaactcaaaggaattgacggggacccgcacaagcggtggatgatgtggattaattcgatgcaacgcgaaaaaccttacctacccttgacatgtacggaatcttgctgaaaggtgagagtgctcgaaagagagccgtaacacaggtgctgcatggctgtcgtcagctcgtgtcgtgagatgttgggttaagtcccgcaacgagcgcaacccttgtccttagttgctacgcaagagcactctaaggagactgccggtgacaaaccggaggaaggtggggatgacgtcaagtcctcatggcccttatgggtagggcttcacacgtcatacaatggtcggtacagagggctgccaaatcgcgagatggagctaaccccagaaaaccgatcgtagtccggatcgcagtctgcaactcgactgcgtgaagttggaatcgctagtaatcgcggatcagcatgtcgcggtgaatacgttcccgggtcttgtacacaccgcccgtcacaccatgggagtgggttttgccagaagtaggtagcctaaccgtaaggagggcgcttaccacggcaggattcatgactggggtg

SEQ ID NO: 2390 - DNA, 1455 bp, Pandoraea oxalativorans
attgaacgctggcggcatgccttacacatgcaagtcgaacggcagcacgggtgcttgcacctggtggcgagtggcgaacgggtgagtaatatatcggaacgtaccttgtagtgggggatagctcggcgaaagccggattaataccgcatacgctctgaggaggaaagcgggggaccttcgggcctcgcgctacaagagcggccgatatcagattagctagttggtggggtaaaagcttaccaaggcgacgatctgtagctggtctgagaggacgaccagccacactgggactgagacacggcccagactcctacgggaggcagcagtggggaattttggacaatgggcgaaagcctgatccagcaatgccgcgtgtgtgaagaaggccttcgggttgtaaagcacttttgtccggaaagaaatcctctgggttaatacctcggggggatgacggtaccggaagaataagcaccggctaactacgtgccagcagccgcggtaatacgtagggtgcaagcgttaatcggaattactgggcgtaaagcgtgcgcaggcggttttgtaagacggatgtgaaatccccgggcttaacctgggaactgcattcgtgactgcaaggctagagtatggcagaggggggtagaattccacgtgtagcagtgaaatgcgtagagatgtggaggaataccgatggcgaaggcagccccctgggccaatactgacgctcatgcacgaaagcgtggggagcaaacaggattagataccctggtagtccacgccctaaacgatgtcaactagttgttggggattcatttccttagtaacgaagctaacgcgtgaagttgaccgcctggggagtacggtcgcaagattaaaactcaaaggaattgacggggacccgcacaagcggtggatgatgtggattaattcgatgcaacgcgaaaaaccttacctacccttgacatgtacggaagtctgctgagaggcggatgtgctcgaaagagaaccgtaacacaggtgctgcatggctgtcgtcagctcgtgtcgtgagatgttgggttaagtcccgcaacgagcgcaacccttgtccttagttgctacgcaagagcactctaaggagactgccggtgacaaaccggaggaaggtggggatgacgtcaagtcctcatggcccttatgggtagggcttcacacgtcatacaatggtcggtacagagggctgccaaaccgcgaggtggagctaaccccagaaaaccgatcgtagtccggatcgcagtctgcaactcgactgcgtgaagctggaatcgctagtaatcgcggatcagcatgtcgcggtgaatacgttcccgggtcttgtacacaccgcccgtcacaccatgggagtgggttttgccagaagtaggtagcctaaccgtaaggagggcgcttaccacggcaggattcatgactggggtg

SEQ ID NO: 2391 - DNA, 1455 bp, Pandoraea pnomenusa
attgaacgctggcggcatgccttacacatgcaagtcgaacggcagcacgggtgcttgcacctggtggcgagtggcgaacgggtgagtaatacatcggaacgtaccttgtagtgggggatagctcggcgaaagccggattaataccgcatacgctctgaggaggaaagcgggggaccttcgggcctcgcgctacaagagcggccgatgtcagattagctagttggtggggtaaaagctcaccaaggcgacgatctgtagctggtctgagaggacgaccagccacactgggactgagacacggcccagactcctacgggaggcagcagtggggaattttggacaatgggcgaaagcctgatccagcaatgccgcgtgtgtgaagaaggccttcgggttgtaaagcacttttgtccggaaagaaatcctctgggttaatacctcggggggatgacggtaccggaagaataagcaccggctaactacgtgccagcagccgcggtaatacgtagggtgcaagcgttaatcggaattactgggcgtaaagcgtgcgcaggcggttttgtaagacggatgtgaaatccccgggcttaacctgggaactgcattcgtgactgcaaggctagagtatggcagaggggggtagaattccacgtgtagcagtgaaatgcgtagagatgtggaggaataccgatggcgaaggcagccccctgggccaatactgacgctcatgcacgaaagcgtggggagcaaacaggattagataccctggtagtccacgccctaaacgatgtcaactagttgttggggattcatttccttagtaacgtagctaacgcgtgaagttgaccgcctggggagtacggtcgcaagattaaaactcaaaggaattgacggggacccgcacaagcggtggatgatgtggattaattcgatgcaacgcgaaaaaccttacctacccttgacatgtacggaatcctgctgagaggtgggagtgctcgaaagagaaccgtaacacaggtgctgcatggctgtcgtcagctcgtgtcgtgagatgttgggttaagtcccgcaacgagcgcaacccttgtccttagttgctacgcaagagcactctaaggagactgccggtgacaaaccggaggaaggtggggatgacgtcaagtcctcatggcccttatgggtagggcttcacacgtcatacaatggtcggtacagagggctgccaaaccgcgaggtggagctaaccccagaaaaccgatcgtagtccggatcgcagtctgcaactcgactgcgtgaagctggaatcgctagtaatcgcggatcagcatgtcgcggtgaatacgttcccgggtcttgtacacaccgcccgtcacaccatgggagtgggttttgccagaagtaggtagcctaaccgtaaggagggcgcttaccacggcaggattcatgactggggtg

SEQ ID NO: 2392 - DNA, 1455 bp, Pandoraea pulmonicola
attgaacgctggcggcatgccttacacatgcaagtcgaacggcagcacgggtgcttgcacctggtggcgagtggcgaacgggtgagtaatacatcggaacgtaccttgtagtgggggatagctcggcgaaagccggattaataccgcatacgctctgaggaggaaagcgggggaccttcgggcctcgcgctacaagagcggccgatgtcagattagctagttggtggggtaaaagcctaccaaggcgacgatctgtagctggtctgagaggacgaccagccacactgggactgagacacggcccagactcctacgggaggcagcagtggggaattttggacaatgggcgcaagcctgatccagcaatgccgcgtgtgtgaagaaggccttcgggttgtaaagcacttttgtccggaaagaaaacctctgggttaatacctcggggggatgacggtaccggaagaataagcaccggctaactacgtgccagcagccgcggtaatacgtagggtgcgagcgttaatcggaattactgggcgtaaagcgtgcgcaggcggttttgtaagacggatgtgaaatccccgggcttaacctgggaactgcattcgtgactgcaaggctagagtatggcagaggggggtagaattccacgtgtagcagtgaaatgcgtagagatgtggaggaataccgatggcgaaggcagccccctgggccaatactgacgctcatgcacgaaagcgtggggagcaaacaggattagataccctggtagtccacgccctaaacgatgtcaactagttgttggggattcatttccttagtaacgtagctaacgcgtgaagttgaccgcctggggagtacggtcgcaagattaaaactcaaaggaattgacggggacccgcacaagcggtggatgatgtggattaattcgatgcaacgcgaaaaaccttacctacccttgacatgtacggaatcctgctgagaggtgggagtgctcgaaagagagccgtaacacaggtgctgcatggctgtcgtcagctcgtgtcgtgagatgttgggttaagtcccgcaacgagcgcaacccttgtccttagttgctacgcaagagcactctaaggagactgccggtgacaaaccggaggaaggtggggatgacgtcaagtcctcatggcccttatgggtagggcttcacacgtcatacaatggtcggtacagagggctgccaaaccgcgaggtggagctaaccccagaaaaccgatcgtagtccggatcgcagtctgcaactcgactgcgtgaagctggaatcgctagtaatcgcggatcagcatgtcgcggtgaatacgttcccgggtcttgtacacaccgcccgtcacaccatgggagtgggttttgccagaagtaggtagcctaaccgcaaggagggcgcttaccacggcaggattcatgactggggtg

SEQ ID NO: 2393 - DNA, 1455 bp, Pandoraea sputorum
attgaacgctggcggcatgccttacacatgcaagtcgaacggcagcacgggtgcttgcacctggtggcgagtggcgaacgggtgagtaatatatcggaacgtaccttgtagtgggggatagctcggcgaaagccggattaataccgcatacgctctgaggaggaaagcgggggaccttcgggcctcgcgctacaagagcggccgatatcagattagctagttggtggggtaaaagcttaccaaggcgacgatctgtagctggtctgagaggacgaccagccacactgggactgagacacggcccagactcctacgggaggcagcagtggggaattttggacaatgggcgaaagcctgatccagcaatgccgcgtgtgtgaagaaggccttcgggttgtaaagcacttttgtccggaaagaaatcctctgggttaatacctcggggggatgacggtaccggaagaataagcaccggctaactacgtgccagcagccgcggtaatacgtagggtgcgagcgttaatcggaattactgggcgtaaagcgtgcgcaggcggttttgtaagacggatgtgaaatccccgggctcaacctgggaactgcattcgtgactgcaaggctagagtatggcagaggggggtagaattccacgtgtagcagtgaaatgcgtagagatgtggaggaataccgatggcgaaggcagccccctgggccaatactgacgctcatgcacgaaagcgtggggagcaaacaggattagataccctggtagtccacgccctaaacgatgtcaactagttgttggggattcatttccttagtaacgtagctaacgcgtgaagttgaccgcctggggagtacggtcgcaagattaaaactcaaaggaattgacggggacccgcacaagcggtggatgatgtggattaattcgatgcaacgcgaaaaaccttacctacccttgacatgtacggaagtctgctgagaggcggatgtgctcgaaagagaaccgtaacacaggtgctgcatggctgtcgtcagctcgtgtcgtgagatgttgggttaagtcccgcaacgagcgcaacccttgtccttagttgctacgcaagagcactctaaggagactgccggtgacaaaccggaggaaggtggggatgacgtcaagtcctcatggcccttatgggtagggcttcacacgtcatacaatggtcggtacagagggctgccaaaccgcgaggtggagctaaccccagaaaaccgatcgtagtccggatcgcagtctgcaactcgactgcgtgaagctggaatcgctagtaatcgcggatcagcatgtcgcggtgaatacgttcccgggtcttgtacacaccgcccgtcacaccatgggagtgggttttgccagaagtaggtagcctaaccgtaaggagggcgcttaccacggcaggattcatgactggggtg

SEQ ID NO: 2394 - DNA, 1455 bp, Pandoraea terrae
attgaacgctggcggcatgccttacacatgcaagtcgaacggcagcacgggtgcttgcacctggtggcgagtggcgaacgggtgagtaatatatcggaacgtgccttgtagtgggggatagctcggcgaaagccggattaataccgcatacgatctacggatgaaagcgggggaccttcgggcctcgtgctataagagcggccgatatcagattagctagttggtgaggtaaaggctcaccaaggcgacgatctgtagctggtctgagaggacgaccagccacactgggactgagacacggcccagactcctacgggaggcagcagtggggaattttggacaatgggcgaaagcctgatccagcaatgccgcgtgtgtgaagaaggccttcgggttgtaaagcacttttgttcgggaagaaatcccttgggctaatacctcggggggatgacggtaccggaagaataagcaccggctaactacgtgccagcagccgcggtaatacgtagggtgcaagcgttaatcggaattactgggcgtaaagcgtgcgcaggcggttttgtaagacggatgtgaaatccccgggcttaacctgggaactgcattcgtgactgcaaggctagagtatggcagaggggggtagaattccacgtgtagcagtgaaatgcgtagagatgtggaggaataccgatggcgaaggcagccccctgggccaatactgacgctcatgcacgaaagcgtggggagcaaacaggattagataccctggtagtccacgccctaaacgatgtcaactagttgttggggattcatttccttagtaacgaagctaacgcgtgaagttgaccgcctggggagtacggtcgcaagattaaaactcaaaggaattgacggggacccgcacaagcggtggatgatgtggattaattcgatgcaacgcgaaaaaccttacctacccttgacatgtacggaatcctgctgagaggtgggagtgctcgaaagagaaccgtaacacaggtgctgcatggctgtcgtcagctcgtgtcgtgagatgttgggttaagtcccgcaacgagcgcaacccttgtccttagttgctacgcaagagcactctagggagactgccggtgacaaaccggaggaaggtggggatgacgtcaagtcctcatggcccttatgggtagggcttcacacgtcatacaatggtcggtacagagggctgccaaaccgcgaggtggagctaaccccagaaaaccgatcgtagtccggatcgcagtctgcaactcgactgcgtgaagctggaatcgctagtaatcgcggatcagcatgtcgcggtgaatacgttcccgggtcttgtacacaccgcccgtcacaccatgggagtgggttttgccagaagtaggtagcctaaccgcaaggagggcgcttaccacggcaggattcatgactggggtg

SEQ ID NO: 2395 - DNA, 1457 bp, Pandoraea thiooxydans
attgaacgctggcggcatgccttacacatgcaagtcgaacggcagcgcggagagcttgctctctggcggcgagtggcgaacgggtgagtaatacatcggaacgtgccctgtagtgggggatagctcggcgaaagccggattaataccgcataagctctacggaggaaagcgggggaccgcaaggcctcgtgctataggagcggccgatggcagattagctagttggtgaggtaaaggctcaccaaggcgacgatctgtagctggtctgagaggacgaccagccacactgggactgagacacggcccagactcctacgggaggcagcagtggggaattttggacaatgggcgaaagcctgatccagcaatgccgcgtgtgtgaagaaggccttcgggttgtaaagcacttttgttcgggaagaaagtattcgtgctaataccatggatagatgacggtaccggaagaataagcaccggctaactacgtgccagcagccgcggtaatacgtagggtgcgagcgttaatcggaattactgggcgtaaagcgtgcgcaggcggttttgtaagacagatgtgaaatccccgggcttaacctgggaactgcatttgtgactgcaaggctagagtatggcagaggggggtagaattccacgtgtagcagtgaaatgcgtagagatgtggaggaataccgatggcgaaggcagccccctgggccaatactgacgctcatgcacgaaagcgtggggagcaaacaggattagataccctggtagtccacgccctaaacgatgtcaactagttgttggggattcatttccttagtaacgtagctaacgcgtgaagttgaccgcctggggagtacggtcgcaagattaaaactcaaaggaattgacggggacccgcacaagcggtggatgatgtggattaattcgatgcaacgcgaaaaaccttacctacccttgacatgtacggaatcctgctgagaggtgggagtgctcgaaagagaaccgtaacacaggtgctgcatggctgtcgtcagctcgtgtcgtgagatgttgggttaagtcccgcaacgagcgcaacccttgtccttagttgctacgcaagggcactctaaggagactgccggtgacaaaccggaggaaggtggggatgacgtcaagtcctcatggcccttatgggtagggcttcacacgtcatacaatggtcggtacagagggctgccaaaccgcgaggtggagctaaccccagaaaaccgatcgtagtccggattgcagtctgcaactcgactgcatgaagctggaatcgctagtaatcgcggatcagcatgtcgcggtgaatacgttcccgggtcttgtacacaccgcccgtcacaccatgggagtgggttttaccagaagtaggtagcctaaccgcaaggagggcgcttaccacggtaggattcatgactggggtg

SEQ ID NO: 2396 - DNA, 1455 bp, Pandoraea vervacti
attgaacgctggcggcatgccttacacatgcaagtcgaacggcagcacgggtgcttgcacctggtggcgagtggcgaacgggtgagtaatatatcggaacgtaccttgtagtgggggatagctcggcgaaagccggattaataccgcatacgctctgaggaggaaagcgggggaccttcgggcctcgcgctacaagagcggccgatatcagattagctagttggtgaggtaaaagctcaccaaggcgacgatctgtagctggtctgagaggacgaccagccacactgggactgagacacggcccagactcctacgggaggcagcagtggggaattttggacaatgggcgaaagcctgatccagcaatgccgcgtgtgtgaagaaggccttcgggttgtaaagcacttttgtccggaaagaaatcctttgggttaatacctcggggggatgacggtaccggaagaataagcaccggctaactacgtgccagcagccgcggtaatacgtagggtgcaagcgttaatcggaattactgggcgtaaagcgtgcgcaggcggttttgtaagacggatgtgaaatccccgggctcaacctgggaactgcattcgtgactgcaaggctagagtatggcagaggggggtagaattccacgtgtagcagtgaaatgcgtagagatgtggaggaataccgatggcgaaggcagccccctgggccaatactgacgctcatgcacgaaagcgtggggagcaaacaggattagataccctggtagtccacgccctaaacgatgtcaactagttgttggggattcatttccttagtaacgtagctaacgcgtgaagttgaccgcctggggagtacggtcgcaagattaaaactcaaaggaattgacggggacccgcacaagcggtggatgatgtggattaattcgatgcaacgcgaaaaaccttacctacccttgacatgtacggaatcctgctgagaggcgggagtgctcgaaagagaaccgtaacacaggtgctgcatggctgtcgtcagctcgtgtcgtgagatgttgggttaagtcccgcaacgagcgcaacccttgtccttagttgctacgcaagagcactctaaggagactgccggtgacaaaccggaggaaggtggggatgacgtcaagtcctcatggcccttatgggtagggcttcacacgtcatacaatggtcggtacagagggctgccaaaccgcgaggtggagctaaccccagaaaaccgatcgtagtccggatcgcagtctgcaactcgactgcgtgaagctggaatcgctagtaatcgcggatcagcatgtcgcggtgaatacgttcccgggtcttgtacacaccgcccgtcacaccatgggagtgggttttgccagaagtaggtagcctaaccgcaaggagggcgcttaccacggcaggattcatgactggggtg

SEQ ID NO: 2397 - DNA, 1405 bp, Pannonibacter indicus
aacgaacgctggcggcaggcttaacacatgcaagtcgaacgccctggtaacggggagtggcagacgggtgagtaacacgtgggaacataccctttggtgcggaacaacagctggaaacggctgctaataccgcatgcgccctacgggggaaagatttatcgccgaaggattggcccgcgtctgattagctagttggtggggtaatggctcaccaaggcgacgatcagtagctggtctgagaggatgatcagccacactgggactgagacacggcccagactcctacgggaggcagcagtggggaatattggacaatgggcgcaagcctgatccagccatgccgcgtgagtgatgaaggccctagggttgtaaagctctttcagcgaggaggataatgacgttactcgcagaagaagccccggctaacttcgtgccagcagccgcggtaatacgaagggggctagcgttgttcggaatcactgggcgtaaagcgcacgtaggcggacttttaagtcaggggtgaaatcccggggctcaacctcggaactgcctttgatactgggagtctggagtccgggagaggtgagtggaactccgagtgtagaggtgaaattcgtagatattcggaagaacaccagtggcgaaggcggctcactggcccggtactgacgctgaggtgcgaaagcgtggggagcaaacaggattagataccctggtagtccacgccgtaaacgatggaagctagccgtcagggtgcatgcatcttggtggcgcagttaacgcattaagcttcccgcctggggagtacggtcgcaagattaaaactcaaaggaattgacgggggcccgcacaagcggtggagcatgtggtttaattcgaagcaacgcgcagaaccttaccagcccttgacatttggtgctaccacgggagaccgtgggttcccttcggggacgccaggacaggtgctgcatggctgtcgtcagctcgtgtcgtgagatgttgggttaagtcccgcaacgagcgcaaccctcgcccttagttgccagcattgagttgggcactctagggggactgccggtgataagccgagaggaaggtggggatgacgtcaagtcctcatggcccttacgggctgggctacacacgtgctacaatggcggtgacagtgggcagcgaaggggcgacccggagctaatctccaaaagccgtctcagttcggattgttctctgcaactcgagagcatgaagttggaatcgctagtaatcgcgtaacagcatgacgcggtgaatacgttcccgggccttgtacacaccgcccgtcacaccatgggagttgggtttacccgaaggtggtgcgctaaccgcaaggaggcagccaaccacggtaggctcagcgactggggtg

SEQ ID NO: 2398 - DNA, 1403 bp, Pannonibacter phragmitetus
aacgaacgctggcggcaggcttaacacatgcaagtcgaacgccccgcaaggggagtggcagacgggtgagtaacacgtgggaacataccctttggtgcggaacaacagctggaaacggctgctaataccgcatgcgccctacgggggaaagatttatcgccgaaggattggcccgcgtctgattagctagttggtgaggtaatggctcaccaaggcgacgatcagtagctggtctgagaggatgatcagccacactgggactgagacacggcccagactcctacgggaggcagcagtggggaatattggacaatgggcgcaagcctgatccagccatgccgcgtgagtgatgaaggccttagggttgtaaagctctttcagcgaggaggataatgacgttactcgcagaagaagccccggctaacttcgtgccagcagccgcggtaatacgaagggggctagcgttgttcggaatcactgggcgtaaagcgcacgtaggcggacttttaagtcaggggtgaaatcccggggctcaacctcggaactgcctttgatactggaagtctggagtccgagagaggtgagtggaactccgagtgtagaggtgaaattcgtagatattcggaagaacaccagtggcgaaggcggctcactggctcggtactgacgctgaggtgcgaaagcgtggggagcaaacaggattagataccctggtagtccacgccgtaaacgatggaagctagccgtcagggtgcatgcatcttggtggcgcagttaacgcattaagcttcccgcctggggagtacggtcgcaagattaaaactcaaaggaattgacgggggcccgcacaagcggtggagcatgtggtttaattcgaagcaacgcgcagaaccttaccagctcttgacatttggtgctaccacgggagaccgtgggttcccttcggggacgccaggacaggtgctgcatggctgtcgtcagctcgtgtcgtgagatgttgggttaagtcccgcaacgagcgcaaccctcgcccttagttgccagcattcagttgggcactctagggggactgccggtgataagccgagaggaaggtggggatgacgtcaagtcctcatggcccttacgggctgggctacacacgtgctacaatggcggtgacagtgggcagcgaaggggtgacccggagctaatctccaaaagccgtctcagttcggattgttctctgcaactcgagagcatgaagttggaatcgctagtaatcgcgtaacagcatgacgcggtgaatacgttcccgggccttgtacacaccgcccgtcacaccatgggagttgggtttacccgaaggtggtgcgctaaccgcaaggaggcagccaaccacggtaggctcagcgactggggtg

SEQ ID NO: 2399 - DNA, 1464 bp, Pantoea alhagi
attgaacgctggcggcaggcctaacacatgcaagtcgaacggtaacagggagcagcttgctgctccgctgacgagtggcggacgggtgagtaatgtctggggatctgcccgatggagggggataaccactggaaacggtggctaataccgcataacgtcgcaagaccaaagtgggggaccttcgggcctcacaccatcggatgaacccagatgggattagctagtaggtggggtaacggctcacctaggcgacgatccctagctggtctgagaggatgaccagccacactggaactgagacacggtccagactcctacgggaggcagcagtggggaatattgcacaatgggcgcaagcctgatgcagccatgccgcgtgtatgaagaaggccttcgggttgtaaagtactttcagcggggaggaagggagcgaggttaataacctggttcattgacgttacccgcagaagaagcaccggctaactccgtgccagcagccgcggtaatacggagggtgcaagcgttaatcggaattactgggcgtaaagcgcacgcaggcggtctgtcaagtcggatgtgaaatccccgggctcaacccgggaactgcattcgaaactggcaggctagagtcttgtagaggggggtagaattccaggtgtagcggtgaaatgcgtagagatctggaggaataccggtggcgaaggcggccccctggacaaagactgacgctcaggtgcgaaagcgtggggagcaaacaggattagataccctggtagtccacgccgtaaacgatgtcgacttggaggctgtgagcttgactcgtggcttccggagctaacgcgttaagtcgaccgcctggggagtacggccgcaaggttaaaactcaaatgaattgacgggggcccgcacaagcggtggagcatgtggtttaattcgatgcaacgcgaagaaccttacctggccttgacatccacggaattctgcagagatgcggaagtgccttcgggaaccgtgagacaggtgctgcatggctgtcgtcagctcgtgttgtgaaatgttgggttaagtcccgcaacgagcgcaacccttatcctttgttgccagcgattcggtcgggaactcaagggagactgccggtgataaaccggaggaaggtggggatgacgtcaagtcatcatggcccttacggccagggctacacacgtgctacaatggcgcatacaaagagaagcgacctcgcgagagcaagcggacctcataaagtgcgtcgtagtccggatcggagtctgcaactcgactccgtgaagtcggaatcgctagtaatcgtggatcagaatgccacggtgaatacgttcccgggccttgtacacaccgcccgtcacaccatgggagtgggttgcaaaagaagtaggtagcttaaccttcgggagggcgcttaccactttgtgattcatgactggggtg

SEQ ID NO: 2400 - DNA, 1462 bp, Pantoea allii
attgaacgctggcggcaggcctaacacatgcaagtcggacggtagcacagagagcttgctctcgggtgacgagtggcggacgggtgagtaatgtctggggatctgcccgatagagggggataaccactggaaacggtggctaataccgcataacgtcgcaagaccaaagagggggaccttcgggcctctcactatcggatgaacccagatgggattagctagtaggcggggtaacggcccacctaggcgacgatccctagctggtctgagaggatgaccagccacactggaactgagacacggtccagactcctacgggaggcagcagtggggaatattgcacaatgggcgcaagcctgatgcagccatgccgcgtgtatgaagaaggccttcgggttgtaaagtactttcagcggggaggaaggcattgtggttaataaccgcagtgattgacgttacccgcagaagaagcaccggctaactccgtgccagcagccgcggtaatacggagggtgcaagcgttaatcggaattactgggcgtaaagcgcacgcaggcggtctgttaagtcagatgtgaaatccccgggcttaacctgggaactgcatttgaaactggcaggcttgagtctcgtagaggggggtagaattccaggtgtagcggtgaaatgcgtagagatctggaggaataccggtggcgaaggcggccccctggacgaagactgacgctcaggtgcgaaagcgtggggagcaaacaggattagataccctggtagtccacgccgtaaacgatgtcgacttggaggttgttcccttgaggagtggcttccggagctaacgcgttaagtcgaccgcctggggagtacggccgcaaggttaaaactcaaatgaattgacgggggcccgcacaagcggtggagcatgtggtttaattcgatgcaacgcgaagaaccttacctactcttgacatccagagaacttagcagagatgctttggtgccttcgggaactctgagacaggtgctgcatggctgtcgtcagctcgtgttgtgaaatgttgggttaagtcccgcaacgagcgcaacccttatcctttgttgccagcgattcggtcgggaactcaaaggagactgccggtgataaaccggaggaaggtggggatgacgtcaagtcatcatggcccttacgagtagggctacacacgtgctacaatggcgcatacaaagagaagcgacctcgcgagagcaagcggacctcacaaagtgcgtcgtagtccggatcggagtctgcaactcgactccgtgaagtcggaatcgctagtaatcgtggatcagaatgccacggtgaatacgttcccgggccttgtacacaccgcccgtcacaccatgggagtgggttgcaaaagaagtaggtagcttaacctccgggagggcgcttaccactttgtgattcatgactggggtg

SEQ ID NO: 2401 - DNA, 1462 bp, Pantoea ananatis
attgaacgctggcggcaggcctaacacatgcaagtcggacggtagcacagagagcttgctctcgggtgacgagtggcggacgggtgagtaatgtctggggatctgcccgatagagggggataaccactggaaacggtggctaataccgcataacgtcgcaagaccaaagagggggaccttcgggcctctcactatcggatgaacccagatgggattagctagtaggcggggtaacggcccacctaggcgacgatccctagctggtctgagaggatgaccagccacactggaactgagacacggtccagactcctacgggaggcagcagtggggaatattgcacaatgggcgcaagcctgatgcagccatgccgcgtgtatgaagaaggccttcgggttgtaaagtactttcagcggggaggaaggcgatgtggttaataaccgcgtcgattgacgttacccgcagaagaagcaccggctaactccgtgccagcagccgcggtaatacggagggtgcaagcgttaatcggaattactgggcgtaaagcgcacgcaggcggtctgttaagtcagatgtgaaatccccgggcttaacctgggaactgcatttgaaactggcaggcttgagtctcgtagaggggggtagaattccaggtgtagcggtgaaatgcgtagagatctggaggaataccggtggcgaaggcggccccctggacgaagactgacgctcaggtgcgaaagcgtggggagcaaacaggattagataccctggtagtccacgccgtaaacgatgtcgacttggaggttgttcccttgaggagtggcttccggagctaacgcgttaagtcgaccgcctggggagtacggccgcaaggttaaaactcaaatgaattgacgggggcccgcacaagcggtggagcatgtggtttaattcgatgcaacgcgaagaaccttacctactcttgacatccagagaacttagcagagatgctttggtgccttcgggaactctgagacaggtgctgcatggctgtcgtcagctcgtgttgtgaaatgttgggttaagtcccgcaacgagcgcaacccttatcctttgttgccagcgattcggtcgggaactcaaaggagactgccggtgataaaccggaggaaggtggggatgacgtcaagtcatcatggcccttacgagtagggctacacacgtgctacaatggcgcatacaaagagaagcgacctcgcgagagcaagcggacctcataaagtgcgtcgtagtccggatcggagtctgcaactcgactccgtgaagtcggaatcgctagtaatcgtggatcagaatgccacggtgaatacgttcccgggccttgtacacaccgcccgtcacaccatgggagtgggttgcaaaagaagtaggtagcttaaccttcgggagggcgcttaccactttgtgattcatgactggggtg

SEQ ID NO: 2402 - DNA, 1402 bp, Pantoea anthophila
  misc_feature (384)..(384): n is a, c, g, or t
  misc_feature (571)..(571): n is a, c, g, or t
cttgggtgacgagtggcggacgggtgagtaatgtctggggatctgcccgatagagggggataaccactggaaacggtggctaataccgcataacgtcgcaagaccaaagagggggaccttcgggcctctcactatcggatgaacccagatgggattagctagtaggcggggtaatggcccacctaggcgacgatccctagctggtctgagaggatgaccagccacactggaactgagacacggtccagactcctacgggaggcagcagtggggaatattgcacaatgggcgcaagcctgatgcagccatgccgcgtgtatgaagaaggccttcgggttgtaaagtactttcagcggggaggaaggcggtgaggttaataacctngccgattgacgttacccgcagaagaagcaccggctaactccgtgccagcagccgcggtaatacggagggtgcaagcgttaatcggaattactgggcgtaaagcgcacgcaggcggtctgttaagtcagatgtgaaatccccgggcttaacctgggaactgcatttgaaactggcaggcttgagtctngtagaggggggtagaattccaggtgtagcggtgaaatgcgtagagatctggaggaataccggtggcgaaggcggccccctggacgaagactgacgctcaggtgcgaaagcgtggggagcaaacaggattagataccctggtagtccacgccgtaaacgatgtcgacttggaggttgttcccttgaggagtggcttccggagctaacgcgttaagtcgaccgcctggggagtacggccgcaaggttaaaactcaaatgaattgacgggggcccgcacaagcggtggagcatgtggtttaattcgatgcaacgcgaagaaccttacctactcttgacatccagagaacttagcagagatgctttggtgccttcgggaactctgagacaggtgctgcatggctgtcgtcagctcgtgttgtgaaatgttgggttaagtcccgcaacgagcgcaacccttatcctttgttgccagcgattcggtcgggaactcaaaggagactgccggtgataaaccggaggaaggtggggatgacgtcaagtcatcatggcccttacgagtagggctacacacgtgctacaatggcgcatacaaagagaagcgacctcgcgagagcaagcggacctcacaaagtgcgtcgtagtccggatcggagtctgcaactcgactccgtgaagtcggaatcgctagtaatcgtggatcagaatgccacggtgaatacgttcccgggccttgtacacaccgcccgtcacaccatgggagtgggttgcaaaagaagtaggtagcttaaccttcgggagggcgcttaccactttgtgattcatgactggggtg

SEQ ID NO: 2403 - DNA, 1445 bp, Pantoea coffeiphila
ggcctaacacatgcaagtcgaacggtagcacagagagcttgctcttgggtgacgagtggcggacgggtgagtaatgtctgggaaactgcccgatggagggggataactactggaaacggtagctaataccgcataacgtcgcaagaccaaagtgggggaccttcgggcctcacaccatcggatgtgcccagatgggattagctagtaggtggggtaatggctcacctaggcgacgatccctagctggtctgagaggatgaccagccacactggaactgagacacggtccagactcctacgggaggcagcagtggggaatattgcacaatgggcgcaagcctgatgcagccatgccgcgtgtatgaagaaggccttcgggttgtaaagtactttcagcggggaggaaggcgataaggttaatagccttgtcgattgacgttacccgcagaagaagcaccggctaactccgtgccagcagccgcggtaatacggagggtgcaagcgttaatcggaattactgggcgtaaagcgcacgcaggcggtctgttaagtcagatgtgaaatccccgggcttaacctgggaactgcatttgaaactggcaggcttgagtctcgtagaggggggtagaattccaggtgtagcggtgaaatgcgtagagatctggaggaataccggtggcgaaggcggccccctggacgaagactgacgctcaggtgcgaaagcgtggggagcaaacaggattagataccctggtagtccacgccgtaaacgatgtcgacttggaggttgtgcccttgaggcgtggcttccggagctaacgcgttaagtcgaccgcctggggagtacggccgcaaggttaaaactcaaatgaattgacgggggcccgcacaagcggtggagcatgtggtttaattcgatgcaacgcgaagaaccttacctggccttgacatccacagaacttaccagagatgctttggtgccttcgggaactgtgagacaggtgctgcatggctgtcgtcagctcgtgttgtgaaatgttgggttaagtcccgcaacgagcgcaacccttatcctttgttgccagcgattcggtcgggaactcaaaggagactgccggtgataaaccggaggaaggtggggatgacgtcaagtcatcatggcccttacggccagggctacacacgtgctacaatggcgcatacaaagagaagcgacctcgcgagagcaagcggacctcataaagtgcgtcgtagtccggatcggagtctgcaactcgactccgtgaagtcggaatcgctagtaatcgtggatcagaatgccacggtgaatacgttcccgggccttgtacacaccgcccgtcacaccatgggagtgggttgcaaaagaagtaggtagcttaaccttcgggagggcgcttaccactttgtgattcatgactggggtg

SEQ ID NO: 2404 - DNA, 1463 bp, Pantoea conspicua
attgaacgctggcggcaggcctaacacatgcaagtcggacggtagcacaggggagcttgctccctgggtgacgagtggcggacgggtgagtaatgtctggggatctgcccgatagagggggataaccactggaaacggtggctaataccgcataacgtcgcaagaccaaagagggggaccttcgggcctctcactatcggatgaacccagatgggattagctagtaggcggggtaatggcccacctaggcgacgatccctagctggtctgagaggatgaccagccacactggaactgagacacggtccagactcctacgggaggcagcagtggggaatattgcacaatgggcgcaagcctgatgcagccatgccgcgtgtatgaagaaggcctcgggttgtaaagtactttcagcggggaggaaggcgatgcggttaataaccgcgtcgattgacgttacccgcagaagaagcaccggctaactccgtgccagcagccgcggtaatacggagggtgcaagcgttaatcggaattactgggcgtaaagcgcacgcaggcggtctgttaagtcagatgtgaaatccccgggcttaacctgggaactgcatttgaaactggcaggcttgagtctcgtagaggggggtagaattccaggtgtagcggtgaaatgcgtagagatctggaggaataccggtggcgaaggcggccccctggacgaagactgacgctcaggtgcgaaagcgtggggagcaaacaggattagataccctggtagtccacgccgtaaacgatgtcgacttggaggttgttcccttgaggagtggcttccggagctaacgcgttaagtcgaccgcctggggagtacggccgcaaggttaaaactcaaatgaattgacgggggcccgcacaagcggtggagcatgtggtttaattcgatgcaacgcgaagaaccttacctactcttgacatccagcgaacttggcagagatgccttggtgccttcgggaacgctgagacaggtgctgcatggctgtcgtcagctcgtgttgtgaaatgttgggttaagtcccgcaacgagcgcaacccttatcctttgttgccagcgattcggtcgggaactcaaaggagactgccggtgataaaccggaggaaggtggggatgacgtcaagtcatcatggcccttacgagtagggctacacacgtgctacaatggcgcatacaaagagaagcgacctcgcgagagcaagcggacctcacaaagtgcgtcgtagtccggatcggagtctgcaactcgactccgtgaagtcggaatcgctagtaatcgtggatcagaatgccacggtgaatacgttcccgggccttgtacacaccgcccgtcacaccatgggagtgggttgcaaaagaagtaggtagcttaaccttcgggagggcgcttaccactttgtgattcatgactggggtg

SEQ ID NO: 2405 - DNA, 1464 bp, Pantoea cypripedii
attgaacgctggcggcaggcctaacacatgcaagtcgaacggtagcacagaggagcttgctccttgggtgacgagtggcggacgggtgagtaatgtctggggatctgcccgatggagggggataactactggaaacggtagctaataccgcataacgtcgcaagaccaaagtgggggaccttcgggcctcacaccatcggatgaacccagatgggattagctagtaggtggggtaacggctcacctaggcgacgatccctagctggtctgagaggatgaccagccacactggaactgagacacggtccagactcctacgggaggcagcagtggggaatattgcacaatgggcgcaagcctgatgcagccatgccgcgtgtatgaagaaggccttcgggttgtaaagtactttcagcggggaggaaggggttgagtttaatacgctcaatcattgacgttacccgcagaagaagcaccggctaactccgtgccagcagccgcggtaatacggagggtgcaagcgttaatcggaattactgggcgtaaagcgcacgcaggcggtctgtcaagtcggatgtgaaatccccgggcttaacctgggaactgcattcgaaactggcaggctagagtctcgtagaggggggtagaattccaggtgtagcggtgaaatgcgtagagatctggaggaataccggtggcgaaggcggccccctggacgaagactgacgctcaggtgcgaaagcgtggggagcaaacaggattagataccctggtagtccacgccgtaaacgatgtcgacttggaggttgtgcccttgaggcgtggcttccggagctaacgcgttaagtcgaccgcctggggagtacggccgcaaggttaaaactcaaatgaattgacgggggcccgcacaagcggtggagcatgtggtttaattcgatgcaacgcgaagaaccttacctggccttgacatccagagaacttagcagagatgctttggtgccttcgggaactctgagacaggtgctgcatggctgtcgtcagctcgtgttgtgaaatgttgggttaagtcccgcaacgagcgcaacccttatcctttgttgccagcgattcggtcgggaactcaaaggagactgccggtgataaaccggaggaaggtggggatgacgtcaagtcatcatggcccttacggccagggctacacacgtgctacaatggcgcatacaaagagaagcgacctcgcgagagcaagcggacctcataaagtgcgtcgtagtccggattggagtctgcaactcgactccatgaagtcggaatcgctagtaatcgtagatcagaatgctacggtgaatacgttcccgggccttgtacacaccgcccgtcacaccatgggagtgggttgcaaaagaagtaggtagcttaaccttcgggagggcgcttaccactttgtgattcatgactggggtg

SEQ ID NO: 2406 - DNA, 1394 bp, Pantoea deleyi
  misc_feature (912)..(912): n is a, c, g, or t
acgagtggcggacgggtgagtaatgtctggggatctgcccgatagagggggataaccactggaaacggtggctaataccgcataacgtcgcaagaccaaagagggggaccttcgggcctctcactatcggatgaacccagatgggattagctagtaggcggggtaatggcccacctaggcgacgatccctagctggtctgagaggatgaccagccacactggaactgagacacggtccagactcctacgggaggcagcagtggggaatattgcacaatgggcgcaagcctgatgcagccatgccgcgtgtatgaagaaggccttcgggttgtaaagtactttcagcggggaggaaggcggtgcggttaataaccgcgccgattgacgttacccgcagaagaagcaccggctaactccgtgccagcagccgcggtaatacggagggtgcaagcgttaatcggaattactgggcgtaaagcgcacgcaggcggtctgttaagtcagatgtgaaatccccgggcttaacctgggaactgcatttgaaactggcaggcttgagtctcgtagaggggggtagaattccaggtgtagcggtgaaatgcgtagagatctggaggaataccggtggcgaaggcggccccctggacgaagactgacgctcaggtgcgaaagcgtggggagcaaacaggattagataccctggtagtccacgccgtaaacgatgtcgacttggaggttgttcccttgaggagtggcttccggagctaacgcgttaagtcgaccgcctggggagtacggccgcaaggttaaaactcaaatgaattgacgggggcccgcacaagcggtggagcatgtggtttaattcgatgcaacgcgaagaaccttacctactcttgacatccagcgaacggngcagagatgccccggtgccttcgggaacgctgagacaggtgctgcatggctgtcgtcagctcgtgttgtgaaatgttgggttaagtcccgcaacgagcgcaacccttatcctttgttgccagcgattcggtcgggaactcaaaggagactgccggtgataaaccggaggaaggtggggatgacgtcaagtcatcatggcccttacgagtagggctacacacgtgctacaatggcgcatacaaagagaagcgacctcgcgagagcaagcggacctcacaaagtgcgtcgtagtccggatcggagtctgcaactcgactccgtgaagtcggaatcgctagtaatcgtggatcagaatgccacggtgaatacgttcccgggccttgtacacaccgcccgtcacaccatgggagtgggttgcaaaagaagtaggtagcttaaccttcgggagggcgcttaccactttgtgattcatgactggggtg

SEQ ID NO: 2407 - DNA, 1347 bp, Pantoea dispersa
  misc_feature (83)..(83): n is a, c, g, or t
  misc_feature (367)..(367): n is a, c, g, or t
  misc_feature (742)..(742): n is a, c, g, or t
  misc_feature (1029)..(1029): n is a, c, g, or t
ggacgggtgagtaatgtctgggaaactgcccgatggagggggataactactggaaacggtagctaataccgcataacgtcgcnagaccaaagtgggggaccttcgggcctcacaccatcggatgtgcccagatgggattagctagtaggtggggtaatggctcacctaggcgacgatccctagctggtctgagaggatgaccagccacactggaactgagacacggtccagactcctacgggaggcagcagtggggaatattgcacaatgggcgcaagcctgatgcagccatgccgcgtgtatgaagaaggccttcgggttgtaaagtactttcagcggggaggaaggcggtgaggttaataacctngccgattgacgttacccgcagaagaagcaccggctaactccgtgccagcagccgcggtaatacggagggtgcaagcgttaatcggaattactgggcgtaaagcgcacgcaggcggtctgttaagtcagatgtgaaatccccgggcttaacctgggaactgcatttgaaactggcaggcttgagtctcgtagaggggggtagaattccaggtgtagcggtgaaatgcgtagagatctggaggaataccggtggcgaaggcggccccctggacgaagactgacgctcaggtgcgaaagcgtggggagcaaacaggattagataccctggtagtccacgccgtaaacgatgtcgacttggaggttgtgcccttgaggngtggcttccggagctaacgcgttaagtcgaccgcctggggagtacggccgcaaggttaaaactcaaatgaattgacgggggcccgcacaagcggtggagcatgtggtttaattcgatgcaacgcgaagaaccttacctggccttgacatccagagaacttagcagagatgctttggtgccttcgggaactctgagacaggtgctgcatggctgtcgtcagctcgtgttgtgaaatgttgggttaagtcccgcaacgagcgcaacccttatcctttgttgccagcggntcggccgggaactcaaaggagactgccggtgataaaccggaggaaggtggggatgacgtcaagtcatcatggcccttacggccagggctacacacgtgctacaatggcgcatacaaagagaagcgacctcgcgagagcaagcggacctcataaagtgcgtcgtagtccggattggagtctgcaactcgactccatgaagtcggaatcgctagtaatcgtagatcagaatgctacggtgaatacgttcccgggccttgtacacaccgcccgtcacaccatgggagtgggttgcaaaagaagtaggtagcttaaccttcg

SEQ ID NO: 2408 - DNA, 1348 bp, Pantoea eucalypti
  misc_feature (354)..(354): n is a, c, g, or t
ggacgggtgagtaatgtctggggatctgcccgatagagggggataaccactggaaacggtggctaataccgcataacgtcgcaagaccaaagagggggaccttcgggcctctcactatcggatgaacccagatgggattagctagtaggcggggtaatggcccacctaggcgacgatccctagctggtctgagaggatgaccagccacactggaactgagacacggtccagactcctacgggaggcagcagtggggaatattgcacaatgggcgcaagcctgatgcagccatgccgcgtgtatgaagaaggccttcgggttgtaaagtactttcagcggggaggaaggcgatgnggttaataacctcatcgattgacgttacccgcagaagaagcaccggctaactccgtgccagcagccgcggtaatacggagggtgcaagcgttaatcggaattactgggcgtaaagcgcacgcaggcggtctgttaagtcagatgtgaaatccccgggcttaacctgggaactgcatttgaaactggcaggcttgagtcttgtagaggggggtagaattccaggtgtagcggtgaaatgcgtagagatctggaggaataccggtggcgaaggcggccccctggacaaagactgacgctcaggtgcgaaagcgtggggagcaaacaggattagataccctggtagtccacgccgtaaacgatgtcgacttggaggttgttcccttgaggagtggcttccggagctaacgcgttaagtcgaccgcctggggagtacggccgcaaggttaaaactcaaatgaattgacgggggcccgcacaagcggtggagcatgtggtttaattcgatgcaacgcgaagaaccttacctactcttgacatccagagaacttagcagagatgctttggtgccttcgggaactctgagacaggtgctgcatggctgtcgtcagctcgtgttgtgaaatgttgggttaagtcccgcaacgagcgcaacccttatcctttgttgccagcgcgtgatggcgggaactcaaaggagactgccggtgataaaccggaggaaggtggggatgacgtcaagtcatcatggcccttacgagtagggctacacacgtgctacaatggcgcatacaaagagaagcgacctcgcgagagcaagcggacctcacaaagtgcgtcgtagtccggatcggagtctgcaactcgactccgtgaagtcggaatcgctagtaatcgtggatcagaatgccacggtgaatacgttcccgggccttgtacacaccgcccgtcacaccatgggagtgggttgcaaaagaagtaggtagcttaaccttcg

SEQ ID NO: 2409 - DNA, 1462 bp, Pantoea rodasii
attgaacgctggcggcaggcctaacacatgcaagtcgaacggtagcacagagagcttgctcttgggtgacgagtggcggacgggtgagtaatgtctgggaaactgcccgatggagggggataactactggaaacggtagctaataccgcataacgtcttcggaccaaagtgggggaccttcgggcctcacaccatcggatgtgcccagatgggattagctagtaggtggggtaatggctcacctaggcgacgatccctagctggtctgagaggatgaccagccacactggaactgagacacggtccagactcctacgggaggcagcagtggggaatattgcacaatgggcgcaagcctgatgcagccatgccgcgtgtatgaagaaggcctcgggttgtaaagtactttcagtggggaggaaggcgatgtggttaataaccgcatcgattgacgttacccgcagaagaagcaccggctaactccgtgccagcagccgcggtaatacggagggtgcaagcgttaatcggaattactgggcgtaaagcgcacgcaggcggtctgtcaagtcggatgtgaaatccccgggctcaacctgggaactgcattcgaaactggcaggctagagtcttgtagaggggggtagaattccaggtgtagcggtgaaatgcgtagagatctggaggaataccggtggcgaaggcggccccctggacaaagactgacgctcaggtgcgaaagcgtggggagcaaacaggattagataccctggtagtccacgccgtaaacgatgtcgacttggaggttgttcccttgaggagtggcttccggagctaacgcgttaagtcgaccgcctggggagtacggccgcaaggttaaaactcaaatgaattgacgggggcccgcacaagcggtggagcatgtggtttaattcgatgcaacgcgaagaaccttacctactcttgacatccagagaacttagcagagatgctttggtgccttcgggaactctgagacaggtgctgcatggctgtcgtcagctcgtgttgtgaaatgttgggttaagtcccgcaacgagcgcaacccttatcctttgttgccagcgggttatgccgggaactcaaaggagactgccagtgataaactggaggaaggtggggatgacgtcaagtcatcatggcccttacgagtagggctacacacgtgctacaatggcgcatacaaagagaagcgacctcgcgagagcaagcggacctcataaagtgcgtcgtagtccggatcggagtctgcaactcgactccgtgaagtcggaatcgctagtaatcgtagatcagaatgctacggtgaatacgttcccgggccttgtacacaccgcccgtcacaccatgggagtgggttgcaaaagaagtaggtagcttaaccttcgggagggcgcttaccactttgtgattcatgactggggtg

SEQ ID NO: 2410 - DNA, 1464 bp, Pantoea rwandensis
attgaacgctggcggcaggcctaacacatgcaagtcgaacggtagcacagaggagcttgctccttgggtgacgagtggcggacgggtgagtaatgtctgggaaactgcccgatggagggggataactactggaaacggtagctaataccgcataacgtcttcggaccaaagtgggggaccttcgggcctcacaccatcggatgtgcccagatgggattagctagtaggtggggtaatggctcacctaggcgacgatccctagctggtctgagaggatgaccagccacactggaactgagacacggtccagactcctacgggaggcagcagtggggaatattgcacaatgggcgcaagcctgatgcagccatgccgcgtgtatgaagaaggccttcgggttgtaaagtactttcagtggggaggaaggcgatgtggttaataaccgcatcgattgacgttacccgcagaagaagcaccggctaactccgtgccagcagccgcggtaatacggagggtgcaagcgttaatcggaattactgggcgtaaagcgcacgcaggcggtctgtcaagtcggatgtgaaatccccgggctcaacctgggaactgcattcgaaactggcaggctagagtcttgtagaggggggtagaattccaggtgtagcggtgaaatgcgtagagatctggaggaataccggtggcgaaggcggccccctggacaaagactgacgctcaggtgcgaaagcgtggggagcaaacaggattagataccctggtagtccacgccgtaaacgatgtcgacttggaggttgttcccttgaggagtggcttccggagctaacgcgttaagtcgaccgcctggggagtacggccgcaaggttaaaactcaaatgaattgacgggggcccgcacaagcggtggagcatgtggtttaattcgatgcaacgcgaagaaccttacctactcttgacatccacggaattcggcagagatgccttagtgccttcgggaaccgtgagacaggtgctgcatggctgtcgtcagctcgtgttgtgaaatgttgggttaagtcccgcaacgagcgcaacccttatcctttgttgccagcggttcggccgggaactcaaaggagactgccagtgataaactggaggaaggtggggatgacgtcaagtcatcatggcccttacgagtagggctacacacgtgctacaatggcgcatacaaagagaagcgacctcgcgagagcaagcggacctcataaagtgcgtcgtagtccggatcggagtctgcaactcgactccgtgaagtcggaatcgctagtaatcgtagatcagaatgctacggtgaatacgttcccgggccttgtacacaccgcccgtcacaccatgggagtgggttgcaaaagaagtaggtagcttaaccttcgggagggcgcttaccactttgtgattcatgactggggtg

SEQ ID NO: 2411 - DNA, 1464 bp, Pantoea stewartii
  misc_feature (420)..(420): n is a, c, g, or t
  misc_feature (470)..(470): n is a, c, g, or t
  misc_feature (1263)..(1263): n is a, c, g, or t
  misc_feature (1289)..(1289): n is a, c, g, or t
attgaacgctggcggcaggcctaacacatgcaagtcggacggtagcacagaggagcttgctcctcgggtgacgagtggcggacgggtgagtaatgtctgggaaactgcccgatggagggggataactactggaaacggtagctaataccgcataacgtcgcaagaccaaagtgggggacctccgggcctcacaccatcggatgtgcccagatgggattagctagtaggcggggtaacggcccacctaggcgacgatccctagctggtctgagaggatgaccagccacactggaactgagacacggtccagactcctacgggaggcagcagtggggaatattgcacaatgggcgcaagcctgatgcagccatgccgcgtgtatgaagaaggccttcgggttgtaaagtactttcagcgggnaggaaggtggtgaggttaataacctcatcaattgacgttacccgcagaanaagcaccggctaactccgtgccagcagccgcggtaatacggagggtgcaagcgttaatcggaattactgggcgtaaagcgcacgcaggcggtctgttaagtcagatgtgaaatccccgggcttaacctgggaactgcatttgaaactggcaggcttgagtctcgtagaggggggtagaattccaggtgtagcggtgaaatgcgtagagatctggaggaataccggtggcgaaggcggccccctggacgaagactgacgctcaggtgcgaaagcgtggggagcaaacaggattagataccctggtagtccacgccgtaaacgatgtcgacttggaggttgttcccttgaggagtggcttccggagctaacgcgttaagtcgaccgcctggggagtacggccgcaaggttaaaactcaaatgaattgacgggggcccgcacaagcggtggagcatgtggtttaattcgatgcaacgcgaagaaccttacctactcttgacatccagcgaacttggcagagatgccttggtgccttcgggaacgctgagacaggtgctgcatggctgtcgtcagctcgtgttgtgaaatgttgggttaagtcccgcaacgagcgcaacccttatcctttgttgccagcgattcggtcgggaactcaaaggagactgccggtgataaaccggaggaaggtggggatgacgtcaagtcatcatggcccttacgagtagggctacacacgtgctacaatggcgcatacaaagagaagcgacctcgcgagagcaagcggacctcataaantgcgtcgtagtccggatcggagtctncaactcgactccgtgaagtcggaatcgctagtaatcgtggatcagaatgccacggtgaatacgttcccgggccttgtacacaccgcccgtcacaccatgggagtgggttgcaaaagaagtaggtagcttaacccccgggagggcgcttaccactttgtgattcatgactggggtg

SEQ ID NO: 2412 - DNA, 1399 bp, Pantoea vagans
  misc_feature (909)..(910): n is a, c, g, or t
  misc_feature (914)..(914): n is a, c, g, or t
  misc_feature (917)..(917): n is a, c, g, or t
  misc_feature (931)..(931): n is a, c, g, or t
  misc_feature (947)..(947): n is a, c, g, or t
gggtgacgagtggcggacgggtgagtaatgtctggggatctgcccgatagagggggataaccactggaaacggtggctaataccgcataacgtcgcaagaccaaagagggggaccttcgggcctctcactatcggatgaacccagatgggattagctagtaggcggggtaatggcccacctaggcgacgatccctagctggtctgagaggatgaccagccacactggaactgagacacggtccagactcctacgggaggcagcagtggggaatattgcacaatgggcgcaagcctgatgcagccatgccgcgtgtatgaagaaggccttcgggttgtaaagtactttcagcggggaggaaggcgatgcggttaataaccgcgtcgattgacgttacccgcagaagaagcaccggctaactccgtgccagcagccgcggtaatacggagggtgcaagcgttaatcggaattactgggcgtaaagcgcacgcaggcggtctgttaagtcagatgtgaaatccccgggcttaacctgggaactgcatttgaaactggcaggcttgagtcttgtagaggggggtagaattccaggtgtagcggtgaaatgcgtagagatctggaggaataccggtggcgaaggcggccccctggacaaagactgacgctcaggtgcgaaagcgtggggagcaaacaggattagataccctggtagtccacgccgtaaacgatgtcgacttggaggttgttcccctgaggagtggcttccggagctaacgcgttaagtcgaccgcctggggagtacggccgcaaggttaaaactcaaatgaattgacgggggcccgcacaagcggtggagcatgtggtttaattcgatgcaacgcgaagaaccttacctactcttgacatccanngaanttngcagagatgctttngtgccttcgggaactntgagacaggtgctgcatggctgtcgtcagctcgtgttgtgaaatgttgggttaagtcccgcaacgagcgcaacccttatcctttgttgccagcgattcggtcgggaactcaaaggagactgccggtgataaaccggaggaaggtggggatgacgtcaagtcatcatggcccttacgagtagggctacacacgtgctacaatggcgcatacaaagagaagcgacctcgcgagagcaagcggacctcacaaagtgcgtcgtagtccggatcggagtctgcaactcgactccgtgaagtcggaatcgctagtaatcgtggatcagaatgccacggtgaatacgttcccgggccttgtacacaccgcccgtcacaccatgggagtgggttgcaaaagaagtaggtagcttaaccttcgggagggcgcttaccactttgtgattcatgactggggtg

SEQ ID NO: 2413 - DNA, 1465 bp, Pantoea wallisii
attgaacgctggcggcaggcctaacacatgcaagtcggacggtagcacagaagagcttgctcttcgggtgacgagtggcggacgggtgagtaatgtctgggaaactgcccgatggcgggggataactactggaaacggtagctaataccgcataacgtcgcaagaccaaagtgggggaccttcgggcctcacgccatcggatgtgcccagatgggattagctagtaggtggggtaacggctcacctaggcgacgatccctagctggtctgagaggatgaccagccacactggaactgagacacggtccagactcctacgggaggcagcagtggggaatattgcacaatgggcgcaagcctgatgcagccatgccgcgtgtatgaagaaggccttcgggttgtaaagtactttcagcggggaggaaggcggtaaggttaataaccttgccgattgacgttacccgcagaagaagcaccggctaactccgtgccagcagccgcggtaatacggagggtgcaagcgttaatcggaattactgggcgtaaagcgcacgcaggcggtctgttaagtcagatgtgaaatccccgggcttaacctgggaactgcatttgaaactggcaggcttgagtctcgtagaggggggtagaattccaggtgtagcggtgaaatgcgtagagatctggaggaataccggtggcgaaggcggccccctggacgaagactgacgctcaggtgcgaaagcgtggggagcaaacaggattagataccctggtagtccacgccgtaaacgatgtcgacttggaggttgtgcccttgaggcgtggcttccggagctaacgcgttaagtcgaccgcctggggagtacggccgcaaggttaaaactcaaatgaattgacgggggcccgcacaagcggtggagcatgtggtttaattcgatgcaacgcgaagaaccttacctggccttgacatccagagaactttccagagatggattggtgccttcgggaactctgagacaggtgctgcatggctgtcgtcagctcgtgttgtgaaatgttgggttaagtcccgcaacgagcgcaacccttatcctttgttgccagcgggtagtgccgggaactcaaaggagactgccggtgataaaccggaggaaggtggggatgacgtcaagtcatcatggcccttacggccagggctacacacgtgctacaatggcgcatacaaagagaagcgacctcgcgagagcaagcggacctcataaagtgcgtcgtagtccggatcggagtctgcaactcgactccgtgaagtcggaatcgctagtaatcgtagatcagaatgctacggtgaatacgttcccgggccttgtacacaccgcccgtcacaccatgggagtgggttgcaaaagaagtaggtagcttaaccttcgggagggcgcttaccactttgtgattcatgactggggtg

SEQ ID NO: 2414 - DNA, 1450 bp, Parabacteroides chinchillae
gatgaacgctagcgacaggcttaacacatgcaagtcgaggggtagcagggggtagcaatatcccgctgacgaccggcgcacgggtgagtaacgcgtatgcaacttacctatcagagagggataacccggcgaaagtcggactaataccacatgaaacaggggtcccgcatgggaatatttgttaaagatttattgctgatagataggcatgcgttccattagatagttggtggggtaacggcccaccaagtctgcgatggataggggttctgagaggaaggtcccccacattggtactgagacacggaccaaactcctacgggaggcagcagtgaggaatattggtcaatgggcgagagcctgaaccagccaagtcgcgtgaaggatgaaggttctatggattgtaaacttcttttagaggggaataaagtgcgggacgtgtcctgttttgtatgtaccctctgaataagcatcggctaactccgtgccagcagccgcggtaatacggaggatgcgagcgttatccggatttattgggtttaaagggtgcgtaggtggatgtttaagtcagcggtgaaagtttgtggctcaaccataaaattgccgttgaaactggatatcttgagtatgtttgaggtaggcggaatgcgtggtgtagcggtgaaatgcatagatatcacgcagaactccgattgcgaaggcagcttactaaaccaacactgacactgaagcacgaaagcgtgggtatcaaacaggattagataccctggtagtccacgcagtaaacgatgattactaggagtttgcgatatattgtaagctctacagcgaaagcgttaagtaatccacctggggagtacgccggcaacggtgaaactcaaaggaattgacgggggcccgcacaagcggaggaacatgtggtttaattcgatgatacgcgaggaaccttacccgggtttgaacgtaagaagaccggagtggaaacactctttctagcaatagctttttacgaggtgctgcatggttgtcgtcagctcgtgccgtgaggtgtcggcttaagtgccataacgagcgcaacccttatcactagttactaacaggtcaagctgaggactctagtgagactgccagcgtaagctgtgaggaaggtggggatgacgtcaaatcagcacggcccttacatccggggcgacacacgtgttacaatggcatggacaaagggcggctacacagcgatgtgatgctaatccccaaaccatgtctcagttcggatcggagtctgcaactcgactccgtgaagctggattcgctagtaatcgcgcatcagccatggcgcggtgaatacgttcccgggccttgtacacaccgcccgtcaagccatgggagccgggggtacctgaagtccgtaaccgttgaggatcggcctagggtaaaactggtgactggggct

SEQ ID NO: 2415 - DNA, 1455 bp, Paraburkholderia aromaticivorans
attgaacgctggcggcatgccttacacatgcaagtcgaacggcagcacgggggcaaccctggtggcgagtggcgaacgggtgagtaatacatcggaacgtgtcctgtagtgggggatagcccggcgaaagccggattaataccgcatacgatctgcggatgaaagcgggggctccttcgggacctcgcgctgcaggggcggccgatggcagattagctagttggtggggtaaaggcctaccaaggcgacgatctgtagctggtctgagaggacgaccagccacactgggactgagacacggcccagactcctacgggaggcagcagtggggaattttggacaatgggcgaaagcctgatccagcaatgccgcgtgtgtgaagaaggccttcgggttgtaaagcacttttgtccggaaagaaaacctcttggttaatacccgagggggatgacggtaccggaagaataagcaccggctaactacgtgccagcagccgcggtaatacgtagggtgcaagcgttaatcggaattactgggcgtaaagcgtgcgcaggcggttcgctaagacagatgtgaaatccccgggcttaacctgggaactgcatttgtgactggcgggctagagtatggcagaggggggtagaattccacgtgtagcagtgaaatgcgtagagatgtggaggaataccgatggcgaaggcagccccctgggccaatactgatgctcatgcacgaaagcgtggggagcaaacaggattagataccctggtagtccacgccctaaacgatgtcaactagttgtcgggtcttcattgacttggtaacgtagctaacgcgtgaagttgaccgcctggggagtacggtcgcaagattaaaactcaaaggaattgacggggacccgcacaagcggtggatgatgcggattaattcgatgcaacgcgaaaaaccttacctacccttgacatgtatggaatcctgctgagaggtgggagtgcccgaaagggagccataacacaggtgctgcatggctgtcgtcagctcgtgtcgtgagatgttgggttaagtcccgcaacgagcgcaacccttgtccctagttgctacgcaagagcactctagggagactgccggtgacaaaccggaggaaggtggggatgacgtcaagtcctcatggcccttatgggtagggcttcacacgtcatacaatggtcggaacagagggtcgccaacccgcgagggggagccaatcccagaaaaccgatcgtagtccggatcgcactctgcaactcgagtgcgtgaagctggaatcgctagtaatcgcggatcagcatgccgcggtgaatacgttcccgggtcttgtacacaccgcccgtcacaccatgggagtgggttttaccagaagtggctagtctaaccgcaaggaggacggtcaccacggtaggattcatgactggggtg

SEQ ID NO: 2416 - DNA, 1409 bp, Paraburkholderia aspalathi
tgcaagtcgaacggcagcacgggggcaaccctggtggcgagtggcgaacgggtgagtaatacatcggaacgtgtcctgtagtgggggatagcccggcgaaagccggattaataccgcatacgctctacggaggaaagggggggatctcaggacctcccgctacaggggcggccgatggcagattagctagttggtggggtaaaggcctaccaaggcgacgatctgtagctggtctgagaggacgaccagccacactgggactgagacacggcccagactcctacgggaggcagcagtggggaattttggacaatgggcgaaagcctgatccagcaatgccgcgtgtgtgaagaaggccttcgggttgtaaagcacttttgtccggaaagaaaacctccgccctaatatggtggggggatgacggtaccggaagaataagcaccggctaactacgtgccagcagccgcggtaatacgtagggtgcaagcgttaatcggaattactgggcgtaaagcgtgcgcaggcggtccgctaagacagatgtgaaatccccgggcttaacctgggaactgcctttgtgactggcgggctagagtatggaagaggggggtagaattccacgtgtagcagtgaaattcgtagagatgtggaggaacaccgatggcgaaggcagccccctgggccaatactgacgctcatgcacgaaagcgtggggagcaaacaggattagataccctggtagtccacgccctaaacgatgacaactagttgtcggggattcatattgtttagtaacgtagctaacgcgtgaagttgtccgcctggggagtacggtcgcaagattaaaactcaaaggaattgacggggacccgcacaagcggtggatgatgtggattaattcgatgcaacgcgaaaaaccttacctacccttgacatcgcatggaatcctgctgagaggtgggagtgcccgtaagggagccatgagacaggtgctgcatggctgtcgtcagctcgtgtcgtgagatgttgggttaagtcccgcaacgagcgcaacccttgtccctagttgctacgcatttagttgagcactctagggagactgccggtgataaaccgagaggaaggtggggatgacgtcaagtcctcatggcccttatgggtagggcttcacacgtcatacaatggtcggaacagagggtcgccaacccgcgagggggagccaatctccagaaaaccgatcgtagtccggatcgcactctgcaactcgagtgcgtgaagctggaatcgctagtaatcgcggatcagcatgccgcggtgaatacgttcccgggtcttgtacacaccgcccgtcacaccatgggagtgggttttaccagaagtggctagtctaaccgcaaggaggacggtca

SEQ ID NO: 2417 - DNA, 1453 bp, Paraburkholderia azotifigens
attgaacgctggcggcatgccttacacatgcaagtcggacggcagcacgggggcaaccctggtggcgagtggcgaacgggtgagtaatacatcggaacgtgtcctggagtgggggatagcccggcgaaagccggattaataccgcatacgctctatggaggaaagcgggggatcttcggacctcgcgctcaaggggcggccgatggcagattagctagttggtggggtaaaggcctaccaaggcgacgatctgtagctggtctgagaggacgaccagccacactgggactgagacacggcccagactcctacgggaggcagcagtggggaattttggacaatgggggcaaccctgatccagcaatgccgcgtgtgtgaagaaggccttcgggttgtaaagcacttttgtccggaaagaaaaccatcgccctaatatggtggtgggatgacggtaccggaagaataagcaccggctaactacgtgccagcagccgcggtaatacgtagggtgcgagcgttaatcggaattactgggcgtaaagcgtgcgcaggcggttcgctaagaccgatgtgaaatccccgggcttaacctgggaactgcattggtgactggcgggctagagtatggcagaggggggtagaattccacgtgtagcagtgaaatgcgtagagatgtggaggaataccgatggcgaaggcagccccctgggccaatactgacgctcatgcacgaaagcgtggggagcaaacaggattagataccctggtagtccacgccctaaacgatgtcaactagttgtcgggtcttcattgacttggtaacgtagctaacgcgtgaagttgaccgcctggggagtacggtcgcaagattaaaactcaaaggaattgacggggacccgcacaagcggtggatgatgtggattaattcgatgcaacgcgaaaaaccttacctacccttgacatgtacggaatcctgctgagaggtgggagtgcccgaaagggagccgtaacacaggtgctgcatggctgtcgtcagctcgtgtcgtgagatgttgggttaagtcccgcaacgagcgcaacccttgtccctagttgctacgcaagagcactctagggagactgccggtgacaaaccggaggaaggtggggatgacgtcaagtcctcatggcccttatgggtagggcttcacacgtcatacaatggtcggaacagagggttgccaagccgcgaggtggagccaatcccagaaaaccgatcgtagtccggatcgcagtctgcaactcgactgcgtgaagctggaatcgctagtaatcgcggatcagcatgccgcggtgaatacgttcccgggtcttgtacacaccgcccgtcacaccatgggagtgggttttaccagaagtggctagtctaaccgcaaggaggacggtcaccacggtaggattcatgactggggtg

SEQ ID NO: 2418 - DNA, 1453 bp, Paraburkholderia bryophila
  misc_feature (161)..(161): n is a, c, g, or t
attgaacgctggcggcatgccttacacatgcaagtcgaacggcagcacgggagcaatcctggtggcgagtggcgaacgggtgagtaatacatcggaacgtgtcctgtagtgggggatagcccggcgaaagccggattaataccgcatacgctctacggagnaaagggggggatcttaggacctcccgctacaggggcggccgatggcagattagctagttggtggggtaaaggcctaccaaggcgacgatctgtagctggtctgagaggacgaccagccacactgggactgagacacggcccagactcctacgggaggcagcagtggggaattttggacaatgggcgaaagcctgatccagcaatgccgcgtgtgtgaagaaggccttcgggttgtaaagcacttttgtccggaaagaaaacttctgccctaatacggcgggaggatgacggtaccggaagaataagcaccggctaactacgtgccagcagccgcggtaatacgtagggtgcaagcgttaatcggaattactgggcgtaaagcgtgcgcaggcggtccgctaagacagatgtgaaatccccgggcttaacctgggaactgcatttgtgactggcgggctagagtatggcagaggggggtagaattccacgtgtagcagtgaaatgcgtagagatgtggaggaataccgatggcgaaggcagccccctgggccaatactgacgctcatgcacgaaagcgtggggagcaaacaggattagataccctggtagtccacgccctaaacgatgtcaactagttgttgggtcttcattgacttggtaacgtagctaacgcgtgaagttgaccgcctggggagtacggtcgcaagattaaaactcaaaggaattgacggggacccgcacaagcggtggatgatgtggattaattcgatgcaacgcgaaaaaccttacctacccttgacatgtatggaaccctgctgagaggtgggggtgcccgaaagggagccataacacaggtgctgcatggctgtcgtcagctcgtgtcgtgagatgttgggttaagtcccgcaacgagcgcaacccttgtccctagttgctacgcaagagcactccagggagactgccggtgacaaaccggaggaaggtggggatgacgtcaagtcctcatggcccttatgggtagggcttcacacgtcatacaatggtcggaacagagggttgccaagccgcgaggtggagccaatcccagaaaaccgatcgtagtccggatcgcactctgcaactcgagtgcgtgaagctggaatcgctagtaatcgcggatcagcatgccgcggtgaatacgttcccgggtcttgtacacaccgcccgtcacaccatgggagtgggtttcaccagaagtaggtagcctaaccgtaaggagggcgcttaccacggtgggattcatgactggggtg

SEQ ID NO: 2419 - DNA, 1453 bp, Paraburkholderia caballeronis
attgaacgctggcggcatgccttacacatgcaagtcgaacggcagcgcgggggcaaccctggcggcgagtggcgaacgggtgagtaatacatcggaacgtgtccattagtgggggatagcccggcgaaagccggattaataccgcatacgatctgtggatgaaagcgggggaccgaaaggcctcgcgctaacggggcggccgatggcggattaggtagttggtggggtaaaggcctaccaagccgacgatccgtagctggtctgagaggacgaccagccacactgggactgagacacggcccagactcctacgggaggcagcagtggggaattttggacaatgggggcaaccctgatccagcaatgccgcgtgtgtgaagaaggccttcgggttgtaaagcacttttgtccggaaagaaatcatccctgctaataccgggggtggatgacggtaccggaagaataagcaccggctaactacgtgccagcagccgcggtaatacgtagggtgcgagcgttaatcggaattactgggcgtaaagcgtgcgcaggcggtgatgtaagaccgatgtgaaatccccgggcttaacctgggaactgcattggtgactgcatcgctggagtatggcagaggggggtggaattccacgtgtagcagtgaaatgcgtagagatgtggaggaacaccgatggcgaaggcagccccctgggccaatactgacgctcatgcacgaaagcgtggggagcaaacaggattagataccctggtagtccacgccctaaacgatgtcaactggttgttggggattcatttccttagtaacgtagctaacgcgtgaagttgaccgcctggggagtacggtcgcaagattaaaactcaaaggaattgacggggacccgcacaagcggtggatgatgtggattaattcgatgcaacgcgaaaaaccttacctacccttgacatgtacggaaccctggtgagagccgggggtgcccgaaagggagccgtaacacaggtgctgcatggctgtcgtcagctcgtgtcgtgagatgttgggttaagtcccgcaacgagcgcaacccttgtccctagttgctacgcaagagcactccagggagactgccggtgacaaaccggaggaaggtggggatgacgtcaagtcctcatggcccttatgggtagggcttcacacgtcatacaatggtcggaacagagggtcgccaacccgcgagggggagccaatcccagaaaaccgatcgtagtccggatcgcagtctgcaactcgactgcgtgaagctggaatcgctagtaatcgcggatcagcatgccgcggtgaatacgttcccgggtcttgtacacaccgcccgtcacaccatgggagtgggttttgccagaagtggctagtctaaccgcaaggaggacggtcaccacggcaggattcatgactggggtg

SEQ ID NO: 2420 - DNA, 1457 bp, Paraburkholderia caledonica
attgaacgctggcggcatgccttacacatgcaagtcgaacggcagcacgggagcaatcctggtggcgagtggcgaacgggtgagtaatacatcggaacgtgtcctgtagtgggggatagcccggcgaaagccggattaataccgcatacgctctgcggaggaaagcgggggatccttcgggacctcgcgctacaggggcggccgatggcagattagctagttggtggggtaaaggcctaccaaggcgacgatctgtagctggtctgagaggacgaccagccacactgggactgagacacggcccagactcctacgggaggcagcagtggggaattttggacaatgggcgcaagcctgatccagcaatgccgcgtgtgtgaagaaggccttcgggttgtaaagcacttttgtccggaaagaaaacctcgtggttaatacccgtgggggatgacggtaccggaagaataagcaccggctaactacgtgccagcagccgcggtaatacgtagggtgcaagcgttaatcggaattactgggcgtaaagcgtgcgcaggcggttcgctaagacagatgtgaaatccccgggcttaacctgggaactgcatttgtgactggcgggctagagtatggcagaggggggtagaattccacgtgtagcagtgaaatgcgtagagatgtggaggaataccgatggcgaaggcagccccctgggccaatactgacgctcatgcacgaaagcgtggggagcaaacaggattagataccctggtagtccacgccctaaacgatgtcaactagttgtcgggtcttcattgacttggtaacgtagctaacgcgtgaagttgaccgcctggggagtacggtcgcaagattaaaactcaaaggaattgacggggacccgcacaagcggtggatgatgtggattaattcgatgcaacgcgaaaaaccttacctacccttgacatgtatggaaccctgctgagaggtgggggtgcccgaaagggagccataacacaggtgctgcatggctgtcgtcagctcgtgtcgtgagatgttgggttaagtcccgcaacgagcgcaacccttgtccctagttgctacgcaagagcactccagggagactgccggtgacaaaccggaggaaggtggggatgacgtcaagtcctcatggcccttatgggtagggcttcacacgtcatacaatggtcggaacagagggtcgccaacccgcgagggggagccaatcccagaaaaccgatcgtagtccggatcgcactctgcaactcgagtgcgtgaagctggaatcgctagtaatcgcggatcagcatgccgcggtgaatacgttcccgggtcttgtacacaccgcccgtcacaccatgggagtgggtttcaccagaagtaggtagcctaacctgcaaaggagggcgcttaccacggtgggattcatgactggggtg

SEQ ID NO: 2421 - DNA, 1453 bp, Paraburkholderia caribensis
attgaacgctggcggcatgccttacacatgcaagtcggacggcagcgcgggggcaaccctggcggcgagtggcgaacgggtgagtaatacatcggaacgtgtcctggagtgggggatagcccggcgaaagccggattaataccgcatacgctctgtggaggaaagcgggggatcttcggacctcgcgctcaaggggcggccgatggcagattagctagttggtggggtaaaggcctaccaaggcgacgatctgtagctggtctgagaggacgaccagccacactgggactgagacacggcccagactcctacgggaggcagcagtggggaattttggacaatgggggcaaccctgatccagcaatgccgcgtgtgtgaagaaggccttcgggttgtaaagcacttttgtccggaaagaaaaccgcttctctaatacagaggcgggatgacggtaccggaagaataagcaccggctaactacgtgccagcagccgcggtaatacgtagggtgcaagcgttaatcggaattactgggcgtaaagcgtgcgcaggcggttcgctaagaccgatgtgaaatccccgggcttaacctgggaactgcattggtgactggcgggctagagtatggcagaggggggtagaattccacgtgtagcagtgaaatgcgtagagatgtggaggaataccgatggcgaaggcagccccctgggccaatactgacgctcatgcacgaaagcgtggggagcaaacaggattagataccctggtagtccacgccctaaacgatgtcaactagttgtcgggtcttcattgacttggtaacgaagctaacgcgtgaagttgaccgcctggggagtacggtcgcaagattaaaactcaaaggaattgacggggacccgcacaagcggtggatgatgtggattaattcgatgcaacgcgaaaaaccttacctacccttgacatgtacggaaccttgctgagaggtgagggtgcccgaaagggagccgtaacacaggtgctgcatggctgtcgtcagctcgtgtcgtgagatgttgggttaagtcccgcaacgagcgcaacccttgtccctagttgctacgcaagagcactctagggagactgccggtgacaaaccggaggaaggtggggatgacgtcaagtcctcatggcccttatgggtagggcttcacacgtcatacaatggtcggaacagagggttgccaagccgcgaggtggagccaatcccagaaaaccgatcgtagtccggatcgcagtctgcaactcgactgcgtgaagctggaatcgctagtaatcgcggatcagcatgccgcggtgaatacgttcccgggtcttgtacacaccgcccgtcacaccatgggagtgggttttaccagaagtggctagtctaaccgcaaggaggacggtcaccacggtaggattcatgactggggtg

SEQ ID NO: 2422 - DNA, 1395 bp, Paraburkholderia diazotrophica
cctggcggcgagtggcgaacgggtgagtaagacatcggaacgtgtcctggagtgggggatagcccggcgaaagccggattaataccgcatacgctctgtggaggaaagcgggggatcgaaagacctcgcgctcaaggggcggccgatggcagattagctagttggtggggtaaaggcctaccaaggcgacgatctgtagctggtctgagaggacgaccagccacactgggactgagacacggcccagactcctacgggaggcagcagtggggaattttggacaatgggggcaaccctgatccagcaatgccgcgtgtgtgaagaaggccttcgggttgtaaagcacttttgtccggaaagaaaactttcgccctaatacggcgggaggatgacggtaccggaagaataagcaccggctaactacgtgccagcagccgcggtaatacgtagggtgcgagcgttaatcggaattactgggcgtaaagcgtgcgcaggcggtgctgtaagaccgatgtgaaatccccgggcttaacctgggaactgcattggtgactgcagcgctggagtatggcagaggggggtggaattccacgtgtagcagtgaaatgcgtagagatgtggaggaacaccgatggcgaaggcagccccctgggccaatactgacgctcatgcacgaaagcgtggggagcaaacaggattagataccctggtagtccacgccctaaacgatgtcaactggttgtcgggccttcattggcttggtaacgtagctaacgcgtgaagttgaccgcctggggagtacggtcgcaagattaaaactcaaaggaattgacggggacccgcacaagcggtggatgatgtggattaattcgatgcaacgcgaaaaaccttacctacccttgacatggatggaaccttgctgagaggcgagggtgcccgaaagggagccatcacacaggtgctgcatggctgtcgtcagctcgtgtcgtgagatgttgggttaagtcccgcaacgagcgcaacccttgtccctggttgctacgcaagagcactccagggagactgccggtgacaaaccggaggaaggtggggatgacgtcaagtcctcatggcccttaggggtagggcttcacacgtcatacaatggtgggaacagagggtcgagaagccgcgaggtggagccaatcccagaaaaccgatcgtagtccggatcgcagtctgcaactcgactgcgtgaagctggaatcgctagtaatcgcggatcagcatgccgcggtgaatacgttcccgggtcttgtacacaccgcccgtcacaccatgggagtgggttttaccagaagtggctagtctaaccgcaaggaggacggtcaccacggtaggattcatgactggggg

SEQ ID NO: 2423 - DNA, 1427 bp, Paraburkholderia dipogonis
tgcaagtcgaacggcagcacggacttcggtctggtggcgagtggcgaacgggtgagtaatacatcggaacgtgtcctgtagtgggggatagcccggcgaaagccggattaataccgcatacgatctgtggatgaaagcgggggatccttcgggacctcgcgctacaggggcggccgatggcagattagctagttggtggggtaaaggcctaccaaggcgacgatctgtagctggtctgagaggacgaccagccacactgggactgagacacggcccagactcctacgggaggcagcagtggggaattttggacaatgggcgcaagcctgatccagcaatgccgcgtgtgtgaagaaggccttcgggttgtaaagcacttttgtccggaaagaaaacctcttggttaatacctgagggggatgacggtaccggaagaataagcaccggctaactacgtgccagcagccgcggtaatacgtagggtgcaagcgttaatcggaattactgggcgtaaagcgtgcgcaggcggttcgctaagacagatgtgaaatccccgggcttaacctgggaactgcatttgtgactggcgggctagagtatggcagaggggggtagaattccacgtgtagcagtgaaatgcgtagagatgtggaggaataccgatggcgaaggcagccccctgggccaatactgacgctcatgcacgaaagcgtggggagcaaacaggattagataccctggtagtccacgccctaaacgatgtcaactagttgtcgggtcttcattgacttggtaacgtagctaacgcgtgaagttgaccgcctggggagtacggtcgcaagattaaaactcaaaggaattgacggggacccgcacaagcggtggatgatgtggattaattcgatgcaacgcgaaaaaccttacctacccttgacatgtatggaaccctgctgagaggtgggggtgcccgaaagggagccataacacaggtgctgcatggctgtcgtcagctcgtgtcgtgagatgttgggttaagtcccgcaacgagcgcaacccttgtccctagttgctacgcaagagcactctagggagactgccggtgacaaaccggaggaaggtggggatgacgtcaagtcctcatggcccttatgggtagggcttcacacgtcatacaatggtcggaacagagggtcgccaacccgcgagggggagccaatcccagaaaaccgatcgtagtccggatcgcactctgcaactcgagtgcgtgaagctggaatcgctagtaatcgcggatcagcatgccgcggtgaatacgttcccgggtcttgtacacaccgcccgtcacaccatgggagtgggttttaccagaagtggctagtctaaccgcaaggaggacggtcaccacggtaggattcatgactggggtg

SEQ ID NO: 2424 - DNA, 1426 bp, Paraburkholderia eburnea
atgacgctggcggcatgcttacacatgcagtcgaacggcagcacgggtgcttgcacctggtggcgagtggcgaacgggtgagtaatacatcggaacatgtccagtagtgggggatagcccggcgaaagccggattaataccgcatacgctctatggaggaaagcgggggatcgaaagacctcgcgctataggggtggccgatggcggattagctagttggtggggtaaaggcctaccaaggcgacgatccgtagctggtctgagaggacgaccagccacactgggactgagacacggcccagactcctacgggaggcagcagtggggaattttggacaatgggggcaaccctgatccagcaatgccgcgtgtgtgaagaaggccttcgggttgtaaagcactttgtccggaaagaaatccctggtcctaatatggccgggggatgacggtaccggaagaataagcaccggctaactacgtgccagcagccgcggtaatacgtagggtgcaagcgttaatcggaattactgggcgtaaagcgtgcgcaggcggtgatgcaagaccgatgtgaaatccccgggtcaacctgggaactgcattggtgactgcatcgctagagtatggcagaggggggtagaattccacgtgtagcagtgaaatgcgtagagatgtggaggaataccgatggcgaaggcagccccctgggtcaatactgacgctcatgcacgaaagcgtggggagcaaacaggattagataccctggtagtccacgccctaaacgatgtcaactggttgtcgggtcttcattgacttggtaacgtagctaacgcgtgaagttgaccgcctggggagtacggtcgcaagattaaaactcaaaggaattgacggggacccgcacaagcggtggatgatgtggattaattcgatgcaacgcgaaaaaccttacctacccttgacatggatggaagtctgctgagaggcggatgtgcccgaaagggagccatcacacaggtgctgcatggctgtcgtcagctcgtgtcgtgagatgttgggttaagtcccgcaacgagcgcaacccttgtccctagttgctacgcaagagcactccagggagactgccggtgacaaaccggaggaaggtggggatgacgtcaagtcctcatggcccttatgggtagggcttcacacgtcatacaatggtcggaacagagggttgccaagccgcgaggtggagccaatcccagaaaaccgatcgtagtccggatcgcagtctgcaactcgactgcgtgaagctggaatcgctagtaatcgcggatcagcatgccgcggtgaatacgttcccgggtcttgtacacaccgcccgtcacaccatgggagtgggttttgccagaagtggctagtctaaccgcaaggaggacggtcacca

SEQ ID NO: 2425 - DNA, 1455 bp, Paraburkholderia endofungorum
attgaacgctggcggcatgccttacacatgcaagtcggacggcagcgcgggcttcggcctggcggcgagtggcgaacgggtgagtaatacatcggaacgtgtcctagagtgggggatagcccggcgaaagccggattaataccgcatacgctctgaggaggaaagcgggggactcgcaagggcctcgcgctcaaggggcggccgatggcagattagctagttggtagggtaaaggcctaccaaggcgacgatctgtagctggtctgagaggacgaccagccacactgggactgagacacggcccagactcctacgggaggcagcagtggggaattttggacaatgggggcaaccctgatccagcaatgccgcgtgtgtgaagaaggccttcgggttgtaaagcacttttgtccggaaagaaaacggcctggcgaataactgggttggatgacggtaccggaagaataagcaccggctaactacgtgccagcagccgcggtaatacgtagggtgcgagcgttaatcggaattactgggcgtaaagcgtgcgcaggcggtttgctaagaccgatgtgaaatccccgggctcaacctgggaactgcattggtgactggcaggctagagtatggcagagggaggtagaattccacgtgtagcagtgaaatgcgtagagatgtggaggaataccgatggcgaaggcagcctcctgggccaatactgacgctcatgcacgaaagcgtggggagcaaacaggattagataccctggtagtccacgccctaaacgatgtcaactagttgttggggattcatttccttagtaacgtagctaacgcgtgaagttgaccgcctggggagtacggtcgcaagattaaaactcaaaggaattgacggggacccgcacaagcggtggatgatgtggattaattcgatgcaacgcgaaaaaccttacctacccttgacatggtcggaaccctgctgagaggtgggggtgctcgaaagagaaccggcgcacaggtgctgcatggctgtcgtcagctcgtgtcgtgagatgttgggttaagtcccgcaacgagcgcaacccttgtccctagttgctacgcaagagcactctagggagactgccggtgacaaaccgaaggaaggtggggatgacgtcaagtcctcatggcccttatgggtagggcttcacacgtcatacaatggtcggaacaaagggttgccaacccgcgagggggagctaatcccagaaaaccgatcgtagtccggattgcagtctgcaactcgactgcatgaagctggaatcgctagtaatcgcggatcagcatgtcgcggtgaatacgttcccgggtcttgtacacaccgcccgtcacaccatgggagtgggttttaccagaagtggctagtctaaccgcaaggaggacggtcaccacggtaggattcatgactggggtg

SEQ ID NO: 2426 - DNA, 1453 bp, Paraburkholderia fungorum
attgaacgctggcggcatgccttacacatgcaagtcgaacggcagcacgggggcaaccctggtggcgagtggcgaacgggtgagtaatacatcggaacgtgtcctgtagtgggggatagcccggcgaaagccggattaataccgcatacgctctacggaggaaagggggggatcttaggacctcccgctacaggggcggccgatggcagattagctagttggtggggtaaaggcctaccaaggcgacgatctgtagctggtctgagaggacgaccagccacactgggactgagacacggcccagactcctacgggaggcagcagtggggaattttggacaatgggggcaaccctgatccagcaatgccgcgtgtgtgaagaaggccttcgggttgtaaagcacttttgtccggaaagaaaacgccgtggttaatacccgtggcggatgacggtaccggaagaataagcaccggctaactacgtgccagcagccgcggtaatacgtagggtgcaagcgttaatcggaattactgggcgtaaagcgtgcgcaggcggtccgctaagacagatgtgaaatccccgggcttaacctgggaactgcatttgtgactggcgggctagagtatggcagaggggggtagaattccacgtgtagcagtgaaatgcgtagagatgtggaggaataccgatggcgaaggcagccccctgggccaatactgacgctcatgcacgaaagcgtggggagcaaacaggattagataccctggtagtccacgccctaaacgatgtcaactagttgtcgggtcttcattgacttggtaacgtagctaacgcgtgaagttgaccgcctggggagtacggtcgcaagattaaaactcaaaggaattgacggggacccgcacaagcggtggatgatgtggattaattcgatgcaacgcgaaaaaccttacctacccttgacatgtatggaatcctgctgagaggtgggagtgcccgaaagggagccataacacaggtgctgcatggctgtcgtcagctcgtgtcgtgagatgttgggttaagtcccgcaacgagcgcaacccttgtccctagttgctacgcaagagcactctagggagactgccggtgacaaaccggaggaaggtggggatgacgtcaagtcctcatggcccttatgggtagggcttcacacgtcatacaatggtcggaacagagggtcgccaacccgcgagggggagccaatcccagaaaaccgatcgtagtccggatcgcactctgcaactcgagtgcgtgaagctggaatcgctagtaatcgcggatcagcatgccgcggtgaatacgttcccgggtcttgtacacaccgcccgtcacaccatgggagtgggttttaccagaagtggctagtctaaccgcaaggaggacggtcaccacggtaggattcatgactggggtg

SEQ ID NO: 2427 - DNA, 1453 bp, Paraburkholderia ginsengiterrae
attgaacgctggcggcatgccttacacatgcaagtcgaacggcagcacgggagcaatcctggtggcgagtggcgaacgggtgagtaatacatcggaacgtgtcctggagtgggggatagcccggcgaaagccggattaataccgcatacgctctgaggaggaaagggggggatcgcaagacctctcgctcaaggggcggccgatggcagattagctagttggtggggtaaaggcctaccaaggcgacgatctgtagctggtctgagaggacgaccagccacactgggactgagacacggcccagactcctacgggaggcagcagtggggaattttggacaatgggggcaaccctgatccagcaatgccgcgtgtgtgaagaaggccttcgggttgtaaagcacttttgtccggaaagaaaacttcggggttaatacccctggaggatgacggtaccggaagaataagcaccggctaactacgtgccagcagccgcggtaatacgtagggtgcgagcgttaatcggaattactgggcgtaaagcgtgcgcaggcggtccgctaagaccgatgtgaaatccccgggcttaacctgggaactgcattggtgactggcgggctagagtatggcagaggggggtagaattccacgtgtagcagtgaaatgcgtagagatgtggaggaataccgatggcgaaggcagccccctgggccaatactgacgctcatgcacgaaagcgtggggagcaaacaggattagataccctggtagtccacgccctaaacgatgtcaactagttgtcgggtcttcattgacttggtaacgtagctaacgcgtgaagttgaccgcctggggagtacggtcgcaagattaaaactcaaaggaattgacggggacccgcacaagcggtggatgatgtggattaattcgatgcaacgcgaaaaaccttacctacccttgacatgtatggaatcctgctgagaggtgggagtgcccgaaagggagccataacacaggtgctgcatggctgtcgtcagctcgtgtcgtgagatgttgggttaagtcccgcaacgagcgcaacccttgtccctagttgctacgcaagagcactccagggagactgccggtgacaaaccggaggaaggtggggatgacgtcaagtcctcatggcccttatgggtagggcttcacacgtcatacaatggtcggaacagagggtcgccaagccgcgaggtggagccaatcccagaaaaccgatcgtagtccggatcgcactctgcaactcgagtgcgtgaagctggaatcgctagtaatcgcggatcagcatgccgcggtgaatacgttcccgggtcttgtacacaccgcccgtcacaccatgggagtgggttttaccagaagtggctagtctaaccgcaaggaggacggtcaccacggtaggattcatgactggggtg

SEQ ID NO: 2428 - DNA, 1435 bp, Paraburkholderia graminis
cttacgcatgcaattcgaacggcagcacgggagcaatcctggtggcgattggcgaacgggtgagtaatacatcggaacgtgtcctgtagtgggggatagcccggcgaaagccggattaataccgcatacgctctgcggaggaaagcgggggatccttcgggacctcgcgctacaggggcggccgatggcagattagctagttggtggggtaaaggcctaccaaggcgacgatctgtagctggtctgagaggacgaccagccacactgggactgagacacggcccagactcctacgggaggcagcagtggggaattttggacaatgggcgcaagcctgatccagcaatgccgcgtgtgtgaagaaggccttcgggttgtaaagcacttttgtccggaaagaaaactgcctggctaatatccgggcgggatgacggtaccggaagaataagcaccggctaactacgtgccagcagccgcggtaatacgtagggtgcaagcgttaatcggaattactgggcgtaaagcgtgcgcaggcggttcgctaagacagatgtgaaatccccgggcttaacctgggaactgcatttgtgactggcgggctagagtatggcagaggggggtagaattccacgtgtagcagtgaaatgcgtagagatgtggaggaataccgatggcgaaggcagccccctgggccaatactgacgctcatgcacgaaagcgtggggagcaaacaggattagataccctggtagtccacgccctaaacgatgtcaactggttgtcgggccttcattggcttggtaacgtagctaacgcgtgaagttgaccgcctggggagtacggtcgcaagattaaaactcaaaggaattgacggggacccgcacaagcggtggatgatgtggattaattcgatgcaacgcgaaaaaccttacctacccttgacatgtacggaagtccgctgagaggtggatgtgcccgaaagggagccgtaacacaggtgctgcatggctgtcgtcagctcgtgtcgtgagatgttgggttaagtcccgcaacgagcgcaacccttgtccctagttgctacgcaagagcactccagggagactgccggtgacaaaccggaggaaggtggggatgacgtcaagtcctcatggcccttatgggtagggcttcacacgtcatacaatggtcggaacagagggtcgccaagccgcgaggtggagccaatcccagaaaaccgatcgtagtccggatcgcactctgcaactcgagtgcgtgaagctggaatcgctagtaatcgcggatcagcatgccgcggtgaatacgttcccgggtcttgtacacaccgcccgtcacaccatgggagtgggttttaccagaagtggctagtctaaccgcaaggaggacggtcaccacggtaggattcatgactggggtg

SEQ ID NO: 2429 - DNA, 1453 bp, Paraburkholderia hospita
  misc_feature (426)..(426): n is a, c, g, or t
  misc_feature (428)..(429): n is a, c, g, or t
  misc_feature (442)..(442): n is a, c, g, or t
  misc_feature (1211)..(1211): n is a, c, g, or t
attgaacgctggcggcatgccttacacatgcaagtcgaacggcagcacgggggcaaccctggtggcgagtggcgaacgggtgagtaatacatcggaacgtgtcctggagtgggggatagcccggcgaaagccggattaataccgcatacgatctctggatgaaagcgggggaccgaaaggcctcgcgctcaaggggcggccgatggcagattagctagttggtggggtaaaggcctaccaaggcgacgatctgtagctggtctgagaggacgaccagccacactgggactgagacacggcccagactcctacgggaggcagcagtggggaattttggacaatgggggcaaccctgatccagcaatgccgcgtgtgtgaagaaggccttcgggttgtaaagcacttttgtccggaaagaaaaccgcntnnctaatacaggggngggatgacggtaccggaagaataagcaccggctaactacgtgccagcagccgcggtaatacgtagggtgcgagcgttaatcggaattactgggcgtaaagcgtgcgcaggcggttcgctaagaccgatgtgaaatccccgggcttaacctgggaactgcattggtgactggcgggctagagtatggcagaggggggtagaattccacgtgtagcagtgaaatgcgtagagatgtggaggaataccgatggcgaaggcagccccctgggccaatactgacgctcatgcacgaaagcgtggggagcaaacaggattagataccctggtagtccacgccctaaacgatgtcaactagttgtcgggtcttcattgacttggtaacgaagctaacgcgtgaagttgaccgcctggggagtacggtcgcaagattaaaactcaaaggaattgacggggacccgcacaagcggtggatgatgtggattaattcgatgcaacgcgaaaaaccttacctacccttgacatgtacggaaccttgccgagaggtgagggtgcccgaaagggagccgtaacacaggtgctgcatggctgtcgtcagctcgtgtcgtgagatgttgggttaagtcccgcaacgagcgcaacccttgtccctagttgctacgcaagagcactctagggagactgccggtgacaaaccggaggaaggtggggatgacgtcaagtcctcatggcccttatgggtagggcttcacacgtcatacaatggtcggaanagagggttgccaagccgcgaggtggagccaatcccagaaaaccgatcgtagtccggatcgcagtctgcaactcgactgcgtgaagctggaatcgctagtaatcgcggatcagcatgccgcggtgaatacgttcccgggtcttgtacacaccgcccgtcacaccatgggagtgggttttaccagaagtggctagtctaaccgcaaggaggacggtcaccacggtaggattcatgactggggtg

SEQ ID NO: 2430 - DNA, 1414 bp, Paraburkholderia insulsa
agtcgaacggcagcacgggggcaaccctggtggcgagtggcgaacgggtgagtaatacatcggaacgtgtcctgtagtgggggatagcccggcgaaagccggattaataccgcatacgctctacggaggaaagggggggatcttaggacctcccgctacaggggcggccgatggcagattagctagttggtggggtaaaggcctaccaaggcgacgatctgtagctggtctgagaggacgaccagccacactgggactgagacacggcccagactcctacgggaggcagcagtggggaattttggacaatgggcgaaagcctgatccagcaatgccgcgtgtgtgaagaaggccttcgggttgtaaagcacttttgtccggaaagaaaacgccgtggttaatacccgtggcggatgacggtaccggaagaataagcaccggctaactacgtgccagcagccgcggtaatacgtagggtgcaagcgttaatcggaattactgggcgtaaagcgtgcgcaggcggtccgctaagacagatgtgaaatccccgggcttaacctgggaactgcatttgtgactggcgggctagagtatggcagaggggggtagaattccacgtgtagcagtgaaatgcgtagagatgtggaggaataccgatggcgaaggcagccccctgggccaatactgacgctcatgcacgaaagcgtggggagcaaacaggattagataccctggtagtccacgccctaaacgatgtcaactagttgtcgggtcttcattgacttggtaacgtagctaacgcgtgaagttgaccgcctggggagtacggtcgcaagattaaaactcaaaggaattgacggggacccgcacaagcggtggatgatgtggattaattcgatgcaacgcgaaaaaccttacctacccttgacatgtatggaatcctgctgagaggtgggagtgcccgaaagggagccataacacaggtgctgcatggctgtcgtcagctcgtgtcgtgagatgttgggttaagtcccgcaacgagcgcaacccttgtccctagttgctacgcaagagcactctagggagactgccggtgacaaaccggaggaaggtggggatgacgtcaagtcctcatggcccttatgggtagggcttcacacgtcatacaatggtcggaacagagggtcgccaacccgcgagggggagccaatcccagaaaaccgatcgtagtccggatcgcactctgcaactcgagtgcgtgaagctggaatcgctagtaatcgcggatcagcatgccgcggtgaatacgttcccgggtcttgtacacaccgcccgtcacaccatgggagtgggttttaccagaagtggctagtctaaccgcaaggaggacggtcaccacggtaggattcatgac

SEQ ID NO: 2431 - DNA, 1453 bp, Paraburkholderia megapolitana
attgaacgctggcggcatgccttacacatgcaagtcgaacggcagcgcgggagcaatcctggcggcgagtggcgaacgggtgagtaatacatcggaacgtgtcctgtagtgggggatagcccggcgaaagccggattaataccgcatacgctctacggaggaaagggggggatcttaggacctctcgctacaggggcggccgatggcggattagctagttggtggggtaaaggcctaccaaggcgacgatccgtagctggtctgagaggacgaccagccacactgggactgagacacggcccagactcctacgggaggcagcagtggggaattttggacaatgggggcaaccctgatccagcaatgccgcgtgtgtgaagaaggccttcgggttgtaaagcacttttgtccggaaagaaatcatcctggttaatacctggggtggatgacggtaccggaagaataagcaccggctaactacgtgccagcagccgcggtaatacgtagggtgcaagcgttaatcggaattactgggcgtaaagcgtgcgcaggcggttcgctaagacagatgtgaaatccccgggcttaacctgggaactgcatttgtgactggcgggctagagtatggcagaggggggtagaattccacgtgtagcagtgaaatgcgtagagatgtggaggaataccgatggcgaaggcagccccctgggccaatactgacgctcatgcacgaaagcgtggggagcaaacaggattagataccctggtagtccacgccctaaacgatgtcaactagttgtcgggtcttcattgacttggtaacgtagctaacgcgtgaagttgaccgcctggggagtacggtcgcaagattaaaactcaaaggaattgacggggacccgcacaagcggtggatgatgtggattaattcgatgcaacgcgaaaaaccttacctacccttgacatgtacggaatcctgctgagaggtgggagtgcccgaaagggagccgtaacacaggtgctgcatggctgtcgtcagctcgtgtcgtgagatgttgggttaagtcccgcaacgagcgcaacccttgtccctagttgctacgcaagagcactccagggagactgccggtgacaaaccggaggaaggtggggatgacgtcaagtcctcatggcccttatgggtagggcttcacacgtcatacaatggtcggaacagagggtcgccaacccgcaagggggagccaatcccagaaaaccgatcgtagtccggatcgcagtctgcaactcgactgcgtgaagctggaatcgctagtaatcgcggatcagcatgccgcggtgaatacgttcccgggtcttgtacacaccgcccgtcacaccatgggagtgggttttaccagaagtggctagtctaaccgcaaggaggacggtcaccacggtaggattcatgactggggtg

SEQ ID NO: 2432 - DNA, 1453 bp, Paraburkholderia monticola
attgaacgctggcggcatgccttacacatgcaagtcgaacggcagcacgggagcaatcctggtggcgagtggcgaacgggtgagtaatacatcggaacgtgtcctggagtgggggatagcccggcgaaagccggattaataccgcatacgctctatggaggaaagcgggggatcttcggacctcgcgctcaaggggcggccgatggcagattaggtagttggtggggtaaaggcctaccaagccgacgatctgtagctggtctgagaggacgaccagccacactgggactgagacacggcccagactcctacgggaggcagcagtggggaattttggacaatgggcgcaagcctgatccagcaatgccgcgtgtgtgaagaaggccttcgggttgtaaagcacttttgtccgggaagaaatccctggtcctaatatggccgggggatgacggtactggaagaataagcaccggctaactacgtgccagcagccgcggtaatacgtagggtgcgagcgttaatcggaattactgggcgtaaagcgtgcgcaggcggtgatgtaagaccgatgtgaaatccccgggcttaacctgggaactgcattggtgactgcatcgctcgagtatggcagaggggggtagaattccacgtgtagcagtgaaatgcgtagagatgtggaggaataccgatggcgaaggcagccccctgggtcaatactgacgctcatgcacgaaagcgtggggagcaaacaggattagataccctggtagtccacgccctaaacgatgtcaactggttgtcgggccttcattggcttggtaacgtagctaacgcgtgaagttgaccgcctggggagtacggtcgcaagattaaaactcaaaggaattgacggggacccgcacaagcggtggatgatgtggattaattcgatgcaacgcgaaaaaccttacctacccttgacatgtatggaaccctgctgagaggtgggggtgcccgaaagggagccataacacaggtgctgcatggctgtcgtcagctcgtgtcgtgagatgttgggttaagtcccgcaacgagcgcaacccttgtccctagttgctacgcaagagcactccagggagactgccggtgacaaaccggaggaaggtggggatgacgtcaagtcctcatggcccttatgggtagggcttcacacgtcatacaatggtcggaacagagggttgccaagccgcgaggtggagccaatcccagaaaaccgatcgtagtccggatcgcactctgcaactcgagtgcgtgaagctggaatcgctagtaatcgcggatcagcatgccgcggtgaatacgttcccgggtcttgtacacaccgcccgtcacaccatgggagtgggttttaccagaagtggctagtctaaccgcaaggaggacggtcaccacggtaggattcatgactggggtg

SEQ ID NO: 2433 - DNA, 1421 bp, Paraburkholderia phenazinium
agtcgaacggcagcacgggggcaaccctggtggcgagtggcgaacgggtgagtaatacatcggaacgtgtcctgtagtgggggatagcccggcgaaagccggattaataccgcatacgctctacggaggaaagggggggatcttaggacctctcgctacaggggcggccgatggcagattagctagttggtggggtaaaggcctaccaaggcgacgatctgtagctggtctgagaggacgaccagccacactgggactgagacacggcccagactcctacgggaggcagcagtggggaattttggacaatgggggcaaccctgatccagcaatgccgcgtgtgtgaagaaggccttcgggttgtaaagcacttttgtccggaaagaaatcctctgggttaataccccggggggatgacggtaccggaagaataagcaccggctaactacgtgccagcagccgcggtaatacgtagggtgcaagcgttaatcggaattactgggcgtaaagcgtgcgcaggcggtccgctaagacagatgtgaaatccccgggcttaacctgggaactgcatttgtgactggcgggctagagtatggcagaggggggtagaattccacgtgtagcagtgaaatgcgtagagatgtggaggaataccgatggcgaaggcagccccctgggccaatactgacgctcatgcacgaaagcgtggggagcaaacaggattagataccctggtagtccacgccctaaacgatgtcaactagttgtcgggtcttcattgacttggtaacgtagctaacgcgtgaagttgaccgcctggggagtacggtcgcaagattaaaactcaaaggaattgacggggacccgcacaagcggtggatgatgtggattaattcgatgcaacgcgaaaaaccttacctacccttgacatggtcggaaccctgctgaaaggtgggggtgctcgaaagagaaccgatacacaggtgctgcatggctgtcgtcagctcgtgtcgtgagatgttgggttaagtcccgcaacgagcgcaacccttgtccctagttgctacgcaagagcactctagggagactgccggtgacaaaccggaggaaggtggggatgacgtcaagtcctcatggcccttatgggtagggcttcacacgtcatacaatggtcggaacagagggtcgccaacccgcgagggggagccaatcccagaaaaccgatcgtagtccggatcgcactctgcaactcgagtgcgtgaagctggaatcgctagtaatcgcggatcagcatgccgcggtgaatacgttcccgggtcttgtacacaccgcccgtcacaccatgggagtgggttttaccagaagtggctagtctaaccgcaaggaggacggtcaccacggtaggattcatgactggggtg

SEQ ID NO: 2434 - DNA, 1453 bp, Paraburkholderia phenoliruptrix
attgaacgctggcggcatgccttacacatgcaagtcggacggcagcgcgggcttcggcctggcggcgagtggcgaacgggtgagtaatacatcggaacgtgtcctgtagtgggggatagcccggcgaaagccggattaataccgcatacgctctgcggaggaaagcgggggatccttcgggacctcgcgctacaggggcggccgatggcagattagctagttggtggggtaaaggcctaccaaggcgacgatctgtagctggtctgagaggacgaccagccacactgggactgagacacggcccagactcctacgggaggcagcagtggggaattttggacaatgggggcaaccctgatccagcaatgccgcgtgtgtgaagaaggccttcgggttgtaaagcacttttgtccggaaagaaaacgtcgtggctaatacccgtggcggatgacggtaccggaagaataagcaccggctaactacgtgccagcagccgcggtaatacgtagggtgcaagcgttaatcggaattactgggcgtaaagcgtgcgcaggcggttcgctaagacagatgtgaaatccccgggcttaacctgggaactgcatttgtgactggcgggctagagtatggcagaggggggtagaattccacgtgtagcagtgaaatgcgtagagatgtggaggaataccgatggcgaaggcagccccctgggccaatactgacgctcatgcacgaaagcgtggggagcaaacaggattagataccctggtagtccacgccctaaacgatgtcaactggttgtcgggccttcattggcttggtaacgtagctaacgcgtgaagttgaccgcctggggagtacggtcgcaagattaaaactcaaaggaattgacggggacccgcacaagcggtggatgatgtggattaattcgatgcaacgcgaaaaaccttacctacccttgacatggatggaatcccgctgagaggtgggagtgcccgaaagggagccatcacacaggtgctgcatggctgtcgtcagctcgtgtcgtgagatgttgggttaagtcccgcaacgagcgcaacccttgtccctagttgctacgcaagagcactccagggagactgccggtgacaaaccggaggaaggtggggatgacgtcaagtcctcatggcccttatgggtagggcttcacacgtcatacaatggtcggaacagagggtcgccaagccgcgaggtggagccaatcccagaaaaccgatcgtagtccggatcgcactctgcaactcgagtgcgtgaagctggaatcgctagtaatcgcggatcagcatgccgcggtgaatacgttcccgggtcttgtacacaccgcccgtcacaccatgggagtgggttttaccagaagtggctagtctaaccgcaaggaggacggtcaccacggtaggattcatgactgggg

SEQ ID NO: 2435 - DNA, 1453 bp, Paraburkholderia phymatum
attgaacgctggcggcatgccttacacatgcaagtcggacggcagcgcgggcttcggcctggcggcgagtggcgaacgggtgagtaatacatcggaacgtgtcctggagtgggggatagcccggcgaaagccggattaataccgcatacgctctgaggaggaaagcgggggatcttcggacctcgcgctcaaggggcggccgatggcagattagctagttggtggggtaaaggcctaccaaggcgacgatctgtagctggtctgagaggacgaccagccacactgggactgagacacggcccagactcctacgggaggcagcagtggggaattttggacaatgggggcaaccctgatccagcaatgccgcgtgtgtgaagaaggccttcgggttgtaaagcacttttgtccggaaagaaaacttcgccgccaatagcggtggaggatgacggtaccggaagaataagcaccggctaactacgtgccagcagccgcggtaatacgtagggtgcgagcgttaatcggaattactgggcgtaaagcgtgcgcaggcggttcgctaagaccgatgtgaaatccccgggcttaacctgggaactgcattggtgactggcgggctagagtatggcagaggggggtagaattccacgtgtagcagtgaaatgcgtagagatgtggaggaataccgatggcgaaggcagccccctgggccaatactgacgctcatgcacgaaagcgtggggagcaaacaggattagataccctggtagtccacgccctaaacgatgtcaactagttgtcgggtcttcattgacttggtaacgtagctaacgcgtgaagttgaccgcctggggagtacggtcgcaagattaaaactcaaaggaattgacggggacccgcacaagcggtggatgatgtggattaattcgatgcaacgcgaaaaaccttacctacccttgacatgtacggaaccttgccgagaggtgagggtgcccgaaagggagccgtaacacaggtgctgcatggctgtcgtcagctcgtgtcgtgagatgttgggttaagtcccgcaacgagcgcaacccttgtccctagttgctacgcaagagcactctagggagactgccggtgacaaaccggaggaaggtggggatgacgtcaagtcctcatggcccttatgggtagggcttcacacgtcatacaatggtcggaacagagggttgccaagccgcgaggtggagccaatcccagaaaaccgatcgtagtccggatcgcagtctgcaactcgactgcgtgaagctggaatcgctagtaatcgcggatcagcatgccgcggtgaatacgttcccgggtcttgtacacaccgcccgtcacaccatgggagtgggttttaccagaagtggctagtctaaccgcaaggaggacggtcaccacggtaggattcatgactggggtg

SEQ ID NO: 2436 - DNA, 1455 bp, Paraburkholderia phytofirmans
attgaacgctggcggcatgccttacacatgcaagtcgaacggcagcacgggggcaaccctggtggcgagtggcgaacgggtgagtaatacatcggaacgtgtcctgtagtgggggatagcccggcgaaagccggattaataccgcatacgatctgtggatgaaagcgggggatccttcgggacctcgcgctacaggggcggccgatggcagattagctagttggtggggtaaaggcctaccaaggcgacgatctgtagctggtctgagaggacgaccagccacactgggactgagacacggcccagactcctacgggaggcagcagtggggaattttggacaatgggcgcaagcctgatccagcaatgccgcgtgtgtgaagaaggccttcgggttgtaaagcacttttgtccggaaagaaaacctctgggttaataccctggggggatgacggtaccggaagaataagcaccggctaactacgtgccagcagccgcggtaatacgtagggtgcaagcgttaatcggaattactgggcgtaaagcgtgcgcaggcggttcgctaagacagatgtgaaatccccgggcttaacctgggaactgcatttgtgactggcgggctagagtatggcagaggggggtagaattccacgtgtagcagtgaaatgcgtagagatgtggaggaataccgatggcgaaggcagccccctgggccaatactgacgctcatgcacgaaagcgtggggagcaaacaggattagataccctggtagtccacgccctaaacgatgtcaactagttgtcgggtcttcattgacttggtaacgtagctaacgcgtgaagttgaccgcctggggagtacggtcgcaagattaaaactcaaaggaattgacggggacccgcacaagcggtggatgatgtggattaattcgatgcaacgcgaaaaaccttacctacccttgacatgtatggaatcctgctgagaggtgggagtgcccgaaagggagccataacacaggtgctgcatggctgtcgtcagctcgtgtcgtgagatgttgggttaagtcccgcaacgagcgcaacccttgtccctagttgctacgcaagagcactctagggagactgccggtgacaaaccggaggaaggtggggatgacgtcaagtcctcatggcccttatgggtagggcttcacacgtcatacaatggtcggaacagagggtcgccaacccgcgagggggagccaatcccagaaaaccgatcgtagtccggatcgcactctgcaactcgagtgcgtgaagctggaatcgctagtaatcgcggatcagcatgccgcggtgaatacgttcccgggtcttgtacacaccgcccgtcacaccatgggagtgggttttaccagaagtggctagtctaaccgcaaggaggacggtcaccacggtaggattcatgactggggtg

SEQ ID NO: 2437 - DNA, 1453 bp, Paraburkholderia piptadeniae
attgaacgctggcggcatgccttacacatgcaagtcggacggcagcgcgggcttcggcctggcggcgagtggcgaacgggtgagtaagacatcggaacgtgtcctggagtgggggatagcccggcgaaagccggattaataccgcatacgctctgtggaggaaagcgggggaccgaaaggcctcgcgctcaaggggcggccgatggcagattagctggttggtggggtaaaggcctaccaaggcgacgatctgtagctggtctgagaggacgaccagccacactgggactgagacacggcccagactcctacgggaggcagcagtggggaattttggacaatgggggcaaccctgatccagcaatgccgcgtgtgtgaagaaggccttcgggttgtaaagcacttttgtccggaaagaaaacctcccggttaatacctgggggggatgacggtaccggaagaataagcaccggctaactacgtgccagcagccgcggtaatacgtagggtgcgagcgttaatcggaattactgggcgtaaagcgtgcgcaggcggtgctgtaagaccgatgtgaaatccccgggcttaacctgggaactgcattggtgactgcagcgctggagtatggcagaggggggtggaattccacgtgtagcagtgaaatgcgtagagatgtggaggaacaccgatggcgaaggcagccccctgggccaatactgacgctcatgcacgaaagcgtggggagcaaacaggattagataccctggtagtccacgccctaaacgatgtcaactggttgtcgggccttcattggcttggtaacgtagctaacgcgtgaagttgaccgcctggggagtacggtcgcaagattaaaactcaaaggaattgacggggacccgcacaagcggtggatgatgtggattaattcgatgcaacgcgaaaaaccttacctacccttgacatgtacggaagactgccgagaggtggttgtgcccgaaagggagccgtaacacaggtgctgcatggctgtcgtcagctcgtgtcgtgagatgttgggttaagtcccgcaacgagcgcaacccttgtccctggttgctacgcaagagcactccagggagactgccggtgacaaaccggaggaaggtggggatgacgtcaagtcctcatggcccttatgggtagggcttcacacgtcatacaatggtcggaacagagggtcgcgaagccgcgaggtggagccaatcccagaaaaccgatcgtagtccggatcgcagtctgcaactcgactgcgtgaagctggaatcgctagtaatcgcggatcagcatgccgcggtgaatacgttcccgggtcttgtacacaccgcccgtcacaccatgggagtgggttttaccagaagtggctagtctaaccgcaaggaggacggtcaccacggtaggattcatgactggggtg

SEQ ID NO: 2438 - DNA, 1435 bp, Paraburkholderia rhizosphaerae
tgccttacacatgcagtcgaacggcagcgcgggggcaaccctggcggcgagtggcgaacgggtgagtaagacatcggaacgtgtcctggagtgggggatagcccggcgaaagccggattaataccgcatacgatccacggatgaaagcgggggaccgaaaggcctcgcgctcaaggagcggccgatggcggattagctagttggtggggtaaaggctcaccaaggcgacgatccgtagctggtctgagaggacgaccagccacactgggactgagacacggcccagactcctacgggaggcagcagtggggaattttggacaatgggcgaaagcctgatccagcaatgccgcgtgtgtgaagaaggccttcgggttgtaaagcacttttgtccggaaagaaaactctgttcctaatatggatggaggatgacggtaccggaagaataagcaccggctaactacgtgccagcagccgcggtaatacgtagggtgcgagcgttaatcggaattactgggcgtaaagcgtgcgcaggcggtgatgtaagaccgatgtgaaatccccgggcttaacctgggaactgcattggtgactgcattgctggagtatggcagaggggggtggaattccacgtgtagcagtgaaatgcgtagagatgtggaggaacaccgatggcgaaggcagccccctgggccaatactgacgctcatgcacgaaagcgtggggagcaaacaggattagataccctggtagtccacgccctaaacgatgtcaactggttgtcgggccttcattggcttggtaacgtagctaacgcgtgaagttgaccgcctggggagtacggtcgcaagattaaaactcaaaggaattgacggggacccgcacaagcggtggatgatgtggattaattcgatgcaacgcgaaaaaccttacctacccttgacatggatggaagtctgccgagaggtggatgtgcccgaaagggagccatcacacaggtgctgcatggctgtcgtcagctcgtgtcgtgagatgttgggttaagtcccgcaacgagcgcaacccttgtccctagttgctacgcaagagcactccagggagactgccggtgacaaaccggaggaaggtggggatgacgtcaagtcctcatggcccttatgggtagggcttcacacgtcatacaatggtcggaacagagggttgccaagccgcgaggtggagccaatcccagaaaaccgatcgtagtccggatcgcagtctgcaactcgactgcgtgaagctggaatcgctagtaatcgcggatcagcatgccgcggtgaatacgttcccgggtcttgtacacaccgcccgtcacaccatgggagtgggttttaccagaagtggctagtctaaccgcaaggaggacggtcaccacggtaggattcatgacgggggtg

SEQ ID NO: 2439 - DNA, 1453 bp, Paraburkholderia rhizoxinica
attgaacgctggcggcatgccttacacatgcaagtcggacggcagcgcgggtttcggcctggcggcgagtggcgaacgggtgagtaagacatcggaacgtgtcctggagtgggggatagcccggcgaaagccggattaataccgcatacgctctgaggaggaaagcgggggaccttagggcctcgcgctcaaggggcggccgatggcagattagctagttggtagggtaaaggcctaccaaggcgacgatctgtagctggtctgagaggacgaccagccacactgggactgagacacggcccagactcctacgggaggcagcagtggggaattttggacaatgggggcaaccctgatccagcaatgccgcgtgtgtgaagaaggccttcgggttgtaaagcacttttgtccggaaagaaaacggcctggttaatacctgggctggatgacggtaccggaagaataagcaccggctaactacgtgccagcagccgcggtaatacgtagggtgcgagcgttaatcggaattactgggcgtaaagcgtgcgcaggcggtttgctaagaccgatgtgaaatccccgggcttaacctgggaactgcattggtgactggcaggctagagtatggcagagggaggtagaattccacgtgtagcagtgaaatgcgtagagatgtggaggaataccgatggcgaaggcagcctcctgggccaatactgacgctcatgcacgaaagcgtggggagcaaacaggattagataccctggtagtccacgccctaaacgatgtcaactagttgttggggattcatttccttagtaacgtagctaacgcgtgaagttgaccgcctggggagtacggtcgcaagattaaaactcaaaggaattgacggggacccgcacaagcggtggatgatgtggattaattcgatgcaacgcgaaaaaccttacctacccttgacatggtcggaaccctgctgagaggtgggggtgctcgaaagagaaccggcgcacaggtgctgcatggctgtcgtcagctcgtgtcgtgagatgttgggttaagtcccgcaacgagcgcaacccttgtccttagttgctacgcaagagcactctagggagactgccggtgacaaaccggaggaaggtggggatgacgtcaagtcctcatggcccttatgggtagggcttcacacgtcatacaatggtcggaacagagggttgccaacccgcgagggggagctaatcccaaaaaaccgatcgtagtccggattgcagtctgcaactcgactgcatgaagctggaatcgctagtaatcgcggatcagcatgtcgcggtgaatacgttcccgggtcttgtacacaccgcccgtcacaccatgggagtgggttttaccagaagtggctagtctaaccgcaaggaggacggtcaccacggtaggattcatgactggggtg

SEQ ID NO: 2440 - DNA, 1455 bp, Paraburkholderia rhynchosiae
attgaacgctggcggcatgccttacacatgcaagtcgaacggcagcacgggggcaaccctggtggcgagtggcgaacgggtgagtaatacatcggaacgtgtcctgtagtgggggatagcccggcgaaagccggattaataccgcatacgctctgcggaggaaagcgggggatccttcgggacctcgcgctacaggggcggccgatggcagattagctagttggtggggtaaaggcctaccaaggcgacgatctgtagctggtctgagaggacgaccagccacactgggactgagacacggcccagactcctacgggaggcagcagtggggaattttggacaatgggggcaaccctgatccagcaatgccgcgtgtgtgaagaaggccttcgggttgtaaagcacttttgtccggaaagaaaacttcggggctaatacctctgggggatgacggtaccggaagaataagcaccggctaactacgtgccagcagccgcggtaatacgtagggtgcaagcgttaatcggaattactgggcgtaaagcgtgcgcaggcggtccgctaagacagatgtgaaatccccgggcttaacctgggaactgcatttgtgactggcgggctagagtatggcagaggggggtagaattccacgtgtagcagtgaaatgcgtagagatgtggaggaataccgatggcgaaggcagccccctgggccaatactgacgctcatgcacgaaagcgtggggagcaaacaggattagataccctggtagtccacgccctaaacgatgtcaactagttgtcgggccttcattggcttggtaacgtagctaacgcgtgaagttgaccgcctggggagtacggtcgcaagattaaaactcaaaggaattgacggggacccgcacaagcggtggatgatgtggattaattcgatgcaacgcgaaaaaccttacctacccttgacatgtacggaacctggctgagaggccggggtgcccgaaagggagccgtaacacaggtgctgcatggctgtcgtcagctcgtgtcgtgagatgttgggttaagtcccgcaacgagcgcaacccttgtccctagttgctacgcaagagcactccagggagactgccggtgacaaaccggaggaaggtggggatgacgtcaagtcctcatggcccttatgggtagggcttcacacgtcatacaatggtcggaacagagggtcgccaacccgcgagggggagccaatcccagaaaaccgatcgtagtccggatcgcactctgcaactcgagtgcgtgaagctggaatcgctagtaatcgcggatcagcatgccgcggtgaatacgttcccgggtcttgtacacaccgcccgtcacaccatgggagtgggttttaccagaagtggctagtctaaccgcaaggaggacggtcaccacggtaggattcatgactggggtg

SEQ ID NO: 2441 - DNA, 1455 bp, Paraburkholderia ribeironis
attgaacgctggcggcatgccttacacatgcaagtcggacggcagcgcgggcttcggcctggcggcgagtggcgaacgggtgagtaatacatcggaacgtgtcctggagtgggggatagcccggcgaaagccggattaataccgcatacgctctgaggaggaaagcgggggatctttcgggacctcgcgctcaaggggcggccgatggcagattagctagttggtggggtaaaggcctaccaaggcgacgatctgtagctggtctgagaggacgaccagccacactgggactgagacacggcccagactcctacgggaggcagcagtggggaattttggacaatgggcgcaagcctgatccagcaatgccgcgtgtgtgaagaaggccttcgggttgtaaagcacttttgtccggaaagaaaacttccgccctaatacggtgggaggatgacggtaccggaagaataagcaccggctaactacgtgccagcagccgcggtaatacgtagggtgcgagcgttaatcggaattactgggcgtaaagcgtgcgcaggcggttcgttaagacagatgtgaaatccccgggcttaacctgggaactgcatttgtgactggcaaactggagtatggcagaggggggtagaattccacgtgtagcagtgaaatgcgtagagatgtggaggaataccgatggcgaaggcagccccctgggccaatactgacgctcatgcacgaaagcgtggggagcaaacaggattagataccctggtagtccacgccctaaacgatgtcaactggttgtcgggccttcattggcttggtaacgtagctaacgcgtgaagttgaccgcctggggagtacggtcgcaagattaaaactcaaaggaattgacggggacccgcacaagcggtggatgatgtggattaattcgatgcaacgcgaaaaaccttacctacccttgacatgtacggaagtctgccgagaggtggatgtgcccgaaagggagccgtaacacaggtgctgcatggctgtcgtcagctcgtgtcgtgagatgttgggttaagtcccgcaacgagcgcaacccttgtccctagttgctacgcaagagcactccagggagactgccggtgacaaaccggaggaaggtggggatgacgtcaagtcctcatggcccttatgggtagggcttcacacgtcatacaatggtcggaacagagggtcgccaacccgcgagggggagccaatcccagaaaaccgatcgtagtccggatcgcactctgcaactcgggtgcgtgaagctggaatcgctagtaatcgcggatcagcatgccgcggtgaatacgttcccgggtcttgtacacaccgcccgtcacaccatgggagtgggttttaccagaagtggctagtctaaccgcaaggaggacggtcaccacggtaggattcatgactggggtg

SEQ ID NO: 2442 - DNA, 1455 bp, Paraburkholderia sacchari
attgaacgctggcggcatgccttacacatgcaagtcgaacggcagcacgggtgcttgcacctggtggcgagtggcgaacgggtgagtaatacatcggaacatgtccagtagtgggggatagcccggcgaaagccggattaataccgcatacgatctttggatgaaagcgggggaccttcgggcctcgcgctattggggtggccgatggcggattaggtagttggtggggtaaaggcctaccaagccgacgatccgtagctggtctgagaggacgaccagccacactgggactgagacacggcccagactcctacgggaggcagcagtggggaattttggacaatgggggaaaccctgatccagcaatgccgcgtgtgtgaagaaggccttcgggttgtaaagcacttttgtccggaaagaaatcctttgggctaataccccggggggatgacggtaccggaagaataagcaccggctaactacgtgccagcagccgcggtaatacgtagggtgcaagcgttaatcggaattactgggcgtaaagcgtgcgcaggcggtgatgcaagaccgatgtgaaatccccgggcttaacctgggaactgcattggtgactgcatcgctggagtatggcagaggggggtagaattccacgtgtagcagtgaaatgcgtagagatgtggaggaataccgatggcgaaggcagccccctgggccaatactgacgctcatgcacgaaagcgtggggagcaaacaggattagataccctggtagtccacgccctaaacgatgtcaactggttgtcgggccttcattggcttggtaacgtagctaacgcgtgaagttgaccgcctggggagtacggtcgcaagattaaaactcaaaggaattgacggggacccgcacaagcggtggatgatgtggattaattcgatgcaacgcgaaaaaccttacctacccttgacatgtacggaatcctgctgagaggcgggagtgcccgaaagggagccgtaacacaggtgctgcatggctgtcgtcagctcgtgtcgtgagatgttgggttaagtcccgcaacgagcgcaacccttgtccccagttgctacgcaagagcactccggggagactgccggtgacaaaccggaggaaggtggggatgacgtcaagtcctcatggcccttatgggtagggcttcacacgtcatacaatggtcggaacagagggttgcgaagccgcgaggtggagccaatcccagaaaaccgatcgtagtccggatcgcagtctgcaactcgactgcgtgaagctggaatcgctagtaatcgcggatcagcatgccgcggtgaatacgttcccgggtcttgtacacaccgcccgtcacaccatgggagtgggttttgccagaagtggctagtctaaccgcaaggaggacggtcaccacggcaggattcatgactggggtg

SEQ ID NO: 2443 - DNA, 1453 bp, Paraburkholderia sartisoli
attgaacgctggcggcatgccttacacatgcaagtcgaacggcagcacgggggcaaccctggtggcgagtggcgaacgggtgagtaatacatcggaacgtgtcctggagtgggggatagcccggcgaaagccggattaataccgcatacgctctacggaggaaagggggggatcttaggacctctcgctcaaggggcggccgatggcagattagctagttggtggggtaaaggcctaccaaggcgacgatctgtagctggtctgagaggacgaccagccacactgggactgagacacggcccagactcctacgggaggcagcagtggggaattttggacaatgggcgcaagcctgatccagcaatgccgcgtgtgtgaagaaggccttcgggttgtaaagcacttttgtccggaaagaaaacctcagccctaatacggcggggggatgacggtaccggaagaataagcaccggctaactacgtgccagcagccgcggtaatacgtagggtgcgagcgttaatcggaattactgggcgtaaagcgtgcgcaggcggttcgttaagacagatgtgaaatccccgggcttaacctgggaactgcatttgtgactggcgggctagagtatggcagaggggggtagaattccacgtgtagcagtgaaatgcgtagagatgtggaggaataccgatggcgaaggcagccccctgggccaatactgacgctcatgcacgaaagcgtggggagcaaacaggattagataccctggtagtccacgccctaaacgatgtcaactagttgtcgggtcttcattgacttggtaacgtagctaacgcgtgaagttgaccgcctggggagtacggtcgcaagattaaaactcaaaggaattgacggggacccgcacaagcggtggatgatgtggattaattcgatgcaacgcgaaaaaccttacctacccttgacatggacggagcctggctgaaaggtcggggtgctcgaaagagaaccgtcacacaggtgctgcatggctgtcgtcagctcgtgtcgtgagatgttgggttaagtcccgcaacgagcgcaacccttgtccctagttgctacgcaagagcactctagggagactgccggtgacaaaccggaggaaggtggggatgacgtcaagtcctcatggcccttatgggtagggcttcacacgtcatacaatggtcggaacagagggccgccaacccgtgagggggagccaatcccagaaaaccgatcgtagtccggatcgcactctgcaactcgagtgcgtgaagctggaatcgctagtaatcgcggatcagcatgccgcggtgaatacgttcccgggtcttgtacacaccgcccgtcacaccatgggagtgggttttaccagaagtggctagtctaaccgcaaggaggacggtcaccacggtaggattcatgactggggtg

SEQ ID NO: 2444 - DNA, 1453 bp, Paraburkholderia sediminicola
attgaacgctggcggcatgccttacacatgcaagtcgaacggcagcacgggagcaatcctggtggcgagtggcgaacgggtgagtaatacatcggaacgtgtcctgtagtgggggatagcccggcgaaagccggattaataccgcatacgctctacggaggaaagggggggatcttaggacctcccgctacaggggcggccgatggcagattagctagttggtggggtaaaggcctaccaaggcgacgatctgtagctggtctgagaggacgaccagccacactgggactgagacacggcccagactcctacgggaggcagcagtggggaattttggacaatgggcgaaagcctgatccagcaatgccgcgtgtgtgaagaaggccttcgggttgtaaagcacttttgtccggaaagaaaacctccgccctaatatggtggggggatgacggtaccggaagaataagcaccggctaactacgtgccagcagccgcggtaatacgtagggtgcaagcgttaatcggaattactgggcgtaaagcgtgcgcaggcggtccgctaagacagatgtgaaatccccgggcttaacctgggaactgcatttgtgactggcgggctagagtatggcagaggggggtagaattccacgtgtagcagtgaaatgcgtagagatgtggaggaataccgatggcgaaggcagccccctgggccaatactgacgctcatgcacgaaagcgtggggagcaaacaggattagataccctggtagtccacgccctaaacgatgtcaactagttgttggggattcatttccttagtaacgtagctaacgcgtgaagttgaccgcctggggagtacggtcgcaagattaaaactcaaaggaattgacggggacccgcacaagcggtggatgatgtggattaattcgatgcaacgcgaaaaaccttacctacccttgacatgtatggaaccctgctgagaggtgggggtgcccgaaagggagccataacacaggtgctgcatggctgtcgtcagctcgtgtcgtgagatgttgggttaagtcccgcaacgagcgcaacccttgtccctagttgctacgcaagagcactctagggagactgccggtgacaaaccggaggaaggtggggatgacgtcaagtcctcatggcccttatgggtagggcttcacacgtcatacaatggtcggaacagagggtcgccaacccgcgagggggagccaatcccagaaaaccgatcgtagtccggatcgcactctgcaactcgagtgcgtgaagctggaatcgctagtaatcgcggatcagcatgccgcggtgaatacgttcccgggtcttgtacacaccgcccgtcacaccatgggagtgggttttaccagaagtggctagtctaaccgcaaggaggacggtcaccacggtaggattcatgactggggtg

SEQ ID NO: 2445 - DNA, 1453 bp, Paraburkholderia silvatlantica
attgaacgctggcggcatgccttacacatgcaagtcggacggcagcgcgggcttcggcctggcggcgagtggcgaacgggtgagtaatacatcggaacatgtccagtagtgggggatagcccggcgaaagccggattaataccgcatacgctctgtggaggaaagcgggggatcgaaagacctcgcgctattggggtggccgatggcggattagctagatggtggggtaaaggcctaccatggcgacgatccgtagctggtctgagaggacgaccagccacactgggactgagacacggcccagactcctacgggaggcagcagtggggaattttggacaatgggggcaaccctgatccagcaatgccgcgtgtgtgaagaaggccttcgggttgtaaagcacttttgtccggaaagaaatccttttcgataataccggaaggggatgacggtaccggaagaataagcaccggctaactacgtgccagcagccgcggtaatacgtagggtgcgagcgttaatcggaattactgggcgtaaagcgtgcgcaggcggtgatgtaagaccgatgtgaaatccccgggcttaacctgggaactgcattggtgactgcatcgctggagtatggcagaggggggtagaattccacgtgtagcagtgaaatgcgtagagatgtggaggaataccgatggcgaaggcagccccctgggccaatactgacgctcatgcacgaaagcgtggggagcaaacaggattagataccctggtagtccacgccctaaacgatgtcaactggttgtcgggccttcactggcttggtaacgtagctaacgcgtgaagttgaccgcctggggagtacggtcgcaagattaaaactcaaaggaattgacggggacccgcacaagcggtggatgatgtggattaattcgatgcaacgcgaaaaaccttacctacccttgacatggacggaagaccggtgagagctggttgtgcccgaaagggagccgtcacacaggtgctgcatggctgtcgtcagctcgtgtcgtgagatgttgggttaagtcccgcaacgagcgcaacccttgtccctagttgctacgcaagagcactccagggagactgccggtgacaaaccggaggaaggtggggatgacgtcaagtcctcatggcccttatgggtagggcttcacacgtcatacaatggtcggaacagagggtagccaagccgcgaggtggagccaatcccggaaaaccgatcgtagtccggatcgcagtctgcaactcgactgcgtgaagctggaatcgctagtaatcgcggatcagcatgccgcggtgaatacgttcccgggtcttgtacacaccgcccgtcacaccatgggagtgggttttgccagaagtggctagtctaaccgcaaggaggacggtcaccacggcaggattcatgactggggtg

SEQ ID NO: 2446 - DNA, 1455 bp, Paraburkholderia sprentiae
attgaacgctggcggcatgccttacacatgcaagtcggacggcagcacgggggcaaccctggtggcgagtggcgaacgggtgagtaatacatcggaacgtgtcctggagtgggggatagcccggcgaaagccggattaataccgcatacgctcgggagaggaaagcgggggatctttcgggacctcgcgctcaaggggcggccgatggcagattaggtagttggtggggtaaaggcctaccaagccgacgatctgtagctggtctgagaggacgaccagccacactgggactgagacacggcccagactcctacgggaggcagcagtggggaattttggacaatgggggcaaccctgatccagcaatgccgcgtgtgtgaagaaggccttcgggttgtaaagcacttttgtccggaaagaaagcatccctgttaataccgggggtggatgacggtaccggaagaataagcaccggctaactacgtgccagcagccgcggtaatacgtagggtgcgagcgttaatcggaattactgggcgtaaagcgtgcgcaggcggtgctgtaagaccgatgtgaaatccccgggcttaacctgggaactgcattggtgactgcagcgctggagtatggcagaggggggtggaattccacgtgtagcagtgaaatgcgtagagatgtggaggaacaccgatggcgaaggcagccccctgggccaatactgacgctcatgcacgaaagcgtggggagcaaacaggattagataccctggtagtccacgccctaaacgatgtcaactggttgtcgggccttcattggcttggtaacgaagctaacgcgtgaagttgaccgcctggggagtacggtcgcaagattaaaactcaaaggaattgacggggacccgcacaagcggtggatgatgtggattaattcgatgcaacgcgaaaaaccttacctacccttgacatgtatggaatcctggtgagagccgggagtgcccgaaagggagccataacacaggtgctgcatggctgtcgtcagctcgtgtcgtgagatgttgggttaagtcccgcaacgagcgcaacccttgtccctagttgctacgcaagagcactccagggagactgccggtgacaaaccggaggaaggtggggatgacgtcaagtcctcatggcccttatgggtagggcttcacacgtcatacaatggtcggaacagagggttgccaagccgcgaggtggagccaatcccagaaaaccgatcgtagtccggatcgcactctgcaactcgggtgcgtgaagctggaatcgctagtaatcgcggatcagcatgccgcggtgaatacgttcccgggtcttgtacacaccgcccgtcacaccatgggagtgggttttaccagaagtggctagtctaaccgcaaggaggacggtcaccacggtaggattcatgactggggtg

SEQ ID NO: 2447 - DNA, 1453 bp, Paraburkholderia susongensis
attgaacgctggcggcatgccttacacatgcaagtcgaacggcagcacgggagcaatcctggtggcgagtggcgaacgggtgagtaatacatcggaacgtgtcctggagtgggggatagcccggcgaaagccggattaataccgcatacgctctatggaggaaagcgggggatcttcggacctcgcgctcaaggggcggccgatggcagattaggtagttggtggggtaaaggcctaccaagccgacgatctgtagctggtctgagaggacgaccagccacactgggactgagacacggcccagactcctacgggaggcagcagtggggaattttggacaatgggggcaaccctgatccagcaatgccgcgtgtgtgaagaaggccttcgggttgtaaagcacttttgtccggaaagaaagcatccctgttaataccgggggtggatgacggtaccggaagaataagcaccggctaactacgtgccagcagccgcggtaatacgtagggtgcgagcgttaatcggaattactgggcgtaaagcgtgcgcaggcggtgatgtaagaccgatgtgaaatccccgggcttaacctgggaactgcattggtgactgcatcgctcgagtatggcagaggggggtagaattccacgtgtagcagtgaaatgcgtagagatgtggaggaataccgatggcgaaggcagccccctgggtcaatactgacgctcatgcacgaaagcgtggggagcaaacaggattagataccctggtagtccacgccctaaacgatgtcaactggttgtcgggccttcattggcttggtaacgtagctaacgcgtgaagttgaccgcctggggagtacggtcgcaagattaaaactcaaaggaattgacggggacccgcacaagcggtggatgatgtggattaattcgatgcaacgcgaaaaaccttacctacccttgacatggatggaagcctgctgagaggtgggcgtgcccgaaagggagccatcacacaggtgctgcatggctgtcgtcagctcgtgtcgtgagatgttgggttaagtcccgcaacgagcgcaacccttgtccctagttgctacgcaagagcactccagggagactgccggtgacaaaccggaggaaggtggggatgacgtcaagtcctcatggcccttatgggtagggcttcacacgtcatacaatggtcggaacagagggttgccaagccgcgaggtggagccaatcccagaaaaccgatcgtagtccggatcgcactctgcaactcgggtgcgtgaagctggaatcgctagtaatcgcggatcagcatgccgcggtgaatacgttcccgggtcttgtacacaccgcccgtcacaccatgggagtgggttttaccagaagtggctagtctaaccgcaaggaggacggtcaccacggtaggattcatgactggggtg

SEQ ID NO: 2448 - DNA, 1453 bp, Paraburkholderia terrae
attgaacgctggcggcatgccttacacatgcaagtcgaacggcagcgcgggggcaaccctggcggcgagtggcgaacgggtgagtaatacatcggaacgtgtcctggagtgggggatagcccggcgaaagccggattaataccgcatacgatcctgggatgaaagcgggggaccgaaaggcctcgcgctcaaggggcggccgatggcagattagctagttggtggggtaaaggcctaccaaggcgacgatctgtagctggtctgagaggacgaccagccacactgggactgagacacggcccagactcctacgggaggcagcagtggggaattttggacaatgggggcaaccctgatccagcaatgccgcgtgtgtgaagaaggccttcgggttgtaaagcacttttgtccggaaagaaaacctccgtcctaatacggtggggggatgacggtaccggaagaataagcaccggctaactacgtgccagcagccgcggtaatacgtagggtgcaagcgttaatcggaattactgggcgtaaagcgtgcgcaggcggttcgctaagaccgatgtgaaatccccgggcttaacctgggaactgcattggtgactggcgggctagagtatggcagaggggggtagaattccacgtgtagcagtgaaatgcgtagagatgtggaggaataccgatggcgaaggcagccccctgggccaatactgacgctcatgcacgaaagcgtggggagcaaacaggattagataccctggtagtccacgccctaaacgatgtcaactagttgtcgggtcttcattgacttggtaacgaagctaacgcgtgaagttgaccgcctggggagtacggtcgcaagattaaaactcaaaggaattgacggggacccgcacaagcggtggatgatgtggattaattcgatgcaacgcgaaaaaccttacctacccttgacatgtacggaaccttgctgagaggtgagggtgcccgaaagggagccgtaacacaggtgctgcatggctgtcgtcagctcgtgtcgtgagatgttgggttaagtcccgcaacgagcgcaacccttgtccctagttgctacgcaagagcactctagggagactgccggtgacaaaccggaggaaggtggggatgacgtcaagtcctcatggcccttatgggtagggcttcacacgtcatacaatggtcggaacagagggttgccaagccgcgaggtggagccaatcccagaaaaccgatcgtagtccggatcgcagtctgcaactcgactgcgtgaagctggaatcgctagtaatcgcggatcagcatgccgcggtgaatacgttcccgggtcttgtacacaccgcccgtcacaccatgggagtgggttttaccagaagtggctagtctaaccgcaaggaggacggtcaccacggtaggattcatgactggggtg

SEQ ID NO: 2449 - DNA, 1450 bp, Paraburkholderia terricola
acgctggcggcatgccttacacatgcaagtcgaacggcagcacgggggcaaccctggtggcgagtggcgaacgggtgagtaatacatcggaacgtgtcctgtagtgggggatagcccggcgaaagccggattaataccgcatacgctctgcggaggaaagcgggggctccttcgggacctcgcgctacaggggcggccgatggcagattagctagttggtggggtaaaggcctaccaaggcgacgatctgtagctggtctgagaggacgaccagccacactgggactgagacacggcccagactcctacgggaggcagcagtggggaattttggacaatgggcgcaagcctgatccagcaatgccgcgtgtgtgaagaaggccttcgggttgtaaagcacttttgtccggaaagaaaacctcagccctaatacggcggggggatgacggtaccggaagaataagcaccggctaactacgtgccagcagccgcggtaatacgtagggtgcaagcgttaatcggaattactgggcgtaaagcgtgcgcaggcggtccgctaagacagatgtgaaatccccgggcttaacctgggaactgcatttgtgactggcgggctagagtatggcagaggggggtagaattccacgtgtagcagtgaaatgcgtagagatgtggaggaataccgatggcgaaggcagccccctgggccaatactgacgctcatgcacgaaagcgtggggagcaaacaggattagataccctggtagtccacgccctaaacgatgtcaactagttgtcgggccttcattggcttggtaacgtagctaacgcgtgaagttgaccgcctggggagtacggtcgcaagattaaaactcaaaggaattgacggggacccgcacaagcggtggatgatgtggattaattcgatgcaacgcgaaaaaccttacctacccttgacatgtacggaatcctgctgagaggcgggagtgcccgaaagggagccgtaacacaggtgctgcatggctgtcgtcagctcgtgtcgtgagatgttgggttaagtcccgcaacgagcgcaacccttgtccctagttgctacgcaagagcactccagggagactgccggtgacaaaccggaggaaggtggggatgacgtcaagtcctcatggcccttatgggtagggcttcacacgtcatacaatggtcggaacagagggtcgccaagccgcgaggtggagccaatcccagaaaaccgatcgtagtccggatcgcactctgcaactcgagtgcgtgaagctggaatcgctagtaatcgcggatcagcatgccgcggtgaatacgttcccgggtcttgtacacaccgcccgtcacaccatgggagtgggttttaccagaagtggctagtctaaccgcaaggaggacggtcaccacggtaggattcatgactggggtg

SEQ ID NO: 2450 - DNA, 1455 bp, Paraburkholderia tropica
attgaacgctggcggcatgccttacacatgcaagtcgaacggcagcacgggtgcttgcacctggtggcgagtggcgaacgggtgagtaatacatcggaacgtgtcctgtagtgggggatagcccggcgaaagccggattaataccgcatacgatctacggatgaaagcgggggatcttcggacctcgcgctataggggcggccgatggcggattagctagttggtgaggtaaaggctcaccaaggcgacgatccgtagctggtctgagaggacgaccagccacactgggactgagacacggcccagactcctacgggaggcagcagtggggaattttggacaatgggcgaaagcctgatccagcaatgccgcgtgtgtgaagaaggccttcgggttgtaaagcacttttgtccggaaagaaatccctggtcctaatatggccgggggatgacggtaccggaagaataagcaccggctaactacgtgccagcagccgcggtaatacgtagggtgcaagcgttaatcggaattactgggcgtaaagcgtgcgcaggcggtgatgtaagaccgatgtgaaatccccgggctcaacctgggaactgcattggtgactgcatcgcttgagtatggcagaggggggtagaattccacgtgtagcagtgaaatgcgtagagatgtggaggaataccgatggcgaaggcagccccctgggtcaatactgacgctcatgcacgaaagcgtggggagcaaacaggattagataccctggtagtccacgccctaaacgatgtcaactggttgtcgggtcttcattgacttggtaacgtagctaacgcgtgaagttgaccgcctggggagtacggtcgcaagattaaaactcaaaggaattgacggggacccgcacaagcggtggatgatgtggattaattcgatgcaacgcgaaaaaccttacctacccttgacatgtacggaattccgctgagaggtggaagtgcccgaaagggagccgtaacacaggtgctgcatggctgtcgtcagctcgtgtcgtgagatgttgggttaagtcccgcaacgagcgcaacccttgtccctagttgctacgcaagagcactccagggagactgccggtgacaaaccggaggaaggtggggatgacgtcaagtcctcatggcccttatgggtagggcttcacacgtcatacaatggtcggaacagagggttgccaagccgcgaggtggagccaatcccagaaaaccgatcgtagtccggatcgcagtctgcaactcgactgcgtgaagctggaatcgctagtaatcgcggatcagcatgccgcggtgaatacgttcccgggtcttgtacacaccgcccgtcacaccatgggagtgggttttgccagaagtggctagtctaaccgcaaggaggacggtcaccacggcaggattcatgactggggtg

SEQ ID NO: 2451 - DNA, 1452 bp, Paraburkholderia tuberum
gaacgctggcggcatgccttacacatgcaagtcgaacggcagcacggacttcggtctggtggcgagtggcgaacgggtgagtaatacatcggaacgtgtcctggagtgggggatagcccggcgaaagccggattaataccgcatacgctcgggagaggaaagcgggggatctttcgggacctcgcgctcaaggggcggccgatggcagattaggtagttggtggggtaaaggcctaccaagccgacgatctgtagctggtctgagaggacgaccagccacactgggactgagacacggcccagactcctacgggaggcagcagtggggaattttggacaatgggcgcaagcctgatccagcaatgccgcgtgtgtgaagaaggccttcgggttgtaaagcacttttgtccggaaagaaaacctcgtggctaatatccgtgagggatgacggtaccggaagaataagcaccggctaactacgtgccagcagccgcggtaatacgtagggtgcgagcgttaatcggaattactgggcgtaaagcgtgcgcaggcggtgctgtaagaccgatgtgaaatccccgggcttaacctgggaactgcattggtgactgcagcgctggagtatggcagaggggggtggaattccacgtgtagcagtgaaatgcgtagagatgtggaggaacaccgatggcgaaggcagccccctgggccaatactgacgctcatgcacgaaagcgtggggagcaaacaggattagataccctggtagtccacgccctaaacgatgtcaactggttgtcgggccttcattggcttggtaacgtagctaacgcgtgaagttgaccgcctggggagtacggtcgcaagattaaaactcaaaggaattgacggggacccgcacaagcggtggatgatgtggattaattcgatgcaacgcgaaaaaccttacctacccttgacatgtatggaatcctgccgagaggcgggagtgcccgaaagggagccgtaacacaggtgctgcatggctgtcgtcagctcgtgtcgtgagatgttgggttaagtcccgcaacgagcgcaacccttgtccctagttgctacgcaagagcactccagggagactgccggtgacaaaccggaggaaggtggggatgacgtcaagtcctcatggcccttatgggtagggcttcacacgtcatacaatggtcggaacagagggttgccaagccgcgaggtggagccaatcccagaaaaccgatcgtagtccggatcgcactctgcaactcgggtgcgtgaagctggaatcgctagtaatcgcggatcagcatgccgcggtgaatacgttcccgggtcttgtacacaccgcccgtcacaccatgggagtgggttttaccagaagtggctagtctaaccgcaaggaggacggtcaccacggtaggattcatgactggggtg

SEQ ID NO: 2452 - DNA, 1455 bp, Paraburkholderia unamae
attgaacgctggcggcatgccttacacatgcaagtcgaacggcagcacgggtgcttgcacctggtggcgagtggcgaacgggtgagtaatacatcggaacatgtccagtagtgggggatagcccggcgaaagccggattaataccgcatacgatctacggatgaaagcgggggaccttcgggcctcgcgctattggggtggccgatggcggattagctagttggtggggtaaaggctcaccaaggcgacgatccgtagctggtctgagaggacgaccagccacactgggactgagacacggcccagactcctacgggaggcagcagtggggaattttggacaatgggcgaaagcctgatccagcaatgccgcgtgtgtgaagaaggccttcgggttgtaaagcacttttgtccggaaagaaatcctttgggctaataccctagggggatgacggtaccggaagaataagcaccggctaactacgtgccagcagccgcggtaatacgtagggtgcaagcgttaatcggaattactgggcgtaaagcgtgcgcaggcggtgatgcaagaccgatgtgaaatccccgggctcaacctgggaactgcattggtgactgcatcgctagagtatggcagaggggggtagaattccacgtgtagcagtgaaatgcgtagagatgtggaggaataccgatggcgaaggcagccccctgggtcaatactgacgctcatgcacgaaagcgtggggagcaaacaggattagataccctggtagtccacgccctaaacgatgtcaactggttgtcgggtcttcattgacttggtaacgtagctaacgcgtgaagttgaccgcctggggagtacggtcgcaagattaaaactcaaaggaattgacggggacccgcacaagcggtggatgatgtggattaattcgatgcaacgcgaaaaaccttacctacccttgacatgtatggaatcctgctgagaggtgggagtgcccgaaagggagccataacacaggtgctgcatggctgtcgtcagctcgtgtcgtgagatgttgggttaagtcccgcaacgagcgcaacccttgtccctagttgctacgcaagagcactccagggagactgccggtgacaaaccggaggaaggtggggatgacgtcaagtcctcatggcccttatgggtagggcttcacacgtcatacaatggtcggaacagagggttgccaagccgcgaggtggagccaatcccagaaaaccgatcgtagtccggatcgcagtctgcaactcgactgcgtgaagctggaatcgctagtaatcgcggatcagcatgccgcggtgaatacgttcccgggtcttgtacacaccgcccgtcacaccatgggagtgggttttgccagaagtggctagtctaaccgcaaggaggacggtcaccacggcaggattcatgactggggtg

SEQ ID NO: 2453 - DNA, 1453 bp, Paraburkholderia xenovorans
attgaacgctggcggcatgccttacacatgcaagtcgaacggcagcacgggggcaaccctggtggcgagtggcgaacgggtgagtaatacatcggaacgtgtcctgtagtgggggatagcccggcgaaagccggattaataccgcatacgctctgcggaggaaagcgggggatcttcggacctcgcgctacaggggcggccgatggcagattagctggttggtggggtaaaggcctaccaaggcgacgatctgtagctggtctgagaggacgaccagccacactgggactgagacacggcccagactcctacgggaggcagcagtggggaattttggacaatgggcgcaagcctgatccagcaatgccgcgtgtgtgaagaaggccttcgggttgtaaagcacttttgtccggaaagaaaacctctgccctaatacggtggggggatgacggtaccggaagaataagcaccggctaactacgtgccagcagccgcggtaatacgtagggtgcaagcgttaatcggaattactgggcgtaaagcgtgcgcaggcggttcgctaagacagatgtgaaatccccgggcttaacctgggaactgcatttgtgactggcgggctagagtatggcagaggggggtagaattccacgtgtagcagtgaaatgcgtagagatgtggaggaataccgatggcgaaggcagccccctgggccaatactgacgctcatgcacgaaagcgtggggagcaaacaggattagataccctggtagtccacgccctaaacgatgtcaactagttgtcgggtcttcattgacttggtaacgtagctaacgcgtgaagttgaccgcctggggagtacggtcgcaagattaaaactcaaaggaattgacggggacccgcacaagcggtggatgatgtggattaattcgatgcaacgcgaaaaaccttacctacccttgacatgtatggaagtctgctgagaggtggatgtgcccgaaagggagccataacacaggtgctgcatggctgtcgtcagctcgtgtcgtgagatgttgggttaagtcccgcaacgagcgcaacccttgtccctagttgctacgcaagagcactccagggagactgccggtgacaaaccggaggaaggtggggatgacgtcaagtcctcatggcccttatgggtagggcttcacacgtcatacaatggtcggaacagagggtcgccaacccgcgagggggagccaatcccagaaaaccgatcgtagtccggatcgcactctgcaactcgggtgcgtgaagctggaatcgctagtaatcgcggatcagcatgccgcggtgaatacgttcccgggtcttgtacacaccgcccgtcacaccatgggagtgggttttaccagaagtggctagtctaaccgcaaggaggacggtcaccacggtaggattcatgactggggtg

SEQ ID NO: 2454 - DNA, 1464 bp, Parachlamydia acanthamoebae
attgaatgctgacggcgtggatgaggcatgcaagtcgaacgaaacgggcaaccgtttagtggcggaagggttagtaatacatggataacttgcctttaactttgggataacgattggaaacgatcgctaataccaaatgtggtggggtaattaatttacctttatcaaagtgggggatcgcaagacctcgcggttaaagagaggtccatgggatatcagctagttggtgtggtaatggcgcaccaaggctaagacgtctaggcggattgagagattgaccgccaacactgggactgagaactgcccagactcctacgggaggctgcagtcgagaatcattcgcaatgggcgaaagcctgacgatgcgacgccgtgtgagcgatgaaggccttagggtcgtaaagctctttcgcctgggagcaagagaagccgactaatattcggctaatttgagagtaccaggtaaagaagcaccggctaactccgtgccagcagctgcggtaatacggagggtgcaagcattaatcggatttattgggcgtaaagggcgcgtaggcgggaacataagtcagatgtgaaatcctggagctcaactccagaacagcatttgaaactatatttcttgagggtaggcggagaaaacggaattccacatgtagcggtgaaatgcgtagatatgtggaagaacatcggtggcgaaggcggttttctagcttattcctgacgctgaggcgcgaaagcaaggggagcaaacaggattagataccctggtagtccttgccgtaaacgatgtatacttggtgtaattggactcaaccccaattgtgccggagctaacgcgttaagtataccgcctggggagtacgctcgcaagggtgaaactcaaaagaattgacggggacccgcacaagcagtggagcatgtggtttaattcgatgcaacgcgaagaaccttacccagacttgacatgcagaagacagctttagagatagagtgttccttagggacttctgcacaggtgctgcatggctgtcgtcagctcgtgccgtgaggtgttgggttaagtcccgcaacgagcgcaacccttatcattagttgccaacacgtaatggtgggaactctaatgagactgcctgggttaaccaggaggaaggtgaggatgacgtcaagtccgcatggcccttatgtctggggctacacacgtgctacaatggtcggtacagaaggcagcgaagccgtgaggtgaagcaaatcccaaaaagccgatcccagttcagattgtagtctgcaactcgactacatgaagatggaattgctagtaatggcgagtcagcaacatcgccgtgaatacgttcccgggtcttgtacacaccgcccgtcacatcatgggagttggttttacccgaagccgctgacttaaccgcaaggagagaagcgtcgaaggtgaggctgatgactgggatg

SEQ ID NO: 2455 - DNA, 1300 bp, Paracoccus aestuarii
cgggtgagtaacgcgtgggaacgtgcccttctctacggaatagccccgggaaactgggagtaataccgtatacgccctttgggggaaagatttatcggagaaggatcggcccgcgttggattaggtagttggtggggtaatggcccaccaagccgacgatccatagctggtttgagaggatgatcagccacactgggactgagacacggcccagactcctacgggaggcagcagtggggaatcttagacaatgggggcaaccctgatctagccatgccgcgtgagtgatgaaggccttagggttgtaaagctctttcagctgggaagataatgacggtaccagcagaagaagccccggctaactccgtgccagcagccgcggtaatacggagggggctagcgttgttcggaattactgggcgtaaagcgcacgtaggcggactggaaagttgggggtgaaatcccggggctcaacctcggaactgccttcaaaactatcagtctggagttcgagagaggtgagtggaattccgagtgtagaggtgaaattcgtagatattcggaggaacaccagtggcgaaggcggctcactggctcgatactgacgctgaggtgcgaaagcgtggggagcaaacaggattagataccctggtagtccacgccgtaaacgatgaatgccagacgtcgggcagcatgctgttcggtgtcacacctaacggattaagcattccgcctggggagtacggtcgcaagattaaaactcaaaggaattgacgggggcccgcacaagcggtggagcatgtggtttaattcgaagcaacgcgcagaaccttaccaacccttgacattacaggaccggtccggagacggatctttcacttcggtgacctgtggacaggtgctgcatggctgtcgtcagctcgtgtcgtgagatgttcggttaagtccggcaacgagcgcaacccacgtccctagttgccagcattcagttgggcactctatggaaactgccgatgataagtcggaggaaggtgtggatgacgtcaagtcctcatggcccttacgggttgggctacacacgtgctacaatggtggtgacagtgggttaatccccaaaagccatctcagttcggattgtcctctgcaactcgagggcatgaagttggaatcgctagtaatcgcggaacagcatgccgcggtgaatacgttcccgggccttgtacacaccgcccgtcacaccatgggagttggttctacccgacgacgctgcgctaaccttcgggaggcaggcgccacgtag

SEQ ID NO: 2456 - DNA, 1385 bp, Paracoccus alcaliphilus
aacgaacgctggcggcaggcctaacacatgcaagtcgagcgaacccttcggggttagcggcggacgggtgagtaacgcgtgggaatatgcccttctctacggaatagtctcgggaaactgggggtaataccgtatacgccctttgggggaaagatttatcggagaaggattagcccgcgttggattaggtagttggtggggtaatggcctaccaagcctacgatccatagctggtttgagaggatgatcagccacactgggactgagacacggcccagactcctacgggaggcagcagtggggaatcttagacaatgggggcaaccctgatctagccatgccgcgtgagtgatgaaggccctagggttgtaaagctctttcagctgggaagataatgacggtaccagcagaagaagccccggctaactccgtgccagcagccgcggtaatacggagggggctagcgttgttcggaattactgggcgtaaagcgcacgtaggcggaccagcaagttaggggtgaaatcccggggctcaaccccggaactgcccttaaaactgttgatcttgagttcgagagaggtgagtggaattccgagtgtagaggtgaaattcgtagatattcggaggaacaccagtggcgaaggcggctcactggctcgatactgacgctgaggtgcgaaagcgtggggagcaaacaggattagataccctggtagtccacgccgtaaacgatgaatgccagtcgtcgggtagcatgctattcggtgacacacctaacggattaagcattccgcctggggagtacggtcgcaagattaaaactcaaaggaattgacgggggcccgcacaagcggtggagcatgtggtttaattcgaagcaacgcgcagaaccttaccaacccttgacatcgcaggaccgccggagagattcggttttctcgtaagagacctgtggacaggtgctgcatggctgtcgtcagctcgtgtcgtgagatgttcggttaagtccggcaacgagcgcaacccacgtccctagttgccagcattcagttgggcactctatggaaactgccgatgataagtcggaggaaggtgtggatgacgtcaagtcctcatggcccttacgggttgggctacacacgtgctacaatggtggtgacagtgggttaatccccaaaagccatctcagttcggattgtcctctgcaactcgagggcatgaagttggaatcgctagtaatcgcggaacagcatgccgcggtgaatacgttcccgggccttgtacacaccgcccgtcacaccatgggagttggttctacccgacggccgtgcgctaaccagcaatgggggcagcggaccacggtaggatcagcgactggggtg

SEQ ID NO: 2457 - DNA, 1333 bp, Paracoccus bengalensis
gtcgagcgcaccttcgggtgagcggcggacgggtgagtaacgcgtgggaatatgccctttggtacggaatagtcctgggaaactgggggtaataccgtatgcgcccttcgggggaaagatttatcgccaaaggattagcccgcgttggattaggtagttggtggggtaatggcctaccaagccgacgatccatagctggtttgagaggatgatcagccacactgggactgagacacggcccagactcctacgggaggcagcagtggggaatcttagacaatgggggcaaccctgatctagccatgccgcgtgagtgatgaaggccctagggttgtaaagctctttcagctgggaagataatgacggtaccagcagaagaagccccggctaactccgtgccagcagccgcggtaatacggagggggctagcgttgttcggaattactgggcgtaaagcgcacgtaggcggaccggaaagttgggggtgaaatcccggggctcaaccccggaactgccttcaaaactatcggtctggagttcgagagaggtgagtggaattccgagtgtagaggtgaaattcgtagatattcggaggaacaccagtggcgaaggcggctcactggctcgatactgacgctgaggtgcgaaagcgtggggagcaaacaggattagataccctggtagtccacgccgtaaacgatgaatgccagtcgtcgggcagcatgctgttcggtgacacacctaacggattaagcattccgctgggagtacggtcgcaagattaaactcaaaggaattgacgggggccgcacaagcggtggagcatgtggtttaattcgaagcaacgcgcagaaccttaccaacccttgacatcccaggaccggcccggagacgggtctttcacttcggtgacctgagacaggtgctgcatggctgtcgtcagctcgtgtcgtgagatgttcggttaagtccggcaacgagcgcaacccacacttccagttgccatcatttggttgggcactctggaagaactgccgatgataagtcggaggaaggtgtggatgacgtcaagtcctcatggcccttacgggttgggctacacacgtgctacaatggtggtgacagtgggttaatccccaaaagccatctcagttcggattggggtctgcaactcgaccccatgaagttggaatcgctagtaatcgcggaacagcatgccgcggtgaatacgttcccgggccttgtacacaccgcccgtcacaccatgggagttgggtctacccgacggccgtgcgctaaccagcaatgggggcagcggaccacggtaggctca

SEQ ID NO: 2458 - DNA, 1385 bp, Paracoccus denitrificans
aacgaacgctggcggcaggcctaacacatgcaagtcgagcgaacccttcggggttagcggcggacgggtgagtaacgcgtgggaatatgccctttgctacggaatagccccgggaaactgggagtaataccgtatacgccctttgggggaaagatttatcggcaaaggattagcccgcgttggattaggtagttggtggggtaatggcctaccaagccgacgatccatagctggtttgagaggatgatcagccacactgggactgagacacggcccagactcctacgggaggcagcagtggggaatcttagacaatgggggcaaccctgatctagccatgccgcgtgagtgatgaaggccctagggttgtaaagctctttcagctgggaagataatgacggtaccagcagaagaagccccggctaactccgtgccagcagccgcggtaatacggagggggctagcgttgttcggaattactgggcgtaaagcgcacgtaggcggaccggaaagttgggggtgaaatcccggggctcaacctcggaactgccttcaaaactatcggtctggagttcgagagaggtgagtggaattccgagtgtagaggtgaaattcgtagatattcggaggaacaccagtggcgaaggcggctcactggctcgatactgacgctgaggtgcgaaagcgtggggagcaaacaggattagataccctggtagtccacgccgtaaacgatgaatgccagtcgtcgggcagcatgctgttcggtgacacacctaacggattaagcattccgcctggggagtacggtcgcaagattaaaactcaaaggaattgacgggggcccgcacaagcggtggagcatgtggtttaattcgaagcaacgcgcagaaccttaccaacccttgacatcgcaggaccgctccagagatggagttttctcgtaagagacctgtggacaggtgctgcatggctgtcgtcagctcgtgtcgtgagatgttcggttaagtccggcaacgagcgcaacccacactcttagttgccagcatttggttgggcactctaagagaactgccgatgataagtcggaggaaggtgtggatgaagtcaagtcctcatggcccttacgggttgggctacacacgtgctacaatggtggtgacagtgggttaatccccaaaagccatctcagttcggattggggtctgcaactcgaccccatgaagttggaatcgctagtaatcgcggaacagcatgccgcggtgaatacgttcccgggccttgtacacaccgcccgtcacaccatgggagttgggtctacccgacggccgtgcgctaaccagcaatggaggcagcggaccacggtaggctcagcgactggggtg

SEQ ID NO: 2459 - DNA, 1383 bp, Paracoccus haeundaensis
aacgaacgctggcggcaggcttaacacatgcaagtcgagcgagaccttcgggtctagcggcggacgggtgagtaacgcgtgggaacgtgcccttctctacggaatagccccgggaaactgggagtaataccgtatacgccctttgggggaaagatttatcggagaaggatcggcccgcgttggattaggtagttggtggggtaatggcccaccaagccgacgatccatagctggtttgagaggatgatcagccacactgggactgagacacggcccagactcctacgggaggcagcagtggggaatcttagacaatgggggcaaccctgatctagccatgccgcgtgagtgatgaaggccttagggttgtaaagctctttcagctgggaagataatgacggtaccagcagaagaagccccggctaactccgtgccagcagccgcggtaatacggagggggctagcgttgttcggaattactgggcgtaaagcgcacgtgggcggactggaaagtcagaggtgaaatcccagggctcaaccttggaactgcctttgaaactatcagtctggagttcgagagaggtgagtggaattccgagtgtagaggtgaaattcgtagatattcggaggaacaccagtggcgaaggcggctcactggctcgatactgacgctgaggtgcgaaagcgtggggagcaaacaggattagataccctggtagtccacgccgtaaacgatgaatgccagacgtcggcaagcatgcttgtcggtgtcacacctaacggattaagcattccgcctggggagtacggtcgcaagattaaaactcaaaggaattgacgggggcccgcacaagcggtggagcatgtggtttaattcgaagcaacgcgcagaaccttaccaacccttgacatggcaggaccgctggagagattcagctttctcgtaagagacctgcacacaggtgctgcatggctgtcgtcagctcgtgtcgtgagatgttcggttaagtccggcaacgagcgcaacccacgtccctagttgccagcattcagttgggcactctatggaaactgccgatgataagtcggaggaaggtgtggatgacgtcaagttctcatggcccttacgggttgggctacacacgtgctacaatggtggtgacagtgggttaatccccaaaagccatctcagttcggattgtcctctgcaactcgagggcatgaagttggaatcgctagtaatcgcggaacagcatgccgcggtgaatacgttcccgggccttgtacacaccgcccgtcacaccatgggagttggttctacccgacgacgctgcgctaaccttcggggggcaggcggccacggtaggatcagcgactggggtg

SEQ ID NO: 2460 - DNA, 1368 bp, Paracoccus hibiscisoli
aacgaacgctggcggcaggcttaacacatgcaagtcgagcgagaccttcgggtctagcggcggacgggtgagtaacgcgtgggaacgtgcccttctctacggaatagccccgggaaactgggagtaataccgtatacgccctttgggggaaagatttatcggagaaggatcggcccgcgttggattaggtagttggtgaggtaacggctcaccaagccgacgatccatagctggtttgagaggatgatcagccacactgggactgagacacggcccagactcctacgggaggcagcagtggggaatcttagacaatgggggcaaccctgatctagccatgccgcgtgagtgatgaaggccttagggttgtaaagctctttcagctgggaagataatgacggtaccagcagaagaagccccggctaactccgtgccagcagccgcggtaatacggagggggctagcgttgttcggaattactgggcgtaaagcgcacgtaggcggactggaaagtcagaggtgaaatcccagggctcaaccttggaactgcctttgaaactatcagtctggagttcgagagaggtgagtggaattccgagtgtagaggtgaaattcgtagatattcggaggaacaccagtggcgaaggcggctcactggctcgatactgacgctgaggtgcgaaagcgtggggagcaaacaggattagataccctggtagtccacgccgtaaacgatgaatgccagacgtcggcaagcatgcttgtcggtgtcacacctaacggattaagcattccgcctggggagtacggtcgcaagattaaaactcaaaggaattgacgggggcccgcacaagcggtggagcatgtggtttaattcgaagcaacgcgcagaaccttaccaacccttgacatggcaggaccgctggagagattcagttttctcgtaagagacctgcacacaggtgctgcatggctgtcgtcagctcgtgtcgtgagatgttcggttaagtccggcaacgagcgcaacccacgtccctagttgccagcattcagttgggcactctatggaaactgccggtgataagccggaggaaggtgtggatgacgtcaagtcctcatggcccttacgggttgggctacacacgtgctacaatggtggtgacagtgggttaatccccaaaagccatctcagttcggattgtcctctgcaactcgagggcatgaagttggaatcgctagtaatcgcggaacagcatgccgcggtgaatacgttcccgggccttgtacacaccgcccgtcacaccatgggagttggttctacccgacgacgctgcgctaaccttcgggaggcaggcggccacggtagga

SEQ ID NO: 2461 - DNA, 1383 bp, Paracoccus homiensis
aacgaacgctggcggcaggcttaacacatgcaagtcgagcgagatcttcggatctagcggcggacgggtgagtaacgcgtgggaacgtgccctttgctacggaatagtcccgggaaactgggtttaataccgtatgtgcccttcgggggaaagatttatcggcaaaggatcggcccgcgttggattaggtagttggtggggtaatggcctaccaagccgacgatccatagctggtttgagaggatgatcagccacactgggactgagacacggcccagactcctacgggaggcagcagtggggaatcttagacaatgggggcaaccctgatctagccatgccgcgtgagtgatgaaggccttagggttgtaaagctctttcagctgggaagataatgacggtaccagcagaagaagccccggctaactccgtgccagcagccgcggtaatacggagggggctagcgttgttcggaattactgggcgtaaagcgcacgtaggcggactggaaagttgggggtgaaatcccggggctcaacctcggaactgcctccaaaactatcagtctggagttcgagagaggtgagtggaataccgagtgtagaggtgaaattcgtagatattcggtggaacaccagtggcgaaggcggctcactggctcgatactgacgctgaggtgcgaaagcgtggggagcaaacaggattagataccctggtagtccacgccgtaaacgatgaatgccagtcgtcgggttgcatgcaattcggtgacacacctaacggattaagcattccgcctggggagtacggtcgcaagattaaaactcaaaggaattgacgggggcccgcacaagcggtggagcatgtggtttaattcgaagcaacgcgcagaaccttaccaacccttgacatcccaggaccgatccggagatggatctttcacttcggtgacctggagacaggtgctgcatggctgtcgtcagctcgtgtcgtgagatgttcggttaagtccggcaacgagcgcaacccacgtccctagttgccagcattcagttgggcactctatggaaactgccgatgataagtcggaggaaggtgtggatgacgtcaagtcctcatggcccttacgggttgggctacacacgtgctacaatggtggtgacagtgggttaatccccaaaagccatctcagttcggattgtcctctgcaactcgagggcatgaagttggaatcgctagtaatcgcggaacagcatgccgcggtgaatacgttcccgggccttgtacacaccgcccgtcacaccatgggagttggttctacccgacggccgtgcgctaaccttttggaggcagcggaccacggtaggatcagcgactggggtg

SEQ ID NO: 2462 - DNA, 1371 bp, Paracoccus laeviglucosivorans
aacgaacgctggcggcaggcctaacacatgcaagtcgagcgagaccttcgggtctagcggcggacgggtgagtaacgcgtgggaatatgcccttctctacggaatagcctcgggaaactgggagtaataccgtatacgccctttgggggaaagatttatcggagaaggattagcccgcgttggattaggtagttggtggggtaatggcctaccaagccgacgatccatagctggtttgagaggatgatcagccacactgggactgagacacggcccagactcctacgggaggcagcagtggggaatcttagacaatgggggcaaccctgatctagccatgccgcgtgagtgatgaaggccttagggttgtaaagctctttcagctgggaagataatgacggtaccagcagaagaagccccggctaactccgtgccagcagccgcggtaatacggagggggctagcgttgttcggaattactgggcgtaaagcgcacgtaggcggaccggaaagtcagaggtgaaatcccagggctcaaccttggaactgcctttgaaactatcggtctggagttcgagagaggtgagtggaattccgagtgtagaggtgaaattcgtagatattcggaggaacaccagtggcgaaggcggctcactggctcgatactgacgctgaggtgcgaaagcgtggggagcaaacaggattagataccctggtagtccacgccgtaaacgatgaatgccagtcgtcgggtagcatgctattcggtgacacacctaacggattaagcattccgcctggggagtacggtcgcaagattaaaactcaaaggaattgacgggggcccgcacaagcggtggagcatgtggtttaattcgaagcaacgcgcagaaccttaccaacccttgacattacaggaccggcgcagagatgtgtctttcacttcggtgacctgtggacaggtgctgcatggctgtcgtcagctcgtgtcgtgagatgttcggttaagtccggcaacgagcgcaacccacactcttagttgccagcattcagttgggcactctaagagaactgccgatgataagtcggaggaaggtgtggatgacgtcaagtcctcatggcccttacgggttgggctacacacgtgctacaatggtggtgacagtgggttaatccccaaaagccatctcagttcggattggggtctgcaactcgaccccatgaagttggaatcgctagtaatcgcggaacagcatgccgcggtgaatacgttcccgggccttgtacacaccgcccgtcacaccatgggagttggttctacccgacggccgtgcgctaaccttttggaggcagcggaccacggtaggatca

SEQ ID NO: 2463 - DNA, 1385 bp, Paracoccus pantotrophus
aacgaacgctggcggcaggcctaacacatgcaagtcgagcgcacccttcggggtgagcggcggacgggtgagtaacgcgtgggaatatgccctttggtacggaatagtcctgggaaactgggggtaataccgtatgcgcccttcgggggaaagatttatcgccaaaggattagcccgcgttggattaggtagttggtggggtaatggcctaccaagccgacgatccatagctggtttgagaggatgatcagccacactgggactgagacacggcccagactcctacgggaggcagcagtggggaatcttagacaatgggggcaaccctgatctagccatgccgcgtgagtgatgaaggccctagggttgtaaagctctttcagctgggaagataatgacggtaccagcagaagaagccccggctaactccgtgccagcagccgcggtaatacggagggggctagcgttgttcggaattactgggcgtaaagcgcacgtaggcggaccggaaagttgggggtgaaatcccggggctcaaccccggaactgccttcaaaactatcggtctggagttcgagagaggtgagtggaattccgagtgtagaggtgaaattcgtagatattcggaggaacaccagtggcgaaggcggctcactggctcgatactgacgctgaggtgcgaaagcgtggggagcaaacaggattagataccctggtagtccacgccgtaaacgatgaatgccagtcgtcgggcagcatgctgttcggtgacacacctaacggattaagcattccgcctggggagtacggtcgcaagattaaaactcaaaggaattgacgggggcccgcacaagcggtggagcatgtggtttaattcgaagcaacgcgcagaaccttaccaacccttgacatcccaggaccggcccggagacgggtctttcacttcggtgacctggagacaggtgctgcatggctgtcgtcagctcgtgtcgtgagatgttcggttaagtccggcaacgagcgcaacccacactcttagttgccagcatttggttgggcactctaagagaactgccgatgataagtcggaggaaggtgtggatgacgtcaagtcctcatggcccttacgggttgggctacacacgtgctacaatggtggtgacagtgggttaatccccaaaagccatctcagttcggattggggtctgcaactcgaccccatgaagttggaatcgctagtaatcgcggaacagcatgccgcggtgaatacgttcccgggccttgtacacaccgcccgtcacaccatgggagttgggtctacccgacggccgtgcgctaaccagcaatgggggcagcggaccacggtaggctcagcgactggggtg

SEQ ID NO: 2464 - DNA, 1382 bp, Paracoccus saliphilus
aacgaacgctggcggcaggcttaacacatgcaagtcgagcgaagacttcggtcttagcggcggacgggtgagtaacgcgtgggaacgtgcccttcactacggaatagcccagggaaacttggattaataccgtatacgcccttcgggggaaagaatttcggtgaaggatcggcccgcgttggattaggtagttggtggggtaatggcctaccaagccgacgatccatagctggtttgagaggatgatcagccacactgggactgagacacggcccagactcctacgggaggcagcagtggggaatcttagacaatgggggcaaccctgatctagccatgccgcgtgagtgatgaaggccttagggttgtaaagctctttcagctgggaagataatgacggtaccagcagaagaagccccggctaactccgtgccagcagccgcggtaatacggagggggctagcgttgttcggaattactgggcgtaaagcgcacgtaggcggacaggaaagttgggggtgaaatcccggggctcaaccccggaactgcctccaaaactatctgtctggagttcgagagaggtgagtggaattccgagtgtagaggtgaaattcgtagatattcggaggaacaccagtggcgaaggcggctcactggctcgatactgacgctgaggtgcgaaagcgtggggagcaaacaggattagataccctggtagtccacgccgtaaacgatgaatgccagtcgtcgggtagcatgctattcggtgacacacctaacggattaagcattccgcctggggagtacggtcgcaagattaaaactcaaaggaattgacgggggcccgcacaagcggtggagcatgtggtttaattcgaagcaacgcgcagaaccttaccaacccttgacatccctggaccgatccggagacggatttttctcgtaagagaccaggagacaggtgctgcatggctgtcgtcagctcgtgtcgtgagatgttcggttaagtccggcaacgagcgcaacccacgtccctagttgccagcattcagttgggcactctatggaaactgccgatgataagtcggaggaaggtgtggatgacgtcaagtcctcatggcccttacgggttgggctacacacgtgctacaatggtggtgacagtgggttaatcccaaaaaaccatctcagttcggattgtcctctgcaactcgagggcatgaagttggaatcgctagtaatcgcggaacagcatgccgcggtgaatacgttcccgggccttgtacacaccgcccgtcacaccatgggagttggttctacccgacggccgtgcgctaaccttttggaggcagcggaccacggtaggatcagcgactggggtg

SEQ ID NO: 2465 - DNA, 1385 bp, Paracoccus seriniphilus
aacgaacgctggcggcaggcctaacacatgcaagtcgagcgagatcttcggatctagcggcggacgggtgagtaacgcgtgggaatatgcccttctctacggaatagtcccgggaaactgggtttaataccgtatacgcccttcgggggaaagatttatcggagaaggattagcccgcgttggattaggtagttggtggggtaatggcctaccaagcctacgatccatagctggtttgagaggatgatcagccacactgggactgagacacggcccagactcctacgggaggcagcagtggggaatcttagacaatgggggaaaccctgatctagccatgccgcgtgagtgatgaaggccttagggttgtaaagctctttcagctgggaagataatgacggtaccagcagaagaagccccggctaactccgtgccagcagccgcggtaatacggagggggctagcgttgttcggaattactgggcgtaaagcgcacgtaggcggactggaaagttgggggtgaaatcccggggctcaacctcggaactgcctccaaaactatcagtctggagttcgagagaggtgagtggaataccgagtgtagaggtgaaattcgtagatattcggtggaacaccagtggcgaaggcggctcactggctcgatactgacgctgaggtgcgaaagcgtggggagcaaacaggattagataccctggtagtccacgccgtaaacgatgaatgccagtcgtcgggcagcttgctgttcggtgacacacctaacggattaagcattccgcctggggagtacggtcgcaagattaaaactcaaaggaattgacgggggcccgcacaagcggtggagcatgtggtttaattcgaagcaacgcgcagaaccttaccaacccttgacatggcaggaccgctggagagattcagctttctcgtaagagacctgcacacaggtgctgcatggctgtcgtcagctcgtgtcgtgagatgttcggttaagtccggcaacgagcgcaacccacgtccctagttgccagcattcagttgggcactctatggaaactgccgatgataagtcggaggaaggtgtggatgacgtcaagtcctcatggcccttacgggttgggctacacacgtgctacaatggtggtgacagtgggttaatccccaaaagccatctcagttcggattgtcctctgcaactcgagggcatgaagttggaatcgctagtaatcgcggaacagcatgccgcggtgaatacgttcccgggccttgtacacaccgcccgtcacaccatgggagttggttctacccgacgacgctgcgctaacccttcggggaggcaggcggccacggtaggatcagcgactggggtg

SEQ ID NO: 2466 - DNA, 1383 bp, Paracoccus siganidrum
aacgaacgctggcggcaggcctaacacatgcaagtcgagcgaacccttcggggttagcggcggacgggtgagtaacgcgtgggaatgtgcccttctctacggaatagtcctgggaaactgggggtaataccgtatacgccctttgggggaaagatttatcggagaaggatcagcccgcgttggattaggtagttggtggggtaatggcctaccaagcctacgatccatagctggtttgagaggatgatcagccacactgggactgagacacggcccagactcctacgggaggcagcagtggggaatcttagacaatgggggcaaccctgatctagccatgccgcgtgagtgatgaaggccttagggttgtaaagctctttcagctgggaagataatgacggtaccagcagaagaagccccggctaactccgtgccagcagccgcggtaatacggagggggctagcgttgttcggaattactgggcgtaaagcgcacgtaggcggactggaaagttgggggtgaaatcccggggctcaaccccggaactgccttcaaaactatcagtcttgagttcgagagaggtgagtggaattccgagtgtagaggtgaaattcgtagatattcggaggaacaccagtggcgaaggcggctcactggctcgatactgacgctgaggtgcgaaagcgtggggagcaaacaggattagataccctggtagtccacgccgtaaacgatgaatgccagtcgtcgggcagcatgctgttcggtgacacacctaacggattaagcattccgcctggggagtacggtcgcaagattaaaactcaaaggaattgacgggggcccgcacaagcggtggagcatgtggtttaattcgaagcaacgcgcagaaccttaccaacccttgacatcgcaggaccgccggagagatccggttttctcgtaagagacctgtggacaggtgctgcatggctgtcgtcagctcgtgtcgtgagatgttcggttaagtccggcaacgagcgcaacccacgtccccagttgccagcattcagttgggcactctgtggaaactgccggtgataagccggaggaaggtgtggatgacgtcaagtcctcatggcccttacgggttgggctacacacgtgctacaatggtggtgacagtgggttaatccccaaaagccatctcagttcggattgtcctctgcaactcgagggcatgaagttggaatcgctagtaatcgcggaacagcatgccgcggtgaatacgttcccgggccttgtacacaccgcccgtcacaccatgggagttggttctacccgacggccgtgcgctaaccttttggaggcagcggaccacggtaggatcagcgactggggtg

SEQ ID NO: 2467 - DNA, 1383 bp, Paracoccus versutus
aacgaacgctggcggcaggcctaacacatgcaagtcgagcgcgccttcgggtgagcggcggacgggtgagtaacgcgtgggaatatgccctttggtacggaatagtcctgggaaactgggggtaataccgtatgcgcccttcgggggaaagatttatcgccaaaggattagcccgcgttggattaggtagttggtggggtaatggcctaccaagccgacgatccatagctggtttgagaggatgatcagccacactgggactgagacacggcccagactcctacgggaggcagcagtggggaatcttagacaatgggggcaaccctgatctagccatgccgcgtgagtgatgaaggccctagggttgtaaagctctttcagctgggaagataatgacggtaccagcagaagaagccccggctaactccgtgccagcagccgcggtaatacggagggggctagcgttgttcggaattactgggcgtaaagcgcacgtaggcggaccggaaagttgggggtgaaatcccggggctcaaccccggaactgccttcaaaactatcggtctggagttcgagagaggtgagtggaattccgagtgtagaggtgaaattcgtagatattcggaggaacaccagtggcgaaggcggctcactggctcgatactgacgctgaggtgcgaaagcgtggggagcaaacaggattagataccctggtagtccacgccgtaaacgatgaatgccagtcgtcgggcagcatgctgttcggtgacacacctaacggattaagcattccgcctggggagtacggtcgcaagattaaaactcaaaggaattgacgggggcccgcacaagcggtggagcatgtggtttaattcgaagcaacgcgcagaaccttaccaacccttgacatcccaggaccggcccggagacgggtctttcacttcggtgacctggagacaggtgctgcatggctgtcgtcagctcgtgtcgtgagatgttcggttaagtccggcaacgagcgcaacccacacttccagttgccatcatttggttgggcactctggaagaactgccgatgataagtcggaggaaggtgtggatgacgtcaagtcctcatggcccttacgggttgggctacacacgtgctacaatggtggtgacagtgggttaatccccaaaagccatctcagttcggattggggtctgcaactcgaccccatgaagttggaatcgctagtaatcgcggaacagcatgccgcggtgaatacgttcccgggccttgtacacaccgcccgtcacaccatgggagttgggtctacccgacggccgtgcgctaaccagcaatgggggcagcggaccacggtaggctcagcgactggggtg

SEQ ID NO: 2468 - DNA, 1516 bp, Parageobacillus caldoxylosilyticus
  misc_feature (1510)..(1510): n is a, c, g, or t
  misc_feature (1512)..(1512): n is a, c, g, or t
agatcctggctcaggacgaacgtgggcggggtgcctaatacatgcaagtcgagcggaccgaacaggagcttgctcttgttcggttagcggcggacgggtgagtaacacgtgggtaacctacccgtaagaccgggataactccgggaaaccggagctaataccggataacaccaaagaccgcatggtctttggttgaaaggcggcttcggctgtcacttacggatgggcccgcggcgcattagctagttggtgaggtaacggctcaccaaggcgacgatgcgtagccggcctgagagggtgaccggccacactgggactgaaacacggcccagactcctacgggaggcagcagtagggaatcttccgcaatggacgaaagtctgacggagcgacgccgcgtgagcgaagaaggtcttcggatcgtaaagctctgttgttagggaagaagaagtaccgttcgaatagggcggtacggtgacggtacctaacgagaaagccccggctaactacgtgccagcagccgcggtaatacgtagggggcgagcgttgtccggaattattgggcgtaaagcgcgcgcaggcggtcccttaagtctgatgtgaaagcccacggctcaaccgtggagggtcattggaaactgggggacttgagtgcagaagaggagagcggaattccacgtgtagcggtgaaatgcgtagagatgtggaggaacaccagtggcgaaggcggctctctggtctgtaactgacgctgaggcgcgaaagcgtggggagcaaacaggattagataccctggtagtccacgccgtaaacgatgagtgctaagtgttagaggggtcaaaccctttagtgctgtagctaacgcgttaagcactccgcctggggagtacggccgcaaggctgaaactcaaaggaattgacgggggcccgcacaagcggtggagcatgtggtttaattcgaagcaacgcgaagaaccttaccaggtcttgacatcccctgacaaccctggagacagggcgttcccccttcggggggacagggtgacaggtggtgcatggttgtcgtcagctcgtgtcgtgagatgttgggttaattcccgcaacgagcgcaaccctcgcccttagttgccagcattcagttgggcactctagggggactgccggtgacaaaccggaggaaggtggggatgacgtcaaatcatcatgccccttatgacctgggctacacacgtgctacaatgggcggtacaaagggctgcgaacccgcgagggggagccaatcccaaaaagccgctctcagttcggattgcaggctgcaactcgcctgcatgaagccggaatcgctagtaatcgcggatcagcatgccgcggtgaatacgttcccgggccttgtacacaccgcccgtcacaccacgagagcttgcaacacccgaagtcggtgaggtaacccgcaagggagccagccggcgaaggtggggcaagtgattggggtgaagtcgtaacaaggtancngtac

SEQ ID NO: 2469 - DNA, 1550 bp, Parageobacillus thermantarcticus
agagtttgatcctggctcaggacgaacgctggcggcgtgcctaatacatgcaagtcgagcggaccaaacaggagcttgctcttgtttggttagcggcggacgggtgagtaacacgtgggtaacctgcccgtaagaccgggataactccgggaaaccggagctaataccggataacaccgaagaccgcatggtctttggttgaaaggcggcttcggctgccacttacggatgggcccgcggcgcattagctagttggtgaggtaacggctcaccaaggcgacgatgcgtagccggcctgagagggtgaccggccacactgggactgagacacggcccagactcctacgggaggcagcagtagagaatcttccgcaatggacgaaagtctgacggagcgacgccgcgtgagcgaagaaggtcttcggatcgtaaagctctgttgttagggaagaagaagcgccgttcgaacagggcggcgcggtgacggtacctaacgagaaagccccggctaactacgtgccagcagccgcggtaatacgtagggggcgagcgttgtccggaattattgggcgtaaagcgcgcgcaggcggtcccttaagtctgatgtgaaagcccacggcttaaccgtggagggtcattggaaactgggggacttgagtgcagaagaggagagcggaattccacgtgtagcggtgaaatgcgtagagatgtggaggaacaccagtggcgaaggcggctctctggtctgtaactgacgctgaggcgcgaaagcgtggggagcaaacaggattagataccctggtagtccacgccgtaaacgatgagtgctaagtgttagaggggttttccctttagtgctgtagctaacgcgttaagcactccgcctggggagtacggccgcaaggctgaaactcaaaggaattgacgggggcccgcacaagcggtggagcatgtggtttaattcgaagcaacgcgaagaaccttaccaggtcttgacatcccctgacaaccctggagacagggcgttcccccttcgggggacagggtgacaggtggtgcatggttgtcgtcagctcgtgtcgtgagatgttgggttaagtcccgcaacgagcgcaaccctcgcccctagttgccagcattcagttgggcactctagggggactgccggctaaaagtcggaggaaggtggggatgacgtcaaatcatcatgccccttatgacctgggctacacacgtgctacaatgggcggtacaaagggctgcgaacccgcgagggggagcgaatcccaaaaagccgctctcagttcggattgcaggctgcaactcgcctgcatgaagccggaatcgctagtaatcgcggatcagcatgccgcggtgaatacgttcccgggccttgtacacaccgcccgtcacaccacgagagcttgcaacacccgaagtcggtgaggtaacccttctgggagccagccgccgaaggtggggcaagtgattggggtgaagtcgtaacaaggtagccgtaccggaaggtgcggctggatcacctcctttct

SEQ ID NO: 2470 - DNA, 1559 bp, Parageobacillus thermoglucosidasius
tctttggagagtttgatcctggctcaggacgaacgctggcggcgtgcctaatacatgcaagtcgagcggaccgggcgggagcttgcttccgcttggttagcggcggacgggtgagtaacacgtgggtaacctgcccgtaagaccgggataactccgggaaaccggggctaataccggataacaccgaagaccgcatggtcttcggttgaaaggcggcttcggctgccacttacggatgggcccgcggcgcattagctagttggtgaggtaacggctcaccaaggcgacgatgcgtagccggcctgagagggtgaccggccacactgggactgagacacggcccagactcctacgggaggcagcagtagggaatcttccgcaatggacgaaagtctgacggagcgacgccgcgtgagcgaagaaggtcttcggatcgtaaagctctgttgttagggaagaagaagtgccgttcgaacagggcggcacggtgacggtacctaacgagaaagccccggctaactacgtgccagcagccgcggtaatacgtagggggcgagcgttgtccggaattattgggcgtaaagcgcgcgcaggcggtcccttaagtctgatgtgaaagcccacggcttaaccgtggagggtcattggaaactgggggacttgagtgcagaagaggagagcggaattccacgtgtagcggtgaaatgcgtagagatgtggaggaacaccagtggcgaaggcggctctctggtctgtaactgacgctgaggcgcgaaagcgtggggagcaaacaggattagataccctggtagtccacgccgtaaacgatgagtgctaagtgttagaggggttattccctttagtgctgtagctaacgcgttaagcactccgcctggggagtacggccgcaaggctgaaactcaaaggaattgacgggggcccgcacaagcggtggagcatgtggtttaattcgaagcaacgcgaagaaccttaccaggtcttgacatcccctgacaaccctggagacagggcgttcctcccttgcgggaggacagggtgacaggtggtgcatggttgtcgtcagctcgtgtcgtgagatgttgggttaagtcccgcaacgagcgcaaccctcgcccctagttgccagcattcagttgggcactctagggggactgccggctaaaagtcggaggaaggtggggatgacgtcaaatcatcatgccccttatgacctgggctacacacgtgctacaatgggcggtacaaagggctgcgaacccgcgagggggagcgaatcccaaaaagccgctctcagttcggattgcaggctgcaactcgcctgcatgaagccggaatcgctagtaatcgcggatcagcatgccgcggtgaatacgttcccgggccttgtacacaccgcccgtcacaccacgagagcttgcaacacccgaagtcggtgaggtaacccgcaagggagccagccgccgaaggtggggcaagtgattggggtgaagtcgtaacaaggtagccgtaccggaaggtgcggctggatcacctccttt

SEQ ID NO: 2471 - DNA, 1504 bp, Parageobacillus toebii
  misc_feature (359)..(359): n is a, c, g, or t
  misc_feature (366)..(366): n is a, c, g, or t
gacgaacgctggcggcgtgcctaatacatgcaagtcgagcggaccgaacggaagcttgcttctgttcggttagcggcggacgggtgagtaacacgtgggtaacctgcccgtaagaccgggataactccgggaaaccggggctaataccggataacaccgaagaccgcatggtctttggttgaaaggtggcttttgctaccacttacggatgggcccgcggcgcattagctagttggtgaggtaacggctcaccaaggcgacgatgcgtagccggcctgagagggtgaccggccacactgggactgagacacggcccagactcctacgggaggcagcagtagggaatcttccgcaatggncgaaagnctgacggagcgacgccgcgtgagcgaagaaggtcttcggatcgtaaagctctgttgttagggaagaagaagtaccgttcgaatagggcggtacggtgacggtacctaacgagaaagccccggctaactacgtgccagcagccgcggtaatacgtagggggcgagcgttgtccggaattattgggcgtaaagcgcgcgcaggcggtcccttaagtctgatgtgaaagcccacggctcaaccgtggaggttcattggaaactgggggacttgagtgcagaagaggagagcggaattccacgtgtagcggtgaaatgcgtagagatgtggaggaacaccagtggcgaaggcggctctctggtctgtaactgacgctgaggcgcgaaagcgtggggagcaaacaggattagataccctggtagtccacgccgtaaacgatgagtgctaagtgttagaggggttttccctttagtgctgtagctaacgcgttaagcactccgcctggggagtacggccgcaaggctgaaactcaaaggaattgacgggggcccgcacaagcggtggagcatgtggtttaattcgaagcaacgcgaagaaccttaccaggtcttgacatcccctgacaaccctggagacagggcgttcccccttcggggggacagggtgacaggtggtgcatggttgtcgtcagctcgtgtcgtgagatgttgggttaagtcccgcaacgagcgcaaccctcgcccctagttgccagcattcagttgggcactctagggggactgccggctaaaagtcggaggaaggtggggatgacgtcaaatcatcatgccccttatgacctgggctacacacgtgctacaatgggcggtacaaagggctgcgaacccgcgagggggagcgaatcccaaaaagccgctctcagttcggattgcaggctgcaactcgcctgcatgaagccggaatcgctagtaatcgcggatcagcatgccgcggtgaatacgttcccgggccttgtacacaccgcccgtcacaccacgagagcttgcaacacccgaagtcggtgaggtaacccgtaagggagccagccgccgaaggtggggcaagtgattggggtgaagtcgtaacaaggtagccgtaccgg

SEQ ID NO: 2472 - DNA, 1455 bp, Paraglaciecola agarilytica
attgaacgctggcggcaggcctaacacatgcaagtcgaacggtaacatttctagcttgctagaagatgacgagtggcggacgggtgagtaatacttaggaatatgcctttgtgtgggggataaccattggaaacgatggctaataccgcataacgtcttcggaccaaagggggccttggctcccgcgcaaagagtagcctaagcgagattagcttgttggtgaggtaaaggctcaccaaggcgacgatctctagctgttctgagaggaagatcagccacactggaactgagacacggtccagactcctacgggaggcagcagtggggaatattgcacaatgggggaaaccctgatgcagccatgccgcgtgtgtgaagaaggccttcgggttgtaaagcactttcagttgtgaggaaaggttaacggttaatacccgttagctgtgacgttagcaacagaagaaggaccggctaactccgtgccagcagccgcggtaatacggagggtccgagcgttaatcggaattactgggcgtaaagcgcacgcaggcggtttgttaagctagatgtgaaagccctgggctcaacctgggaattgcatttagaactggcaggctagagttttggagaggggagtggaattccaggtgtagcggtgaaatgcgtagatatctggaggaacatcagtggcgaaggcgactccctggtcagtaactgacgctcatgtgcgaaagtgtgggtagcgaacaggattagataccctggtagtccacaccgtaaacgctgtctactagctgtttgtggatttaatccgtgagtagcgaagctaacgcgataagtagaccgcctggggagtacggccgcaaggttaaaactcaaatgaattgacgggggcccgcacaagcggtggagcatgtggtttaattcgatgcaacgcgaagaaccttacctactcttgacatactgagaacttagcagagatgctttggtgccttcgggaactcagatacaggtgctgcatggctgtcgtcagctcgtgtcgtgagatgttgggttaagtcccgcaacgagcgcaacccctgtccttagttgccagccttaagttgggcactctaaggagactgccggtgacaaaccggaggaaggtggggacgacgtcaagtcatcatggcccttacgagtagggctacacacgtgctacaatggcgagtacagagggaagcaaacttgcgagagtaagcggatcccttaaagctcgtcgtagtccggattggagtctgcaactcgactccatgaagtcggaatcgctagtaatcgcaaatcagaatgttgcggtgaatacgttcccgggccttgtacacaccgcccgtcacaccatgggagtgggttgcaaaagaagtagctagtttaaccttcgggaggacggttaccactttgtgattcatgactggggtg

SEQ ID NO: 2473 - DNA, 1455 bp, Paraglaciecola arctica
attgaacgctggcggcaggcctaacacatgcaagtcgaacggaaacatgtctagcttgctagatgatgtcgagtggcggacgggtgagtaatacttaggaacatgcctttgggtgggggataactattggaaacgatagctaataccgcataacgtctacggaccaaagggggcttcggctcccgcccagagagtggcctaagcgagattagcttgttggtgaggtaaaggctcaccaaggcgacgatctctagctgttctgagaggaagatcagccacactggaactgagacacggtccagactcctacgggaggcagcagtggggaatattgcacaatgggggaaaccctgatgcagccatgccgcgtgtgtgaagaaggccttcgggttgtaaagcactttcagttgtgaggaaagtttgatggttaatacccattagatgtgacgttagcaacagaagaaggaccggctaactccgtgccagcagccgcggtaatacggagggtccgagcgttaatcggaattactgggcgtaaagcgcacgcaggcggttaattaagtcagatgtgaaagcccagggctcaaccttggaattgcatttgaaactggttgactagagtcttggagaggggagtggaatttctggtgtagcggtgaaatgcgtagatatcagaaggaacatcagtggcgaaggcgactccctggccaaagactgacgctcatgtgcgaaagtgtgggtagcgaacaggattagataccctggtagtccacaccgtaaacgctgtctactagctgtttgtggatttaatccgtgagtagcgaagctaacgcgataagtagaccgcctggggagtacggccgcaaggttaaaactcaaatgaattgacgggggcccgcacaagcggtggagcatgtggtttaattcgatgcaacgcgaagaaccttacctactcttgacatactagaaacttttcagagatgaattggtgccttcgggaatctagatacaggtgctgcatggctgtcgtcagctcgtgtcgtgagatgttgggttaagtcccgcaacgagcgcaacccttgtccttagttgccagccttaagttgggcactctaaggagactgccggtgacaaaccggaggaaggtggggacgacgtcaagtcatcatggcccttacgagtagggctacacacgtgctacaatggcgagtacagagggaagcgaacctgcgagggtaagcggatcccttaaagctcgtcgtagtccggattggagtctgcaactcgactccatgaagtcggaatcgctagtaatcgcaaatcagaatgttgcggtgaatacgttcccgggccttgtacacaccgcccgtcacaccatgggagtgggttgcaaaagaagtagctagtctaaccttcgggaggacggttaccactttgtgattcatgactggggtg

SEQ ID NO: 2474 - DNA, 1457 bp, Paraglaciecola hydrolytica
attgaacgctggcggcaggcctaacacatgcaagtcgaacggtagcacagaagagcttgctctttgggtgacgagtggcggacgggtgagtaatgcttaggaacatgcctttgcgtgggggataactattggaaacgatagctaataccgcatgatgtctacggaccaaagtgggcttcggctcacgcgcagagagtggcctaagcgagattagcttgttggtgaggtaaaggctcaccaaggcgacgatctctagctgttctgagaggaagatcagccacactggaactgagacacggtccagactcctacgggaggcagcagtggggaatattgcacaatgggggcaaccctgatgcagccatgccgcgtgtgtgaagaaggccttcgggttgtaaagcactttcagttgtgaggaaagtttggtggttaatacccatcagatgtgacgttagcaacagaagaaggaccggctaactccgtgccagcagccgcggtaatacggagggtccgagcgttaatcggaattactgggcgtaaagcgcacgcaggcggtttgttaagctagatgtgaaagccccgggctcaacctgggaattgcatttagaactggcaggctagagtcttggagaggggagtggaattccaggtgtagcggtgaaatgcgtagatatctggaggaacatcagtggcgaaggcgactccctggccaaagactgacgctcatgtgcgaaagtgtgggtagcgaacaggattagataccctggtagtccacaccgtaaacgatgtctactagctgtttgtgaatttaattcgtgagtagcggagctaacgcgataagtagaccgcctggggagtacggccgcaaggttaaaactcaaatgaattgacgggggcccgcacaagcggtggagcatgtggtttaattcgatgcaacgcgaagaaccttacctactcttgacatactcaaaactttgcagagatgcattggtgccttcgggaattgagatacaggtgctgcatggctgtcgtcagctcgtgtcgtgagatgttgggttaagtcccgcaacgagcgcaacccttgtccttagttgccagccttaagttgggcactctaaggagactgccggtgacaaaccggaggaaggtggggacgacgtcaagtcatcatggcccttacgagtagggctacacacgtgctacaatggcgcgtacagagggaagcgaaacagcgatgtcaagcggatcccttaaagcgcgtcgtagtccggatcggagtctgcaactcgactccgtgaagtcggaatcgctagtaatcgcaaatcagaatgttgcggtgaatacgttcccgggccttgtacacaccgcccgtcacaccatgggagtgggttgcaaaagaagtagctagtctaaccttcgggaggacggttaccactttgtgattcatgactggggtg

SEQ ID NO: 2475 - DNA, 1455 bp, Paraglaciecola mesophila
attgaacgctggcggcaggcctaacacatgcaagtcgaacggtaacatttctagcttgctagaagatgacgagtggcggacgggtgagtaatacttaggaatatgcctttgtgtgggggataactattggaaacgatagctaataccgcataacgtcttcggaccaaagggggcttcggctcccgcgcaaagagtagcctaagcgagattagcttgttggtgaggtaaaggctcaccaaggcgacgatctctagctgttctgagaggaagatcagccacactggaactgagacacggtccagactcctacgggaggcagcagtggggaatattgcacaatgggggaaaccctgatgcagccatgccgcgtgtgtgaagaaggccttcgggttgtaaagcactttcagttgtgaggaaaggttaacggttaatacccgttagctgtgacgttagcaacagaagaaggaccggctaactccgtgccagcagccgcggtaatacggagggtccgagcgttaatcggaattactgggcgtaaagcgcacgcaggcggtttgttaagctagatgtgaaagccctgggctcaacctgggaattgcatttagaactggcaggctagagttttggagaggggagtggaattccaggtgtagcggtgaaatgcgtagatatctggaggaacatcagtggcgaaggcgactccctggtcagtaactgacgctcatgtgcgaaagtgtgggtagcgaacaggattagataccctggtagtccacaccgtaaacgctgtctactagctgtttgtggatttaatccgtgagtagcgaagctaacgcgataagtagaccgcctggggagtacggccgcaaggttaaaactcaaatgaattgacgggggcccgcacaagcggtggagcatgtggtttaattcgatgcaacgcgaagaaccttacctactcttgacatactagaaacttttcagagatgaattggtgccttcgggaatctagatacaggtgctgcatggctgtcgtcagctcgtgtcgtgagatgttgggttaagtcccgcaacgagcgcaacccctgtccttagttgccagccttaagttgggcactctaaggagactgccggtgacaaaccggaggaaggtggggacgacgtcaagtcatcatggcccttacgagtagggctacacacgtgctacaatggcgagtacagagggaagcaaacttgcgagagtaagcggatcccttaaagctcgtcgtagtccggattggagtctgcaactcgactccatgaagtcggaatcgctagtaatcgcaaatcagaatgttgcggtgaatacgttcccgggccttgtacacaccgcccgtcacaccatgggagtgggttgcaaaagaagtagctagtttaaccttcgggaggacggttaccactttgtgattcatgactggggtg

SEQ ID NO: 2476 - DNA, 1455 bp, Paraglaciecola polaris
attgaacgctggcggcaggcctaacacatgcaagtcgaacggaaacatgtctagcttgctagatgatgtcgagtggcggacgggtgagtaatacttaggaacatgcctttgggtgggggataactattggaaacgatagctaataccgcataacgtctacggaccaaagggggcttcggctcccgcccagagagtggcctaagcgagattagcttgttggtgaggtaaaggctcaccaaggcgacgatctctagctgttctgagaggaagatcagccacactggaactgagacacggtccagactcctacgggaggcagcagtggggaatattgcacaatgggcgcaagcctgatgcagccatgccgcgtgtgtgaagaaggccttcgggttgtaaagcactttcagttgtgaggaaaggttaacggttaatacccgttagctgtgacgttagcaacagaagaaggaccggctaactccgtgccagcagccgcggtaatacggagggtccgagcgttaatcggaattactgggcgtaaagcgcacgcaggcggtttgttaagctagatgtgaaagccctgggctcaacctgggaattgcatttagaactggcaggctagagttttggagaggggagtggaattccaggtgtagcggtgaaatgcgtagatatctggaggaacatcagtggcgaaggcgactccctggtcagtaactgacgctcatgtgcgaaagtgtgggtagcgaacaggattagataccctggtagtccacaccgtaaacgctgtctactagctgtttgtggatttaatccgtgagtagcgaagctaacgcgataagtagaccgcctggggagtacggccgcaaggttaaaactcaaatgaattgacgggggcccgcacaagcggtggagcatgtggtttaattcgatgcaacgcgaagaaccttacctactcttgacatacttggaatttagcagagatgctttagtgccttcgggaaccaagatacaggtgctgcatggctgtcgtcagctcgtgtcgtgagatgttgggttaagtcccgcaacgagcgcaacccttgtccttagttgccagccttaagttgggcactctaaggagactgccggtgacaaaccggaggaaggtggggacgacgtcaagtcatcatggcccttacgagtagggctacacacgtgctacaatggcgagtacagagggaagcaaacttgcgagagtaagcggatcccttaaagctcgtcgtagtccggattggagtctgcaactcgactccatgaagtcggaatcgctagtaatcgcaaatcagaatgttgcggtgaatacgttcccgggccttgtacacaccgcccgtcacaccatgggagtgggttgcaaaagaagtagctagtttaaccttcgggaggacggttaccactttgtgattcatgactggggtg

SEQ ID NO: 2477 - DNA, 1459 bp, Paraglaciecola psychrophila
attgaacgctggcggcaggcctaacacatgcaagtcgaacggaaacatgtctagcttgctagatgatgtcgagtggcggacgggtgagtaatacttaggaacatgcctttgggtgggggataactattggaaacgatagctaataccgcataacgtctacggaccaaaggggggagcttgctcctctcgcccaaagagtggcctaagcgagattagcttgttggtgaggtaaaggctcaccaaggcgacgatctctagctgttctgagaggaagatcagccacactgggactgagacacggcccagactcctacgggaggcagcagtggggaatattgcacaatggaggaaactctgatgcagccatgccgcgtgtgtgaagaaggccttcgggttgtaaagcactttcagttgtgaggaaagcttgttggttaatacccagcaggtatgacgttagcaacagaagaaggaccggctaactccgtgccagcagccgcggtaatacggagggtccgagcgttaatcggaattactgggcgtaaagcgcacgcaggcggtttgttaagctagatgtgaaagccccgggctcaacctgggaatagcatttagaactggcagactagagtcttggagaggggagtggaatttctggtgtagcggtgaaatgcgtagatatcagaaggaacatcagtggcgaaggcgactccctggccaaagactgacgctcatgtgcgaaagtgtgggtagcgaacaggattagataccctggtagtccacaccgtaaacgctgtctactagctgtttgtggatttaatccgtgggtagcgaagctaacgcgataagtagaccgcctggggagtacggccgcaaggttaaaactcaaatgaattgacgggggcccgcacaagcggtggagcatgtggtttaattcgatgcaacgcgaagaaccttacctactcttgacatactagaaacttttcagagatgaattggtgccttcgggaatctagatacaggtgctgcatggctgtcgtcagctcgtgtcgtgagatgttgggttaagtcccgcaacgagcgcaacccttgtccttagttgccagccttaagttgggcactctaaggagactgccggtgacaaaccggaggaaggtggggacgacgtcaagtcatcatggcccttacgagtagggctacacacgtgctacaatggcgagtacagagggaagcaaacctgcgagggtaagcggatcccttaaagctcgtcgtagtccggattggagtctgcaactcgactccatgaagtcggaatcgctagtaatcgcaaatcagaatgttgcggtgaatacgttcccgggccttgtacacaccgcccgtcacaccatgggagtgggttgcaaaagaagtaggtagtctaaccttcgggaggacgcttaccactttgtgattcatgactggggtg

SEQ ID NO: 2478 - DNA, 1458 bp, Parahaliea aestuarii
attgaacgctggcggcaggcctaacacatgcaagtcgagcgcgaaagccctttcgggggtgagtagagcggcggacgggtgagtaacgcgtaggaatctacctggtagtgggggacaacatggggaaactcatgctaataccgcatacgccctacgggggaaagcgggggaccttcgggcctcgcgctatcagatgagcctgcgttggattagcttgtcggtgaggtaaaggctcaccaaggcgacgatccatagctggtctgagaggatgatcagccacaccgggactgagacacggcccggactcctacgggaggcagcagtggggaatattgcgcaatgggcgaaagcctgacgcagccatgccgcgtgtgtgaagaaggccttcgggttgtaaagcactttcacttgggaagaaaggttgtacgttaatagcgtgcagctgtgacattaccttgagaagaagcaccggctaactccgtgccagcagccgcggtaatacggagggtgcgagcgttaatcggaattactgggcgtaaagcgcgcgtaggcggtttgttaagtcggatgtgaaagccctgggctcaacctgggaactgcacccgatactggccgactagagtacgagagagggaggtagaattccacgtgtagcggtgaaatgcgtagatatgtggaggaataccggtggcgaaggcggcctcctggctcgatactgacgctgaggtgcgaaagcgtggggagcaaacaggattagataccctggtagtccacgccgtaaacgatgtctactagccgttggggaacttgagtccttggtggcgcagctaacgcactaagtagaccgcctggggagtacggccgcaaggttaaaactcagatgaattgacgggggcccgcacaagcggtggagcatgtggtttaattcgatgcaacgcgaagaaccttaccaggtcttgacatccagagaactttccagagatggattggtgccttcgggagctctgagacaggtgctgcatggctgtcgtcagctcgtgtcgtgagatgttgggttaagtcccgtaacgagcgcaacccctgtccctagttgctagcaggtaatgctgagaactctagggagactgacggtgacaaaccgtaggaaggtggggacgacgtcaagtcatcatggcccttacgacctgggctacacacgtgctacaatggaacgcacagagggcagcaaacccgcgagggggagcgaatcccacaaaacgtttcgtagtccggattggagtctgcaactcgactccatgaagtcggaatcgctagtaatcgtgaatcagaatgtcacggtgaatacgttcccgggccttgtacacaccgcccgtcacaccatgggagtgggttgctccagaagtggttagcctaaccttcgggggggcgatcaccacggagtgattcatgactggggtg

SEQ ID NO: 2479 - DNA, 1431 bp, Paralcaligenes ureilyticus
attgaacgctagcgggatgctttacacatgcaagtcgaacggcagcgcgaaggaaagcttgcttttctttggcggcgagtggcgaacgggtgagtaatgtatcggaacgtgcccagtagcgggggataactacgcgaaagcgtggctaataccgcatacgccctacgggggaaagggggggatcgcaagacctcccactattggagcggccgatatcggattagctagttggtggggtaaaggcctaccaaggcgacgatccgtagctggtttgagaggacgaccagccacactgggactgagacacggcccagactcctacgggaggcagcagtggggaattttggacaatgggggcaaccctgatccagccatcccgcgtgtgcgatgaaggccttcgggttgtaaagcacttttggcagggaagaaacggcaccttttaatacagggtgtcactgacggtacctgcagaataagcaccggctaactacgtgccagcagccgcggtaatacgtagggtgcaagcgttaatcggaattactgggcgtaaagcgtgcgcaggcggttcggaaagaaagatgtgaaatcccagggctcaaccttggaacggcatttttaactcccgagctagagtatgtcagaggggggtagaattccacgtgtagcagtgaaatgcgtagagatgtggaggaataccgatggcgaaggcagccccctgggacaatactgacgctcaggcacgaaagcgtggggagcaaacaggattagataccctggtagtccacgccctaaacgatgtcaactagctgttggggccttcgggctttagtagcgcagctaacgcgtgaagttgaccgcctggggagtacggtcgcaagattaaaactcaaaggaattgacggggacccgcacaagcggtggatgatgtggattaattcgatgcaacgcgaaaaaccttacctacccttgacatgtctggaatccttaagagattgaggagtgctcgcaagagaaccggaacacaggtgctgcatggctgtcgtcagctcgtgtcgtgagatgttgggttaagtcccgcaacgagcgcaacccttgtcattagttgctacgaaagggcactctaatgagactgccggtgacaaaccggaggaaggtggggatgacgtcaagtcctcatggcccttatgggtagggcttcacacgtcatacaatggtcgggacagagggatgccaacccgcgagggggagccaatctcagaaacccgatcgtagtccggattggagtctgcaactcgactccatgaagtcggaatcgctagtaatcgcggatcagcatgtcgcggtgaatacgttcccgggtcttgtacacaccgcccgtcacaccatgggagtgggttttaccagaagtagttagctaacccgcaagggggg

SEQ ID NO: 2480 - DNA, 1545 bp, Paramaledivibacter caminithermalis
ctggcggcgtgcttaacacatgcaagtcgagcgagctaatgcttggcactgtgtacttagttgattgatgtggtgtaataattagccagcgtcaagggcgaagcggagcagagtccttcacgcgttctaaagtgataacacatgtgactgagtattgagtgctaagcattagctagcggcggacgggtgagtaacgcgtgggcaacctgccttgtacagagggatagccactggaaacggtgattaatacctcataaaactattttatcgcatgatgagatagtcaaaactcaggtggtacaagatgggcccgcgtctgattagctagttggtggggtaaaggcctaccaaggcgacgatcagtagccgacctgagagggtgatcggccacactggaactgagacacggtccagactcctacgggaggcagcagtggggaatattgcacaatgggcgaaagcctgatgcagcaacgccgcgtgagcgaagaaggccttcgggtcgtaaagctctgtcctaagggaagaaaaatgacggtaccttaggaggaagccccggctaactacgtgccagcagccgcggtaatacgtagggggcaagcgttatccggaatcactgggcgtaaagggtgcgtaggcggccaaataagccaggggtgaaaggctacggcttaaccgtagtaagcccttggaactatttggcttgagtgcaggagaggagagtggaattcctagtgtagcggtgaaatgcgtagatattaggaggaacaccagtggcgaaggcgactctctggactgcaactgacgctgaggcacgaaagcgtggggagcgaacaggattagataccctggtagtccacgccgtaaacgatgagtgctaggtgtcgggggttcacaccctcggtgccggagttaacgcattaagcactccgcctggggagtacggtcgcaagactgaaactcaaaggaattgacggggacccgcacaagcagcggagcatgtggtttaattcgaagcaacgcgaagaaccttaccaggacttgacatccctttgacaggtttgtaatgggacccttcccttttgggacaaaggagacaggtggtgcatggttgtcgtcagctcgtgtcgtgagatgttgggttaagtcccgcaacgagcgcaacccttgtctttagttgccagcactaagggtgggcactctagagagactgccggtgacaaaccggaggaaggtggggatgacgtcaaatcatcatgccccttatgttctgggctacacacgtgctacaatggctggtacaacgggcagctaaggagcaatctggagctaatcccaaaaagccagtcccagttcggattgtgggctgcaactcgcccacatgaagtcggagttgctagtaatcgtgaatcagaatgtcgcggtgaatgcgttcccgggtcttgtacacaccgcccgtcacaccatggaagcctaaggcacccgaagtcagcgagttaacccttgtgggaacagctgccgaaggtgaaataggtgactggggtg

SEQ ID NO: 2481 - DNA, 1409 bp, Paramesorhizobium deserti
aacgaacgctggcggcaggcttaacacatgcaagtcgaacgccctcttcggagggagtggcagacgggtgagtaacgcgtgggaatctacccatctctacggaacaactccgggaaactggagctaataccgtatacgtccttttggagaaagatttatcggagatggatgagcccgcgttggattagctagttggtggggtaaaggcctaccaaggcgacgatccatagctggtctgagaggatgatcagccacactgggactgagacacggcccagactcctacgggaggcagcagtggggaatattggacaatgggcgcaagcctgatccagccatgccgcgtgagtgatgaaggccctagggttgtaaagctctttcaccggtgaagataatgacggtaaccggagaagaagccccggctaacttcgtgccagcagccgcggtaatacgaagggggctagcgttgttcggatttactgggcgtaaagcgcacgtaggcggacttttaagtcaggggtgaaatcccggggctcaaccccggaactgcctttgatactggaagtcttgagtatggaagaggtgagtggaattccgagtgtagaggtgaaattcgtagatattcggaggaacaccagtggcgaaggcggctcactggtccattactgacgctgaggtgcgaaagcgtggggagcaaacaggattagataccctggtagtccacgccgtaaacgatgaatgttagccgtcggcaagtttacttgtcggtggcgcagctaacgcattaaacattccgcctggggagtacggtcgcaagattaaaactcaaaggaattgacgggggcccgcacaagcggtggagcatgtggtttaattcgaagcaacgcgcagaaccttaccagcccttgacatcccggtcgcgggtaggagagatcctatccttcagttcggctggaccggtgacaggtgctgcatggctgtcgtcagctcgtgtcgtgagatgttgggttaagtcccgcaacgagcgcaaccctcgcccttagttgccagcattcagttgggcactctaaggggactgccggtgataagccgagaggaaggtggggatgacgtcaagtcctcatggcccttacgggctgggctacacacgtgctacaatggtggtgacagtgggcagcgagaccgcgaggtcgagctaatctccaaaaaccatctcagttcggattgcactctgcaactcgggtgcatgaagttggaatcgctagtaatcgtggatcagcatgccacggtgaatacgttcccgggccttgtacacaccgcccgtcacaccatgggagttggctttacccgaaggtgctgtgctaaccgcaaggaggcaggcaaccacggtagggtcagcgactggggtg

SEQ ID NO: 2482 - DNA, 1459 bp, Paraperlucidibaca baekdonensis
attgaacgctggcggcaggcttaacacatgcaagtcgaacgaggtgttggtgcttgcactaacacctagtggcgaacgggtgagtaatacttgggaatctgccttgtagcgggggataacgtttcgaaaggaacgctaataccgcatacgtcctacgggagaaaggaggggatcttcggaccttccactataagatgagcccaagcgagattagctagttggtgaggtaaaggctcaccaaggcgacgatctctagctggtctgagaggatgatcagccacactgggactgagacacggcccagactcctacgggaggcagcagtggggaatattggacaatgggcgaaagcctgatccagccatgccgcgtgtgtgaagaaggccttcgggttgtaaagcactttaagcgaggaggaaatgttctgggttaatacccttgagcagtgacgttactcgcagaataagcaccggctaactctgtgccagcagccgcggtaatacagagggtgcaagcgttaatcggaattactgggcgtaaagcgcgcgtaggcggttacgtaagttggaggtgaaatccccgagctcaacttgggaattgccttcaaaactgcgtggctagagtgtgggagaggaaggtagaattccaggtgtagcggtgaaatgcgtagatatctggaggaataccgatggcgaaggcagccttctggcctaacactgacgctgaggtgcgaaagcatggggagcaaacaggattagataccctggtagtccatgccgtaaacgatgtctactagccgttgggggacttgatcctttagtggcgcagctaacgcattaagtagaccgcctggggagtacggtcgcaagactaaaactcaaatgaattgacgggggcccgcacaagcggtggagcatgtggtttaattcgatgcaacgcgaagaaccttacctagccttgacatgtccggaatcttgcagagatgcgagagtgccttcgggaatcggaacacaggtgctgcatggctgtcgtcagctcgtgtcgtgagatgttgggttaagtcccgcaacgagcgcaacccttgtccttagttgccagcacgtaatggtgggaactctagggagactgccggtgacaaaccggaggaaggcggggacgacgtcaagtcatcatggcccttacggctagggctacacacgtgctacaatggtcggtacaaagggttgccaactcgcgagagtgcgctaatctcaaaaagccgatcgtagtccggattggagtctgcaactcgactccatgaagtcggaatcgctagtaatcgcggatcagaatgccgcggtgaatacgttcccgggccttgtacacaccgcccgtcacaccatgggagtttactgcaccagaagtaggtagcctaaccgcaaggggggcgcttaccacggtgtggtcaatgactggggtg

SEQ ID NO: 2483 - DNA, 1488 bp, Pararheinheimera mesophila
agatttgatcctggctcagattgaacgctggcggcaggcctaacacatgcaagtcgagcggggttttcggacctagcggcggacgggtgagtaatgcgtaggaagctgcccgatagagggggataccagttggaaacgactgttaataccgcataatgtctacggaccaaagtgtgggaccttcgggccacatgctatcggatgcgcctacgtgggattagctagttggtgaggtaatggctcaccaaggcgacgatctctagctggtttgagaggatgatcagccacactggaactgagacacggtccagactcctacgggaggcagcagtggggaatattggacaatgggcgcaagcctgatccagccatgccgcgtgtgtgaagaaggccttcgggttgtaaagcactttcagcgaggaggaagggtggtgtgttaatagcacatcattttgacgttactcgcagaagaagcaccggctaactctgtgccagcagccgcggtaatacagagggtgcaagcgttaatcggaattactgggcgtaaagcgcacgtaggcggttttttaagtcagatgtgaaagccccgggctcaacctgggaattgcatttgaaactgggaaactagagtgtgtgagagggggggtagaattccaagtgtagcggtgaaatgcgtagagatttggaggaataccagtggcgaaggcggccccctggcacaacactgacgctcaggtgcgaaagcgtggggagcaaacaggattagataccctggtagtccacgccgtaaacgatgtctactagctgttcgtgaccttgtgttgtgagtagcgcagctaacgcactaagtagaccgcctggggagtacggtcgcaagattaaaactcaaatgaattgacgggggcccgcacaagcggtggagcatgtggtttaattcgacgcaacgcgaagaaccttacctactcttgacatctacggaagactgcagagatgcggttgtgccttcgggaaccgtaagacaggtgctgcatggctgtcgtcagctcgtgttgtgaaatgttgggttaagtcccgcaacgagcgcaacccctatccttagttgccagcgattcggtcgggaactctagggagactgccggtgataaaccggaggaaggtggggacgacgtcaagtcatcatggcccttacgagtagggctacacacgtgctacaatggtacgtacagagggaggcaagctggcgacagtgagcggatctcttaaagcgtatcgtagtccggatcgcagtctgcaactcgactgcgtgaagtcggaatcgctagtaatcgcaaatcagaatgttgcggtgaatacgttcccgggccttgtacacaccgcccgtcacaccatgagagtgggttgcaaaagaagtaggtagcttaaccgcaaggagggcgcttaccactttgtgattcatgactggggtgaagtcgtaacaaggtaaccgta

SEQ ID NO: 2484 - DNA, 1390 bp, Pararheinheimera tangshanensis
agtcgagcggggttttcggacctagcggcggacgggtgagtaatgcgtaggaagctgcccgatagagggggataccagttggaaacgactgttaataccgcataatgtctacggaccaaagtgtgggaccttcgggccacatgctatcggatgcgcctacgtgggattagctagttggtgaggtaatggctcaccaaggcgacgatctctagctggtttgagaggatgatcagccacactggaactgagacacggtccagactcctacgggaggcagcagtggggaatattggacaatgggcgcaagcctgatccagccatgccgcgtgtgtgaagaaggccttcgggttgtaaagcactttcagcgaggaggaagggatgtatgttaatagcatgcatttttgacgttactcgcagaagaagcaccggctaactctgtgccagcagccgcggtaatacagagggtgcaagcgttaatcggaattactgggcgtaaagcgcacgtaggcggttttttaagtcagatgtgaaagccccgggctcaacctgggaattgcatttgaaactggggaactagagtgtgtgagaggggggtagaattccaagtgtagcggtgaaatgcgtagagatttggaggaataccagtggcgaaggcggccccctggcacaacactgacgctcaggtgcgaaagcgtggggagcaaacaggattagataccctggtagtccacgccgtaaacgatgtctactagctgttcgtgtccttgtgatgtgagtagcgcagctaacgcactaagtagaccgcctggggagtacggtcgcaagattaaaactcaaatgaattgacgggggcccgcacaagcggtggagcatgtggtttaattcgacgcaacgcgaagaaccttacctactcttgacatctacggaagactgcagagatgcggttgtgccttcgggaaccgtaagacaggtgctgcatggctgtcgtcagctcgtgttgtgaaatgttgggttaagtcccgcaacgagcgcaacccctatccttagttgccagcgagttaagtcgggaactctagggagactgccggtgataaaccggaggaaggtggggacgacgtcaagtcatcatggcccttacgagtagggctacacacgtgctacaatggtacgtacagagggaggcaagctggcgacagtgagcggatctcttaaagcgtatcgtagtccggatcgcagtctgcaactcgactgcgtgaagtcggaatcgctagtaatcgcaaatcagaatgttgcggtgaatacgttcccgggccttgtacacaccgcccgtcacaccatgggagtgggttgcaaaagaagtaggtagcttaaccttcgggagggcgctacc

SEQ ID NO: 2485 - DNA, 1409 bp, Pararhizobium polonicum
aacgaacgctggcggcaggcttaacacatgcaagtcgaacgctgtagcaatacagagtggcagacgggtgagtaacgcgtgggaatctacccaactctacggaataacgcatggaaacgtgtgctaataccgtatacgcccttcgggggaaagatttatcggagttggatgagcccgcgttggattagctagttggtggggtaaaggcctaccaaggcgacgatccatagctggtctgagaggatgatcagccacattgggactgagacacggcccaaactcctacgggaggcagcagtggggaatattggacaatgggcgcaagcctgatccagccatgccgcgtgtgtgatgaaggccttagggttgtaaagcactttcaccggagaagataatgacggtatccggagaagaagccccggctaacttcgtgccagcagccgcggtaatacgaagggggctagcgttgttcggaattactgggcgtaaagcgcacgtaggcggatcgatcagtcaggggtgaaatcccagagctcaactctggaactgcctttgatactgtcggtctagagtatggaagaggtgagtggaattccgagtgtagaggtgaaattcgtagatattcggaggaacaccagtggcgaaggcggctcactggtccattactgacgctgaggtgcgaaagcgtggggagcaaacaggattagataccctggtagtccacgccgtaaacgatgaatgttagccgtcggcaagtttacttgtcggtggcgcagctaacgcattaaacattccgcctggggagtacggtcgcaagattaaaactcaaaggaattgacgggggcccgcacaagcggtggagcatgtggtttaattcgaagcaacgcgcagaaccttaccagctcttgacatcccgatcgcggacagtggagacattgtccttcagttaggctggatcggtgacaggtgctgcatggctgtcgtcagctcgtgtcgtgagatgttgggttaagtcccgcaacgagcgcaaccctcgcccttagttgccagcattcagttgggcactctaaggggactgccggtgataagccgagaggaaggtggggatgacgtcaagtcctcatggcccttacgggctgggctacacacgtgctacaatggtggtgacagtgggcagcgagaccgcgaggtcgagctaatctccaaaagccatctcagttcggattgcactctgcaactcgagtgcatgaagttggaatcgctagtaatcgcagatcagcatgctgcggtgaatacgttcccgggccttgtacacaccgcccgtcacaccatgggagttggttttacccgaaggtagtgcgctaaccgcaaggaggcagctaaccacggtagggtcagcgactggggtg

SEQ ID NO: 2486 - DNA, 1406 bp, Parasaccharibacter apium
agcgaacgctggcggcatgcttaacacatgcaagtcgcacggacctttcggggttagtggcggacgggtgagtaacgcgtaggaacctatccagaggtgggggataacattgggaaactggtgctaataccgcatgaagcctgagggccaaaggagagatctgccattggaggggcctgcgttcgattagctagttggttaggtaaaggctgaccaaggcgatgatcgatagctggtttgagaggatgatcagccacactgggactgagacacggcccagactcctacgggaggcagcagtggggaatattggacaatggggggaaccctgatccagcaatgccgcgtgtgtgaagaaggtcttcggattgtaaagcactttcactagggaagatgatgacggtacctagagaagaagccccggctaacttcgtgccagcagccgcggtaatacgaagggggctagcgttgctcggaatgactgggcgtaaagggcgcgtaggctgtttgtacagtcagatgtgaaatccccgggcttaacctgggaactgcatttgatacgtgcagactagagtccgagagagggttgtggaattcccagtgtagaggtgaaattcgtagatattgggaagaacaccggttgcgaaggcggcaacctggctcggaactgacgctgaggcgcgaaagcgtggggagcgaacaggattagataccctggtagtccacgctgtaaacgatgtgtgctggatgttgggtgattttatcattcagtgtcggagctaacgcgttaagcacaccgcctggggagtacggccgcaaggttgaaactcaaaggaattgacgggggcccgcacaagcggtggagcatgtggtttaattcgaagcaacgcgcagaaccttaccagggcttgcatggggaggctgtagtcagagatggctatttcttcggacctcccacacaggtgctgcatggctgtcgtcagctcgtgtcgtgagatgttgggttaagtcccgcaacgagcgcaacccttgtctttagttgccagcatgtttgggtgggcactctagagagactgccggtgacaagccggaggaaggtggggatgacgtcaagtcctcatggcccttatgtcctgggctacacacgtgctacaatggcggtgacagagggaagctagatggtgacattgtgctgatctccaaaagccgtctcagttcggattgtactctgcaactcgagtgcatgaaggtggaatcgctagtaatcgcggatcagcatgccgcggtgaatacgttcccgggccttgtacacaccgcccgtcacaccatgggagttggtttgaccttaagccggtgagcgaaccgcaaggacgcagccgaccacggtcgggtcagcgactggggtg

SEQ ID NO: 2487 - DNA, 1413 bp, Parasphingopyxis lamellibrachiae
aacgaacgctggcggcaggcctaacacatgcaagtcgaacgaagtcttcggacttagtggcgcacgggtgcgtaacgcgtgggaatctacccttaggtgcggaataacagttagaaatgactgctaataccgcataatgactccggtccaaagatttatcgcctaaggatgagcccgcgtaagattagctagttggtgaggtaaaagctcaccaaggcgacgatctttagctggtctgagaggatgatcagccacactgggactgagacacggcccagactcctacgggaggcagcagtggggaatattggacaatgggcgaaagcctgatccagccatgccgcgtgagtgatgaaggccttagggttgtaaagctcttttaccagggatgataatgacagtacctggagaataagctccggctaactccgtgccagcagccgcggtaatacggagggagctagcgttgttcggaattactgggcgtaaagcgcgcgtaggcggctattcaagtcagaggtgaaagcccggggctcaaccccggaactgcctttgaaactagatagctagaatatgggagaggtgagtggaattccgagtgtagaggtgaaattcgtagatattcggaagaacaccagtggcgaaggcgactcactggaccattattgacgctgaggtgcgaaagcgtggggagcaaacaggattagataccctggtagtccacgccgtaaacgatgagaactagctgttggggcccatagggtttcagtggcgcagttaacgcattaagttctccgcctggggagtacggtcgcaagattaaaactcaaaggaattgacgggggcctgcacaagcggtggagcatgtggtttaattcgaagcaacgcgcagaaccttaccagcgtttgacatcccgatcgcggtttccagagatggattccttcagttaggctggatcggtgacaggtgctgcatggctgtcgtcagctcgtgtcgtgagatgttgggttaagtcccgcaacgagcgcaaccctcatccttagttgccagcatttagttgggcactctaaggaaactgccggtgataagccggaggaaggtggggatgacgtcaagtcctcatggcccttacacgctgggctacacacgtgctacaatggcggtgacagtgggcagctagatcgcaagatcatgctaatctcaaaaaaccgtctcagttcggattgttctctgcaactcgagagcatgaaggcggaatcgctagtaatcgcggatcagcatgccgcggtgaatacgttcccaggccttgtacacaccgcccgtcacaccatgggagttggattgacccgaaggtggtgagctaacctgcttgcaggaggcagccaaccacggtcggttcagcgactggggtg

SEQ ID NO: 2488 - DNA, 1436 bp, Parendozoicomonas haliclonae
tgcaagtcgagcggtaacagatctagcttgctagatgctgacgagcggcggacgggtgagtaatgcatagaaatctgcctggtagtgggggatagcccagagaaatttggattaataccgcatacgccctacgggggaaagcaggggaccttcgggccttgcgctatcagatgagtctatgtcggattagcttgttggtgaggtaatggctcaccaaggcgacgatccgtagctggtctgagaggatgatcagccacactgggactgagacacggcccagactcctacgggaggcagcagtggggaatattggacaatgggcgaaagcctgatccagccatgccgcgtgtgtgaagaaggccttagggttgtaaagcactttcagcgaggaggaaaggatgttggttaatacccagcgtctgtgacgttactcgcagaagaagcaccggctaactccgtgccagcagccgcggtaatacggagggtgcaagcgttaatcggaattactgggcgtaaagcgtgcgtaggcggccatttaagttggatgtgaaagccccgggctcaacctgggaacggcatccaaaactgagtggcttgagtgcggaagaggagtgtggaatttcctgtgtagcggtgaaatgcgtagatataggaaggaacaccagtggcgaaggcgacactctggtctgacactgacgctgaggtacgaaagcgtggggagcaaacaggattagataccctggtagtccacgccgtaaacgatgtctactagttgtcgggttccttgcgaacttggtaacgcagctaacgcgataagtagaccgcctggggagtacggccgcaaggttaaaactcaaatgaattgacgggggcccgcacaagcggtggagcatgtggtttaattcgaagcaacgcgaagaaccttacctggccttgacatactgtgaacttactagagatagtttggtgccttcgggaacacagatacaggtgctgcatggctgtcgtcagctcgtgtcgtgagatgttgggttaagtcccgtaacgagcgcaacccctgtccttagttaccagcacgttatggtgggcactctagggagactgccggtgacaaaccggaggaaggtggggatgacgtcaagtcatcatggcccttacggccagggctacacacgtgctacaatggtacatacaaacggtcgcgaagcagcaatgtggagctaatctgagaaaatgtatcgtagtccggattggggtctgcaactcgaccccatgaagtcggaatcgctagtaatcgcaaatcagaatgttgcggtgaatacgttcccgggccttgtacacaccgcccgtcacaccatgggagtgggttgctccagaagtagctagcttaaccttcgggagagcggttaccacggagtgattcatgactggggtga

SEQ ID NO: 2489 - DNA, 1430 bp, Parvibacter caecicola
gatgaacgctggcggcgtgcttaacacatgcaagtcgaacgattaaaccgccctcgggcggaaatagagtggcgaacgggtgagtaacacgtgaccaacctgccccgcgctccgggacaaccgctggaaacggcggctaataccggatactccggccagcccgcatgggccggccgggaaagccttcacggcgcgggatggggtcgcggcccattaggtagtaggcggggtaacggcccacctagcccgcgatgggtagccggactgagaggtcgaccggccacattgggactgagatacggcccagactcctacgggaggcagcagtggggaattttgcgcaatgggggaaaccctgacgcagcaacgccgcgtgcgggacgacggccctcgggttgtaaaccgctttcagtggggacgatggtgacggtacccacagaagaagctccggctaactacgtgccagcagccgcggtaatacgtagggagcgagcgttatccggattcattgggcgtaaagcgcgcgtaggcggctgcctaagcggaacctctaatcccggggctcaacctcgggccgggttccgaactgggcggctcgagtgcggtagaggcaggcggaattcccggtgtagcggtggaatgcgcagatatcgggaagaacaccgatggcgaaggcagcctgctgggccgtcactgacgctgaggcgcgaaagctgggggagcgaacaggattagataccctggtagtcccagccgtaaacgatgggcgctaggtgtggggggaccatccctccgtgccgcagccaacgcattaagcgccccgcctggggagtacggccgcaaggctaaaactcaaaggaattgacgggggcccgcacaagcagcggagcatgtggcttaattcgaagcaacgcgaagaaccttaccagggcttgacatgcgagtgaagccggggaaacccggtggccgagaggagctcgcgcaggtggtgcatggctgtcgtcagctcgtgtcgtgagatgttgggttaagtcccgcaacgagcgcaacccctgtcccgtgttgccagcattcagttggggactcgcgggagactgccggcgttaagccggaggaaggtggggacgacgtcaagtcatcatgccccttatgccctgggctgcacacgtgctacaatggccggtacagagggctgcgacgccgcgaggcggagcgaatcccaaaaagccggccccagttcggatcgcaggctgcaacccgcctgcgtgaagtcggagttgctagtaatcgcggatcagcatgccgcggtgaatacgttcccgggccttgtacacaccgcccgtcacaccacccgagtcgtctgcacccgaagccgccggccgaacccgaaaggggcggaggtgtcgaaggtgtggagggtaaggggggtg

SEQ ID NO: 2490 - DNA, 1408 bp, Parvibaculum lavamentivorans
aacgaacgctggcggcaggcttaacacatgcaagtcgaacgccctcttcggagggagtggcagacgggtgagtaacacgtgggaacctacctaggggtacggaataactcggggaaactcgtgctaataccgtatacgaccttcgggtgaaagatttatcgcccctagatgggcccgcgctggattagctagttggtggggtaaaagcctaccaaggcgacgatccatagctggtctgagaggatgatcagccacactgggactgagacacggcccagactcctacgggaggcagcagtggggaatcttggacaatgggggaaaccctgatccagccatgccgcgtgagtgatgaaggccttagggttgtaaagctctttcgccagggaagataatgacggtacctggataagaagccccggctaactccgtgccagcagccgcggtaatacggagggggctagcgttgttcggaattactgggcgtaaagcgcacgtaggcggctatccaagttgggggtgaaatccctgggcttaacccaggaactgccttcaaaactggatggctagagtccgagagaggtgagtggaatttccagtgtagaggtgaaattcgtagatattggaaagaacaccagtggcgaaggcggctcactggctcggtactgacgctgaggtgcgacagcgtggggagcaaacaggattagataccctggtagtccacgccgtaaacgatgggtgctagttgtcaggcagcttgctgcttggtgacgcagctaacgcattaagcaccccgcctggggagtacggtcgcaagattaaaactcaaaggaattgacgggggcccgcacaagcggtggagcatgtggtttaattcgaagcaacgcgcagaaccttaccaacccttgacatcccggtcgcggttaccagagatggtttccttcagttcggctggaccggagacaggtgttgcatggctgtcgtcagctcgtgtcgtgagatgttgggttaagtcccgcaacgagcgcaaccctcgcctttagttgccatcattaagttgggcactctagagggactgccgatgataagtcggaggaaggtggggatgacgtcaagtcctcatggcccttacgggttgggctacacacgtgctacaatggcggcgacaatgggcagcgaaggggcgacccggtgcaaatcccaaaaagccgtctcagttcggattgtactctgcaactcgagtgcatgaaggtggaatcgctagtaatcgcgtaacagcatgacgcggtgaatacgttcccgggccttgtacacaccgcccgtcacaccatgggagttggttttacccgaagccggtgcgctaaccgcaaggaggcagccgaccacggtaaggtcagcgactggggtg

SEQ ID NO: 2491 - DNA, 1414 bp, Parvibium lacunae
ccatgcagtcgaacgggggtagcaatactctagtggcgaacgggtgagtaatatatcggaacgtacccagtagtgggggataactagtcgaaagattagctaataccgcatacgacctacgggtgaaagcgggggaccgtaaggcctcgcgctattggagcggccgatatcagattagctagttggtggggtaaaagctcaccaaggcgacgatctgtagctggtctgagaggacgaccagccacactgggactgagacacggcccagactcctacgggaggcagcagtggggaattttggacaatgggggcaaccctgatccagcaatgccgcgtgtgtgaagaaggccttcgggttgtaaagcacttttgtcagggaagaaaactgttgcgctaatatcgcgacgggatgacggtacctgaagaataaggaccggctaactacgtgccagcagccgcggtaatacgtagggtccaagcgttaatcggaattactgggcgtaaagcgtgcgcaggcggttatgtaagacaggtgtgaaatccccgggcttaacctgggaactgcacttgtgactgcatggctagagtgtgatagaggggggtagaattccacgtgtagcagtgaaatgcgtagagatgtggaggaataccgatggcgaaggcagccccctgggtcaatacgacgctcatgcacgaaagcgtggggagcaaacaggattagataccctggtagtccacgccctaaacgatgcctactagttgttgggtcttcattgactcagtaacgcagctaacgcgtgaagtaggccgcctggggagtacggtcgcaagattaaaactcaaaggaattgacggggacccgcacaagcggtggatgatgtggattaattcgatgcaacgcgaaaaaccttacctacgcttgacatgtctgaaagtttccagagatggattcgtgctcgaaagagaatcagaacacaggtgctgcatggctgtcgtcagctcgtgtcgtgagatgttgggttaagtcccgcaacgagcgcaacccttgtcattagttgctacgaaagggcactctaatgagactgccggtgacaaaccggaggaaggtggggatgacgtcaagtcctcatggcccttatgcgtagggcttcacacgtcatacaatggtcggtacagagggttgccaacccgcgagggggagctaatctcataaaaccgatcgtagtccggattgcactctgcaactcgagtgcatgaagtcggaatcgctagtaatcgcggatcagcatgtcgcggtgaatacgttcccgggtcttgtacacaccgcccgtcacaccatgggagtggcttttgccagaagtagttagcctaaccgcaaggagggcgattaccacggcaggggtcatgactgggg

SEQ ID NO: 2492 - DNA, 1383 bp, Parvularcula bermudensis
gacgaacgctggcggcaggcttaacacatgcaagtcgaacgatccttcgggatagtggcagacgggtgcgtaacacgtgggaacctacctcagggtacggaataactcggggaaactcgtgctaataccgtatatgcctttgggtgaaagatttatcgccctgagatgggcccgcggctgattaggtagttggtggggtaaaagcctaccaagccgacgatcagtagctggtctgagaggatgatcagccacactgggactgagacacggcccagactcctacgggaggcagcagtgaggaatattggacaatgggggcaaccctgatccagccatgccgcgtgagtgatgaaggccttagggttgtaaaactctttcgccggtgaagataatgacggtaaccggtaaagaagccccggctaatttcgtgccagcagccgcggtaatacgaaaggggctagcgttgttcggaattactgggcgtaaagcgcgcgtaggcgggatgccaagttgggggtgaaatcccggagctcaactccggaactgcctccaaaactggcaacctagaggatgtgagaggatagtggaattccgagtgtagaggtgaaattcgtagatattcggaagaacaccggtggcgaaggcgactgtctggcacatttctgacgctgaggtgcgaaagcgtggggagcaaacaggattagataccctggtagtccacgccgtaaacgatgagggctagttgtcggcttgcatgcaagtcggtgacgcagctaacgcattaagccctccgcctggggagtacggtcgcaagattaaaactcaaaggaattgacgggggcccgcacaagcggtggagcatgtggtttaattcgaagcaacgcgaagaaccttaccaacccttgacatcccgattgcggtttccagagatggataccttcatttagttggatcggtgacaggtgttgcatggctgtcgtcagctcgtgtcgtgagatgttgggttaagtcccgcaacgagcgcaaccctcgctgttagttgccagcatttagttgggcactctaacgggaccgccggtgataagccggaggaaggtggggacgacgtcaagtcatcatggcccttacgggttgggctacacacgtgctacaatggcgctcatagtgggataatccccaaaaggcgtctcagttcggattgtcttctgcaactcgaaggcatgaagtcggaatcgctagtaatcgcggatcagcatgccgcggtgaatacgttcccgggccttgtacacaccgcccgtcacaccatgggagttggttttacccgacgacgctgcgctaaccttcgggaggcaggcggccacggtaagatcagcgactggggtg

SEQ ID NO: 2493 - DNA, 1385 bp, Pasteurella aerogenes
attgaacgctggcggcaggcttaacacatgcaagtcgaacggtaacagggagaaagcttgctttctttgctgacgagtggcggacgggtgagtaatgcttgggaatctggcttatggagggggataacgacgggaaactgtcgctaataccgcgtagtgtcgagagacgaaagaccgggaccgcaaggccggttaccataagatgagcccaagtgggattaggtagttggtggggtaaaggcctaccaagcctgcgatctctagctggtctgagaggatggccagccacactggaactgagacacggtccagactcctacgggaggcagcagtggggaatattgcgcaatgggggcaaccctgacgcagccatgccgcgtgaatgaagaaggccttcgggttgtaaagttctttcggtgatgaggaaggcggttagtttaataggctaatcgattgacgttaatcacagaagaagcaccggctaactccgtgccagcagccgcggtaatacggagggtgcgagcgttaatcggaataactgggcgtaaagggcacgcaggcggttgcttaagtgaggtgtgaaatccccgggcttaacctgggaattgcatttcagactgggcagctagagtattttagggaggggtagaattccacgtgtagcggtgaaatgcgtagagatgtggaggaataccgaaggcgaaggcagccccttggggaaatactgacgctcatgtgcgaaagcgtggggagcaaacaggattagataccctggtagtccacgctgtaaacgctgtcgatttggggattgggctttaagcttggtgcccgtagctaacgtgataaatcgaccgcctggggagtacggccgcaaggttaaaactcaaatgaattgacgggggcccgcacaagcggtggagcatgtggtttaattcgatgcaacgcgaagaaccttacctactcttgacatccagagaagagcgcagagatgtgcttgtgccttcgggagctctgagacaggtgctgcatggctgtcgtcagctcgtgttgtgaaatgttgggttaagtcccgcaacgagcgcaacccttatcctttgttgccagcacgttatggtgggaactcaaaggagactgccggtgataaaccggaggaaggtggggatgacgtcaagtcatcatggcccttacgagtagggctacacacgtgctacaatggtgcatacagagagcgacgagaccgcgaggtggagtgaatctcagaaagtgcatctaagtccggattggagtctgcaactcgactccatgaagtcggaatcgctagtaatcgcgaatcagaatgtcgcggtgaatacgttcccgggccttgtacacaccgcccgtcacac

SEQ ID NO: 2494 - DNA, 1462 bp, Pasteurella bettyae
attgaacgctggcggcaggcttaacacatgcaagtcgaacggtagcacaggggagcttgctccctgggtgacgagtggcggacgggtgagtaatgcttgggaatttggcttatggagggggataactacgggaaactgtagctaataccgcgtaatgtctacggactaaagggtgggactatttggccacctgccatgagatgagcccaagtgggattaggtagttggtggggtaaaggcctaccaagccgacgatctctagctggtctgagaggatgaccagccacactggaactgagacacggtccagactcctacgggaggcagcagtggggaatattgcacaatggggggaaccctgatgcagccatgccgcgtgaatgaagaaggccttcgggttgtaaagttctttcggtgatgaggaaggcaggtattttaatagaatacttgattgacgttaatcacagaagaagcaccggctaactccgtgccagcagccgcggtaatacggagggtgcgagcgttaatcggaataactgggcgtaaagggcatgcaggcggttgtttaagtgagatgtgaaagccccgggcttaacctgggaattgcatttcagactggacagctagagtactttagggaggggtagaattccacgtgtagcggtgaaatgcgtagagatgtggaggaataccgaaggcgaaggcagccccttgggaatgtactgacgctcatatgcgaaagcgtggggagcaaacaggattagataccctggtagtccacgctgtaaacgatgtcgatttggggattgagcaataagcttggtgctcgaagctaacgtgataaatcgaccgcctggggagtacggccgcaaggttaaaactcaaatgaattgacgggggcccgcacaagcggtggagcatgtggtttaattcgatgcaacgcgaagaaccttacctactcttgacatccatagaagaactcagagatgagtttgtgccttcgggagctatgagacaggtgctgcatggctgtcgtcagctcgtgttgtgaaatgttgggttaagtcccgcaacgagcgcaacccttatcctttgttgccagcgacatggtcgggaactcaaaggagactgccagtgataaactggaggaaggtggggatgacgtcaagtcatcatggcccttacgagtagggctacacacgtgctacaatggtgcatacagagggaagcgagcctgcgagggggagcgaatctcagaaagtgcatctaagtccggattggagtctgcaactcgactccatgaagtcggaatcgctagtaatcgcaaatcagaatgttgcggtgaatacgttcccgggccttgtacacaccgcccgtcacaccatgggagtgggttgtaccagaagtagatagcttaacggaaacgggggcgtttaccacggtatgattcatgactggggtg

SEQ ID NO: 2495 - DNA, 1414 bp, Pasteurella caecimuris
attgaacgctggcggcaggcttaacacatgcaagtcgaacggtagcaggaaggaagcttgctttctttgctgacgagtggcggacgggtgagtaatgcttgggaatctggcttatggagggggataactgcgggaaactgcagctaataccgcgtaaagtctttggactaaagggggcgtttgctcttgccataagatgagcccaagtgggattaggtagttggtggggtaatggctcaccaagccgtcgatctctagctggtctgagaggatgaccagccacaccgggactgagacacggcccggactcctacgggaggcagcagtggggaatattgcgcaatggggggaaccctgacgcagccatgccgcgtgaatgaagaaggccttcgggttgtaaagttctttcggtgatgaggaaggcagtttggttaatagccaagctgattgacgttagtcacagaagaagcaccggctaactccgtgccagcagccgcggtaatacggagggtgcgagcgttaatcggaataactgggcgtaaagggcacgcaggcggatttttaagtgaggtgtgaaagccccgggcttaacctgggaattgcatttcagactgggaatctagagtactttagggaggggtagaattccacgtgtagcggtgaaatgcgtagagatgtggaggaataccgaaggcgaaggcagccccttgggaatgtactgacgctcatgtgcgaaagcgtggggagcaaacaggattagataccctggtagtccacgctgtaaacgctgtcgatttgggggttggggtttaactctgacgcccgtagctaacgtgataaatcgaccgcctggggagtacggccgcaaggttaaaactcaaatgaattgacgggggcccgcacaagcggtggagcatgtggtttaattcgatgcaacgcgaagaaccttacctactcttgacatccagagaatcctgtagagatacgggagtgccttcgggagctttgagacaggtgctgcatggctgtcgtcagctcgtgttgtgaaatgttgggttaagtcccgcaacgagcgcaacccttatcctttgttgccagcgatacggtcgggaactcaaaggagactgccggtgataaaccggaggaaggtggggatgacgtcaagtcatcatggcccttacgagtagggctacacacgtgctacaatggcgtatacagagggaggcgaagcagcgatgtggagcgaatctcacaaagtacgtctaagtccggattggagtctgcaactcgactccatgaagtcggaatcgctagtaatcgcgaatcagaatgtcgcggtgaatacgttcccgggccttgtacacaccgcccgtcacaccatgggagtgggttgtaccagaagtagatagctaac

SEQ ID NO: 2496 - DNA, 1364 bp, Pasteurella canis
attgaacgctggcggcaggcttaacacatgcaagtcgaacggtagcaggaagaaagcttgctttttttgctgacgagtggcggacgggtgagtaatgcttgggaatctggcttatggagggggataactgtgggaaactgcagctaataccgcgtataatcgagagatgaaagggtgggaccgtaaggccacttgccataagatgagcccaagtgggattaggtagttggtggggtaaaggcctaccaagcctgcgatctctagctggtctgagaggatggccagccacactgggactgagacacggcccagactcctacgggaggcagcagtggggaatattgcgcaatggggggaaccctgacgcagccatgccgcgtgaatgaagaaggccttcgggttgtaaagttctttcggtgatgaggaaggggtattattgaatagataatatcattgacgttaattacagaagaagcaccggctaactccgtgccagcagccgcggtaatacggagggtgcgagcgttaatcggaataactgggcgtaaagggcacgcaggcggacttttaagtgagatgtgaaatccccgagcttaacttgggaactgcatttcagactgggagtctagagtactttagggaggggtagaattccacgtgtagcggtgaaatgcgtagagatgtggaggaataccgaaggcgaaggcagccccttgggaatgtactgacgctcatgtgcgaaagcgtggggagcaaacaggattagataccctggtagtccacgctgtaaacgctgtcgatttggggattggactttatgtttggtgcccgaagctaacgtgataaatcgaccgcctggggagtacggccgcaaggttaaaactcaaatgaattgacgggggcccgcacaagcggtggagcatgtggtttaattcgatgcaacgcgaagaaccttacctactcttgacatcctaagaagagctcagagatgagcttgtgccttcgggaacttagagacaggtgctgcatggctgtcgtcagctcgtgttgtgaaatgttgggttaagtcccgcaacgagcgcaacccttatcctttgttgccagcgatttggtcgggaactcaaaggagactgccagtgacaaactggaggaaggtggggatgacgtcaagtcatcatggcccttacgagtagggctacacacgtgctacaatggtgcatacagagggcggcgagacggcgacgttgagcgaatctcagaaagtgcatctaagtccggattggagtctgcaactcgactccatgaagtcggaatcgctagtaatcgcaaatcagaatgttgcggtgaatacgttcccgggcctt

SEQ ID NO: 2497 - DNA, 1464 bp, Pasteurella dagmatis
attgaacgctggcggcaggcttaacacatgcaagtcgaacggtagcaggaagaaagcttgctttctttgctgacgagtggcggacgggtgagtaatgcttgggaatctggcttatggagggggataactgtgggaaactgcagctaataccgcgtagtatcgagagatgaaagggtgggaccttcgggccacctgccataagatgagcccaagtgggattaggtagttggtggggtaaaggcctaccaagccgacgatctctagctggtctgagaggatgaccagccacactgggactgagacacggcccagactcctacgggaggcagcagtggggaatattgcgcaatggggggaaccctgacgcagccatgccgcgtgaatgaagaaggccttcgggttgtaaagttctttcggtaatgaggaaggggtattattgaatagataatatcattgacgttaattacagaagaagcaccggctaactccgtgccagcagccgcggtaatacggagggtgcgagcgttaatcggaataactgggcgtaaagggcacgcaggcggacttttaagtgagatgtgaaatccccgagcttaacttgggaactgcatttcagactgggagtctagagtactttagggaggggtagaattccacgtgtagcggtgaaatgcgtagagatgtggaggaataccgaaggcgaaggcagccccttgggaatgtactgacgctcatgtgcgaaagcgtggggagcaaacaggattagataccctggtagtccacgctgtaaacgctgtcgatttggggattgtgctttatgcatggtgcccgaagctaacgtgataaatcgaccgcctggggagtacggccgcaaggttaaaactcaaatgaattgacgggggcccgcacaagcggtggagcatgtggtttaattcgatgcaacgcgaagaaccttacctactcttgacatccaaagaaggccgtagagatatggctgtgccttcgggaactttgagacaggtgctgcatggctgtcgtcagctcgtgttgtgaaatgttgggttaagtcccgcaacgagcgcaacccttatcctttgttgccagcgatttggtcgggaactcaaaggagactgccagtgacaaactggaggaaggtggggatgacgtcaagtcatcatggcccttacgagtagggctacacacgtgctacaatggtgcatacagagggcggcgagacggcgacgttgagcgaatctcagaaagtgcatctaagtccggattggagtctgcaactcgactccatgaagtcggaatcgctagtaatcgcaaatcagaatgttgcggtgaatacgttcccgggccttgtacacaccgcccgtcacaccatgggagtgggttgtaccagaagtagatagcttaaccttcgggagggcgtttaccacggtatgattcatgactggggtg

SEQ ID NO: 2498 - DNA, 1363 bp, Pasteurella langaaensis
  misc_feature (995)..(995): n is a, c, g, or t
attgaacgctggcggcaggcttaacacatgcaagtcgaacggtaacaggtgagtacttgtacttacgctgacgagtggcggacgggtgagtaatgcttgggaatctagcttatggagggggataactacgggaaactgtagctaataccgcgtagtatcggaagatgaaaggctgggaccgaaaggccagttgccataggatgagcccaagtgggattaggtagttggtagggtaaaggcctaccaagccgacgatctctagctggtctgagaggatgaccagccacactggaactgagacacggtccagactcctacgggaggcagcagtggggaatattgcacaatgggggaaaccctgatgcagccatgccgcgtgaatgaagaaggccttagggttgtaaagttctttcggtagagaggaaggcgaacttgtgaatagcaagtttgattgacgttacctacagaagaagcaccggctaactccgtgccagcagccgcggtaatacggagggtgcgagcgttaatcggaataactgggcgtaaagggcacgcaggcggttgattaagtgagatgtgaaagccccgagctcaacttgggaatagcatttcatactggtcaactagagtactttagggaggggtagaattccacgtgtagcggtgaaatgcgtagagatgtggaggaataccgaaggcgaaggcagccccttgggaatgtactgacgctcatgtgcgaaagcgtggggagcaaacaggattagataccctggtagtccacgctgtaaacgatgtcgatttgggggttgagcttaaagcttggcgcccgtagctaacgtgataaatcgaccgcctggggagtacggccgcaaggttaaaactcaaatgaattgacgggggcccgcacaagcggtggagcatgtggtttaattcgatgcaacgcgaagaaccttacctactcttgacatccagagaagacactagagatagtgttntgccttcgggagctctgagacaggtgctgcatggctgtcgtcagctcgtgttgtgaaatgttgggttaagtcccgcaacgagcgcaacccttatcctttgttgccagcatgtaaagatgggaactcaaaggagactgccagtgataaactggaggaaggtggggatgacgtcaagtcatcatggcccttacgagtagggctacacacgtgctacaatggtgcatacagagggcggcgaacctgcgagggtgagcgaatctcagaaagtgcatcgtagtccggattggagtctgcaactcgactccatgaagtcggaatcgctagtaatcgcaaatcagaatgttgcggtgaatacgttcccgggcctt

SEQ ID NO: 2499 - DNA, 1460 bp, Pasteurella mairii
  misc_feature (102)..(102): n is a, c, g, or t
  misc_feature (432)..(432): n is a, c, g, or t
  misc_feature (450)..(450): n is a, c, g, or t
  misc_feature (602)..(602): n is a, c, g, or t
  misc_feature (1063)..(1063): n is a, c, g, or t
  misc_feature (1384)..(1384): n is a, c, g, or t
attgaacgctggcggcaggcttaacacatgcaagtcgaacggtagcagggaagtgcttgcacttttgctgacgagtggcggacgggtgagtaatgcttgggnatctggcttatggagggggataacgacgggaaactgtcgctaataccgcgtagaatcgggagatgaaagtgtgggaccgtaaggccacatgccataagatgagcccaagtgggattaggtagttggtggggtaaaggcctaccaagcctgcgatctctagctggtctgagaggatggccagccacactggaactgagacacggtccagactcctacgggaggcagcagtggggaatattgcgcaatggggggaaccctgacgcagccatgccgcgtgaatgaagaaggccttcgggttgtaaagttctttcggtgatgaggaaggtggtngatttaatagattcactnattgacgttaatcacagaagaagcaccggctaactccgtgccagcagccgcggtaatacggggggtgcaagcgttaatcggaataactgggcgtaaagggcacgcaggcggacttttaagtgaggtgtgaaatccccgggcttaacctgggnatggcatttcagactgggggtctagagtattttagggaggggtagaattccacgtgtagcggtgaaatgcgtagagatgtggaggaataccgaaggcgaaggcagccccttggggggatactgacgctcaagtgcgaaagcgtggggagcaaacaggattagataccctggtagtccacgctgtaaacgatgtcgatttggggattgggctttaagtttggtgcccgtagctaacgtgataaatcgaccgcctggggagtacggccgcaaggttaaaactcaaatgaattgacgggggcccgcacaagcggtggagcatgtggtttaattcgatgcaacgcgaagaaccttacctactcttgacatccatagaagagctcagagatgagtttgtgccttcgggagctatgagacaggtgctgcatggctgtcgtcagctcgtgttgtgaaatgttgggttnagtcccgcaacgagcgcaacccttatcctttgttgccagcgattaggtcgggaactcaaaggagactgccggtgataaaccggaggaaggtggggatgacgtcaagtcatcatggcccttacgagtagggctacacacgtgctacaatggtgcatacagagagcgacgaggccgcgaggtggagtgaatctcagaaagtgcatctaagtccggattggagtctgcaactcgactccatgaagtcggaatcgctagtaatcgcggatcagaatgtcgcggtgaatacgttcccgggccttgtacacaccgcccgtcacaccntgggagtgggttgtaccagaagtagatagcttaaccgtaaggatggcgtttaccacggtatgattcatgactgggg

SEQ ID NO: 2500 - DNA, 1464 bp, Pasteurella multocida
attgaacgctggcggcaggcttaacacatgcaagtcgaacggtagcaggaagaaagcttgctttctttgctgacgagtggcggacgggtgagtaatgcttgggaatctggcttatggagggggataactgtgggaaactgcagctaataccgcgtattctctgaggaggaaagggtgggaccttagggccacctgccataagatgagcccaagtgggattaggtagttggtggggtaaaggcctaccaagcctgcgatctctagctggtctgagaggatgaccagccacactggaactgagacacggtccagactcctacgggaggcagcagtggggaatattgcgcaatggggggaaccctgacgcagccatgccgcgtgaatgaagaaggccttcgggttgtaaagttctttcggtaatgaggaagggatgttgttaaatagatagcatcattgacgttaattacagaagaagcaccggctaactccgtgccagcagccgcggtaatacggagggtgcgagcgttaatcggaataactgggcgtaaagggcacgcaggcggacttttaagtgagatgtgaaatccccgagcttaacttgggaactgcatttcagactgggagtctagagtactttagggaggggtagaattccacgtgtagcggtgaaatgcgtagagatgtggaggaataccgaaggcgaaggcagccccttgggaatgtactgacgctcatgtgcgaaagcgtggggagcaaacaggattagataccctggtagtccacgctgtaaacgctgtcgatttggggattgggctatatgcttggtgcccgaagctaacgtgataaatcgaccgcctggggagtacggccgcaaggttaaaactcaaatgaattgacgggggcccgcacaagcggtggagcatgtggtttaattcgatgcaacgcgaagaaccttacctactcttgacatcctaagaagagctcagagatgagtttgtgccttcgggaacttagagacaggtgctgcatggctgtcgtcagctcgtgttgtgaaatgttgggttaagtcccgcaacgagcgcaacccttatcctttgttgccagcgattcggtcgggaactcaaaggagactgccagtgacaaactggaggaaggtggggatgacgtcaagtcatcatggcccttacgagtagggctacacacgtgctacaatggtgcatacagagggcagcgagagtgcgagcttgagcgaatctcagaaagtgcatctaagtccggattggagtctgcaactcgactccatgaagtcggaatcgctagtaatcgcaaatcagaatgttgcggtgaatacgttcccgggccttgtacacaccgcccgtcacaccatgggagtgggttgtaccagaagtagatagcttaaccttcgggggggcgtttaccacggtatgattcatgactggggtg

SEQ ID NO: 2501 - DNA, 1470 bp, Pasteurella testudinis
  misc_feature (7)..(7): n is a, c, g, or t
  misc_feature (57)..(58): n is a, c, g, or t
  misc_feature (321)..(321): n is a, c, g, or t
  misc_feature (530)..(530): n is a, c, g, or t
  misc_feature (838)..(838): n is a, c, g, or t
  misc_feature (949)..(949): n is a, c, g, or t
  misc_feature (1189)..(1189): n is a, c, g, or t
attgaangctggcggcaggcttaacacatgcaagtcgagcggtaacggggggtagcnngctactctgccgacgagcggcggacgggtgagtaatgcttgggaatctgccttatggcgggggataactacgggaaactgtagctaataccgcgtaacatctttactttagggtagggattaaagtgtgggactttcgggccacacgccatgagatgagcccaagtgagattaggtagttggtgaggtaatggctcaccaagccgtcgatctctaactggtctgagaggatgaccagtcacactgggactgagacacggcccngactcctacgggaggcagcagtggggaatattgcgcaatgggggcaaccctgacgcagctatgccgcgtgaatgaagaaggccttcgggttgtaaagttctttcggtgatgaggaaggtgttgaagttaatagctttaacaattgacgttagtcacagaagaagcaccggctaactccgtgccagcagccgcggtaatacggagggtgngagcgttaatcggaataactgggcgtaaagggcacgcaggcggatagataagtgagatgtgaaatccccgagcttaacttgggaactgcatttcatactgtttatctagagttttgtagagaggggtagaattccacgtgtagcggtgaaatgcgtagagatgtggaggaataccggaggcgaaggcggccccttggacaaagactgacgctcatgtgcgaaagcgtggggagcaaacaggattagataccctggtagtccacgctgtaaacgatgtcgatttgggggttgggtgtatacctggctcncgtagctaacgcgttaaatcgaccgcctggggagtacggccgcaaggttaaaactcaaatgaattgacgggggcccgcacaagcggtggagcatgtggtttaattcgatgnaacgcgaagaaccttacctactcttgacatcctaagaagagctcagagatgagcttgtgccttcgggaacttagagacaggtgctgcatggctgtcgtcagctcgtgttgtgaaatgttgggttaagtcccgcaacgagcgcaacccctatcctttgttgccatcattaagttgggaactcaaaggagactgccggtgacaaaccggaggaaggtggggatgacgtcaagtcatcatggnccttacgagtagggctacacacgtgctacaatggcgtatacagagggaagcgagagtgcgagcttaagcaaatctcttaaagtgcgtcgtagtccggattggagtctgcaactcgactccatgaagtcggaatcgctagtaatcgcaaatcagaatgttgcggtgaatacgttcccgggccttgtacacaccgcccgtcacaccatgggagtgggttgtaccagaagtagatagcttaaccgagaggggggcgtttaccacggtatgattcatgactgggg

SEQ ID NO: 2502 - DNA, 1429 bp, Paucibacter toxinivorans
aacgctggcggcatgccttacacatgcaagtcgaacggcagcacgggagcatcctggtggcgagtggcgaacgggtgagtaatgtatcggaacgtgcccagttgtgggggataactacttgaaagagtggctaataccgcatacgacctgagggtgaaagcgggggatgcaaacctcgcgcaattggagcggccgatatcagattagctagttggcggggtaaaagcccaccaaggcgacgatctgtagctggtctgagaggacgaccagccacactgggactgagacacggcccagactcctacgggaggcagcagtggggaattttggacaatggacgcaagtctgatccagccatgccgcgtgcgggaagaaggccttcgggttgtaaaccgcttttgtcagggaagaaacggcctgggataataccttgggctaatgacggtacctgaagaataagcaccggctaactacgtgccagcagccgcggtaatacgtagggtgcaagcgttaatcggaattactgggcgtaaagcgtgcgcaggcggttatgcaagacagatgtgaaatccccgggctcaacctgggaactgcatttgtgactgcatagctagagtacggtagagggggatggaattccgcgtgtagcagtgaaatgcgtagatatgcggaggaacaccgatggcgaaggcaatcccctggacctgtactgacgctcatgcacgaaagcgtggggagcaaacaggattagataccctggtagtccacgccctaaacgatgtcaactggttgttgggagggtttcttctcagtaacgtagctaacgcgtgaagttgaccgcctggggagtacggccgcaaggttgaaactcaaaggaattgacggggacccgcacaagcggtggatgatgtggtttaattcgatgcaacgcgaaaaaccttacctacccttgacatgtcagagatcccgaagagatttgggagtgtcgaaagaaatctgaacacaggtgctgcatggccgtcgtcagctcgtgtcgtgagatgttgggttaagtcccgcaacgagcgcaacccttgtcattagttgctactagtgggcactctaatgagactgccggtgacaaaccggaggaaggtggggatgacgtcaggtcatcatggcccttatgggtagggctacacacgtcatacaatggccggtacagagggctgccaacccgcgagggggagctaatcccagaaaaccggtcgtagtccggatcgcagtctgcaactcgactgcgtgaagtcggaatcgctagtaatcgcggatcagttgccgcggtgaatacgttcccgggtcttgtacacaccgcccgtcacaccatgggagcgggttctgccagaagtagttagcctaaccgcaaggagggcgattaccacggcagggt

SEQ ID NO: 2503 - DNA, 1455 bp, Paucimonas lemoignei
  misc_feature (23)..(23): n is a, c, g, or t
  misc_feature (53)..(53): n is a, c, g, or t
  misc_feature (279)..(279): n is a, c, g, or t
attgaacgctggcggcatgcctnacacatgcaagtcgaacggcagcacgggtncttgcacctggtggcgagtggcgaacgggtgagtaatatatcggaacgtgcccaatagtgggggataacgtagcgaaagttacgctaataccgcatacgctctacggaggaaagtgggggatcgcaagacctcatgctattggagcggccgatatctgattagctagttggtggggtaatggcccaccaaggcgacgatcagtagctggtctgagaggacgaccanccacactgggactgagacacggcccagactcctacgggaggcagcagtggggaattttggacaatgggggcaaccctgatccagcaatgccgcgtgtgtgaagaaggccttcgggttgtaaagcacttttgtcaggaacgaaacggagctggctaatacctggctctaatgacggtacctgaagaataagcaccggctaactacgtgccagcagccgcggtaatacgtagggtgcgagcgttaatcggaattactgggcgtaaagcgtgcgcaggcggttgtgcaagacagaggtgaaatccccgagcttaacttgggaactgcctttgtgactgcatggctagagtgtgtcagaggggggtagaattccacgtgtagcagtgaaatgcgtagatatgtggaggaataccgatggcgaaggcagccccctgggataacactgacgctcatgcacgaaagcgtggggagcaaacaggattagataccctggtagtccacgccctaaacgatgtcaactagttgtcgggtcttaattgacttggtaacgcagctaacgcgtgaagttgaccgcctggggagtacggtcgcaagattaaaactcaaaggaattgacggggacccgcacaagcggtggatgatgtggattaattcgatgcaacgcgaaaaaccttacctacccttgacatgtacggaatccttcagagatggaggagtgctcgaaagagagccgtaacacaggtgctgcatggctgtcgtcagctcgtgtcgtgagatgttgggttaagtcccgcaacgagcgcaacccttgtcattagttgctacgaaagggcactctaatgagactgccggtgacaaaccggaggaaggtggggatgacgtcaagtcctcatggcccttatgggtagggcttcacacgtcatacaatggtacatacagagggctgccaacccgcgagggggagctaatcccagaaagtgtatcgtagtccggattgtagtctgcaactcgactacatgaagttggaatcgctagtaatcgcggatcagcatgtcgcggtgaatacgttcccgggtcttgtacacaccgcccgtcacaccatgggagcgggttttaccagaagtaggtagcttaaccgcaaggagggcgcttaccacggtaggattcgtgactggggtg

SEQ ID NO: 2504 - DNA, 1380 bp, Pectinatus cerevisiiphilus
  misc_feature (696)..(696): n is a, c, g, or t
  misc_feature (738)..(738): n is a, c, g, or t
  misc_feature (853)..(854): n is a, c, g, or t
  misc_feature (1364)..(1364): n is a, c, g, or t
taggcaacctgcctccaagatggggacaacatctcgaaaggggtgctaataccgaatgttgtaaagcgattgcataatggctttaccaaaggcggcttttagctgtcgcttggagatgggcctacgtctgattagctagttggtgcggtaacggcgcaccaaggcaacgatcagtagccggtctgagaggatggacggccacattgggactgagacacggcccaaactcctacgggaggcagcagtggggaatcttccgcaatgggcgaaagcctgacggagcaacgccgcgtgaacgaggaaggtcttcggatcgtaaagttctgttgcaggggacgaatggcagtagtgttaataccactattgaatgacggtaccctgttagaaagccacggctaactacgtgccagcagccgcggtaatacgtaggcggcaagcgttgtccggaattattgggcgtaaagggagcgcaggcggatgactaagcggatcttaaaagtgcggggctcaaccccgtgatgggattcgaactggtcatcttgagtgcaggagaggaaagcggaattcccagtgtagcggtgaaatgcgtagatattgggaagaacaccagtggcgaaggcggctttctggactgtaactgacgctgaggctcgaaagccagggtagcgaacgggattagataccccggtagtcctngccgtaaacgatggatactaggtgtagggggtattgaccctncctgtgccggagttaacgcaataagtatcccgcctggggagtacggccgcaaggctgaaactcaaaggaattgacgggggcccgcacaagcggtggagtatgtggtttaattcgnngcaacgcgaagaaccttaccagggcttgacattgattgacgtatgcagagatgcatattttctcttcggaggacaagaaaacaggtggtgcatggctgtcgtcagctcgtgtcgtgagatgttgggttaagtcccgcaacgagcgcaacccctatcatttgttgccagcacgtcaaggtgggaactcaaatgagactgccgcggataacgcggaggaaggcggggatgacgtcaagtcatcatgccccttacgtcctgggctacacacgtactacaatgggatacacagagggaagcgaaggagtgatctggagcggaacccaaaaaatatcccccagttcggattgcaggctgcaactcgcctgcatgaagtcggaatcgctagtaatcgcaggtcagcatactgcggtgaatacgttcccgggccttgtacacaccgcccgtcacaccacgaaagtcatccacacccgaagccggctaagggccgcaaggaaccgaccgtctaaggtnggggcgatgaccgggg

SEQ ID NO: 2505 - DNA, 1444 bp, Pedobacter africanus
gatgaacgctagcggcaggcctaatacatgcaagtcgaacgagattaaggtgcttgcaccttatgaaagtggcgcacgggtgcgtaacgcgtatgcaacctaccttaatcagggggatagcccgaagaaattcggattaacaccgcataaaatcacagtacagcattgtacaatgatcaaatatttataggattaagatgggcatgcgtgtcattagctagttggcggggtaacggcccaccaaggcgacgatgactaggggatctgagaggatggccccccacactggtactgagacacggaccagactcctacgggaggcagcagtaaggaatattggtcaatggagggaactctgaaccagccatgccgcgtgcaggaagacagccctctgggtcgtaaactgcttttattcgggaataaaccttgctacgtgtagcaagctgaatgtaccgaaggaataaggatcggctaactccgtgccagcagccgcggtaatacggaggatccaagcgttatccggatttattgggtttaaagggtgcgtaggcggcttattaagtcaggggtgaaagacggtggctcaaccatcgcagtgcccttgatactgatgagcttgaatacactagaggtaggcggaatgtgacaagtagcggtgaaatgcatagatatgtcacagaacaccgattgcgaaggcagcttactatggtgtgattgacgctgaggcacgaaagcgtggggatcaaacaggattagataccctggtagtccacgccctaaacgatgaatactcgctgttagcgatatacagttagcggctaagcgaaagcgttaagtattccacctggggagtacgcccgcaagggtgaaactcaaaggaattgacgggggcccgcacaagcggaggagcatgtggtttaattcgatgatacgcgaggaaccttacccgggcttgaaagttagtgaataatcaagagattgattagtgagcaatcacacgaaactaggtgctgcatggctgtcgtcagctcgtgccgtgaggtgttgggttaagtcccgcaacgagcgcaacccctatgtttagttgccagcacgttaaggtggggactctaaacagactgcctgtgcaaacagagaggaaggaggggacgacgtcaagtcatcatggcccttacgtccggggctacacacgtgctacaatggatggtacagagggcagcaagctggcaacagcaagcgaatctcaaaaagccattcacagttcggatagaggtctgcaactcgacctcttgaagttggattcgctagtaatcgcgtatcagcaatgacgcggtgaatacgttcccgggccttgtacacaccgcccgtcaagccatggaagttgggggtacctaaagtatgtaaccgcaaggagcgtcctagggtaaaaccgataactggggct

SEQ ID NO: 2506 - DNA, 1444 bp, Pedobacter luteus
gatgaacgctagcggcaggcctaatacatgcaagtcgaacgagattgaggagcttgctcttcatgaaagtggcgcacgggtgcgtaacgcgtatgcaacctaccttaatcagggggatagcctctcgaaagagagattaacaccgcataaaatcacaagctggcatcagcaaatgatcaaatatttataggattaagatgggcatgcgtgacattagctagttggtaaggtaacggcttaccaaggctacgatgtctaggggatctgagaggatgaccccccacactggtactgagacacggaccagactcctacgggaggcagcagtaaggaatattggtcaatggaggcaactctgaaccagccatgccgcgtgcaggaagacggccctacgggttgtaaactgcttttatacgggaataaacctctttacgtgtaaagagttgaatgtactgtaagaataaggatcggctaactccgtgccagcagccgcggtaatacggaggatccaagcgttatccggatttattgggtttaaagggtgcgtaggcggcctattaagtcaggggtgaaagacggtggctcaaccatcgcagtgcccttgatactgatgggcttgattacacttgaggtaggcggaatgtgacaagtagcggtgaaatgcatagatatgtcacagaacaccaattgcgaaggcagcttactaaggtgttaatgacgctgaggcacgaaagcgtggggatcaaacaggattagataccctggtagtccacgccctaaacgatgaatactcgatgttagcgatatacagttagcgtcaaagcgaaagcgttaagtattccacctggggagtacgcccgcaagggtgaaactcaaaggaattgacgggggcccgcacaagcggaggagcatgtggtttaattcgatgatacgcgaggaaccttacccgggcttgaaagttactgaagtatccagagatggatgcgtccgcaaggacaggaaactaggtgctgcatggctgtcgtcagctcgtgccgtgaggtgttgggttaagtcccgcaacgagcgcaacccctatgtttagttgccagcatgttatggtggggactctaaacagactgcctgtgcaaacagagaggaaggaggggacgacgtcaagtcatcatggcccttacgtccggggctacacacgtgctacaatggatggtacagagggccgctacctggtaacaggatgccaatctcaaaaagccattcacagttcggatagaggtctgcaactcgacctcttgaagttggattcgctagtaatcgcatatcagcaatgatgcggtgaatacgttcccgggccttgtacacaccgcccgtcaagccatggaagttgggggtacctgaagtacgtaaccgcaaggagcgtcctagggtaaaaccgataactggggct

SEQ ID NO: 2507 - DNA, 1444 bp, Pedobacter nutrimenti
gatgaacgctagcggcaggcctaatacatgcaagtcgaacgagattaagaggcttgcttcttatgaaagtggcgcacgggtgcgtaacgcgtatgcaacctaccttaatcagggggatagcccgaagaaattcggattaagaccgcataaaaacacaggatagcattatccaatgttcaaatatttataggattaagatgggcatgcgtgtcattagctagttggcggggtaacggcccaccaaggcgacgatgactaggggatctgagaggatgaccccccacactggtactgagacacggaccagactcctacgggaggcagcagtaaggaatattggtcaatggagggaactctgaaccagccatgccgcgtgcaggaagacagccctctgggtcgtaaactgcttttattcgggaataaacctttctacgtgtaggaagctgaatgtaccgaaggaataaggatcggctaactccgtgccagcagccgcggtaatacggaggatccaagcgttatccggatttattgggtttaaagggtgcgtaggcggcttattaagtcaggggtgaaagacggtggctcaaccatcgcagtgcccttgatactgatgagcttgaatacactagaggtaggcggaatgtgacaagtagcggtgaaatgcatagatatgtcacagaacaccgattgcgaaggcagcttactatggtgttattgacgctgaggcacgaaagcgtggggatcaaacaggattagataccctggtagtccacgccctaaacgatgaatactcgctgttagcgatatacagttagcggctaagcgaaagcgttaagtattccacctggggagtacgcccgcaagggtgaaactcaaaggaattgacgggggcccgcacaagcggaggagcatgtggtttaattcgatgatacgcgaggaaccttacccgggcttgaaagttagtgaatgatctagagatagatcagtgagcaatcacacgaaactaggtgctgcatggctgtcgtcagctcgtgccgtgaggtgttgggttaagtcccgcaacgagcgcaacccctatgtttagttgccagcacgttaaggtggggactctaaacagactgcctgtgcaaacagagaggaaggaggggacgacgtcaagtcatcatggcccttacgtccggggctacacacgtgctacaatggatggtacagagggcagcaagctggcaacagcaagcgaatctcaaaaagccattcacagttcggatagaggtctgcaactcgacctcttgaagttggattcgctagtaatcgcgtatcagcaatgacgcggtgaatacgttcccgggccttgtacacaccgcccgtcaagccatggaagttgggggtacctaaagtatgtaaccgtaaggagcgtcctagggtaaaaccgataactggggct

SEQ ID NO: 2508 - DNA, 1435 bp, Pedobacter suwonensis
tagcggcaggcctaatacatgcaagtcgaacgatactttccagcttgctggagaggaaagtggcgcacgggtgcgtaacgcgtatgcaacctaccttcatcagggggatagcccggagaaatccggattaataccgcataaaatcacaggatggcattatccaatgatcaaacatttatgggatggagatgggcatgcgtgtcattagctagttggcggggtaacggcccaccaaggcgacgatgactaggggatctgagaggatggccccccacactggtactgagacacggaccagactcctacgggaggcagcagtaaggaatattggtcaatggaggcaactctgaaccagccatgccgcgtgcaggaagactgccctatgggttgtaaactgcttttatccgggaataaacctaaatacgtgtatttagctgaatgtaccggaagaataaggatcggctaactccgtgccagcagccgcggtaatacggaggatccaagcgttatccggatttattgggtttaaagggtgcgtaggcggcctgttaagtcaggggtgaaagacggtagctcaactatcgcagtgcccttgatactgatgggcttgaatggactagaggtaggcggaatgagacaagtagcggtgaaatgcatagatatgtctcagaacaccgattgcgaaggcagcttactatggtcttattgacgctgaggcacgaaagcgtggggatcaaacaggattagataccctggtagtccacgccctaaacgatgaacactcgctgttggcgatacacagtcagcggctaagcgaaagcgttaagtgttccacctggggagtacgcccgcaagggtgaaactcaaaggaattgacgggggcccgcacaagcggaggagcatgtggtttaattcgatgatacgcgaggaaccttacccgggcttgaaagttagtgaagtgatcagagatggatcagtgagcaatcacacgaaactaggtgctgcatggctgtcgtcagctcgtgccgtgaggtgttgggttaagtcccgcaacgagcgcaacccctatgtttagttgccagcatgtcatggtggggactctaaacagactgcctgtgcaaacagagaggaaggaggggacgacgtcaagtcatcatggcccttacgtccggggctacacacgtgctacaatggacggtacagagggcagctacatagcaatatgatgcgaatctcacaaagccgttcacagttcggattggggtctgcaactcgaccccatgaagttggattcgctagtaatcgcgtatcagcaatgacgcggtgaatacgttcccgggccttgtacacaccgcccgtcaagccatggaagctgggggtacctaaagtatgtaaccgcaaggagcgtcctagggtaaaaccggtaactggggct

SEQ ID NO: 2509 - DNA, 1390 bp, Pelagicola litorisediminis
aacgaacgctggcggcaggcctaacacatgcaagtcgagcgcaccttcgggtgagcggcggacgggttagtaacgcgtgggaacgtgcccttctctaaggaatagccactggaaacggtgagtaataccttatacgcccttcgggggaaagatttatcggagaaggatcggcccgcgttagattagatagttggtggggtaatggcctaccaagtctacgatctatagctggttttagaggatgatcagcaacactgggactgagacacggcccagactcctacgggaggcagcagtggggaatcttagacaatgggcgaaagcctgatctagccatgccgcgtgagtgacgaaggccttagggtcgtaaagctctttcgccagggatgataatgacagtacctggtaaagaaaccccggctaactccgtgccagcagccgcggtaatacggagggggttagcgttgttcggaattactgggcgtaaagcgtacgtaggcggattggaaagtatggggtgaaatcccagggctcaaccctggaactgcctcataaactatcagtctagagttcgagagaggtgagtggaattccgagtgtagaggtgaaattcgtagatattcggaggaacaccagtggcgaaggcggctcactggctcgatactgacgctgaggtacgaaagtgtggggagcaaacaggattagataccctggtagtccacaccgtaaacgatgaatgccagtcgtcgggttgcatgcaattcggtgacacacctaacggattaagcattccgcctggggagtacggtcgcaagattaaaactcaaaggaattgacgggggcccgcacaagcggtggagcatgtggtttaattcgaagcaacgcgcagaaccttaccaacccttgacatactcgtcgtagtttccagagatggattcgtcagttcggctggacgagatacaggtgctgcatggctgtcgtcagctcgtgtcgtgagatgttcggttaagtccggcaacgagcgcaacccacatccctagttgccagcaggttaagctgggcactctatggaaactgcccgtgataagcgggaggaaggtgtggatgacgtcaagtcctcatggcccttacgggttgggctacacacgtgctacaatggcagtgacaatgggttaatcccaaaaaactgtctcagttcggattggggtctgcaactcgaccccatgaagtcggaatcgctagtaatcgcgtaacagcatgacgcggtgaatacgttcccgggccttgtacacaccgcccgtcacaccatgggagttgggtttacccgaaggccgtgcgccaaccttttaggagggggcagcggaccacggtgagctcagcgactggggtg

SEQ ID NO: 2510 - DNA, 1478 bp, Pelobacter acetylenicus
aacgaacgctggcggcgtgcttaacacatgcaagtcgaacgcgaaagggacttcggtcctgagtaaagtggcgcacgggtgagtaacacgtggataatctacccgatggaccgggataacacttcgaaaggggtgctaataccggataagcccacaggctccctggagcttgcgggaaaaggtggggaccttcgggcctgccgtcatcggatgagtccgcggcccattagctagttggtggggtaacggcccaccaaggcgacgatgggtagctggtctgagaggatgatcagccacactggaactgagacacggtccagactcctacgggaggcagcagtggggaattttgcgcaatgggggaaaccctgacgcagcaacgccgcgtgagtgatgaaggctttcgggtcgtaaagctctgtcagaggggaagaaactgttgtggtcgaacaggccgcaagactgacggtaccctcaaaggaagcaccggctaactccgtgccagcagccgcggtaatacggagggtgcaagcgttgttcggaattattgggcgtaaagcgcgtgtaggcggttcgttaagtctgatgtgaaagcccggggctcaaccccggaagtgcattggatactggcggacttgagtacgggagagggaagtggaattccgagtgtaggggtgaaatccgtagatattcggaggaacaccggtggcgaaggcggcttcctggaccgatactgacgctgagacgcgaaagcgtggggagcaaacaggattagataccctggtagtccacgccgtaaacgatgggtactaggtgtcgcgggtattgacccctgcggtgccgaagctaacgcattaagtaccccgcctggggagtacggccgcaaggctaaaactcaaaggaattgacgggggcccgcacaagcggtggagcatgtggtttaattcgacgcaacgcgcagaaccttacctgggcttgacatcccgatcgtactttctggaaacagagaggtcagttcggctggatcggtgacaggtgctgcatggctgtcgtcagctcgtgtcgtgagatgttgggttaagtcccgcaacgagcgcaacccttgtccttagttgccagcattgagttgggcactctaaggagactgccggtgttaaaccggaggaaggtggggatgacgtcaagtcctcatggcccttatgtccagggctacacacgtgctacaatggccggtacaaagggcagcaataccgaaaggtggagcgaatcccagaaagccggtctcagttcggattggagtctgcaactcgactccatgaagttggaatcgctagtaatcgcggatcagcatgccgcggtgaatacgttcccgggccttgtacacaccgcccgtcacaccacgggagttgattgtacctgaaatcggtgggctaaccttcggggggcagccgcttatggtatggtcggtaactggggtg

SEQ ID NO: 2511 - DNA, 1480 bp, Pelobacter carbinolicus
aacgaacgctggcggcgtgcttaacacatgcaagtcgaacgcgaaagtttccttcgggaagcgagtagagtggcgcacgggtgagtaacacgtggataatctgcccgatgacctgggataacacttcgaaagaggtgctaataccggataagcccacaggctcttcggagcatgcgggaaaaggtggggaccttcgggcctaccgtcatcggatgagtccgcggcccattagctagttggtggggtaacggcccaccaaggcgacgatgggtagctggtctgagaggatgatcagccacactggaactgagacacggtccagactcctacgggaggcagcagtggggaattttgcgcaatgggggaaaccctgacgcagcaacgccgcgtgagtgatgaaggctttcgggtcgtaaagctctgtcagaggggaagaaactatcgtggtcgaataggccccggtactgacggtaccctcaaaggaagcaccggctaactccgtgccagcagccgcggtaatacggagggtgcaagcgttgttcggaattattgggcgtaaagcgcgtgtaggcggtctgttaagtctgatgtgaaagccccgggctcaacccgggaagtgcattggatactggcagacttgagtacgggagaggaaagtggaattccgagtgtaggggtgaaatccgtagatattcggaggaacaccggtggcgaaggcggctttctggaccgatactgacgctgagacgcgaaagcgtggggagcaaacaggattagataccctggtagtccacgccgtaaacgatgggtactaggtgtcgcgggtattgacccctgcggtgccgaagctaacgcattaagtaccccgcctggggagtacggccgcaaggctaaaactcaaaggaattgacgggggcccgcacaagcggtggagcatgtggtttaattcgacgcaacgcgcagaaccttacctgggcttgacatcccgatcgtactttctggaaacagttaggtcagtacggctggatcggtgacaggtgctgcatggctgtcgtcagctcgtgtcgtgagatgttgggttaagtcccgcaacgagcgcaacccttgtccttagttgccagcattcagttgggcactctaaggagactgccggtgttaaaccggaggaaggtggggatgacgtcaagtcctcatggcccttatgtccagggctacacacgtgctacaatggccggtacaaagggcagcgaaaccgcaaggtttagcgaatcccaaaaagccggtctcagttcggattggagtctgcaactcgactccatgaagttggaatcgctagtaatcgcggatcagcatgccgcggtgaatacgttcccgggccttgtacacaccgcccgtcacaccacgggagttgattgtacctgaaatcggtgggctaaccttcgggaggcagccgcttatggtatggtcggtaactggggtg

SEQ ID NO: 2512 - DNA, 1480 bp, Pelobacter propionicus
aacgaacgctggcggcgtgcctaacacatgcaagtcgaacgggattaaggggcttgctccttaatctagtggcgcacgggtgagtaacgcgtagataatctgcctgatgatcaggaataacacttcgaaagaggtgctaatacctgataagcccacgacggctttggtcgttgcgggaaaagggggggaccatttggccttctgtcatcagatgagtctgcgtaccattagctagttggtagggtaaaggcctaccaaggcgacgatggttagctggtctgagaggatgatcagccacactggaactgagacacggtccagactcctacgggaggcagcagtggggaattttgcgcaatgggcgaaagcctgacgcagcaacgccgcgtgagtgatgaaggctttcgggtcgtaaagctctgtcaaggggaaagaagtgtattgtggttaatacccatggtacttgacggtacccctgaaggaagcaccggctaactccgtgccagcagccgcggtaatacggggggtgcaagcgttgttcggaattattgggcgtaaagcgcgtgtaggcggtttgttaagtctgatgtgaaagccctgggctcaacccaggaagtgcattggatactggcagacttgaatacgggagagggtagtggaattcctggtgtaggagtgaaatccgtagatatcaggaggaacaccggtggcgaaggcggctacctggaccgatattgacgctgagacgcgaaagcgtgggtagcaaacaggattagataccctggtagtccacgccgtaaacgatgagtactaggtgttgcgggtattgacccctgcagtgccgcagctaacgcattaagtactccgcctgggaagtacggtcgcaagactaaaactcaaaggaattgacgggggcccgcacaagcggtggagcatgtggtttaattcgacgcaacgcgcagaaccttacctgggcttgacatccacggaaccctcccgaaacggaggggtgcccttcggggagccgtgagacaggtgctgcatggctgtcgtcagctcgtgtcgtgagatgttgggttaagtcccgcaacgagcgcaacccctatcctcagttgccatcattaagttgggcactctgtggagactgccggtgtcaaaccggaggaaggtggggatgacgtcaagtcctcatggcccttatgtccagggctacacacgtgctacaatggccggtacaaagagtagcgaagccgcgaggttgagccaatctcataaagccggtctcagttcggattggagtctgcaactcgactccatgaagttggaatcgctagtaatcgcggatcagcatgccgcggtgaatacgttcccgggccttgtacacaccgcccgtcacaccacgggagtcgattggtcccgaagtgcgtgagctaacccgcaagggaggcagcgtcctaaggaatggtcggtgactggggtg

SEQ ID NO: 2513 - DNA, 1494 bp, Pelodictyon luteolum
agagtttgatcctggctcaggacgaacgctggcggcgtgcctaacacatgcaagtcaaaggaaagcggcttcggccgggagtacttggcgcaagggtgagtaaggcataggtaatctgccctttggactgggataacctcgagaaatcgaggacaataccagatgatgcagcgggaccgcatggtcatgttgttaaagatttatcgccaagggatgagcctatgttccatcaggtagttggtagggtaacggcctaccaagcctacgacggatagctggtctgagaggatgatcagccacattggaactgagacacggtccagactcctacgggaggcagcagtgaggaatattgcgcaatgggcgaaagcctgacgcagcaacgccgcgtggatgatgaagttcttcggaatgtaaagtccttttgcaggggacgaacatgtcggtataccgacactgacggtaccttgcgaataagccacggctaactctgtgccagcagccgcggtgatacaggggtggcaagcgttgtccggatttactgggtgtaaagggtgcgcaggcggacttataagtcgggggttaaatccatgtgcttaacacatgcatggcttccgatactgtaagtctagagtctcggagaggaagatggaatttccggtgtaacggtggaatgtgtagatatcggaaagaacaccagtggcgaaggcagtcttctggccgagtactgacgctcaggcacgaaagcgtggggagcaaacaggattagataccctggtagtccacgccgtaaacgatgaatactagatgttggtcatattgatcagtgtcgcagctaacgcgttaagtattccacctgggaagtacgctcgcaagagtgaaactcaaaggaattgacgggggcccgcacaagcggtggatcatgtggtttaattcgatgcaacgcgaagaaccttacctaggcttgatattgcgactaaacctcctgaaagggagggtccttcggggagtcgtaacaggtgctgcatggctgtcgtcagctcgtgtcgtgagatgttgggttaagtcccgcaacgagcgcaacccctacaattagttactaacaggttaagctgaggactctaattgaactgcctacgcaagtagtgaggaaggaggggatgacgtcaagtcctcatggcccttacgcctagggccacacacgtgatacaatggcagctacagagggcaaagccgcgaggtggaggaaatcccttaaaagctgtctcagtccggatcggagtctgcaactcgactccgtgaagttggaatcgctagtaatcgcagatcagcatgctgcggtgaatgtgttcccgggccttgtacacaccgcccgtcaagtcatggaagtcaggagtacccaaagacgctcgcgcgtttaaggtaagactggtaactgggactaagtcgtaacaaggtagccgtaccggaaggtgcggctggatcacctccttt

SEQ ID NO: 2514 - DNA, 1495 bp, Pelodictyon phaeoclathratiforme
agagtttgatcctggctcaggacgaacgctggcggcgtgcctaacacatgcaagtcaaaggaaagcagcttcggctgggagtacttggcgcaagggtgagtaacgtataggtaatctgccctttggactggaataaccccgagaaatcggggacaataccagatgaagcagcgacaatcgcatggttgttctgccaaagatttatcgccaaaggatgaacctatatcccatcaggtagttggtaaggtaacggcttaccaagcctacgacgggtagctggtctgagaggatgatcagccacattggaactgagacacggtccagactcctacgggaggcagcagtgaggaatattgcgcaatgggcgaaagcctgacgcagcaacgccgcgtggatgatgaagttcttcggaatgtaaagtccttttgtagaggaagaatatcccggtttaccgggactgacggtactctgcgaataagccacggctaactctgtgccagcagccgcggtgatacaggggtggcaagcgttgtccggatttactgggtgtaaagggtgcgcaggcgggccgataagtcgggggttaaatccatgtgcttaacacatgcatggcttccgatactgtcggcctagagtctcgaagaggaagatggaatttccggtgtaacggtggaatgtgtagatatcggaaagaacaccagtggcgaaggcagtcttctggtcgagcactgacgctcaggcacgaaagcgtggggagcaaacaggattagataccctggtagtccacgccgtaaacgatgaatactagatgttggtcatattgatcagtgtcgcagctaacgcgttaagtattccacctgggaagtacgcccgcaagggtgaaactcaaaggaattgacgggggcccgcacaagcggtggatcatgtggtttaattcgatgcaacgcgaagaaccttacctgggcttgatatggcgactaaactcattgaaagatgaggtgcttcggcgagtcgtcacaggtgctgcatggctgtcgtcagctcgtgtcgtgagatgttgggttaagtcccgcaacgagcgcaacccctacaattagttactaacaggttaagctgaggactctaattgaactgcctacgcaagtagtgaggaaggaggggatgacgtcaagtcctcatggcccttacgcccagggccacacacgtgatacaatggtagctacagagggcaaagccgcgaggcagagttaatcccttaaaagctatctcagtccggatcggagtctgcaactcgactccgtgaagttggaatcgctagtaatcgcagatcagcatgctgcggtgaatgtgttcccgggccttgtacacaccgcccgtcaagtcatggaagtcaggagtacccaaagacactcgcgtgtttaaggtaagactggtaactgggactaagtcgtaacaaggtagccgtaccggaaggtgcggctggatcacctccttt

SEQ ID NO: 2515 - DNA, 1446 bp, Pelomonas puraquae
attgaacgctggcggcatgccttacacatgcaagtcgaacggtaacaggttaagctgacgagtggcgaacgggtgagtaatgtatcggaacgtgcccagtcgtgggggataactgctcgaaagagcagctaataccgcatacgacctgagggtgaaagcgggggatcgcaagacctcgcgcgattggagcggccgatatcagattaggtagttggtggggtaaaggctcaccaagccaacgatctgtagctggtctgagaggacgaccagccacactgggactgagacacggcccagactcctacgggaggcagcagtggggaattttggacaatgggcgcaagcctgatccagccatgccgcgtgcgggaagaaggccttcgggttgtaaaccgcttttgtcagggaagaaaaggttctggctaatacctgggactcatgacggtacctgaagaataagcaccggctaactacgtgccagcagccgcggtaatacgtagggtgcaagcgttaatcggaattactgggcgtaaagcgtgcgcaggcggttatgcaagacagaggtgaaatccccgggctcaacctgggaactgcctttgtgactgcatagctagagtgcggcagagggggatggaattccgcgtgtagcagtgaaatgcgtagatatgcggaggaacaccgatggcgaaggcaatcccctgggcctgcactgacgctcatgcacgaaagcgtggggagcaaacaggattagataccctggtagtccacgccctaaacgatgtcaactggttgttgggagggtttcttctcagtaacgtagctaacgcgtgaagttgaccgcctggggagtacggccgcaaggttgaaactcaaaggaattgacggggacccgcacaagcggtggatgatgtggtttaattcgatgcaacgcgaaaaaccttacctacccttgacatgtctggaatcctgaagagatttgggagtgctcgaaagagagccagaacacaggtgctgcatggccgtcgtcagctcgtgtcgtgagatgttgggttaagtcccgcaacgagcgcaacccttgtcattagttgctacgaaagggcactctaatgagactgccggtgacaaaccggaggaaggtggggatgacgtcaggtcatcatggcccttatgggtagggctacacacgtcatacaatggccgggacagagggctgccaacccgcgagggggagctaatcccagaaacccggtcgtagtccggatcgtagtctgcaactcgactgcgtgaagtcggaatcgctagtaatcgcggatcagcttgccgcggtgaatacgttcccgggtcttgtacacaccgcccgtcacaccatgggagcgggttctgccagaagtagttagcctaaccgcaaggagggcgattaccacggcagggttcgtgactggggtg

SEQ ID NO: 2516 - DNA, 1446 bp, Pelomonas saccharophila
  misc_feature (180)..(181): n is a, c, g, or t
attgaacgctggcggcatgccttacacatgcaagtcgaacggtaacaggttaagctgacgagtggcgaacgggtgagtaatatatcggaacgtgcccagtcgtgggggataactgctcgaaagagcagctaataccgcatacgacctgagggtgaaagcgggggatcgcaagacctcgcnngattggagcggccgatatcagattaggtagttggtggggtaaaggcccaccaagccaacgatctgtagctggtctgagaggacgaccagccacactgggactgagacacggcccagactcctacgggaggcagcagtggggaattttggacaatgggcgcaagcctgatccagccatgccgcgtgcgggaagaaggccttcgggttgtaaaccgcttttgtcagggaagaaaaggttctggttaatacctgggactcatgacggtacctgaagaataagcaccggctaactacgtgccagcagccgcggtaatacgtagggtgcaagcgttaatcggaattactgggcgtaaagcgtgcgcaggcggttatgcaagacagaggtgaaatccccgggctcaacctgggaactgcctttgtgactgcatagctagagtacggtagagggggatggaattccgcgtgtagcagtgaaatgcgtagatatgcggaggaacaccgatggcgaaggcaatcccctggacctgtactgacgctcatgcacgaaagcgtggggagcaaacaggattagataccctggtagtccacgccctaaacgatgtcaactggttgttgggagggtttcttctcagtaacgtagctaacgcgtgaagttgaccgcctggggagtacggccgcaaggttgaaactcaaaggaattgacggggacccgcacaagcggtggatgatgtggtttaattcgatgcaacgcgaaaaaccttacctacccttgacatgccaggaatcctgaagagatttgggagtgctcgaaagagaacctggacacaggtgctgcatggccgtcgtcagctcgtgtcgtgagatgttgggttaagtcccgcaacgagcgcaacccttgtcattagttgctacgaaagggcactctaatgagactgccggtgacaaaccggaggaaggtggggatgacgtcaggtcatcatggcccttatgggtagggctacacacgtcatacaatggccgggacagagggctgccaacccgcgagggggagctaatcccagaaacccggtcgtagtccggatcgtagtctgcaactcgactgcgtgaagtcggaatcgctagtaatcgcggatcagcttgccgcggtgaatacgttcccgggtcttgtacacaccgcccgtcacaccatgggagcgggttctgccagaagtagttagcctaaccgcaaggagggcgattaccacggcagggttcgtgactggggtg

SEQ ID NO: 2517 - DNA, 1417 bp, Pelosinus fermentans
agtggcgaacgggtgagtaacgcgtagacaacctaccttctagctggggacaacactgcgaaagtggtgctaataccgaatgttgtattttgagtgcatacttaaaatactaaaggtggcctctatttataagctatcactagaagatgggtctgcgtctgattagctagttggtgaggtaatggctcaccaaggcgacgatcagtagccggtctgagaggatgaacggccacactgggactgagacacggcccagactcctacgggaggcagcagtggggaatcttccgcaatggacgaaagtctgacggagcaacgccgcgtgagtgaagaaggttttcggatcgtaaaactctgttttcagggacgaatgtgtggattgtaaataatggttcataatgacggtacctgacaagaaagccacggctaactacgtgccagcagccgcggtaatacgtaggtggcaagcgttgtccggaattattgggcgtaaagcgcgcgcaggtgggataatcagtctgatgttaaagttcggggcttaaccccgtgaagcattggatactgttattcttgagtgcaggagaggaaagtggaattcctagtgtagcggtgaaatgcgtagatattaggaggaacaccagtggcgaaggcgactttctggactgtgtctgacactgaggcgcgaaagccagggtagtgaacgggattagataccccggtaatcctggccgtaaacgatgggtactaggtgttgggggtatcgacccctccagtgccggagttaacgcaataagtaccccgcctggggagtacggccgcaaggttgaaactcaaaggaattgacgggggcccgcacaagcggtggagtatgtggtttaattcgacgcaacgcgaagaaccttaccaaggcttgacatcgtctgatgatcctagagataggaagttcttcttcggaagacagatagacaggtggtgcatggctgtcgtcagctcgtgtcgtgagatgttgggttaagtcccgcaacgagcgcaacccttatcctatgttgccagcacgtaaaggtgggaactcatgggagactgccgtggataacacggaggaaggtggggatgacgtcaagtcatcatgccccttatgtcttgggctacacacgtactacaatgggcttaaatagagggtagcgaagccgcgaggtgaagccaaacccaaaaacaagctctcagttcggattgcaggctgcaactcgcctgcatgaagtcggaatcgctagtaatcgcagatcagcatgctgcggtgaatacgttcccgggccttgtacacaccgcccgtcacaccacgaaagttgagagcacccgaagccggtgaggtaaccagcaatggaaccagccgtcgaaggtgagatcagtgattggggtg

SEQ ID NO: 2518 - DNA, 1479 bp, Pelosinus propionicus
gacgaacgctggcggcgtgcctaacacatgcaagtcgaacggagattttagcaataaaatcttagtggcgaacgggtgagtaacgcgtagacaacctgccttctagctggggacaacaccgcgaaagtggtgctaataccgaatgttgtattttgagtgcatgcttgaaatactaaaggtggcctctatttataagctatcactagaagatgggtctgcgtctgattagctagttggtgaggtaatggctcaccaaggcgacgatcagtagccggtctgagaggatgaacggccacactgggactgagacacggcccagactcctacgggaggcagcagtggggaatcttccgcaatggacgaaagtctgacggagcaacgccgcgtgagtgaagaaggttttcggatcgtaaaactctgttttcagggacgaatgtgtggattgtaaataatgattcataatgacggtacctgacaagaaagccacggctaactacgtgccagcagccgcggtaatacgtaggtggcaagcgttgtccggaattattgggcgtaaagcgcgcgcaggtgggataatcagtctgatgttaaagttcggggcttaaccccgtgaagcattggatactgttattcttgagtgcaggagaggaaagtggaattcctagtgtagcggtgaaatgcgtagatattaggaggaacaccagtggcgaaggcgactttctggactgtgtctgacactgaggcgcgaaagccagggtagtgaacgggattagataccccggtaatcctggccgtaaacgatgggtactaggtgttgggggtatcgacccctccagtgccggagttaacgcaataagtaccccgcctggggagtacggccgcaaggttgaaactcaaaggaattgacgggggcccgcacaagcggtggagtatgtggtttaattcgacgcaacgcgaagaaccttaccaaggcttgacatcgtctgatgactctagagatagagagttctccttcgggagacagatagacaggtggtgcatggctgtcgtcagctcgtgtcgtgagatgttgggttaagtcccgcaacgagcgcaacccttatcctatgttgccagcacgtaatggtgggaactcatgggagactgccgtggataacacggagaaggtggggatgacgtcaagtcatcatgccccttatgtcttgggctacacacgtactacaatgggcttaaatagagggtagcgaagccgcgaggtgaagccaaacccaaaaacaagctctcagttcggattgcaggctgcaactcgcctgcatgaagtcggaatcgctagtaatcgcagatcagcatgctgcggtgaatacgttcccgggccttgtacacaccgcccgtcacaccacgaaagttgagagcacccgaagccggtgaggtaaccagcaatggaaccagccgtcgaaggtgagatcagtgattggggtg

SEQ ID NO: 2519 - DNA, 1467 bp, Pelotomaculum propionicicum
gacgaacgctggcggcgtgcttaacacatgcaagtcgaacggtccagcactcaacttagtgctcataagatatagagttttaattagaggaagcgatatatctggtgagtagcaagttgagtgctggatagtggcggacgggtgagtaacgcgtggataacctgcctatatgaccgggacaacaccgggaaactggtgctaataccggatacgctcgcggaggcacatgcttttgtgaggaaaggagcaatccgcatatagatgggtccgcgtcccattagctagttggcggtgtaaaagaccaccaaggcgacgatgggtagccggcctgagagggtggacggccacactggaactgagacacggtccagactcctacgggaggcagcagtggggaatcttccgcaatgggcgcaagcctgacggagcaacgccgcgtgagtgaagaaggctttcgggttgtaaaactctgtcttcagggaagaagaaagtgacggtacctgaggaggaagccccggctaactacgtgccagcagccgcggtaaaacgtagggggcgagcgttgtccggaattactgggcgtaaagggcgcgtaggcggtttcttaagtcagaggtgaaaactaccggcttaaccggtagcctgcctttgaaactggggaacttgagggcaggagaggggagtggaattcccagtgtagcggtgaaatgcgtagatattgggaggaacaccagtggcgaaggcggctctctggcctgtttctgacgctgaggcgcgaaagcgtggggagcaaacgggattagataccccggtagtccacgccgtaaacgatgggtgctaggtgtaggaggtatcgaccccttctgtgccgtagttaacacaataagcaccccgcctggggagtacggccgcaaggttgaaactcaaaggaattgacgggggcccgcacaagcggtggagcatgtggttaattcgacgcaacgcgaagaaccttaccagggcttgacatcccctgacagtcattgaaagatggttttccagcttcggttggacagggagacaggtggtgcatggttgtcgtcagctcgtgtcgtgagatgttgggttaagtcccgcaacgagcgcaacccttacgtttagttgctaacgtgtaaagatgagcactctagacgaactgccgttgacaaaacggaggaaggtggggatgacgtcaaatcatcatgccccttatgtcctgggctacacacgtgctacaatggccggtacaaagggaagcgaagccgcgaggcggagcaaatccgataaaagccggtctcagttcggattgcaggctgcaattcgcctgcatgaagtcggaatcgctagtaatcgcaggtcagcatactgcggtgaatacgttcccgggccttgtacacaccgcccgtcacaccacgaaagctgacaacacccgaagccggtgagctaacc

SEQ ID NO: 2520 - DNA, 1358 bp, Pelotomaculum schinkii
  misc_feature (173)..(173): n is a, c, g, or t
  misc_feature (1065)..(1065): n is a, c, g, or t
  misc_feature (1142)..(1142): n is a, c, g, or t
  misc_feature (1204)..(1204): n is a, c, g, or t
  misc_feature (1317)..(1317): n is a, c, g, or t
  misc_feature (1327)..(1327): n is a, c, g, or t
tggataacctgccttaacgaccgggataacgccgggaaactggcgctaataccggatacgctcaagggaacacatgtttttttaaggaaaggagcaatccgcattaagatgggtccgcgtcccattagctggttggaggtgtaagagacccccaaggcgacgatgggtagccnggctgagagggtggacggccacactggaactgagacacggtccagactcctacgggaggcagcagtggggaatcttccgcaatgggcgaaagcctgacggagcaacgccgcgtggatgaagaaggccttcgggttgtaaaattctgtcttcagggaagaaaaaaatgacggtacctgaggaggaagccccggctaactacgtgccagcagccgcggtaaaacgtagggggcgagcgttgtccggaattactgggcgtaaagggcgcgtaggcggtttcttaagtctcaggtgaaaactatcggctcaaccggtagcgtgcctgagaaactgggggacttgagggcaggagaggggagtggaattcccagtgtagcggtgaaatgcgtagatattgggaggaacaccagtggcgaaggcggctctctggcctgttgctgacgctgaggcgcgaaagcgtggggagcgaacgggattagataccccggtagtccacgccgtaaacgatgggtgctaggtgtaggaggtatcgaccccttctgtgccgtagttaacacaataagcaccccgcctggggagtacggccgcaaggttgaaactcaaaggaattgacgggggcccgcacaagcggtggagcatgtggtttaattcgacgcaacgcgaagaaccttaccagggtttgacatcccctgatgactgtggaaacacagagttttgccttcgggtaaacagggagacaggtggtgcatggttgtcgtcagctcgtgtcgtgagatgttgggttaagtcccgcaacgagcgcaacccctacgtttagttgctaacgcgtgaaggcgagcactctagaggaactgccgttgacaaaacggaggaaggtggggatgacgtcaaatnatcatgccccttatgtcctgggctacacacgtgctacaatggccggtacaaagggaagcgaagccgcgaggcggagnaaatcccaaaaagccggtctcagttcggattgcaggctgcaattcgcctgcatgaagtcggnatcgctagtaatcgcaggtcagcatactgcggtgaatacgttcccgggccttgtacacaccgcccgtcacaccacgaaagctgacaacacccgaagccggtgagctaaccttnaacaggagcngccgtcgaaggtggggttggtgattggggtg

SEQ ID NO: 2521 - DNA, 1523 bp, Pelotomaculum thermopropionicum
gacgaacgctggcggcgtgcctaacacatgcaagtcgagcggttcggcactcagccactagtggtcagtagttgctatgagttttggcaatagctgaggcaagggagcagcaactggccagtagggctgagtgccggatagcggcggacgggtgagtaacgcgtggataacctgcctgtcagaccgggataacaccgggaaactggtgctaataccggatacgttcaccggggcgcatgctttggtgaagaaaggggcaacccactgacagatgggtccgcgtcccattagctagttggcggtgtaacggaccaccaaggcgacgatgggtagccggcctgagagggtggacggccacactggaactgagacacggtccagactcctacgggaggcagcagtggggaatcttccgcaatgggcgaaagcctgacggagcaacgccgcgtgagcgaagaaggccttcgggttgtaaagctctgtcttcagggacgaaggaagtgacggtacctgaggaggaagccccggctaactacgtgccagcagccgcggtaaaacgtagggggcgagcgttgtccggaattactgggcgtaaagggcgcgtaggcggttccttaagtcaggggtgaaaactgtcggcttaaccggcagcctgcctttgaaactgagggacttgagggcaggagaggggagtggaattcccggtgtagcggtgaaatgcgtagatatcgggaggaacaccagtggcgaaggcggctctctggcctgtttctgacgctgaggcgcgaaagcgtggggagcgaacgggattagataccccggtagtccacgccgtaaacgatgggtgctaggtgtaggaggtatcgaccccttctgtgccgtagttaacacaataagcaccccgcctggggagtacggccgcaaggttgaaactcaaaggaattgacgggggcccgcacaagcggtggagcatgtggtttaattcgacgcaacgcgaagaaccttaccagggcttgacatcccctgaccgctgtggaaacacagttttctgctttcgggcagacagggagacaggtggtgcatggttgtcgtcagctcgtgtcgtgagatgttgggttaagtcccgcaacgagcgcaaccctcacgtttagttgccagcgggtagagccgggcactctaaacgaactgccgttgacaaaacggaggaaggtggggatgacgtcaaatcatcatgccccttatgtcctgggccacacacgtgctacaatggccggtacagagggaggcgaagccgtgaggcggagcaaatcccaaaaagccggtctcagttcggattgcaggctgaaattcgcctgcatgaagtcggaatcgctagtaatcgcaggtcagcatactgcggtgaatacgttcccgggccttgtacacaccgcccgtcacaccacgaaagctgacaacacccgaagccggtgagctaaccgcgaaagcggaggcagccgtcgaaggtggggttggtgattggggtg

SEQ ID NO: 2522 - DNA, 1450 bp, Peptoclostridium acidaminophilum
gatgaacgctggcggcgtgcttaacacatgcaagtcgagcgaacaaagcgggagggagtcttcggacgaagccccgctgcgtgagcggcggacgggtgagtaacacgtgggcaacctgccctatgcacagggataacgcaccgaaaggtgtgctaataccggataaagcgagatgtccgcatggacgactcgccaaagcttttgcggcataggatgggcccgcgtcccattagctagttggtgaggtaacggctcaccaaggctgcgatgggtagccgacctgagagggtgatcggccacactggaactgagacacggtccagactcctacgggaggcagcagtggggaatattgcacaatgggcgaaagcctgatgcagcaacgccgcgtgagcgatgaaggccttcgggtcgtaaagctctgtcccaagggaagataatgacggtaccttgggaggaagccccggctaactacgtgccagcagccgcggtaatacgtagggggcaagcgttatccggaatcactgggcgtaaagggtgcgtaggcggtcttgcaagccagaggtgaaaggctatggctcaaccatagtgagcctttggaactgccggacttgagtacaggagaggaaagtggaattcctagtgtagcggtgaaatgcgtagatattaggaggaacaccagtggcgaaggcgactttctggactgttactgacgctgaggcacgaaagcgtggggagcgaacaggattagataccctggtagtccacgccgtaaacgatgagtgctaggtgtcgggggtcaaacctcggtgccgcagctaacgcattaagcactccgcctggggagtacgctcgcaagagtaaaactcaaaggaattgacggggacccgcacaagcagcggagcatgtggtttaattcgaagcaacgcgaagaaccttacctggacttgacatccctttgaccgcttcgtaacggaagctttctcttcggagacaaaggtgacaggtggtgcatggttgtcgtcagctcgtgtcgtgagatgttgggttaagtcccgcaacgagcgcaacccctatctttagttgccagcacctagggtgggcactctagagagactgccgaggacaactcggaggaaggtggggatgacgtcaaatcatcatgccccttatgttcagggctacacacgtgctacaatgggcggtacaacgggttgcgagctcgcgagagcaagccaatcccttaaagccgttctcagttcggattgcaggctgaaactcgcctgcatgaagtcggagttgctagtaatcgcggatcagaatgccgcggtgaatgcgttcccgggtcttgtacacaccgcccgtcacaccatgggagtcgggggcgcccgaagtcagctgtccaaccgcaagggggaggctgccgaaggtgaaactgatgactggggtg

SEQ ID NO: 2523 - DNA, 1449 bp, Peptoclostridium litorale
gatgaacgctggcggcgtgcttaacacatgcaagtcgagcgaacaaagcgatgtgaagccttcgggtggatcatcgcggcgtgagcggcggacgggtgagtaacacgtgggtaacctgccctgtacactgggataacgcaccgaaaggtgtgctaataccggataaagtgaacctttcgcatggaaggatcaccaaagctccggcggtacaggatggacccgcgtcccattagctagttggtgaggtaacggctcaccaaggcgacgatgggtagccgacctgagagggtgatcggccacactggaactgagacacggtccagactcctacgggaggcagcagtggggaatattgcacaatgggcgaaagcctgatgcagcaacgccgcgtgagcgatgaaggccttcgggtcgtaaagctctgtcctaagggaagataatgacggtaccttaggaggaagccccggctaactacgtgccagcagccgcggtaatacgtagggggcaagcgttatccggaatcactgggcgtaaagggtgcgtaggcggctgataaagtccgaggtgaaaggctacggcttaaccgtagtaagccttggaaacttatcagcttgagtacaggagaggaaagtggaattcctagtgtagcggtgaaatgcgtagatattaggaggaacaccagtggcgaaggcgactttctggactgttactgacgctgaggcacgaaagcgtggggagcgaacaggattagataccctggtagtccacgccgtaaacgatgagtgctaggtgtcgggggtcgaacctcggtgccgcagctaacgcattaagcactccgcctggggagtacgttcgcaagaataaaactcaaaggaattgacggggacccgcacaagcagcggagcatgtggtttaattcgaagcaacgcgaagaaccttacctggacttgacatccctttgaccgcttcttaaccgaagctttcccttcggggacaaaggtgacaggtggtgcatggttgtcgtcagctcgtgtcgtgagatgttgggttaagtcccgcaacgagcgcaacccctgtctttagttgccagcattaagttgggcactctagagagactgccgaggataactcggaggaaggtggggatgacgtcaaatcatcatgccccttatgttcagggctacacacgtgctacaatgggcggtacaacgggcagcaagctcgcgagagcaagccaatcccttaaagccgttctcagttcggattgtaggctgaaactcgcctacatgaagctggagttgctagtaatcgcggatcagaatgccgcggtgaatgcgttcccgggtcttgtacacaccgcccgtcacaccatggaagttgggggcgcccgaagtcagttatccaaccgcaagggggaggctgccgaaggtgaaatcaatgactggggtg

SEQ ID NO: 2524 - DNA, 1423 bp, Permianibacter aggregans
ggggcagcttacacatgcagtcgagcggggacttcggtcctagcggcggacgggtgaggaatgcatcggaacgtgcccagtgatgggggataacacaccgaaaggtgtgctaataccgcatacgccctgagggggaaagtgggggaccgcaaggcctcacgtcattggagcggccgatgcccgattagctagttggtgaggtaaaggctcaccaaggcgacgatcggtagctggtctgagaggatgatcagccacactggaactgagacacggtccagactcctacgggaggcagcagtggggaatattggacaatgggcgcaagcctgatccagccatgccgcgtgagtgaagaaggccttcgggttgtaaagctctttaagcggggaggaaggtcagccacttaatacgtggttgaattgacgttacctgcagaataagcaccggctaactctgtgccagcagccgcggtaatacagagggtgcaagcgttaatcggaattactgggcgtaaagcgtgcgtaggcggtcttttaagttggatgtgaaatccccgggcttaacctgggaactgcattcaagactgggagactggagtctgggagaggatggtggaatttccggtgtagcggtgaaatgcgtagatatcggaaggaacatcagtggcgaaggcgaccatctggcctaagactgacgctgaggcacgaaagcgtggggagcaaacaggattagataccctggtagtccacgccgtaaacgatgagaactagccgttggagacccttgaggtttttagtggcgcagctaacgcgataagttctccgcctgggaagtacggccgcaaggttgaaactcaaatgaattgacgggggcccgcacaagcggtggagcatgtggtttaattcgatgcaacgcgaagaaccttacctactcttgacatccagagaatcctgtagagatacgggagtgccttcgggaattctgagacaggtgctgcatggctgtcgtcagctcgtgtcgtgagatgttgggttaagtcccgcaacgagcgcaacccttgtccttagttgccaacacgtaatggtgggaactctaaggagactgccggtgacaaaccggaggaaggtggggatgacgtcaagtcatcatggcccttacgagtagggctacacacgtgctacaatggtcggtacaaacggttgcgatatcgcgagatggagccaatccgaaaaagccgatcgtagtccggatcggagtctgcaactcgactccgtgaagtcggaatcgctagtaatcgcagatcagcattgctgcggtgaatacgttcccgggccttgtacacaccgcccgtcacaccatggaagtttactgcaccagaagccggtagcttaaccgcaaggggagcgcctccacggtttcgtgg

SEQ ID NO: 2525 - DNA, 1464 bp, Persephonella hydrogeniphila
cgcgaacgttggcggcgtgcctaacacatgcaagtcgaggggcagcaggccttttcttcggaaaaggtgctggcgaccggcgaacgggtgagtaacacgtagctaacctaccccgaggatggggataaccctccgaaaggggggctaatacccaataaagagtcctgtgtaatgatgggactccaaaggccttcgggcgcctcgggatggggctgcgtcccatcagctagttggtgaggtaatggctcaccaaggctacgacgggtagccggcctgagagggtggccggccacagtgggactgagacacggcccgcacccctacggggggcagcagtggggaatattgggcaatggccggaaggctgacccagcgacgccgcgtggtggaagaagcccttcggggtgtaaacacctgtcaggggggaagataatgacggtacccccagaggaagggacggctaactacgtgccagcagccgcggtaatacgtaggtcccgaacgttgcgcgaaattactgggcgtaaagggtccgtaggcggtctggtaagtggaaggtgaaagcccggggctcaactccggaattgccttccaaactgccggacttgaggcagggagaggtcggcggaattcccggtgtagcggtgaaatgcgtagatatcgggaggaacaccagtggcgaaggcggccgactggaactgacctgacgctgagggacgaaagccaggggagcgaaccggattagatacccgggtagtcctggccgtaaacgatgggtgctagatgtgggtgccgataggcatccgtgtcgcaagctaacgcgttaagcaccccgcctggggagtacggtcgcaaggctgaaactcaaaggaattgacggggacccgcacaaccggtggagcgtctggtttaattcgatgctaaccgaaaaacctcaccagggcttgacatgcggtgtgtcgtggccgaaaggtcactaggtcaccctttagggtgaccgcgccgcacaggtggtgcatggtcgtcgtcagctcgtgtcgtgagatgttgggttaagtcccgcaacgagcgcaacccctgccctgtgttaccagcgggtgaagccgggtactcacaggggactgccggcgataagtcggaggaaggaggggatgacgtcagatcagtatgccctttatgccctgggctacacaggcgctacagtggcagggacaaagggaggcgaagccgcgaggtggagcaaatcccaaaaaccctgtcgtggtgcggattgggggttgcaactcacccccatgaaggcggaatcggtagtaatggcggatcagcaatgccgccgtgaatacgttcccgggtcttgtacacaccgcccgtcacgccacgggagtcgggtctgtcggaagtccccgggctaaccagccttcgggctgggggcaggggccgatgacaggcctggcgactggggcg

SEQ ID NO: 2526 - DNA, 1462 bp, Persephonella marina
cgcgaacgttggcggcgcgcctaacacatgcaagtcgtggggcagcaggccacttcttcgggagtggtgctgcgaccggcgaacgggtgagtaacacgtagctgacctaccccagggatggggataaccctccgaaaggggggctaatacccaataacgagccctgtataatgatggggttccaaaggcctacgggcgccctgggatggggctgcgtcccatcagctagttggtgaggtaacggctcaccaaggctacgacgggtagccggcctgagagggtggccggccacagtgggactgagacacggcccgcacccctacggggggcagcagtggggaatattgggcaatggccgaaaggctgacccagcgacgccgcgtggtggaagaagcccttcggggtgtaaacacctgtcaggggggaagatgatgacggtacccccagaggaagggacggctaactacgtgccagcagccgcggtaatacgtaggtcccgaacgttgcgcgaaattactgggcgtaaagggtccgtaggcggtctggtaagtggaaggtgaaagcccacggctcaaccgtggaattgccttccaaactgctggacttgagggcggaagaggtcggcggaattcccggtgtagcggtgaaatgcgtagatatcgggaggaacaccggtggcgaaggcggccgactgggacgcacctgacgctgagggacgaaagccaggggagcgaaccggattagatacccgggtagtcctggccgtaaacgatgggtgctagatgtgggcggggatatcccgtccgtgtcgtaagctaacgcgttaagcaccccgcctggggagtacgggcgcaagcctgaaactcaaaggaattgacggggacccgcacaaccggtggagcgtctggtttaattcgatgctaaccgaaaaacctcaccagggcttgacatgcggtgtgtcgtgcccgaaagggtgctaggttactcttcggagtaaccgcgccgcacaggtggtgcatggccgtcgtcagctcgtgtcgtgagatgttgggttaagtcccgcaacgagcgcaacccttgccctgtgttaccagcgggtgaagccgggtactcacaggggactgccggcgataagtcggaggaaggaggggatgacgtcaggtcagtatgccctttatgccctgggctacacaggcgctacagtggcagggacaaagggaagcgaagccgcaaggtggagcaaatcccaaaaaccctgtcgtggtgcggattgggggttgcaactcacccccatgaaggcggaatcggtagtaatggcgaatcagcaatgtcgccgtgaatacgttcccgggtcttgtacacaccgcccgtcacgccacgggagttgggtccatcggaagtccccgggctaaccgtcttcggacggaggcaggggccgatgatgggcctggcgactggggcg

SEQ ID NO: 2527 - DNA, 1451 bp, Petrimonas mucosa
gatgaacgctagcgataggcctaacacatgcaagtcgaggggcagcacatgagtagcaatacgatggtggcgaccggcgcacgggtgagtaacacgtatgcaacctacctctaacagggggataacccgttgaaagacggactaataccccataatacaggggctccgcatggagatatttgttaaagattttatcggttagagatgggcatgcgttccattagctagttggtgaggtaacggctcaccaaggcgacgatggataggggaactgagaggtttatcccccacactggaactgagacacggtccagactcctacgggaggcagcagtgaggaatattggtcaatggaggcaactctgaaccagccaagtcgcgtgaaggatgaaggtcttatggattgtaaacttcttttgcaggggaataaatagcggtacgtgtaccgttttgcatgtaccctgcgaataaggatcggctaactccgtgccagcagccgcggtaatacggaggatccgagcgttatccggatttattgggtttaaagggtgcgcaggcgggagattaagtcggcggtgaaattttgcagctcaactgtaaaagtgccttcgatactggtttccttgagtgtggatgaagtaggcggaatttgtggtgtagcggtgaaatgcttagatatcacgaggaactccgattgcgcaggcagcttactaaaccactactgacgctcaggcacgaaggcgtggggatcaaacaggattagataccctggtagtccacgcagtaaacgatgattactggctgtttgcgatacaatgtaagcggctgagcgaaagcgttaagtaatccacctggggagtacgttcgcaagaatgaaactcaaaggaattgacgggggcccgcacaagcggaggaacatgtggtttaattcgatgatacgcgaggaaccttacccgggcttgaaatgcggtggaccggcggagagatccgccttcccttcggggccaccgtgtaggtgctgcatggttgtcgtcagctcgtgccgtgaggtgtcggcttaagtgccataacgagcgcaaccctcatcattagttactaacaggtaaagctgaggactctagtgagactgccatcgtaagatgcgaggaaggtggggatgacgtcaaatcagcacggcccttacgtccggggcgacacacgtgttacaatgggtggtacaaagggcagctacctggcgacaggatgccaatccccaaaaccactctcagttcggatcggagtctgcaactcgactccgtgaagctggattcgctagtaatcgcgcatcagccacggcgcggtgaatacgttcccgggccttgtacacaccgcccgtcaagccatggaagccgggggtacctgaagtccgtaaccgcaaggagcggcctagggtaaaactggtgactggggct

SEQ ID NO: 2528 - DNA, 1386 bp, Phaeobacter gallaeciensis
aacgaacgctggcggcaggcctaacacatgcaagtcgagcgcactcttcggagtgagcggcggacgggttagtaacgcgtgggaacgtgcccttctctaaggaatagccactggaaacggtgagtaataccttatacgcccttcgggggaaagatttatcggagaaggatcggcccgcgttagattagatagttggtggggtaacggcctaccaagtctacgatctatagctggttttagaggatgatcagcaacactgggactgagacacggcccagactcctacgggaggcagcagtggggaatcttggacaatgggcgcaagcctgatccagccatgccgcgtgagtgatgaaggccttagggtcgtaaagctctttcgccagagatgataatgacagtatctggtaaagaaaccccggctaactccgtgccagcagccgcggtaatacggagggggttagcgttgttcggaattactgggcgtaaagcgcacgtaggcggatcagaaagttgggggtgaaatcccggggctcaaccccggaactgcctccaaaactcctggtcttgagttcgagagaggtgagtggaattccgagtgtagaggtgaaattcgtagatattcggaggaacaccagtggcgaaggcggctcactggctcgatactgacgctgaggtgcgaaagtgtggggagcaaacaggattagataccctggtagtccacaccgtaaacgatgaatgccagtcgtcggcaagcatgcttgtcggtgacacacctaacggattaagcattccgcctggggagtacggtcgcaagattaaaactcaaaggaattgacgggggcccgcacaagcggtggagcatgtggtttaattcgaagcaacgcgcagaaccttaccaacccttgacatcctaggaccgccagagagatttggctttcacttcggtgacctagtgacaggtgctgcatggctgtcgtcagctcgtgtcgtgagatgttcggttaagtccggcaacgagcgcaacccacatccttagttgccagcagttcggctgggcactctagggaaactgcccgtgataagcgggaggaaggtgtggatgacgtcaagtcctcatggcccttacgggttgggctacacacgtgctacaatggcagtgacaatgggttaatcccaaaaaactgtctcagttcggattggggtctgcaactcgaccccatgaagtcggaatcgctagtaatcgcgtaacagcatgacgcggtgaatacgttcccgggccttgtacacaccgcccgtcacaccatgggagttgggtttacccgaaggccgtgcgccaacctttcgagggggcagcggaccacggtgagctcagcgactggggtg

SEQ ID NO: 2529 - DNA, 1386 bp, Phaeobacter inhibens
aacgaacgctggcggcaggcctaacacatgcaagtcgagcgcactcttcggagtgagcggcggacgggttagtaacgcgtgggaacgtgcccttctctaaggaatagccactggaaacggtgagtaataccttatacgcccttcgggggaaagatttatcggagaaggatcggcccgcgttagattagatagttggtggggtaacggcctaccaagtctacgatctatagctggttttagaggatgatcagcaacactgggactgagacacggcccagactcctacgggaggcagcagtggggaatcttggacaatgggcgcaagcctgatccagccatgccgcgtgagtgatgaaggccttagggtcgtaaagctctttcgccagagatgataatgacagtatctggtaaagaaaccccggctaactccgtgccagcagccgcggtaatacggagggggttagcgttgttcggaattactgggcgtaaagcgcacgtaggcggatcagaaagttgggggtgaaatcccagggctcaaccctggaactgcctccaaaactcctggtcttgagttcgagagaggtgagtggaattccgagtgtagaggtgaaattcgtagatattcggaggaacaccagtggcgaaggcggctcactggctcgatactgacgctgaggtgcgaaagtgtggggagcaaacaggattagataccctggtagtccacaccgtaaacgatgaatgccagtcgtcagcaagcatgcttgttggtgacacacctaacggattaagcattccgcctggggagtacggtcgcaagattaaaactcaaaggaattgacgggggcccgcacaagcggtggagcatgtggtttaattcgaagcaacgcgcagaaccttaccaacccttgacatcctaggaccgccagagagatttggctttcacttcggtgacctagtgacaggtgctgcatggctgtcgtcagctcgtgtcgtgagatgttcggttaagtccggcaacgagcgcaacccacatccttagttgccagcagttcggctgggcactctagggaaactgcccgtgataagcgggaggaaggtgtggatgacgtcaagtcctcatggcccttacgggttgggctacacacgtgctacaatggcagtgacaatgggttaatcccaaaaaactgtctcagttcggattggggtctgcaactcgaccccatgaagtcggaatcgctagtaatcgcgtaacagcatgacgcggtgaatacgttcccgggccttgtacacaccgcccgtcacaccatgggagttgggtttacccgaaggccgtgcgccaacctttcgagggggcagcggaccacggtgagctcagcgactggggtg

SEQ ID NO: 2530 - DNA, 1426 bp, Phaeobacter italicus
acgctggcggcaggcctaacacatgcaagtcgagcgcgcccttcggggtgagcggcggacgggttagtaacgcgtgggaacgtgcccagatctaaggaatagccactggaaacggtgagtaataccttatacgcccttcgggggaaagatttatcggatttggatcggcccgcgttagattaggtagttggtggggtaatggcctaccaagcctacgatctatagctggttttagaggatgatcagcaacactgggactgagacacggcccagactcctacgggaggcagcagtggggaatcttggacaatgggggcaaccctgatccagccatgccgcgtgagtgatgaaggccttagggtcgtaaagctctttcgcctgtgatgataatgacagtagcaggtaaagaaaccccggctaactccgtgccagcagccgcggtaatacggagggggttagcgttgttcggaattactgggcgtaaagcgcgcgtaggcggattagtcagttagaggtgaaatcccagggctcaaccctggaactgcctttaatactgctagtcttgagttcgagagaggtgagtggaattccgagtgtagaggtgaaattcgtagatattcggaggaacaccagtggcgaaggcggctcactggctcgatactgacgctgaggtgcgaaagtgtggggagcaaacaggattagataccctggtagtccacaccgtaaacgatgaatgccagtcgtcggcaagcatgcttgtcggtgacacacctaacggattaagcattccgcctggggagtacggtcgcaagattaaaactcaaaggaattgacgggggcccgcacaagcggtggagcatgtggtttaattcgaagcaacgcgcagaaccttaccaacccttgacatcctcggaccgccagagagatctggctttcacttcggtgaccgagtgacaggtgctgcatggctgtcgtcagctcgtgtcgtgagatgttcggttaagtccggcaacgagcgcaacccacatccttagttgccagcagttcggctgggcactctagggaaactgcccgtgataagcgggaggaaggtgtggatgacgtcaagtcctcatggcccttacgggttgggctacacacgtgctacaatggcagtgacaatgggttaatcccaaaaaactgtctcagttcggattggggtctgcaactcgaccccatgaagtcggaatcgctagtaatcgcgtaacagcatgacgcggtgaatacgttcccgggccttgtacacaccgcccgtcacaccatgggagttgggtttacccgaaggccgtgcgctaacttttgaggcagcggaccacggtgagctcagcgactggggtgaagtcgtaacaaggtagccgtaggggaacctgcggctggatcacctcct

SEQ ID NO: 2531 - DNA, 1386 bp, Phaeobacter piscinae
aacgaacgctggcggcaggcctaacacatgcaagtcgagcgcactcttcggagtgagcggcggacgggttagtaacgcgtgggaacgtgcccttctctaaggaatagccactggaaacggtgagtaataccttatacgcccttcgggggaaagatttatcggagaaggatcggcccgcgttagattagatagttggtggggtaacggcctaccaagtctacgatctatagctggttttagaggatgatcagcaacactgggactgagacacggcccagactcctacgggaggcagcagtggggaatcttggacaatgggcgcaagcctgatccagccatgccgcgtgagtgatgaaggccttagggtcgtaaagctctttcgccagagatgataatgacagtatctggtaaagaaaccccggctaactccgtgccagcagccgcggtaatacggagggggttagcgttgttcggaattactgggcgtaaagcgcacgtaggcggatcagaaagttgggggtgaaatcccggggctcaaccccggaactgcctccaaaactcctggtcttgagttcgagagaggtgagtggaattccgagtgtagaggtgaaattcgtagatattcggaggaacaccagtggcgaaggcggctcactggctcgatactgacgctgaggtgcgaaagtgtggggagcaaacaggattagataccctggtagtccacaccgtaaacgatgaatgccagtcgtcagcaagcatgcttgttggtgacacacctaacggattaagcattccgcctggggagtacggtcgcaagattaaaactcaaaggaattgacgggggcccgcacaagcggtggagcatgtggtttaattcgaagcaacgcgcagaaccttaccaacccttgacatcctcggaccgccagagagatctggctttcacttcggtgaccgagtgacaggtgctgcatggctgtcgtcagctcgtgtcgtgagatgttcggttaagtccggcaacgagcgcaacccacatccttagttgccagcagttcggctgggcactctagggaaactgcccgtgataagcgggaggaaggtgtggatgacgtcaagtcctcatggcccttacgggttgggctacacacgtgctacaatggcagtgacaatgggttaatcccaaaaaactgtctcagttcggattggggtctgcaactcgaccccatgaagtcggaatcgctagtaatcgcgtaacagcatgacgcggtgaatacgttcccgggccttgtacacaccgcccgtcacaccatgggagttgggtttacccgaaggccgtgcgccaacctttcgagggggcagcggaccacggtgagctcagcgactggggtg

SEQ ID NO: 2532 - DNA, 1388 bp, Phaeobacter porticola
aacgaacgctggcggcaggcctaacacatgcaagtcgagcgcactcttcggagtgagcggcggacgggttagtaacgcgtgggaacgtgcccttctctaaggaatagccactggaaacggtgagtaataccttatacgcccttcgggggaaagatttatcggagaaggatcggcccgcgttagattagatagttggtggggtaacggcctaccaagtctacgatctatagctggttttagaggatgatcagcaacactgggactgagacacggcccagactcctacgggaggcagcagtggggaatcttggacaatgggcgcaagcctgatccagccatgccgcgtgagtgatgaaggccttagggtcgtaaagctctttcgccagagatgataatgacagtatctggtaaagaaaccccggctaactccgtgccagcagccgcggtaatacggagggggttagcgttgttcggaattactgggcgtaaagcgcacgtaggcggatcagaaagtatagggtgaaatcccagggctcaaccctggaactgccttgtaaactcctggtcttgagttcgagagaggtgagtggaattccgagtgtagaggtgaaattcgtagatattcggaggaacaccagtggcgaaggcggctcactggctcgatactgacgctgaggtgcgaaagtgtggggagcaaacaggattagataccctggtagtccacaccgtaaacgatgaatgccagtcgtcggcaagcatgcttgtcggtgacacacctaacggattaagcattccgcctggggagtacggtcgcaagattaaaactcaaaggaattgacgggggcccgcacaagcggtggagcatgtggtttaattcgaagcaacgcgcagaaccttaccaacccttgacatcctaggaccgccagagagatttggctttcacttcggtgacctagtgacaggtgctgcatggctgtcgtcagctcgtgtcgtgagatgttcggttaagtccggcaacgagcgcaacccacatccttagttgccagcagttcggctgggcactctagggaaactgcccgtgataagcgggaggaaggtgtggatgacgtcaagtcctcatggcccttacgggttgggctacacacgtgctacaatggcagtgacaatgggttaatcccaaaaaactgtctcagttcggattggggtctgcaactcgaccccatgaagtcggaatcgctagtaatcgcgtaacagcatgacgcggtgaatacgttcccgggccttgtacacaccgcccgtcacaccatgggagttgggtttacccgaaggccgtgcgccaaccttttcggagggggcagcggaccacggtgagctcagcgactggggtg

SEQ ID NO: 2533 - DNA, 1400 bp, Phaeospirillum fulvum
  misc_feature (635)..(635): n is a, c, g, or t
  misc_feature (954)..(954): n is a, c, g, or t
acgctggcggcaggcttaacacatgcaagtcgaacgaaggcttcggccttagtggcgcacgggtgagtaacacgtgggaatatacctctcggtggggaataacgtcgggaaactgacgctaataccgcatacgcccttagggggaaagatttatcgccgagagattagcccgcgtccgattagctagttggtgaggtaaaagctcaccaaggcgacgatcggtagctggtctgagaggatgatcagccacactgggactgagacacggcccagactcctacgggaggcagcagtggggaatattggacaatgggcgcaagcctgatccagccatgccgcgtgagtgatgaaggccttagggttgtaaagctctttcgacggggacgatgatgacggtacccgtagaagaagccccggctaacttcgtgccagcagccgcggtaatacgaagggggcaagcgttgttcggaattactgggcgtaaagcgcacgtaggcggcgatccaagtcagaagtgaaagccctgggctcaacccgggaactgcttttgatactgggttgctagaatcacggagagggtaggggaattccgagtgtagaggtgaaattcgtagatattcggaagaacaccagtngcgaaggcgcctacctggccgtcgattgacgctcatgtgcgaaagcgtggggagcaaacaggattagataccctggtagtccacgccgtaaacgatgagtgctagatgttggggtgcatgcacctcagtgtcgaacgtaacgcgataagcactccgcctggggagtacggccgcaaggttaaaactcaaaggaattgacgggggcccgcacaagcggtggagcatgtggtttaattcgaagcaacgcgcagaaccttaccagcccttgacatgggggataccggccagagagatttggccttcagttcggctgatccgnccacaggtgctgcatggctgtcgtcagctcgtgtcgtgagatgttgggttaagtcccgcaacgagcgcaaccctcatcttcagttgccatcatttagttgggcactctgaagaaactgccggtgacaagccggaggaaggtggggatgacgtcaagtcctcatggcccttacgggctgggctacacacgtgctacaatggtggtgacagtgggcagccaactcgcgagagtgagctaatccccaaaagccatctcagttcggattgcactctgcaactcgagtgcatgaagtcggaatcgctagtaatcgtggatcagcatgccacggtgaatacgttcccgggccttgtacacaccgcccgtcacaccatgggagttggctttacccgaagccggtgcgctaaccgcaaggaggcagccgaccacggtaaggtcagcgactgggg

SEQ ID NO: 2534 - DNA, 1407 bp, Phaeospirillum molischianum
aacgaacgctggcggcaggcttaacacatgcaagtcgaacgaaggcttcggccttagtggcgcacgggtgagtaacacgtgggaatatacctctcggtggggaataacgtcgggaaactgacgctaataccgcatacgcccttagggggaaagatttatcgccgagagattagcccgcgtccgattagctagttggtgaggtaaaagctcaccaaggcgacgatcggtagctggtctgagaggatgatcagccacactgggactgagacacggcccagactcctacgggaggcagcagtggggaatattggacaatgggcgcaagcctgatccagccatgccgcgtgagtgatgaaggccttagggttgtaaagctctttcgacggggacgatgatgacggtacccgtagaagaagccccggctaacttcgtgccagcagccgcggtaatacgaagggggcaagcgttgttcggaattactgggcgtaaagcgcacgcaggcggcgatccaagtcagaagtgaaagccctgggctcaacccgggaactgcttttgatactgggttgctagaatcacggagagggtaggggaattccgagtgtagaggtgaaattcgtagatattcggaagaacaccagtggcgaaggcgcctacctggccgtcgattgacgctcatgtgcgaaagcgtggggagcaaacaggattagataccctggtagtccacgccgtaaacgatgagtgctagatgttggggtgcatgcacctcagtgtcgaagctaacgcgataagcactccgcctggggagtacggccgcaaggttaaaactcaaaggaattgacgggggcccgcacaagcggtggagcatgtggtttaattcgaagcaacgcgcagaaccttaccagcccttgacatgggggacatcgaccagagagatttggtcttcagttcggctggtccccgcacaggtgctgcatggctgtcgtcagctcgtgtcgtgagatgttgggttaagtcccgcaacgagcgcaaccctcatcttcagttgccatcatttagttgggcactctgaagaaactgccggtgacaagccggaggaaggtggggatgacgtcaagtcctcatggcccttacgggctgggctacacacgtgctacaatggtggtgacagtgggcagccaactcgcgagagtgagctaatcccaaaaagccatctcagttcggattgcactctgcaactcgagtgcatgaagtcggaatcgctagtaatcgtggatcagcatgccacggtgaatacgttcccgggccttgtacacaccgcccgtcacaccatgggagttggctttacccgaagccggtgcgctaaccgcaaggaggcagccgaccacggtaaggtcagcgactggggtg

SEQ ID NO: 2535 - DNA, 1348 bp, Phorcysia thermohydrogeniphila
ggagagtaacgcgtgagcaacctaccccgaggaggggggataacccggggaaacccgggctaataccccataagcgcacggcccgcatgggctgtgtgaaaaggtggcctctgggctctgcccatgctgccgcctcgggatgggctcgcgtcccatcaggtagttggtggggtaacggcccaccaagcctacgacgggtagccggcctgagagggtggtcggccacaccgggactgtatacacggcccggactcctacgggaggcagcagtggggaatcttgggcaatgggcgaaagcctgacccagcgacgccgagtgggggaagaagcccttcggggtgtaaacccctgtcgccggggacgatgcggagttgggttaagagctcaactccgtgacggtacccggagaggaagggacggctaactacgtgccagcagccgcggtaatacgtaggtcccgagcgttgcgcgaaattactgggcgtaaaaagcgcgtaggcgggccagtaagtcagaggtgaaagcccccggctcaaccggggaattgcctctgatactgctggcctagggtccggaagaggccggcggaattcccggtgtagcgggtgaaatgcgtagatatcgggaggaacaccggtggcgaaggcggccggctaggacggtaccgacgctgaggcgcgaaagcgtggggagcgaaccggattagatacccgggtagtccacgctgtaaacgatgggtgctgggcgttggcacctaagggtgtcagtgccgaagctaacgcgttaagcaccccgcctggggagtacggccgcaaggctgaaactcaaaggaatagacgggggcccgcacaagcggtggagcatgtggtttaattcaatgctacgcgaagaaccttaccagggcttgacatgctgggggtagccccgccgaaaggcgtgggtcgcggcaggccttttggcctgcccacccagcacaggtggtacatggccgtcgtcagctcgtgccgtgaggtgttgggttaagtcccgcaacgagtgcaacccctgcccctagttgccagcgggttaggccgggcacactagggggactgccggcgataagccggaggaaggaggggatgacgtcaggtcagtatgccccttaagccctgggctacacacgtgctacaatggccgggacagagggaagcgaagccgcgaggcggagcaaatcccagaaacccggtcccagttcggattgcaggctgcaactcgcctgcatgaagccggaatcgctagtaacggccggtcatccacacggccgtgaagacgttaaccgggccttgtactcaccgcccgtcacacccct

SEQ ID NO: 2536 - DNA, 1413 bp, Phormidesmis priestleyi
gatgaacgctggcggtatgcttaacacatgcaagtcgaacggtcctttcggggatagtggcggacgggtgagtaacgcgtgagaatctgcctttaggacggggacaacagttggaaacggctgctaaaacccgatgtgcccttcggggtgaaatatttatagcctgaagatgagctcgcgtctgattagctagtaggtgaggtaaaggctcacctaggcgacgatcagtaactggtctgagaggatgaccagtcacactgggactgagacacggcccagactcctacgggaggcagcagtggggaattttccgcaatgggcgcaagcctgacggagcaataccgcgtgagggaggaaggctcttgggtcgtaaacctcttttatcagggaagaacacaatgacggtacctgatgaatcagcatcggctaactctgtgccagcagccgcggtaatacagaggatgcaagcgttatccggaattattgggcgtaaagcgtccgcaggtggttttggtagtctgctgtcaaagcgcgaggctcaacttcgtatcggcggtggaaactccaagactagagctaggtaggggtcacgggaattcccagtgtagcggtgaaatgcgtagatattgggaagaacaccagcggcgaaagcgcgtgactgggcctgagctgacactcatggacgaaagctaggggagcgaaagggattagatacccctgtagtcctagccgtaaacgatgacaactaggtgttgcccgtatcgacccgggcagtgccgtagccaacgcgttaagttgtccgcctggggagtacgcacgcaagtgtgaaactcaaaggaattgacgggggcccgcacaagcggtggagtatgtggtttaattcgatgcaacgcgaagaaccttaccaaggcttgacatgtcgcgaaccttcttgaaagggaagggtgccttcgggagcgcgaacacaggtggtgcatggctgtcgtcagctcgtgtcgtgagatgttgggttaagtcccgcaacgagcgcaaccctcgtttctagttgccatcattcagttgggcactttagagagactgccggtgacaaaccggaggaaggtggggatgacgtcaagtcagcatgccccttacgccttgggctacacacgtactacaatgctacggacaaagagccgcaagttcgcgaggacaagcaaatctcataaaccgtggctcagttcagattgcaggctgcaactcgcctgcatgaaggcggaatcgctagtaatcgcaggtcagcatactgcggtgaatacgttcccgggccttgtacacaccgcccgtcacaccatgggagttggccacgcccgaagtcgttactccaaccgttcgcggaggaggatgccgaaggcagggctgatgactggggtg

SEQ ID NO: 2537 - DNA, 1409 bp, Phormidium ambiguum
gatgaacgctggcggtctgcttaacacatgcaagtcgaacgaactcttcggagttagtggcggacgggtgagtaacgcgtgagagtctagcttcagaacggggacaacagagggaaaccactgctaatacccgatgtgccgagaggtgaaagatttatcatctgaagatgagctcgcgtccgattagctagttggtaaggtaagagcttaccaaggcgacgatcggtagctggtctgagaggatgaccagccacactgggactgagacacggcccagactcctacgggaggcagcagtggggaattttccgcaatgggcgaaagctgacggagcaagaccgcgtgagggaggaaggctcttgggttgtaaacctcttttctctgggaagaagatctgacggtaccagaggaatcagcatcggctaactccgtgccagcagccgcggtaatacggaggatgcaagcgttatccggaattattgggcgtaaagcgtccgtaggtggcggttcaagtctgccgttaaaaccagtagcttaactactgacaggcggtggaaactgaacagctagagtgtggtaggggtagagggaattcccagtgtagcggtgaaatgcgtagagattgggaagaacaccggtggcgaaagcgctctgctggaccacaactgacactcacggacgaaagctaggggagcgaaagggattagataccccagtagtcctagccgtaaacgatggatactaggtgtagtaggtatcgacccctactgtgccgtagctaacgcgttaagtatcccgcctggggagtacggtcgcaagattgaaactcaaaggaattgacgggggcccgcacaagcggtggagtatgtggtttaattcgatgcaacgcgaagaaccttaccaggacttgacatgtcgcgaatctctctgaaaggagagagtgccttcgggagcgcgaacacaggtggtgcatggctgtcgtcagctcgtgtcgtgagatgttgggttaagtcccgcaacgagcgcaacccacgtttttagttgccatcattaagttgggcactctagagagactgccggtgacaaaccggaggaaggtgtggatgacgtcaagtcagcatgccccttacgtcctgggctacacacgtactacaatggctgggacaaagagctgcaagcgagcgatcgcaagccaatctcataaacccagtcttagttcagatcgcaggctgcaactcgcctgcgtgaaggcggaatcgctagtaatcgcagatcagaatgctgcggtgaatacgttcccgggccttgtacacaccgcccgtcacaccatggaagctggtcacgcccgaagtcgttatcctaaccgttcgcggagggagatgcctaaggcagggctggtgactggggtg

SEQ ID NO: 2538 - DNA, 1411 bp, Phormidium tenue
gatgaacgctggcggcgtgcttaacacatgcaagtcgaacggacccttcggggttagtggcggacgggtgagtaacgcgtgaggatctgcccttaggaggggaacaacagttggaaacgactgctaatgccccatatgccgagaggtgaaatgttatatcgcctagggatgaactcgcgtctgattagctagttggtggggtaaaggctcaccaaggcgacgatcagtagctggtctaagaggatgatcagccacactgggactgagacacggcccagactcctacgggaggcagcagtggggaattttccgcaatgggcgaaagcctgacggagcaacgccgcgtgagggacgaaggccttagggttgtaaacctcttttctctgggaagaagaactgacggtaccagaggaataagcctcggctaactccgtgccagcagccgcggtaagacggaggaggcaagcgttatccggaattattgggcgtaaagcgtccgcaggcggctaattaagtctgttgtcaaagcccacagctcaactgtggatcggcaatggaaactggttggctagagtgtggtaggggtagagggaattcccggtgtagcggtgaaatgcgtagatatcgggaagaacaccagtggcgaaggcgctctactgggccacaactgacgctgagggacgaaagctaggggagcgaaagggattagatacccctgtagtcctagctgtaaacgatggatactaggtgttggacgtatcgacccgtgcagtaccgtagctaacgcgttaagtatcccgcctggggagtacgcacgcaagtgtgaaactcaaaggaattgacgggggcccgcacaagcggtggaggatgtggtttaattcgatgcaacgcgaagaaccttaccaaggcttgacatgtcacgaatctttgcgagagcagagagtgccttcgggagcgtgaacacaggtggtgcatggctgtcgtcagctcgtgtcgtgagatgttgggttaagtcccgcaacgagcgcaacccacgtttttagttgccatcattaagttgggcactctaaagagactgccgtggacaacacggaggaaggtgtggacgacgtcaagtcatcatgccccttacgtcttgggctacacacgtcctacaatgctacagacagagggcagcgagcgcgcgagtgcaagcaaatcccataaactgtggctcagttcagattgcaggctgcaactcgcctgcatgaaggcggaatcgctagtaatcgcaggtcagcatactgcggtgaatacgttcccgggccttgtacacaccgcccgtcacaccatgggagttggccacgcccgaagtcgttactctaaccgttcgcggaggagggcgccgaaggcagggctgatgactggggtg

SEQ ID NO: 2539 - DNA, 1428 bp, Photorhabdus asymbiotica
acatgcaagtcgagcggtaacaggaaagtgcttgcacttttgctgacgagcggcggacgggtgagtaatgtctggggatctgcccgagggcgggggataaccactggaaacggtggctaataccgcatgatgtcgcgagaccaaagtgggggacctgaaagggcctcacgccctcggatgaacccagatgggattagctagtaggtagggtaatggcctacctaggcgacgatccctagctggtctgagaggatgaccagccacactgggactgagacacggcccagactcctacgggaggcagcagtggggaatattgcacaatgggcgcaagcctgatgcagccatgccgcgtgtatgaagcaggccttcgggttgtaaagtactttcagcggggaggaagggtttggcctgaagagggttaaattttgacgttacccgcagaagaagcaccggctaactccgtgccagcagccgcggtaatacggagggtgcaagcgttaatcggaatgactgggcgtaaagcgcacgcaggcggtcaattaagttagatgtgaaatccccgggctcaacctgggaatggcatctaagactggttggctagagtctcgtagaggggggtagaattccatgtgtagcggtgaaatgcgtagagatgtggaggaataccggtggcgaaggcggccccctggacgaagactgacgctcatgtgcgaaagcgtggggagcaaacaggattagataccctggtagtccacgctgtaaacgatgtcgatttggaggttgtggtctagagctgtggcttccggagctaacgcgttaaatcgaccgcctggggagtacggccgcaaggttaaaactcaaatgaattgacgggggcccgcacaagcggtggagcatgtggtttaattcgatgcaacgcgaagaaccttacctactcttgacatccagagaagacctcagagatgaggttgtgccttcgggagctctgagacaggtgctgcatggctgtcgtcagctcgtgttgtgaaatgttgggttaagtcccgcaacgagcgcaacccttatcctttgttgccagcacgttgaggtgggaactcaaaggagactgccggtgataaaccggaggaaggtggggatgacgtcaagtcatcatggccctgacgagtagggctacacacgtgctacaatggcggatacaaagtgaagcgacctcgcgagagcaagcggaacacacaaagtctgtcgtagtccggattggagtctgcaactcgactccatgaagtcggaatcgctagtaatcgtagatcagcatgctacggtgaatacgttcccgggccttgtacacaccgcccgtcacaccatgggagtgggtggcaaaagaagtcggtagcctaaccgcgaggggggcgctgaccactttgtgat

SEQ ID NO: 2540 - DNA, 1441 bp, Photorhabdus heterorhabditis
  misc_feature (445)..(445): n is a, c, g, or t
cacatgcaagtcgggcggtaacaggaaagcgcgtgcgcttttgctgacgagcggcggacgggtgagtaaagtctggggatctgcctgatggagggggataaccactggaaacggtggctaataccgcatgaagtcgcaagaccaaagtgggggacctgcgggcctcacgccatcggatgaacccagatgggattagctagtaggtagggtaatggcctacctaggcgacgatccctagctggtctgagaggatgaccagccacactgggactgagacacggcccagactcctacgggaggcagcagtggggaatattgcacaatgggcgcaagcctgatgcagccatgccgcgtgtatgaagaaggctttcgggttgtaaagtactttcagcggggaggaagggtttagcctgaataaggctggactttgacgttacccgcagangaagcaccggctaactccgtgccagcagccgcggtaatacggagggtgcaagcgttaatcggaatgactgggcgtaaagcgcacgcaggcggtcaattaagttagatgtgaaatccccgggcttaacctgggaacggcatctaagactggttggctagagtctcgtagaggggggtagaattccatgtgtagcggtgaaatgcgtagagatgtggaggaataccggtggcgaaggcggccccctggacgaagactgacgctcaggtgcgaaagcgtggggagcaaacaggattagataccctggtagtccacgctgtaaacgatgtcgatttggaggttgttccctggaggagtggcttccggagctaacgcgttaaatcgaccgcctggggagtacggccgcaaggttaaaactcaaatgaattgacgggggcccgcacaagcggtggagcatgtggtttaattcgatgcaacgcgaagaaccttacctactcttgacatccagagaagacctcagagatggggttgtgccttagggagctctgagacaggtgctgcatggctgtcgtcagctcgtgttgtgaaatgttgggttaagtcccgcaacgagcgcaacccttatcctttgttgccagcacgtaaaggtgggaactcaagggagactgccggtgataaaccggaggaaggtggggatgacgtcaagtcatcatggcccttacgagtagggctacacacgtgctacaatggcggatacaaagtgaagcgacctcgcgagagcaagcggaacacacaaagtctgtcgtagtccggattggagtctgcaactcgactccatgaagtcggaatcgctagtaatcgtagatcagcatgctacggtgaatacgttcccgggccttgtacacaccgcccgtcacaccatgggagtgggtggcaaaagaagtcggtagcttaaccgaaaggagggcgctgaccactttgtgattcatgactggggtg

SEQ ID NO: 2541 - DNA, 1499 bp, Photorhabdus khanii
agattgaacgctggcggcaggcctaacacatgcaagtcgagcggtaacaggaaagcgcttgcgcttttgctgacgagcggcggacgggtgagtaatgtctggggatctgcccgagggcgggggataaccactggaaacggtggctaataccgcataatgtcgcaagaccaaagtgggggacctgaaagggcctcacgcccgtggatgaacccagatgggattagctagtaggtagggtaatggcctacctaggcgacgatccctagctggtctgagaggatgaccagccacactgggactgagacacggcccagactcctacgggaggcagcagtggggaatattgcacaatgggcgcaagcctgatgcagccatgccgcgtgtatgaagaaggccttcgggttgtaaagtactttcagcggggaggaagggtatggcctgaagagggcgatagcttgacgttacccgcagaagaagcaccggctaactccgtgccagcagccgcggtaatacggagggtgcaagcgttaatcggaatgactgggcgtaaagcgcacgcaggcggtcaattaagttggatgtgaaatccccgggcttaacctgggaacggcatccaagactggttggctagagtctcgtagaggggggtagaattccatgtgtagcggtgaaatgcgtagagatgtggaggaataccggtggcgaaggcggccccctggacgaagactgacgctcaggtgcgaaagcgtggggagcaaacaggattagataccctggtagtccacgcggtaaacgatgtcgatttggaggttgttccctggaggagtggcttccggagctaacgcgttaaatcgaccgcctggggagtacggccgcaaggttaaaactcaaatgaattgacgggggcccgcacaagcggtggagcatgtggtttaattcgatgcaacgcgaagaaccttacctactcttgacatccagagaagacctcagagatggggttgtgccttcgggagctctgagacaggtgctgcatggctgtcgtcagctcgtgttgtgaaatgttgggttaagtcccgcaacgagcgcaacccttatcctttgttgccagcacgtgatggtgggaactcaaaggagactgccggtgataaaccggaggaaggtggggatgacgtcaagtcatcatggccctaacgagtagggctacacacgtgctacaatggcggatacaaagtgaagcgacctcgcgagagcaagcggaacacataaagtctgtcgtagtccggattggagtctgcaactcgactccatgaagtcggaatcgctagtaatcgtagatcagaacgctacggtgaatacgttcccgggccttgtacacaccgcccgtcacaccatgggagtgggttgcaaaagaagtcggtagcttaacctgcgggagggcgctgaccactttgtgattcatgactggggtgaagtcgtaacaaggtaaccgtaggggaacc

SEQ ID NO: 2542 - DNA, 1499 bp, Photorhabdus laumondii
agattgaacgctggcggcaggcctaacacatgcaagtcgggcggtaacaggaaagtgcctgcacttttgctgacgagcggcggacgggtgagtaatgtctggggatctgcccgagggcgggggataaccactggaaacggtggctaataccgcataatgtcgcgagaccaaagtgggggacctgaaagggcctcacgccgtcggatgaacccagatgggattagctggtaggtagggtaatggcctacctaggcgacgatctctagctggtctgagaggatgaccagccacactgggactgagacacggcccagactcctacgggaggcagcagtggggaatattgcacaatgggcgcaagcctgatgcagccatgccgcgtgtatgaagaaggccttcgggttgtaaagtactttcagcggggaggaagggtttagcctgaagagggttggactttgacgttacccgcagaagaagcaccggctaactccgtgccagcagccgcggtaatacggagggtgcaagcgttaatcggaatgactgggcgtaaagcgcacgcaggcggtcaattaagttagatgtgaaatccccgggctcaacctgggaatggcatctaagactggttgactggagtctcgtagaggggggtagaattccatgtgtagcggtgaaatgcgtagagatgtggaggaataccggtggcgaaggcggccccctggacgaagactgacgctcaggtgcgaaagcgtggggagcaaacaggattagataccctggtagtccacgctgtaaacgatgtcgatttggaggttgcggtcttgaacggtggcttccgaagctaacgcgttaaatcgaccgcctggggagtacggccgcaaggttaaaactcaaatgaattgacgggggcccgcacaagcggtggagcatgtggtttaattcgatgcaacgcgaagaaccttacctactcttgacatcctcagaatttgctggagacagcgaagtgccttagggaactgagagacaggtgctgcatggctgtcgtcagctcgtgttgtgaaatgttgggttaagtcccgcaacgagcgcaacccttatcctttgttgccagcacgtgaaggtgggaactcaaaggagactgccggtgataaaccggaggaaggtggggatgacgtcaagtcatcatggcccttacgagtagggctacacacgtgctacaatggcggatacaaagtgaagcgacctcgcgagagcaagcggaacacacaaagtctgtcgtagtccggattggagtctgcaactcgactccatgaagtcggaatcgctagtaatcgtagatcagcatgctacggtgaatacgttcccgggccttgtacacaccgcccgtcacaccatgggagtgggttgcaaaagaagtcggtagcttaaccgaaaggggggcgctgaccactttgtggctcatgactggggtgaagtcgtaacaaggtaaccgtaggggaacc

SEQ ID NO: 2543 - DNA, 1426 bp, Photorhabdus luminescens
attgaacgctggcggcaggcctaacacatgcaagtcgggcggtaacaggaaagcgcctgcgcttttgctgacgagcggcggacgggtgagtaatgtctggggatctgcccgagggtgggggataaccactggaaacggtggctaataccgcataatgtcgcaagaccaaagtgggggacctgaaagggcctcacgccgtcggatgaacccagatgggattagctggtaggtagggtaatggcctacctaggcgacgatccctagctggtctgagaggatgaccagccacactgggactgagacacggcccagactcctacgggaggcagcagtggggaatattgcacaatgggcgcaagcctgatgcagccatgccgcgtgtatgaagaaggccttcgggttgtaaagtactttcagcggggaggaaggatgtaacttgaatagagttggattttgacgttacccgcagaagaagcaccggctaactccgtgccagcagccgcggtaatacggagggtgcaagcgttaatcggaatgactgggcgtaaagcgcacgcaggcggtcaattaagttagatgtgaaatccccgggctcaacctgggaatggcatctaagactggttgactggagtctcgtagaggggggtagaattccatgtgtagcggtgaaatgcgtagagatgtggaggaataccggtggcgaaggcggccccctggacgaagactgacgctcaggtgcgaaagcgtggggagcaaacaggattagataccctggtagtccacgctgtaaacgatgtcgatttggaggttgtggccttgagctgtggcttccgaagctaacgcgttaaatcgaccgcctggggagtacggccgcaaggttaaaactcaaatgaattgacgggggcccgcacaagcggtggagcatgtggtttaattcgatgcaacgcgaagaaccttacctactcttgacatccgagacaggtgctgcatggctgtcgtcagctcgtgttgtgaaatgttgggttaagtcccgcaacgagcgcaacccttatcctttgttgccagcgcgtcgaggtgggaactcaaaggagactgccggtgataaaccggaggaaggtggggatgacgtcaagtcatcatggcccttacgagtagggctacacacgtgctacaatggcggatacaaagtgaagcgacctcgcgagagcaagcggaacacacaaagtctgtcgtagtccggattggagtctgcaactcgactccatgaagtcggaatcgctagtaatcgtagatcagcatgctacggtgaatacgttcccgggccttgtacacaccgcccgtcacaccatgggagtgggttgcaaaagaagtcggtagcttaaccgagaggagggcgctgaccactttgtggctcatgactggggtg

SEQ ID NO: 2544 - DNA, 1378 bp, Photorhabdus temperata
gacgagcggcggacgggtgagtaatgtctggggatctgcccgagggcgggggataaccactggaaacggtggctaataccgcataatgtcgcaagaccaaagtgggggacctgaaagggcctcacgcccgtggatgaacccagatgggattagctggtaggtggggtaatggctcacctaggcgacgatccctagctggtctgagaggatgaccagccacactgggactgagacacggcccagactcctacgggaggcagcagtggggaatattgcacaatgggcgcaagcctgatgcagccatgccgcgtgtatgaagaaggccttcgggttgtaaagtactttcagcggggaggaaggggttgatttgaacagagtcaattcttgacgttacccgcagaagaagcaccggctaactccgtgccagcagccgcggtaatacggagggtgcaagcgttaatcggaatgactgggcgtaaagcgcacgcaggcggtcaattaagttggatgtgaaatccccgggcttaacctgggaacggcatccaagactggttggctagagtctcgtagaggggggtagaattccatgtgtagcggtgaaatgcgtagagatgtggaggaataccggtggcgaaggcggccccctggacgaagactgacgctcaggtgcgaaagcgtggggagcaaacaggattagataccctggtagtccacgcggtaaacgatgtcgatttggaggttgttcccttgaggagtggcttccggagctaacgcgttaaatcgaccgcctggggagtacggccgcaaggttaaaactcaaatgaattgacgggggcccgcacaagcggtggagcatgtggtttaattcgatgcaacgcgaagaaccttacctactcttgacatccagagaagacctcagagatggggttgtgcctaagggagctctgagacaggtgctgcatggctgtcgtcagctcgtgttgtgaaatgttgggttaagtcccgcaacgagcgcaacccttatcctttgttgccagcacgtgatggtgggaactcaagggagactgccggtgataaaccggaggaaggtggggatgacgtcaagtcatcatggcccttacgagtagggctacacacgtgctacaatggcggatacaaagtgaagcgaacttgcgagagtaagcggaacacataaagtctgtcgtagtccggattggagtctgcaactcgactccatgaagtcggaatcgctagtaatcgtagatcagaatgctacggtgaatacgttcccgggccttgtacacaccgcccgtcacaccatgggagtgggttgcaaaagaagtcggtagcttaaccttcgggagggcgctgaccactt

SEQ ID NO: 2545 - DNA, 1516 bp, Photorhabdus thracensis
cctggctcagattgaacgctggcggcaggcctaacacatgcaagtcgagcggtaacaggaaaatgcttgcatttttgctgacgagcggcggacgggtgagtaatgtctggggatctgcccgagggcgggggataaccactggaaacggtggctaataccgcataatgtcgcaagaccaaagtgggggacctgaaagggcctcacgcccgcggatgaacccagatgggattagctggtaggtagggtaatggcctacctaggcgacgatccctagctggtctgagaggatgaccagccacactgggactgagacacggcccagactcctacgggaggcagcagtggggaatattgcacaatgggcgcaagcctgatgcagccatgccgcgtgtatgaagaaggccttcgggttgtaaagtactttcagcggggaggaaggatatcgcttgaacagagcggtatgttgacgttacccgcagaagaagcaccggctaactccgtgccagcagccgcggtaatacggagggtgcaagcgttaatcggaatgactgggcgtaaagcgcacgcaggcggtcaattaagttagatgtgaaatccccgggcttaacctgggaacggcatctaagactggttggctagagtctcgtagaggggggtagaattccatgtgtagcggtgaaatgcgtagagatgtggaggaataccggtggcgaaggcggccccctggacgaagactgacgctcaggtgcgaaagcgtggggagcaaacaggattagataccctggtagtccacgcggtaaacgatgtcgatttggaggttgttccctaagaggagtggcttccggagctaacgcgttaaatcgaccgcctggggagtacggccgcaaggttaaaactcaaatgaattgacgggggcccgcacaagcggtggagcatgtggtttaattcgatgcaacgcgaagaaccttacctactcttgacatcctcagaatttgctggagacagcgaagtgccttcgggaactgagagacaggtgctgcatggctgtcgtcagctcgtgttgtgaaatgttgggttaagtcccgcaacgagcgcaacccttatcctttgttgccagcacgtaatggtgggaactcaaaggagactgccggtgataaaccggaggaaggtggggatgacgtcaagtcatcatggcccttacgagtagggctacacacgtgctacaatggcggatacaaagtgaagcgacctcgcgagagcaagcggaacacataaagtctgtcgtagtccggattggagtctgcaactcgactccatgaagtcggaatcgctagtaatcgtagatcagaatgctacggtgaatacgttcccgggccttgtacacaccgcccgtcacaccatgggagtgggttgcaaaagaagtcggtagcttaaccgtttggagggcgctgaccactttgtgattcatgactggggtgaagtcgtaacaaggtaaccgtaggggaacctgcggctg

SEQ ID NO: 2546 - DNA, 1402 bp, Phreatobacter oligotrophus
aacgaacgctggcggcaggcttaacacatgcaagtcgagcgccccgcaaggggagcggcagacgggtgagtaacgcgtgggaacgtaccttttggttcggaacaactccgggaaactggagctaataccggataagcccttcgggggaaagatttatcgccgaaagatcggcccgcgtctgattagctagttggtgaggtaacggctcaccaaggcgacgatcagtagctggtctgagaggatgatcagccacactgggactgagacacggcccagactcctacgggaggcagcagtggggaatattggacaatgggcgcaagcctgatccagccatgccgcgtgagtgatgaaggccttagggttgtaaagctcttttgtccgggaagataatgactgtaccggaagaataagccccggctaacttcgtgccagcagccgcggtaatacgaagggggctagcgttgttcggaatcactgggcgtaaagcgcacgtaggcggaccattaagtcaggggtgaaagcctggagctcaactccagaactgcctttgatactgatggtctcgagttcggaagaggttggtggaactgcgagtgtagaggtgaaattcgtagatattcgcaagaacaccagtggcgaaggcggccaactggtccgatactgacgctgaggtgcgaaagcgtggggagcaaacaggattagataccctggtagtccacgccgtaaacgatgaatgccagccgttggggagcttgctcctcagtggcgcagctaacgctttaagcattccgcctggggagtacggtcgcaagattaaaactcaaaggaattgacgggggcccgcacaagcggtggagcatgtggtttaattcgaagcaacgcgcagaaccttaccagctcttgacatcccgtgccacgcccagagatgggcggtcctcttcggaggcgcggagacaggtgctgcatggctgtcgtcagctcgtgtcgtgagatgttgggttaagtcccgcaacgagcgcaaccctcgcctttagttgccagcattcagttgggcactctagagggactgccggtgataagccggaggaaggtggggatgacgtcaagtcctcatggcccttacgggctgggctacacacgtgctacaatggcggtgacagtgggcagcaaagccgcaaggccaagctaatctccaaaagccgtctcagttcggattgcactctgcaactcgagtgcatgaagttggaatcgctagtaatcgcagatcagaatgctgcggtgaatacgttcccgggccttgtacacaccgcccgtcacaccatgggagttgggtttacccgaaggcagtgcgctaaccgcaagggggcagctgaccacggtaggctcagcgactggggtg

SEQ ID NO: 2547 - DNA, 1402 bp, Phreatobacter stygius
aacgaacgctggcggcaggcttaacacatgcaagtcgagcgccccgcaaggggagcggcagacgggtgagtaacacgtgggaacgtaccttttggttcggaacaactccgggaaactggagctaataccggataagccctaacggggaaagatttatcgccaaaagatcggcccgcgtctgattagctagttggtggggtaacggcccaccaaggcgacgatcagtagctggtctgagaggatgatcagccacactgggactgagacacggcccagactcctacgggaggcagcagtggggaatattggacaatgggcgcaagcctgatccagccatgccgcgtgagtgatgaaggccttagggttgtaaagctcttttgtccgggaagataatgactgtaccggaagaataagccccggctaacttcgtgccagcagccgcggtaatacgaagggggctagcgttgttcggaatcactgggcgtaaagcgcacgtaggcggattattaagtcaggggtgaaagcctggagctcaactccagaactgcctttgatactgatagtctcgagttcggaagaggttggtggaactgcgagtgtagaggtgaaattcgtagatattcgcaagaacaccagtggcgaaggcggccaactggtccgatactgacgctgaggtgcgaaagcgtggggagcaaacaggattagataccctggtagtccacgccgtaaacgatgaatgccagccgttggggagcttgctcttcagtggcgcagctaacgctttaagcattccgcctggggagtacggtcgcaagattaaaactcaaaggaattgacgggggcccgcacaagcggtggagcatgtggtttaattcgaagcaacgcgcagaaccttaccagctcttgacatcccgtgttacatcgagagatcgatggtcctcttcggaggcgcggagacaggtgctgcatggctgtcgtcagctcgtgtcgtgagatgttgggttaagtcccgcaacgagcgcaaccctcgcctttagttgccagcatttagttgggcactctagagggactgccggtgataagccggaggaaggtggggatgacgtcaagtcctcatggcccttacgggctgggctacacacgtgctacaatggtggtgacagtgggcagcgaaaccgcgaggtctagctaatctccaaaagccatctcagttcggattgcactctgcaactcgagtgcatgaagttggaatcgctagtaatcgcagatcagaatgctgcggtgaatacgttcccgggccttgtacacaccgcccgtcacaccatgggagttgggtttacccgaaggcagtgcgctaaccgcaagggggcagctgaccacggtaggctcagcgactggggtg

SEQ ID NO: 2548 - DNA, 1428 bp, Phycisphaera mikurensis
atcgaacgctggcggcatggctaaaacatgcaagtcgaacgagaagccacttcggtggcggacagtggcgaaagggcgagtaacgtgtatctaatgtacccccgagtcctggatagcagtgggaaaccgctggtaacacaggatgacatcggtagtccgcatggccggccgatcaaagtttacgctcggggagcaggatacatcctatcagcttgttggtgaggtaacggcttaccaaggcgaagacgggtagcgggtgtgagagcatgacccgccgcatcgggactgagacactgcccggactcctacgggaggctgcagtaacgaatattccgcaatgcgcgaaagcgtgacggagcaatgccgcgtgcgggatgaagccccttggggtgtaaaccgctgtcagggtttaggaatcaatgaccagacccaaaggaaggaccggctaactctgtgccagcagccgcggtaatacagagggtccaagcgttgatcggaatcactgggtttaaagggtccgcaggcggattggcaagtgcgttgtgaaatcccacggcttaaccgtggaactgcttcgcagactgccaatcttgagcgtgtcaggggtcgtcggaactctaggtggagcggtgaaatgcgtagatatctagaggaacgccaaaagggaagccagacgactgggacattgctgacgctcagggacgaaagcgtgggtagcgaacgggattagataccccggtagtccacgccctaaacgatgtgtactaggtagcggaggttttgacgccatcgctgccgaagccaaagtgttaagtacaccacctggggagtacggtcgcaaggctaaaactcaaaggaattgacgggggctcacacaagcggtggagcatgtggcttaattcgaagcaacgcgaagaaccttatccagggtttgacattcacggattagcttcctgaaagggaagtgacgcgcttgcgtggaacgtgaacaggtgctgcatggctgtcgtcagctcgtgctgtgaagtgtcgggttaagtcccttaacgagcgaaacccctatcattagttgccatcaggtcatgctggggactctagtgagactgccggcgtcaagccggaggaaggtggggatgacgtcaagtcctcatggcctttatgccctgggctgcacacgtgctacaatgcggtagacagagcgaagcgatacggtaacgtggagcaaatcgcacaaactaccgctcagttcggattgtgggctgcaactcgcccacatgaagttggaatcgctagtaatcgcgtatcatcaacgacgcggtgaataagttcctgagccttgtacacaccgcccgtcacgtcatgggagccgggagcgcccgaagtggtcacgattcagtgatccctacggtgagctcggtgactgggacg

SEQ ID NO: 2549 - DNA, 1435 bp, Phytobacter diazotrophicus
  misc_feature (1127)..(1127): n is a, c, g, or t
attgaacgctggcggcaggcctaacacatgcaagtcgagcggtagcacagggagcttgctctcgggtgacgagtgggggacgggtgagtaatgtctgggaaactgcccgatggagggggataactactggaaacggtagctaataccgcataatgtggcaagaccaaagagggggaccttcgggcctcttgccatcggatgtgcccagatgggattagcttgttggtgaggtaatggctcaccaaggcgacaatccctagctggtctgagaggatgaccagccacactggaactgagacacggtccagactcctacgggaggcagcagtggggaatattgcacaatgggcgcaagcctgatgcagccatgccgcgtgtgtgaagaaggccttcgggttgtaaagcactttcagcggggaggaaggcaatgcggttaataaccgtgttgattgacgttacccgcagaagaagcaccggctaactccgtgccagcagccgcggtaatacggagggtgcaagcgttaatcggaattactgggcgtaaagcgcacgcaggcggtctgtcaagtcggatgtgaaatccccgggctcaacctgggaactgcattcgaaactggcaggcttgagtcttgtagaggggggtagaattccaggtgtagcggtgaaatgcgtaaagatctggaggaataccggtggcgaaggcggccccctggacaaagactgacgctcaggtgcgaaagcgtggggagcaaacaggattagataccctggtagtccacgccgtaaacgatgtcgacttggaggttgtgcccttgaggcgtggcttccggagctaacgcgttaagtcgaccgcctggggagtacggccgcaaggttaaaactcaaatgaattgacgggggcccgcacaagcggtggagcatgtggtttaattcgatgcaacgcgaagaaccttacctggtcttgacatccacggaatttggcagagatgccttagtgccttcgggaaccgtgagacaggtgctgcatggctgtcgtcagctcgtgttgtgaaatgttgggttaagtcccgcaacgagcgcaacccttatcctttgttgccagcggtccggccgggaactcaaagganactgccagtgataaactggaggaaggtggggatgacgtcaagtcatcatggcccttacgaccagggctacacacgtgctacaatggcatatacaaagagaagcgacctcgcgagagcaagcggacctcataaagtatgtcgtagtccggattggagtctgcaactcgactccatgaagtcggaatcgctagtaatcgtggatcagaatgccacggtgaatacgttcccgggccttgtacacaccgcccgtcacaccatgggagtgggttgcaaaagaagtaggtagcttaaccttcgggagggcgctt

SEQ ID NO: 2550 - DNA, 1363 bp, Phytobacter ursingii
  misc_feature (351)..(352): n is a, c, g, or t
  misc_feature (1031)..(1032): n is a, c, g, or t
cggacgggtgagtaatgtctgggaaactgcccgatggagggggataactactggaaacggtagctaataccgcataacgtcgcaagaccaaagagggggaccttcgggcctcttgccatcggatgtgcccagatgggattagctagtaggtggggtaatggctcacctaggcgacgatccctagctggtctgagaggatgaccagccacactggaactgagacacggtccagactcctacgggaggcagcagtggggaatattgcacaatgggcgcaagcctgatgcagccatgccgcgtgtgtgaagaaggccttcgggttgtaaagcactttcagcggggaggaaggcnntacggttaataaccgtgttgattgacgttacccgcagaagaagcaccggctaactccgtgccagcagccgcggtaatacggagggtgcaagcgttaatcggaattactgggcgtaaagcgcacgcaggcggtctgtcaagtcggatgtgaaatccccgggctcaacctgggaactgcattcgaaactggcaggcttgagtcttgtagaggggggtagaattccaggtgtagcggtgaaatgcgtagagatctggaggaataccggtggcgaaggcggccccctggacaaagactgacgctcaggtggaaaagcgtggggagcaaacaggattagataccctggtagtccacgccgtaaacgatgtcgacttggaggttgtgcccttgaggcgtggcttccggagctaacgcgttaagtcgaccgcctggggagtacggccgcaaggttaaaactcaaatgaattgacgggggcccgcacaagcggtggagcatgtggtttaattcgatgcaacgcgaagaaccttacctggtcttgacatccacggaattcggcagagatgccttagtgccttcgggaaccgtgagacaggtgctgcatggctgtcgtcagctcgtgttgtgaaatgttgggttaagtcccgcaacgagcgcaacccttatcctttgttgccagcggtnnggccgggaactcaaaggagactgccagtgataaactggaggaaggtggggatgacgtcaagtcatcatggcccttacgaccagggctacacacgtgctacaatggcgcatacaaagagaagcgacctcgcgagagcaagcggacctcataaagtgcgtcgtagtccggattggagtctgcaactcgactccatgaagtcggaatcgctagtaatcgtggatcagaatgccacggtgaatacgttcccgggccttgtacacaccgcccgtcacaccatgggagtgggttgcaaaagaagtaggtagcttaaccttcgggagggcgcttacca

SEQ ID NO: 2551 - DNA, 1439 bp, Pigmentiphaga aceris
aacgctagcggaatgccttacacatgcaagtcgaacggcagcacggacttcggtctggtggcgagtggcgaacgggtgagtaatgtatcggaacgtacccagtagcgggggataactactcgaaagagtagctaataccgcatacgccctacgggggaaagggggggatcttcggacctcccactattggagcggctgatatcggattagctagttggtgaggtaaaggctcaccaaggcgacgatccgtagctggtttgagaggacgaccagccacactgggactgagacacggcccagactcctacgggaggcagcagtggggaattttggacaatgggggaaaccctgatccagccattccgcgtgtgtgaagaaggccttcgggttgtaaagcacttttggcgggaaagaaacggcgtcgactaatactcggcgtaactgacggtacccgcagaataagcaccggctaactacgtgccagcagccgcggtaatacgtagggtgcaagcgttaatcggaattactgggcgtaaagcgtgcgcaggcggttcggaaagaaagatgtgaaatcccagggctcaaccttggaactgcatttttaactaccggactagagtatgtcagaggggggtggaattccacgtgtagcagtgaaatgcgtagatatgtggaggaacaccgatggcgaaggcagccccctgggataatactgacgctcatgcacgaaagcgtggggagcaaacaggattagataccctggtagtccacgccctaaacgatgtcaactagctgtcgggaccttcgggttttggtagcgcagctaacgcgtgaagttgaccgcctggggagtacggtcgcaagattaaaactcaaaggaattgacggggacccgcacaagcggtggatgatgtggattaattcgatgcaacgcgaaaaaccttacctacccttgacatgtctagaatcccgaagagatttgggagtgctcgaaagagaactggaacacaggtgctgcatggccgtcgtcagctcgtgtcgtgagatgttgggttaagtcccgcaacgagcgcaacccttgtcattagttgctacgaaagggcactctaatgagactgccggtgacaaaccggaggaaggtggggatgacgtcaggtcctcatggcccttatgggtagggcttcacacgtcatacaatggtcgggacagagggctgccaacccgcgagggggagccaatcccagaaacccgatcgtagtccggattgtagtctgcaactcgactgcatgaagtcggaatcgctagtaatcgcggatcagcatgtcgcggtgaatacgttcccgggtcttgtacacaccgcccgtcacaccatgggagtgggttctaccagaagtaggtagcctaaccgtaaggagggcgcttaccacggtaggattcat

SEQ ID NO: 2552 - DNA, 1444 bp, Pirellula staleyi
aatgaacgttggcggcatggattaggcatgcaagtcgtgcgcgatatgtagcaatacatggagagcggcgaaagggagagtaatacgtaggaacctaccttcgggtctgggatagcggcgggaaactgccggtaataccagatgatgtttccgaaccaaaggtgtgattccgcctgaagaggggcctacgtcgtattagctagttggtagggtaatggcctaccaaggcaaagatgcgtatggggtgtgagagcatgcccccactcactgggactgagacactgcccagacacctacgggtggctgcagtcgagaatcttcggcaatgggcgaaagcctgaccgagcgatgccgcgtgcgggatgaaggccttcgggttgtaaaccgctgtcgtaggggatgaagtgctagggggttctccctctagtttgactgaacctaggaggaagggccggctaatctcgtgccagcagccgcggtaatacgagaggcccaaacgttattcggatttactgggcttaaagagttcgtaggcggtcttgtaagtggggtgtgaaatccctcggctcaaccgaggaactgcgctccaaactacaagacttgagggggatagaggtaagcggaactgatggtggagcggtgaaatgcgttgatatcatcaggaacaccggaggcgaaggcggcttactgggtcctttctgacgctgaggaacgaaagctaggggagcaaacgggattagataccccggtagtcctagccgtaaacgatgagcactggaccggagctctgcacagggtttcggtcgtagcgaaagtgttaagtgctccgcctggggagtatggtcgcaaggctgaaactcaaaggaattgacgggggctcacacaagcggtggaggatgtggcttaattcgaggctacgcgaagaaccttatcctagtcttgacatgcttaggaatcttcctgaaagggaggagtgctcgcaagagagcctttgcacaggtgctgcatggctgtcgtcagctcgtgtcgtgagatgtcgggttaagtcccttaacgagcgaaacccttgtccttagttaccagcgcgtcatggcggggactctaaggagactgccggtgttaaaccggaggaaggtggggatgacgtcaagtcctcatggcctttatgattagggctgcacacgtcctacaatggtgcacacaaagcgacgcaaactcgtgagagccagctaatcgcaaaaaatgtacctcagttcggattgcaggctgcaactcgcctgcatgaagctggaatcgctagtaatcgcgggtcagcataccgcggtgaatgtgttcctgagccttgtacacaccgcccgtcaagccacgaaagtgggggggacccaacagcgctgccgtaaccgcaaggaacaaggcgcctaaggtcaactccgtgattgggact

SEQ ID NO: 2553 - DNA, 1467 bp, Piscirickettsia salmonis
attgaacgctggtggcatgcttaacacatgcaagtcgaacggtagcagatctagcttgctagatgctgacgagtggcggacgggtgagtaacgcgtgggaatttaccttttagtgggggataactttaggaaactgaagctaataccgcataagacctgagggttaaagagggcctctatttataagctcttgctaggagatgagcccgcgttggattagctagttggtagggtaaaggcttaccaaggcgacgatccatagctggtttgagagaatggccagccacactgggactgagacacggcccagactcctacgggaggcagcagtggggaatattggacaatggggggaaccctgatccagcaatgccacgtgtgtgaagaaggccttagggttgtaaagcactttcagcggggaggaaggtaagctaattaatacttggcttaattgacgttacctgcagaagaagcaccggctaactccgtgccagcagccgcggtaatacggagggtgcgagcgttaatcggaattactgggcgtaaagggcgcgtaggcggaagattaagttggatgtgaaatcccagggctcaaccttggaactgcatccgaaactggtattctagagtatggtagaggaaagtggaatttcaggtgtagcggtgaaatgcgtagatatctgaaggaacaccggtggcgaaggcgactttctggatcaatactgacgctgaggcgcgaaagcatgggtagcgaacaggattagataccctggtagtccatgctgtaaacgatgtcaactagccgttggattcccttgaggagtttagtggcgtagctaacgcgataagttgaccgcctggggagtacggccgcaaggttaaaactcaaaggaattgacgggggcccgcacaagcggtggagcatgtggtttaattcgatgcaacgcgaagaaccttacctggtcttgacatcctaagaattctgcagagatgcggaagtgccttcgggagcttagagacaggtgctgcatggctgtcgtcagctcgtgtcgtgagatgttgggttaagtcccgcaacgagcgcaacccttatccttagttgccagcacgtgatggtgggaactctagggagactgccggtgataaaccggaggaaggtggggacgacgtcaagtcatcatggcccttacgaccagggctacacacgtgctacaatggggcgtacagacggaggcgaagcagcgatgtggagcgaacctgagaaagcgcctcgtagtccggattggagtctgcaactcgactccatgaagtcggaatcgctagtaatcgcgaatcagcatgtcgcggtgaatacgttcccgggccttgtacacaccgcccgtcacaccatgggagtgaattgcaccagaaggggctaggctaactttagggaggccggtcaccacggtgtggttcatgactggggtg

SEQ ID NO: 2554 - DNA, 1429 bp, Planctomicrobium piriforme
aatgaacgttggtagcatggattaggcatgcaagtcgagcgacaaggtaccttcgggtactggaggagcggcaaacggggtagtaaggcatcggaacgtaccctcttgtccgggatagccgcgggaaactgcggttaataccggataatcccgaaagggcaaaggtccgccgcgggaggagcggccgatgtgatatcaggtagttggcggggtaacggcccaccaagccatagacgtctaggggatgtgagagcatgatccccaccactgggactgagatactgcccagacacctacgggtggctgcagtcgagaatcttcggcaatgggcgcaagcctgaccgagcgatgctacgtgtgggatgaaggcccttgggttgtaaaccactgtcagaggggatgaaagcgtaagcttgacagagcctcagaggaagcgcgggctaagttcgtgccagcagccgcggtaatacgaactgcgcaaacgttattcggaatcactgggcttacagggtgcgtaggctgccattcaggtccgatgtgaaatcccacagctcaactgtggaatggcattggaaaccgattggcttgagtgagctagagatgcacggaacttccggtggagcggtgaaatgtgttgagatcggaaggaacaccagaggcgaaggcggtgcattggggcttgtctgacgctgaggcacgaaagccaggggagcgaacgggattagataccccggtagtcctggctgtaaacgatcagtactagacggaggggggcttgcccttctcggtcgtagcgaaagcgataagtactgcgcctggggagtatggtcgcaaggctgaaactcaaaggaattgacgggggctcacacaagcggtggagcatgtggcttaattcgaggcaacgcgaagaaccttatcctaggcttgacatgctggaattagttggctgaaaggtcaatgacgccttcgggtggaatcagcacaggtgctgcatggctgtcgtcagctcgtgccgtgaggtgtcgggttaagtccttaaacgagcgaaacccctgtcgtcagttgccagcattcagttggggactctgacgagaccgccggtgtcaaaccggaggaaggcggggacgacgtcaagtcatcatggcctttatgtctagggctgcacacgtgctacaatgcggcgtacaaagggaagccaacccgcgagggggagccaatcccaaaaagcgtcgctcagttcggattgcaggctgcaactcgcctgcatgaagctggaatcgctagtaatcgcaggtcagctatactgcggtgaatgtgttcctgagccttgtacacaccgcccgtcaagccacgaaaggggggggcatcccaagtcgccgagcgaaccgcaaggacgcaggcgcctaagatgaactccctgattgggact

SEQ ID NO: 2555 - DNA, 1394 bp, Planctopirus hydrillae
gtcgagggagacccgcaagggggacaccggcgaacggggtaggaatacataggtaacgtaccctcaggacggggatagccaagggaaactttgggtaatacccgatgtgatgtcaggatgtgaatgcctgccatcaaaggtgagattccacctggggagcggcttatgcatcattagcttgttggcggggtaacggcccaccaaggctgcgatgattagggggtgtgagagcatggcccccaccactggcactgagacactggccagacacctacgggtggctgcagtcgagaatcttcggcaatgggcgaaagcctgaccgagcgatgccgcgtgcgggatgaaggtcttcggattgtaaaccgctgtcggaggggatgaagtgtatgggagcaatctcctgtatttgacagagcctcggaggaagcacgggctaagttcgtgccagcagccgcggtaatacgaactgtgcaaacgttattcggaatcactgggcttacagggtgcgtaggcggcattttaagtcaggtgtgaaatcccccggctcaaccggggaactgcgcctgagactggattgctcgagtgaggcaggggtgtacggaacttccggtggagcggtgaaatgtgtagatatcggaaggaacgccagcagcgaaagcggtacactgggccttgtctgacgctgaggcacgaaagccagggtagcgaacgggattagataccccggtagtcctggccgtaaacaatgagcactgggggagggacgggtcaccgttctttcccgtagcgaaagcgttaagtgctccgcctggggagtatggtcgcaaggctgaaactcaaaggaattgacgggggctcacacaagcggtggagcatgtggcttaattcgaggcaacgcgaagaaccttatcctagacttgacatggtgggattagttggctgaaaggtcaatgacgccttcgggtggaaccatcacaggtgctgcatggctgtcgtcagctcgtgtcgtgagatgtcgcgttaagtcgctaaacgagcgaaacccctgttcttagttgccaacacgtcatggtggggactctaagaagaccgccggcgtcaagccggaggaaggcggggatgacgtcaagtcctcatggcctttatgtctagggctgcacacgtgctacaatgggatgtacagagggacgccaagctgcgaagccgagcaaaccccaaaaagcatccctcagttcggattgcaggctgcaactcgcctgcatgaagccggaatcgctagtaatcgccggtcagcaatacggcggtgaatgtgttcctgagccttgtacacaccgcccgtcaagccacgaaagcggggggcgcctaaagacacttgtctaaccgcaaggaggacg

SEQ ID NO: 2556 - DNA, 1458 bp, Planctopirus limnophila
aatgaacgttggcggcatggattaggcatgcaagtcgagggagaacccgcaagggggacaccggcgaacggggtaggaatacataggtaacgtaccctcaggacggggatagccaagggaaactttgggtaatacccgatgtgatgtcaggatgtgaatgcctgccatcaaaggtgagattccacctgaggagcggcttatgcatcattagcttgttggcggggtaacggcccaccaaggctgcgatgattagggggtgtgagagcatggcccccaccactggcactgagacactggccagacacctacgggtggctgcagtcgagaatcttcggcaatgggcgaaagcctgaccgagcgatgccgcgtgcgggatgaaggccttcgggttgtaaaccgctgtcggaggggatgaagtgtatgggagcaatctcctgtatttgacagagcctcggaggaagcacgggctaagttcgtgccagcagccgcggtaatacgaactgtgcaaacgttattcggaatcactgggcttacagggtgcgtaggcggcattttaagtcaggtgtgaaatcccccggctcaaccggggaactgcgcctgagactggattgctcgagtgaggcaggggtgtacggaacttccggtggagcggtgaaatgtgtagatatcggaaggaacgccagcagcgaaagcggtacactgggccttgtctgacgctgaggcacgaaagccagggtagcgaacgggattagataccccggtagtcctggccgtaaacaatgagcactgggggagggacgggtcaccgttctttcccgtagcgaaagcgttaagtgctccgcctggggagtatggtcgcaaggctgaaactcaaaggaattgacgggggctcacacaagcggtggagcatgtggcttaattcgaggcaacgcgaagaaccttatcctagacttgacatggtgggattagttggctgaaaggtcaatgacgccttcgggtggaaccatcacaggtgctgcatggctgtcgtcagctcgtgtcgtgagatgtcgcgttaagtcgctaaacgagcgaaacccctgttcttagttgccaacacgtcatggtggggactctaagaagaccgccggcgtcaagccggaggaaggcggggatgacgtcaagtcctcatggcctttatgtctagggctgcacacgtgctacaatgggatgtacagagggacgccaagctgcgaagccgagcaaaccccaaaaagcatccctcagttcggattgcaggctgcaactcgcctgcatgaagccggaatcgctagtaatcgccggtcagcaatacggcggtgaatgtgttcctgagccttgtacacaccgcccgtcaagccacgaaagcggggggcgcctaaagacacttgtctaaccgtaaggaggacggtgtttagggcgaaactcgtgattgggact

SEQ ID NO: 2557 - DNA, 1472 bp, Planifilum fimeticola
gacgaacgctggcggcgtgcctaatacatgcaagtcgggcggggttttgaggggcttgcccttcaagacccagcggcgaacgggtgagtaacacgtgggcaacctgcccgcaagaccgggataacttcgggaaaccggagctaataccggataggaccccggatcgcatgatccggggtggaaaggcggcctcggctgccacttgcggatgggcccgcggcgcattagctagttggtgaggtaacggctcaccaaggtgacgatgcgtagccgacctgagagggtgaccggccacactgggactgagacacggcccagactcctacgggaggcagcagtagggaattttccgcaatgggcgcaagcctgacggagcaacgccgcgtgagcgaggacggccttcgggttgtaaagctctgttcttcgggaagaatggcgggagggcgaacaactctcccgcatgacggtaccgaaggagaaagccccggctaactacgtgccagcagccgcggtaatacgtagggggcgagcgttgtccggaattattgggcgtaaagcgcgcgtaggcggccggttaagtcctgtgtgaaagaccacggctcaaccgtgggggtgcatgggaaactggccggcttgagtgcaggagaggggagcggaattcccggtgtagcggtggaatgcgtagagatcgggaggaacaccagtggcgaaggcggctctctggcctgtaactgacgctgaggcgcgaaagcgtggggagcgaacaggattagataccctggtagtccacgccgtaaacgatgagtgctaggtgttgggggcatcaggccctctgtgccgaaggaaacccaataagcactccgcctggggagtacggccgcaaggctcaaactaaaggaattgacgggggcccgcacaagcggtggagcatgtggtttaattcgaagcaacgcgaagaaccttaccagggcttgacatcccgctgaccggtgcagagatgcgccttcccttcggggcagcggtgacaggtggtgcatggttgtcgtcagctcgtgtcgtgagatgttgggttcagtcccgcaacgagcgcaacccttgcccttagttgccagcgggtaaagccgggcactctaaggggacagccggtgaaagccggaggaaggtggggatgacgtcaaatcatcatgccccttatgtcctgggctacacacgtgctacaatggccggtacaaagggcagcgaacccgcgagggggagccaatcccaaaaagccggtctcagttcggatcgcaggctgcaactcgcctgcgtgaaggcggaatcgctagtaatcgcggatcagcatgccgcggtgaatacgttcccgggccttgtacacaccgcccgtcacacacgagagtctgcaacacccgaagtcggtgagccaacccgcaagggggcagccgccgaaggtggggcagatgattggggtg

SEQ ID NO: 2558 - DNA, 1478 bp, Planifilum fulgidum
gacgaacgctggcggcgtgcctaatacatgcaagtcgtgcggggtcttgaagggcttgccctttaagacccagcggcgaacgggtgagtaacacgtgggtaacctgcccgcaagaccgggataactccgggaaaccggggctaataccggataagactccggatcgcatgatccggagtggaaaggcggcgtcaagctgccacttgcggatgggcccgcggcgcattagctggttggtgaggtaacggctcaccaaggcgacgatgcgtagccgacctgagagggtgatcggccacactgggactgagacacggcccagactcctacgggaggcagcagtagggaatcttccgcaatgggcgcaagcctgacggagcaacgccgcgtgagcgaggacggccttcgggttgtaaagctctgttcttcgggaagaagggcgggagggcgaacaactcttccgcttgacggtaccgaaggagaaagccccggctaactacgtgccagcagccgcggtaatacgtagggggcgagcgttgtccggaattattgggcgtaaagcgcgcgtaggcggctggttaagtcctgtgtgaaagaccacggctcaaccgtgggggtgcacgggaaactggccggcttgagtgcaggagaggggagcggaattcccggtgtagcggtggaatgcgtagagatcgggaggaacaccagtggcgaaggcggctccctggcctgtaactgacgctgaggcgcgaaagcgtggggagcgaacaggattagataccctggtagtccacgccgtaaacgatgagtgctaggtgttgggggcgtcaggccctctgtgccgaaggtaacccaataagcactccgcctggggagtacggccgcaaggctgaaactcaaaggaattgacgggggcccgcacaagcggtggagcatgtggtttaattcgaagcaacgcgaagaaccttaccagggcttgacatcccgctgaccggtgcagagatgtgcccttcccttcggggacagcggtgacaggtggtgcatggttgtcgtcagctcgtgtcgtgagatgttgggttcagtcccgcaacgagcgcaacccttgcccttagttgccagcgggttaggccgggcactctaaggggacagccggtgaaagccggaggaaggtggggatgacgtcaaatcatcatgccccttatgccctgggctacacacgtgctacaatggccggtacaatgggctgcgaacccgcgagggggagccaatcccaaaaagccggtctcagttcggatcgcaggctgcaactcgcctgcgtgaagccggaatcgctagtaatcgcggatcagcatgccgcggtgaatacgttcccgggccttgtacacaccgcccgtcacaccacgagagtctgcaacacccgaagtcggtgagctaacccgcaagggaggcagccgccgaaggtggggcagatgattggggtg

SEQ ID NO: 2559 - DNA, 1412 bp, Planktothrix agardhii
gatgaacgctggcggtctgcttaacacatgcaagtcgaacggaatccttcgggatttagtggcggacgggtgagtaacacgtaagaacctgcctctaggacggggacaacagttggaaacgactgctaaacccggatgagccgaaaggtaaaagattaatcgcctagagaggggcttgcgtctgattagctagttggtgaggtaagagcccaccaaggcgacgatcagtagctggtctgagaggatgatcagccacactgggactgagacacggcccagactcctacgggaggcagcagtggggaattttccgcaatgggcgaaagctgacggagcaagaccgcgtgggggaggaaggttcttggattgtcaaccccttttctcagggaagaacacaatgacggtacctgaggaaaaagcatcggctaactccgtgccagcagccgcggtaatacgggggatgcaagcgttatccggaatgattgggcgtaaagagtccgtaggtagtcatccaagtctgctgttaaagagcgaggcttaacctcgtaaaggcagtggaaactggaagactagagtgtagtaggggcagagggaattcctggtgtagcggtgaaatgcgtagagatcaggaagaacaccggtggcgaaggcgctctgctgggctataactgacactgagggacgaaagctaggggagcgaatgggattagataccccagtagtcctagcggtaaacgatggaaactaggtgtggcctgtatcgacccgggccgtgccgaagcaaacgcgttaagtttcccgcctggggagtacgcacgcaagtgtgaaactcaaaggaattgacgggggcccgcacaagcggtggagtatgtggtttaattcgatgcaacgcgaagaaccttaccaggacttgacatctctggaatctccttgaaaggggagagtgccgtaaggaaccagaagacaggtgctgcatggctgtcgtcagctcgtgtcgtgagatgttgggttaagtcccgcaacgagcgcaaccctcgtcgttagttgccatcattaagttgggaactctagcgagactgccggtgacaaaccggaggaaggtgaggatgacgtcaagtcagcatggcccttacgtcctgggcgacacacgtactacaatgcgagggacagagagcagccaacccgcgagggagagcgaatctcataaaccctggcacagttcagattgcaggctgcaactcgcctgcatgaaggaggaatcgctagtaatcggaggtcagcatactgcggtgaatccgttcccgggccttgtacacaccgcccgtcacaccatggaagtgagccacgcccgaagtcattactctaacccgaaagggaggagggtgccgaaggcggggttgatgactggggtg

SEQ ID NO: 2560 - DNA, 1413 bp, Planktothrix rubescens
gatgaacgctggcggtctgcttaacacatgcaagtcgaacggaatccttcgggatttagtggcggacgggtgagtaacacgtaagaacctgcctctaggacggggacaacagttggaaacgactgctaaacccggatgagccgaaaggtaaaagattaatcgcctagagaggggcttgcgtctgattagctagttggtgaggtaagagcccaccaaggcgacgatcagtagctggtctgagaggatgatcagccacactgggactgagacacggcccagactcctacgggaggcagcagtggggaattttccgcaatgggcgaaagcctgacggagcaagaccgcgtgggggaggaaggttcttggattgtcaaccccttttctcagggaagaacacaatgacggtacctgaggaaaaagcatcggctaactccgtgccagcagccgcggtaatacgggggatgcaagcgttatccggaatgattgggcgtaaagagtccgtaggtagtcatccaagtctgctgttaaagagcgaggcttaacctcgtaaaggcagtggaaactggaagactagagtgtagtaggggcagagggaattcctggtgtagcggtgaaatgcgtagagatcaggaagaacaccggtggcgaaggcgctctgctgggctataactgacactgagggacgaaagctaggggagcgaatgggattagataccccagtagtcctagcggtaaacgatggaaactaggtgtggcctgtatcgacccgggccgtgccgaagcaaacgcgttaagtttcccgcctggggagtacgcacgcaagtgtgaaactcaaaggaattgacgggggcccgcacaagcggtggagtatgtggtttaattcgatgcaacgcgaagaaccttaccaggacttgacatctctggaatctccttgaaaggggagagtgccgtaaggaaccagaagacaggtgctgcatggctgtcgtcagctcgtgtcgtgagatgttgggttaagtcccgcaacgagcgcaaccctcgtcgttagttgccatcattaagttgggaactctagcgagactgccggtgacaaaccggaggaaggtgaggatgacgtcaagtcagcatggcccttacgtcctgggcgacacacgtactacaatgcgagggacagagagcagccaacccgcgagggagagcgaatctcataaaccctggcacagttcagattgcaggctgcaactcgcctgcatgaaggaggaatcgctagtaatcgcaggtcagcatactgcggtgaatccgttcccgggccttgtacacaccgcccgtcacaccatggaagtgagccacgcccgaagtcattactctaacccgaaagggaggagggtgccgaaggcggggttgatgactggggtg

SEQ ID NO: 2561 - DNA, 1474 bp, Planococcus antarcticus
gacgaacgctggcggcgtgcctaatacatgcaagtcgagcggaaccagaggagcttgctccttctggtttagcggcggacgggtgagtaacacgtgggcaacctgccctgcagatcgggataactccgggaaaccggtgctaataccgaatagtttgtcgcctctcctgaggcggcacggaaagacggcatctcgctgtcactgcaggatgggcccgcggcgcattagctagttggtggggtaatggcctaccaaggcgacgatgcgtagccgacctgagagggtgatcggccacactgggactgagacacggcccagactcctacgggaggcagcagtagggaatcttccgcaatggacgaaagtctgacggagcaacgccgcgtgagtgacgaaggttttcggatcgtaaaactctgttgtgagggaagaacaagtaccaactaactactggtaccttgacggtacctcaccagaaagccacggctaactacgtgccagcagccgcggtaatacgtaggtggcaagcgttgtccggaattattgggcgtaaagcgcgcgcaggcggttctttaagtctgatgtgaaagcccacggctcaaccgtggagggtcattggaaactggagaacttgagtgcagaagaggaaagtggaattccatgtgtagcggtgaaatgcgtagagatgtggaggaacaccagtggcgaaggcgactttctggtctgtaactgacgctgaggcgcgaaagcgtggggagcaaacaggattagataccctggtagtccacgccgtaaacgatgagtgctaagtgttagggggtttccgccccttagtgctgcagctaacgcattaagcactccgcctggggagtacggccgcaaggctgaaactcaaaggaattgacgggggcccgcacaagcggtggagcatgtggtttaattcgaagcaacgcgaagaaccttaccaggtcttgacatcccgctgcccggtgtagagatacgcctttcccttcggggacagcggtgacaggtggtgcatggttgtcgtcagctcgtgtcgtgagatgttgggttaagtcccgcaacgagcgcaacccttgatcttagttgccagcattcagttgggcactctaaggtgactgccggtgacaaaccggaggaaggtggggatgacgtcaaatcatcatgccccttatgacctgggctacacacgtgctacaatggacggtacaaagggctgcaaccccgcgagggcaagccaatcccagaaaaccgttctcagttcggattgcaggctgcaactcgcctgcatgaagccggaatcgctagtaatcgtggatcagcatgccacggtgaatacgttcccgggccttgtacacaccgcccgtcacaccacgagagtttgtaacacccgaagtcggtgaggtaacccttgtggagccagccgccgaaggtgggacggatgattggggtg

SEQ ID NO: 2562 - DNA, 1411 bp, Planococcus citreus
  misc_feature (149)..(149): n is a, c, g, or t
  misc_feature (197)..(197): n is a, c, g, or t
  misc_feature (203)..(203): n is a, c, g, or t
  misc_feature (773)..(773): n is a, c, g, or t
  misc_feature (841)..(841): n is a, c, g, or t
gacgaacgctggcggcgtgcctaatacatgcaagtcgagcggagatagtggagcttgctccattatcttcagcggcggacgggtgagtaacacgtgggcaacctgccctgcagatcgggataactccgggaaaccggtgctaataccgnatagtttgcggcctctcatgaggctgcacggaaagacggtttcggctntcactnacagaatggcccgcggcgcattagctagttggtgaggtaacggctcaccaaggccacgatgcgtagccgacctgagagggtgatcggccacactgggactgagacacggcccagactcctacgggaggcagcagtagggaatcttccgcaatggacgaaagtctgacggagcaacgccgcgtgagtgaagaaggttttcggatcgtaaaactctgttgtgagggaagaacaagtaccaagtaactactggtaccttgacggtacctcaccagaaagccacggctaactacgtgccagcagccgcggtaatacgtaggtggcaagcgttgtccggaattattgggcgtaaagcgcgcgcaggcggtcctttaagtctgatgtgaaagcccacggctcaaccgtggagggtcattggaaactgggggacttgagtgcagaagaggaaagtggaattccacgtgtagcggtgaaatgcgtagagatgtggaggaacaccagtggcgaaggcgactttctggtctgtaactgacgctgaggcgcgaaagcgtggggagcaaacaggattagatnccctggtagtccacgccgtaaacgatgagtgctaagtgttagggggtttccgccccttagtgctgcantaacgcattaagcactccgcctggggagtacggccgcaaggctgaaactcaaaggaattgacgggggcccgcacaagcggtggagcatgtggtttaattcgaagcaacgcgaagaaccttaccaggtcttgacatcccgctgaccgcctaggagactaggcttttccttcggggacagcggtgacaggtggtgcatggttgtcgtcagctcgtgtcgtgagatgttgggttaagtcccgcaacgagcgcaacccttgatcttagttgccagcattcagttgggcactctaaggtgactgccggtgacaaaccggaggaaggtggggatgacgtcaaatcatcatgccccttatgacctgggctacacacgtgctacaatggacggtacaaagggctgcaaacccgcgagggggagccaatcccagaaaaccgttctcagttcggattgcaggctgcaactcgcctgcatgaagccggaatcgctagtaatcgcggatcagcatgccgcggtgaatacgttcccgggccttgtacacaccgcccgtcacaccacgagagtttgtaacaccc

SEQ ID NO: 2563 - DNA, 1469 bp, Planococcus donghaensis
gacgaacgctggcggcgtgcctaatacatgcaagtcgagcggaaccagaggagcttgctccttctggtttagcggcggacgggtgagtaacacgtgggcaacctgccctgcagatcgggataactccgggaaaccggtgctaataccgaatagtttgcggcctctcctgaggctgcacggaaagacggtttcggctgtcactgcaggatgggcccgcggcgcattagctagttggtggggtaatggcctaccaaggcgacgatgcgtagccgacctgagagtgatcggccacactgggactgagacacggcccagactcctacgggaggcagcagtagggaatcttccgcaatggacgaaagtctgacggagcaacgccgcgtgagtgacgaaggttttcggatcgtaaaactctgttgtgagggaagaacaagtaccaactaactactggtaccttgacggtacctcaccagaaagccacggctaactacgtgccagcagccgcggtaatacgtaggtggcaagcgttgtccggaattattgggcgtaaagcgcgcgcaggcggtcctttaagtctgatgtgaaagcccacggctcaaccgtggagggtcattggaaactggggacttgagtgcagaagaggaaagtggaattccatgtgtagcggtgaaatgcgtagagatgtgaggaacaccagtggcgaaggcgactttctggtctgtaactgacgctgaggcgcgaaagcgtggggagcaaacaggattagataccctggtagtccacgccgtaaacgatgagtgctaagtgttagggggtttccgccccttagtgctgcagctaacgcattaagcactccgcctggggagtacggccgcaaggctgaaactcaaaggaattgacgggggcccgcacaagcggtggagcatgtggtttaattcgaagcaacgcgaagaaccttaccaggtcttgacatcccactgcccggtgtagagatacgcttttcccttcggggacagtggtgacaggtggtgcatggttgtcgtcagctcgtgtcgtgagatgttgggttaagtcccgcaacgagcgcaacccttgatcttagttgccagcatttagttgggcactctaaggtgactgccggtgacaaaccggaggaaggtggggatgacgtcaaatcatcatgccccttatgacctgggctacacacgtgctacaatggacggtacaaagggttgccaacccgcgagggggagccaatcccataaaaccgttctcagttcggattgtaggctgcaactcgcctgcatgaagccggaatcgctagtaatcgtggatcagcatgccacggtgaatacgttcccgggccttgtacacaccgcccgtcacaccacgagagtttgtaacacccgaagtcggtgaggtaacccttgtggagccagccgccgaaggtgggacagatgattggggtg

SEQ ID NO: 2564 - DNA, 1473 bp, Planococcus halocryophilus
gacgaacgctggcggcgtgcctaatacatgcaagtcgagcggaaccagaggagcttgctccttctggtttagcggcggacgggtgagtaacacgtgggcaacctgccctgcagatcgggataactccgggaaaccggtgctaataccgaatagtttgcggcctctcctgaggctgcacggaaagacggtttcggctgtcactgcaggatgggcccgcggcgcattagctagttggtggggtaatggcctaccaaggcgacgatgcgtagccgacctgagagggtgatcggccacactgggactgagacacggcccagactcctacgggaggcagcagtagggaatcttccgcaatggacgaaagtctgacggagcaacgccgcgtgagtgacgaaggttttcggatcgtaaaactctgttgtgagggaagaacaagtaccaactaactactggtaccttgacggtacctcaccagaaagccacggctaactacgtgccagcagccgcggtaatacgtaggtggcaagcgttgtccggaattattgggcgtaaagcgcgcgcaggcggttctttaagtctgatgtgaaagcccacggctcaaccgtggagggtcattggaaactggagaacttgagtgcagaagaggaaagtggaattccatgtgtagcggtgaaatgcgtagagatgtggaggaacaccagtggcgaaggcgactttctggtctgtaactgacgctgaggcgcgaaagcgtggggagcaaacaggattagataccctggtagtccacgccgtaaacgatgagtgctaagtgttagggggtttccgccccttagtgctgcagctaacgcattaagcactccgcctggggagtacggccgcaaggctgaaactcaaaggaattgacgggggcccgcacaagcggtggagcatgtggtttaattcgaagcaacgcgaagaaccttaccaggtcttgacatcccactgaccggtgtagagatacacttttcccttcggggacagtggtgacaggtggtgcatggttgtcgtcagctcgtgtcgtgagatgttgggttaagtcccgcaacgagcgcaacccttgatcttagttgccagcattcagttgggcactctaaggtgactgccggtgacaaaccggaggaaggtggggatgacgtcaaatcatcatgccccttatgacctgggctacacacgtgctacaatggacggtacaaagggttgccaacccgcgagggggagccaatcccataaaaccgttctcagttcggattgtaggctgcaactcgcctgcatgaagccggaatcgctagtaatcgtggatcagcatgccacggtgaatacgttcccgggccttgtacacaccgcccgtcacaccacgagagtttgtaacacccgaagtcggtgaggtaacccttgtggagccagccgccgaaggtgggacggatgattggggtg

SEQ ID NO: 2565 - DNA, 1472 bp, Planococcus kocurii
gacgaacgctggcggcgtgcctaatacatgcaagtcgagcggaactttgggagcttgctcccattgtttagcggcggacgggtgagtaacacgtgggcaacctgccctgcagatcgggataactccgggaaaccggtgctaataccgaatagtttgcggcctctcctgaggctgcacggaaagacggtttcggctgtcactgcaggatgggcccgcggcgcattagctagttggtggggtaatggcctaccaaggcgacgatgcgtagccgacctgagagggtgatcggccacactgggactgagacacggcccagactcctacgggaggcagcagtagggaatcttccgcaatggacgaaagtctgacggagcaacgccgcgtgagtgacgaaggttttcggatcgtaaaactctgttgtgagggaagaacaagtaccaagtaactactggtaccttgacggtacctcaccagaaagccacggctaactacgtgccagcagccgcggtaatacgtaggtggcaagcgttgtccggaattattgggcgtaaagcgcgcgcaggcggttccttaagtccgatgtgaaagcccacggctcaaccgtggagggtcattggaaactggggaacttgagtgcagaagaggaaagtggaattccatgtgtagcggtgaaatgcgtagagatgtggaggaacaccagtggcgaaggcgactttctggtctgtaactgacgctgaggcgcgaaagcgtggggagcaaacaggattagataccctggtagtccacgccgtaaacgatgagtgctaagtgttagggggtttccgccccttagtgctgcagctaacgcattaagcactccgcctggggagtacggccgcaaggctgaaactcaaaggaattgacgggggcccgcacaagcggtggagcatgtggtttaattcgaagcaacgcgaagaaccttaccaggtcttgacatcccactgaccggtgtagagatacacttttcccttcggggacagtggtgacaggtggtgcatggttgtcgtcagctcgtgtcgtgagatgttgggttaagtcccgcaacgagcgcaacccttgatcttagttgccagcattcagttgggcactctaaggtgactgccggtgacaaaccggaggaaggtggggatgacgtcaaatcatcatgccccttatgacctgggctacacacgtgctacaatggacggtacaaagggctgcaaccccgcgagggcaagccaatcccagaaaaccgttctcagttcggattgcaggctgcaactcgcctgcatgaagccggaatcgctagtaatcgtggatcagcatgccacggtgaatacgttcccgggccttgtacacaccgcccgtcacaccacgagagtttgtaacacccgaagtcggtgaggtaacccttgtggagccagccgccgaaggtgggacagatgattggggtg

SEQ ID NO: 2566 - DNA, 1411 bp, Planococcus maitriensis
gacgaacgctggcggcgtgcctaatacatgcaagtcgagcggagatcttggagcttgctccaggatcttagcggcggacgggtgagtaacacgtgggcaacctgccctgcagatcgggataactccgggaaaccggtgctaataccgaatagtttgcggcctctcatgaggccacacggaaagacggtttcggctgtcactgcaggatgggcccgcggcgcattagctagttggtggggtaacggcctaccaaggcaacgatgcgtagccgacctgagagggtgatcggccacactgggactgagacacggcccagactcctacgggaggcagcagtagggaatcttccgcaatggacgaaagtctgacggagcaacgccgcgtgagtgaagaaggttttcggatcgtaaaactctgttgtgagggaagaacaagtaccaactaactattggtaccttgacggtacctcaccagaaagccacggctaactacgtgccagcagccgcggtaatacgtaggtggcaagcgttgtccggaattattgggcgtaaagcgcgcgcaggcggtcctttaagtctgatgtgaaagcccacggctcaaccgtggagggtcattggaaactgggggacttgagtgcagaagaggaaagtggaattccacgtgtagcggtgaaatgcgtagagatgtggaggaacaccagtggcgaaggcgactttctggtctgtaactgacgctgaggcgcgaaagcgtggggagcaaacaggattagataccctggtagtccacgccgtaaacgatgagtgctaagtgttagggggtttccgccccttagtgctgcagctaacgcattaagcactccgcctggggagtacggccgcaaggctgaaactcaaaggaattgacgggggcccgcacaagcggtggagcatgtggtttaattcgaagcaacgcgaagaaccttaccaggtcttgacatcccgctgaccgccttggagacaaggctttcccttcggggacagcggtgacaggtggtgcatggttgtcgtcagctcgtgtcgtgagatgttgggttaagtcccgcaacgagcgcaacccttgatcttagttgccagcattcagttgggcactctaaggtgactgccggtgacaaaccggaggaaggtggggatgacgtcaaatcatcatgccccttatgacctgggctacacacgtgctacaatggacggtacaaagggtcgcgaacccgcgagggggagccaatcccagaaaaccgttctcagttcggattgcaggctgcaactcgcctgcatgaagccggaatcgctagtaatcgcggatcagcatgccgcggtgaatacgttcccgggccttgtacacaccgcccgtcacaccacgagagtttgtaacaccc

SEQ ID NO: 2567 - DNA, 1473 bp, Planococcus maritimus
gacgaacgctggcggcgtgcctaatacatgcaagtcgagcggaaccattggagcttgctcctttggtttagcggcggacgggtgagtaacacgtgggcaacctgccctgcagatcgggataactccgggaaaccggtgctaataccgaatagtttgcggcctctcatgaggctgtacggaaagacggtttcggctgtcactgcaggatgggcccgcggcgcattagctagttggtggggtaatggcctaccaaggcgacgatgcgtagccgacctgagagggtgatcggccacactgggactgagacacggcccagactcctacgggaggcagcagtagggaatcttccgcaatggacgaaagtctgacggagcaacgccgcgtgagtgaagaaggttttcggatcgtaaaactctgttgtgagggaagaacaagtaccaactaactattggtaccttgacggtacctcaccagaaagccacggctaactacgtgccagcagccgcggtaatacgtaggtggcaagcgttgtccggaattattgggcgtaaagcgcgcgcaggcggtcctttaagtctgatgtgaaagcccacggctcaaccgtggagggtcattggaaactgggggacttgagtgcagaagaggaaagtggaattccacgtgtagcggtgaaatgcgtagagatgtggaggaacaccagtggcgaaggcgactttctggtctgtaactgacgctgaggcgcgaaagcgtggggagcaaacaggattagataccctggtagtccacgccgtaaacgatgagtgctaagtgttagggggtttccgccccttagtgctgcagctaacgcattaagcactccgcctggggagtacggccgcaaggctgaaactcaaaggaattgacgggggcccgcacaagcggtggagcatgtggtttaattcgaagcaacgcgaagaaccttaccaggtcttgacatcccgctgaccgcctaggagactaggctttcccttcggggacagcggtgacaggtggtgcatggttgtcgtcagctcgtgtcgtgagatgttgggttaagtcccgcaacgagcgcaacccttgatcttagttgccagcattcagttgggcactctaaggtgactgccggtgacaaaccggaggaaggtggggatgacgtcaaatcatcatgccccttatgacctgggctacacacgtgctacaatggacggtacaaagggctgcaaacccgcgagggggagccaatcccagaaaaccgttctcagttcggattgtaggctgcaactcgcctgcatgaagccggaatcgctagtaatcgcggatcagcatgccgcggtgaatacgttcccgggccttgtacacaccgcccgtcacaccacgagagtttgtaacacccgaagtcggtggggtaacccttacgggagccagccgccgaaggtgggacagatgattggggtg

SEQ ID NO: 2568 - DNA, 1473 bp, Planococcus plakortidis
gacgaacgctggcggcgtgcctaatacatgcaagtcgagcggaaccattggagcttgctcctttggtttagcggcggacgggtgagtaacacgtgggcaacctgccctgcagatcgggataactccgggaaaccggtgctaataccgaatagtttgtggcctctcatgaggctgcacggaaagacggtttcggctgtcactgcaggatgggcccgcggcgcattagctagttggtggggtaacggcccaccaaggcgacgatgcgtagccgacctgagagggtgatcggccacactgggactgagacacggcccagactcctacgggaggcagcagtagggaatcttccgcaatggacgaaagtctgacggagcaacgccgcgtgagtgaagaaggttttcggatcgtaaaactctgttgtgagggaagaacaagtaccaagtaactactggtaccttgacggtacctcaccagaaagccacggctaactacgtgccagcagccgcggtaatacgtaggtggcaagcgttgtccggaattattgggcgtaaagcgcgcgcaggcggtcctttaagtctgatgtgaaagcccacggctcaaccgtggagggtcattggaaactgggggacttgagtgcagaagaggaaagtggaattccacgtgtagcggtgaaatgcgtagagatgtggaggaacaccagtggcgaaggcgactttctggtctgtaactgacgctgaggcgcgaaagcgtggggagcaaacaggattagataccctggtagtccacgccgtaaacgatgagtgctaagtgttagggggtttccgccccttagtgctgcagctaacgcattaagcactccgcctggggagtacggccgcaaggctgaaactcaaaggaattgacgggggcccgcacaagcggtggagcatgtggtttaattcgaagcaacgcgaagaaccttaccaggtcttgacatcccgctgaccgccttggagacaaggctttcccttcggggacagcggtgacaggtggtgcatggttgtcgtcagctcgtgtcgtgagatgttgggttaagtcccgcaacgagcgcaacccttgatcttagttgccagcattcagttgggcactctaaggtgactgccggtgacaaaccggaggaaggtggggatgacgtcaaatcatcatgccccttatgacctgggctacacacgtgctacaatggacggtacaaagggtcgcgaacccgcgagggggagccaatcccagaaaaccgttctcagttcggattgcaggctgcaactcgcctgcatgaagccggaatcgctagtaatcgcggatcagcatgccgcggtgaatacgttcccgggccttgtacacaccgcccgtcacaccacgagagtttgtaacacccgaagtcggtggggtaacccttatgggagccagccgccgaaggtgggacagatgattggggtg

SEQ ID NO: 2569 - DNA, 1478 bp, Planococcus salinus
gacgaacgctggcggcgtgcctaatacatgcaagtcgagcggaaaccgggggagcttgctcccttcggtttcagcggcggacgggtgagtaacacgtgggcaacctgccctgcagatcgggataactccgggaaaccggagctaataccggatagcttgcggcctctcatgaggctgcacggaaaggcggcttttggctgccactgcaggatgggcccgcggcgcattagctggttggtggggtaacggcccaccaaggcgacgatgcgtagccgacctgagagggtgatcggccacactgggactgagacacggcccagactcctacgggaggcagcagtagggaatcttccgcaatggacgcaagtctgacggagcaacgccgcgtgagtgaagaaggttttcggatcgtaaaactctgttgtgagggaagaacaagtgccagagtaactgctggcaccttgacggtacctcaccagaaagccacggctaactacgtgccagcagccgcggtaatacgtaggtggcaagcgttgtccggaattattgggcgtaaagcgcgcgcaggcggtcttttaagtctgatgtgaaagcccacggctcaaccgtggagggtcattggaaactggaggacttgagtgcagaagaggaaagtggaattccacgtgtagcggtgaaatgcgtagagatgtggaggaacaccagtggcgaaggcgactttctggtctgtaactgacgctgaggcgcgaaagcgtggggagcaaacaggattagataccctggtagtccacgccgtaaacgatgagtgctaagtgttagggggtttccgccccttagtgctgcagctaacgcattaagcactccgcctggggagtacggccgcaaggctgaaactcaaaggaattgacgggggcccgcacaagcggtggagcatgtggtttaattcgaagcaacgcgaagaaccttaccaggtcttgacatcccgctgaccgccctggagacagggctttcccttcggggacagcggtgacaggtggtgcatggttgtcgtcagctcgtgtcgtgagatgttgggttaagtcccgcaacgagcgcaacccttgatcttagttgccagcattcagttgggcactctaaggtgactgccggtgacaaaccggaggaaggtggggatgacgtcaaatcatcatgccccttatgacctgggctacacacgtgctacaatggacggtacaaagggtcgcgaacccgcgaggggaagccaatcccagaaaaccgttctcagttcggattgcaggctgcaactcgcctgcatgaagccggaatcgctagtaatcgtggatcagcatgccacggtgaatacgttcccgggccttgtacacaccgcccgtcacaccacgagagtttgtaacacccgaagtcggtggggtaacccgcatgggagccagccgccgaaggtgggacagatgattggggtg

SEQ ID NO: 2570 - DNA, 1453 bp, Planomicrobium glaciei
tgctatacatgcaagtcgagcggaagttgaagagcttgctcttcaactttagcggcggacgggtgagtaacacgtgggcaacctgccctgcagatcgggataactccgggaaaccggtgctaataccgaatagttttgggtccctcctgggacccaacggaaagacggtttcggctgtcactgcaggatgggcccgcggcgcattagctagttggtggggtaacggcccaccaaggccacgatgcgtagccgacctgagagggtgatcggccacactgggactgagacacggcccagactcctacgggaggcagcagtagggaatcttccgcaatggacgcaagtctgacggagcaacgccgcgtgagtgatgaaggttttcggatcgtaaaactctgttgcgagggaagaaaccgtgccagctaactactggcaccttgacggtacctcgccagaaagccacggctaactacgtgccagcagccgcggtaatacgtaggtggcaagcgttgtccggaattattgggcgtaaagcgcgcgcaggcggtcccttaagtctgatgtgaaagcccacggctcaaccgtggagggtcattggaaactgggggacttgagtgcagaagaggaaagtggaattccatgtgtagcggtgaaatgcgtagagatgtggaggaacaccagtggcgaaggcgactttctggtctgtaactgacgctgaggcgcgaaagcgtggggagcaaacaggattagataccctggtagtccacgccgtaaacgatgagtgctaagtgttagggggtttccgccccttagtgctgcagctaacgcattaagcactccgcctggggagtacggccgcaaggctgaaactcaaaggaattgacgggggcccgcacaagcggtggagcatgtggtttaattcgaagcaacgcgaagaaccttaccaggtcttgacatcccgctgaccgccttggagacaaggctttcccttcggggacagcggtgacaggtggtgcatggttgtcgtcagctcgtgtcgtgagatgttgggttaagtcccgcaacgagcgcaacccttgatcttagttgccagcattcagttgggcactctaaggtgactgccggtgacaaaccggaggaaggtggggatgacgtcaaatcatcatgccccttatgacctgggctacacacgtgctacaatggacggtacaaagggttgccaacccgcgagggggagccaatcccagaaaaccgttctcagttcggattgcaggctgcaactcgcctgcatgaagccggaatcgctagtaatcgtggatcagcatgccacggtgaatacgttcccgggccttgtacacaccgcccgtcacaccacgagagtttgtaacacccgaagtcggtgaggtaacccttgtggagccagccgccgaaggtgggacagatgattggggtg

SEQ ID NO: 2571 - DNA, 1454 bp, Planomicrobium soli
gcctaatacatgcaagtcgagcggaaccggaagagcttgctcttccggtttagcggcggacgggtgagtaacacgtgggcaacctgccctgcagatcgggataactccgggaaaccggtgctaataccgaatagtttggaacctctcctgaggttccacggaaagacggtttcgactgtcactgcaggatgggcccgcggcgcattagctagttggtggggtaacggcccaccaaggcgacgatgcgtagccgacctgagagggtgatcggccacactgggactgagacacggcccagactcctacgggaggcagcagtagggaatcttccgcaatggacgcaagtctgacggagcaatgccgcgtgagtgacgaaggttttcggatcgtaaaactctgttgtgagggaagaaaccgtaccaagtaactactggtaccttgacggtacctcaccagaaagccacggctaactacgtgccagcagccgcggtaatacgtaggtggcaagcgttgtccggaattattgggcgtaaagcgcgcgcaggcggtcctttaagtctgatgtgaaagcccacggctcaaccgtggagggtcattggaaactggaggacttgagtgcagaagaggaaagtggaattccacgtgtagcggtgaaatgcgtagagatgtggaggaacaccagtggcgaaggcgactttctggtctgtaactgacgctgaggcgcgaaagcgtggggagcaaacaggattagataccctggtagtccacgccgtaaacgatgagtgctaagtgttagggggtttccgccccttagtgctgcagctaacgcattaagcactccgcctggggagtacggccgcaaggctgaaactcaaaggaattgacgggggcccgcacaagcggtggagcatgtggtttaattcgaagcaacgcgaagaaccttaccaggtcttgacatcccgctgaccgccttggagacaaggctttcccttcggggacagcggtgacaggtggtgcatggttgtcgtcagctcgtgtcgtgagatgttgggttaagtcccgcaacgagcgcaacccttgatcttagttgccagcattcagttgggcactctaaggtgactgccggtgacaaaccggaggaaggtggggatgacgtcaaatcatcatgccccttatgacctgggctacacacgtgctacaatggacggtacaaagggcagccaacccgcgagggggagccaatcccagaaaaccgttctcagttcggattgcaggctgcaactcgcctgcatgaagccggaatcgctagtaatcgtggatcagcatgccacggtgaatacgttcccgggccttgtacacaccgcccgtcacaccacgagagtttgtaacacccgaagtcggtgaggtaacccttgtggagccagccgccgaaggtgggacagatgattggggtg

SEQ ID NO: 2572 - DNA, 1457 bp, Plasticicumulans acidivorans
attgaacgctggcggcatgcttaacacatgcaagtcgaacgggatcctggtttcggccgggtgagagtggcggacgggtgagtaatacgtaggaatctgcccacgggtgggggacaacatggggaaactcatgctaataccgcataagccctaagggggaaagcgggggaccttcgggcctcgcgccggtggatgagcctacgtcggattagctagttggtagggtaagagcctaccaaggcgacgatccgtagctggtctgagaggatgatcagccacactgggactgagacacggcccagactcctacgggaggcagcagtggggaatattggacaatgggcgcaagcctgatccagcaatgccgcgtgtgtgaagaaggcctgcgggttgtaaagcactttaagcagggaggaggggtactggcgtgaatagcgttggtatctgacgttacctgcagaataagcaccggctaacttcgtgccagcagccgcggtaatacgaagggtgcaagcgttaatcggaattactgggcgtaaagcgcgtgtaggcggttatttaagtcagatgtgaaagccccgggctcaacctgggaatggcatttgatactgggtaactggaatgtggtagagggaggcggaatttccggtgtagcggtgaaatgcgtagatatcggaaagaacaccaatggcgaaggcagcctcctgggccaacattgacgctgagacgcgaaagcgtggggagcaaacaggattagataccctggtagtccacgccctaaacgatgagaactggacggtggggaggtcactcttcgctgttgaagctaacgcgttaagttctccgcctggggagtacggccgcaaggttgaaactcaaaggaattgacgggggcccgcacaagcggtggagcatgtggtttaattcgatgcaacgcgaagaaccttacctggccttgacatctgtcgaattctgcagagatgcggaagtgccttcgggagcgacaagacaggtgctgcatggctgtcgtcagctcgtgtcgtgagatgttgggttaagtcccgcaacgagcgcaacccttgtccttagttgccagcacttcgggtgggaactctaaggagactgccggtgataaaccggaggaaggtggggatgacgtcaagtcatcatggcccttatggccagggctacacacgtgctacaatggtcggtacaaagggttgccaagtcgcgaggcggagctaatcccataaagccggtcgtagtccggattggagtctgcaactcgactccatgaagtcggaatcgctagtaatcgcagatcagcactgctgcggtgaatacgttcccgggccttgtacacaccgcccgtcacaccatgggagttggttgcaccagaagcaggtagcttaaccttcgggagggcgcttgccacggtgtggtcaatgactggggtg

SEQ ID NO: 2573 - DNA, 1451 bp, Plasticicumulans lactativorans
acgctggcggcatgcttaacacatgcaagtcgaacgggattcgggcttcggcctgatgagagtggcggacgggtgagtaacgcgtaggaatctgcccacgggtgggggacaacatggggaaactcatgctaataccgcatacgccctgagggggaaagcgggggaccttcgggcctcgcgccggtggatgagcctacgtcggattagctagttggtagggtaaaggcctaccaaggcgacgatccgtagctggtctgagaggatgatcagccacactgggactgagacacggcccagactcctacgggaggcagcagtggggaatattggacaatgggggcaaccctgatccagcaatgccgcgtgtgtgaagaaggcctgcgggttgtaaagcactttaagtggggaggaaaggcgtcgggcgaataccctggcgatttgacgttacccacagaataagcaccggctaacttcgtgccagcagccgcggtaatacgaagggtgcaagcgttaatcggaattactgggcgtaaagcgtgcgtaggcggttgcctaagtcagatgtgaaagccccgggctcaacctgggaatggcatttgatactgggcggctagaatgtggtagaggaagacggaattcccggtgtagcggtgaaatgcgtagatatcgggaagaacaccaatggcgaaggcagtcttctgggccgacattgacgctgaggcacgaaagcgtggggagcaaacaggattagataccctggtagtccacgccctaaacgatgagaactagacggtgggagggtaacctttcgctgtcgcagctaacgcgttaagttctccgcctggggagtacggccgcaaggttgaaactcaaaggaattgacgggggcccgcacaagcggtggagcatgtggtttaattcgatgcaacgcgaagaaccttacctggccttgacatgtcaggaaccctgcagagatgtgggggtgccttcgggagcctgaacacaggtgctgcatggctgtcgtcagctcgtgtcgtgagatgttgggttaagtcccgcaacgagcgcaacccttgtccttagttgccagcacttcgggtgggaactctaaggagactgccggtgataaaccggaggaaggtggggatgacgtcaagtcatcatggcccttatggccagggctacacacgtgctacaatggtcggtacagagggttgccaagccgcgaggtggagccaatcccaaaaagccgatcgtagtccggattggagtctgcaactcgactccatgaagtcggaatcgctagtaatcgcagatcagcactgctgcggtgaatacgttcccgggccttgtacacaccgcccgtcacaccatgggagttggctgcaccagaagtaggtagcttaaccgcaaggagggcgcttaccacggtgtggtcaatgactggggtg

SEQ ID NO: 2574 - DNA, 1465 bp, Pleionea mediterranea
attgaacgctggcggcaggcctaacacatgcaagtcggacggtaacagcaagagcttgctcttgtctgacgagtggcggacgggtgagtaacgcgtaggaatctaccattcagtgggggatagcccggagaaatccggattaataccgcatacgctctacggaggaaaaggggcctcttcttgaaagctcctgctgattgatgagcctgcgttggattagctagttggtaaggtaagagcttaccaaggcgacgatctatagctggtctgagaggatgatcagccacactgggactgagacacggcccagactcctacgggaggcagcagtggggaatattggacaatgggggcaaccctgatccagccatgccgcgtgtgtgaagaaggccttcgggttgtaaagcactttcaatagggaggaattgcagtgtgttaatagcgcattgtttgacgttacctacagaagaagcaccggctaactccgtgccagcagccgcggtaatacggagggtgcaagcgttaatcggaatcactgggcgtaaagcgcgcgtaggcggagtcttaagtcagttgtgaaagcccagggcttaaccttggaattgcagctgatactggggctctagagtacagaagaggaaggtggaatttcaggtgtagcggtgaaatgcgtagagatctgaaggaacatcagtggcgaaggcggccttctggactgatactgacgctgaggtgcgaaagcgtggggagcaaacaggattagataccctggtagtccacgccgtaaacgatgtcaactagccgttggtcttattaaaaagattagtggcgcagctaacgcgataagttgaccgcctggggagtacggccgcaaggctaaaactcaaatgaattgacgggggcccgcacaagcggtggagcatgtggtttaattcgatgcaacgcgaagaaccttaccatcccttgacatcctcagaacttgtaagaaattacttggtgccttcgggaactgagtgacaggtgctgcatggctgtcgtcagctcgtgtcgtgagatgttgggttaagtcccgcaacgagcgcaacccttatccttagttgccagcacgtaatggtgggaactctaaggagactgccggtgacaaaccggaggaaggtggggacgacgtcaagtcatcatggcccttacgggatgggctacacacgtgctacaatgggcaatacagagggttgcgaacttgcgaaagtaagcgaatcccttaaagttgttcgtagtccggattggagtctgcaactcgactccatgaagtcggaatcgctagtaatcgcaggtcagcatactgcggtgaatacgttcccgggccttgtacacaccgcccgtcacaccatgggagtgaattgcaccagaagtggttagtctaaccttcgggaggacgacccccacggtgtggttcgtgactggggtg

SEQ ID NO: 2575 - DNA, 1454 bp, Plesiocystis pacifica
agcgaacgtttgcggcgggcctaacacatgcaagtcgaacgagaagcccttcggggtggaaagtggcgcacgggtgcgtaacacgtggataaccaaccccccagtttgggacaacaccgggaaactggtgctaataccagatgtgtcgcgggagtcgtcaggctccctcgagaaaggcacgcaagggtcgctgggggacgggtccgcgtcccatcagctagttggtgaggtaatggctcaccaaggctaagacgggtagctggtctgagaggatgatcagccacactggaactgagacacggtccagactcctacgggaggcagcagtggggaatattgcgcaatgggcgaaagcctgacgcagccacgccgcgtgagcgatgaaggttttcggatcgtaaagctctgtggagggagaagaataagtcagtgaagagctggccttgacggtatccctttagcaagcaccggctaactccgtgccagcagccgcggtaatacggagggtgcaaacgttgctcggaatcattgggcgtaaagcgcgcgtaggcggcttggcaagttggatgtgaaagccctgggctcaacccaggaagtgcatccaaaactgcctggcttgaatctcggagggggtcagggaattctcggtgtagaggtgaaattcgtagatatcgggaggaacaccagtggcgaaggcgctgacctggacgatgattgacgctgaggtgcgaaagcatggggagcgaacaggattagataccctggtagtccatgccgtaaacgatgagtgctaggcgccggcggatgaccccgtcggtgccgaagctaacgcgttaagcactccgcctggggagtacggtcgcaagactaaaactcaaaggaattgacgggggcccgcacaagcggtggagcatgtggtttaattcgacgcaacgcgcagaaccttacctgggttaagtccacgagaatccggcccaaaagctggagtgcccttcggggaattcgtgcgaaggtgctgcatggctgtcgtcagctcgtgtcgtgagatgttgggttaagtcccgcaacgagcgcaacccctgccgtctgttgccatcatttagttgggaactcagacggtactgccggcctaaaccggaggaaggtggggatgacgtcaagtcctcatggccctcatgcccagggctacacacgtgctacaatggttggtacaaagagtcgctagcccgcgaggggacgctaacctcaaaaaaccaatctcagttcggattggagtctgcaactcgactccatgaagctggaatcgctagtaatcggagatcagcacgctccggtgaatacgttcccgggccttgtacacaccgcccgtcacaccatgggagtcgattgctccagaagtgggtagcctaaccttcgggagggcgcttaccaaggagtgatcggtgactggggtg

SEQ ID NO: 2576 - DNA, 1464 bp, Plesiomonas shigelloides
attgaacgctggcggcaggcctaacacatgcaagtcgagcggtaacacagaggagcttgctccttgggtgacgagcggcggacgggtgagtaatgcctggggatctgcccgatagagggggataactacgggaaactgtagctaataccgcataatgtctacggaccaaagtgggggctcttcggacctcatgctatcggatgaacccaggtgggattagctagttggtgaggtaatggctcaccaaggcgacgatctctaactggtttgagagaatgaccagtcacactggaactgagacacggtccagactcctacgggaggcagcagtggggaatattgcacaatgggcgcaagcctgatgcagccatgccgcgtgtgtgaagaaggccttcgggttgtaaagcactttcagcggggaggaagggtcactagttaatacctagtggcattgacgttactcgcagaagaagcaccggctaactccgtgccagcagccgcggtaatacggagggtgcaagcgttaatcggaattactgggcgtaaagcgcacgcaggcggtttgttaagtcagatgtgaaatccccgagctcaacttgggaactgcatttgaaactggcaagctagagtcttgtagaggggggtagaattccaggtgtagcggtgaaatgcgtagagatctggaggaataccggtggcgaaggcggccccctggacaaagactgacgctcaggtgcgaaagcgtggggagcaaacaggattagataccctggtagtccacgctgtaaacgatgtcgatttggaggttgtgcccttgaggtgtggcttccggagctaacgcgttaaatcgaccgcctggggagtacggccgcaaggttaaaactcaaatgaattgacgggggcccgcacaagcggtggagcatgtggtttaattcgatgcaacgcgaagaaccttacctactcttgacatccagagaactttccagagatggattggtgccttcgggaactctgagacaggtgctgcatggctgtcgtcagctcgtgttgtgaaatgttgggttaagtcccgcaacgagcgcaacccttatcctttgttgccagcgattcggtcgggaactcaaaggagactgccggtgataaaccggaggaaggtggggatgacgtcaagtcatcatggcccttacgagtagggctacacacgtgctacaatggcatatacaaagggcggcaagctagcgatagtgagcgaatcccataaagtatgtcgtagtccggattggagtctgcaactcgactccatgaagtcggaatcgctagtaatcgcggatcagaatgccgcggtgaatacgttcccgggccttgtacacaccgcccgtcacaccatgggagtgggttgcaaaagaagtaggtagcttaaccttcgggagggcgcttaccactttgtgattcatgactggggtg

SEQ ID NO: 2577 - DNA, 1450 bp, Pluralibacter gergoviae
  misc_feature (443)..(443): n is a, c, g, or t
acgctggcggcaggcctaacacatgcaagtcgaacggtagcagaaagaagcttgcttctttgctgacgagtggcggacgggtgagtaatgtctgggaaactgcccgatggagggggataactactggaaacggtagctaataccgcataacgtcttcggaccaaagagggggaccttcgggcctcttgccatcggatgtgcccagatgggattagctagtaggtggggtaacggctcacctaggcgacgatccctagctggtctgagaggatgaccagccacactggaactgagacacggtccagactcctacgggaggcagcagtggggaatattgcacaatgggcgcaagcctgatgcagccatgccgcgtgtatgaagaaggccttcgggttgtaaagtactttcagcggggaggaagggagtgaggttaataacctcantcattgacgttacccgcagaagaagcaccggctaactccgtgccagcagccgcggtaatacggagggtgcaagcgttaatcggaattactgggcgtaaagcgcacgcaggcggtctgtcaagtcggatgtgaaatccccgggctcaacctgggaactgcattcgaaactggcaggcttgagtctcgtagaggggggtagaattccaggtgtagcggtgaaatgcgtagagatctggaggaataccggtggcgaaggcggccccctggacgaagactgacgctcaggtgcgaaagcgtggggagcaaacaggattagataccctggtagtccacgccgtaaacgatgtctacttggaggctgtggtcttgaaccgtggcttccggagctaacgcgttaagtagaccgcctggggagtacggccgcaaggttaaaactcaaatgaattgacgggggcccgcacaagcggtggagcatgtggtttaattcgatgcaacgcgaagaaccttacctactcttgacatccagagaacttagcagagatgctttggtgccttcgggaactctgagacaggtgctgcatggctgtcgtcagctcgtgttgtgaaatgttgggttaagtcccgcaacgagcgcaacccttatcctttgttgccagcggtccggccgggaactcaaaggagactgccagtgataaactggaggaaggtggggatgacgtcaagtcatcatggcccttacgagtagggctacacacgtgctacaatggcgcatacaaagagaagcgacctcgcgagagcaagcggacctcataaagtgcgtcgtagtccggattggagtctgcaactcgactccatgaagtcggaatcgctagtaatcgtggatcagaatgccacggtgaatacgttcccgggccttgtacacaccgcccgtcacaccatgggagtgggttgcaaaagaagtaggtagcttaaccttcgggagggcgcttaccactttgtgattcatg

SEQ ID NO: 2578 - DNA, 1442 bp, Polaribacter dokdonensis
gatgaacgctagcggcaggcttaacacatgcaagtcgaggggtaacattagtgcttgcactagatgacgaccggcgcacgggtgcgtaacgcgtatagaatctaccttttacagggggatagcctttagaaatgaagattaatatcccatagtattgcgaagtggcatcactttgtaattaaagatttatcggtaaaagatgactatgcgtcctattagttagttggtaaggtaacggcttaccaagacttcgataggtaggggtcctgagagggagatcccccacactggtactgagacacggaccagactcctacgggaggcagcagtgaggaatattgggcaatggaggtaactctgacccagccatgccgcgtgcaggaagactgccctatgggttgtaaactgcttttatacaggaagaaacactgctacgtgtagcagcttgacggtactgtaagaataaggaccggctaactccgtgccagcagccgcggtaatacggagggtccgagcgttatccggaatcattgggtttaaagggtccgcaggcggtcaattaagtcagaggtgaaatcccatagcttaactatggaactgcctttgatactggttgacttgagtcatatggaagtagatagaatgtgtagtgtagcggtgaaatgcatagatattacacagaataccgattgcgaaggcagtctactacgtatgtactgacgctcatggacgaaagcgtggggagcgaacaggattagataccctggtagtccacgccgtaaacgatggacactagttgttgggcattagctcagtgactaagcgaaagtgataagtgtcccacctggggagtacgatcgcaagattgaaactcaaaggaattgacgggggcccgcacaagcggtggagcatgtggtttaattcgatgatacgcgaggaaccttaccagggcttaaatgtagtctgacagctttagagatagagttttcttcggacagattacaaggtgctgcatggttgtcgtcagctcgtgccgtgaggtgtcaggttaagtcctataacgagcgcaacccttgtcgttagttgccagcatgtaaagatggggactctaacgagactgccggtgcaaaccgagaggaaggtggggatgacgtcaaatcatcacggcccttacgtcctgggccacacacgtgctacaatggtatggacaatgagcagccatctggcaacagagagcgaatctataaaccatatcacagttcggatcggagtctgcaactcgactccgtgaagctggaatcgctagtaatcggatatcagccatgatccggtgaatacgttcccgggccttgtacacaccgcccgtcaagccatggaagctgggggtgcctgaagtcggtcaccgtaaggagccgcctagggtaaaactggtaactagggct

SEQ ID NO: 2579 - DNA, 1440 bp, Polaribacter filamentus
  misc_feature (660)..(660): n is a, c, g, or t
  misc_feature (1128)..(1128): n is a, c, g, or t
gatgaacgctagcggcaggcctaactcatgcaagtcgaggggtaacagggagcttgcttcgctgacgaccggcgcacgggtgcgtaacgcgtatagaacctaccttttacaggggaatagcctttagaaatgaagattaatgccccatagtattgtagactggcatcagtttacaattaaagatttatcggtaaaagatggctatgcgtcctattagttagttggtaaggtaacggcttaccaagacatcgataggtaggggtcctgagagggagatcccccgcactggtactgagacacggaccagactcctacgggaggcagcagtgaggaatattgggcaatggaggagactctgacccagccatgccgcgtgtaggaagaatgccctatgggttgtaaactacttttatacaggaagaaacactggtatgtataccagcttgacggtactgtaagaataaggaccggctaactccgtgccagcagccgcggtaatacggagggtccaagcgttatccggaatcattgggtttaaagggtccgcaggcggtcaattaagtcagaggtgaaatcccgtcgctcaacgacggaactgcctttgatactggttgacttgagtcatatggaagtagatagaatgtgtagtgtagcggtganatgcatagagattacacagaataccgattgcgaaggcagtctactacgtatgtactgacgctgagggacgaaagcgtggggagcgaacaggattagataccctggtagtccacgccgtaaacgatggatactagttgttgggcaatagctcagtgactaagcgaaagtgataagtatcccacctggggagtacggtcgcaagactgaaactcaaaggaattgacgggggcccgcacaagcggtggagcatgtggtttaattcgatgatacgcgaggaaccttaccagggcttaaatgtagtctgacagctttagagatagagttttcttcggacagattacaaggtgctgcatggttgtcgtcagctcgtgccgtgaggtgtcaggttaagtcctataacgagcgcaacccctgtcgttagttgccagcatgttatgatggggactctaacgaaactgccggtgcacnccgcgaggaaggtggggatgacgtcaaatcatcacggcccttacgtcctgggccacacacgtgctacaatggtatggacaatgagcagccatctggcaacagagagcaaatctataaaccatatcacagttcggatcggagtctgcaactcgactccgtgaagctggaatcgctagtaatcggatatcagccatgatccggtgaatacgttcccgggccttgtacacaccgcccgtcaagccatggaagctgggggtgcctgaagtcggtcaccgcaaggagccgcctagggtaaaactggtaactggggct

SEQ ID NO: 2580 - DNA, 1450 bp, Polaromonas naphthalenivorans
attgaacgctggcggcatgccttacacatgcaagtcgaacggtcgggttaagccgacgagtggcgaacgggtgagtaatatatcggaacgtgcccagtcgtgggggataacgtagagaaatttacgctaataccgcatacgatctaaggatgaaagcgggggaccttcgggcctcgcgcgattggagcggctgatatcagattaggttgttggtgaggtaaaagctcaccaagccgacgatctgtagctggtttgagagaacgaccagccacactgggactgagacacggcccagactcctacgggaggcagcagtggggaattttggacaatgggcgaaagcctgatccagcaatgccgcgtgcaggaagaaggccttcgggttgtaaactgcttttgtacggaacgaaaaggccagccctaatacggcaggcccatgacggtaccgtaagaataagcaccggctaactacgtgccagcagccgcggtaatacgtagggtgcgagcgttaatcggaattactgggcgtaaagcgtgcgcaggcggtgatgtaagacagttgtgaaatccccgggctcaacctgggaattgcatctgtgactgcatcgctagagtacggtagagggggatggaattccgcgtgtagcagtgaaatgcgtagatatgcggaggaacaccgatggcgaaggcaatcccctggacctgtactgacgctcatgcacgaaagcgtggggagcaaacaggattagataccctggtagtccacgccctaaacgatgtcaactggttgttgggtgcattagtactcagtaacgaagctaacgcgtgaagttgaccgcctggggagtacggccgcaaggttgaaactcaaaggaattgacggggacccgcacaagcggtggatgatgtggtttaattcgatgcaacgcgaaaaaccttacctacctttgacatgtacggaactcgccagagatggcttggtgctcgaaagagagccgtaacacaggtgctgcatggctgtcgtcagctcgtgtcgtgagatgttgggttaagtcccgcaacgagcgcaacccttgtcattagttgctacatttagttgggcactctaatgagactgccggtgacaaaccggaggaaggtggggatgacgtcaagtcctcatggcccttataggtagggctacacacgtcatacaatggatggtacaaagggtcgccaacccgcgagggggagccaatcccataaagccattcgtagtccggatcgcagtctgcaactcgactgcgtgaagtcggaatcgctagtaatcgtggatcagaatgtcacggtgaatacgttcccgggtcttgtacacaccgcccgtcacaccatgggagcgggttctgccagaagtagttagcctaacctgcaaaggagggcgattaccacggcagggttcgtgactggggtg

SEQ ID NO: 2581 - DNA, 1453 bp, Polyangium brachysporum
attgaacgctggcggcatgccttacacatgcaagtcgaacggcagcacgggagcaatcctggtggcgagtggcgaacgggtgagtaatacatcggaacgtgcccagtagtgggggatagcccggcgaaagccggattaataccgcatacgacctgagggtgaaagcgggggatcgcaagacctcgcgctattggagcggccgatgtcagattagctagttggtggggtaaaggcctaccaaggcgacgatctgtagctggtctgagaggacgaccagccacactgggactgagacacggcccagactcctacgggaggcagcagtggggaattttggacaatgggcgcaagcctgatccagccatgccgcgtgcgggaagaaggccttcgggttgtaaaccgcttttgtcagggaagaaaagttctgggctaataccccggagcgatgacggtacctgaagaataagcaccggctaactacgtgccagcagccgcggtaatacgtagggtgcgagcgttaatcggaattactgggcgtaaagcgtgcgcaggcggttgtgcaagacagatgtgaaatccccgggctcaacctgggaactgcatttgtgactgcacggctagagtgcggcagagggagatggaattccgcgtgtagcagtgaaatgcgtagatatgcggaggaacaccgatggcgaaggcaatctcctgggcctgcactgacgctcatgcacgaaagcgtggggagcaaacaggattagataccctggtagtccacgccctaaacgatgtcaactagttgttggacggcttgctgttcagtaacgaagctaacgcgtgaagttgaccgcctggggagtacggccgcaaggttgaaactcaaaggaattgacggggacccgcacaagcggtggatgatgtggtttaattcgatgcaacgcgaaaaaccttacctacccttgacatgccaggaatcctgcagagatgtgggagtgctcgaaagagaacctggacacaggtgctgcatggccgtcgtcagctcgtgtcgtgagatgttgggttaagtcccgcaacgagcgcaacccttgtcattagttgctacgaaagggcactctaatgagactgccggtgacaaaccggaggaaggtggggatgacgtcaggtcatcatggcccttatgggtagggctacacacgtcatacaatggccggtacagagggctgccaacccgcgagggggagctaatcccagaaaaccggtcgtagtccggatcgcagtctgcaactcgactgcgtgaagtcggaatcgctagtaatcgcggatcagcatgccgcggtgaatacgttcccgggtcttgtacacaccgcccgtcacaccatgggagcgggttctgccagaagtggttagcctaaccgcaaggagggcgatcaccacggcagggttcgtgactggggtg

SEQ ID NO: 2582 - DNA, 1455 bp, Polynucleobacter aenigmaticus
attgaacgctggcggcatgccttacacatgcaagtcgaacggcagcacgggtacttgtacctggtggcgagtggcgaacgggtgagtaatacatcggaacgtaccttatcgtgggggataacgcagcgaaagctgtgctaataccgcatacgccctgagggggaaagcgggggatcgaaagacctcgcgcgattagagcggccgatgcctgattagcttgttggtggggtaaaagcccaccaaggcgacgatcagtagctggtctgagaggacgatcagccacactgggactgagacacggcccagactcctacgggaggcagcagtggggaattttggacaatgggggaaaccctgatccagcaatgccgcgtgagtgaagaaggccttcgggttgtaaagctcttttgtcagggaagaaacaccggctctaacacagtccgggaatgacggtacctgaagaataagcaccggctaactacgtgccagcagccgcggtaatacgtagggtgcaagcgttaatcggaattactgggcgtaaagcgtgcgcaggcggttatacaagacaggcgtgaaatccccgggcttaacctgggaatggcgcctgtgactgtatagctagagtgtgtcagaggggggtagaattccacgtgtagcagtgaaatgcgtagatatgtggaggaataccaatggcgaaggcagccccctgggataacactgacgctcatgcacgaaagcgtggggagcaaacaggattagataccctggtagtccacgccctaaacgatgctgactagttgttcgggattttcatcctgagtaacgtagctaacgcgtgaagtcagccgcctggggagtacggtcgcaagattaaaactcaaaggaattgacggggacccgcacaagcggtggatgatgtggattaattcgatgcaacgcgaaaaaccttacctacccttgacatgtcactaacgaagtagagatacattaggtgcccgtaagggaaagtgaacacaggtgctgcatggctgtcgtcagctcgtgtcgtgagatgttgggttaagtcccgcaacgagcgcaacccttgtctttagttgctacgcaagagcactctaaagagactgccggtgacaaaccggaggaaggtggggatgacgtcaagtcctcatggcccttatgggtagggcttcacacgtcatacaatggtgcatacagagggttgccaacccgcgagggggagctaatctcagaaaatgcatcgtagtccggatcgtagtctgcaactcgactacgtgaagctggaatcgctagtaatcgcggatcagaatgtcgcggtgaatacgttcccgggtcttgtacacaccgcccgtcataccatgggagtgggttttgccagaagccgttagcctaaccgcaaggagggcgactgccacggcagggttcatgactggggta

SEQ ID NO: 2583 - DNA, 1454 bp, Polynucleobacter asymbioticus
attgaacgctggcggcatgccttacacatgcaagtcgaacggcagcacggtgcttgcacctggtggcgagtggcgaacgggtgagtaatacatcggaacgtaccttatcgtgggggataacgcagcgaaagctgtgctaataccgcatacgccctgagggggaaagcgggggatcgaaagacctcgcgcgattagagcggccgatgcctgattagcttgttggtggggtaaaagcccaccaaggcgacgatcagtagctggtctgagaggacgatcagccacactgggactgagacacggcccagactcctacgggaggcagcagtggggaattttggacaatgggggaaaccctgatccagcaatgccgcgtgagtgaagaaggccttcgggttgtaaagctcttttgtcagggaagaaaatccggctctaacacagtccgggaatgacggtacctgaagaataagcaccggctaactacgtgccagcagccgcggtaatacgtagggtgcgagcgttaatcggaattactgggcgtaaagcgtgcgcaggcggttatacaagacaggcgtgaaatccccgggcttaacctgggaatggcgcctgtgactgtatagctagagtgtgtcagaggggggtagaattccacgtgtagcagtgaaatgcgtagatatgtggaggaataccaatggcgaaggcagccccctgggataacactgacgctcatgcacgaaagcgtggggagcaaacaggattagataccctggtagtccacgccctaaacgatgctgactagttgttcgggatttacatcctgagtaacgtagctaacgcgtgaagtcagccgcctggggagtacggtcgcaagattaaaactcaaaggaattgacggggacccgcacaagcggtggatgatgtggattaattcgatgcaacgcgaaaaaccttacctacccttgacatgtcactaacgaagtagagatacattaggtgctcgtaagagaaagtgaacacaggtgctgcatggctgtcgtcagctcgtgtcgtgagatgttgggttaagtcccgcaacgagcgcaacccttgtctttagttgctacgcaagagcactctaaagagactgccggtgacaaaccggaggaaggtggggatgacgtcaagtcctcatggcccttatgggtagggcttcacacgtcatacaatggtgcatacagagggttgccaacccgcgagggggagctaatctcagaaaatgcatcgtagtccggatcgtagtctgcaactcgactacgtgaagctggaatcgctagtaatcgcggatcagaatgtcgcggtgaatacgttcccgggtcttgtacacaccgcccgtcataccatgggagtgggttttgccagaagccgttagcctaaccgcaaggagggcgactgccacggcagggttcatgactggggta

SEQ ID NO: 2584 - DNA, 1455 bp, Polynucleobacter cosmopolitanus
attgaacgctggcggcatgccttacacatgcaagtcgaacggcagcacgggtgcttgcacctggtggcgagtggcgaacgggtgagtaatatatcggaacgtaccttattgtgggggataacgcagcgaaagctgtgctaataccgcataatcccttagggggaaagcgggggaccgtaaggcctcgcgcaattagagcggccgatacctgattagctagttggtgaggtaaaggctcaccaaggcaacgatcagtagctggtctgagaggacgatcagccacactgggactgagacacggcccagactcctacgggaggcagcagtggggaattttggacaatgggggcaaccctgatccagcaatgccgcgtgagtgaagaaggccttcgggttgtaaagctcttttgtcagggaagaaacagcagctctaacacagtctgcgaatgacggtacctgaagaataagcaccggctaactacgtgccagcagccgcggtaatacgtagggtgcaagcgttaatcggaattactgggcgtaaagcgtgcgcaggcggttatgtaagacaggcgtgaaatccccgggcttaacctgggaattgcgcttgtgactgcatagctagagtatgtcagaggggggtagaattccacgtgtagcagtgaaatgcgtagagatgtggaggaataccaatggcgaaggcagccccctgggataatactgacgctcatgcacgaaagcgtggggagcaaacaggattagataccctggtagtccacgccctaaacgatgctgactagttgttcgggaatttattcctgagtaacgtagctaacgcgtgaagtcagccgcctggggagtacggtcgcaagattaaaactcaaaggaattgacggggacccgcacaagcggtggatgatgtggattaattcgatgcaacgcgaaaaaccttacctacccttgacatgccactaacgaagtagagatacattaggtgcccgtaagggaaagtggacacaggtgctgcatggctgtcgtcagctcgtgtcgtgagatgttgggttaagtcccgcaacgagcgcaacccttgtctttagttgctacgcaagagcactctaaagagactgccggtgacaaaccggaggaaggtggggatgacgtcaagtcctcatggcccttatgggtagggcttcacacgtcatacaatggtgcatacagagggttgccaacccgcgagggggagctaatctcagaaaatgcatcgtagtccggatcgtagtctgcaactcgactacgtgaagctggaatcgctagtaatcgcggatcagaatgtcgcggtgaatacgttcccgggtcttgtacacaccgcccgtcacaccatgggagtgggttttgccagaagccgttagcctaaccgcaaggagggcgacgaccacggcagggttcatgactggggtg

SEQ ID NO: 2585 - DNA, 1455 bp, Polynucleobacter duraquae
attgaacgctggcggcatgccttacacatgcaagtcgaacggcagcacgggtacttgtacctggtggcgagtggcgaacgggtgagtaatacatcggaacgtaccttatcgtgggggataacgcagcgaaagctgtgctaataccgcatacgccctgagggggaaagcgggggatcgaaagacctcgcgcgattagagcggccgatgcctgattagcttgttggtggggtaaaagcccaccaaggcgacgatcagtagctggtctgagaggacgatcagccacactgggactgagacacggcccagactcctacgggaggcagcagtggggaattttggacaatgggggaaaccctgatccagcaatgccgcgtgagtgaagaaggccttcgggttgtaaagctcttttgtcagggaagaaacaccggctctaacacagtccgggaatgacggtacctgaagaataagcaccggctaactacgtgccagcagccgcggtaatacgtagggtgcaagcgttaatcggaattactgggcgtaaagcgtgcgcaggcggttatacaagacaggcgtgaaatccccgggcttaacctgggaatggcgcctgtgactgtatagctagagtgtgtcagaggggggtagaattccacgtgtagcagtgaaatgcgtagatatgtggaggaataccaatggcgaaggcagccccctgggataacactgacgctcatgcacgaaagcgtggggagcaaacaggattagataccctggtagtccacgccctaaacgatgctgactagttgttcgggatttacatcctgagtaacgtagctaacgcgtgaagtcagccgcctggggagtacggtcgcaagattaaaactcaaaggaattgacggggacccgcacaagcggtggatgatgtggattaattcgatgcaacgcgaaaaaccttacctacccttgacatgtcactaacgaagtagagatacattaggtgcccgtaagggaaagtgaacacaggtgctgcatggctgtcgtcagctcgtgtcgtgagatgttgggttaagtcccgcaacgagcgcaacccttgtctttagttgctacgcaagagcactctaaagagactgccggtgacaaaccggaggaaggtggggatgacgtcaagtcctcatggcccttatgggtagggcttcacacgtcatacaatggtgcatacagagggttgccaacccgcgagggggagctaatctcagaaaatgcatcgtagtccggatcgtagtctgcaactcgactacgtgaagctggaatcgctagtaatcgcggatcagaatgtcgcggtgaatacgttcccgggtcttgtacacaccgcccgtcataccatgggagtgggttttgccagaagccgttagcctaaccgcaaggagggcgactgccacggcagggttcatgactggggta

SEQ ID NO: 2586 - DNA, 1448 bp, Polynucleobacter necessarius
gctggcggcatgccttacacatgcaagtcgaacggcagcacgggtgcttgcacctggtggcgagtggcgaacgggtgagtaatacatcggaacgtaccttatcgtgggggataacgcagcgaaagctgtgctaataccgcatacgccctgagggggaaagcgggggatcgaaagacctcgcgcgattagagcggccgatgcctgattagcttgttggtggggtaaaagcccaccaaggcgacgatcagtagctggtctgagaggacgatcagccacactgggactgagacacggcccagactcctacgggaggcagcagtgaggaattttggacaatgggggcaaccctgatccagcaatgccgcgtgagtgaagaaggcctttgggttgtaaagctcttttgtcagggaagaaacaccggctctaacacagtccgggaatgacggtacctgaagaataagcaccggctaactacgtgccagcagccgcggtaatacgtagggtgcgagcgttaatcggaattactgggcgtaaagcgtgcgcaggcggttatacaagataggcgtgaaatccccgggcttaacctgggaatggcgcctgtgactgtatggctagagtgtgtcagaggggggtagaattccacgtgtagcagtgaaatgcgtagatatgtggaggaataccaatggcgaaggcagccccctgggataacactgacgctcatgcacgaaagcgtggggagcaaacaggattagataccctggtagtccacgccctaaacgatgctgactagttgttcgggatttacatcctgagtaacgtagctaacgcgtgaagtcagccgcctggggagtacggtcgcaagattaaaactcaaaggaattgacggggacccgcacaagcggtggatgatgtggattaattcgatgcaacgcgaaaaaccttacctacccttgacatgtcactaacgaagtagagatacattaggtgctcgtaggagaaagtgaacacaggtgctgcatggctgtcgtcagctcgtgtcgtgagatgttgggttaagtcccgcaacgagcgcaacccttgtctttagttgctacgcaagagcactctaaagagactgccggtgacaaaccggaggaaggtggggatgacgtcaagtcctcatggcccttatgggtagggcttcacacgtcatacaatggtgcatacagagggttgccaacccgcgagggggagctaatctcagaaaatgcatcgtagtccgaatcgtagtctgcaactcgactacgtgaagctggaatcgctagtaatcgcggatcagaatgtcgcggtgaatacgttcccgggtcttgtacacaccgcccgtcataccatgggagtgggttttgccagaagctgttagcctaaccgcaaggggggcgactgccacggcagggttcatgactggggta

SEQ ID NO: 2587 - DNA, 1455 bp, Polynucleobacter sphagniphilus
attgaacgctggcggcatgccttacacatgcaagtcgaacggcagcacgggtgcttgcacctggtggcgagtggcgaacgggtgagtaatacatcggaacgtaccttatcgtgggggataacgcagcgaaagctgtgctaataccgcatacgccctgagggggaaagcgggggatcgaaagacctcgcgcgattagagcggccgatgcctgattagcttgttggtggggtaaaagcccaccaaggcgacgatcagtagctggtctgagaggacgatcagccacactgggactgagacacggcccagactcctacgggaggcagcagtggggaattttggacaatgggggaaaccctgatccagcaatgccgcgtgagtgaagaaggccttcgggttgtaaagctcttttgtcagggaagaaacaccggctctaacacagtccgggaatgacggtacctgaagaataagcaccggctaactacgtgccagcagccgcggtaatacgtagggtgcgagcgttaatcggaattactgggcgtaaagcgtgcgcaggcggttatacaagacaggcgtgaaatccccgggcttaacctgggaatggcgcctgtgactgtatagctagagtgtgtcagaggggggtagaattccacgtgtagcagtgaaatgcgtagatatgtggaggaataccaatggcgaaggcagccccctgggataacactgacgctcatgcacgaaagcgtggggagcaaacaggattagataccctggtagtccacgccctaaacgatgctgactagttgttcgggatttacatcctgagtaacgtagctaacgcgtgaagtcagccgcctggggagtacggtcgcaagattaaaactcaaaggaattgacggggacccgcacaagcggtggatgatgtggattaattcgatgcaacgcgaaaaaccttacctacccttgacatgtcactaacgaagtagagatacattaggtgctcgtaagagaaagtgaacacaggtgctgcatggctgtcgtcagctcgtgtcgtgagatgttgggttaagtcccgcaacgagcgcaacccttgtctttagttgctacgcaagagcactctaaagagactgccggtgacaaaccggaggaaggtggggatgacgtcaagtcctcatggcccttatgggtagggcttcacacgtcatacaatggtgcatacagagggttgccaacccgcgagggggagctaatctcagaaaatgcatcgtagtccggatcgtagtctgcaactcgactacgtgaagctggaatcgctagtaatcgcggatcagaatgtcgcggtgaatacgttcccgggtcttgtacacaccgcccgtcataccatgggagtgggttttgccagaagcagttagcctaaccgcaaggagggcgactgccacggcagggttcatgactggggta

SEQ ID NO: 2588 - DNA, 1455 bp, Polynucleobacter victoriensis
attgaacgctggcggcatgccttacacatgcaagtcgaacggcagcacgggtgcttgcacctggtggcgagtggcgaacgggtgagtaatatatcggaacgtaccttattgtgggggataacgcagcgaaagctgtgctaataccgcataatccctaagggggaaagcgggggaccgtaaggcctcgcgcaattagagcggccgatacctgattagctagttggtgaggtaaaggctcaccaaggcaacgatcagtagctggtctgagaggacgatcagccacactgggactgagacacggcccagactcctacgggaggcagcagtggggaattttggacaatgggggcaaccctgatccagcaatgccgcgtgagtgaagaaggccttcgggttgtaaagctcttttgtcagggaagaaacagcagctctaacacagtttgcgaatgacggtacctgaagaataagcaccggctaactacgtgccagcagccgcggtaatacgtagggtgcaagcgttaatcggaattactgggcgtaaagcgtgcgcaggcggttatgtaagacaggcgtgaaatccccgggcttaacctgggaattgcgcttgtgactgcatagctagagtatgtcagaggggggtagaattccacgtgtagcagtgaaatgcgtagagatgtggaggaataccaatggcgaaggcagccccctgggataatactgacgctcatgcacgaaagcgtggggagcaaacaggattagataccctggtagtccacgccctaaacgatgctgactagttgttcgggaatttattcctgagtaacgtagctaacgcgtgaagtcagccgcctggggagtacggtcgcaagattaaaactcaaaggaattgacggggacccgcacaagcggtggatgatgtggattaattcgatgcaacgcgaaaaaccttacctacccttgacatgccactaacgaagtagagatacattaggtgcccgtaagggaaagtggacacaggtgctgcatggctgtcgtcagctcgtgtcgtgagatgttgggttaagtcccgcaacgagcgcaacccttgtctctagttgctacgcaagagcactctagagagactgccggtgacaaaccggaggaaggtggggatgacgtcaagtcctcatggcccttatgggtagggcttcacacgtcatacaatggtgcatacagagggttgccaacccgcgagggggagctaatctcagaaaatgcatcgtagtccggatcgtagtctgcaactcgactacgtgaagctggaatcgctagtaatcgcggatcagaatgtcgcggtgaatacgttcccgggtcttgtacacaccgcccgtcacaccatgggagtgggttttgccagaagccgttagcctaaccgcaaggagggcgacgaccacggcagggttcatgactggggtg

SEQ ID NO: 2589 - DNA, 1454 bp, Polynucleobacter wuianus
attgaacgctggcggcatgccttacacatgcaagtcgaacggcagcacgggtgcttgcacctggtggcgagtggcgaacgggtgagtaatacatcggaacgtaccttatcgtgggggataacgcagcgaaagctgtgctaataccgcatacgccctgagggggaaagcgggggatcgaaagacctcgcgcgattagagcggccgatgcctgattagcttgttggtggggtaaaagcccaccaaggcgacgatcagtagctggtctgagaggacgatcagccacactgggactgagacacggcccagactcctacgggaggcagcagtggggaattttggacaatgggggcaaccctgatccagcaatgccgcgtgagtgaagaaggccttcgggttgtaaagctcttttgtcagggaagaaacaccggctctaacacagtccgggaatgacggtacctgaagaataagcaccggctaactacgtgccagcagccgcggtaatacgtagggtgcgagcgttaatcggaattactgggcgtaaagcgtgcgcaggcggttatacaagacaggcgtgaaatccccgggcttaacctgggaatggcgcctgtgactgtatagctagagtgtgtcagaggggggtagaattccacgtgtagcagtgaaatgcgtagatatgtggaggaataccaatggcgaaggcagccccctgggataacactgacgctcatgcacgaaagcgtggggagcaaacaggattagataccctggtagtccacgccctaaacgatgctgactagttgttcgggatttacatcctgagtaacgtagctaacgcgtgaagtcagccgcctggggagtacggtcgcaagattaaaactcaaaggaattgacggggacccgcacaagcggtggatgatgtggattaattcgatgcaacgcgaaaaaccttacctacccttgacatgtcactaacaagtagagatacattaggtgctcgtaagagaaagtgaacacaggtgctgcatggctgtcgtcagctcgtgtcgtgagatgttgggttaagtcccgcaacgagcgcaacccttgtctttagttgctacgcaagagcactctaaagagactgccggtgacaaaccggaggaaggtggggatgacgtcaagtcctcatggcccttatgggtagggcttcacacgtcatacaatggtgcatacagagggttgccaacccgcgagggggagctaatctcagaaaatgcatcgtagtccggatcgtagtctgcaactcgactacgtgaagctggaatcgctagtaatcgcggatcagaatgtcgcggtgaatacgttcccgggtcttgtacacaccgcccgtcataccatgggagtgggttttgccagaagccgttagcctaaccgcaaggggggcgactgccacggcagggttcatgactggggta

SEQ ID NO: 2590 - DNA, 1427 bp, Pontibacillus chungwhensis
gtgcctaatacatgcaagtcgagcgcgtgaaacaacatgatcccttcggggtgattgttgtggatcgagcggcggacgggtgagtaacacgtgggcaacctacccatgagatcgggataactccgggaaaccggagctaataccgaataacccagtgaactgcatggttcactggtaaaaggcggtttcggccgtcactcatggatgggcccgcggcgcattagctagttggtaaggtaacggcttaccaaggcaacgatgcgtagccgacctgagagggtgatcggccacactgggactgagacacggcccagactcctacgggaggcagcagtagggaatcttccgcaatggacgaaagtctgacggagcaacgccgcgtgaacgatgaaggtcttcggatcgtaaagttctgttgttagggaagaacaagtaccagaggaaatgctggtaccttgacggtacctaaccagaaagccacggctaactacgtgccagcagccgcggtaatacgtaggtggcaagcgttgtccggaattattgggcgtaaagcgcgcgcaggcggtttcttaagtctgatgtgaaagcccacagctcaactgtggagggccattggaaactggggaacttgagtacagaagaggagagtggaattccacgtgtagcggtgaaatgcgtagatatgtggaggaacaccagtggcgaaggcgactctctggtctgtaactgacgctgaggcgcgaaagcgtgggtagcaaacaggattagataccctggtagtccacgccgtaaacgttgagtgctaggtgttagggggtttccgccccttagtgctgaagttaacgcattaagcactccgcctggggagtacggccgcaaggctgaaactcaaaagaattgacgggggcccgcacaagcggtggagcatgtggtttaattcgaagcaacacgaagaaccttaccaggtcttgacatcttccgctatccctagagatagggagttcccttcggggacggaatgacaggtggtgcatggttgtcgtcagctcgtgtcgtgagatgttgggttaagtcccgcaacgagcgcaacccctaatcttagttgccagcattcagttgggcactctaaggtgactgccggtgacaaaccggaggaaggcggggatgacgtcaaatcatcatgccccttatgacctgggctacacacgtgctacaatggatggtacagagggccgcgagaccgcgaggtcaagcaaatctcaaaaaaccattctcagttcggattgcaggctgcaactcgcctgtatgaagccggaatcgctagtaatcgcaggtcagcatactgcggtgaatacgttcccgggccttgtacacaccgcccgtcacaccacgagagttggcaacacccgaagtcggtgaggtaacct

SEQ ID NO: 2591 - DNA, 1466 bp, Pontibacillus halophilus
cctaatacatgcaagtcgagcgcgtgaaacaacatgattccttcggggtgattgttgtggaatgagcggcggacgggtgagtaacacgtgggtaacctacccacaagatcgggataactccgggaaaccggggctaataccgaataatcctttgaaccgcatggttcagaggtaaaagacggtttcggctgtcacttgtggatggacccgcggcgcattagctagttggtgaggtaacggctcaccaaggcgacgatgcgtagccgacctgagagggtgatcggccacactgggactgagacacggcccagactcctacgggaggcagcagtagggaatcttccgcaatggacgaaagtctgacggagcaacgccgcgtgagtgatgaaggttttcggatcgtaaagctctgttgttagggaagaacaagtaccagagtaactgctggtaccttgacggtacctaaccagaaagccccggctaactacgtgccagcagccgcggtaatacgtagggggcaagcgttgtccggaattattgggcgtaaagcgcgcgcaggcggttccttaagtctgatgtgaaaggccacggctcaaccgtggacggccattggaaactggggaacttgagtgcagaagaggagagtggaattccaagtgtagcggtgaaatgcgtagatatttggaggaacaccagtggcgaaggcgactctctggtctgcaactgacgctgaggcgcgaaagcgtgggtagcaaacaggattagataccctggtagtccacgccgtaaacgatgagtgctaggtgttagggggtttccgccccttagtgctgaagttaacgcattaagcactccgcctggggagtacggccgcaaggctgaaactcaaaggaattgacgggggcccgcacaagcggtggagcatgtggtttaattcgaagcaacgcgaagaaccttaccaggtcttgacatcttgtgctatccctagagatagggagttcccttcggggacacaatgacaggtggtgcatggttgtcgtcagctcgtgtcgtgagatgttgggttaagtcccgcaacgagcgcaacccctaatcttagttgccagcatttagttgggcactctaaggtgactgccggtgacaaaccggaggaaggcggggatgacgtcaaatcatcatgccccttatgacctgggctacacacgtgctacaatggatggtacagagggctgcgagaccgcgaggtcaagcgaatctcaaaaaaccattctcagttcggattgcaggctgcaactcgcctgtatgaagccggaatcgctagtaatcgcaggtcagcatactgcggtgaatacgttcccgggccttgtacacaccgcccgtcacaccacgagagttggcaacacccgaagtcggtgaggtaacctttttggagccagccgccgaaggtggggccaatgattggggtg

SEQ ID NO: 2592 - DNA, 1485 bp, Pontibacillus marinus
gacgaacgctggcggcgtgcctaatacatgcaagtcgagcgcgtgaaacaacatgatcccttcggggtgattgttgtggatcgagcggcggacgggtgagtaacacgtgggtaacctacctgagagatcgggataaccccgggaaaccggggctaataccgaataatcgttggaaccgcatggttccaacgtaaaaggcggcttttgccgtcactttcagatggacccgcggcgcattagctagttggtaaggtaacggcttaccaaggcaacgatgcgtagccgacctgagagggtgatcggccacactgggactgagacacggcccagactcctacgggaggcagcagtagggaatcttccgcaatggacgaaagtctgacggagcaacgccgcgtgaacgatgaaggtcttcggatcgtaaagttctgttgttagggaagaacaagtaccagaggaaatgctggtaccttgacggtacctaaccagaaagccacggctaactacgtgccagcagccgcggtaatacgtaggtggcaagcgttgtccggaattattgggcgtaaagcgcgcgcaggcggttccttaagtctgatgtgaaagcccacagctcaactgtggagggccattggaaactggggaacttgagtacagaagaggagagcggaattccacgtgtagcggtgaaatgcgtagatatgtggaggaacaccagtggcgaaggcggctctctggtctgtaactgacgctgaggcgcgaaagcgtgggtagcaaacaggattagataccctggtagtccacgccgtaaacgttgagtgctaggtgttagggggtttccgccccttagtgctgaagttaacgcattaagcactccgcctggggagtacggccgcaaggctgaaactcaaaagaattgacgggggcccgcacaagcggtggagcatgtggtttaattcgaagcaacgcgaagaaccttaccaggtcttgacatcttccgctatccctagagatagggagttcccttcggggacggaatgacaggtggtgcatggttgtcgtcagctcgtgtcgtgagatgttgggttaagtcccgcaacgagcgcaacccctaatcttagttgccagcattcagttgggcactctaaggtgactgccggtgacaaaccggaggaaggcggggatgacgtcaaatcatcatgccccttatgacctgggctacacacgtgctacaatggatggtacagagggcagcgagaccgcgaggtcaagcaaatctcaaaaaaccattctcagttcggattgcaggctgcaactcgcctgtatgaagccggaatcgctagtaatcgcaggtcagcatactgcggtgaatacgttcccgggccttgtacacaccgcccgtcacaccacgagagttggcaacacccgaagtcggtgaggtaacctttttggagccagccgccgaaggtggggccaatgattggggtg

SEQ ID NO: 2593 - DNA, 1484 bp, Pontibacillus yanchengensis
gacgaacgctggcggcgtgcctaatacatgcaagtcgagcgcgtgaagcaacatgatcccttcggggtgattgttgtggatcgagcggcggacgggtgagtaacacgtggataacctaccttcgagatcgggataaccccgggaaaccggggctaataccgaataatctgttagaccgcatggtcgaacagcaaacggcggccctgccgtcactcgaagatggatccgcggcgcattagctagttggtaaggtaacggcttaccaaggcgacgatgcgtagccgacctgagagggtgatcggccacactgggactgagacacggcccagactcctacgggaggcagcagtagggaatcttccgcaatggacgaaagtctgacggagcaacgccgcgtgaacgatgaaggtcttcggatcgtaaagttctgttgttagggaagaacaagtgccagaggaaatgctggcaccttgacggtacctaaccagaaagccccggctaactacgtgccagcagccgcggtaatacgtagggggcaagcgttgtccggaattattgggcgtaaagcgcgcgcaggcggttccttaagtctgatgtgaaagcccacggctcaaccgtggagggccattggaaactggggagcttgagtacagaagaggagagtggaattccacgtgtagcggtgaaatgcgtagatatgtggaggaacaccagtggcgaaggcgactctctggtctgtaactgacgctgaggcgcgaaagcgtgggtagcaaacaggattagataccctggtagtccacgccgtaaacgttgagtgctaggtgttagggggtttccgccccttagtgctgaagttaacgcattaagcactccgcctggggagtacggccgcaaggctgaaactcaaaggaattgacgggggcccgcacaagcggtggagcatgtggtttaattcgaagcaacgcgaagaaccttaccaggtcttgacatcttccgctatccctagagatagggagttcccttcggggacggaatgacaggtggtgcatggttgtcgtcagctcgtgtcgtgagatgttgggttaagtcccgcaacgagcgcaacccctaatcttagctgccagcattcagttgggcactctaaggtgactgccggtgacaaaccggaggaaggcggggatgacgtcaaatcatcatgccccttatgacctgggctacacacgtgctacaatggatggtacagagggcagcgagaccgcgaggtcaagcaaatctcaaaaaaccattctcagttcggattgcaggctgcaactcgcctgtatgaagccggaatcgctagtaatcgcaggtcagcatactgcggtgaatacgttcccgagccttgtacacaccgcccgtcacaccacgagagttggcaacacccgaagtcggtgaggtaacctttttggaggcagccgccgaaggtggggccaatgattggggtg

SEQ ID NO: 2594 - DNA, 1423 bp, Pontibacter korlensis
atacatgcaagtcgaacggatcagagggcttcggttctctggttagtggcgcacgggtgcgtaacgcgtatgcaacctaccttccactgggggatagcccggggaaacccggattaataccgcatgtgaccactgagagggcatccgatcgtggtaaaagctgaggcggtggaagatgggcatgcgtgccattagctagttggcggggtaacggcccaccaaggctacgatggctaggggttctgagaggatggtcccccacactggtactgagacacggaccagactcctacgggaggcagcagtagggaatattgggcaatggccgagaggctgacccagccatgccgcgtgcaggaagaaggccttctgggttgtaaactgcttttatctgggaagaaaacgcccctgcgggggtaactgacggtaccagatgaataagcaccggctaactccgtgccagcagccgcggtaatacggagggtgcaagcgttgtccggatttattgggtttaaagggtgcgtaggcggcccgttaagtcagcggtgaaatcccacggctcaaccgtggaactgccgttgatactggcgggcttgagttcggtcgaggcgggcggaactggtggtgtagcggtgaaatgcttagataccaccaagaaccccgattgcgtaggcagctcgctgggccgaaactgacgctgaggcacgaaagcgtggggagcgaacaggattagataccctggtagtccacgccgtaaacgatgatgactcgatgttggcgatacactgtcagcgtccaagcgaaagcgttaagtcatccacctggggagtacgcccgcaagggtgaaactcaaaggaattgacgggggcccgcacaagcggtggagcatgtggtttaattcgatgatacgcgaggaaccttacctaggctagaatgcgcgtgaccgcaccagagatggtgcttcccttcggggcacaaagcaaggtgctgcatggctgtcgtcagctcgtgccgtgaggtgttgggttaagtcccgcaacgagcgcaacccctacctttagttgccagcgcgtcatggcggggactctaaagggactgccttcgcaagaagcgaggaaggcggggacgacgtcaagtcatcatggcccttacgcctagggctacacacgtgctacaatggccggtacagagggttgccacccagcgatggggcgccaatctcaaaaagccggtctcagttcggatcggagtctgcaactcgactccgtgaagccggaatcgctagtaatcgcgtatcagcaacgacgcggtgaatacgttcccgggccttgtacacaccgcccgtcaagccatggaagtcagggagacctgaagccggtgaccgtcataggagccgtctagggtaaaactggtaactggggct

SEQ ID NO: 2595 - DNA, 1407 bp, Porphyrobacter dokdonensis
aacgaacgctggcggcatgcctaacacatgcaagtcgaacgagaccttcgggtctagtggcgcacgggtgcgtaacgcgtgggaacctgcccttaggttcggaataactcagagaaatttgagctaataccggataatgtcttcggaccaaagatttatcgcctttggatgggcccgcgttggattagctagttggtggggtaaaggcctaccaaggcgacgatccatagctggtctgagaggatgatcagccacactgggactgagacacggcccagactcctacgggaggcagcagtggggaatattggacaatgggcgaaagcctgatccagcaatgccgcgtgagtgatgaaggccttagggttgtaaagctcttttacccgagatgataatgacagtatcgggagaataagctccggctaactccgtgccagcagccgcggtaatacggagggagctagcgttgttcggaattactgggcgtaaagcgcacgtaggcggctttttaagtcagaggtgaaatcccggggctcaaccccggaactgcctttgaaactgggaagctagaatcctggagaggcgagtggaattccgagtgtagaggtgaaattcgtagatattcggaagaacaccagtggcgaaggcgactcgctggacaggtattgacgctgaggtgcgaaagcgtggggagcaaacaggattagataccctggtagtccacgccgtaaacgatgataactagctgtccgggttcatggaacttgggtggcgcagctaacgcattaagttatccgcctggggagtacggtcgcaagattaaaactcaaaggaattgacgggggcctgcacaagcggtggagcatgtggtttaattcgaagcaacgcgcagaaccttaccagcctttgacatcctaggacgacttctggagacagatttcttcccttcggggacctagtgacaggtgctgcatggctgtcgtcagctcgtgtcgtgagatgttgggttaagtcccgcaacgagcgcaaccctcgtccttagttgccatcatttagttgggcactttaaggaaactgccggtgataagccggaggaaggtggggatgacgtcaagtcctcatggcccttacaggctgggctacacacgtgctacaatggcaactacagtgggcagctatcccgcgagggtgagctaatctccaaaagttgtctcagttcggattgttctctgcaactcgagagcatgaaggcggaatcgctagtaatcgcggatcagcatgccgcggtgaatacgttcccaggccttgtacacaccgcccgtcacaccatgggagttggattcacccgaaggcagtgcgctaaccgcaaggaggcagctgaccacggtgggttcagcgactggggtg

SEQ ID NO: 2596 - DNA, 1409 bp, Porphyrobacter mercurialis
aacgaacgctggcggcatgcctaacacatgcaagtcgaacgagaccttcgggtctagtggcgcacgggtgcgtaacgcgtgggaacctgcctttaggttcgggataactcctcgaaaggggtgctaataccggatgatgtcttcggaccaaagatttatcgcctttagatgggcccgcgttggattagcttgttggtgaggtaaaggctcaccaaggcgacgatccatagctggtcttagaggatgatcagccacactgggactgagacacggcccagactcctacgggaggcagcagtggggaatattggacaatgggcgaaagcctgatccagcaatgccgcgtgagtgatgaaggccttagggttgtaaagctcttttacccgggatgataatgacagtaccgggagaataagccccggctaactccgtgccagcagccgcggtaatacggagggggctagcgttgttcggaaatactgggcgtaaagcgaacgtaggcggcttggcaagtcaggggtgaaatcccagtgctcaacactggaactgcctttgaaactgccaggcttgaatcctggagaggcgagtggaattccgagtgtagaggtgaaattcgtagatattcggaagaacaccagtggcgaaggcgactcgctggacaggtattgacgctgaggttcgaaagcgtggggagcaaacaggattagataccctggtagtccacgccgtaaacgatgataactagctgtccgggcacatggtgtttgggtggcgcagctaacgcattaagttatccgcctggggagtacggtcgcaagattaaaactcaaaggaattgacgggggcctgcacaagcggtggagcatgtggtttaattcgaagcaacgcgcagaaccttaccagcctttgacatcctcggacgactaccggagacggttttcttcccttacgggaccgagtgacaggtgctgcatggctgtcgtcagctcgtgtcgtgagatgttgggttaagtcccgcaacgagcgcaaccctcgtccttagttgccatcattaagttgggaactctaaggaaaccgccggtgataagccggaggaaggtggggatgacgtcaagtcctcatggcccttacaggctgggctacacacgtgctacaatggcatctacagtgggcagctaactcgcaagggtgcgctaatctccaaaagatgtctcagttcggattgtcctctgcaactcgagggcatgaaggcggaatcgctagtaatcgcggatcagcacgccgcggtgaatacgttcccaggccttgtacacaccgcccgtcacgccatgggagttggttctacccgaaggtggtgcgctaacccgcaagggaggcagccaaccacggtgggatcagcgactggggtg

SEQ ID NO: 2597 - DNA, 1406 bp, Porphyrobacter neustonensis
aacgaacgctggcggcatgcctaacacatgcaagtcgaacgagaccttcggtctagtggcgcacgggtgcgtaacgcgtgggaacctgcctttaggttcggaataactcagagaaatttgagctaataccggataatgtcttcggaccaaagatttatcgcctttagatgggcccgcgtaagattagctagttggtggggtaaaggcctaccaaggcgacgatctttagctggtctgagaggatgatcagccacactgggactgagacacggcccagactcctacgggaggcagcagtggggaatattggacaatgggcgaaagcctgatccagcaatgccgcgtgagtgatgaaggccttagggttgtaaagctcttttaccagggatgataatgacagtacctggagaataagctccggctaactccgtgccagcagccgcggtaatacggagggagctagcgttgttcggaattactgggcgtaaagcgcacgtaggcggctttttaagtcaggggtgaaatcccggggctcaaccccggaactgcccttgaaactgggaagctagaatcttggagaggcgagtggaattccgagtgtagaggtgaaattcgtagatattcggaagaacaccagtggcgaaggcgactcgctggacaagtattgacgctgaggtgcgaaagcgtggggagcaaacaggattagataccctggtagtccacgccgtaaacgatgataactagctgtccgggctcatagagtttgggtggcgcagctaacgcattaagttatccgcctggggagtacggtcgcaagattaaaactcaaaggaattgacgggggcctgcacaagcggtggagcatgtggtttaattcgaagcaacgcgcagaaccttaccagcctttgacatcctaggacgacttctggagacagatttcttcccttcggggacctagtgacaggtgctgcatggctgtcgtcagctcgtgtcgtgagatgttgggttaagtcccgcaacgagcgcaaccctcgtccttagttgccatcatttagttgggcactttaaggaaactgccggtgataagccggaggaaggtggggatgacgtcaagtcctcatggcccttacaggctgggctacacacgtgctacaatggcatctacagtgggcagctattccgcaaggatgcgctaatctccaaaagatgtctcagttcggattgtcctctgcaactcgagggcatgaaggcggaatcgctagtaatcgcggatcagcatgccgcggtgaatacgttcccaggccttgtacacaccgcccgtcacaccatgggagttggattcacccgaaggcagtgcgctaaccgcaaggaggcagctgaccacggtgggttcagcgactggggtg

SEQ ID NO: 2598 - DNA, 1409 bp, Porphyrobacter sanguineus
aacgaacgctggcggcatgcctaacacatgcaagtcgaacgagaccttcgggtctagtggcgcacgggtgcgtaacgcgtgggaacctgcctttaggttcggaataacagtgagaaattactgctaataccggataatgtcttcggaccaaagatttatcgcctttagatgggcccgcgttggattagctagttggtggggtaaaggcctaccaaggcgacgatccatagctggtctgagaggatgatcagccacactgggactgagacacggcccagactcctacgggaggcagcagtggggaatattggacaatgggcgaaagcctgatccagcaatgccgcgtgagtgatgaaggccttagggttgtaaagctcttttactggggatgataatgacagtacccagagaataagctccggctaactccgtgccagcagccgcggtaatacggagggagctagcgttgttcggaattactgggcgtaaagcgcacgtaggcggctttttaagtcaggggtgaaatcccggggctcaaccccggaactgcccttgaaactgggaagctagaatcttggagaggcgagtggaattccgagtgtagaggtgaaattcgtagatattcggaagaacaccagtggcgaaggcgactcgctggacaagtattgacgctgaggtgcgaaagcgtggggagcaaacaggattagataccctggtagtccacgccgtaaacgatgataactagctgtccgggctcatagagcttgggtggcgcagctaacgcattaagttatccgcctggggagtacggtcgcaagattaaaactcaaaggaattgacgggggcctgcacaagcggtggagcatgtggtttaattcgaagcaacgcgcagaaccttaccagcctttgacatcctaggacgacttctggagacagatttcttcccttcggggacctagtgacaggtgctgcatggctgtcgtcagctcgtgtcgtgagatgttgggttaagtcccgcaacgagcgcaaccctcgtccttagttgccatcattaagttgggcactttaaggaaactgccggtgataagccggaggaaggtggggatgacgtcaagtcctcatggcccttacaggctgggctacacacgtgctacaatggcatctacagtgggcagctattccgcaaggatgcgctaatctccaaaagatgtctcagttcggattgtcctctgcaactcgagggcatgaaggcggaatcgctagtaatcgcggatcagcatgccgcggtgaatacgttcccaggccttgtacacaccgcccgtcacaccatgggagttggattcactcgaaggcgttgagctaacccgcaagggaggcaggcgaccacagtgggtttagcgactggggtg

SEQ ID NO: 2599 - DNA, 1452 bp, Porphyromonas catoniae
gatgaacgctagcgataggcttaacacatgcaagtcgaggggcagcatggtcttagcttgctaagactgatggcgaccggcgcacgggtgcgtaacgcgtatgcaacttgcctcacagagggggataacccgtcgaaagacggactaataccgcgtacactccagtctgggcatccaggctagaggaaatgaaattcgctgtgagataggcatgcgtcccattagctagttggtgaggtaacggctcaccaaggcgacgatgggtaggggaactgagaggttgaacccccacactggtactgagacacggaccagactcctacgggaggcagcagtgaggaatattggtcaatgggcgagagcctgaaccagccaagtcgcgtgaaggatgactgtcttatggattgtaaacttcttttgtaggggaataaagaatggtacgtgtaccatagtgaatgtaccctacgaataagcatcggctaactccgtgccagcagccgcggtaatacggaggatgcgagcgttatccggatttattgggtttaaagggtgcgtaggcggcctgttaagtcagcggtgaaatctaggggcttaactcctaaattgccattgatactggtgggcttgagtgtagatgaggtaggcggaatgcgtggtgtagcggtggaatgcatagatatcacgcagaactccaattgcgaaggcagcttactaaggtacaactgacgctgaagcacgaaagcgtgggtatcaaacaggattagataccctggtagtccacgcagtaaacgatgataactgggcgtatgcgatatacagtatgctcctaagcgaaagcgttaagttatccacctggggagtacgccggcaacggtgaaactcaaaggaattgacgggggcccgcacaagcggaggaacatgtggtttaattcgatgatacgcgaggaaccttacccgggattgaaatgtagacgacgagcggtgaaagtcgctttcccttcggggcttctatgtaggtgctgcatggttgtcgtcagctcgtgccgtgaggtgtcggcttaagtgccataacgagcgcaacccctgtctacggttgccatcaggtaatgctgggaactccgtagagactgccgtcgtaaggcgtgaggaaggtggggatgacgtcaaatcagcacggcccttacatccggggcgacacacgtgttacaatggtggggacaaagggcagctacctggcgacaggatgcgaatctccaaaccccatcacagttcggatcggagtctgcaactcgactccgtgaagctggattcgctagtaatcgcgcatcagccatggcgcggtgaatacgttcccgggccttgtacacaccgcccgtcaagccatgggagtctggagtacctaaagtccgtacctgcgagggtcggcctagggtaatacaggtgactggggct

SEQ ID NO: 2600 - DNA, 1455 bp, Porphyromonas circumdentaria
gatgaacgctagcgataggcttaacacatgcaagtcgaggggcagcatggtcttagcttgctaagattgatggcgaccggcgcacgggtgcgtaacgcgtatgtaacctgcctgtaattaggggatagctcggtgaaagtcgaattaataccctatattctatatatttcgcatgggatttataggaaagatttattgattacagatgggcatgcgttccattagcttgttggtaaggtaacggcttaccaaggctacgatggatagggggactgagaggttgaccccccacactggtactgagacacggaccagactcctacgggaggcagcagtgaggaatattggtcaatgggcgaaagcctgaaccagccaagtcgcgtgaaggaagactgtcctatggattgtaaacttcttttgtagaggaataatggtagccacgtgtggctaaggggaatgtactctacgaataagtatcggctaactccgtgccagcagccgcggtaatacggaggatacgagcgttatccggatttattgggtttaaagggtgcgtaggtggcgaattaagtcagtggtgaaaagctgcagctcaactgtagtcttgccgttgaaactggtttgcttgagaggagacgaggtatgtggaatgtgtggtgtagcggtgaaatgcatagatatcacacagaacgccgattgcgaaggcagcgtaccaggctctatctgacactgaagcacgaaagcgtgggtatcaaacaggattagataccctggtagtccacgctgtaaacgatgaatactagatttttgcgatatacagtaagagtctaagcgaaagcgataagtattccacctggggagtacgccggcaacggtgaaactcaaaggaattgacgggggcccgcacaagcggaggaacatgtggtttaattcgatgatacgcgaggaaccttacctgggattgaaatttaggagaacgatttatgaaagtagattttcccttcggggctcctaagtaggtgctgcatggttgtcgtcagctcgtgccgtgaggtgtcggcttaagtgccataacgagcgcaacccgcgttgatagttactaacagataaagctgaggactctatcgagacagccgtcgtaagacgcgaggaaggggcggatgacgtcaaatcagcacggcccttacatccagggcgacacacgtgttacaatggcaaggacaaagggaagccacatagcgatatggagcagatcctcaaaccttgtcccagttcggatcggagtctgcaactcgactccgtgaagctggattcgctagtaatcgcgcatcagccatggcgcggtgaatacgttcccgggccttgtacacaccgcccgtcaagccatgggagtcgggggtacctgaagagtgtaaccgtaaggagcgcttaagggtaataccggtgactggggct

SEQ ID NO: 2601 - DNA, 1453 bp, Porphyromonas crevioricanis
gatgaacgctagcgataggcttaacacatgcaagtcgaggggcatcgggtaagtagcttgctacttatgccggcgaccggcgcacgggtgcgtaacgcgtatgcaacctacctgtcagactgggataacccggtgaaagccggactaatactggatatacttattcttctgcatggggggataaggaaagatttattactgacagatgggcatgcgttccattagctagttggtgaggtaacggctcaccaaggcgacgatggataggggaactgagaggtttatcccccacactggtactgagacacggaccagactcctacgggaggcagcagtgaggaatattggtcaatgggcgagagcctgaaccagccaagtcgcgtgagggcagacggtcctaaggattgtaaacctctttttcaggggagtaaaattagatacgcgtatttaattgcaagtaccctgcgaataagcatcggctaactccgtgccagcagccgcggtaatacggaggatgcgagcgttatccggatttattgggtttaaagggtgcgtaggttgttttgtaagtcagtggtgaaacctgggggctcaacccctagcatgccgttgaaactgcagagctagagattagaataggtaggcggaatgtatggtgtagcggtgaaatgcatagatatcatacagaaccccgattgcgaaggcagcttaccgggctatatctgacactgaagcacgaaagcgtgggtatcaaacaggattagataccctggtagtccacgccgtaaacgatgattactcggagtatgcgatatgagtgtatgcttcttagcgaaagcgttaagtaatccacctggggagtacgtcggcaacgatgaaactcaaaggaattgacgggggcccgcacaagcggaggaacatgtggtttaattcgatgatacgcgaggaaccttacccgggattgaaatatagatgacaggcagcgagagttgttatcccttcggggcatctatgtaggtgctgcatggttgtcgtcagctcgtgccgtgaggtgtcggcttaagtgccctaacgagcgcaacccacattattagttactaacaggttaagctgaggactctaataagactgccggcgtaagccgtgaggaaggtgtggatgacgtcaaatcagcacggcccttacatccggggcgacacacgtgttacaatggtagggacaaagggcagctaccgggcgaccggatgcgaatctccaaaccctatcccagttcggatcggagtctgcaactcgactctgtgaagctggattcgctagtaatcgcgcatcagccatggcgcggtgaatacgttcccgggccttgtacacaccgcccgtcaagccatgggagtcgggggtacctgaagtacgtaaccgcgaggggcgtcctagggtaataccggtgactggggct

SEQ ID NO: 2602 - DNA, 1452 bp, Porphyromonas endodontalis
gatgaacgctagcgataggcttaacacatgcaagtcgaggggcagcattattttagcttgctaagatagatggcgaccggcgcacgggtgcgtaacgcgtatgcaacctgcctgtaattagggaataacccggtgaaagtcggactaataccctatattcttctttctccgcatggaggaggacggaaagatttattgattacagatgggcatgcgtcccattagctggttggtaaggtaacggcttaccaaggcaacgatgggtagggggactgagaggttgaccccccacactggtactgagacacggaccagactcctacgggaggcagcagtgaggaatattggtcaatgggcgagagcctgaaccagccaagtcgcgtgaaggacgacggttctatggattgtaaacttcttttgtagaggaataatggcagctacgtgtagctgagtgcatgtactctacgaataagtatcggctaactccgtgccagcagccgcggtaatacggaggatacgagcgttatccggaattattgggtttaaagggtgcgtaggtggcgtattaagtcagtggtgaaaagctgcagctcaactgtagtcttgccgttgaaactgatatgctagagaggagacgaggtatgcggaatgtgtggtgtagcggtgaaatgcatagatatcacacagaacgccgattgcgaaggcagcgtaccaggctccgtctgacactgaagcacgaaagcgtggggatcaaacaggattagataccctggtagtccacgcagtaaacgatgaatactagatttttgcgatatactgtaagagtctaagcgaaagcgataagtattccacctggggagtacgccggcaacggtgaaactcaaaggaattgacgggggcccgcacaagcggaggaacatgtggtttaattcgatgatacgcgaggaaccttacccgggattgaaatttagatgatggcagatgagagtttgctttccttcgggacatctaagtaggtgctgcatggttgtcgtcagctcgtgccgtgaggtgtcggcttaagtgccataacgagcgcaacccgcgtcgatagttactaacaggttatgctgaggactctatcgagacagccgtcgtaagacgcgaggaaggggcggatgacgtcaaatcagcacggcccttacatccggggcgacacacgtgttacaatggcagggacaaagggaagcgacatggtgacatgaagcggatctccaaaccctgtcccagttcggatcggagtctgcaactcgactccgtgaagctggattcgctagtaatcgcgcatcagccatggcgcggtgaatacgttcccgggccttgtacacaccgcccgtcaagccatggaagttgggagtacctgaagagcgtaaccgcaaggggcgcttaagggtaataccagtgactggggct

SEQ ID NO: 2603 - DNA, 1454 bp, Porphyromonas gingivalis
gatgaacgctagcgataggcttaacacatgcaagtcgaggggcagcatgatcttagcttgctaaggttgatggcgaccggcgcacgggtgcgtaacgcgtatgcaacttgccttacagagggggataacccgttgaaagacggactaaaaccgcatacacttgtattattgcatgatattacaaggaaatatttatagctgtaagataggcatgcgtcccattagctagttggtgaggtaacggctcaccaaggcgacgatgggtaggggaactgagaggtttatcccccacactggtactgagacacggaccagactcctacgggaggcagcagtgaggaatattggtcaatgggcgagagcctgaaccagccaagtcgcgtgaaggaagactgtcctaaggattgtaaacttcttttatacgggaataacgggcgatacgagtattgcattgaatgtaccgtaagaataagcatcggctaactccgtgccagcagccgcggtaatacggaggatgcgagcgttatccggatttattgggtttaaagggtgcgtaggttgttcggtaagtcagcggtgaaacctgagcgctcaacgttcagcctgccgttgaaactgccgggcttgagttcagcggcggcaggcggaattcgtggtgtagcggtgaaatgcatagatatcacgaggaactccgattgcgaaggcagcttgccatactgcgactgacactgaagcacgaaggcgtgggtatcaaacaggattagataccctggtagtccacgcagtaaacgatgattactaggagtttgcgatataccgtcaagcttccacagcgaaagcgttaagtaatccacctggggagtacgccggcaacggtgaaactcaaaggaattgacgggggcccgcacaagcggaggaacatgtggtttaattcgatgatacgcgaggaaccttacccgggattgaaatgtagatgactgatggtgaaaaccgtcttcccttcggggcttctatgtaggtgctgcatggttgtcgtcagctcgtgccgtgaggtgtcggcttaagtgccataacgagcgcaacccacatcggtagttgctaacagttttcgctgaggactctaccgagactgccgtcgtaaggcgtgaggaaggtgtggatgacgtcaaatcagcacggcccttacatccggggcgacacacgtgttacaatgggagggacaaagggcagctaccgggcgaccggatgcgaatctctaaacccttccccagttcggatcggagtctgcaactcgactccgtgaagctggattcgctagtaatcgcgcatcagccatggcgcggtgaatacgttcccgggccttgtacacaccgcccgtcaagccatgggagtcgggggtacctgaagggcgtaaccgcaaggggcgcactagggtaataccggtgactggggct

SEQ ID NO: 2604 - DNA, 1454 bp, Porphyromonas gingivicanis
gatgaacgctagcgataggcttaacacatgcaagtcgaggggcagcataattttagcttgctaagattgatggcgaccggcgcacgggtgcgtaacgcgtatgcaacctgcctgtaattaggggatagctcggtgaaagtcgaattaataccctatattctatatttttcgcatgattgatataggaaagatttattgattacagatgggcatgcgttccattagcttgttggtaaggtaacggcttaccaaggcaacgatggatagggggactgagaggttgaccccccacactggtactgagacacggaccagactcctacgggaggcagcagtgaggaatattggtcaatgggcgcaagcctgaaccagccaagtcgcgtgaaggacgacggtcctatggattgtaaacttcttttgtagaggaataatgatggccacgagtggctgaaggaatgtactctacgaataagtatcggctaactccgtgccagcagccgcggtaatacggaggatacgagcgttatccggatttattgggtttaaagggtgcgtaggtggcgaattaagtcagtggtgaaaagctgcagctcaactgtagtcttgccgttgaaactggtttgcttgagaggagacgaggtatgcggaatgtgtggtgtagcggtgaaatgcatagatatcacacagaacgccgattgcgaaggcagcgtaccaggctctgtctgacactgaagcacgaaagcgtgggtatcaaacaggattagataccctggtagtccacgctgtaaacgatgaatactagatttttgcgatatacagtaagagtctaagcgaaagcgataagtattccacctggggagtacgccggcaacggtgaaactcaaaggaattgacgggggcccgcacaagcggaggaacatgtggtttaattcgatgatacgcgaggaaccttacctgggattgaaatttaggagaacgatttatgaaagtagattttcccttcggggctcctaagtaggtgctgcatggttgtcgtcagctcgtgccgtgaggtgtcggcttaagtgccataacgagcgcaacccgcgtcgatagttactaacaggtaatgctgaggactctatcgagacagccgtcgtaagacgagaggaaggggcggatgacgtcaaatcagcacggcccttacatccagggcgacacacgtgttacaatggcaaggacaaagggaagccacatagcgatatggagcagatcctcaaaccttgtcccagttcggatcggagtctgcaactcgactccgtgaagctggattcgctagtaatcgcgcatcagccatggcgcggtgaatacgttcccgggccttgtacacaccgcccgtcaagccatgggagtcgggggtacctgaagagtgtaaccgtaaggagcgcttaagggtaataccggtgactggggct

SEQ ID NO: 2605 - DNA, 1450 bp, Porphyromonas gulae
aacgctagcgataggcttaacacatgcaagtcgaggggcagcatgaacttagcttgctaagtttgatggcgaccggcgcacgggtgcgtaacgcgtatgcaacttgccttacagagggggataacccgttgaaaggcggactaataccgcatacacttgcttggttgcatgatcgggcaaggaaatatttatagctgtaagataggcatgcgtcccattagctggttggtgaggtaacggctcaccaaggcaacgatgggtaggggaactgagaggtttatcccccacactggtactgagacacggaccagactcctacgggaggcagcagtgaggaatattggtcaatgggcgagagcctgaaccagccaagtcgcgtgaaggatgactgtcctaaggattgtaaacttcttttatacgggaataacgggcgatacgtgtattgctgtgaatgtaccgtaagaataagcatcggctaactccgtgccagcagccgcggtaatacggaggatgcgagcgttatccggatttattgggtttaaagggtgcgtaggttgttcggtaagtcagcggtgaaaactgagcgctcaacgttcagcgtgccgttgaaactgccgggcttgagttcagaggcggcaggcggaattcgtggtgtagcggtgaaatgcatagatatcacgaggaactccgattgcgaaggcagcttgccatactgcgactgacactgaagcacgaaggcgtgggtatcaaacaggattagataccctggtagtccacgcagtaaacgatgattactaggagtttgcgatataccgtcaagcttccacagcgaaagcgttaagtaatccacctggggagtacgccggcaacggtgaaactcaaaggaattgacgggggcccgcacaagcggaggaacatgtggtttaattcgatgatacgcgaggaaccttacccgggattgaaatgtagacgacggatggtgaaagccgtcttcccttcggggcgtctatgtaggtgctgcatggttgtcgtcagctcgtgccgtgaggtgtcggcttaagtgccataacgagcgcaacccacatcggtagttgctaacaggtttagctgaggactctaccgagactgccgtcgtaaggcgtgaggaaggtgtggatgacgtcaaatcagcacggcccttacatccggggcgacacacgtgttacaatgggagggacaaagggcagctaccgggcgaccggatgcgaatctcgaaacccttccccagttcggatcggagtctgcaactcgactccgtgaagctggattcgctagtaatcgcgcatcagccatggcgcggtgaatacgttcccgggccttgtacacaccgcccgtcaagccatgggagtcgggggtacctgaagggcgtaaccgcaaggggcgcactagggtaataccggtgactggggct

SEQ ID NO: 2606 - DNA, 1445 bp, Porphyromonas levii
  misc_feature (18)..(18): n is a, c, g, or t
  misc_feature (310)..(310): n is a, c, g, or t
  misc_feature (510)..(510): n is a, c, g, or t
  misc_feature (614)..(614): n is a, c, g, or t
  misc_feature (780)..(780): n is a, c, g, or t
  misc_feature (932)..(932): n is a, c, g, or t
  misc_feature (942)..(943): n is a, c, g, or t
  misc_feature (990)..(992): n is a, c, g, or t
  misc_feature (1085)..(1085): n is a, c, g, or t
  misc_feature (1262)..(1262): n is a, c, g, or t
  misc_feature (1417)..(1417): n is a, c, g, or t
aacgctagcgataggctnaacacatgcaagtcgaggggtaacatgggagtagcttgctgcttctgatgacgaccggcggatgggtgagtaacgcgtatgcaacttgcctcttagtggggaataacccggagaaatccggactaataccgcatacacttagttatccgcatggatgattaaggaaagatttattgctaagagataggcatgcgttccattagttagttggtgaggtaacggctcaccaaggcatcgatggataggggagctgagaggcttatcccccacattgggactgagacacggcccnaactcctacgggaggcagcagtgaggaatattggtcaatggaggaaactctgaaccagccaagtcgcgtgaaggatgactgtcctatggattgtaaacttctttagtaggcgagtaaacgtaggtacgagtacctacctgcaagtagcctaagaataagtatcggctaactccgtgccagcagccgcggtaatacggagnatacgagcgttatccggatttattgggtttaaagggtgcgtaggtggcagattaagtcagtggtgaaaagctgtggctcaaccatagtcttgccgttgaaactngtttgcttgagtacagttgatgtaggcggaatgcgtagtgtagcggtgaaatgcatagatattacgcagaactccgattgcgaaggcagcttacaaaagtgtaactgacactgatgcacgaaagcgtgggtatcaaacaggattagataccctggtagtccacgcngtaaactatgattactcagagtatgcgatataatgtatgctctcaagcgaaagcattaagtaatccacctggggagtacgtcggcaacgatgaaactcaaaggaattgacgggggcccgcacaagcggaggaacatgtggtttaattcgatnatacgcgagnnaccttacctgggattgaaatgtataggacaggggatggaaacattcnnnttctcttcggagacttatatgtaggtgctgcatggttgtcgtcagctcgtgccgtgaggtgtcggcttaagtgccataacgagcgcaaccctnatcgttagttactagcaggtagtgctgaggactctagcgagactgccgtcgtaagacgagaggaaggtggggatgacgtcaaatcagcacggcccttatatccagggcgacacacgtgttacaatggtgaggacaaagggtagctacctggtgacaggatgccaatctccaaacctnatctcagttcggatcgaagtctgcaactcgacttcgtgaagctggattcgctagtaatcgcgcatcagccatggcgcggtgaatacgttcccgggccttgtacacaccgcccgtcaagccatgggagctgggggtacctgaagtacgtgaccgcnaggagcgtccgagggtaagaccggtgac

SEQ ID NO: 2607 - DNA, 1452 bp, Porphyromonas loveana
gatgaacgctagcgataggcttaacacatgcaagtcgaggggcagcatggtcttagcttgctaagactgatggcgaccggcgcacgggtgcgtaacgcgtatgcaacttgccttacagagggggataacccgttgaaagacggactaacaccgcatatgctcaggggtctgcatgggcctttgaggaaatatttatagctgtaagataggcatgcgtcccattagcttgttggtgaggtaacggctcaccaaggcaacgatgggtaggggaactgagaggtttatcccccacactggtactgagacacggaccagactcctacgggaggcagcagtgaggaatattggtcaatgggcgagagcctgaaccagccaagtcgcgtgaaggatgaaggccctatgggtcgtaaacttcttttatacgggaataacgagccttacgggtagggcgctgaatgtaccgtaggaataagcatcggctaactccgtgccagcagccgcggtaatacggaggatgcgagcgttatccggatttattgggtttaaagggtgcgtaggttgcttggtaagtcagcggtgaaaactgaacgctcaacgttcagcgtgccgttgaaactgtcaggcttgagtgcagtggcggcaggcggaattcgtggtgtagcggtgaaatgcatagatatcacgaggaactccgattgcgaaggcagcttgccatactgtaactgacactgaagcacgaaggcgtgggtatcaaacaggattagataccctggtagtccacgcagtaaacgatgattactaggagtttgcgatataccgtaagctccacagcgaaagcgttaagtaatccacctggggagtacgccggcaacggtgaaactcaaaggaattgacgggggcccgcacaagcggaggaacatgtggtttaattcgatgatacgcgaggaaccttacccgggattgaaatgtagatgacagatggtgaaagccgttcttccttcgggacatctatgtaggtgctgcatggttgtcgtcagctcgtgccgtgaggtgtcggcttaagtgccataacgagcgcaacccacattggtagttactaacaggtcaagctgaggactctaccgagactgccgtcgtaaggcgcgaggaaggtgtggatgacgtcaaatcagcacggcccttacatccggggcgacacacgtgttacaatgggagggacaaagggcagctaccgggcgaccggatgcgaatctcgaaacccttccccagttcggatcggagtctgcaactcgactccgtgaagctggattcgctagtaatcgcgcatcagccatggcgcggtgaatacgttcccgggccttgtacacaccgcccgtcaagccatgggagtcgggggtacctgaaggacgtaaccgcaaggggcgtactagggtaataccggtgactggggct

SEQ ID NO: 2608 - DNA, 1454 bp, Porphyromonas macacae
gatgaacgctagcgataggcttaacacatgcaagtcgaggggcagcatggtcttagcttgctaagattgatggcgaccggcgcacgggtgcgtaacgcgtatgtaacttgcctgatagaaagggataacccggtgaaagtcggactaataccttatggtcttgggttattgcatgatgattcaagtaaagattaattgctatcagataggcatgcgttccattagttggttggtgaggtaacggctcaccaaggctacgatggataggggaactgagaggtttatcccccacactggtactgagacacggaccagactcctacgggaggcagcagtgaggaatattggtcaatgggcgagagcctgaaccagccacgtcgcgtgaaggaagacggttctatggattgtaaacttcttttataggggattaaagttatccacgtgtggatatttgcaagtaccctatgaataagcatcggctaactccgtgccagcagccgcggtaatacggaggatgcgagcgttatccggatttattgggtttaaagggtgcgtaggtggcctgataagtcgggggtgaaaagctgtggctcaaccacagtcttgccttcgaaactgtttggcttgagtatagatgaagtaggcggaatttgtggtgtagcggtgaaatgcatagatatcacgaggaactccgattgcgaaggcagcttactaagttatgactgacactgaagcacgaaagcgtgggtatcaaacaggattagataccctggtagtccacgcagtaaacgatgataactgggcgtatgcgatatacagtatgctcctgagcgaaagcgttaagttatccacctggggagtacgccggcaacggtgaaactcaaaggaattgacgggggcccgcacaagcggaggaacatgtggtttaattcgatgatacgcgaggaaccttacccgggattgaaatttagcggactatgtatgaaagtacatatcctgtcacaaggccgctaagtaggtgctgcatggttgtcgtcagctcgtgccgtgaggtgtcggcttaagtgccataacgagcgcaacccacgttgtcagttactatcgggtaaagccgaggactctgacaagactgccgtcgtaaggcgcgaggaaggtgtggatgacgtcaaatcagcacggcccttacatccggggcgacacacgtgttacaatggtggggacaaagggcagctacttggtgacaagatgcgaatctccaaaccccatcccagttcggatcgtagtctgcaactcgactatgtgaagctggattcgctagtaatcgcgcatcagccatggcgcggtgaatacgttcccgggccttgtacacaccgcccgtcaagccatgggagtcgggagtacctaaagcacgtaaccgcgaggggcgtgtcagggtaataccggtgactggggct

SEQ ID NO: 2609 - DNA, 1460 bp, Pragia fontium
acgctggcggcaggcctaacacatgcaagtcgagcggcagcggaaagtagcttgctactttgccggcgagcggcggacgggtgagtaatgtctgggaaactgcctgatggagggggataactactggaaacggtggctaataccgcgtaacgtcgcaagaccaaagagggggaccttcgggcctctcgccatcagatgtgcccagatgggattagctagtaggtggggtaatggctcacctaggcgacgatccctagctggtctgagaggatgaccagccacactgggactgagacacggcccagactcctacgggaggcagcagtggggaatattgcacaatgggggaaaccctgatgcagccatgccgcgtgtgtgaagaaggccttagggttgtaaagcactttcagcggggaggaagggtaggtacttaatacgtgcttacattgacgttacccgcagaagaagcaccggctaactccgtgccagcagccgcggtaatacggagggtgcaagcgttaatcggaattactgggcgtaaagcgcacgcaggcggtttgttaagttagatgtgaaatccccgggcttaacctgggaactgcatttaaaactggcaagctagagtcttgtagaggggggtagaattccatgtgtagcggtgaaatgcgtagagatgtggaagaataccggtggcgaaggcggccccctggacaaagactgacgctcaggtgcgaaagcgtggggagcaaacaggattagataccctggtagtccacgctgtaaacgatgtcgacttggaggttgttcccttgaggagtggcttccggagctaacgcgttaagtcgaccgcctggggagtacggccgcaaggttaaaactcaaatgaattgacgggggcccgcacaagcggtggagcatgtggtttaattcgatgcaacgcgaagaaccttacctactcttgacatccagagaacttagcagagatgctttggtgccttcgggaactctgagacaggtgctgcatggctgtcgtcagctcgtgttgtgaaatgttgggttaagtcccgcaacgagcgcaacccttatcctttgttgccagcaagtcatgttgggaactcaaaggagactgccggtgataaaccggaggaaggtggggatgacgtcaagtcatcatggcccttacgagtagggctacacacgtgctacaatggcgtatacaaagagaagctaactcgcgagagcatgcggacctcataaagtacgtcgtagtccggatcggagtctgcaactcgactccgtgaagtcggaatcgctagtaatcgtggatcagaatgccacggtgaatacgttcccgggccttgtacacaccgcccgtcacaccatgggagtgggttgcaaaagaagtaggtagcttaaccttcgggagggcgcttaccactttgtgattcatgactggggtg

SEQ ID NO: 2610 - DNA, 1452 bp, Prevotella bryantii
gatgaacgctagctacaggcttaacacatgcaagtcgaggggtaacatgaagaaagcttgctttctttgatgacgaccggcgcacgggtgagtatcgcgtatccaacctgcccataagtagggaatagccttgcgaaagtaagattaatgccctatggtttccgtcgaagacatctgagatggaataaagatttatcgcttatggatggggatgcgtctgattaggtagtaggcggggtaacggcccacctagccgacgatcagtaggggttctgagaggaaggtcccccacattggaactgagacacggtccaaactcctacgggaggcagcagtgaggaatattggtcaatggacggaagtctgaaccagccaagtagcgtgcaggatgacggccctatgggttgtaaactgcttttttaggggaataaagttagccacgtgtggttatttgcatgtaccctacgaataaggaccggctaattccgtgccagcagccgcggtaatacggaaggtccgggcgttatccggatttattgggtttaaagggagcgcaggccgtttggtaagcgtgttgtgaaatgtccgggctcaacctgggcactgcagcgcgaactgtcagacttgagtgcacaggaagcgggcggaattcgtggtgtagcggtgaaatgcttagatatcacgaagaactccaattgcgaaggcagctcgctgtagtgttactgacgctaaagctcgaaagtgcgggtatcgaacaggattagataccctggtagtccgcacggtaaacgatggatgcccgctgtttgcccttcggggtgagtggctaagcgaaagcgttaagcatcccacctggggagtacgccggcaacggtgaaactcaaaggaattgacgggggcccgcacaagcggaggaacatgtggtttaattcgatgatacgcgaggaaccttacccgggcttgaattgcagatgacggatctagagatagtgacttccttcgggacatctgtgaaggtgctgcatggttgtcgtcagctcgtgccgtgaggtgtcggcttaagtgccataacgagcgcaacccttctcttcagttgccatcaggtagagctgggcactctggagacactgccaccgtaaggtgtgaggaaggtggggatgacgtcaaatcagcacggcccttacgtccggggctacacacgtgttacaatggccggtacagaaagtcggatgcccgtaaggtcattctaatcaagaaagccggtcccagttcggactgaggtctgcaacccgacctcacgaagctggattcgctagtaatcgcgcatcagccatggcgcggtgaatacgttcccgggccttgtacacaccgcccgtcaagccatgaaagccgggggtgcctgaagtccgtgaccgcaagggtcggcctagggcaaaactggtaattggggct

SEQ ID NO: 2611 - DNA, 1455 bp, Prevotella colorans
gatgaacgctagctacaggcttaacacatgcaagtcgaggggaaacggcatcaagcgcttgcgcctgatggacgtcgaccggcgcacgggtgagtaacgcgtatccaacctgccccacactaagggataacccgcagaaatgtggactaataccttatattttccaccaagggcatcgtcgatggaacaaagatttatcggtatgggatggggatgcgtccgattaggttgttggcggggtaacggcccaccaagccttcgatcggtaggggttctgagaggaaggtcccccacataggaactgagacacggtcctaactcctacgggaggcagcagtgaggaatattggtcaatgggcgtgagcctgaaccagccaagtagcgtgcaggaagacggccctatgggttgtaaactgcttttatgcggggataaaggagtccacgtgtggatttttgcaggtaccgcatgaataaggaccggctaattccgtgccagcagccgcggtaatacggaaggtccgggcgttatccggatttattgggtttaaagggagcgtaggccgcgttttaagcgtgttgtgaaatgtaggcgcccaacgtctgcatcgcagcgcgaactgggacgcttgagtacgcgcaacgttggcggaattcgtcgtgtagcggtgaaatgcttagatatgacgaggaactccgattgcgaaggcagctgacgggagcggcactgacgcttaagctcgaaggtgcgggtatcaaacaggattagataccctggtagtccgcacagtaaacgatggatgcccgctgtgtgccaattatggtacgcggctaagcgaaagcgttaagcatcccacctggggagtacgccggcaacggtgaaactcaaaggaattgacgggggcccgcacaagcggaggaacatgtggtttaattcgatgatacgcgaggaaccttacccgggcttgaactgccggtgcacgatccagagatggtgaggcccttcggggcgccggtggaggtgctgcatggttgtcgtcagctcgtgccgtgaggtgtcggcttaagtgccataacgagcgcaacccctctccgtagttgccatcaggtaatgctgggcactctgcggatactgccaccgcaaggtgcgaggaaggtggggatgacgtcaaatcagcacggcccttacgtccggggctacacacgtgttacaatggggggcacagcgagttggccgcgcgcaagttcggtccaatcaagaaatcccccctcagttcggactggggtctgcaacccgaccccacgaagctggattcgctagtaatcgcgcatcagccatggcgcggtgaatacgttcccgggccttgtacacaccgcccgtcaagccatgaaagctgggggtgcctgaagtccgtaaccgtcaaggagcggcctagggcaaaaccggtgattggggct

SEQ ID NO: 2612 - DNA, 1454 bp, Prevotella maculosa
gatgaacgctagctacaggcttaacacatgcaagtcgaggggaaacgacattgaagcttgcttcgatggtcgtcgaccggcgcacgggtgagtaacgcgtatccaacctgcctctgaccaagggataacccgtcgaaagtcggactaataccttatgcagtcgtcggaagtcatctgatgacgacgaaagatttcatcggtgagagatggggatgcgtctgattagcttgttggcggggtaacggcccaccaaggcgacgatcagtaggggttctgagaggaaggtcccccacattggaactgagacacggtccaaactcctacgggaggcagcagtgaggaatattggtcaatgggcgcgagcctgaaccagccaagtagcgtgcaggatgacggccctatgggttgtaaactgcttttatgcggggataaagtgagggacgtgtccttcattgcaggtaccgcatgaataaggaccggctaattccgtgccagcagccgcggtaatacggaaggtccgggcgttatccggatttattgggtttaaagggagcgtaggccgtggattaagcgtgttgtgaaatgtagacgctcaacgtctgacttgcagcgcgaactggtccacttgagtgtgcacaacgcaggcggaattcgtcgtgtagcggtgaaatgcttagatatgacgaagaaccccgattgcgaaggcagcttgcgggagcacgactgacgctgaagctcgaaagtgcgggtatcgaacaggattagataccctggtagtccgcacggtaaacgatggatgcccgttgtcaggctgtatcagtctggtgaccaagcgaaagcattaagcatcccacctggggagtacgccggcaacggtgaaactcaaaggaattgacgggggcccgcacaagcggaggaacatgtggtttaattcgatgatacgcgaggaaccttacccgggcttgaattgcagacgtacgattcagagatgaagaggcccttcggggcgtctgtgaaggtgctgcatggttgtcgtcagctcgtgccgtgaggtgtcggcttaagtgccataacgagcgcaacccctatcctcggttgccatcgggtaatgccgggcactccgtggagactgccaccgtaaggtgtgaggaaggtggggacgacgtcaaatcagcacggcccttacgtccggggctacacacgtgttacaatggccggtacagcgagtcggccgcatgcaaatgcggtccaatcctgaaagccggtcccagttcggaccggggtctgcaacccgaccccgcgaagccggattcgctagtaatcgcgcatcagccatggcgcggtgaatacgttcccgggccttgtacacaccgcccgtcaagccatgaaagccgggggtgcctgaagtccgttaccgcgagggtcggcctaaggcaaaaccggtgattggggct

SEQ ID NO: 2613 - DNA, 1452 bp, Prevotella multisaccharivorax
gatgaacgctagctacaggcctaacacatgcaagtcgaggggaaacgaagcgggagcttgcttctgctgtcgtcgaccggcgcacgggtgagtaacgcgtatccaacctggcctgaggtaagggataatccgcagaaatgtggtctaataccttatgtgctcctatgaggccatctgaagaggagcaaagatttatcgccttaggatggggatgcgtctgattagatagttggcggggcaacggcccaccaagtcatcgatcagtaggggttctgagaggaaagtcccccacattggaactgagacacggtccagactcctacgggaggcagcagtgaggaatattggtcaatgggcgagagcctgaaccagccaagtagcgtgcaggatgacggccctatgggttgtaaactgcttttatgcgggtataaaggagcatacgtgtatgtttttgcagttaccgcatgaataaggaccggctaattccgtgccagcagccgcggtaatacggaaggttctggtgttatccggatttattgggtttaaagggagcgcaggctgtcagataagcgtgttgtgaaatgcggttgctcaacatccgcactgcagcgcgaactgtttgacttgagtacgcacgacgttggtggaatttgccgtgtagcggtgaaatgcttagatatggcgaagaactccgattgcgaaggcagctgacgggagcgctactgacgctcatgctcgaaagtgcgggtatcgaacaggattagataccctggtagtccgcacggtaaacgctggatgcccgctatatgccccttagggtatgtggccaagtgaaaacgttaagcatcccacctggggagtacgccggcaacggtgaaactcaaaggaattgacgggggcccgcacaagcggaggaacatgtggtttaattcgatgatacgcgaggaaccttacccgggcttgaattgctgaggaaggcttcagagatggagctgcccttcggggcttcagtgaaggtgctgcatggttgtcgtcagctcgtgccgtgaggtgtcggcttaagtgccataacgagcgcaacccttttcttcagttgccatcaggtagtgctgggccctctggagatactgccgccgtaaggtgtgaggaaggtggggatgacgtcaaatcagcacggcccttacgtccggggctacacacgtgttacaatgggtggtacagcgagcagggttaccgcaaggtatcccgaatcattaaatccgccctcagttcggactggggtctgcaacccgaccccacgaagctggattcgctagtaatcgcgcatcagccatggcgcggtgaatacgttcccgggccttgtacacaccgcccgtcaagccatgaaagccgggggtgcctgaagtccgtgaccgcaaggatcggcctagggcaaaactggtaattggggct

SEQ ID NO: 2614 - DNA, 1454 bp, Prevotella oris
gatgaacgctggctacaggcttaacacatgcaagtcgaggggaaacgacggggaagcttgcttccccgggcgtcgaccggcgcacgggtgagtaacgcgtatccaacctgcctctgactgagggataacccgtcgaaagtcggcctaatacctcatggcatcgtctgcgggcatccaacgacgattaaagatttcatcggtcagggatggggatgcgtctgattagcttgttggcggggtaacggcccaccaaggcgacgatcagtaggggttctgagaggaaggtcccccacattggaactgagacacggtccaaactcctacgggaggcagcagtgaggaatattggtcaatgggcgagagcctgaaccagccaagtagcgtgcaggatgacggccctatgggttgtaaactgcttttatgcggggataaagtgagggacgtgtccttcattgcaggtaccgcatgaataaggaccggctaattccgtgccagcagccgcggtaatacggaaggtccgggcgttatccggatttattgggtttaaagggagcgtaggccgtggattaagcgtgttgtgaaatgcaggtgctcaacgtctgcactgcagcgcgaactggtccacttgagtgtgcgcaacgcaggcggaattcgtcgtgtagcggtgaaatgcttagatatgacgaagaactccgattgcgaaggcagcttgcgggagcacaactgacgctgaagctcgaaagtgcgggtatcgaacaggattagataccctggtagtccgcacggtaaacgatggatgcccgttgtcaggctgtttcagcctggtgaccaagcgaaagcattaagcatcccacctggggagtacgccggcaacggtgaaactcaaaggaattgacgggggcccgcacaagcggaggaacatgtggtttaattcgatgatacgcgaggaaccttacccgggcttgaattgcagacgaacgattcagagatgatgaggcccttcggggcgtctgtgaaggtgctgcatggttgtcgtcagctcgtgccgtgaggtgtcggcttaagtgccataacgagcgcaacccctttcttcagttgccatcaggtgatgctgggcactctggagacactgccaccgcaaggtgtgaggaaggtggggatgacgtcaaatcagcacggcccttacgtccggggctacacacgtgttacaatggccggtacagagagttgattttgtgcaaacacgatctaatccttaaatccggtcccagttcggactggggtctgcaacccgaccccacgaagctggattcgctagtaatcgcgcatcagccatggcgcggtgaatacgttcccgggccttgtacacaccgcccgtcaagccatgaaagccgggggtgcctgaagtctgtgaccgcaaggaacggcctagggcaaaaccggtgattggggct

SEQ ID NO: 2615 - DNA, 1452 bp, Prevotella paludivivens
gatgaacgctagctacaggcttaacacatgcaagtcgaggggtaacgagagggaagcttgctttccttgtcgacgaccggcgcacgggtgagtaacgcgtatccaacctgcccacaactagagaataaccttgcgaaagtaagactaatgctctataatttccttagatggcatctgacgaggaataaagatttatcggttatggatggggatgcgtctgattagcttgttggcggggtaacggcccaccaaggcaacgatcagtaggggttctgagaggaaggtcccccacattggaactgagacacggtccaaactcctacgggaggcagcagtgaggaatattggtcaatgggcgaaagcctgaaccagccaagtagcgtgcaggatgacggccctatgggttgtaaactgcttttatacagggataaagttagccacgtgtggctatttgcaggtactgtatgaataaggaccggctaattccgtgccagcagccgcggtaatacggaaggtccaggcgttatccggatttattgggtttaaagggagcgtaggccgtctgttaagcgtgttgtgaaatgtagatgctcaacatctgaattgcagcgcgaactggcagacttgagtgtgcgcaacgtaggcggaattcgtggtgtagcggtgaaatgcttagatatcacgaagaactccaattgcgaaggcagcttacgggagcacaactgacgctgaagctcgaaagtgcgggtatcgaacaggattagataccctggtagtccgcacggtaaacgatggatgcccgctgttgacccacctgggccagcggccaagcgaaagcattaagcatcccacctggggagtacgccggcaacggtgaaactcaaaggaattgacgggggcccgcacaagcggaggaacatgtggtttaattcgatgatacgcgaggaaccttacccgggcttgaattgcagaggaatttaccagagacggtaaagcccttcggggtctctgtgaaggtgctgcatggttgtcgtcagctcgtgccgtgaggtgtcggcttaagtgccataacgagcgcaacccctttctttagttgccatcaggtgatgctgggcactctggagatactgccaccgtaaggtgtgaggaaggtggggatgacgtcaaatcagcacggcccttacgtccggggctacacacgtgttacaatggccggtacagagagacggttgcttgcaaaagtaatccaatccttaaagccggtcccagttcggactggggtctgcaacccgaccccacgaagctggattcgctagtaatcgcgcatcagccatggcgcggtgaatacgttcccgggccttgtacacaccgcccgtcaagccatgaaagccgggggtgcctgaagtccgtgaccgcaaggaacggcctagggcaaaactggtaattggggct

SEQ ID NO: 2616 - DNA, 1454 bp, Prevotella salivae
gatgaacgctagctacaggcttaacacatgcaagtcgaggggaaacgacattgaagcttgcttcgatgggcgtcgaccggcgcacgggtgagtaacgcgtatccaacctgcctctgactaagggataacccggcgaaagtcggactaataccttatgaggttttcagcagacatctaacgaaaacgaaagatttatcggtcagtgatggggatgcgtctgattagcttgttggcggggtaacggcccaccaaggcaacgatcagtaggggttctgagaggaaggtcccccacattggaactgagacacggtccaaactcctacgggaggcagcagtgaggaatattggtcaatgggcgagagcctgaaccagccaagtagcgtgcaggatgacggccctatgggttgtaaactgcttttatgtggggataaagtgagctacgtgtagtttattgcaggtaccacatgaataaggaccggctaattccgtgccagcagccgcggtaatacggaaggtccaggcgttatccggatttattgggtttaaagggagcgtaggccgtggattaagcgtgttgtgaaatgtagacgctcaacgtctgaattgcagcgcgaactggttcacttgagtatgcacaacgtaggcggaattcgtcgtgtagcggtgaaatgcttagatatgacgaagaactccgattgcgaaggcagcttacgggagcacaactgacgctgaagctcgaaggtgcgggtatcaaacaggattagataccctggtagtccgcacagtaaacgatggatgcccgttgttagttcacttatgaattagcgaccaagcgaaagcattaagcatcccacctggggagtacgccggcaacggtgaaactcaaaggaattgacgggggcccgcacaagcggaggaacatgtggtttaattcgatgatacgcgaggaaccttacccgggcttgaattgcagacgaacgattcagagatgatgaggcccttcggggcgtctgtgaaggtgctgcatggttgtcgtcagctcgtgccgtgaggtgtcggcttaagtgccataacgagcgcaaccccttttttcagttgccatcaggtgatgctgggcactctggagatactgccaccgtaaggtgtgaggaaggtggggatgacgtcaaatcagcacggcccttacgtccggggctacacacgtgttacaatggccggtacagagcgttggtcgtgtgcaaatacgatctaatccttaaagccggtcccagttcggactggggtctgcaacccgaccccacgaagctggattcgctagtaatcgcgcatcagccatggcgcggtgaatacgttcccgggccttgtacacaccgcccgtcaagccatgaaagccgggggtgcctgaagtctgtgaccgcaaggaacggcctagggcaaaactggtgattggggct

SEQ ID NO: 2617 - DNA, 1407 bp, Prochlorococcus marinus
gatgaacgctggcggcgtgcttaacacatgcaagtcgaacgaacattcgggttagtggcggacgggtgagtaacgcgtgagaatctgccctcaggagggggataacggttggaaacgaccgctaataccccatatgccgataggtgaaatgaatttcgcctgaggatgagctcgcgtctgattagcttgttggtgaggtaatggctcaccaaggcttcgatcagtagctggtctgagaggatgatcagccacactgggactgagacacggcccagactcctacgggaggcagcagtggggaattttccgcaatgggcgaaagcctgacggagcaacgccgcgtgagggacgaaggcctctgggctgtaaacctcttttctcaaggaagaagatatgacggtacttgaggaataagccacggctaattccgtgccagcagccgcggtaatacgggagtggcaagcgttatccggaattattgggcgtaaagcgtccgcaggcggcctttcaagtctgctgttaaagcgtggagcttaactccattatggcagtggaaactgatcggcttgagtatggtaggggcagagggaattcccggtgtagcggtgaaatgcgtagatatcgggaagaacaccagtggcgaaggcgctctgctgggccattactgacgctcatggacgaaagccaggggagcgaaagggattagatacccctgtagtcctggccgtaaacgatgaacactaggtgtcgggggaatcgaccccttcggtgtcgtagctaacgcgttaagtgttccgcctggggagtacgcacgcaagtgtgaaactcaaaggaattgacgggggcccgcacaagcggtggagtatgtggtttaattcgatgcaacgcgaagaaccttaccagggtttgacatcctgagaacctcttagaaattagagggtgccttcgggaattcagtgacaggtggtgcatggctgtcgtcagctcgtgtcgtgagatgttgggttaagtcccgcaacgagcgcaacccacgtttttagttgccagcatttagttgggcactctagaaagaccgccggtgataaaccggaggaaggtgtggatgacgtcaagtcatcatgccccttacaccctgggctacacacgtactacaatgctacggacaaagggcagcaaactcgcgagagctagcaaatcccataaaccgtggctcagttcagatcgtaggctgcaactcgcctacgtgaagtaggaatcgctagtaatcgcaggtcagcatactgcggtgaatacgttcccgggccttgtacacaccgcccgtcacaccatggaagttggccatgcccgaagtcgttactccaacccttgtggaggaggacgccgaaggtggggctaatgactggggtg

SEQ ID NO: 2618 - DNA, 1410 bp, Prochlorothrix hollandica
gatgaacgctggcggcgtgcttaacacatgcaagtcgaacgaagtcttcggacttagtggcggacgggtgagtaacgcgtgaggacctaccctaaggacggggacaacagttggaaacgactgctaatacccgatgtgccgagaggtgaaagatttatcgcctaaggatggactcgcgtcagattagctagttggtgtggtaacggcataccaaggcaacgatctgtagctggtctgagaggatgatcagccacactgggactgagacacggcccagactcctacgggaggcagcagtggggaattttccgcaatgggcgaaagcctgacggagcaacgccgcgtgtgggaggaaggttttaggactgtaaaccacttttctcagggaagaagatctgacggtacctgaggaatcagcatcggctaattccgtgccagcagccgcggtaatacgggagatgcaagcgttatccggaattattgggcgtaaagcgtccgcaggcggtcttataagtctgtcgttaaagcacacagcttaactgtgggagagcgatggaaactgtgagactagagtgcggtaggggtagggggaattcccggtgtagcggtgaaatgcgtagatatcgggaagaacaccagcagcgaaagcgccctactgggccgcaactgacgctcatggacgaaagctaggggagcgaaagggattagatacccctgtagtcctagccgtaaacgatggacactaggtgttgtctgtatcgacccggacagtgccgtagctaacgcgttaagtgtcccgcctggggagtacgcacgcaagtgtgaaactcaaaggaattgacgggggcccgcacaagcggtggagtatgtggtttaattcgatgcaacgcgaagaaccttaccagggcttgacatcccgcgaatctctgtgaaagtggagagtgccttcgggagcgcggagacaggtggtgcatggctgtcgtcagctcgtgtcgtgagatgttgggttaagtcccgcaacgagcgcaaccctcgttcttagttgccatcattaagttgggcactctagggagactgccggtgacaaaccggaggaaggtggggacgacgtcaagtcatcatgccccttacgtcctgggctacacacgtactacaatgctagggacaaagagcagccaactcgcgagagtgagctaatctcataaaccctggctcagttcggattgcaggctgcaactcgcctgcatgaagtaggaatcgctagtaatcgcaggtcagaatactgcggtgaatacgttcccgggccttgtacacaccgcccgtcacaccatggaagttggccacgcccgaagtcgttaccctaaccgttcgcggaggggggcgccgaaggcagggctgatgactggggtg

SEQ ID NO: 2619 - DNA, 1413 bp, Prolinoborus fasciculus
cttgctactttacctagcggcggacgggtgagtaatgcttaggaatctgcctattagtgggggacaacatctcgaaagggatgctaataccgcatacgtcctacgggagaaagcaggggaccttcgggccttgcgctaatagatgagcctaagtcggattagctagttggtggggtaaaggcctaccaaggcgacgatctgtagcgggtctgagaggatgatccgccacactgggactgagacacggcccagactcctacgggaggcagcagtggggaatattggacaatggggggaaccctgatccagccatgccgcgtgtgtgaagaaggccttttggttgtaaagcactttaagcgaggaggaggctaccgagattaatactcttggatagtggacgttactcgcagaataagcaccggctaactctgtgccagcagccgcggtaatacagagggtgcaagcgttaatcggatttactgggcgtaaagcgcgcgtaggtggccaattaagtcaaatgtgaaatccccgagcttaacttgggaattgcattcgatactggttggctagagtatgggagaggatggtagaattccaggtgtagcggtgaaatgcgtagagatctggaggaataccgatggcgaaggcagccatctggcctaatactgacactgaggtgcgaaagcatggggagcaaacaggattagataccctggtagtccatgccgtaaacgatgtctactagccgttggggcctttgaggctttagtggcgcagctaacgcgataagtagaccgcctggggagtacggtcgcaagactaaaactcaaatgaattgacgggggcccgcacaagcggtggagcatgtggtttaattcgatgcaacgcgaagaaccttacctggtcttgacatagtaagaactttccagagatggattggtgccttcgggaacttacatacaggtgctgcatggctgtcgtcagctcgtgtcgtgagatgttgggttaagtcccgcaacgagcgcaacccttttccttatttgccagcgggttaagccgggaactttaaggatactgccagtgacaaactggaggaaggcggggacgacgtcaagtcatcatggcccttacgaccagggctacacacgtgctacaatggtcggtacaaagggttgctacctcgcgagaggatgctaatctcaaaaagccgatcgtagtccggattggagtctgcaactcgactccatgaagtcggaatcgctagtaatcgcggatcagaatgccgcggtgaatacgttcccgggccttgtacacaccgcccgtcacaccatgggagtttgttgcaccagaagtaggtagtctaaccgtaaggaggacgcttaccacggtgtggcagatgactggggtgaagtc

SEQ ID NO: 2620 - DNA, 1444 bp, Prolixibacter denitrificans
gatgaacgctagcgggaggcttaacacatgcaagtcgaacggtaacaggtccttcgggacgctgacgagtggcgcacgggtgagtaacgcgtatgcaacctgccctgtacagggggatagcccggagaaatccggattaataccccatggtttctgtgattcgcatgttttacagaataaagtttcggcggtacaggatgggcatgcgtggcattagcttgttggtagggtaacggcttaccaaggcgacgatgcctaggggttctgagaggatgatcccccacactgggactgagacacggcccagactcctacgggaggcagcagtgaggaatattggtcaatgggcgagagcctgaaccagccatcccgcgtgcaggatgacggccctacgggttgtaaactgcttttctgcaagaagaatggtcactacgtgtagtgatttgacggtattgcaggaataagcatcggctaactccgtgccagcagccgcggtaatacggaggatgcaagcgttatccggattcattgggtttaaagggtgcgtaggcggctatataagtcagtggtgaaatgctgcagctcaactgtagaactgccattgaaactgtatagcttgagtgcgcctgaggtaggcggaatgagtagtgtagcggtgaaatgcttagatattactcagaacaccgattgcgaaggcagcttactaaagcgtaactgacgctgatgcacgaaagcgtggggagcgaacaggattagataccctggtagtccacgccgtaaacgatgataactcgctgttggcgatacacagtcagcggcttagcgaaagcattaagttatccacctggggagtacgatcgcaaggttgaaactcaaaggaattgacgggggcccgcacaagcggaggaacatgtggtttaattcgatgatacgcgaggaaccttacctgggcttaaatgtagaatgaccgttgccgaaaggtgacttcccttcggggcgttttacaaggtgctgcatggttgtcgtcagctcgtgccgtgaggtgtcgggttaagtcccataacgagcgcaacccttatcgtcagttgctagcaggtcaagctgaggactctggcgagactgccaccgtaaggtgagaggaaggtggggatgacgtcaaatcagcacggcccttatgtccagggctacacacgtgttacaatggtcggtacaaagggcagctacctggtaacaggatgctaatcccaaaagccggtctcagttcggattggagtctgcaacccgactccatgaagctggattcgctagtaatcgcgcatcagccatggcgcggtgaatacgttcccgggccttgtacacaccgcccgtcaaaccatggaagttgggggtacctgaagtctgcaaccgcaaggagcggcctagggtaaaaccaatgactggggtt

SEQ ID NO: 2621 - DNA, 1417 bp, Propionispira arboris
tcgaacgggcgaacgggtgagtaacgcgtagacaacctaccttttagatggggacaacatcgcgaaagcggtgctaataccgaatgttgtgtctttcccacatgggaaagctactaaagatggcctctatttataagctgtcactaaaagatgggtctgcgtctgattagctagttggcgggggtaatgcccaccaaggcgacgatcagtagccggtcagagaggatgaacggccacattgggactgagacacggcccaaactcctacgggaggcagcagtggggaatcttccgcaatggacgaaagtctgacggagcaacgccgcgtgagtgaagaaggttttcggatcgtaaagctctgttgtttgagacgaacgtgcagtatacgaataatgtgctgtaatgacggtatcaaactagaaagccacggctaactacgtgccagcagccgcggtaatacgtaggtggcaagcgttgtccggaattattgggcgtaaagggagcgcaggtgggaatgtaagtcagtcttaaaagtgcggggctcaaccccgtgatgggacagaaactacatttcttgagtgcaggagaggaaagtggaattcctagtgtagcggtgaaatgcgtagatattaggaggaacaccagtggcgaaggcgactttctggactgtaactgacactgaggctcgaaagctaggggagcgaacgggattagataccccggtagtcctagccgtaaacgatgaatactaggtgtagggggtatcgacccctcctgtgccggagctaacgcaataagtattccgcctggggagtacggtcgcaaggttgaaactcaaaggaattgacggggacccgcacaagcggtggagtatgtggtttaattcgacgcaacgcgaagaaccttaccagggcttgacatcgagtgaaaggctaagagattagtcctctccttcgggaagacacgaaaacaggtggtgcatggctgtcgtcagctcgtgtcgtgagatgttgggttaagtcccgcaacgagcgcaacccctatcctatgttgccagcacgtaatggtgggaactcatgggagactgccgcggataacgcggaggaaggcggggatgacgtcaagtcatcatgccccttatgtcctgggctacacacgtactacaatgggataaacagagggaagcgagaccgcgaggtggagcaaacccataaattatctctcagttcggattgcaggctgcaactcgcctgcatgaagtcggaatcgctagtaatcgcaggtcagcatactgcggtgaatacgttcccgggtcttgtacacaccgcccgtcacaccacgaaagtcattcacacccgaagccggtggggtaaccgcaaggagccagccgtctaaggtgggggcgatgattggggtg

SEQ ID NO: 2622 - DNA, 1599 bp, Propionispora hippei
gacgaacgctggcggcgtgcctaacacatgcaagtcgaacggttctggtgtttaacaccaaatgctacatgctaaccgggggatcacaaacaagccgcgtcttatgaacgagcgaagcgagttcattacgcaacttaaaagtgactaaccggaaaagtaagagcgattggtgttgaacgccaggtagtggcgaacgggtgagtaacgcgtaaacaacctgcctcatagatggggacaacaccgcgaaagtggtgctaataccgaatgttttaactttgctgcatggcagagttaataaaggtggcctctaaattatgctaccgttatgagaggggtttgcgtctgattagctagttggcggggtaatggcccaccaaggcgacgatcagtagccggtctgagaggatgaacggccacactgggactgagacacggcccagactcctacgggaggcagcagtggggaatcttccgcaatggacgaaagtctgacggagcaacgccgcgtgagtgaagaaggttttcggatcgtaaagctctgtcttttgggacgaatgtgctgtaggtgaataatctgtagcaatgacggtactaaaggaggaagccccggctaactacgtgccagcagccgcggtaatacgtaggtggcgagcgttgtccggaattattgggcgtaaagggcgcgtaggcggatctgtaagtctgacttaaaagtgcagggctcaaccctgtgaggggtcagaaactatagatcttgagtgcaggagaggaaagtggaattcccagtgtagcggtgaaatgcgtagatattgggaggaacaccagtggcgaaggcgactttctggactgtgtctgacgctgaggcgcgaaagccaggggagtgaacgggattagataccccggtaatcctggccgtaaacgatgggtactaggtgtaggaggtatcgaccccttctgtgccggagttaacgcaataagtaccccgcctggggagtacggccgcaaggttgaaactcaaaggaattgacgggggcccgcacaagcggtggagtatgtggtttaattcgacgcaacgcgaagaaccttaccagggcttgacattgagtgaaatgttaagagattagcacctctccttcgggagacacgaaaacaggtggtgcatggctgtcgtcagctcgtgtcgtgagatgttgggttaagtcccgcaacgagcgcaacccctgtcctatgttgccagcacgtaaaggtgggaactcatgggagactgccgcagagaatgcggaggaaggcggggatgacgtcaagtcatcatgccccttatgtcctgggctacacacgtactacaatgggcttaacagagggaagcgaagccgcgaggcagagcgaaccccgataaataagctctcagttcggatcgcaggctgcaactcgcctgcgtgaagtcggaatcgctagtaatcgcagatcagcatgctgcggtgaatacgttcccgggccttgtacacaccgcccgtcacaccacgagagttggaaacacccgaagccggtggggtaaccgcaaggagccagccgtcgaaggtggggccgatgattggggtg

SEQ ID NO: 2623 - DNA, 1479 bp, Propionispora vibrioides
gacgaacgctggcggcgtgcctaacacatgcaagtcgaacggaggttttcagcaatggagatcttagtggcgaacgggtgagtaacgcgtaaacaacctgcctcatagatggggacaacaccgcgaaagtggtgctaataccgaatgttttaactaagccgcatggcagagttaataaaggtggcctctaaattatgctaccgttatgagaggggtttgcgtctgattagctagttggcggggtaatggcccaccaaggcgacgatcagtagccggtctgagaggatgaacggccacactgggactgagacacggcccagactcctacgggaggcagcagtggggaatcttccgcaatggacgaaagtctgacggagcaacgccgcgtgagtgaagaaggttttcggatcgtaaagctctgtcttttgggacgaatgtagactgtgtaaataatgcagtttaatgacggtactaaaggaggaagccacggctaactacgtgccagcagccgcggtaatacgtaggtggcgagcgttgtccggaattattgggcgtaaagggcgcgtaggcggatttgtaagtctgacttaaaagtgcagggctcaaccctgtgaggggtcagaaactatggatcttgagtgcaggagaggaaagtggaattcccagtgtagcggtgaaatgcgtagatattgggaggaacaccagtggcgaaggcgactttctggactgtgtctgacgctgaggcgcgaaagccaggggagtgaacgggattagataccccggtaatcctggccgtaaacgatgggtactaggtgtaggaggtatcgaccccttctgtgccggagttaacgcaataagtaccccgcctggggagtacggccgcaaggttgaaactcaaaggaattgacgggggcccgcacaagcggtggagtatgtggtttaattcgacgcaacgcgaagaaccttaccagggcttgacattgagtgaaatgttaagagattagcacctctccttcgggagacatgaaacaggtggtgcatggctgtcgtcagctcgtgtcgtgagatgttgggttaagtcccgcaacgagcgcaacccctgtcctatgttgccagcacgtaaaggtgggaactcatgggagactgccgcagagaatgcggaggaaggcggggatgacgtcaagtcatcatgccccttatgtcctgggctacacacgtactacaatgggcttaaacagagggaagcgaagccgcgaggcagagcgaaccccgataaataagctctcagttcggatcgcaggctgcaactcgcctgcgtgaagtcggaatcgctagtaatcgcagatcagcatgctgcggtgaatacgttcccgggccttgtacacaccgcccgtcacaccacgagagttggaaacacccgaagccggtggggtaaccgcaaggagccagccgtcgaaggtggggccgatgattggggtg

SEQ ID NO: 2624 - DNA, 1462 bp, Propionivibrio dicarboxylicus
attgaacgctggcggcatgccttacacatgcaagtcgaacggcagcacgggtgcttgcacctggtggcgagtggcgaacgggtgagtaatgcatcggaacgtacccggaagtgggggataacgtagcgaaagttacgctaataccgcatattctgtgagcaggaaagcgggggatcttcggacctcgtgctttcggagcggccgatgtcggattagctagttggtgaggtaaaggctcaccaaggcgacgatccgtagcgggtctgagaggatgatccgccacactgggactgagacacggcccagactcctacgggaggcagcagtggggaattttggacaatgggggcaaccctgatccagccatgccgcgtgagtgaagaaggccttcgggttgtaaagctcttttgtcagggaagaaatggtctgggctaataccctgggcagatgacggtacctgaagaataagcaccggctaactacgtgccagcagccgcggtaatacgtagggtgcgagcgttaatcggaattactgggcgtaaagcgtgcgcaggcggttttgtaagtcagatgtgaaatccccgggctcaacctgggaactgcatttgagactgcaaggctagagtgtagcagaggggggtagaattccacgtgtagcagtgaaatgcgtagagatgtggaggaataccgatggcgaaggcagccccctgggctactactgacgctcatgcacgaaagcgtggggagcaaacaggattagataccctggtagtccacgccctaaacgatgtcaactggatgttggaagggttaaaccttttagtgtcgtagctaacgcgtgaagttgaccgcctggggagtacggccgcaaggctaaaactcaaaggaattgacggggacccgcacaagcggtggatgatgtggattaattcgatgcaacgcgaaaaaccttacctacccttgacatgtcaggaaccctggagagatctgggggtgcccgaaagggagcctgaacacaggtgctgcatggctgtcgtcagctcgtgtcgtgagatgttgggttaagtcccgcaacgagcgcaacccttgtcgttaattgccatcattaagttgggcactttaatgagactgccggtgacaaaccggaggaaggtggggatgacgtcaagtcctcatggcccttatgggtagggcttcacacgtcatacaatggtcggttcagagggttgccaacccgcgagggggagctaatctcagaaagccgatcgtagtccggattgcagtctgcaactcgactgcatgaagtcggaatcgctagtaatcgcggatcagcatgccgcggtgaatacgttcccgggtcttgtacacaccgcccgtcacaccatgggagcgggttctgccagaagtagttagcctaaccgcaaggggggcgattaccacggcagggttcgtgactggggtg

SEQ ID NO: 2625 - DNA, 1467 bp, Prosthecobacter debontii
  misc_feature (302)..(302): n is a, c, g, or t
  misc_feature (754)..(754): n is a, c, g, or t
  misc_feature (1034)..(1034): n is a, c, g, or t
  misc_feature (1050)..(1050): n is a, c, g, or t
  misc_feature (1084)..(1084): n is a, c, g, or t
  misc_feature (1097)..(1097): n is a, c, g, or t
  misc_feature (1103)..(1103): n is a, c, g, or t
  misc_feature (1371)..(1371): n is a, c, g, or t
aacgaacgctggcggcgtggataagacatgcaagtcgaacgggacattatgagtagcaatacaagtgatgtttagtggcgaacgggtgcgtaacacgtggatacattccggaaagcgggggatagcccagggaaacttggattaataccgcatgtggtcgagagactaaagacggggatcgaaagacctgtcactttccgattggtccgcggcctatcagctagttggcggggtaatggcccaccaaggcgacgacgggtagctggtcttagaggacgaccacccacactggaactgagacncggtccagacacctacgggtggcagcagtcgagaatctttcacaatgggggcaaccctgatggagcgacaccacgtggaggataaggtcttcggattgtaaactcctgtcatgcgtgaacaaggttgcttggataatacctgagcaaattgatggtagcgcaagaggaagagacggctaactctgtgccagcagccgcggtaatacagaggtctcaagcgttgttcggaatcactgggcgtaaagggtgcgtaggtggcgtggcaagtcagatgtgaaagcccggggctcaacctcggaactgcatccgatactgccatgctagagtactggaggggtgactagaattctcggtgtagcagtgaaatgcgtagatatcgagaggaataccaaaggcgtaggcaggtcactggacagttactgacactgaggcacgaaggccaggggagcgancgggattagataccccggtagtcctggcagtaaacggtgcatacttggtgtgggaagattcgacccttcctgtgccggagctaacgcgttaagtatgccgcctgggaagtacggtcgcaagattaaaactcaaagaaattgacggggacccgcacaagcggtggagtatgtggcttaattcgatgcaacgcgaagaaccttacctggtcttgaaatacactgtgtctccgatgaaagtcggatagagtaacaatactcgctttgcacaggtcctgcatgnctgtcgtcagctcgtntcgtgagatgttgggttaagtcccccaacgagcncaaccctgtgatntgttgncacccggtttaccggagcactcgaatcagactgcctcgatcaacgaggaggaaggtggggatgacgtcaagtccgtatggcccttacgaccagggctgcacacgtactacaatgcccagcacaatgtgaaccgaaaccgcgaggtggaggaaatcagtaaaactgggctcagttcagattgtagtctgcaactcgactacatgaagttggaatcgctagtaatggtacatcagctacggtaccgtgaatacgttcccgggtcttgtanacaccgcccgtcacatcatggaagctggtttcgcccgaagtgcgtgagtcaaccgcaaggggacagcgccctaaggcaagactggtgactgggatg

SEQ ID NO: 2626 - DNA, 1468 bp, Prosthecobacter fusiformis
aacgaacgctggcggcgtggataagacatgcaagtcgaacgggatatttctggtagtaatactaggaatgttcagtggcgaacgggtgcgtaacacgtggatacattccgggaagcgggggatagcccagggaaacttggattaataccgcatgtggtcgagagactaaagacggggaccgcaaggcctgtcacttcccgattggtccgcggcctatcagctagttggcggggtaaaggcccaccaaggctacgacgggtagctggtcttagaggacgaccagccacactggaactgagacacggtccagacacctacgggtggcagcagtcgagaatctttcacaatgggggcaaccctgatggagcgacgccgcgtggaggataaggtcttcggattgtaaactcctgtcatgcgtgaacaaggctgcgaggataatacctttgcagattgatggtagcgcaagaggaagagacggctaactctgtgccagcagccgcggtaatacagaggtctcaagcgttgttcggaatcactgggcgtaaagggtgcgtaggtggcgtggtaagtcagatgtgaaagcccagggctcaaccctggaattgcatccgatactgctgtgctagagtactggaggggtgactagaattctcggtgtagcagtgaaatgcgtagatatcgagaggaataccaaaggcgtaggcaggtcactggacagttactgacactgaggcacgaaggccaggggagcgaacgggattagataccccggtagtcctggcagtaaacggtgcatacttggtgtgggaagattcgacccttcctgtgccggagctaacgcgttaagtatgccgcctgggaagtacggtcgcaagattaaaactcaaagaaattgacggggacccgcacaagcggtggagtatgtggcttaattcgatgcaacgcgaagaaccttacctggtcttgacatgcactgtgtctccgatgaaagtcggatagagtagcaatactcgctttgcacaggtgctgcatggctgtcgtcagctcgtgtcgtgagatgttgggttaagtcccgcaacgagcgcaacccctgtgatttgttgccacccggtttaccggagcactcgaatcagactgcctcgatcaacgaggaggaaggtggggatgacgtcaagtccgtatggcccttacgaccagggctgcacacgtactacaatgcccagcacaatgtgaaccgaaaccgcgaggtggaggaaatcagtaaaactgggctcagttcagattgtagtctgcaactcgactacatgaagttggaatcgctagtaatggtacatcagctacggtaccgtgaatacgttcccgggtcttgtacacaccgcccgtcacatcatggaagctggtttcgcccgaagtgcgtgagtcaaccgcaaggggacagcgccctaaggcaagactggtgactgggatg

SEQ ID NO: 2627 - DNA, 1424 bp, Prosthecochloris aestuarii
gacgaacgctggcggcgtgcctaacacatgcaagtcaaaggaaagtgacttcggttacaagtacttggcgcaagggtgagtaaggtataggtaatttgcctacaggaccgggataaccccgagaaatcggggacaataccggatgatgcagcggaaccgcatggttatgttgttaaatcaggaatggcctgtagataagcctatattccatcaggtagttggcagggtaacagcctaccaagcctacgacggatagctggtctgagaggatgatcagccacattggaactgagacacggtccagactcctacgggaggcagcagtgaggaatattgcgcaatgggcgaaagcctgacgcagcaacgccgcgtggatgatgaagttcttcggaatgtaaagtccttttgtagaggaagaatagcctgctttgcgggtgtgacggtactctacgaataagccacggctaactctgtgccagcagccgcggtgatacaggggtggcaagcgttgtccggatttactgggtgtaaagggtgcgcaggcggaatagtaagtcgggggttaaatccatgtgctcaacacatgcacggcttccgatactgctaatctagagtgtcgaagaggaaggtggaatttccggtgtaacggtggaatgtgtagatatcggaaagaacaccagtggcgaaggcagccttctggtcgacaactgacgctcaggcacgaaagcgtggggagcaaacaggattagataccctggtagtccacgccgtaaacgatgaatactagatgttggtcattcgtgatcagtgtcgcagctaacgcgttaagtattccacctgggaagtacgctcgcaagagtgaaactcaaaggaattgacgggggcccgcacaagcggtggatcatgtggtttaattcgatgcaacgcgaagaaccttacctaggcttgacatgctgactaaagctcctgaaagggagtgtccttcggggagtcagcacaggtgctgcatggctgtcgtcagctcgtgtcgtgagatgttgggttaagtcccgcaacgagcgcaacccctacaattagttgctagcaggtaaagctgaggactctaattgaactgcctacgcaagtagtgaggaaggaggggatgacgtcaagtcctcatggcccttacgcctagggccacacacgtgatacaatggcgactacagagggcaaagccgcgaggtggagataatcccttaaaagtcgtcctagtccggatcggagtctgcaactcgactccgtgaagctggaatcgctagtaatcgcagatcagcatgctgcggtgaatgtgttcccgggccttgtacacaccgcccgtcaagtcatggaagtcaggagtacccgaagacgcgtatgcgtttaaggtaagactggtaactgggact

SEQ ID NO: 2628 - DNA, 1408 bp, Prosthecochloris vibrioformis
tgcctaacacatgcaagtcaaaggaaagcgccttcgggtgcgagtacttggcgcaagggtgagtaaggtataggtaagttgcctacaggaccggcataaccccgagaaatcggggacaataccggatgatgcagcggaaccgcatggttatgttgttaaatcaggaatggcctgtagataagcctatattccatcaggtagttggcggggtaacggcccaccaagcctacgacggatagctggtctgagaggatgatcagccacattggaactgagacacggtccagactcctacgggaggcagcagtgaggaatattgcgcaatgggcgaaagcctgacgcagcaacgccgcgtggatgatgaagtccttcgggatgtaaagtccttttgcagaggaagaacatgctggtttaccggcagtgacggtactctgcgaataagccacggctaactctgtgccagcagccgcggtgatacaggggtggcaagcgttgtccggatttactgggtgtaaagggtgcgcaggcggaataataagtcgggggttaaatccatgtgcttaacacatgacatgcttccgatactgttattctagagtgtcgaagaggaagatggaatttccggtgtaacggtggaatgtgtagatatcggaaagaacaccagtggcgaaggcagtcttctggtcgacaactgacgctcaggcacgaaagcgtggggagcgaacaggattagataccctggtagtccacgccgtaaacgatgaatactagatgttggtcattcgtgatcagtgtcgaagctaacgcgttaagtattccacctgggaagtacgctcgcaagagtgaaactcaaaggaattgacgggggcccacacaagcggtggatcatgtggtttaattcgatgcaacgcgaagaaccttacccgggcttgaaaggctggctaaacctcctgaaagggagggttcttcggggagccagtacaggtgctgcatggctgtcgtcagctcgtgtcgtgagatgttgggttaagtcccgcaacgagcgcaacccctacaattagttgctagcaggtaaagctgaggactctaattgaactgcctacgcaagtagagaggaaggaggggatgacgtcaagtcctcatggcccttacgtccggggctacacacgtgatacaatggtaactacagagggcaaagccgcgaggcagaggaaatcccttaaaagttatcctagtccggatcggagtctgcaactcgactccgtgaagctggaatcgctagtaatcgcagatcagcatgctgcggtgaatgtgttcctgggccttgtacacaccgcccgtcaagtcatggaagttgggagtacccgaagacgcgtatgcgtttaaggtaagaccagtaactgggact

SEQ ID NO: 2629 - DNA, 1453 bp, Proteiniphilum acetatigenes
gatgaacgctagcgataggcctaacacatgcaagtcgaggggcatcacatgaagtagcaatacggatggtggcgaccggcgcacgggtgagtaacacgtatgcaacctgccttcaacaaggggataacccgttgaaagacggactaataccctataacacaggggccccgcatggggatatttgttaaagattaatcggttgaagatgggcatgcgttccattagctagttggtggggtaatggcccaccaaggcaacgatggataggggaactgagaggtttatcccccacactggtactgagacacggaccagactcctacgggaggcagcagtgaggaatattggtcaatggacgcaagtctgaaccagccacgtcgcgtgaaggaagacggccctacgggttgtaaacttcttttgcaagggaataaagtgagtcacgtgtgactttttgcaagtaccttgcgaataaggatcggctaactccgtgccagcagccgcggtaatacggaggatccgagcgttatccggatttattgggtttaaagggtgctcaggcgggcgattaagtcggcggtgaaattttgcggctcaaccgtaaaagtgccttcgaaactggttgccttgagtgtggatgaggtaggcggaatttgtggtgtagcggtgaaatgcatagatatcacgaggaactccgattgcgcaggcagcttactaagccataactgacgctcaagcacgaaggcgtggggatcaaacaggattagataccctggtagtccacgcagtaaacgatgattactggctgtttgcgatataatgtaagcggctgagcgaaagcgttaagtaatccacctggggagtacgttcgcaagaatgaaactcaaaggaattgacgggggcccgcacaagcggaggaacatgtggtttaattcgatgatacgcgaggaaccttacccgggcttgaaatgcatctggcgtctccagagatggggatttccttcgggacagatgtgtaggtgctgcatggttgtcgtcagctcgtgccgtgaggtgtcggcttaagtgccataacgagcgcaaccctcatcgttagttgccatcaggtcaagctggggactctaacgagactgccatcgtaagatgcgaggaaggtggggatgacgtcaaatcagcacggcccttacgtccggggcgacacacgtgttacaatgggtggtacaaagggcagctacatggcgacatgatgccaatctccaaaaccactctcagttcggatcggagtctgcaactcgactccgtgaagctggattcgctagtaatcgcgcatcagccacggcgcggtgaatacgttcccgggccttgtacacaccgcccgtcaagccatggaagctgggggtgcctgaagtccgtaaccggtgaggagcggcctagggtaaaaccggtgactggggct

SEQ ID NO: 2630 - DNA, 1453 bp, Proteiniphilum saccharofermentans
gatgaacgctagcgataggcctaacacatgcaagtcgaggggcatcacatgaagtagcaatacggatggtggcgaccggcgcacgggtgagtaacacgtatgcaacctgccttcaacaaggggataacccgttgaaagacggactaataccctataacacaggggtcccgcatgggaatatttgttaaaggacaaccggttgaagatgggcatgcgttccattagctagttggcggggtaacggcccaccaaggcaacgatggataggggaactgagaggtttatcccccacactggtactgagacacggaccagactcctacgggaggcagcagtgaggaatattggtcaatgggcgcaagcctgaaccagccacgtcgcgtgaaggaagacggccctacgggttgtaaacttcttttgcaagggaataaagtgggccacgtgtggccttttgcaagtaccttgcgaataaggatcggctaactccgtgccagcagccgcggtaatacggaggatccgagcgttatccggatttattgggtttaaagggtgctcaggcgggacattaagtcggcggtgaaattttgcggctcaaccgtaaaagtgccttcgaaactggtatccttgagtgtggatgaggtaggcggaatttgtggtgtagcggtgaaatgcatagatatcacgaggaactccgattgcgcaggcagcttactaagccataactgacgctcaagcacgaaggcgtggggatcaaacaggattagataccctggtagtccacgcagtaaacgatgattactggctgtttgcgatataatgtaagcggctgagcgaaagcgttaagtaatccacctggggagtacgttcgcaagaatgaaactcaaaggaattgacgggggcccgcacaagcggaggaacatgtggtttaattcgatgatacgcgaggaaccttacccgggcttgaaatgcgtctgacagtcggagagatccgatctcccttcggggcagacgtgtaggtgctgcatggttgtcgtcagctcgtgccgtgaggtgtcggcttaagtgccataacgagcgcaaccctcatcgttagttgccatcaggtagtgctggggactctaacgagactgccatcgtaagatgcgaggaaggtggggatgacgtcaaatcagcacggcccttacgtccggggcgacacacgtgttacaatgggtggtacaaagggcagctacatggcgacatgatgccaatccccaaaaccactctcagttcggatcggagtctgcaactcgactccgtgaagctggattcgctagtaatcgcgcatcagccacggcgcggtgaatacgttcccgggccttgtacacaccgcccgtcaagccatggaagctgggggtgcctgaagtccgtaaccgacaaggagcggcctagggtaaaaccggtgactggggct

SEQ ID NO: 2631 - DNA, 1465 bp, Proteus hauseri
attgaacgctggcggcaggcctaacacatgcaagtcgagcggtaacagaggaaagcttgctttcttgctgacgagcggcggacgggtgagtaatgtatggggatctgcccgatagagggggataactactggaaacggtagctaataccgcatgacgtctacggaccaaagcaggggctcttcggaccttgcgctatcggatgaacccatatgggattagctagtaggtgaggtaatggctcacctaggcgacgatctctagctggtctgagaggatgatcagccacactgggactgagacacggcccagactcctacgggaggcagcagtggggaatattgcacaatgggcgcaagcctgatgcagccatgccgcgtgtatgaagaaggccttagggttgtaaagtactttcagcggggaggaaggtgttaagattaatactcttagcaattgacgttacccgcagaagaagcaccggctaactccgtgccagcagccgcggtaatacggagggtgcaagcgttaatcggaattactgggcgtaaagcgcacgcaggcggtcaattaagtcagatgtgaaagccccgagcttaacttgggaattgcatctgaaactggttggctagagtcttgtagaggggggtagaattccacgtgtagcggtgaaatgcgtagagatgtggaggaataccggtggcgaaggcggccccctggacaaagactgacgctcaggtgcgaaagcgtggggagcaaacaggattagataccctggtagtccacgctgtaaacgatgtcgatttggaggttgtgcccttgaggcgtggcttccggagctaacgcgttaaatcgaccgcctggggagtacggccgcaaggttaaaactcaaatgaattgacgggggcccgcacaagcggtggagcatgtggtttaattcgatgcaacgcgaagaaccttacctactcttgacatccagagaatcctttagagatagaggagtgccttcgggaactctgagacaggtgctgcatggctgtcgtcagctcgtgttgtgaaatgttgggttaagtcccgcaacgagcgcaacccttatcctttgttgccagcacgtaatggtgggaactcaaaggagactgccggtgataaaccggaggaaggtggggatgacgtcaagtcatcatggcccttacgagtagggctacacacgtgctacaatggcagatacaaagagaagcgacctcgcgagagcaagcggaactcataaagtctgtcgtagtccggattggagtctgcaactcgactccatgaagtcggaatcgctagtaatcgtagatcagaatgctacggtgaatacgttcccgggccttgtacacaccgcccgtcacaccatgggagtgggttgcaaaagaagtaggtagcttaaccttcgggagggcgcttaccactttgtgattcatgactggggtg

SEQ ID NO: 2632 - DNA, 1463 bp, Providencia burhodogranariea
attgaacgctggcggcaggcctaacacatgcaagtcgagcggtaacaggggaagcttgcttctcgctgacgagcggcggacgggtgagtaatgtatggggatctgcccgatagagggggataactactggaaacggtggctaataccgcataatctctaaggagcaaagcaggggaacttcggtccttgcgctatcggatgaacccatatgggattagctagtaggtgaggtaatggctcacctaggcgacgatccctagctggtctgagaggatgatcagccacactgggactgagacacggcccagactcctacgggaggcagcagtggggaatattgcacaatgggcgcaagcctgatgcagccatgccgcgtgtatgaagaaggccttagggttgtaaagtactttcagtcgggaggaaggcgttgatgctaatatcatcaacgattgacgttaccgacagaagaagcaccggctaactccgtgccagcagccgcggtaatacggagggtgcaagcgttaatcggaattactgggcgtaaagcgcacgcaggcggttgattaagttagatgtgaaatccccgggcttaacctgggaatggcatctaaaactggtcagctagagtcttgtagaggggggtagaattccatgtgtagcggtgaaatgcgtagagatgtggaggaataccggtggcgaaggcggccccctggacaaagactgacgctcaggtgcgaaagcgtggggagcaaacaggattagataccctggtagtccacgctgtaaacgatgtcgatttggaggttgttcccttgaggagtggcttccggagctaacgcgttaaatcgaccgcctggggagtacggccgcaaggttaaaactcaaatgaattgacgggggcccgcacaagcggtggagcatgtggtttaattcgatgcaacgcgaagaaccttacctactcttgacatccagagaatttagcagagatgctttagtgccttcgggaactctgagacaggtgctgcatggctgtcgtcagctcgtgttgtgaaatgttgggttaagtcccgcaacgagcgcaacccttatcctttgttgccagcacgtcatggtgggaactcaaaggagactgccggtgataaaccggaggaaggtggggatgacgtcaagtcatcatggcccttacgagtagggctacacacgtgctacaatggcgtatacaaagagaagctacctcgcgagagcaagcggaactcataaagtacgtcgtagtccggattggagtctgcaactcgactccatgaagtcggaatcgctagtaatcgtagatcagaatgctacggtgaatacgttcccgggccttgtacacaccgcccgtcacaccatgggagtgggttgcaaaagaagtaggtagcttaaccttcgggagggcgcttaccactttgtgattcatgactggggtg

SEQ ID NO: 2633 - DNA, 1463 bp, Providencia rustigianii
attgaacgctggcggcaggcctaacacatgcaagtcgagcggtaacaggggaagcttgcttctcgctgacgagcggcggacgggtgagtaatgtatggggatctgcccgatagagggggataactactggaaacggtagctaataccgcataatctctttggagcaaagcaggggaacttcggtccttgcgctatcggatgaacccatatgggattagctagttggtggggtaatggctcaccaaggcgacgatccctagctggtctgagaggatgatcagccacactgggactgagacacggcccagactcctacgggaggcagcagtggggaatattgcacaatgggcgcaagcctgatgcagccatgccgcgtgtatgaagaaggccttagggttgtaaagtactttcagttgggaggaaggcgttgatgctaatatcatcaacgattgacgttaccaacagaagaagcaccggctaactccgtgccagcagccgcggtaatacggagggtgcaagcgttaatcggaattactgggcgtaaagcgcacgcaggcggttgattaagttagatgtgaaatccccgggcttaacctgggaatggcatctaagactggtcagctagagtcttgtagaggggggtagaattccatgtgtagcggtgaaatgcgtagagatgtggaggaataccggtggcgaaggcggccccctggacaaagactgacgctcaggtgcgaaagcgtggggagcaaacaggattagataccctggtagtccacgctgtaaacgatgtcgatttggaggttgttcccttgaggagtggcttccggagctaacgcgttaaatcgaccgcctggggagtacggccgcaaggttaaaactcaaatgaattgacgggggcccgcacaagcggtggagcatgtggtttaattcgatgcaacgcgaagaaccttacctactcttgacatccagagaatttagcagagatgctttagtgccttcgggaactctgagacaggtgctgcatggctgtcgtcagctcgtgttgtgaaatgttgggttaagtcccgcaacgagcgcaacccttatcctttgttgccagcacgtcatggtgggaactcaaaggagactgccggtgataaaccggaggaaggtggggatgacgtcaagtcatcatggcccttacgagtagggctacacacgtgctacaatggcgtatacaaagagaagcgacctcgcgagagcaagcggaactcataaagtacgtcgtagtccggattggagtctgcaactcgactccatgaagtcggaatcgctagtaatcgtagatcagaatgctacggtgaatacgttcccgggccttgtacacaccgcccgtcacaccatgggagtgggttgcaaaagaagtaggtagcttaaccttcgggagggcgcttaccactttgtgattcatgactggggtg

SEQ ID NO: 2634 - DNA, 1462 bp, Providencia sneebia
attgaacgctggcggcaggcctaacacatgcaagtcgagcggtaacaggagaagcttgcttctcgctgacgagcggcggacgggtgagtaatgtatggggatctgcccgatagagggggataaccactggaaacggtggctaataccgcataatctctaaggagcaaagcaggggaacttcggtccttgcgctatcggatgaacccatatgggattagctagtaggtgaggtaatggctcacctaggcgacgatccctagctggtctgagaggatgatcagccacactgggactgagacacggcccagactcctacgggaggcagcagtggggaatattgcacaatgggcgcaagcctgatgcagccatgccgcgtgtatgaagaaggccttagggttgtaaagtactttcagtcgggaggaaggcgttgatgctaatatcatcaacgattgacgttaccgacagaagaagcaccggctaactccgtgccagcagccgcggtaatacggagggtgcaagcgttaatcggaattactgggcgtaaagcgcacgcaggcggttgattaagttagatgtgaaatccccgggcttaacctgggaatggcatctaagactggtcagctagagtcttgtagaggggggtagaattccatgtgtagcggtgaaatgcgtagagatgtggaggaataccggtggcgaaggcggccccctggacaaagactgacgctcaggtgcgaaagcgtggggagcaaacaggattagataccctggtagtccacgctgtaaacgatgtcgatttggaggttgttccctagaggagtggcttccggagctaacgcgttaaatcgaccgcctggggagtacggccgcaaggttaaaactcaaatgaattgacgggggcccgcacaagcggtggagcatgtggtttaattcgatgcaacgcgaagaaccttacctactcttgacatccagagaactgagcagagatgcttaggtgccttcgggaactctgagacaggtgctgcatggctgtcgtcagctcgtgttgtgaaatgttgggttaagtcccgcaacgagcgcaacccttatcctttgttgccagcgattcggtcgggaactcaaaggagactgccagtgataaactggaggaaggtggggatgacgtcaagtcatcatggcccttacgagtagggctacacacgtgctacaatggcgtatacaaagagaagcgacctcgcgagagcaagcggaactcataaagtacgtcgtagtccggattggagtctgcaactcgactccatgaagtcggaatcgctagtaatcgtagatcagaatgctacggtgaatacgttcccgggccttgtacacaccgcccgtcacaccatgggagtgggttgcaaaagaagtaggtagcttaaccttcgggagggcgcttaccactttgtgattcatgactggggtg

SEQ ID NO: 2635 - DNA, 1451 bp, Pseudacidovorax intermedius
attgaacgctggcggcatgccttacacatgcaagtcgaacggtaacaggccgcaaggtgctgacgagtggcgaacgggtgagtaatacatcggaacgtgcccgatcgtgggggataacgcagcgaaagctgtgctaataccgcatacgatctacggatgaaagcgggggatcgcaagacctcgcgcggacggagcggccgatggcagattaggtagttggtggggtaaaggcctaccaagccgacgatctgtagctggtctgagaggacgaccagccacactgggactgagacacggcccagactcctacgggaggcagcagtggggaattttggacaatgggcgcaagcctgatccagccatgccgcgtgcaggatgaaggccttcgggttgtaaactgcttttgtacggaacgaaaaggtttcttttaatacagggaactgatgacggtaccgtaagaataagcaccggctaactacgtgccagcagccgcggtaatacgtagggtgcgagcgttaatcggaattactgggcgtaaagcgtgcgcaggcggtgatgtaagacagaggtgaaatccccgggctcaacctgggaactgcctttgtgactgcatcgctggagtgcggcagagggggatggaattccgcgtgtagcagtgaaatgcgtagatatgcggaggaacaccgatggcgaaggcaatcccctgggcctgcactgacgctcatgcacgaaagcgtggggagcaaacaggattagataccctggtagtccacgccctaaacgatgtcaactggttgttgggaattagttttctcagtaacgaagctaacgcgtgaagttgaccgcctggggagtacggccgcaaggttgaaactcaaaggaattgacggggacccgcacaagcggtggatgatgtggtttaattcgatgcaacgcgaaaaaccttacccacctttgacatgtacggaatcctttagagatagaggagtgctcgaaagagagccgtaacacaggtgctgcatggctgtcgtcagctcgtgtcgtgagatgttgggttaagtcccgcaacgagcgcaacccttgccattagttgctacgaaagggcactctaatgggactgccggtgacaaaccggaggaaggtggggatgacgtcaagtcctcatggcccttataggtggggctacacacgtcatacaatggctggtacaaagggttgccaacccgcgagggggagctaatcccataaagccagtcgtagtccggatcgcagtctgcaactcgactgcgtgaagtcggaatcgctagtaatcgtggatcagcatgtcacggtgaatacgttcccgggtcttgtacacaccgcccgtcacaccatgggagcgggttctgccagaagtaggtagcctaaccgtaaggagggcgcttaccacggcagggttcgtgactggggtg

SEQ ID NO: 2636 - DNA, 1408 bp, Pseudanabaena biceps
gatgaacgctggcggtatgcttaacacatgcaagtcgaacggaatcttcggatttagtggcggacgggtgagtaacgcgtaagaatctacctataggttcgggacaacagttagaaatgactgctaataccggatatgccttcgggtgaaagttttaatgcctgtagatgagcttgcgttcgattagctagatggtggggtaaaggcctaccatggcgacgatcgataactggtctgagaggatgaccagtcacactgggactgagacacggcccagactcctacgggaggcagcagtggggaattttccgcaatgggcgaaagcctgacggagcaataccgcgtgagggacgaaggcctgtgggttgtaaacctcttttgttagggaagataatgacggtacctaacgaataagcatcggctaactccgtgccagcagccgcggtaagacggaggatgcaagcgttatccggaattattgggcgtaaagcgtacgtaggctgtttgataagtctgttgtcaaagcccgaggctcaaccttggatcggcaatggaaactgtgagactagagagagataggggcaggaggaattccaggtgtagcggtgaaatgcgtagatatctggaagaacaccagtggcgaaagcgtcctgctggatctcaactgacgctgaagtacgaaagctaggggagcgaatgggattagataccccagtagtcctagccgtaaacgatgggtactaggtgttggccgtatcgacccggtcagtgccgtagctaacgcgttaagtaccccgcctggggagtacggtcgcaagattgaaactcaaaggaattgacgggggcccgcacaagcggtggagtatgtggtttaattcgatgcaacgcgaagaaccttaccaaggcttgacatgtcgtgaatcctcttgaaagggaggagtgccttcgggagcacgaacacaggtggtgcatggctgtcgtcagctcgtgtcgtgagatgttgggttaagtcccgcaacgagcgcaaccctcgtttttagttgccatcattaagttgggcactctagagagactgccggtgacaaaccggaggaaggtggggatgacgtcaagtcatcatgccccttacgccttgggctacacacgtactacaatggccgggacaaagagtcgcgagcatgcgaatgcaagctaatctcgtaaacccggtcttagttcagattgcaggctgcaactcgcctgcatgaaggcggaatcgctagtaatcgcaggtcagcatactgcggtgaatacgttcccgggccttgtacacaccgcccgtcacaccatggaagctggtcacgcccgaagtcgttatctcaacccgtaagggagggaggcgcctaaggcagggctggtgactggggtg

SEQ ID NO: 2637 - DNA, 1462 bp, Pseudescherichia vulneris
attgaacgctggcggcaggcctaacacatgcaagtcgaacggtagcacagagagcttgctctcgggtgacgagtggcggacgggtgagtaatgtctgggaaactgcctgatggagggggataactactggaaacggtagctaataccgcataacgtcgcaagaccaaagagggggaccttcgggcctcttgccatcagatgtgcccagatgggattagctagtaggtggggtaacggctcacctaggcgacgatccctagctggtctgagaggatgaccagccacactggaactgagacacggtccagactcctacgggaggcagcagtggggaatattgcacaatgggcgcaagcctgatgcagccatgccgcgtgtatgaagaaggccttcgggttgtaaagtactttcagcggggaggaaggcgatacggttaataaccgtgtcgattgacgttacccgcagaagaagcaccggctaactccgtgccagcagccgcggtaatacggagggtgcaagcgttaatcggaattactgggcgtaaagcgcacgcaggcggtctgtcaagtcggatgtgaaatccccgggctcaacctgggaactgcattcgaaactgacaggctagagtcttgtagaggggggtagaattccaggtgtagcggtgaaatgcgtagagatctggaggaataccggtggcgaaggcggccccctggacaaagactgacgctcaggtgcgaaagcgtggggagcaaacaggattagataccctggtagtccacgctgtaaacgatgtcgacttggaggttgtgcccttgaggcgtggcttccggagctaacgcgttaagtcgaccgcctggggagtacggccgcaaggttaaaactcaaatgaattgacgggggcccgcacaagcggtggagcatgtggtttaattcgatgcaacgcgaagaaccttacctactcttgacatccagagaacttagcagagatgctttggtgccttcgggaactctgagacaggtgctgcatggctgtcgtcagctcgtgttgtgaaatgttgggttaagtcccgcaacgagcgcaacccttatcctttgttgccagcggttaggccgggaactcaaaggagactgccagtgataaactggaggaaggtggggatgacgtcaagtcatcatggcccttacgagtagggctacacacgtgctacaatggcgcatacaaagagaagcgaactcgcgagagcaagcggacctcataaagtgcgtcgtagtccggatcggagtctgcaactcgactccgtgaagtcggaatcgctagtaatcgtggatcagaatgccacggtgaatacgttcccgggccttgtacacaccgcccgtcacaccatgggagtgggttgcaaaagaagtaggtagcttaaccttcgggagggcgcttaccactttgtgattcatgactggggtg

SEQ ID NO: 2638 - DNA, 1458 bp, Pseudoalteromonas agarivorans
attgaacgctggcggcaggcctaacacatgcaagtcgagcggtaacagaaagtagcttgctactttgctgacgagcggcggacgggtgagtaatgcttgggaacatgccttgaggtgggggacaacagttggaaacgactgctaataccgcataatgtctacggaccaaagggggcttcggctctcgcctttagattggcccaagtgggattagctagttggtgaggtaatggctcaccaaggcgacgatccctagctggtttgagaggatgatcagccacactgggactgagacacggcccagactcctacgggaggcagcagtggggaatattgcacaatgggcgcaagcctgatgcagccatgccgcgtgtgtgaagaaggccttcgggttgtaaagcactttcagtcaggaggaaaggttagtagttaatacctgctagctgtgacgttactgacagaagaagcaccggctaactccgtgccagcagccgcggtaatacggagggtgcgagcgttaatcggaattactgggcgtaaagcgtacgcaggcggtttgttaagcgagatgtgaaagccccgggctcaacctgggaactgcatttcgaactggcaaactagagtgtgatagagggtggtagaatttcaggtgtagcggtgaaatgcgtagagatctgaaggaataccgatggcgaaggcagccacctgggtcaacactgacgctcatgtacgaaagcgtggggagcaaacaggattagataccctggtagtccacgccgtaaacgatgtctactagaagctcggagcctcggctctgtttttcaaagctaacgcattaagtagaccgcctggggagtacggccgcaaggttaaaactcaaatgaattgacgggggcccgcacaagcggtggagcatgtggtttaattcgatgcaacgcgaagaaccttacctacacttgacatacagagaacttaccagagatggtttggtgccttcgggaactctgatacaggtgctgcatggctgtcgtcagctcgtgttgtgagatgttgggttaagtcccgcaacgagcgcaacccctatccttagttgctagcaggtaatgctgagaactctaaggagactgccggtgataaaccggaggaaggtggggacgacgtcaagtcatcatggcccttacgtgtagggctacacacgtgctacaatggcgcatacagagtgctgcgaactcgcgagagtaagcgaatcacttaaagtgcgtcgtagtccggattggagtctgcaactcgactccatgaagtcggaatcgctagtaatcgcatatcagaatgatgcggtgaatacgttcccgggccttgtacacaccgcccgtcacaccatgggagtgggttgctccagaagtagatagtctaaccctcgggaggacgtttaccacggagtgattcatgactggggtg

SEQ ID NO: 2639 - DNA, 1393 bp, Pseudoalteromonas aliena
  misc_feature (903)..(903): n is a, c, g, or t
  misc_feature (939)..(939): n is a, c, g, or t
tgctgacgagcggcggacgggtgagtaatgcttgggaacatgccttgaggtgggggacaacagttggaaacgactgctaataccgcataatgtctacggaccaaagggggcttcggctctcgcctttagattggcccaagtgggattagctagttggtgaggtaatggctcaccaaggcgacgatccctagctggtttgagaggatgatcagccacactgggactgagacacggcccagactcctacgggaggcagcagtggggaatattgcacaatgggcgcaagcctgatgcagccatgccgcgtgtgtgaagaaggccttcgggttgtaaagcactttcagtcaggaggaaaggttagtagttaatacctgctagctgtgacgttactgacagaagaagcaccggctaactccgtgccagcagccgcggtaatacggagggtgcgagcgttaatcggaattactgggcgtaaagcgtacgcaggcggtttgttaagcgagatgtgaaagccctgggctcaacctgggaactgcatttcgaactggcaaactagagtgtgatagagggtggtagaatttcaggtgtagcggtgaaatgcgtagagatctgaaggaataccgatggcgaaggcagccacctgggtcaacactgacgctcatgtacgaaagcgtggggagcaaacgggattagataccccggtagtccacgccgtaaacgatgtctactagaagctcgggtcctcggacttgtttttcaaagctaacgcattaagtagaccgcctggggagtacggccgcaaggttaaaactcaaatgaattgacgggggcccgcacaagcggtggagcatgtggtttaattcgatgcaacgcgaagaaccttacctacacttgacatacagngaacttaccagagatggtttggtgccttcgggaacnctgatacaggtgctgcatggctgtcgtcagctcgtgttgtgagatgttgggttaagtcccgcaacgagcgcaacccctatccttagttgctagcaggtaatgctgagaactctaaggagactgccggtgataaaccggaggaaggtggggacgacgtcaagtcatcatggcccttacgtgtagggctacacacgtgctacaatggcgcatacagagtgctgcgaacctgcgaaggtaagcgaatcacttaaagtgcgtcgtagtccggattggagtctgcaactcgactccatgaagtcggaatcgctagtaatcgcgtatcagaatgacgcggtgaatacgttcccgggccttgtacacaccgcccgtcacaccatgggagtgggttgctccagaagtagatagtctaaccctcgggaggacgtttaccacggagtgattcatgactggggtg

SEQ ID NO: 2640 - DNA, 1461 bp, Pseudoalteromonas amylolytica
attgaacgctggcggcaggcctaacacatgcaagtcgagcggaaacgagaatagcttgctattcggcgtcgagcggcggacgggtgagtaatgcttgggaacatgcctttaggtgggggacaacagttggaaacgactgctaataccgcataatgtctacggaccaaagtgggggaccttcgggcctcacgcctaaagattggcccaagtgggattagctagttggtgaggtaatggctcaccaaggcgacgatccctagctggtttgagaggatgatcagccacactgggactgagacacggcccagactcctacgggaggcagcagtggggaatattgcacaatgggcgcaagcctgatgcagccatgccgcgtgtgtgaagaaggccttcgggttgtaaagcactttcagtaaggaggaaaggttaagtcttaatacggcttagctgtgacgttacttacagaagaagcaccggctaactccgtgccagcagccgcggtaatacggagggtgcgagcgttaatcggaattactgggcgtaaagcgtacgcaggcggtttgttaagcgagatgtgaaagccccgggcttaacctgggaactgcatttcgaactggcaaactagagtgtgatagagggtggtagaatttcaggtgtagcggtgaaatgcgtagagatctgaaggaataccgatggcgaaggcagccacctgggtcaacactgacgctcatgtacgaaagcgtggggagcaaacaggattagataccctggtagtccacgccgtaaacgatgtctactagaagctggggtcctcggacaactttttcaaagctaacgcattaagtagaccgcctggggagtacggccgcaaggttaaaactcaaatgaattgacgggggcccgcacaagcggtggagcatgtggtttaattcgatgcaacgcgaagaaccttacctacacttgacatacagagaactttctagagatagattggtgccttcgggaactctgatacaggtgctgcatggctgtcgtcagctcgtgttgtgagatgttgggttaagtcccgcaacgagcgcaacccctatccttagttgccagcgattcggtcgggaactctaaggagactgccggtgataaaccggaggaaggtggggacgacgtcaagtcatcatggcccttacgtgtagggctacacacgtgctacaatggcgtatacagagtgctgcgaacttgcgagagtaagcgaatcacttaaagtacgtcgtagtccggattggagtctgcaactcgactccatgaagtcggaatcgctagtaatcgcggatcagaatgccgcggtgaatacgttcccgggccttgtacacaccgcccgtcacaccatgggagtgggttgctccagaagtggatagtctaaccttcgggaggacgttcaccacggagtgattcatgactggggtg

SEQ ID NO: 2641 - DNA, 1458 bp, Pseudoalteromonas arctica
attgaacgctggcggcaggcctaacacatgcaagtcgagcggtaacagaaagtagcttgctactttgctgacgagcggcggacgggtgagtaatgcttgggaacatgccttgaggtgggggacaacagttggaaacgactgctaataccgcataatgtctacggaccaaagggggcttcggctctcgcctttagattggcccaagtgggattagctagttggtgaggtaatggctcaccaaggcgacgatccctagctggtttgagaggatgatcagccacactgggactgagacacggcccagactcctacgggaggcagcagtggggaatattgcacaatgggcgcaagcctgatgcagccatgccgcgtgtgtgaagaaggccttcgggttgtaaagcactttcagtcaggaggaaaggttagtagttaatacctgctagctgtgacgttactgacagaagaagcaccggctaactccgtgccagcagccgcggtaatacggagggtgcgagcgttaatcggaattactgggcgtaaagcgtacgcaggcggtttgttaagcgagatgtgaaagccccgggctcaacctgggaactgcatttcgaactggcaaactagagtgtgatagagggtggtagaatttcaggtgtagcggtgaaatgcgtagagatctgaaggaataccgatggcgaaggcagccacctgggtcaacactgacgctcatgtacgaaagcgtggggagcaaacgggattagataccccggtagtccacgccgtaaacgatgtctactagaagctcggagcctcggttctgtttttcaaagctaacgcattaagtagaccgcctggggagtacggccgcaaggttaaaactcaaatgaattgacgggggcccgcacaagcggtggagcatgtggtttaattcgatgcaacgcgaagaaccttacctacacttgacatacagagaacttaccagagatggtttggtgccttcgggaactctgatacaggtgctgcatggctgtcgtcagctcgtgttgtgagatgttgggttaagtcccgcaacgagcgcaacccctatccttagttgctagcaggtaatgctgagaactctaaggagactgccggtgataaaccggaggaaggtggggacgacgtcaagtcatcatggcccttacgtgtagggctacacacgtgctacaatggcgcatacagagtgctgcgaactcgcgagagtaagcgaatcacttaaagtgcgtcgtagtccggattggagtctgcaactcgactccatgaagtcggaatcgctagtaatcgcgtatcagaatgacgcggtgaatacgttcccgggccttgtacacaccgcccgtcacaccatgggagtgggttgctccagaagtagatagtctaaccctcgggaggacgtttaccacggagtgattcatgactggggtg

SEQ ID NO: 2642 - DNA, 1423 bp, Pseudoalteromonas atlantica
  misc_feature (49)..(49): n is a, c, g, or t
  misc_feature (1332)..(1332): n is a, c, g, or t
ttgaacgctggcggcaggcctaacacatgcaagtcgagcggtaacaganagtagcttgctactttgctgacgagcggcggacgggtgagtaatgcttgggaacatgccttgaggtgggggacaacagttggaaacgactgctaataccgcataatgtctacggaccaaagggggcttcggctctcgcctttagattggcccaagtgggattagctagttggtgaggtaatggctcaccaaggcaacgatccctagctggtttgagaggatgatcagccacactgggactgagacacggcccagactcctacgggaggcagcagtggggaatattgcacaatgggcgcaagcctgatgcagccatgccgcgtgtgtgaagaaggccttcgggttgtaaagcactttcagtcaggaggaaaggttagtagttaatacctgctagctgtgacgttactgacagaagaagcaccggctaactccgtgccagcagccgcggtaatacggagggtgcgagcgttaatcggaattactgggcgtaaagcgtacgcaggcggtttgttaagcgagatgtgaaagccccgggctcaacctgggaactgcatttcgaactggcaaactagagtgtgatagagggtggtagaatttcaggtgtagcggtgaaatgcgtagagatctgaaggaataccgatggcgaaggcagccacctgggtcaacactgacgctcatgtacgaaagcgtggggagcaaacaggattagataccctggtagtccacgccgtaaacgatgtctactagaagctcggagcctcggctctgtttttcaaagctaacgcattaagtagaccgcctggggagtacggccgcaaggttaaaactcaaatgaattgacgggggccgcacaagcggtggagcatgtggtttaattcgatgcaacgcgaagaaccttacctacacttgacatacagagaacttaccagagatggtttggtgccttcgggaactctgatacaggtgctgcatggctgtcgtcagctcgtgttgtgagatgttgggttaagtcccgcaacgagcgcaacccctatccttagttgctagcaggtaatgctgagaactctaaggagactgccggtgataaaccggaggaaggtggggacgacgtcaagtcatcatggcccttacgtgtagggctacacacgtgctacaatggcgcatacagagtgctgcgaactcgcgagagtaagcgaatcacttaaagtgcgtcgtagtccggattggagtctgcaactcgactccatgaagtcggaatcgctagtaatcgcgtatcagaatgangcggtgaatacgttcccgggccttgtacacaccgcccgtcacaccatgggagtgggttgctccagaagtagatagtctaaccctcgggagg

SEQ ID NO: 2643 - DNA, 1461 bp, Pseudoalteromonas byunsanensis
attgaacgctggcggcaggcctaacacatgcaagtcgagcggtaacatttctagcttgctagaagatgacgagcggcggacgggtgagtaatgcttgggaacatgcctttaggtgggggacaacagttggaaacgactgctaataccgcatgatgtctacggaccaaagtgggggaccttcgggcctcacgcctaaagattggcccaagtgggattagctagttggtgaggtaatggctcaccaaggcaacgatccctagctggtttgagaggatgatcagccacactgggactgagacacggcccagactcctacgggaggcagcagtggggaatattgcacaatgggcgcaagcctgatgcagccatgccgcgtgtgtgaagaaggccttcgggttgtaaagcactttcagtaaggaggaaaggttggatgttaatagcattcagctgtgacgttacttacagaagaagcaccggctaactccgtgccagcagccgcggtaatacggagggtgcgagcgttaatcggaattactgggcgtaaagcgtacgcaggcggtttgttaagcgagatgtgaaagccccgggcttaacctgggaactgcatttcgaactggcaaactagagtgtgatagagggtggtagaatttcaggtgtagcggtgaaatgcgtagagatctgaaggaataccgatggcgaaggcagccacctgggtcaacactgacgctcatgtacgaaagcgtggggagcaaacaggattagataccctggtagtccacgccgtaaacgatgtctactagaagctggggtcctcggacaactttttcaaagctaacgcattaagtagaccgcctggggagtacggccgcaaggttaaaactcaaatgaattgacgggggcccgcacaagcggtggagcatgtggtttaattcgatgcaacgcgaagaaccttacctacacttgacatacagagaactttccagagatggattggtgccttcgggaactctgatacaggtgctgcatggctgtcgtcagctcgtgttgtgagatgttgggttaagtcccgcaacgagcgcaacccctatccttagttgccagcgattcggtcgggaactctaaggagactgccggtgataaaccggaggaaggtggggacgacgtcaagtcatcatggcccttacgtgtagggctacacacgtgctacaatggcgtatacagagtgctgcgaacttgcgagagtaagcgaatcacttaaagtacgtcgtagtccggattggagtctgcaactcgactccatgaagtcggaatcgctagtaatcgcggatcagaatgccgcggtgaatacgttcccgggccttgtacacaccgcccgtcacaccatgggagtgggttgctccagaagtggatagtctaaccttagggaggacgttcaccacggagtgattcatgactggggtg

SEQ ID NO: 2644 - DNA, 1423 bp, Pseudoalteromonas carrageenovora
  misc_feature (777)..(777): n is a, c, g, or t
  misc_feature (845)..(845): n is a, c, g, or t
  misc_feature (1071)..(1071): n is a, c, g, or t
  misc_feature (1409)..(1409): n is a, c, g, or t
ttgaacgctggcggcaggcctaacacatgcaagtcgagcggtaacagaaagtagcttgctactttgctgacgagcggcggacgggtgagtaatgcttgggaacatgccttgaggtgggggacaacagttggaaacgactgctaataccgcataatgtctacggaccaaagggggcttcggctctcgcctttagattggcccaagtgggattagctagttggtgaggtaatggctcaccaaggcaacgatccctagctggtttgagaggatgatcagccacactggaactgagacacggtccagactcctacgggaggcagcagtggggaatattgcacaatgggcgcaagcctgatgcagccatgccgcgtgtgtgaagaaggccttcgggttgtaaagcactttcagtcaggaggaaaggttagtagttaatacctgctagctgtgacgttactgacagaagaagcaccggctaactccgtgccagcagccgcggtaatacggagggtgcgagcgttaatcggaattactgggcgtaaagcgtacgcaggcggtttgttaagcgagatgtgaaagccccgggctcaacctgggaactgcatttcgaactggcaaactagagtgtgatagagggtggtagaatttcaggtgtagcggtgaaatgcgtagagatctgaaggaataccgatggcgaaggcagccacctgggtcaacactgacgctcatgtacgaaagcgtggggagcaaacaggattagataccctggtagtccacgcngtaaacgatgtctactagaagctcggaacctcggttctgtttttcaaagctaacgcattaagtagacngcctggggagtacggccgcaaggttaaaactcaaatgaattgacgggggccgcacaagcggtggagcatgtggtttaattcgatgcaacgcgaagaaccttacctacacttgacatacagagaacttaccagagatggtttggtgccttcgggaactctgatacaggtgctgcatggctgtcgtcagctcgtgttgtgagatgttgggttaagtcccgcaacgagngcaacccctatccttagttgctagcaggtaatgctgagaactctaaggagactgccggtgataaaccggaggaaggtggggacgacgtcaagtcatcatggcccttacgtgtagggctacacacgtgctacaatggcgcatacagagtgctgcgaactcgcgagagtaagcgaatcacttaaagtgcgtcgtagtccggattggagtctgcaactcgactccatgaagtcggaatcgctagtaatcgcgtatcagaatgacgcggtgaatacgttcccgggccttgtacacaccgcccgtcacaccatgggagtgggttgctccagaagtagatagtntaaccctcgggagg

SEQ ID NO: 2645 - DNA, 1436 bp, Pseudoalteromonas citrea
  misc_feature (442)..(442): n is a, c, g, or t
ttgaacgctggcggcaggcctaacacatgcaagtcgagcggtaacagagatagcttgctatctgctgacgagcggcggacgggtgagtaatgcttgggaatatgccttttggtgggggacaacagttggaaacgactgctaataccgcataacgtctacggaccaaagtgggggaccttcgggcctcacgccaagagattagcccaagtgggattagctagttggtaaggtaatggcttaccaaggcaacgatccctagctggtttgagaggatgatcagccacactggaactgagacacggtccagactcctacgggaggcagcagtggggaatattgcacaatgggcgcaagcctgatgcagccatgccgcgtgtgtgaagaaggccttcgggttgtaaagcactttcagtcaggaggaaaggttagtagttaatagctnctagctgtgacgttactgacagaagaagcaccggctaactccgtgccagcagccgcggtaatacggagggtgcgagcgttaatcggaattactgggcgtaaagcgtacgcaggcggtttgttaagcgagatgtgaaagccccgggctcaacctgggaactgcatttcgaactggcagactagagtgtgatagagggtggtagaatttcaggtgtagcggtgaaatgcgtagagatctgaaggaataccgatggcgaaggcagccacctgggtcaacactgacgctcatgtacgaaagcgtggggagcaaacgggattagataccccggtagtccacgccgtaaacgatgtctactagaagctggggtccttcggacaactttttcaaagctaacgcattaagtagaccgcctggggagtacggccgcaaggttaaaactcaaatgaattgacgggggccgcacaagcggtggagcatgtggtttaattcgatgcaacgcgaagaaccttacctacacttgacatacagagaacttaccagagatggtttggtgccttcgggaactctgatacaggtgctgcatggctgtcgtcagctcgtgttgtgagatgttgggttaagtcccgcaacgagcgcaacccctatccttagttgccagcacataatggtgggaactctaaggagactgccggtgataaaccggaggaaggtggggacgacgtcaagtcatcatggcccttacgtgtagggctacacacgtgctacaatggcgcatacagagtgctgcgagcctgcgaaggttagcgaatcacttaaagtgcgtcgtagtccggattggagtctgcaactcgactccatgaagtcggaatcgctagtaatcgcggatcagaatgccgcggtgaatacgttcccgggccttgtacacaccgcccgtcacaccatgggagtgggttgctccagaagtaggtagcttaaccttagggagggcgcttac

SEQ ID NO: 2646 - DNA, 1423 bp, Pseudoalteromonas denitrificans
  misc_feature (94)..(94): n is a, c, g, or t
  misc_feature (768)..(768): n is a, c, g, or t
  misc_feature (1061)..(1061): n is a, c, g, or t
  misc_feature (1070)..(1070): n is a, c, g, or t
  misc_feature (1122)..(1122): n is a, c, g, or t
ttgaacgctggcggcaggcctaacacatgcaagtcgagcggtaacagagatagcttgctatctgctgacgagcggcggacgggtgagtaatgcntgggaatatgcctttaggtgggggacaacagttggaaacgactgctaataccgcataatgtctacggaccaaagtgggggaccttcgggcctcacgcctaaagattagcccaagtgggattagctagttggtgaggtaaaggctcaccaaggcaacgatccctagctggtttgagaggatgatcagccacactggaactgagacacggtccagactcctacgggaggcagcagtggggaatattgcacaatgggcgaaagcctgatgcagccatgccgcgtgtgtgaagaaggccctagggttgtaaagcactttcagcgaggaggaaaggttatagtttaatagactatagctgtgacgttactcgcagaagaagcaccggctaacttcgtgccagcagccgcggtaatacgaggggtgcaagcgttaatcggaattactgggcgtaaagcgtacgcaggcggtttgttaagcgagatgtgaaagccccgggctcaacctgggaactgcatttcgaactggcagactagagtatgatagagggtggtagaatttcaggtgtagcggtgaaatgcgtagagatctgaaggaataccgatggcgaaggcagccacctgggtcaatactgacgctcatgtacgaaagcgtggggagcaaacgggattagatacccnggtagtccacgccgtaaacgatgtctactaggagctggaatccttcggatgacttttccaaagctaacgcattaagtagaccgcctggggagtacggccgcaaggttaaaactcaaatgaattgacgggggccgcacaagcggtggagcatgtggtttaattcgatgcaacgcgaagaaccttacctacacttgacatccagagaagagactagagatagacttgtgccttcgggaactctgagacaggtgctgcatggctgtcgtcagctcgtgttgtgagatgttgggttnagtcccgcnacgagcgcaacccctatccttagttgctagcaggtaatgctgagaactctanggagactgccggtgataaaccggaggaaggtggggacgacgtcaagtcatcatggcccttacgtgtagggctacacacgtgctacaatggcaggtacagagtgctgcgaactcgcgagagtaagcgaatcacttaaagcctatcgtagtccggattggagtctgcaactcgactccatgaagtcggaatcgctagtaatcgcggatcagaatgccgcggtgaatacgttcccgggccttgtacacaccgcccgtcacaccatgggagtgggttgctccagaagtggctagtctaactgctg

SEQ ID NO: 2647 - DNA, 1458 bp, Pseudoalteromonas distincta
attgaacgctggcggcaggcctaacacatgcaagtcgagcggtaacagagagtagcttgctactttgctgacgagcggcggacgggtgagtaatgcttgggaacatgccttgaggtgggggacaacagttggaaacgactgctaataccgcataatgtctacggaccaaagggggcttcggctctcgcctttagattggcccaagtgggattagctagttggtgaggtaatggctcaccaaggcgacgatccctagctggtttgagaggatgatcagccacactgggactgagacacggcccagactcctacgggaggcagcagtggggaatattgcacaatgggcgcaagcctgatgcagccatgccgcgtgtgtgaagaaggccttcgggttgtaaagcactttcagtcaggaggaaaggttagtagttaatacctgctagctgtgacgttactgacagaagaagcaccggctaactccgtgccagcagccgcggtaatacggagggtgcgagcgttaatcggaattactgggcgtaaagcgtacgcaggcggtttgttaagcgagatgtgaaagccccgggctcaacctgggaactgcatttcgaactggcaaactagagtgtgatagagggtggtagaatttcaggtgtagcggtgaaatgcgtagagatctgaaggaataccgatggcgaaggcagccacctgggtcaacactgacgctcatgtacgaaagcgtggggagcaaacgggattagataccccggtagtccacgccgtaaacgatgtctactagaagctcggagcctcggttctgtttttcaaagctaacgcattaagtagaccgcctggggagtacggccgcaaggttaaaactcaaatgaattgacgggggcccgcacaagcggtggagcatgtggtttaattcgatgcaacgcgaagaaccttacctacacttgacatacagagaacttaccagagatggtttggtgccttcgggaactctgatacaggtgctgcatggctgtcgtcagctcgtgttgtgagatgttgggttaagtcccgcaacgagcgcaacccctatccttagttgctagcaggtaatgctgagaactctaaggagactgccggtgataaaccggaggaaggtggggacgacgtcaagtcatcatggcccttacgtgtagggctacacacgtgctacaatggcgcatacagagtgctgcgaactcgcgagagtaagcgaatcacttaaagtgcgtcgtagtccggattggagtctgcaactcgactccatgaagtcggaatcgctagtaatcgcgtatcagaatgacgcggtgaatacgttcccgggccttgtacacaccgcccgtcacaccatgggagtgggttgctccagaagtagatagtctaaccctcgggaggacgtttaccacggagtgattcatgactggggtg

SEQ ID NO: 2648 - DNA, 1458 bp, Pseudoalteromonas elyakovii
  misc_feature (50)..(50): n is a, c, g, or t
attgaacgctggcggcaggcctaacacatgcaagtcgagcggtaacaganagtagcttgctactttgctgacgagcggcggacgggtgagtaatgcttgggaacatgccttgaggtgggggacaacagttggaaacgactgctaataccgcataatgtctacggaccaaagggggcttcggctctcgcctttagattggcccaagtgggattagctagttggtgaggtaatggctcaccaaggcgacgatccctagctggtttgagaggatgatcagccacactgggactgagacacggcccagactcctacgggaggcagcagtggggaatattgcacaatgggcgcaagcctgatgcagccatgccgcgtgtgtgaagaaggccttcgggttgtaaagcactttcagtcaggaggaaaggttagtagttaatacctgctagctgtgacgttactgacagaagaagcaccggctaactccgtgccagcagccgcggtaatacggagggtgcgagcgttaatcggaattactgggcgtaaagcgtacgcaggcggtttgttaagcgagatgtgaaagccccgggctcaacctgggaactgcatttcgaactggcaaactagagtgtgatagagggtggtagaatttcaggtgtagcggtgaaatgcgtagagatctgaaggaataccgatggcgaaggcagccacctgggtcaacactgacgctcatgtacgaaagcgtggggagcaaacgggattagataccccggtagtccacgccgtaaacgatgtctactagaagctcggagcctcggttctgtttttcaaagctaacgcattaagtagaccgcctggggagtacggccgcaaggttaaaactcaaatgaattgacgggggcccgcacaagcggtggagcatgtggtttaattcgatgcaacgcgaagaaccttacctacacttgacatacagagaacttaccagagatggtttggtgccttcgggaactctgatacaggtgctgcatggctgtcgtcagctcgtgttgtgagatgttgggttaagtcccgcaacgagcgcaacccctatccttagttgctagcaggtaatgctgagaactctaaggagactgccggtgataaaccggaggaaggtggggacgacgtcaagtcatcatggcccttacgtgtagggctacacacgtgctacaatggcgcatacagagtgctgcgaactcgcgagagtaagcgaatcacttaaagtgcgtcgtagtccggattggagtctgcaactcgactccatgaagtcggaatcgctagtaatcgcgtatcagaatgacgcggtgaatacgttcccgggccttgtacacaccgcccgtcacaccatgggagtgggttgctccagaagtagatagtctaaccctcgggaggacgtttaccacggagtgattcatgactggggtg

SEQ ID NO: 2649 - DNA, 1458 bp, Pseudoalteromonas espejiana
attgaacgctggcggcaggcctaacacatgcaagtcgagcggtaacagaaagtagcttgctactttgctgacgagcggcggacgggtgagtaatgcttgggaacatgccttgaggtgggggacaacagttggaaacgactgctaataccgcataatgtctacggaccaaagggggcttcggctctcgcctttagattggcccaagtgggattagctagttggtgaggtaatggctcaccaaggcaacgatccctagctggtttgagaggatgatcagccacactgggactgagacacggcccagactcctacgggaggcagcagtggggaatattgcacaatgggcgcaagcctgatgcagccatgccgcgtgtgtgaagaaggccttcgggttgtaaagcactttcagtcaggaggaaagattagtagttaatacctgctagttgtgacgttactgacagaagaagcaccggctaactccgtgccagcagccgcggtaatacggagggtgcgagcgttaatcggaattactgggcgtaaagcgtacgcaggcggtttgttaagcgagatgtgaaagccccgggctcaacctgggaactgcatttcgaactggcaaactagagtgtgatagagggtggtagaatttcaggtgtagcggtgaaatgcgtagagatctgaaggaataccgatggcgaaggcagccacctgggtcaacactgacgctcatgtacgaaagcgtggggagcaaacaggattagataccctggtagtccacgccgtaaacgatgtctactagaagctcggagcctcggctctgtttttcaaagctaacgcattaagtagaccgcctggggagtacggccgcaaggttaaaactcaaatgaattgacgggggcccgcacaagcggtggagcatgtggtttaattcgatgcaacgcgaagaaccttacctacacttgacatacagagaacttaccagagatggtttggtgccttcgggaactctgatacaggtgctgcatggctgtcgtcagctcgtgttgtgagatgttgggttaagtcccgcaacgagcgcaacccctatccttagttgctagcaggtaatgctgagaactctaaggagactgccggtgataaaccggaggaaggtggggacgacgtcaagtcatcatggcccttacgtgtagggctacacacgtgctacaatggcgcatacagagtgctgcgaactcgcgagagtaagcgaatcacttaaagtgcgtcgtagtccggattggagtctgcaactcgactccatgaagtcggaatcgctagtaatcgcgtatcagaatgacgcggtgaatacgttcccgggccttgtacacaccgcccgtcacaccatgggagtgggttgctccagaagtagatagtctaaccctcgggaggacgtttaccacggagtgattcatgactggggtg

SEQ ID NO: 2650 - DNA, 1458 bp, Pseudoalteromonas fuliginea
  misc_feature (1002)..(1002): n is a, c, g, or t
attgaacgctggcggcaggcctaacacatgcaagtcgagcggtaacagaaagtagcttgctactttgctgacgagcggcggacgggtgagtaatgcttgggaacatgccttgaggtgggggacaacagttggaaacgactgctaataccgcataatgtctacggaccaaagggggcttcggctctcgcctttagattggcccaagtgggattagctagttggtgaggtaatggctcaccaaggcgacgatccctagctggtttgagaggatgatcagccacactgggactgagacacggcccagactcctacgggaggcagcagtggggaatattgcacaatgggcgcaagcctgatgcagccatgccgcgtgtgtgaagaaggccttcgggttgtaaagcactttcagtcaggaggaaaggttaacggttaatacccgttagctgtgacgttactgacagaagaagcaccggctaactccgtgccagcagccgcggtaatacggagggtgcgagcgttaatcggaattactgggcgtaaagcgtacgcaggcggtttgttaagcgagatgtgaaagccccgggctcaacctgggaactgcatttcgaactggcaaactagagtgtgatagagggtggtagaatttcaggtgtagcggtgaaatgcgtagagatctgaaggaataccgatggcgaaggcagccacctgggtcaacactgacgctcatgtacgaaagcgtggggagcaaacgggattagataccccggtagtccacgccgtaaacgatgtctactagaagctcggagcctcggttctgtttttcaaagctaacgcattaagtagaccgcctggggagtacggccgcaaggttaaaactcaaatgaattgacgggggcccgcacaagcggtggagcatgtggtttaattcgatgcaacgcgaagaaccttacctacacttgacatacagagaacttaccagagatggtttggtgccttcggganctctgatacaggtgctgcatggctgtcgtcagctcgtgttgtgagatgttgggttaagtcccgcaacgagcgcaacccctatccttagttgctagcaggtaatgctgagaactctaaggagactgccggtgataaaccggaggaaggtggggacgacgtcaagtcatcatggcccttacgtgtagggctacacacgtgctacaatggcgcatacagagtgctgcgaacctgcgaaggtaagcgaatcacttaaagtgcgtcgtagtccggattggagtctgcaactcgactccatgaagtcggaatcgctagtaatcgcgtatcagaatgacgcggtgaatacgttcccgggccttgtacacaccgcccgtcacaccatgggagtgggttgctccagaagtagatagtctaaccctcgggaggacgtttaccacggagtgattcatgactggggtg

SEQ ID NO: 2651 - DNA, 1436 bp, Pseudoalteromonas haloplanktis
  misc_feature (50)..(50): n is a, c, g, or t
  misc_feature (62)..(62): n is a, c, g, or t
  misc_feature (779)..(779): n is a, c, g, or t
  misc_feature (784)..(784): n is a, c, g, or t
  misc_feature (826)..(826): n is a, c, g, or t
attgaacgctggcggcaggcctaacacatgcaagtcgagcggtaacaganagtagcttgctnctttgctgacgagcggcggacgggtgagtaatgcttgggaacatgccttgaggtgggggacaacagttggaaacgactgctaataccgcataatgtctacggaccaaagggggcttcgctctcgcctttagattggcccaagtgggattagctagttggtgaggtaatggctcaccaaggcgacgatccctagctggtttgagaggatgatcagccacactgggactgagacacggcccagactcctacgggaggcagcagtggggaatattgcacaatgggcgcaagcctgatgcagccatgccgcgtgtgtgaagaaggccttcgggttgtaaagcactttcagtcaggaggaaaggttagtagttaatacctgctagctgtgacgttactgacagaagaagcaccggctaactccgtgccagcagccgcggtaatacggagggtgcgagcgttaatcggaattactgggcgtaaagcgtacgcaggcggtttgttaagcgagatgtgaaagccccgggctcaacctgggaactgcatttcgaactggcaaactagagtgtgatagagggtggtagaatttcaggtgtagcggtgaaatgcgtagagatctgaaggaataccgatggcgaaggcagccacctgggtcaacactgacgctcatgtacgaaagcgtggggagcaaacgggattagataccccggtagtccacgccgnaaacnatgtctactagaagctcggagcctcggttctgtttggcaaanaacgcattaagtagaccgcctggggagtacggccgcaaggttaaaactcaaatgaattgacgggggccgcacaagcggtggagcatgtggtttaattcgatgcaacgcgaagaaccttacctacacttgacatacagagaacttaccagagatggtttggtgcttcgggaactctgatacaggtgctgcatggctgtcgtcagctcgtgttgtgagatgttgggttaagtcccgcaacgagcgcaacccctatccttagttgctagcaggtaatgctgagaactctaaggagactgccggtgataaaccggaggaaggtggggacgacgtcaagtcatcatggcccttacgtgtagggctacacacgtgctacaatggcgcatacagagtgctgcgaacctgcgaaggtaagcgaatcacttaaagtgcgtcgtagtccggattggagtctgcaactcgactccatgaagtcggaatcgctagtaatcgcgtatcagaatgacgcggtgaatacgttcccgggccttgtacacaccgcccgtcacaccatgggagtgggttgctccagaagtagatagtctaaccctcgggaggacgtttaccacggagt

SEQ ID NO: 2652 - DNA, 1456 bp, Pseudoalteromonas issachenkonii
attgaacgctggcggcaggcctaacacatgcaagtcgagcggtaacatttctagcttgctagaagatgacgagcggcggacgggtgagtaatgcttgggaacatgccttgaggtgggggacaacagttggaaacgactgctaataccgcataatgtctacggaccaaagggggcttcggctcccgcctttagattggcccaagtgggattagctagttggtgaggtaatggctcaccaaggcgacgatccctagctggtttgagaggatgatcagccacactgggactgagacacggcccagactcctacgggaggcagcagtggggaatattgcacaatgggcgcaagcctgatgcagccatgccgcgtgtgtgaagaaggccttcgggttgtaaagcactttcagtcaggaggaaaggttagtagttaatacctgctagctgtgacgttactgacagaagaagcaccggctaactccgtgccagcagccgcggtaatacggagggtgcgagcgttaatcggaattactgggcgtaaagcgtacgcaggcggtttgttaagcgagatgtgaaagccccgggctcaacctgggaactgcatttcgaactggcaaactagagtgtgatagagggtggtagaatttcaggtgtagcggtgaaatgcgtagagatctgaaggaataccgatggcgaaggcagccacctgggtcaacactgacgctcatgtacgaaagcgtggggagcaaacaggattagataccctggtagtccacgccgtaaacgatgtctactagaagctcggaacctcggttctgtttttcaaagctaacgcattaagtagaccgcctggggagtacggccgcaaggttaaaactcaaatgaattgacgggggcccgcacaagcggtggagcatgtggtttaattcgatgcaacgcgaagaaccttacctacacttgacatacagagaacttaccagagatggtttggtgccttcgggaactctgatacaggtgctgcatggctgtcgtcagctcgtgttgtgagatgttgggttaagtcccgcaacgagcgcaacccctatccttagttgctagcaggtaatgctgagaactctaaggagactgccggtgataaaccggaggaaggtggggacgacgtcaagtcatcatggcccttacgtgtagggctacacacgtgctacaatggcgcatacagagtgctgcgaactcgcgagagtaagcgaatcacttaaagtgcgtcgtagtccggattggagtctgcaactcgactccatgaagtcggaatcgctagtaatcgcgtatcagaatgacgcggtgaatacgttcccgggccttgtacacaccgcccgtcacaccatgggagtgggttgctccagaagtagatagtctaaccttcgggaggacgtttaccacggagtgattcatgactggggtg

SEQ ID NO: 2653 - DNA, 1463 bp, Pseudoalteromonas lipolytica
attgaacgctggcggcaggcctaacacatgcaagtcgagcggtaacagagagtagcttgctactctgctgacgagcggcggacgggtgagtaatgcttgggaatgtaccttatggtgggggacaacagttggaaacgactgctaataccgcataatgtcttcggaccaaagcgggggaccttcgggcctcgcgccataagatcagcccaagtgggattagctagttggtgaggtaatggctcaccaaggcgacgatccctagctggtttgagaggatgatcagccacactgggactgagacacggcccagactcctacgggaggcagcagtggggaatattgcacaatgggcgcaagcctgatgcagccatgccgcgtgtgtgaagaaggccttcgggttgtaaagcactttcagtaaggaggaaaggttggatgttaatagcattcagctgtgacgttacttacagaagaagcaccggctaactccgtgccagcagccgcggtaatacggagggtgcgagcgttaatcggaattactgggcgtaaagcgtacgcaggcggtttgttaagcgagatgtgaaagccccgggctcaacctgggaactgcatttcgaactggcaaactagagtgtgatagagggtggtagaatttcaggtgtagcggtgaaatgcgtagagatctgaaggaataccgatggcgaaggcagccacctgggtcaacactgacgctcatgtacgaaagcgtggggagcaaacaggattagataccctggtagtccacgccgtaaacgatgtctactagaagctcggttcctcggaactgtttttcaaagctaacgcattaagtagaccgcctggggagtacggccgcaaggttaaaactcaaatgaattgacgggggcccgcacaagcggtggagcatgtggtttaattcgatgcaacgcgaagaaccttacctacacttgacatacagagaacttaccagagatggtttggtgccttcgggaactctgatacaggtgctgcatggctgtcgtcagctcgtgttgtgagatgttgggttaagtcccgcaacgagcgcaacccctatccttagttgccagcgattcggtcgggaactctaaggagactgccggtgataaaccggaggaaggtggggacgacgtcaagtcatcatggcccttacgtgtagggctacacacgtgctacaatggcgcatacagagtgctgcgaacctgcgagggtaagcgaatcacttaaagtgcgtcgtagtccggattggagtctgcaactcgactccatgaagtcggaatcgctagtaatcgcgtatcagaatgacgcggtgaatacgttcccgggccttgtacacaccgcccgtcacaccatgggagtgggttgctccagaagtggatagtctaaccttcgggaggacgttcaccacggagtgattcatgactggggtg

SEQ ID NO: 2654 - DNA, 1455 bp, Pseudoalteromonas luteoviolacea
attgaacgctggcggcaggcctaacacatgcaagtcgagcggaaacgagaatagcttgctattcggcgtcgagcggcggacgggtgagtaatgcttgggaacgtgccgtaaggtgggggacaaccattggaaacgatggctaataccgcataatgtctacggaccaaagggggcttcggctctcgccttatgatcggcccaagtgggattagctagttggtaaggtaatggcttaccaaggcgacgatccctagctggtttgagaggatgatcagccacactggaactgagacacggtccagactcctacgggaggcagcagtggggaatattgcacaatgggcgcaagcctgatgcagccatgccgcgtgtgtgaagaaggccttagggttgtaaagcactttcagtaaggaggaaaggttagtagttaatacctgctagctgtgacgttacttacagaagaagcaccggctaactccgtgccagcagccgcggtaatacggagggtgcgagcgttaatcggaattactgggcgtaaagcgtacgcaggcggtttgttaagcgagatgtgaaagccccgggctcaacctgggaactgcatttcgaactggcaaactagagtgtgatagagggtggtagaatttcaggtgtagcggtgaaatgcgtagagatctgaaggaataccgatggcgaaggcagccacctgggtcaacactgacgctcatgtacgaaagcgtggggagcaaacaggattagataccctggtagtccacgccgtaaacgatgtctactaggagctggggtcttcggacaacttttccaaagctaacgcattaagtagaccgcctggggagtacggccgcaaggttaaaactcaaatgaattgacgggggcccgcacaagcggtggagcatgtggtttaattcgatgcaacgcgaagaaccttacctacacttgacatacagagaacttaccagagatggtttggtgccttcgggaactctgatacaggtgctgcatggctgtcgtcagctcgtgttgtgagatgttgggttaagtcccgcaacgagcgcaacccctatccttagttgccagcgattcggtcgggaactctaaggagactgccggtgataaaccggaggaaggtggggacgacgtcaagtcatcatggcccttacgtgtagggctacacacgtgctacaatggcagatacagagtgctgcgaacttgcgagagtaagcgaatcacttaaagtctgtcgtagtccggattggagtctgcaactcgactccatgaagtcggaatcgctagtaatcgcggatcagaatgccgcggtgaatacgttcccgggccttgtacacaccgcccgtcacaccatgggagtgggttgctccagaagtaggtagcttaaccttcgggggggcgcttaccacggagtgattcatgactggggtg

SEQ ID NO: 2655 - DNA, 1371 bp, Pseudoalteromonas marina
gagcggcggacgggtgagtaatgcttgggaacatgccttgaggtgggggacaacagttggaaacgactgctaataccgcataatgtctacggaccaaagggggcttcggctctcgcctttagattggcccaagtgggattagctagttggtgaggtaatggctcaccaaggcaacgatccctagctggtttgagaggatgatcagccacactggaactgagacacggtccagactcctacgggaggcagcagtggggaatattgcacaatgggcgaaagcctgatgcagccatgccgcgtgtgtgaagaaggccttcgggttgtaaagcactttcagtcaggaggaaagggtgtgagttaatacctcatatctgtgacgttactgacagaagaagcaccggctaactccgtgccagcagccgcggtaatacggagggtgcgagcgttaatcggaattactgggcgtaaagcgtacgcaggcggtttgttaagcgagatgtgaaagccccgggctcaacctgggaactgcatttcgaactggcaaactagagtgtgatagagggtggtagaatttcaggtgtagcggtgaaatgcgtagagatctgaaggaataccgatggcgaaggcagccacctgggtcaacactgacgctcatgtacgaaagcgtggggagcaaacgggattagataccccggtagtccacgccgtaaacgatgtctactagaagctcggaacctcggttctgtttttcaaagctaacgcattaagtagaccgcctggggagtacggccgcaaggttaaaactcaaatgaattgacgggggcccgcacaagcggtggagcatgtggtttaattcgatgcaacgcgaagaaccttacctacacttgacatacagagaactttctagagatagattggtgccttcgggagctctgatacaggtgctgcatggctgtcgtcagctcgtgttgtgagatgttgggttaagtcccgcaacgagcgcaacccctatccttagttgctagcaggtaatgctgagaactctaaggagactgccggtgataaaccggaggaaggtggggacgacgtcaagtcatcatggcccttacgtgtagggctacacacgtgctacaatggcgcatacagagtgctgcgaacctgcgaaggtaagcgaatcacttaaagtgcgtcgtagtccggattggagtctgcaactcgactccatgaagtcggaatcgctagtaatcgcgtatcagaatgacgcggtgaatacgttcccgggccttgtacacaccgcccgtcacaccatgggagtgggttgctccagaagtagatagtctaaccctcgggaggacgtttaccacggagtga

SEQ ID NO: 2656 - DNA, 1464 bp, Pseudoalteromonas neustonica
attgaacgctggcggcaggcctaacacatgcaagtcgagcggtaacagagagtagcttgctactttgctgacgagcggcggacgggtgagtaatgcttgggaatatgccttttggtgggggacaacagttggaaacgactgctaataccgcatgatgtctacggaccaaagtgggggaccttcgggcctcacgccaaaagattagcccaagtgggattagctagttggtaaggtaatggcttaccaaggcaacgatccctagctggtttgagaggatgatcagccacactgggactgagacacggcccagactcctacgggaggcagcagtggggaatattgcacaatgggcgcaagcctgatgcagccatgccgcgtgtgtgaagaaggccttcgggttgtaaagcactttcagtcaggaggaaagggtgtgttttaatagagcatatctgtgacgttactgacagaagaagcaccggctaactccgtgccagcagccgcggtaatacggagggtgcgagcgttaatcggaattactgggcgtaaagcgtacgcaggcggtttgttaagcgagatgtgaaagccccgggctcaacctgggaactgcatttcgaactggcaaactagagtgtgatagagggtggtagaatttcaggtgtagcggtgaaatgcgtagagatctgaaggaataccgatggcgaaggcagccacctgggtcaacactgacgctcatgtacgaaagcgtggggagcaaacaggattagataccctggtagtccacgccgtaaacgatgtctactagaagctcggagcctcggttctgtttttcaaagctaacgcattaagtagaccgcctggggagtacggccgcaaggttaaaactcaaatgaattgacgggggcccgcacaagcggtggagcatgtggtttaattcgatgcaacgcgaagaaccttacctacacttgacatacagagaacttaccagagatggtttggtgccttcgggaactctgatacaggtgctgcatggctgtcgtcagctcgtgttgtgagatgttgggttaagtcccgcaacgagcgcaacccctatccttagttgctagcaggtaatgctgagaactctaaggagactgccggtgataaaccggaggaaggtggggacgacgtcaagtcatcatggcccttacgtgtagggctacacacgtgctacaatggcgcatacagagtgctgcgaactcgcgagagtaagcgaatcacttaaagtgcgtcgtagtccggattggagtctgcaactcgactccatgaagtcggaatcgctagtaatcgcgtatcagaatgacgcggtgaatacgttcccgggccttgtacacaccgcccgtcacaccatgggagtgggttgctccagaagtagatagtctaaccctcgggaggacgtttaccacggagtgattcatgactggggtg

SEQ ID NO: 2657 - DNA, 1458 bp, Pseudoalteromonas nigrifaciens
attgaacgctggcggcaggcctaacacatgcaagtcgagcggtaacagaaagtagcttgctactttgctgacgagcggcggacgggtgagtaatgcttgggaacatgccttgaggtgggggacaacagttggaaacgactgctaataccgcataatgtctacggaccaaagggggcttcggctctcgcctttagattggcccaagtgggattagctagttggtgaggtaatggctcaccaaggcgacgatccctagctggtttgagaggatgatcagccacactgggactgagacacggcccagactcctacgggaggcagcagtggggaatattgcacaatgggcgcaagcctgatgcagccatgccgcgtgtgtgaagaaggccttcgggttgtaaagcactttcagtcaggaggaaaggttagtagttaatacctgctagctgtgacgttactgacagaagaagcaccggctaactccgtgccagcagccgcggtaatacggagggtgcgagcgttaatcggaattactgggcgtaaagcgtacgcaggcggtttgttaagcgagatgtgaaagccccgggctcaacctgggaactgcatttcgaactggcaaactagagtgtgatagagggtggtagaatttcaggtgtagcggtgaaatgcgtagagatctgaaggaataccgatggcgaaggcagccacctgggtcaacactgacgctcatgtacgaaagcgtggggagcaaacgggattagataccccggtagtccacgccgtaaacgatgtctactagaagctcggagcctcggttctgtttttcaaagctaacgcattaagtagaccgcctggggagtacggccgcaaggttaaaactcaaatgaattgacgggggcccgcacaagcggtggagcatgtggtttaattcgatgcaacgcgaagaaccttacctacacttgacatacagagaacttaccagagatggtttggtgccttcgggaactctgatacaggtgctgcatggctgtcgtcagctcgtgttgtgagatgttgggttaagtcccgcaacgagcgcaacccctatccttagttgctagcaggtaatgctgagaactctaaggagactgccggtgataaaccggaggaaggtggggacgacgtcaagtcatcatggcccttacgtgtagggctacacacgtgctacaatggcgcatacagagtgctgcgaacctgcgaaggtaagcgaatcacttaaagtgcgtcgtagtccggattggagtctgcaactcgactccatgaagtcggaatcgctagtaatcgcgtatcagaatgacgcggtgaatacgttcccgggccttgtacacaccgcccgtcacaccatgggagtgggttgctccagaagtagatagtctaaccctcgggaggacgtttaccacggagtgattcatgactggggtg

SEQ ID NO: 2658 - DNA, 1424 bp, Pseudoalteromonas peptidolytica
caggcctaacacatgcaagtcgagcggtaacatttctagcttgctagaagatgacgagcggcggacgggtgagtaatgcttgggaacatgccttgaggtgggggacaaccattggaaacgatggctaataccgcataatgtctacggaccaaagggggcttcggctctcgcctttagattggcccaagtgggattagctagttggtgaggtaagggctcaccaaggcgacgatccctagctggtttgagaggatgatcagccacactggaactgagacacggtccagactcctacgggaggcagcagtggggaatattgcacaatgggcgcaacctgatgcagccatgccgcgtgtgtgaagaaggccttagggttgtaaagcactttcagtcaggaggaaaggttagtagttaatacctgctagctgtgacgttactgacagaagaagcaccggctaactccgtgccagcagccgcggtaatacggagggtgcgagcgttaatcggaattactgggcgtaaagcgtacgcaggcggtttgttaagcgagatgtgaaagccccgggcttaacctgggaactgcatttcgaactggcaaactagagtgtgatagagggtggtagaatttcaggtgtagcggtgaaatgcgtagagatctgaaggaataccgatggcgaaggcagccacctgggtcaacactgacgctcatgtacgaaagcgtggggagcaaacaggattagataccctggtagtccacgccgtaaacgatgtctactaggagctggggtcttcggacaacttttccaaagctaacgcattaagtagaccgcctggggagtacggccgcaaggttaaaactcaaatgaattgacgggggcccgcacaagcggtggagcatgtggtttaattcgatgcaacgcgaagaaccttacctacacttgacatacagagaacttaccagagatgtttggtgccttcgggagtttgatacaggtgctgcatggctgttgtcagctcgtgttgtgagatgttgggttaagtcccgcaacgagcgcaacccctatccttagttgccagcgattcggtcgggaatctaaggagactgccggtgataaaccggaggaaggtgggacgacgtcaagtcatcatggcccttacgtgtagggctacacacgtgctacaatggcaggtacagagagcagcgagctagcgatagtgagcgaatcccttaaagcctgtcgtagtccggattggagtctgcaactcgactccatgaagtcggaatcgctagtaatcgcgaatcagaatgtcgcggtgaatacgttcccgggcttgtacacaccgcccgtcacaccatgggagtgggttgctccagaagtggatagtctaaccttcgggggacgttgaccacggagtgaatcatg

SEQ ID NO: 2659 - DNA, 1455 bp, Pseudoalteromonas phenolica
attgaacgctggcggcaggcctaacacatgcaagtcgagcggtaacatttctagcttgctagaagatgacgagcggcggacgggtgagtaatgcttgggaatatgccttagggtgggggacaacagttggaaacgactgctaataccgcataacgtctacggaccaaagggggcttcggctctcgcccttagattagcccaagtgggattagctagttggtgaggtaatggctcaccaaggcgacgatccctagctggtttgagaggatgatcagccacactggaactgagacacggtccagactcctacgggaggcagcagtggggaatattgcacaatgggcgcaagcctgatgcagccatgccgcgtgtgtgaagaaggccttagggttgtaaagcactttcagtaaggaggaaaggttagtagttaatacctgctagctgtgacgttacttacagaagaagcaccggctaactccgtgccagcagccgcggtaatacggagggtgcgagcgttaatcggaattactgggcgtaaagcgtacgcaggcggtttgttaagcgagatgtgaaagccccgggctcaacctgggaactgcatttcgaactggcaaactagagtatgatagagggtggtagaatttcaggtgtagcggtgaaatgcgtagagatctgaaggaataccgatggcgaaggcagccacctgggtcaatactgacgctcatgtacgaaagcgtggggagcaaacgggattagataccccggtagtccacgccgtaaacgatgtctactaggagctggggtcttcggacaacttttccaaagctaacgcattaagtagaccgcctggggagtacggccgcaaggttaaaactcaaatgaattgacgggggcccgcacaagcggtggagcatgtggtttaattcgatgcaacgcgaagaaccttacctacacttgacatacagagaacttactagagatagtttggtgccttcgggaactctgatacaggtgctgcatggctgtcgtcagctcgtgttgtgagatgttgggttaagtcccgcaacgagcgcaacccctatccttagttgccagcgattcggtcgggaactctaaggagactgccggtgataaaccggaggaaggtggggacgacgtcaagtcatcatggcccttacgtgtagggctacacacgtgctacaatggcgcatacagagtgctgcaagctcgcgagagttagcgaatcacttaaaatgcgtcgtagtccggattggagtctgcaactcgactccatgaagtcggaatcgctagtaatcgcggatcagaatgccgcggtgaatacgttcccgggccttgtacacaccgcccgtcacaccatgggagtgggttgctccagaagtaggtagcttaaccttagggagggcgcttaccacggagtgattcatgactggggtg

SEQ ID NO: 2660 - DNA, 1455 bp, Pseudoalteromonas piratica
attgaacgctggcggcaggcctaacacatgcaagtcgagcggtaacatttctagcttgctagaagatgacgagcggcggacgggtgagtaatgcttgggaacatgcctttaggtgggggacaaccattggaaacgatggctaataccgcataatgtctacggaccaaagggggcttcggctctcgcctttagattggcccaagtgggattaggtagttggtgaggtaatggctcaccaagccgacgatccctagctggtttgagaggatgatcagccacactggaactgagacacggtccagactcctacgggaggcagcagtggggaatattgcacaatgggcgcaagcctgatgcagccatgccgcgtgtgtgaagaaggccttcgggttgtaaagcactttcagttgtgaggaaaggttagtagttaatacctgctagctgtgacgttagcaacagaagaagcaccggctaactccgtgccagcagccgcggtaatacggagggtgcgagcgttaatcggaattactgggcgtaaagcgtacgcaggcggtttgttaagcgagatgtgaaagccccgggctcaacctgggaactgcatttcgaactggcaaactagagtgtgatagagggtggtagaatttcaggtgtagcggtgaaatgcgtagagatctgaaggaataccgatggcgaaggcagccacctgggtcaacactgacgctcatgtacgaaagcgtggggagcaaacgggattagataccccggtagtccacgccgtaaacgatgtctactaggagttcggtttttcggaactgtcttccaaagctaacgcattaagtagaccgcctggggagtacggccgcaaggttaaaactcaaatgaattgacgggggcccgcacaagcggtggagcatgtggtttaattcgatgcaacgcgaagaaccttacctacacttgacatccagagaacttactagagatagtttggtgccttcgggaactctgagacaggtgctgcatggctgtcgtcagctcgtgttgtgagatgttgggttaagtcccgcaacgagcgcaacccctatccttagttgccagcgattcggtcgggaactctaaggagactgccggtgataaaccggaggaaggtggggacgacgtcaagtcatcatggcccttacgtgtagggctacacacgtgctacaatggcgcatacagagtgctgcgaactcgcgagagtaagcgaatcacttaaagtgcgtcgtagtccggattggagtctgcaactcgactccatgaagtcggaatcgctagtaatcgcgaatcagaatgtcgcggtgaatacgttcccgggccttgtacacaccgcccgtcacaccatgggagtgggttgctccagaagtaggtagcttaaccttagggagggcgcttaccacggagtgattcatgactggggtg

SEQ ID NO: 2661 - DNA, 1455 bp, Pseudoalteromonas piscicida
attgaacgctggcggcaggcctaacacatgcaagtcgagcggtaacatttctagcttgctagaagatgacgagcggcggacgggtgagtaatgcttgggaacatgccttgaggtgggggacaaccattggaaacgatggctaataccgcataatgtctacggaccaaagggggcttcggctctcgcctttagattggcccaagtgggattagctagttggtgaggtaaaggctcaccaaggcgacgatccctagctggtttgagaggatgatcagccacactggaactgagacacggtccagactcctacgggaggcagcagtggggaatattgcacaatgggcgcaagcctgatgcagccatgccgcgtgtgtgaagaaggccttcgggttgtaaagcactttcagtcaggaggaaaggttagtagttaatacctgctagctgtgacgttactgacagaagaagcaccggctaactccgtgccagcagccgcggtaatacggagggtgcgagcgttaatcggaattactgggcgtaaagcgtacgcaggcggtttgttaagcgagatgtgaaagccccgggcttaacctgggaactgcatttcgaactggcaaactagagtgtgatagagggtggtagaatttcaggtgtagcggtgaaatgcgtagagatctgaaggaataccgatggcgaaggcagccacctgggtcaacactgacgctcatgtacgaaagcgtggggagcaaacaggattagataccctggtagtccacgccgtaaacgatgtctactaggagctggggtcttcggacaacttttccaaagctaacgcattaagtagaccgcctggggagtacggccgcaaggttaaaactcaaatgaattgacgggggcccgcacaagcggtggagcatgtggtttaattcgatgcaacgcgaagaaccttacctacacttgacatacagagaacttaccagagatggtttggtgccttcgggaactctgatacaggtgctgcatggctgtcgtcagctcgtgttgtgagatgttgggttaagtcccgcaacgagcgcaacccctatccttagttgccagcgattcggtcgggaactctaaggagactgccggtgataaaccggaggaaggtggggacgacgtcaagtcatcatggcccttacgtgtagggctacacacgtgctacaatggcaggtacagagagcagcgagctagcgatagtgagcgaatcccttaaagcctgtcgtagtccggattggagtctgcaactcgactccatgaagtcggaatcgctagtaatcgcaaatcagaatgttgcggtgaatacgttcccgggccttgtacacaccgcccgtcacaccatgggagtgggttgctccagaagtggatagtctaaccttcgggaggacgttcaccacggagtgattcatgactggggtg

SEQ ID NO: 2662 - DNA, 1473 bp, Pseudoalteromonas profundi
attgaacgctggcggcaggcctaacacatgcaagtcgagcggcagcgacaacattgaaccttcgggggatttgttgggcggcgagcggcggacgggtgagtaatgcttgggaatatgccttatggtgggggacaacagttggaaacgactgctaataccgcatgatgtctacggaccaaagtgggggaccttcgggcctcacgccataagattagcccaagtgggattagctagttggtgaggtaatggctcaccaaggcgacgatccctagctggtttgagaggatgatcagccacactgggactgagacacggcccagactcctacgggaggcagcagtggggaatattgcacaatgggcgcaagcctgatgcagccatgccgcgtgtgtgaagaaggccttcgggttgtaaagcactttcagtaaggaggaaaggttagtcactaatattggctagctgtgacgttacttacagaagaagcaccggctaactccgtgccagcagccgcggtaatacggagggtgcgagcgttaatcggaattactgggcgtaaagcgtacgcaggcggtttgttaagcgagatgtgaaagccccgggctcaacctgggaactgcatttcgaactggcaaactagagtgtgatagagggtggtagaatttcaggtgtagcggtgaaatgcgtagagatctgaaggaataccgatggcgaaggcagccacctgggtcaacactgacgctcatgtacgaaagcgtggggagcaaacaggattagataccctggtagtccacgccgtaaacgatgtctactagaagctcggttcctcggaactgtttttcaaagctaacgcattaagtagaccgcctggggagtacggccgcaaggttaaaactcaaatgaattgacgggggcccgcacaagcggtggagcatgtggtttaattcgatgcaacgcgaagaaccttacctacacttgacatacagagaacttaccagagatggtttggtgccttcgggaactctgatacaggtgctgcatggctgtcgtcagctcgtgttgtgagatgttgggttaagtcccgcaacgagcgcaacccctatccttagttgccagcgattcggtcgggaactctaaggagactgccggtgataaaccggaggaaggtggggacgacgtcaagtcatcatggcccttacgtgtagggctacacacgtgctacaatggcgcatacagagtgctgcgaacctgcgagggtaagcgaatcacttaaagtgcgtcgtagtccggattggagtctgcaactcgactccatgaagtcggaatcgctagtaatcgcgtatcagaatgacgcggtgaatacgttcccgggccttgtacacaccgcccgtcacaccatgggagtgggttgctccagaagtggatagtctaaccttcgggaggacgttcaccacggagtgattcatgactggggtg

SEQ ID NO: 2663 - DNA, 1426 bp, Pseudoalteromonas rubra
  misc_feature (221)..(221): n is a, c, g, or t
  misc_feature (233)..(233): n is a, c, g, or t
  misc_feature (242)..(242): n is a, c, g, or t
ttgaacgctggcggcaggcctaacacatgcaagtcgagcggtaacatttctagcttgctagaagatgacgagcggcggacgggtgagtaatgcttgggaacatgcctttaggtgggggacaaccattggaaacgatggctaataccgcataatgtctacggaccaaagggggcttcggctctcgcctttagattggcccaagtgggattagctagttggtnaggtaacggctnaccaaggcnacgatccctagctggtttgagaggatgatcagccacactggaactgagacacggtccagactcctacgggaggcagcagtggggaatattgcacaatgggcgcaagcctgatgcagccatgccgcgtgtgtgaagaaggccttcgggttgtaaagcactttcagtcaggaggaaaggttagtagttaatacctgctagctgtgacgttactgacagaagaagcaccggctaactccgtgccagcagccgcggtaatacggagggtgcgagcgttaatcggaattactgggcgtaaagcgtacgcaggcggtttgttaagcgagatgtgaaagccccgggcttaacctgggaactgcatttcgaactggcaaactagagtgtgatagagggtggtagaatttcaggtgtagcggtgaaatgcgtagagatctgaaggaataccgatggcgaaggcagccacctgggtcaacactgacgctcatgtacgaaagcgtggggagcaaacaggattagataccctggtagtccacgccgtaaacgatgtctactaggagctggggtccttcggacaacttttccaaagctaacgcattaagtagaccgcctggggagtacggccgcaaggttaaaactcaaatgaattgacgggggccgcacaagcggtggagcatgtggtttaattcgatgcaacgcgaagaaccttacctacacttgacatacagagaacttaccagagatggtttggtgccttcgggaactctgatacaggtgctgcatggctgtcgtcagctcgtgttgtgagatgttgggttaagtcccgcaacgagcgcaacccttatccttagttgccagcgattcggtcgggaactctaaggagactgccggtgataaaccggaggaaggtggggacgacgtcaagtcatcatggcccttacgtgtagggctacacacgtgctacaatggcatatacagagtgctgcgaactagcgatagtaagcgaatcacttaaagtatgtcgtagtccggattggagtctgcaactcgactccatgaagtcggaatcgctagtaatcgcggatcagaatgccgcggtgaatacgttcccgggccttgtacacaccgcccgtcacaccatgggagtgggttgctccagaagtggatagcttaacttcgggagggcgttc

SEQ ID NO: 2664 - DNA, 1457 bp, Pseudoalteromonas ruthenica
  misc_feature (157)..(157): n is a, c, g, or t
  misc_feature (159)..(159): n is a, c, g, or t
attgaacgctggcggcaggcctaacacatgcaagtcgagcggaaacgaagaggtgcttgcacctctggcgtcgagcggcggacgggtgagtaatgcttgggaacatgccttgaggtgggggacaaccgttggaaacgacggctaataccgcataatntntacggaccaaagggggcttcggctctcgcctttagattggcccaagtgggattagctagttggtgaggtaatggctcaccaaggcgacgatccctagctggtttgagaggatgatcagccacactgggactgagacacggcccagactcctacgggaggcagcagtggggaatattgcacaatgggcgcaagcctgatgcagccatgccgcgtgtgtgaagaaggccttcgggttgtaaagcactttcagcaaggaggaaaggttgttagttaatacctgatatctgtgacgttacttgcagaagaagcaccggctaactccgtgccagcagccgcggtaatacggagggtgcgagcgttaatcggaattactgggcgtaaagcgtacgcaggcggtttgttaagcgagatgtgaaagccccgggcttaacctgggaactgcatttcgaactggcaagctagagtgtgatagagggtggtagaatttcaggtgtagcggtgaaatgcgtagagatctgaaggaataccgatggcgaaggcagccacctgggtcaacactgacgctcatgtacgaaagcgtggggagcaaacaggattagataccctggtagtccacgccgtaaacgatgtctactaggagctcggcttttcggagctgttttccaaagcaaacgcattaagtagaccgcctggggagtacggccgcaaggttaaaactcaaatgaattgacgggggcccgcacaagcggtggagcatgtggtttaattcgatgcaacgcgaagaaccttacctacacttgacatccagagaactttctagagatagattggtgccttcgggaactctgagacaggtgctgcatggctgtcgtcagctcgtgttgtgagatgttgggttaagtcccgcaacgagcgcaacccctatccttagttgccagcgattcggtcgggaactctaaggagactgccggtgataaaccggaggaaggtggggacgacgtcaagtcatcatggcccttacgtgtagggctacacacgtgctacaatggcgcatacagagtgctgcgagcctgcgagggtgagcgaatcacttaaagtgcgtcgtagtccggattggagtctgcaactcgactccatgaagtcggaatcgctagtaatcgcgaatcagaatgtcgcggtgaatacgttcccgggccttgtacacaccgcccgtcacaccatgggagtgggttgctccagaagtggttagcctaaccttcgggagggcgatcaccacggagtgattcatgactggggtg

SEQ ID NO: 2665 - DNA, 1455 bp, Pseudoalteromonas spongiae
attgaacgctggcggcaggcctaacacatgcaagtcgagcggtaacatttctagcttgctagaagatgacgagcggcggacgggtgagtaatgcttgggaacatgcctttgggtgggggacaaccattggaaacgatggctaataccgcataatgtctacggaccaaagggggcttcggctctcgcctttagattggcccaagtgggattagctagttggtgaggtaatggctcaccaaggcgacgatccctagctggtttgagaggatgatcagccacactggaactgagacacggtccagactcctacgggaggcagcagtggggaatattgcacaatgggcgcaagcctgatgcagccatgccgcgtgtgtgaagaaggccttcgggttgtaaagcactttcagttgtgaggaaaggttagtagttaatacctgctagctgtgacgttagcaacagaagaagcaccggctaactccgtgccagcagccgcggtaatacggagggtgcgagcgttaatcggaattactgggcgtaaagcgtacgcaggcggtttgttaagcgagatgtgaaagccccgggctcaacctgggaactgcatttcgaactggcaaactagagtgtgatagagggtggtagaatttcaggtgtagcggtgaaatgcgtagagatctgaaggaataccgatggcgaaggcagccacctgggtcaacactgacgctcatgtacgaaagcgtggggagcaaacgggattagataccccggtagtccacgccgtaaacgatgtctactaggagttcggtttttcggaactgtcttccaaagctaacgcattaagtagaccgcctggggagtacggccgcaaggttaaaactcaaatgaattgacgggggcccgcacaagcggtggagcatgtggtttaattcgatgcaacgcgaagaaccttacctacacttgacatccagagaacttactagagatagtttggtgccttcgggaactctgagacaggtgctgcatggctgtcgtcagctcgtgttgtgagatgttgggttaagtcccgcaacgagcgcaacccctatccttagttgccagcgattcggtcgggaactctaaggagactgccggtgataaaccggaggaaggtggggacgacgtcaagtcatcatggcccttacgtgtagggctacacacgtgctacaatggcgcatacagagtgctgcgaactcgcgagagtaagcgaatcacttaaagtgcgtcgtagtccggattggagtctgcaactcgactccatgaagtcggaatcgctagtaatcgcgaatcagaatgtcgcggtgaatacgttcccgggccttgtacacaccgcccgtcacaccatgggagtgggttgctccagaagtaggtagcttaaccttagggagggcgcttaccacggagtgattcatgactggggtg

SEQ ID NO: 2666 - DNA, 1456 bp, Pseudoalteromonas tetraodonis
attgaacgctggcggcaggcctaacacatgcaagtcgagcggtaacatttctagcttgctagaagatgacgagcggcggacgggtgagtaatgcttgggaacatgccttgaggtgggggacaacagttggaaacgactgctaataccgcataatgtctacggaccaaagggggcttcggctctcgcctttagattggcccaagtgggattagctagttggtgaggtaatggctcaccaaggcgacgatccctagctggtttgagaggatgatcagccacactgggactgagacacggcccagactcctacgggaggcagcagtggggaatattgcacaatgggcgcaagcctgatgcagccatgccgcgtgtgtgaagaaggccttcgggttgtaaagcactttcagtcaggaggaaaggttagtagttaatacctgctagctgtgacgttactgacagaagaagcaccggctaactccgtgccagcagccgcggtaatacggagggtgcgagcgttaatcggaattactgggcgtaaagcgtacgcaggcggtttgttaagcgagatgtgaaagccccgggctcaacctgggaactgcatttcgaactggcaaactagagtgtgatagagggtggtagaatttcaggtgtagcggtgaaatgcgtagagatctgaaggaataccgatggcgaaggcagccacctgggtcaacactgacgctcatgtacgaaagcgtggggagcaaacaggattagataccctggtagtccacgccgtaaacgatgtctactagaagctcggaacctcggttctgtttttcaaagctaacgcattaagtagaccgcctggggagtacggccgcaaggttaaaactcaaatgaattgacgggggcccgcacaagcggtggagcatgtggtttaattcgatgcaacgcgaagaaccttacctacacttgacatacagagaacttaccagagatggtttggtgccttcgggaactctgatacaggtgctgcatggctgtcgtcagctcgtgttgtgagatgttgggttaagtcccgcaacgagcgcaacccctatccttagttgctagcaggtaatgctgagaactctaaggagactgccggtgataaaccggaggaaggtggggacgacgtcaagtcatcatggcccttacgtgtagggctacacacgtgctacaatggcgcatacagagtgctgcgaactcgcgagagtaagcgaatcacttaaagtgcgtcgtagtccggattggagtctgcaactcgactccatgaagtcggaatcgctagtaatcgcgtatcagaatgacgcggtgaatacgttcccgggccttgtacacaccgcccgtcacaccatgggagtgggttgctccagaagtagatagtctaaccctcgggaggacgtttaccacggagtgattcatgactggggtg

SEQ ID NO: 2667 - DNA, 1458 bp, Pseudoalteromonas translucida
attgaacgctggcggcaggcctaacacatgcaagtcgagcggtaacagaaagtagcttgctactttgctgacgagcggcggacgggtgagtaatgcttgggaacatgccttgaggtgggggacaacagttggaaacgactgctaataccgcataatgtctacggaccaaagggggcttcggctctcgcctttagattggcccaagtgggattagctagttggtgaggtaatggctcaccaaggcgacgatccctagctggtttgagaggatgatcagccacactgggactgagacacggcccagactcctacgggaggcagcagtggggaatattgcacaatgggcgcaagcctgatgcagccatgccgcgtgtgtgaagaaggccttcgggttgtaaagcactttcagtcaggaggaaagcgtggtggttaatacccatcatgtgtgacgttactgacagaagaagcaccggctaactccgtgccagcagccgcggtaatacggagggtgcgagcgttaatcggaattactgggcgtaaagcgtacgcaggcggtttgttaagcgagatgtgaaagccccgggctcaacctgggaactgcatttcgaactggcaaactagagtgtgatagagggtggtagaatttcaggtgtagcggtgaaatgcgtagagatctgaaggaataccgatggcgaaggcagccacctgggtcaacactgacgctcatgtacgaaagcgtggggagcaaacgggattagataccccggtagtccacgccgtaaacgatgtctactagaagctcggagcctcggttctgtttttcaaagctaacgcattaagtagaccgcctggggagtacggccgcaaggttaaaactcaaatgaattgacgggggcccgcacaagcggtggagcatgtggtttaattcgatgcaacgcgaagaaccttacctacacttgacatacagagaacttaccagagatggtttggtgccttcgggaactctgatacaggtgctgcatggctgtcgtcagctcgtgttgtgagatgttgggttaagtcccgcaacgagcgcaacccctatccttagttgctagcaggtaatgctgagaactctaaggagactgccggtgataaaccggaggaaggtggggacgacgtcaagtcatcatggcccttacgtgtagggctacacacgtgctacaatggcgcatacagagtgctgcgaacctgcgaaggtaagcgaatcacttaaagtgcgtcgtagtccggattggagtctgcaactcgactccatgaagtcggaatcgctagtaatcgcgtatcagaatgacgcggtgaatacgttcccgggccttgtacacaccgcccgtcacaccatgggagtgggttgctccagaagtagatagtctaaccctcgggaggacgtttaccacggagtgattcatgactggggtg

SEQ ID NO: 2668 - DNA, 1464 bp, Pseudoalteromonas tunicata
attgaacgctggcggcaggcctaacacatgcaagtcgagcggtagcacagagaaacttgtttcttgggtgacgagcggcggacgggtgagtaatgcttgggaacatgcctttaggtgggggacaacagttggaaacgactgctaataccgcatgatgtctacggaccaaagtgggggaccttcgggcctcacgcctaaagattggcccaagtgggattagctagttggtgaggtaatggctcaccaaggcaacgatctctagctggtttgagaggatgatcagccacactggaactgagacacggtccagactcctacgggaggcagcagtggggaatattgcacaatgggcgaaagcctgatgcagccatgccgcgtgtgtgaagaaggccttcgggttgtaaagcactttcagtcaggaggaaaggttacgttttaatagaacgtagctgtgacgttactgacagaagaagcaccggctaactccgtgccagcagccgcggtaatacggagggtgcgagcgttaatcggaattactgggcgtaaagcgtacgcaggcggttgattaagcgagatgtgaaagccccgggctcaacctgggaactgcatttcgaactggtcaactagagtgtgatagagggtggtagaatttcaggtgtagcggtgaaatgcgtagagatctgaaggaataccgatggcgaaggcagccacctgggtcaacactgacgctcatgtacgaaagcgtggggagcaaacaggattagataccctggtagtccacgccgtaaacgatgtctactagaagctggggtcctcggacaactttttcaaagctaacgcattaagtagaccgcctggggagtacggccgcaaggttaaaactcaaatgaattgacgggggcccgcacaagcggtggagcatgtggtttaattcgatgcaacgcgaagaaccttacctacacttgacatccagagaaatcgctagagatagctttgtgccttcgggaactctgagacaggtgctgcatggctgtcgtcagctcgtgttgtgagatgttgggttaagtcccgcaacgagcgcaacccctatccttagttgccagcgagtaatgtcgggaactctaaggagactgccggtgataaaccggaggaaggtggggacgacgtcaagtcatcatggcccttacgtgtagggctacacacgtgctacaatggcgagtacagagggcagcaagctagcgatagtgagcgaatcccttaaagctcgtcgtagtccggattggagtctgcaactcgactccatgaagtcggaatcgctagtaatcgcaaatcagaatgttgcggtgaatacgttcccgggccttgtacacaccgcccgtcacaccatgggagtgggttgcaccagaagtagctagcttaaccttcgggagggcggttaccacggtgtgattcatgactggggtg

SEQ ID NO: 2669 - DNA, 1355 bp, Pseudoalteromonas ulvae
  misc_feature (382)..(382): n is a, c, g, or t
tgctagaagatgacgagcggcggacgggtgagtaatgcttgggaatatgccttagggtgggggacaacagttggaaacgactgctaataccgcatgatgtctacggaccaaagggggcttcggctctcgcccttagattagcccaagtgggattagctagttggtgaggtaaaggctcaccaaggcgacgatccctagctggtttgagaggatgatcagccacactggaactgagacacggtccagactcctacgggaggcagcagtggggaatattgcacaatgggggaaaccctgatgcagccatgccgcgtgtgtgaagaaggccttcgggttgtaaagcactttcagtaaggaggaaaggttagtagttaatacctgntagctgtgacgttacttacagaagaagcaccggctaactccgtgccagcagccgcggtaatacggagggtgcgagcgttaatcggaattactgggcgtaaagcgtacgcaggcggttgattaagcgagatgtgaaagccccgggctcaacctgggaactgcatttcgaactggtcaactagagtgtgatagagggtggtagaatttcaggtgtagcggtgaaatgcgtagagatctgaaggaataccgatggcgaaggcagccacctgggtcaacactgacgctcatgtacgaaagcgtggggagcaaacaggattagataccctggtagtccacgccgtaaacgatgtctactagaagctggggtcctcggacaactttttcaaagctaacgcattaagtagaccgcctggggagtacggccgcaaggttaaaactcaaatgaattgacgggggcccgcacaagcggtggagcatgtggtttaattcgatgcaacgcgaagaaccttacctacacttgacatccagagaaatcgctagagatagctttgtgccttcgggaactctgagacaggtgctgcatggctgtcgtcagctcgtgttgtgagatgttgggttaagtcccgcaacgagcgcaacccctatccttagttgccagcgagtaatgtcgggaactctaaggagactgccggtgataaaccggaggaaggtggggacgacgtcaagtcatcatggcccttacgtgtagggctacacacgtgctacaatggcaggtacagagggcagcaagctagcgatagtgagcgaatcccttaaagcttgtcgtagtccggattggagtctgcaactcgactccatgaagtcggaatcgctagtaatcgcaaatcagaatgttgcggtgaatacgttcccgggccttgtacacaccgcccgtcacaccatgggagtgggttgcaccagaagtagctagctta

SEQ ID NO: 2670 - DNA, 1425 bp, Pseudobacter ginsenosidimutans
gatgaacgctagcggcaggcttaatacatgcaagtcgaggggcatcgcaggtagcaatactgggcggcgaccggcaaacgggtgcggaacacgtacgcaaccttcctttaagtgtgggatagcccagggaaacttggattaataccacgtaatataattgagtggcatcacttaattattatagctccggcgcttaaagatgggcgtgcgcctgattaggtagttggcggggtaacggcccaccaagccttcgatcagtaactggtgtgagagcacgaccagtcacacgggcactgagacacgggcccgactcctacgggaggcagcagtaaggaatattggtcaatggacgcaagtctgaaccagccatgccgcgtggaggatgaaggtcctctggattgtaaacttcttttttctgggaagaaacctggcttttcttggtcagctgacggtaccagaagaataagcaccggctaactccgtgccagcagccgcggtaatacggagggtgcaagcgttatccggattcactgggtttaaagggtgcgtaggtgggctgataagtcagtggtgaaatccccgagcttaacttgggaactgccattgatactatcggtcttgaatatcgtgtaggtaagcggaatatgtcatgtagcggtgaaatgcttagatatgacatagaacaccaattgcgaaggcagcttactttacgatcattgacactgaggcacgaaagcgtggggagcaaacaggattagataccctggtagtccacgccctaaactatggatactcgacatcagcgatacactgttggtgtctgagcgaaagcattaagtatcccacctgggaagtacgaccgcaaggttgaaactcaaaggaattggcgggggtccgcacaagcggtggagcatgtggtttaattcgatgatacgcgaggaaccttacctgggctagaatgcagtctgaccgtgggtgaaagctcattttgtagcaatacacagattgtaaggtgctgcatggccgtcgtcagctcgtgccgtgaggtgttgggttaagtcccgcaacgagcgcaacccccatcattagttgccatcaggtaaagctgggaactctaatgaaactgccgtcgtaagacgcgaggaaggaggggatgatgtcaggtcatcatggcctttatgcccagggctacacacgtgctacaatgggggagacaaagggctgccacttggcaacaaggcgctaatcccaaaaactccctctcagttcggatcgcagtctgcaactcgactgcgtgaagctggaatcgctagtaatcgtatatcagcaatgatacggtgaatacgttcccggaccttgcacacaccgcccgtcaagccatggaagccgggtgtacctaaagtcggtaaccgcaaggagccgcct

SEQ ID NO: 2671 - DNA, 1434 bp, Pseudobacteroides cellulosolvens
gacgaacgctggcggcgtgcctaacacatgcaagtcgagcggagatatttagcaatagatatcttagcggcggacgggtgagtaacgcgtgggtaacctgccttatacagggggataacacagggaaacttgtgctaataccgcataacacaattttgtggcatcacagagttgtcaaaggagcaatccggtataagatggacccgcgtccaattagctagttggtggtgtaacggaccaccaaggcgacgattggtagccgaactgagaggttgatcggccacattgggactgagacacggcccagactcctacgggaggcagcagtggggaatattgcacaatgggggaaaccctgatgcagcaacgccgcgtgaaggatgaaggttttcggatcgtaaacttctttgatgagggacgaataatgacggtacctcaaaaacaagccacggctaactacgtgccagcagccgcggtaatacgtaggtggcgagcgttgtccggatttactgggtgtaaagggcgtgtaggcgggaatgtaagtcagatgtgaaactccgaagctcaacttcggaactgcatctgaaactatgtttcttgagtgctggagaggaaagcggaattcctagtgtagcggtgaaatgcgtagatattaggaggaacaccagtggcgaaggcggctttctggacagtaactgacgctgaggcgcgaaagcgtggggagcaaacaggattagataccctggtagtccacgctgtaaacgatggatactaggtgtgggaggtatcgaccccttccgtgccgcagttaacacaataagtatcccacctggggagtacggccgcaaggttgaaactcaaaggaattgacgggggcccgcacaagcagtggagtatgtggtttaattcgaagcaacgcgaagaaccttaccagggcttgacatcccttgacgatggtagagatatcatttcccttcggggcaaggagacaggtggtgcatggttgtcgtcagctcgtgtcgtgagatgttgggttaagtcccgcaacgagcgcaacccctgttgttagttgccatcattaagttgggcactctagcgagactgccggtgacaaatcggaggaaggtggggacgacgtcaaatcatcatgccccttatgtcctgggctacacacgtactacaatggctattacagagggaagctaagccgcaaggtggagcaaatccccaaaaatagtcccagttcagattgtgggctgaaactcgcccacatgaagtcggaattgctagtaatggcaggtcagcatactgccgtgaatacgttcccgggccttgtacacaccgcccgtcacaccatgagagtctgcaacacccgaagtcagtagtctaaccgcaaggaggacgctgccgaaggtggggccgatgattggggtg

SEQ ID NO: 2672 - DNA, 1443 bp, Pseudobutyrivibrio ruminis
  misc_feature (176)..(176): n is a, c, g, or t
ggcggcgtgcctaacacatgcaagtcgacggagcaacttatcacgatcccttcggggtgacgatttgttgactgagtggcggacgggtgagtaacgcgtgggtaacctaccttgtacagggggacaacagttggaaacgactgctaataccgcataagcgcacagcatcgcatgangcagtgtgaaaagtttttcggtacaagatggacccgcgtctgattagctagttggtgaggtaacggcccaccaaggcgacgatcagtaaccgacctgagagggtgaccggccacattgggactgagacacggcccaaactcctacgggaggcagcagtggggaatattgcacaatgggcgaaagcctgatgcagcgacgccgcgtgagcgaagaagtatttcggtatgtaaagctctatcagcagggaagataatgacggtacctgactaagaagcaccggctaaatacgtgccagcagccgcggtaatacgtatggtgcaagcgttatccggatttactgggtgtaaagggagcgtaggcggttttacaagtctgatgtgaaagcccggggctcaactccggtattgcattggaaactgtagaactagagtgtcggaggggtaagtggaattcctagtgtagcggtgaaatgcgtagatattaggaggaacaccagtggcgaaggcggcttactggacgattactgacgctgaggctcgaaagcgtggggagcaaacaggattagataccctggtagtccacgccgtaaacgatgaatactaggtgttggcttccatagggagtcggtgccgcagctaacgcaataagtattccacctggggagtacgttcgcaagaatgaaactcaaaggaattgacggggacccgcacaagcggtggagcatgtggtttaattcgaagcaacgcgaagaaccttaccaaatcttgacatcccactgacaaagtatgtaatgtactcttccttcgggacagtggtgacaggtggtgcatggttgtcgtcagctcgtgtcgtgagatgttgggttaagtcccgcaacgagcgcaacccttatctttagtagccagcatttcggatgggcactctagagagactgcccgggtgaaccgggaggaaggtggggatgacgtcaaatcatcatgccccttatgatttgggctacacacgtgctacaatggcgtaaacaaagggaagcaattgggtgaccatgagcaaatctcaaaaataacgtctcagttcggattgtagtctgcaactcgactacatgaagctggaatcgctagtaatcgcgaatcagaatgtcgcggtgaatacgttcccgggtcttgtacacaccgcccgtcacaccatgggagttgggaatgcccgaagtctgtgacccaacccgtaaggagggagcagccgaaggcaggctcgataactggggtg

SEQ ID NO: 2673 - DNA, 1423 bp, Pseudobutyrivibrio xylanivorans
  misc_feature (971)..(971): n is a, c, g, or t
  misc_feature (1043)..(1043): n is a, c, g, or t
  misc_feature (1203)..(1203): n is a, c, g, or t
acatgcatgtcgaacgaagcaatttcttacgatcccttcggggtgacgagttattgactcgagtggcggacgggtgagtaacgcgtgggtaacctgccttgtacagggggacaacagttggaaacgactgctaataccgcataagcgcacagcatcgcatgatgcagtgtgaaaagttttttcggtacaagatggacccgcgtctgattagctagttggtgaggtaacggcccaccaaggctacgatcagtagccgacctgaaagggtgaccggccacattgggactgagacacggcccaaactcctacgggaggcagcagtggggaatattgcacaatgggcgcaagcctgatgcagcgacgccgcgtgagcgaagaagtatttcggtatgtaaagctctatcagcagggaagataatgacggtacctgagtaagaagccccggctaactacgtgccagcagccgcggtcgtatggtgcaagcgttatccggatttactgggtgtaaagggagcgtaggcggttttacaagtctgatgtgaaagcccggggctcaactccggtattgcattggaaactgtagaactagagtgtcggaggggtaagtggaattcctagtgtagcggtgaaatgcgtagatattaggaggaacaccagtggcgaaggcggcttactggacgattactgacgctgaggctcgaaagcgtggggagcaaacaggattagataccctggtagtccacgccgtaaacgatgaatactaggtgttggcttccatagggagtcggtgccgcagctaacgcaataagtattccacctggggagtacgttcgcaagaatgaaactcaaaggaattgacggggacccgcacaagcggtggagcatgtggtttaattcgaagcaacgcgaagaaccttaccaaatcttgacatcctcttgacaaagatgtaatgtctctttcttcgggacangagtgacaggtggtgcatggttgtcgtcagctcgtgtcgagagaagttgggtcaagtcccgcacgagcgcancccttgtccttagtagccagcaattcggttgggcactctagggagactgcccgggtgaaccgggaggaaggtggggatgacgtcaaatcatcatgccccttatgatttgggctacacacgtgctacaatggcgtaaacaaagggaagcaatcgggtgacngtgagcaaatctcaaaaataacgtctcagttcggattgtagtctgcaactcgactacatgaagctggaatcgctagtaatcgcgaatcagaatgtcgcggtgaatacgttcccgggtcttgtacacaccgcccgtcacaccatgggagttgggaatgcccgaagtctgtgacccaaccgtaaggagggagcagccgaaggcaggctcgataactggggtg

SEQ ID NO: 2674 - DNA, 1459 bp, Pseudocitrobacter faecalis
gaacgctggcggcaggcctaacacatgcaagtcgaacggtaacagaaagcagcttgctgctttgctgacgagtggcggacgggtgagtaatgtctgggaaactgcctgatggagggggataactactggaaacggtagctaataccgcataacgtcgcaagaccaaagagggggaccttcgggcctcttgccatcggatgtgcccagatgggattagctagtaggtggggtaatggctcacctaggcgacgatccctagctggtctgagaggatgaccagccacactggaactgagacacggtccagactcctacgggaggcagcagtggggaatattgcacaatgggcgcaagcctgatgcagccatgccgcgtgtatgaagaaggccttcgggttgtaaagtactttcagcgaggaggaaggtgttgtggttaataaccacagcaattgacgttactcgcagaagaagcaccggctaactccgtgccagcagccgcggtaatacggagggtgcaagcgttaatcggaattactgggcgtaaagcgcacgcaggcggtttgttaagtcagatgtgaaatccccgggctcaacctgggaactgcatttgaaactggcaagcttgagtctcgtagaggggggtagaattccaggtgtagcggtgaaatgcgtagagatctggaggaataccggtggcgaaggcggccccctggacgaagactgacgctcaggtgcgaaagcgtggggagcaaacaggattagataccctggtagtccacgctgtaaacgatgtcgacttggaggttgtgcccttgaggcgtggcttccggagctaacgcgttaagtcgaccgcctggggagtacggccgcaaggttaaaactcaaatgaattgacgggggcccgcacaagcggtggagcatgtggtttaattcgatgcaacgcgaagaaccttacctggtcttgacatccacagaacttagcagagatgctttggtgccttcgggaactgtgagacaggtgctgcatggctgtcgtcagctcgtgttgtgaaatgttgggttaatgcccgcaacgagcgcaacccttatcctttgttgccagcggttcggccgggaactcaaaggagactgccagtgataaactggaggaaggtggggatgacgtcaagtcatcatggcccttacgaccagggctacacacgtgctacaatggcatatacaaagagaagcgacctcgcgagagcaagcggacctcataaagtatgtcgtagtccggattggagtctgcaactcgactccatgaagtcggaatcgctagtaatcgtagatcagaatgctacggtgaatacgttcccgggccttgtacacaccgcccgtcacaccatgggagtgggttgcaaaagaagtaggtagcttaaccttcgggagggcgcttaccactttgtgattcatgactgggg

SEQ ID NO: 2675 - DNA, 1386 bp, Pseudofulvimonas gallinarii
  misc_feature (812)..(812): n is a, c, g, or t
  misc_feature (945)..(945): n is a, c, g, or t
  misc_feature (1162)..(1162): n is a, c, g, or t
  misc_feature (1235)..(1235): n is a, c, g, or t
  misc_feature (1253)..(1253): n is a, c, g, or t
  misc_feature (1275)..(1275): n is a, c, g, or t
gcagtcgaacggcagcgcggacttcggtctggcggcgagtggcggacgggtgaggaatgcatcggaatctgccccgacgtgggggataacttggggaaactcaagctaataccgcatacgtcctaacggggaaagcaggggaccttcgggccttgcgcggcgggatgagccgatgccggattagctagttggcggggtaaaggcccaccaaggcgacgatccgtagctggtctgagaggatgatcagccacaccgggactgagacacggcccggactcctacgggaggcagcagtggggaatattggacaatgggcgcaagcctgatccagcaatgccgcgtgtgtgaagaaggccttcgggttgtaaagcacttttatcaggaaagaaatcccatgggttaataccctgtggggatgacggtacctgaggaataagcaccggctaacttcgtgccagcagccgcggtaatacgaagggtgcaagcgttaatcggaattactgggcgtaaagggtgcgtaggcggttcgttaagttggatgtgaaagccctgggctcaacctgggaatggcatccaaaactggcgggctggagtgcggtagaggatggtggaattcccggtgtagcggtgaaatgcgtagagatcgggaggaacatcgatggcgaaggcagccatctggaccagcactgacgctgaggcacgaaagcgtggggagcaaacaggattagataccctggtagtccacgccctaaacgatgcgaactggatgttgtgggcaactaggccctcagtatcgaagctaacgcgttaanttcgccgcctggggagtacggtcgcaagactgaaactcaaaggaattgacgggggcccgcacaagcggtggagtatgtggtttaattcgatgcaacgcgaagaaccttacctggccttgacatgtccggaatnctgcagagatgcgggagtgccttcgggaatcggaacacaggtgctgcatggctgtcgtcagctcgtgtcgtgagatgttgggttaagtcccgcaacgagcgcaacccttgtccctagttgccagcacgtaatggtgggaactctagggagaccgccggtgacaaaccggaggaaggtggggatgacgtcaagtcatcatggcccttacggccagggntacacacgtactacaatggaacgtacagagggttgcgataccgcgaggtggagccaatcccagaaaacgtttntcagtccggatcggagtntgcaactcgactccgtgaagtnggaatcgctagtaatcgcagatcagaatgctgcggtgaatacgttcccgggccttgtacacaccgcccgtcacaccatgggagtgggctgctccagaagccgttagcctaa

SEQ ID NO: 2676 - DNA, 1456 bp, Pseudohaliea rubra
attgaacgctggcggcaggcctaacacatgcaagtcgagcgcgaaaggccttcgggttgagtagagcggcggacgggtgagtaacgcgtaggaatctacctggtagtgggggacaactcggggaaactcgagctaataccgcatacgccctgagggggaaagcgggggatcttcggacctcgcgctattggatgagcctgcgttggattagctagttggtggggtaaaggcctaccaaggcgacgatccatagctggtctgagaggatgatcagccacaccgggactgagacacggcccggactcctacgggaggcagcagtggggaatattgcgcaatgggggaaaccctgacgcagccatgccgcgtgtgtgaagaaggccttcgggttgtaaagcactttcacttgggaagaaaagtttgtcgttaatagcggcaagccgtgacattaccttgagaagaagcaccggctaactccgtgccagcagccgcggtaatacggagggtgcaagcgttaatcggaattactgggcgtaaagcgcgcgtaggcggtttgttaagtcggatgtgaaagccccgggctcaacctgggaattgcacccgatactggccgactggagtgcgagagagggaggtagaattccacgtgtagcggtgaaatgcgtagatatgtggaggaataccggtggcgaaggcggcctcctggctcgacactgacgctgaggtgcgaaagcgtggggagcaaacaggattagataccctggtagtccacgccgtaaacgatgtctactagccgttggggaacttgagtccttggtggcgcagttaacgcgataagtagaccgcctggggagtacggccgcaaggttaaaactcaaatgaattgacgggggcccgcacaagcggtggagcatgtggtttaattcgatgcaacgcgaagaaccttaccaggccttgacatccttggaatcctgcagagatgcgggagtgccttcgggaatcaagtgacaggtgctgcatggctgtcgtcagctcgtgtcgtgagatgttgggttaagtcccgtaacgagcgcaacccttgtcctttgttgccagcacgtaatggtgggaactcaaaggagactgccggtgacaaaccggaggaaggtggggacgacgtcaagtcatcatggcccttacggcctgggctacacacgtgctacaatggaacgcacagagggcagcaaccccgcgagggtgagcgaatcccacaaaacgtttcgtagtccggatcggagtctgcaactcgactccgtgaagtcggaatcgctagtaatcgcgaatcagaatgtcgcggtgaatacgttcccgggccttgtacacaccgcccgtcacaccatgggagtgggttgctccagaagtggttagtctaaccttcggggggacgatcaccacggagtgattcatgactggggtg

SEQ ID NO: 2677 - DNA, 1461 bp, Pseudohongiella acticola
attgaacgctggcggcaggcttaacacatgcaagtcgagcggaaacgatgggagcttgctcccaggcgtcgagcggcggacgggtgagtaacgcgtaggaatctgcctggtagtgggggatagctcggggaaactcgaattaataccgcatacgccctacgggggaaagcaggggatcttcggaccttgcgctatcagatgagcctgcgtcggattagctagttggtggggtaaaggcccaccaaggcgacgatccgtaactggtctgagaggatgatcagtcacaccggaactgagacacggtccggactcctacgggaggcagcagtggggaatattggacaatgggggcaaccctgatccagccatgccgcgtgtgtgaagaaggccttcgggttgtaaagcactttaagcagggaggaaaggggcaagactaataatcttgtcagttgacgttacctgcagaataagcaccggctaacttcgtgccagcagccgcggtaatacgaagggtgcaagcgttaatcggaattactgggcgtaaagcgcgcgtaggcggtttggttagttggatgtgaaagcccagggctcaaccttggaactgcatccaatactgccaggctagagtacgggagaggggggtagaattccacgtgtagcggtgaaatgcgtagagatgtggaggaataccggtggcgaaggcggccccctggatcgatactgacgctgaggtgcgaaagcgtggggagcaaacaggattagataccctggtagtccacgccgtaaacgatgtcaactagccgttgggagcgtaatgctctgagtggcgcagctaacgcactaagttgaccgcctggggagtacggtcgcaagattaaaactcaaatgaattgacgggggcccgcacaagcggtggagcatgtggtttaattcgacgcaacgcgaagaaccttacctggtcttgacatcccaagaactttccagagatggattggtgccttcgggaacttggagacaggtgctgcatggctgtcgtcagctcgtgtcgtgagatgttgggttaagtcccgtaacgagcgcaacccttgtccttatttgccatcatttagttgggcactctaaggagactgccggtgacaaaccggaggaaggtggggacgacgtcaagtcatcatggcccttacgaccagggctacacacgtgctacaatggttcgtacaaagggttgccaagccgcgaggtggagctaatcccataaaacgaatcgtagtccggatcggagtctgcaactcgactccgtgaagtcggaatcgctagtaatcgtaaatcagaatgttacggtgaatacgttcccgggccttgtacacaccgcccgtcacaccatgggagtgggttgcaaaagaagtgggtagcataaccttcgggagtgcgctcaccactttgtgattcatgactggggtg

SEQ ID NO: 2678 - DNA, 1459 bp, Pseudohongiella spirulinae
attgaacgctggcggcaggcttaacacatgcaagtcgagcggtaacaggggtagcttgctacccgctgacgagcggcgaacgggtgagtaacgcgtaggaatctgcctgatagagggggatagcccggggaaacccggattaataccgcatacgccctacgggggaaagcaggggatcttcggaccttgcgctatcagatgagcctgcgtcggattagctagttggtggggtaaaggcctaccaaggcgacgatccgtagctggtctgagaggatgatcagccacaccggaactgagacacggtccggactcctacgggaggcagcagtggggaatattggacaatgggggcaaccctgatccagccatgccgcgtgtgtgaagaaggccttcgggttgtaaagcactttaagcagggaggaaagggcaacggttaatacccgttgcagttgacgttacctgcagaataagcaccggctaacttcgtgccagcagccgcggtaatacgaagggtgcaagcgttaatcggaattactgggcgtaaagcgcgcgtaggcggtttggtaagtgtgatgtgaaagcccagggctcaaccttggaactgcatcacatactgtcaggctagagtacgggagaggggggtagaattccacgtgtagcggtgaaatgcgtagagatgtggaggaataccggtggcgaaggcggccccctggatcgatactgacgctgaggtgcgaaagcgtggggagcaaacaggattagataccctggtagtccacgccgtaaacgatgtcaactagccgttgggagcgtaatgctctgagtggcgcagctaacgcactaagttgaccgcctggggagtacggtcgcaagattaaaactcaaatgaattgacgggggcccgcacaagcggtggagcatgtggtttaattcgacgcaacgcgaagaaccttacctggtcttgacatccagagaactttccagagatggattggtgccttcgggaactctgagacaggtgctgcatggctgtcgtcagctcgtgtcgtgagatgttgggttaagtcccgtaacgagcgcaacccttgtccttatttgccatcatttagttgggcactctaaggagactgccggtgacaaaccggaggaaggtggggacgacgtcaagtcatcatggcccttacgaccagggctacacacgtgctacaatggggcgtacaaagggttgccaagccgcgaggtggagctaatcccataaaacgtctcgtagtccggattggagtctgcaactcgactccatgaagtcggaatcgctagtaatcgtaaatcagaatgttacggtgaatacgttcccgggccttgtacacaccgcccgtcacaccatgggagtgggttgcaaaagaagtgggtagtctaacttcggaggacgctcaccactttgtgattcatgactggggtg

SEQ ID NO: 2679 - DNA, 1459 bp, Pseudomonas abietaniphila
attgaacgctggcggcaggcctaacacatgcaagtcgagcggatgaagggagcttgctccctgattcagcggcggacgggtgagtaatgcctaggaatctgcctggtagtgggggacaacgtctcgaaagggacgctaataccgcatacgtcctacgggagaaagtgggggatcttcggacctcacgctatcagatgagcctaggtcggattagctagttggtgaggtaatggctcaccaaggcgacgatccgtaactggtctgagaggatgatcagtcacactggaactgagacacggtccagactcctacgggaggcagcagtggggaatattggacaatgggcgaaagcctgatccagccatgccgcgtgtgtgaagaaggtcttcggattgtaaagcactttaagttgggaggaagggcattaacctaatacgttagtgttttgacgttaccgacagaataagcaccggctaactctgtgccagcagccgcggtaatacagagggtgcaagcgttaatcggaattactgggcgtaaagcgcgcgtaggtggtttgttaagttgaatgtgaaatccccgggctcaacctgggaactgcatccaaaactggcaagctagagtagggcagagggtggtggaatttcctgtgtagcggtgaaatgcgtagatataggaaggaacaccagtggcgaaggcgaccacctgggctcatactgacactgaggtgcgaaagcgtggggagcaaacaggattagataccctggtagtccacgccgtaaacgatgtcaactagccgttgggagtcttgaactcttagtggcgcagctaacgcattaagttgaccgcctggggagtacggccgcaaggttaaaactcaaatgaattgacgggggcccgcacaagcggtggagcatgtggtttaattcgaagcaacgcgaagaaccttaccaggccttgacatccaatgaactttccagagatggattggtgccttcgggaacattgagacaggtgctgcatggctgtcgtcagctcgtgtcgtgagatgttgggttaagtcccgtaacgagcgcaacccttgtccttagttaccagcacgttatggtgggcactctaaggagactgccggtgacaaaccggaggaaggtggggatgacgtcaagtcatcatggcccttacggcctgggctacacacgtgctacaatggtcggtacagagggttgccaagccgcgaggtggagctaatcccacaaaaccgatcgtagtccggatcgcagtctgcaactcgactgcgtgaagtcggaatcgctagtaatcgcgaatcagaatgtcgcggtgaatacgttcccgggccttgtacacaccgcccgtcacaccatgggagtgggttgcaccagaagtagctagtctaaccttcggggggacggttaccacggtgtgattcatgactggggtg

SEQ ID NO: 2680 - DNA, 1459 bp, Pseudomonas agarici
attgaacgctggcggcaggcctaacacatgcaagtcgagcggatgaagggagcttgctcccggattcagcggcggacgggtgagtaatgcctaggaatctgcctggtagtgggggacaacgtttcgaaaggaacgctaataccgcatacgtcctacgggagaaagcaggggaccttcgggccttgcgctatcagatgagcctaggtcggattagctagttggtgaggtaaaggctcaccaaggcgacgatccgtaactggtctgagaggatgatcagtcacactggaactgagacacggtccagactcctacgggaggcagcagtggggaatattggacaatgggcgaaagcctgatccagccatgccgcgtgtgtgaagaaggtcttcggattgtaaagcactttaagttgggaggaagggcattaacctaatacgttagtgttttgacgttaccgacagaataagcaccggctaactctgtgccagcagccgcggtaatacagagggtgcaagcgttaatcggaattactgggcgtaaagcgcgcgtaggtggttggttaagttggatgtgaaatccccgggctcaacctgggaactgcatccaaaactggccagctagagtagggtagagggtggtggaatttcctgtgtagcggtgaaatgcgtagatataggaaggaacaccagtggcgaaggcgaccacctggactcatactgacactgaggtgcgaaagcgtggggagcaaacaggattagataccctggtagtccacgccgtaaacgatgtcaactagccgttgggaaccttgagttcttagtggcgcagctaacgcattaagttgaccgcctggggagtacggccgcaaggttaaaactcaaatgaattgacgggggcccgcacaagcggtggagcatgtggtttaattcgaagcaacgcgaagaaccttaccaggccttgacatccaatgaatcttccagagatggaggagtgccttcgggaacattgagacaggtgctgcatggctgtcgtcagctcgtgtcgtgagatgttgggttaagtcccgtaacgagcgcaacccttgtccttagttaccagcacgtgatggtgggcactctaaggagactgccggtgacaaaccggaggaaggtggggatgacgtcaagtcatcatggcccttacggcctgggctacacacgtgctacaatggtcggtacaaagggttgccaagccgcgaggtggagctaatcccataaaaccgatcgtagtccggatcgcagtctgcaactcgactgcgtgaagtcggaatcgctagtaatcgcgaatcagaatgtcgcggtgaatacgttcccgggccttgtacacaccgcccgtcacaccatgggagtgggttgcaccagaagtagctagtctaaccttcgggaggacggttaccacggtgtgattcatgactggggtg

SEQ ID NO: 2681 - DNA, 1459 bp, Pseudomonas alcaliphila
attgaacgctggcggcaggcctaacacatgcaagtcgagcggatgacgggagcttgctccctgatttagcggcggacgggtgagtaatgcctaggaatctgcctggtagtgggggataacgttccgaaaggaacgctaataccgcatacgtcctacgggagaaagcaggggaccttcgggccttgcgctatcagatgagcctaggtcggattagctagttggtgaggtaatggctcaccaaggcgacgatccgtaactggtctgagaggatgatcagtcacactggaactgagacacggtccagactcctacgggaggcagcagtggggaatattggacaatgggcgaaagcctgatccagccatgccgcgtgtgtgaagaaggtcttcggattgtaaagcactttaagttgggaggaagggcattaacctaatacgttagtgttttgacgttaccgacagaataagcaccggctaacttcgtgccagcagccgcggtaatacgaagggtgcaagcgttaatcggaattactgggcgtaaagcgcgcgtaggtggttcgttaagttggatgtgaaagccccgggctcaacctgggaactgcatccaaaactggcgagctagagtacggtagagggtggtggaatttcctgtgtagcggtgaaatgcgtagatataggaaggaacaccagtggcgaaggcgaccacctggactgatactgacactgaggtgcgaaagcgtggggagcaaacaggattagataccctggtagtccacgccgtaaacgatgtcaactagccgttgggttccttgagaacttagtggcgcagctaacgcattaagttgaccgcctggggagtacggccgcaaggttaaaactcaaatgaattgacgggggcccgcacaagcggtggagcatgtggtttaattcgaagcaacgcgaagaaccttacctggccttgacatgctgagaactttccagagatggattggtgccttcgggaactcagacacaggtgctgcatggctgtcgtcagctcgtgtcgtgagatgttgggttaagtcccgtaacgagcgcaacccttgtccttagttaccagcacgttatggtgggcactctaaggagactgccggtgacaaaccggaggaaggtggggatgacgtcaagtcatcatggcccttacggccagggctacacacgtgctacaatggtcggtacaaagggttgccaagccgcgaggtggagctaatcccataaaaccgatcgtagtccggatcgcagtctgcaactcgactgcgtgaagtcggaatcgctagtaatcgtgaatcagaatgtcacggtgaatacgttcccgggccttgtacacaccgcccgtcacaccatgggagtgggttgctccagaagtagctagtctaaccttcggggggacggttaccacggagtgattcatgactggggtg

SEQ ID NO: 2682 - DNA, 1459 bp, Pseudomonas alkylphenolica
attgaacgctggcggcaggcctaacacatgcaagtcgagcggatgagaagagcttgctcttcgattcagcggcggacgggtgagtaatgcctaggaatctgcctggtagtgggggacaacgtttcgaaaggaacgctaataccgcatacgtcctacgggagaaagcaggggaccttcgggccttgcgctatcagatgagcctaggtcggattagctagttggtgaggtaatggctcaccaaggcgacgatccgtaactggtctgagaggatgatcagtcacactggaactgagacacggtccagactcctacgggaggcagcagtggggaatattggacaatgggcgaaagcctgatccagccatgccgcgtgtgtgaagaaggtcttcggattgtaaagcactttaagttgggaggaagggcattaacctaatacgttagtgttttgacgttaccaacagaataagcaccggctaactctgtgccagcagccgcggtaatacagagggtgcaagcgttaatcggaattactgggcgtaaagcgcgcgtaggtggttcgttaagttggatgtgaaatccccgggctcaacctgggaactgcatccaaaactggcgagctagagtagggcagagggtggtggaatttcctgtgtagcggtgaaatgcgtagatataggaaggaacaccagtggcgaaggcgaccacctgggctcatactgacactgaggtgcgaaagcgtggggagcaaacaggattagataccctggtagtccacgccgtaaacgatgtcaactagccgttggaatccttgagattttagtggcgcagctaacgcattaagttgaccgcctggggagtacggccgcaaggttaaaactcaaatgaattgacgggggcccgcacaagcggtggagcatgtggtttaattcgaagcaacgcgaagaaccttaccaggccttgacatgcagagaactttccagagatggattggtgccttcgggaactctgacacaggtgctgcatggctgtcgtcagctcgtgtcgtgagatgttgggttaagtcccgtaacgagcgcaacccttgtccttagttaccagcacgttatggtgggcactctaaggagactgccggtgacaaaccggaggaaggtggggatgacgtcaagtcatcatggcccttacggcctgggctacacacgtgctacaatggtcggtacagagggttgccaagccgcgaggtggagctaatctcacaaaaccgatcgtagtccggatcgcagtctgcaactcgactgcgtgaagtcggaatcgctagtaatcgcgaatcagaatgtcgcggtgaatacgttcccgggccttgtacacaccgcccgtcacaccatgggagtgggttgcaccagaagtagctagtctaaccttcgggaggacggttaccacggtgtgattcatgactggggtg

SEQ ID NO: 2683 - DNA, 1461 bp, Pseudomonas amygdali
attgaacgctggcggcaggcctaacacatgcaagtcgagcggcagcacgggtacttgtacctggtggcgagcggcggacgggtgagtaatgcctaggaatctgcctggtagtgggggataacgctcggaaacggacgctaataccgcatacgtcctacgggagaaagcaggggaccttcgggccttgcgctatcagatgagcctaggtcggattagctagttggtgaggtaatggctcaccaaggcgacgatccgtaactggtctgagaggatgatcagtcacactggaactgagacacggtccagactcctacgggaggcagcagtggggaatattggacaatgggcgaaagcctgatccagccatgccgcgtgtgtgaagaaggtcttcggattgtaaagcactttaagttgggaggaagggcagttacctaatacgtgattgttttgacgttaccgacagaataagcaccggctaactctgtgccagcagccgcggtaatacagagggtgcaagcgttaatcggaattactgggcgtaaagagcgcgtaggtggtttgttaagttggatgtgaaatccccgggctcaacctgggaactgcatccaaaactggcaagctagagtatggtagagggtggtggaatttcctgtgtagcggtgaaatgcgtagatataggaaggaacaccagtggcgaaggcgaccacctggactgatactgacactgaggtgcgaaagcgtggggagcaaacaggattagataccctggtagtccacgccgtaaacgatgtcaactagccgttgggagccttgagctcttagtggcgcagctaacgcattaagttgaccgcctggggagtacggccgcaaggttaaaactcaaatgaattgacgggggcccgcacaagcggtggagcatgtggtttaattcgaagcaacgcgaagaaccttaccaggccttgacatccaatgaactttccagagatggattggtgccttcgggaacattgagacaggtgctgcatggctgtcgtcagctcgtgtcgtgagatgttgggttaagtcccgtaacgagcgcaacccttgtccttagttaccagcacgtaatggtgggcactctaaggagactgccggtgacaaaccggaggaaggtggggatgacgtcaagtcatcatggcccttacggcctgggctacacacgtgctacaatggtcggtacagagggttgccaagccgcgaggtggagctaatctcacaaaaccgatcgtagtccggatcgcagtctgcaactcgactgcgtgaagtcggaatcgctagtaatcgcgaatcagaatgtcgcggtgaatacgttcccgggccttgtacacaccgcccgtcacaccatgggagtgggttgcaccagaagtagctagtctaaccttcggggggacggttaccacggtgtgattcatgactggggtg

SEQ ID NO: 2684 - DNA, 1459 bp, Pseudomonas anguilliseptica
attgaacgctggcggcaggcctaacacatgcaagtcgagcggtagagagaagcttgcttctcttgagagcggcggacgggtgagtaatgcctaggaatctgcctagtggtggggggtaacgttcggaaacggacgctaataccgcatacgtcctacgggagaaagcgggggatcttcggacctcgcgccattagatgagcctaggtcggattagctagttggtgaggtaatggctcaccaaggcgacgatccgtaactggtctgagaggatgatcagtcacactggaactgagacacggtccagactcctacgggaggcagcagtggggaatattggacaatgggcgaaagcctgatccagccatgccgcgtgtgtgaagaaggtcttcggattgtaaagcactttaagttgggaggaagggcagtaacctaatacgttattgttttgacgttaccgacagaataagcaccggctaacttcgtgccagcagccgcggtaatacgaagggtgcaagcgttaatcggaattactgggcgtaaagcgcgcgtaggtggttcagtaagttggaagtgaaatccccaggctcaacctgggaactgctttcaaaactgctgagctagagtacggtagagggtggtggaatttcctgtgtagcggtgaaatgcgtagatataggaaggaacaccagtggcgaaggcgaccacctggactgatactgacactgaggtgcgaaagcgtggggagcaaacaggattagataccctggtagtccacgccgtaaacgatgtcaactagccgttggaatccttgagattttagtggcgcagctaacgcattaagttgaccgcctggggagtacggccgcaaggttaaaactcaaatgaattgacgggggcccgcacaagcggtggagcatgtggtttaattcgaagcaacgcgaagaaccttacctggccttgacatgctgagagctttccagagatggattggtgccttcgggagctcagacacaggtgctgcatggctgtcgtcagctcgtgtcgtgagatgttgggttaagtcccgtaacgagcgcaacccttgtccttagttaccagcacgttatggtggggactctaaggagactgccggtgacaagccggaggaaggtggggatgacgtcaagtcatcatggcccttacggccggggctacacacgtgctacaatggtcggcacaaagggttgccaagccgcgaggtggagctaatcccataaaaccgatcgtagtccggatcgcagtctgcaactcgactgcgtgaagtcggaatcgctagtaatcgtgaatcagaatgtcacggtgaatacgttcccgggccttgtacacaccgcccgtcacaccatgggagtgggttgcaccagaagtagctagtctaaccgcaagggggacggttaccacggtgtgattcatgactggggtg

SEQ ID NO: 2685 - DNA, 1459 bp, Pseudomonas antarctica
attgaacgctggcggcaggcctaacacatgcaagtcgagcggtagagagaagcttgcttctcttgagagcggcggacgggtgagtaatgcctaggaatctgcctggtagtgggggataacgttcggaaacggacgctaataccgcatacgtcctacgggagaaagcaggggaccttcgggccttgcgctatcagatgagcctaggtcggattagctagttggtgaggtaatggctcaccaaggctacgatccgtaactggtctgagaggatgatcagtcacactggaactgagacacggtccagactcctacgggaggcagcagtggggaatattggacaatgggcgaaagcctgatccagccatgccgcgtgtgtgaagaaggtcttcggattgtaaagcactttaagttgggaggaagggcagttacctaatacgtgattgttttgacgttaccgacagaataagcaccggctaactctgtgccagcagccgcggtaatacagagggtgcaagcgttaatcggaattactgggcgtaaagcgcgcgtaggtggtttgttaagttggatgtgaaatccccgggctcaacctgggaactgcattcaaaactgactgactagagtatggtagagggtggtggaatttcctgtgtagcggtgaaatgcgtagatataggaaggaacaccagtggcgaaggcgaccacctggactaatactgacactgaggtgcgaaagcgtggggagcaaacaggattagataccctggtagtccacgccgtaaacgatgtcaactagccgttgggagccttgagctcttagtggcgcagctaacgcattaagttgaccgcctggggagtacggccgcaaggttaaaactcaaatgaattgacgggggcccgcacaagcggtggagcatgtggtttaattcgaagcaacgcgaagaaccttaccaggccttgacatccaatgaactttctagagatagattggtgccttcgggaacattgagacaggtgctgcatggctgtcgtcagctcgtgtcgtgagatgttgggttaagtcccgtaacgagcgcaacccttgtccttagttaccagcacgtaatggtgggcactctaaggagactgccggtgacaaaccggaggaaggtggggatgacgtcaagtcatcatggcccttacggcctgggctacacacgtgctacaatggtcggtacagagggttgccaagccgcgaggtggagctaatcccacaaaaccgatcgtagtccggatcgcagtctgcaactcgactgcgtgaagtcggaatcgctagtaatcgcgaatcagaatgtcgcggtgaatacgttcccgggccttgtacacaccgcccgtcacaccatggcagtgggttgcaccagaagtagctagtctaaccttcgggaggacggttaccacggtgtgattcatgactggggtg

SEQ ID NO: 2686 - DNA, 1458 bp, Pseudomonas argentinensis
attgaacgctggcggcaggcctaacacatgcaagtcgagcggttgacgggagcttgctccctgattcagcggcggacgggtgagtaatgcctaggaatctgcctattagtgggggacaacgtttcgaaaggaacgctaataccgcatacgtcctacgggagaaagcaggggaccttcgggccttgcgctaatagatgagcctaggtcggattagctagttggtggggtaaaggctcaccaaggcgacgatccgtaactggtctgagaggatgatcagtcacactggaactgagacacggtccagactcctacgggaggcagcagtggggaatattggacaatgggcgaaagcctgatccagccatgccgcgtgtgtgaagaaggtcttcggattgtaaagcactttaagttgggaggaagggttgtagattaatactctgcaattttgacgttaccgacagaataagcaccggctaactctgtgccagcagccgcggtaatacagagggtgcaagcgttaatcggaattactgggcgtaaagcgcgcgtaggtggtttgttaagttggatgtgaaagccccgggctcaacctgggaactgcatccaaaactggcaagctagagtacggtagagggtggtggaatttcctgtgtagcggtgaaatgcgtagatataggaaggaacaccagtggcgaaggcgaccacctggactgatactgacactgaggtgcgaaagcgtggggagcaaacaggattagataccctggtagtccacgccgtaaacgatgtcaactagccgttggaatccttgagattttagtggcgcagctaacgcattaagttgaccgcctggggagtacggccgcaaggttaaaactcaaatgaattgacgggggcccgcacaagcggtggagcatgtggtttaattcgaagcaacgcgaagaaccttacctggccttgacatgctgagaactttccagagatggattggtgccttcgggaactcagacacaggtgctgcatggctgtcgtcagctcgtgtcgtgagatgttgggttaagtcccgtaacgagcgcaacccttgtccttagttaccagcacctcgggtgggaactctaaggagactgccggtgacaaaccggaggaaggtggggatgacgtcaagtcatcatggcccttacggccagggctacacacgtgctacaatggtcggtacaaagggttgccaagccgcgaggtggagctaatcccataaaaccgatcgtagtccggatcgcagtctgcaactcgactgcgtgaagtcggaatcgctagtaatcgtgaatcagaatgtcacggtgaatacgttcccgggccttgtacacaccgcccgtcacaccatgggagtgggttgcaccagaagtagctagtctaaccttcgggaggacggttaccacggtgtgattcatgactggggtg

SEQ ID NO: 2687 - DNA, 1459 bp, Pseudomonas arsenicoxydans
attgaacgctggcggcaggcctaacacatgcaagtcgagcggtagagagaagcttgcttctcttgagagcggcggacgggtgagtaatgcctaggaatctgcctggtagtgggggataacgctcggaaacggacgctaataccgcatacgtcctacgggagaaagcaggggaccttcgggccttgcgctatcagatgagcctaggtcggattagctagttggtgaggtaatggctcaccaaggcgacgatccgtaactggtctgagaggatgatcagtcacactggaactgagacacggtccagactcctacgggaggcagcagtggggaatattggacaatgggcgaaagcctgatccagccatgccgcgtgtgtgaagaaggtcttcggattgtaaagcactttaagttgggaggaagggcagttacctaatacgtatctgttttgacgttaccgacagaataagcaccggctaactctgtgccagcagccgcggtaatacagagggtgcaagcgttaatcggaattactgggcgtaaagcgcgcgtaggtggtttgttaagttggatgtgaaatccccgggctcaacctgggaactgcattcaaaactgacaagctagagtatggtagagggtggtggaatttcctgtgtagcggtgaaatgcgtagatataggaaggaacaccagtggcgaaggcgaccacctggactgatactgacactgaggtgcgaaagcgtggggagcaaacaggattagataccctggtagtccacgccgtaaacgatgtcaactagccgttgggagccttgagctcttagtggcgcagctaacgcattaagttgaccgcctggggagtacggccgcaaggttaaaactcaaatgaattgacgggggcccgcacaagcggtggagcatgtggtttaattcgaagcaacgcgaagaaccttaccaggccttgacatccaatgaactttccagagatggattggtgccttcgggaacattgagacaggtgctgcatggctgtcgtcagctcgtgtcgtgagatgttgggttaagtcccgtaacgagcgcaacccttgtccttagttaccagcacgtaatggtgggcactctaaggagactgccggtgacaaaccggaggaaggtggggatgacgtcaagtcatcatggcccttacggcctgggctacacacgtgctacaatggtcggtacagagggttgccaagccgcgaggtggagctaatcccagaaaaccgatcgtagtccggatcgcagtctgcaactcgactgcgtgaagtcggaatcgctagtaatcgcgaatcagaatgtcgcggtgaatacgttcccgggccttgtacacaccgcccgtcacaccatgggagtgggttgcaccagaagtagctagtctaaccttcgggaggacggttaccacggtgtgattcatgactggggtg

SEQ ID NO: 2688 - DNA, 1459 bp, Pseudomonas asplenii
attgaacgctggcggcaggcctaacacatgcaagtcgagcggatgagaagagcttgctcttcgattcagcggcggacgggtgagtaatgcctaggaatctgcctggtagtgggggacaacgtttcgaaaggaacgctaataccgcatacgtcctacgggagaaagcaggggaccttcgggccttgcgctatcagatgagcctaggtcggattagctagttggtgaggtaatggctcaccaaggcgacgatccgtaactggtctgagaggatgatcagtcacactggaactgagacacggtccagactcctacgggaggcagcagtggggaatattggacaatgggcgaaagcctgatccagccatgccgcgtgtgtgaagaaggtcttcggattgtaaagcactttaagttgggaggaagggcattaacctaatacgttagtgttttgacgttaccgacagaataagcaccggctaactctgtgccagcagccgcggtaatacagagggtgcaagcgttaatcggaattactgggcgtaaagcgcgcgtaggtggttcgttaagttggatgtgaaatccccgggctcaacctgggaactgcatccaaaactggcgagctagagtagggtagagggtggtggaatttcctgtgtagcggtgaaatgcgtagatataggaaggaacaccagtggcgaaggcgaccacctggactcatactgacactgaggtgcgaaagcgtggggagcaaacaggattagataccctggtagtccacgccgtaaacgatgtcaactagccgttgggaaccttgagttcttagtggcgcagctaacgcattaagttgaccgcctggggagtacggccgcaaggttaaaactcaaatgaattgacgggggcccgcacaagcggtggagcatgtggtttaattcgaagcaacgcgaagaaccttaccaggccttgacatgcagagaactttccagagatggattggtgccttcgggaactctgacacaggtgctgcatggctgtcgtcagctcgtgtcgtgagatgttgggttaagtcccgtaacgagcgcaacccttgtccttagttaccagcacgtcatggtgggcactctaaggagactgccggtgacaaaccggaggaaggtggggatgacgtcaagtcatcatggcccttacggcctgggctacacacgtgctacaatggtcggtacagagggttgccaagccgcgaggtggagctaatcccacaaaaccgatcgtagtccggatcgcagtctgcaactcgactgcgtgaagtcggaatcgctagtaatcgcgaatcagaatgtcgcggtgaatacgttcccgggccttgtacacaccgcccgtcacaccatgggagtgggttgcaccagaagtagctagtctaaccttcgggaggacggttaccacggtgtgattcatgactggggtg

SEQ ID NO: 2689 - DNA, 1459 bp, Pseudomonas asturiensis
attgaacgctggcggcaggcctaacacatgcaagtcgagcggtagagagaagcttgcttctcttgagagcggcggacgggtgagtaatgcctaggaatctgcctggtagtgggggataacgctcggaaacggacgctaataccgcatacgtcctacgggagaaagcaggggaccttcgggccttgcgctatcagatgagcctaggtcggattagctagttggtgaggtaatggctcaccaaggcgacgatccgtaactggtctgagaggatgatcagtcacactggaactgagacacggtccagactcctacgggaggcagcagtggggaatattggacaatgggcgaaagcctgatccagccatgccgcgtgtgtgaagaaggtcttcggattgtaaagcactttaagttgggaggaagggcattaacctaatacgttagtgttttgacgttaccgacagaataagcaccggctaactctgtgccagcagccgcggtaatacagagggtgcaagcgttaatcggaattactgggcgtaaagcgcgcgtaggtggtttgttaagttgaatgtgaaatccccgggctcaacctgggaactgcatccaaaactggcaagctagagtatggtagagggtggtggaatttcctgtgtagcggtgaaatgcgtagatataggaaggaacaccagtggcgaaggcgaccacctggactgatactgacactgaggtgcgaaagcgtggggagcaaacaggattagataccctggtagtccacgccgtaaacgatgtcaactagccgttggggaccttgagtctttagtggcgcagctaacgcattaagttgaccgcctggggagtacggccgcaaggttaaaactcaaatgaattgacgggggcccgcacaagcggtggagcatgtggtttaattcgaagcaacgcgaagaaccttaccaggccttgacatccaatgaaccttccagagatggaggggtgccttcgggagcattgagacaggtgctgcatggctgtcgtcagctcgtgtcgtgagatgttgggttaagtcccgtaacgagcgcaacccttgtccttagttaccagcacgtcatggtgggcactctaaggagactgccggtgacaaaccggaggaaggtggggatgacgtcaagtcatcatggcccttacggcctgggctacacacgtgctacaatggtcggtacagagggttgccaagccgcgaggtggagctaatctcacaaaaccgatcgtagtccggatcgcagtctgcaactcgactgcgtgaagtcggaatcgctagtaatcgcgaatcagaatgtcgcggtgaatacgttcccgggccttgtacacaccgcccgtcacaccatgggagtgggttgcaccagaagtagctagtctaaccttcggggggacggttaccacggtgtgattcatgactggggtg

SEQ ID NO: 2690 - DNA, 1461 bp, Pseudomonas avellanae
attgaacgctggcggcaggcctaacacatgcaagtcgagcggcagcacgggtacttgtacctggtggcgagcggcggacgggtgagtaatgcctaggaatctgcctggtagtgggggataacgctcggaaacggacgctaataccgcatacgtcctacgggagaaagcaggggaccttcgggccttgcgctatcagatgagcctaggtcggattagctagttggtgaggtaatggctcaccaaggcgacgatccgtaactggtctgagaggatgatcagtcacactggaactgagacacggtccagactcctacgggaggcagcagtggggaatattggacaatgggcgaaagcctgatccagccatgccgcgtgtgtgaagaaggtcttcggattgtaaagcactttaagttgggaggaagggcagttacctaatacgtatctgttttgacgttaccgacagaataagcaccggctaactctgtgccagcagccgcggtaatacagagggtgcaagcgttaatcggaattactgggcgtaaagcgcgcgtaggtggtttgttaagttgaatgtgaaatccccgggctcaacctgggaactgcatccaaaactggcaagctagagtatggtagagggtggtggaatttcctgtgtagcggtgaaatgcgtagatataggaaggaacaccagtggcgaaggcgaccacctggactgatactgacactgaggtgcgaaagcgtggggagcaaacaggattagataccctggtagtccacgccgtaaacgatgtcaactagccgttgggagccttgagctcttagtggcgcagctaacgcattaagttgaccgcctggggagtacggccgcaaggttaaaactcaaatgaattgacgggggcccgcacaagcggtggagcatgtggtttaattcgaagcaacgcgaagaaccttaccaggccttgacatccaatgaatcctttagagatagaggagtgccttcgggaacattgagacaggtgctgcatggctgtcgtcagctcgtgtcgtgagatgttgggttaagtcccgtaacgagcgcaacccttgtccttagttaccagcacgttaaggtgggcactctaaggagactgccggtgacaaaccggaggaaggtggggatgacgtcaagtcatcatggcccttacggcctgggctacacacgtgctacaatggtcggtacagagggttgccaagccgcgaggtggagctaatctcacaaaaccgatcgtagtccggatcgcagtctgcaactcgactgcgtgaagtcggaatcgctagtaatcgcgaatcagaatgtcgcggtgaatacgttcccgggccttgtacacaccgcccgtcacaccatgggagtgggttgcaccagaagtagctagtctaaccttcggggggacggttaccacggtgtgattcatgactggggtg

SEQ ID NO: 2691 - DNA, 1459 bp, Pseudomonas azotoformans
attgaacgctggcggcaggcctaacacatgcaagtcgagcggtagagagaagcttgcttctcttgagagcggcggacgggtgagtaatgcctaggaatctgcctggtagtgggggataacgttcggaaacggacgctaataccgcatacgtcctacgggagaaagcaggggaccttcgggccttgcgctatcagatgagcctaggtcggattagctagttggtggggtaatggctcaccaaggcgacgatccgtaactggtctgagaggatgatcagtcacactggaactgagacacggtccagactcctacgggaggcagcagtggggaatattggacaatgggcgaaagcctgatccagccatgccgcgtgtgtgaagaaggtcttcggattgtaaagcactttaagttgggaggaagggttgtagattaatactctgcaattttgacgttaccgacagaataagcaccggctaactctgtgccagcagccgcggtaatacagagggtgcaagcgttaatcggaattactgggcgtaaagcgcgcgtaggtggtttgttaagttggatgtgaaatccccgggctcaacctgggaactgcattcaaaactgactgactagagtatggtagagggtggtggaatttcctgtgtagcggtgaaatgcgtagatataggaaggaacaccagtggcgaaggcgaccacctggactaatactgacactgaggtgcgaaagcgtggggagcaaacaggattagataccctggtagtccacgccgtaaacgatgtcaactagccgttggaagccttgagcttttagtggcgcagctaacgcattaagttgaccgcctggggagtacggccgcaaggttaaaactcaaatgaattgacgggggcccgcacaagcggtggagcatgtggtttaattcgaagcaacgcgaagaaccttaccaggccttgacatccaatgaactttctagagatagattggtgccttcgggaacattgagacaggtgctgcatggctgtcgtcagctcgtgtcgtgagatgttgggttaagtcccgtaacgagcgcaacccttgtccttagttaccagcacgtaatggtgggcactctaaggagactgccggtgacaaaccggaggaaggtggggatgacgtcaagtcatcatggcccttacggcctgggctacacacgtgctacaatggtcggtacagagggttgccaagccgcgaggtggagctaatcccataaaaccgatcgtagtccggatcgcagtctgcaactcgactgcgtgaagtcggaatcgctagtaatcgcgaatcagaatgtcgcggtgaatacgttcccgggccttgtacacaccgcccgtcacaccatgggagtgggttgcaccagaagtagctagtctaaccttcgggaggacggttaccacggtgtgattcatgactggggtg

SEQ ID NO: 2692 - DNA, 1446 bp, Pseudomonas baetica
ggcaggcctaacacatgcaagtcgagcggatgaaaggagcttgctcctggattcagcggcggacgggtgagtaatgcctaggaatctgcctggtagtgggggacaacgtttcgaaaggaacgctaataccgcatacgtcctacgggagaaagcaggggaccttcgggccttgcgctatcagatgagcctaggtcggattagctagttggtgaggtaatggctcaccaaggcgacgatccgtaactggtctgagaggatgatcagtcacactggaactgagacacggtccagactcctacgggaggcagcagtggggaatattggacaatgggcgaaagcctgatccagccatgccgcgtgtgtgaagaaggtcttcggattgtaaagcactttaagttgggaggaagggcagtaaattaatactttgctgttttgacgttaccgacagaataagcaccggctaactctgtgccagcagccgcggtaatacagagggtgcaagcgttaatcggaattactgggcgtaaagcgcgcgtaggtggtttgttaagttggatgtgaaatccccgggctcaacctgggaactgcattcaaaactgacaagctagagtatggtagagggtggtggaatttcctgtgtagcggtgaaatgcgtagatataggaaggaacaccagtggcgaaggcgaccacctggactgatactgacactgaggtgcgaaagcgtggggagcaaacaggattagataccctggtagtccacgccgtaaacgatgtcaactagccgttgggagccttgagctcttagtggcgcagctaacgcattaagttgaccgcctggggagtacggccgcaaggttaaaactcaaatgaattgacgggggcccgcacaagcggtggagcatgtggtttaattcgaagcaacgcgaagaaccttaccaggccttgacatccaatgaactttccagagatggattggtgccttcgggaacattgagacaggtgctgcatggctgtcgtcagctcgtgtcgtgagatgttgggttaagtcccgtaacgagcgcaacccttgtccttagttaccagcacgttatggtgggcactctaaggagactgccggtgacaaaccggaggaaggtggggatgacgtcaagtcatcatggcccttacggcctgggctacacacgtgctacaatggtcggtacaaagggttgccaagccgcgaggtggagctaatcccataaaaccgatcgtagtccggatcgcagtctgcaactcgactgcgtgaagtcggaatcgctagtaatcgcgaatcagaatgtcgcggtgaatacgttcccgggccttgtacacaccgcccgtcacaccatgggagtgggttgcaccagaagtagctagtctaaccttcgggaggacggttaccacggtgtgattcatgactggggtg

SEQ ID NO: 2693 - DNA, 1459 bp, Pseudomonas balearica
attgaacgctggcggcaggcctaacacatgcaagtcgagcggcagcgggtccttcgggatgccggcgagcggcggacgggtgagtaatgcctaggaatctgcctggtagtgggggataactcggggaaactcgagctaataccgcatacgtcctacgggagaaagcgggggatcttcggacctcgcgctaccagatgagcctaggtcggattagctagttggtgaggtaaaggctcaccaaggcgacgatccgtagctggtctgagaggatgatcagccacactggaactgagacacggtccagactcctacgggaggcagcagtggggaatattggacaatgggcgaaagcctgatccagccatgccgcgtgtgtgaagaaggtcttcggattgtaaagcactttaagttgggaggaagggcagtaagctaataccttgctgttttgacgttaccgacagaataagcaccggctaacttcgtgccagcagccgcggtaatacgaagggtgcaagcgttaatcggaattactgggcgtaaagcgcgcgtaggtggtttgataagttggatgtgaaagccccgggctcaacctgggaattgcatccaaaactgtctggctagagtatggcagagggtggtggaatttcctgtgtagcggtgaaatgcgtagatataggaaggaacaccagtggcgaaggcgaccacctgggctaatactgacactgaggtgcgaaagcgtggggagcaaacaggattagataccctggtagtccacgccgtaaacgatgtcgactagccgttgggatccttgagatcttagtggcgcagctaacgcattaagtcgaccgcctggggagtacggccgcaaggttaaaactcaaatgaattgacgggggcccgcacaagcggtggagcatgtggtttaattcgaagcaacgcgaagaaccttaccaggccttgacatgcagagaactttccagagatggattggtgccttcgggaactctgacacaggtgctgcatggctgtcgtcagctcgtgtcgtgagatgttgggttaagtcccgtaacgagcgcaacccttgtccttagttaccagcacgttaaggtgggcactctaaggagactgccggtgacaaaccggaggaaggtggggatgacgtcaagtcatcatggcccttacggcctgggctacacacgtgctacaatggtcggtacaaagggttgccaagccgcgaggtggagctaatcccataaaaccgatcgtagtccggatcgcagtctgcaactcgactgcgtgaagtcggaatcgctagtaatcgtgaatcagaatgtcacggtgaatacgttcccgggccttgtacacaccgcccgtcacaccatgggagtgggttgctccagaagtagctagtctaaccttcggggggacggttaccacggagtgattcatgactggggtg

SEQ ID NO: 2694 - DNA, 1459 bp, Pseudomonas batumici
attgaacgctggcggcaggcctaacacatgcaagtcgagcggatgagaggagcttgctcttcgattcagcggcggacgggtgagtaatgcctaggaatctgcctggtagtgggggacaacgtttcgaaaggaacgctaataccgcatacgtcctacgggagaaagcaggggaccttcgggccttgcgctatcagatgagcctaggtcggattagctagttggtgaggtaatggctcaccaaggcgacgatccgtaactggtctgagaggatgatcagtcacactggaactgagacacggtccagactcctacgggaggcagcagtggggaatattggacaatgggcgaaagcctgatccagccatgccgcgtgtgtgaagaaggtcttcggattgtaaagcactttaagttgggaggaagggttgtacgttaataccgtgcaattttgacgttaccgacagaataagcaccggctaactctgtgccagcagccgcggtaatacagagggtgcaagcgttaatcggaattactgggcgtaaagcgcgcgtaggtggttcgttaagttggatgtgaaatccccgggctcaacctgggaactgcatccaaaactggcgagctagagtatggtagagggtggtggaatttcctgtgtagcggtgaaatgcgtagatataggaaggaacaccagtggcgaaggcgaccacctggactgatactgacactgaggtgcgaaagcgtggggagcaaacaggattagataccctggtagtccacgccgtaaacgatgtcaactagccgttggggaccttgagtctttagtggcgcagctaacgcattaagttgaccgcctggggagtacggccgcaaggttaaaactcaaatgaattgacgggggcccgcacaagcggtggagcatgtggtttaattcgaagcaacgcgaagaaccttaccaggccttgacatccaatgaactttccagagatggattggtgccttcgggaacattgagacaggtgctgcatggctgtcgtcagctcgtgtcgtgagatgttgggttaagtcccgtaacgagcgcaacccttgtccttagttaccagcacgttatggtgggcactctaaggagactgccggtgacaaaccggaggaaggtggggatgacgtcaagtcatcatggcccttacggcctgggctacacacgtgctacaatggtcggtacaaagggttgccaagccgcgaggtggagctaatcccataaaaccgatcgtagtccggatcgcagtctgcaactcgactgcgtgaagtcggaatcgctagtaatcgcgaatcagaatgtcgcggtgaatacgttcccgggccttgtacacaccgcccgtcacaccatgggagtgggttgcaccagaagtagctagtctaaccttcggggggacggttaccacggtgtgattcatgactggggtg

SEQ ID NO: 2695 - DNA, 1459 bp, Pseudomonas benzenivorans
attgaacgctggcggcaggcctaacacatgcaagtcgagcggatgagggtagcttgctacctgattcagcggcggacgggtgagtaatgcctaggaatctgcctggtagtgggggacaacgtttcgaaaggaacgctaataccgcatacgtcctacgggagaaagtgggggatcttcggacctcacgctatcagatgagcctaggtcggattagctagttggtggggtaaaggctcaccaaggcgacgatccgtaactggtctgagaggatgatcagtcacactggaactgagacacggtccagactcctacgggaggcagcagtggggaatattggacaatgggcgaaagcctgatccagccatgccgcgtgtgtgaagaaggtcttcggattgtaaagcactttaagttgggaggaagggcagtaagttaataccttgctgttttgacgttaccgacagaataagcaccggctaactctgtgccagcagccgcggtaatacagagggtgcaagcgttaatcggaattactgggcgtaaagcgcgcgtaggtggtttgttaagttggatgtgaaagccccgggctcaacctgggaactgcatccaaaactggcaagctagagtacggtagagggtggtggaatttcctgtgtagcggtgaaatgcgtagatataggaaggaacaccagtggcgaaggcgaccacctggactgatactgacactgaggtgcgaaagcgtggggagcaaacaggattagataccctggtagtccacgccgtaaacgatgtcaactagccgttggaatccttgagattttagtggcgcagctaacgcattaagttgaccgcctggggagtacggccgcaaggttaaaactcaaatgaattgacgggggcccgcacaagcggtggagcatgtggtttaattcgaagcaacgcgaagaaccttacctggccttgacatctacagaactttccagagatggattggtgccttcgggaactgtaagacaggtgctgcatggctgtcgtcagctcgtgtcgtgagatgttgggttaagtcccgtaacgagcgcaacccttgtccttagttaccagcacgttatggtgggcactctaaggagactgccggtgacaaaccggaggaaggtggggatgacgtcaagtcatcatggcccttacggccagggctacacacgtgctacaatggtcggtacaaagggttgccaagccgcgaggtggagctaatcccataaaaccgatcgtagtccggatcgcagtctgcaactcgactgcgtgaagtcggaatcgctagtaatcgtgaatcagaatgtcacggtgaatacgttcccgggccttgtacacaccgcccgtcacaccatgggagtgggttgcaccagaagtagctagtctaaccttcggggggacggttaccacggtgtgattcatgactggggtg

SEQ ID NO: 2696 - DNA, 1459 bp, Pseudomonas borbori
attgaacgctggcggcaggcctaacacatgcaagtcgagcggtagagaaaagcttgcttttcttgagagcggcggacgggtgagtaatgcctaggaatctgcctggtggtgggggataacgttcggaaacggacgctaataccgcatacgtcctacgggagaaagcgggggaccttcgggcctcgcgccatcagatgagcctaggtcggattagctagttggtgaggtaacggctcaccaaggcgacgatccgtaactggtctgagaggatgatcagtcacactggaactgagacacggtccagactcctacgggaggcagcagtggggaatattggacaatgggcgaaagcctgatccagccatgccgcgtgtgtgaagaaggtcttcggattgtaaagcactttaagttgggaggaagggcagtaagcgaataccttgctgttttgacgttaccgacagaataagcaccggctaactctgtgccagcagccgcggtaatacagagggtgcaagcgttaatcggaattactgggcgtaaagcgcgcgtaggtggttggttaagttggatgtgaaagccccgggctcaacctgggaactgcatccaaaactggccggctagagtacggtagagggtggtggaatttcctgtgtagcggtgaaatgcgtagatataggaaggaacaccagtggcgaaggcgaccacctggactgatactgacactgaggtgcgaaagcgtggggagcaaacaggattagataccctggtagtccacgccgtaaacgatgtcaactagccgttggattccttgagagtttagtggcgcagctaacgcattaagttgaccgcctggggagtacggccgcaaggttaaaactcaaatgaattgacgggggcccgcacaagcggtggagcatgtggtttaattcgaagcaacgcgaagaaccttacctggccttgacatgctgagaactttccagagatggattggtgccttcgggagctcagacacaggtgctgcatggctgtcgtcagctcgtgtcgtgagatgttgggttaagtcccgtaacgagcgcaacccttgtccttagttaccagcacgttatggtgggcactctaaggagactgccggtgacaaaccggaggaaggtggggatgacgtcaagtcatcatggcccttacggccagggctacacacgtgctacaatggtcggtacaaagggttgccaagccgcgaggtggagctaatcccataaaaccgatcgtagtccggatcgcagtctgcaactcgactgcgtgaagtcggaatcgctagtaatcgtgaatcagaatgtcacggtgaatacgttcccgggccttgtacacaccgcccgtcacaccatgggagtgggttgcaccagaagtagctagtctaaccttcggggggacggttaccacggtgtgattcatgactggggtg

SEQ ID NO: 2697 - DNA, 1456 bp, Pseudomonas brassicacearum
acgctggcggcaggcctaacacatgcaagtcgagcggtaagaagaggtgcttgcacctcttgagagcggcggacgggtgagtaatgcctaggaatctgcctggtagtgggggataacgctcggaaacggacgctaataccgcatacgtcctacgggagaaagcaggggaccttcgggccttgcgctatcagatgagcctaggtcggattagctagttggtggggtaatggctcaccaaggcgacgatccgtaactggtctgagaggatgatcagtcacactggaactgagacacggtccagactcctacgggaggcagcagtggggaatattggacaatgggcgaaagcctgatccagccatgccgcgtgtgtgaagaaggtcttcggattgtaaagcactttaagttgggaggaagggcattaacctaatacgttagtgttttgacgttaccgacagaataagcaccggctaactctgtgccagcagccgcggtaatacagagggtgcaagcgttaatcggaattactgggcgtaaagcgcgcgtaggtggttcgttaagttggatgtgaaatccccgggctcaacctgggaactgcattcaaaactgtcgagctagagtatggtagagggtggtggaatttcctgtgtagcggtgaaatgcgtagatataggaaggaacaccagtggcgaaggcgaccacctggactgatactgacactgaggtgcgaaagcgtggggagcaaacaggattagataccctggtagtccacgccgtaaacgatgtcaactagccgttgggagccttgagctcttagtggcgcagctaacgcattaagttgaccgcctggggagtacggccgcaaggttaaaactcaaatgaattgacgggggcccgcacaagcggtggagcatgtggtttaattcgaagcaacgcgaagaaccttaccaggccttgacatccaatgaactttccagagatggattggtgccttcgggaacattgagacaggtgctgcatggctgtcgtcagctcgtgtcgtgagatgttgggttaagtcccgtaacgagcgcaacccttgtccttagttaccagcacgttatggtgggcactctaaggagactgccggtgacaaaccggaggaaggtggggatgacgtcaagtcatcatggcccttacggcctgggctacacacgtgctacaatggtcggtacagagggttgccaagccgcgaggtggagctaatcccacaaaaccgatcgtagtccggatcgcagtctgcaactcgactgcgtgaagtcggaatcgctagtaatcgcgaatcagaatgtcgcggtgaatacgttcccgggccttgtacacaccgcccgtcacaccatgggagtgggttgcaccagaagtagctagtctaaccttcgggaggacggttaccacggtgtgattcatgactggggtg

SEQ ID NO: 2698 - DNA, 1451 bp, Pseudomonas brenneri
  misc_feature (1246)..(1246): n is a, c, g, or t
ctggcggcaggcctaacacatgcaagtcgagcggtagagagaagcttgcttctcttgagagcggcggacgggtgagtaatgcctaggaatctgcctggtagtgggggataacgttcggaaacggacgctaataccgcatacgtcctacgggagaaagcaggggaccttcgggccttgcgctatcagatgagcctaggtcggattagctagttggtggggtaatggctcaccaaggcgacgatccgtaactggtctgagaggatgatcagtcacactggaactgagacacggtccagactcctacgggaggcagcagtggggaatattggacaatgggcgaaagcctgatccagccatgccgcgtgtgtgaagaaggtcttcggattgtaaagcactttaagttgggaggaagggcagtaaattaatactttgctgttttgacgttaccgacagaataagcaccggctaactctgtgccagcagccgcggtaatacagagggtgcaagcgttaatcggaattactgggcgtaaagcgcgcgtaggtggttagttaagttggatgtgaaatccccgggctcaacctgggaactgcattcaaaactgactgactagagtatggtagagggtggtggaatttcctgtgtagcggtgaaatgcgtagatataggaaggaacaccagtggcgaaggcgaccacctggactgatactgacactgaggtgcgaaagcgtggggagcaaacaggattagataccctggtagtccacgccgtaaacgatgtcaactagccgttgggagccttgagctcttagtggcgcagctaacgcattaagttgaccgcctggggagtacggccgcaaggttaaaactcaaatgaattgacgggggcccgcacaagcggtggagcatgtggtttaattcgaagcaacgcgaagaaccttaccaggccttgacatccaatgaactttctagagatagattggtgccttcgggaacattgagacaggtgctgcatggctgtcgtcagctcgtgtcgtgagatgttgggttaagtcccgtaacgagcgcaacccttgtccttagttaccagcacgtaatggtgggcactctaaggagactgccggtgacaaaccggaggaaggtggggatgacgtcaagtcatcatggcccttacggcctgggctacacacgtgctacaatggtcggtacagagggttgccaagccgcgaggtggagctaatcccanaaaaccgatcgtagtccggatcgcagtctgcaactcgactgcgtgaagtcggaatcgctagtaatcgcgaatcagaatgtcgcggtgaatacgttcccgggccttgtacacaccgcccgtcacaccatgggagtgggttgcaccagaagtagctagtctaaccttcgggaggacggttaccacggtgtgattcatgactggggtg

SEQ ID NO: 2699 - DNA, 1459 bp, Pseudomonas canadensis
attgaacgctggcggcaggcctaacacatgcaagtcgagcggtagagagaagcttgcttctcttgagagcggcggacgggtgagtaatgcctaggaatctgcctggtagtgggggataacgttcggaaacgaacgctaataccgcatacgtcctacgggagaaagcaggggaccttcgggccttgcgctatcagatgagcctaggtcggattagctagttggtgaggtaatggctcaccaaggcgacgatccgtaactggtctgagaggatgatcagtcacactggaactgagacacggtccagactcctacgggaggcagcagtggggaatattggacaatgggcgaaagcctgatccagccatgccgcgtgtgtgaagaaggtcttcggattgtaaagcactttaagttgggaggaagggcattaacctaatacgttagtgttttgacgttaccgacagaataagcaccggctaactctgtgccagcagccgcggtaatacagagggtgcaagcgttaatcggaattactgggcgtaaagcgcgcgtaggtggtttgttaagttggatgtgaaatccccgggctcaacctgggaactgcattcaaaactgactgactagagtatggtagagggtggtggaatttcctgtgtagcggtgaaatgcgtagatataggaaggaacaccagtggcgaaggcgaccacctggactaatactgacactgaggtgcgaaagcgtggggagcaaacaggattagataccctggtagtccacgccgtaaacgatgtcaactagccgttggaagccttgagcttttagtggcgcagctaacgcattaagttgaccgcctggggagtacggccgcaaggttaaaactcaaatgaattgacgggggcccgcacaagcggtggagcatgtggtttaattcgaagcaacgcgaagaaccttaccaggccttgacatccaatgaactttctagagatagattggtgccttcgggaacattgagacaggtgctgcatggctgtcgtcagctcgtgtcgtgagatgttgggttaagtcccgtaacgagcgcaacccttgtccttagttaccagcacgtaatggtgggcactctaaggagactgccggtgacaaaccggaggaaggtggggatgacgtcaagtcatcatggcccttacggcctgggctacacacgtgctacaatggtcggtacagagggttgccaagccgcgaggtggagctaatcccataaaaccgatcgtagtccggatcgcagtctgcaactcgactgcgtgaagtcggaatcgctagtaatcgcgaatcagaatgtcgcggtgaatacgttcccgggccttgtacacaccgcccgtcacaccatgggagtgggttgcaccagaagtagctagtctaaccttcgggaggacggttaccacggtgtgattcatgactggggtg

SEQ ID NO: 2700 - DNA, 1461 bp, Pseudomonas cannabina
attgaacgctggcggcaggcctaacacatgcaagtcgagcggcagcacgggtacttgtacctggtggcgagcggcggacgggtgagtaatgcctaggaatctgcctggtagtgggggataacgctcggaaacggacgctaataccgcatacgtcctacgggagaaagcaggggaccttcgggccttgcgctatcagatgagcctaggtcggattagctagttggtgaggtaatggctcaccaaggcgacgatccgtaactggtctgagaggatgatcagtcacactggaactgagacacggtccagactcctacgggaggcagcagtggggaatattggacaatgggcgaaagcctgatccagccatgccgcgtgtgtgaagaaggtcttcggattgtaaagcactttaagttgggaggaagggcagttacctaatacgtatctgttttgacgttaccgacagaataagcaccggctaactctgtgccagcagccgcggtaatacagagggtgcaagcgttaatcggaattactgggcgtaaagcgcgcgtaggtggtttgttaagttgaatgtgaaatccccgggctcaacctgggaactgcatccaaaactggcaagctagagtatggtagagggtggtggaatttcctgtgtagcggtgaaatgcgtagatataggaaggaacaccagtggcgaaggcgaccacctggactgatactgacactgaggtgcgaaagcgtggggagcaaacaggattagataccctggtagtccacgccgtaaacgatgtcaactagccgttgggagccttgagctcttagtggcgcagctaacgcattaagttgaccgcctggggagtacggccgcaaggttaaaactcaaatgaattgacgggggcccgcacaagcggtggagcatgtggtttaattcgaagcaacgcgaagaaccttaccaggccttgacatccaatgaactttccagagatggatgggtgccttcgggaacattgagacaggtgctgcatggctgtcgtcagctcgtgtcgtgagatgttgggttaagtcccgtaacgagcgcaacccttgtccttagttaccagcacgtaatggtgggcactctaaggagactgccggtgacaaaccggaggaaggtggggatgacgtcaagtcatcatggcccttacggcctgggctacacacgtgctacaatggtcggtacagagggttgccaagccgcgaggtggagctaatctcacaaaaccgatcgtagtccggatcgcagtctgcaactcgactgcgtgaagtcggaatcgctagtaatcgcgaatcagaatgtcgcggtgaatacgttcccgggccttgtacacaccgcccgtcacaccatgggagtgggttgcaccagaagtagctagtctaaccttcggggggacggctaccacggtgtgattcatgactggggtg

SEQ ID NO: 2701 - DNA, 1461 bp, Pseudomonas caspiana
attgaacgctggcggcaggcctaacacatgcaagtcgagcggcagcacgggtacttgtacctggtggcgagcggcggacgggtgagtaatgcctaggaatctgcctggtagtgggggataacgctcggaaacggacgctaataccgcatacgtcctacgggagaaagcaggggaccttcgggccttgcgctatcagatgagcctaggtcggattagctagttggtgaggtaatggctcaccaaggcgacgatccgtaactggtctgagaggatgatcagtcacactggaactgagacacggtccagactcctacgggaggcagcagtggggaatattggacaatgggcgaaagcctgatccagccatgccgcgtgtgtgaagaaggtcttcggattgtaaagcactttaagttgggaggaagggcatttacctaatacgtaagtgttttgacgttaccgacagaataagcaccggctaactctgtgccagcagccgcggtaatacagagggtgcaagcgttaatcggaattactgggcgtaaagcgcgcgtaggtggtttgttaagttggatgtgaaatccccgggctcaacctgggaactgcatccaaaactggcaagctagagtatggtagagggtggtggaatttcctgtgtagcggtgaaatgcgtagatataggaaggaacaccagtggcgaaggcgaccacctggactgatactgacactgaggtgcgaaagcgtggggagcaaacaggattagataccctggtagtccacgccgtaaacgatgtcaactagccgttgggagccttgagctcttagtggcgcagctaacgcattaagttgaccgcctggggagtacggccgcaaggttaaaactcaaatgaattgacgggggcccgcacaagcggtggagcatgtggtttaattcgaagcaacgcgaagaaccttaccaggccttgacatccaatgaactttccagagatggattggtgccttcgggaacattgagacaggtgctgcatggctgtcgtcagctcgtgtcgtgagatgttgggttaagtcccgtaacgagcgcaacccttgtccttagttaccagcacattatggtgggcactctaaggagactgccggtgacaaaccggaggaaggtggggatgacgtcaagtcatcatggcccttacggcctgggctacacacgtgctacaatggtcggtacagagggttgccaagccgcgaggtggagctaatcccataaaaccgatcgtagtccggatcgcagtctgcaactcgactgcgtgaagtcggaatcgctagtaatcgcgaatcagaatgtcgcggtgaatacgttcccgggccttgtacacaccgcccgtcacaccatgggagtgggttgcaccagaagtagctagtctaaccttcggggggacggttaccacggtgtgattcatgactggggtg

SEQ ID NO: 2702 - DNA, 1459 bp, Pseudomonas cedrina
attgaacgctggcggcaggcctaacacatgcaagtcgagcggtagagagaagcttgcttctcttgagagcggcggacgggtgagtaatgcctaggaatctgcctggtagtgggggataacgttcggaaacggacgctaataccgcatacgtcctacgggagaaagcaggggaccttcgggccttgcgctatcagatgagcctaggtcggattagctagttggtgaggtaatggctcaccaaggcgacgatccgtaactggtctgagaggatgatcagtcacactggaactgagacacggtccagactcctacgggaggcagcagtggggaatattggacaatgggcgaaagcctgatccagccatgccgcgtgtgtgaagaaggtcttcggattgtaaagcactttaagttgggaggaagggttgtagattaatactctgcaattttgacgttaccgacagaataagcaccggctaactctgtgccagcagccgcggtaatacagagggtgcaagcgttaatcggaattactgggcgtaaagcgcgcgtaggtggtttgttaagttggatgtgaaatccccgggctcaacctgggaactgcattcaaaactgactgactagagtgtggtagagggtggtggaatttcctgtgtagcggtgaaatgcgtagatataggaaggaacaccagtggcgaaggcgaccacctggaccaacactgacactgaggtgcgaaagcgtggggagcaaacaggattagataccctggtagtccacgccgtaaacgatgtcaactagccgttgggagccttgagctcttagtggcgcagctaacgcattaagttgaccgcctggggagtacggccgcaaggttaaaactcaaatgaattgacgggggcccgcacaagcggtggagcatgtggtttaattcgaagcaacgcgaagaaccttaccaggccttgacatccaatgaactttccagagatggatgggtgccttcgggaacattgagacaggtgctgcatggctgtcgtcagctcgtgtcgtgagatgttgggttaagtcccgtaacgagcgcaacccttgtccttagttaccagcacgtaatggtgggcactctaaggagactgccggtgacaaaccggaggaaggtggggatgacgtcaagtcatcatggcccttacggcctgggctacacacgtgctacaatggtcggtacagagggttgccaagccgcgaggtggagctaatcccacaaaaccgatcgtagtccggatcgcagtctgcaactcgactgcgtgaagtcggaatcgctagtaatcgcgaatcagaatgtcgcggtgaatacgttcccgggccttgtacacaccgcccgtcacaccatgggagtgggttgcaccagaagtagctagtctaaccttcgggaggacggttaccacggtgtgattcatgactggggtg

SEQ ID NO: 2703 - DNA, 1461 bp, Pseudomonas cerasi
attgaacgctggcggcaggcctaacacatgcaagtcgagcggcagcacgggtacttgtgcctggtggcgagcggcggacgggtgagtaatgcctaggaatctgcctggtagtgggggataacgctcggaaacggacgctaataccgcatacgtcctacgggagaaagcaggggaccttcgggccttgcgctatcagatgagcctaggtcggattagctagttggtgaggtaatggctcaccaaggcgacgatccgtaactggtctgagaggatgatcagtcacactggaactgagacacggtccagactcctacgggaggcagcagtggggaatattggacaatgggcgaaagcctgatccagccatgccgcgtgtgtgaagaaggtcttcggattgtaaagcactttaagttgggaggaagggcagttacctaatacgtgattgttttgacgttaccgacagaataagcaccggctaactctgtgccagcagccgcggtaatacagagggtgcaagcgttaatcggaattactgggcgtaaagcgcgcgtaggtggtttgttaagttgaatgtgaaatccccgggctcaacctgggaactgcatccaaaactggcaagctagagtatggtagagggtggtggaatttcctgtgtagcggtgaaatgcgtagatataggaaggaacaccagtggcgaaggcgaccacctggactgatactgacactgaggtgcgaaagcgtggggagcaaacaggattagataccctggtagtccacgccgtaaacgatgtcaactagccgttgggagccttgagctcttagtggcgcagctaacgcattaagttgaccgcctggggagtacggccgcaaggttaaaactcaaatgaattgacgggggcccgcacaagcggtggagcatgtggtttaattcgaagcaacgcgaagaaccttaccaggccttgacatccaatgaactttccagagatggattggtgccttcgggaacattgagacaggtgctgcatggctgtcgtcagctcgtgtcgtgagatgttgggttaagtcccgtaacgagcgcaacccttgtccttagttaccagcacgttatggtgggcactctaaggagactgccggtgacaaaccggaggaaggtggggatgacgtcaagtcatcatggcccttacggcctgggctacacacgtgctacaatggtcggtacagagggttgccaagccgcgaggtggagctaatctcacaaaaccgatcgtagtccggatcgcagtctgcaactcgactgcgtgaagtcggaatcgctagtaatcgcgaatcagaatgtcgcggtgaatacgttcccgggccttgtacacaccgcccgtcacaccatgggagtgggttgcaccagaagtagctagtctaaccttcggggggacggttaccacggtgtgattcatgactggggtg

SEQ ID NO: 2704 - DNA, 1459 bp, Pseudomonas chengduensis
attgaacgctggcggcaggcctaacacatgcaagtcgagcggatgagaggagcttgctccttgatttagcggcggacgggtgagtaatgcctaggaatctgcctggtagtgggggataacgttccgaaaggaacgctaataccgcatacgtcctacgggagaaagcaggggaccttcgggccttgcgctatcagatgagcctaggtcggattagctagttggtgaggtaatggctcaccaaggcgacgatccgtaactggtctgagaggatgatcagtcacactggaactgagacacggtccagactcctacgggaggcagcagtggggaatattggacaatgggcgaaagcctgatccagccatgccgcgtgtgtgaagaaggtcttcggattgtaaagcactttaagttgggaggaagggcattaacctaatacgttagtgttttgacgttaccgacagaataagcaccggctaacttcgtgccagcagccgcggtaatacgaagggtgcaagcgttaatcggaattactgggcgtaaagcgcgcgtaggtggttcgttaagttggatgtgaaagccccgggctcaacctgggaactgcatccaaaactggcgagctagagtacggtagagggtggtggaatttcctgtgtagcggtgaaatgcgtagatataggaaggaacaccagtggcgaaggcgaccacctggactgatactgacactgaggtgcgaaagcgtggggagcaaacaggattagataccctggtagtccacgccgtaaacgatgtcaactagccgttgggttccttgagaacttagtggcgcagctaacgcattaagttgaccgcctggggagtacggccgcaaggttaaaactcaaatgaattgacgggggcccgcacaagcggtggagcatgtggtttaattcgaagcaacgcgaagaaccttacctggccttgacatgctgagaactttccagagatggattggtgccttcgggagctcagacacaggtgctgcatggctgtcgtcagctcgtgtcgtgagatgttgggttaagtcccgtaacgagcgcaacccttgtccttagttaccagcacgtaatggtgggcactctaaggagactgccggtgacaaaccggaggaaggtggggatgacgtcaagtcatcatggcccttacggccagggctacacacgtgctacaatggtcggtacaaagggttgccaagccgcgaggtggagctaatcccataaaaccgatcgtagtccggatcgcagtctgcaactcgactgcgtgaagtcggaatcgctagtaatcgtgaatcagaatgtcacggtgaatacgttcccgggccttgtacacaccgcccgtcacaccatgggagtgggttgctccagaagtagctagtctaaccttcggggggacggttaccacggagtgattcatgactggggtg

SEQ ID NO: 2705 - DNA, 1501 bp, Pseudomonas chloritidismutans
  misc_feature (66)..(66): n is a, c, g, or t
ggctcagattgaacgctggcggcaggcctaacacatgcaagtcgagcggatgaagagagcttgctntctgattcagcggcggacgggtgagtaatgcctaggaatctgcctgatagtgggggacaacgtttcgaaaggaacgctaataccgcatacgtcctacgggagaaagcaggggaccttcgggccttgcgctatcagatgagcctaggtcggattagctagttggtgaggtaacggctcaccaaggcgacgatccgtaactggtctgagaggatgatcagtcacactggaactgagacacggtccagactcctacgggaggcagcagtggggaatattggacaatgggcgaaagcctgatccagccatgccgcgtgtgtgaagaaggtcttcggattgtaaagcactttaagttgggaggaagggcattaacctaatacgttagtgttttgacgttaccgacagaataagcaccggctaacttcgtgccagcagccgcggtaatacgaagggtgcaagcgttaatcggaattactgggcgtaaagcgcgcgtaggtggtttgttaagttgaatgtgaaagccccgggctcaacctgggaactgcatccaaaactggcaagctagagtatggcagagggtggtggaatttcctgtgtagcggtgaaatgcgtagatataggaaggaacaccagtggcgaaggcgaccacctgggctaatactgacactgaggtgcgaaagcgtggggagcaaacaggattagataccctggtagtccacgccgtaaacgatgtcgactagccgttgggatccttgagatcttagtggcgcagctaacgcattaagtcgaccgcctggggagtacggccgcaaggttaaaactcaaatgaattgacgggggcccgcacaagcggtggagcatgtggtttaattcgaagcaacgcgaagaaccttaccaggccttgacatgcagagaactttccagagatggattggtgccttcgggaactctgacacaggtgctgcatggctgtcgtcagctcgtgtcgtgagatgttgggttaagtcccgtaacgagcgcaacccttgtccttagttaccagcacgttaaggtgggcactctaaggagactgccggtgacaaaccggaggaaggtggggatgacgtcaagtcatcatggcccttacggcctgggctacacacgtgctacaatggtcggtacaaagggttgccaagccgcgaggtggagctaatcccataaaaccgatcgtagtccggatcgcagtctgcaactcgactgcgtgaagtcggaatcgctagtaatcgtgaatcagaatgtcacggtgaatacgttcccgggccttgtacacaccgcccgtcacaccatgggagtgggttgctccagaagtagctagtctaaccttcggggggacggttaccacggagtgattcatgactggggtgaagtcgtaacaaggtagccgtaggggaacctgcgt

SEQ ID NO: 2706 - DNA, 1461 bp, Pseudomonas cichorii
attgaacgctggcggcaggcctaacacatgcaagtcgggcggcagcacaggtacttgtaccgggtggcgagcggcggacgggtgagtaatgcctaggaatctgcctggtagtgggggataacgctcggaaacggacgctaataccgcatacgtcctacgggagaaagcaggggaccttcgggccttgcgctatcagatgagcctaggtcggattagctagttggtgaggtaaaggctcaccaaggcgacgatccgtaactggtctgagaggatgatcagtcacactggaactgagacacggtccagactcctacgggaggcagcagtggggaatattggacaatgggcgaaagcctgatccagccatgccgcgtgtgtgaagaaggtcttcggattgtaaagcactttaagttgggaggaagggtcgttacctaatacgtgacgattttgacgttaccgacagaataagcaccggctaactctgtgccagcagccgcggtaatacagagggtgcaagcgttaatcggaattactgggcgtaaagcgcgcgtaggtggttcgttaagttggatgtgaaatccccgggctcaacctgggaactgcatccaaaactggcgagctagagtagggcagagggtggtggaatttcctgtgtagcggtgaaatgcgtagatataggaaggaacaccagtggcgaaggcgaccacctgggctcatactgacactgaggtgcgaaagcgtggggagcaaacaggattagataccctggtagtccacgccgtaaacgatgtcaactagccgttggaatccttgagattttagtggcgcagctaacgcattaagttgaccgcctggggagtacggccgcaaggttaaaactcaaatgaattgacgggggcccgcacaagcggtggagcatgtggtttaattcgaagcaacgcgaagaaccttaccaggccttgacatccagtgaacttaccagagatggtttggtgccttcgggaacactgagacaggtgctgcatggctgtcgtcagctcgtgtcgtgagatgttgggttaagtcccgtaacgagcgcaacccttgtccttagttaccagcacgtgatggtgggcactctaaggagactgccggtgacaaaccggaggaaggtggggatgacgtcaagtcatcatggcccttacggcctgggctacacacgtgctacaatggtcggtacagagggttgccaagccgcgaggtggagctaatctcacaaaaccgatcgtagtccggatcgcagtctgcaactcgactgcgtgaagtcggaatcgctagtaatcgcgaatcagaatgtcgcggtgaatacgttcccgggccttgtacacaccgcccgtcacaccatgggagtgggttgcaccagaagtagctagtctaaccttcggggggacggttaccacggtgtgattcatgactggggtg

SEQ ID NO: 2707 - DNA, 1459 bp, Pseudomonas citronellolis
attgaacgctggcggcaggcctaacacatgcaagtcgagcggatgaagggagcttgcttctggattcagcggcggacgggtgagtaatgcctaggaatctgcctggtagtgggggacaacgttccgaaaggagcgctaataccgcatacgtcctacgggagaaagtgggggatcttcggacctcacgctatcagatgagcctaggtcggattagctagtaggtggggtaatggctcacctaggcgacgatccgtaactggtctgagaggatgatcagtcacactggaactgagacacggtccagactcctacgggaggcagcagtggggaatattggacaatgggcgaaagcctgatccagccatgccgcgtgtgtgaagaaggtcttcggattgtaaagcactttaagttgggaggaagggcagtaagttaataccttgctgttttgacgttaccaacagaataagcaccggctaacttcgtgccagcagccgcggtaatacgaagggtgcaagcgttaatcggaattactgggcgtaaagcgcgcgtaggtggtttggtaagatggatgtgaaatccccgggctcaacctgggaactgcatccataactgcctgactagagtacggtagagggtggtggaatttcctgtgtagcggtgaaatgcgtagatataggaaggaacaccagtggcgaaggcgaccacctggactgatactgacactgaggtgcgaaagcgtggggagcaaacaggattagataccctggtagtccacgccgtaaacgatgtcgactagccgttgggatccttgagatcttagtggcgcagctaacgcgataagtcgaccgcctggggagtacggccgcaaggttaaaactcaaatgaattgacgggggcccgcacaagcggtggagcatgtggtttaattcgaagcaacgcgaagaaccttacctggccttgacatgtccggaattctgcagagatgcgggagtgccttcgggaatcggaacacaggtgctgcatggctgtcgtcagctcgtgtcgtgagatgttgggttaagtcccgtaacgagcgcaacccttgtccttagttaccagcacgttatggtgggcactctaaggagactgccggtgacaaaccggaggaaggtggggatgacgtcaagtcatcatggcccttacggccagggctacacacgtgctacaatggtcggtacagagggttgccaagccgcgaggtggagctaatcccagaaaaccgatcgtagtccggatcgcagtctgcaactcgactgcgtgaagtcggaatcgctagtaatcgtgaatcagaatgtcacggtgaatacgttcccgggccttgtacacaccgcccgtcacaccatgggagtgggttgctccagaagtagctagtctaaccgcaagggggacggttaccacggagtgattcatgactggggtg

SEQ ID NO: 2708 - DNA, 1445 bp, Pseudomonas coleopterorum
attgaacgctggcggcaggcctaacacatgcaagtcgagcggttgaaggaagcttgcttcctgattcagcggcggacgggtgagtaatgcctaggaatctgcctggtagtgggggacaacgtttcgaaaggaacgctaataccgcatacgtcctacgggagaaagcaggggaccttcgggccttgcgctatcagatgagcctaggtcggattagctagttggtgaggtaatggctcaccaaggcgacgatccgtaactggtctgagaggatgatcagtcacactggaactgagacacggtccagactcctacgggaggcagcagtggggaatattggacaatgggcgaaagcctgatccagccatgccgcgtgtgtgaagaaggtcttcggattgtaaagcactttaagttgggaggaagggcagtcagcgaataccttgctgtcttgacgttaccgacagaataagcaccggctaactctgtgccagcagccgcggtaatacagagggtgcaagcgttaatcggaattactgggcgtaaagcgcgcgtaggtggtttgttaagttggatgtgaaatccccgggctcaacctgggaactgcatccaaaactggcaagctagagtagggcagagggtggtggaatttcctgtgtagcggtgaaatgcgtagatataggaaggaacaccagtggcgaaggcgaccacctgggctcatactgacactgaggtgcgaaagcgtggggagcaaacaggattagataccctggtagtccacgccgtaaacgatgtcaactagccgttgggagtcttgaactcttagtggcgcagctaacgcattaagttgaccgcctggggagtacggccgcaaggttaaaactcaaatgaattgacgggggcccgcacaagcggtggagcatgtggtttaattcgaagcaacgcgaagaaccttaccaggccttgacatccaatgaactttccagagatggatgggtgccttcgggaacattgagacaggtgctgcatggctgtcgtcagctcgtgtcgtgagatgttgggttaagtcccgtaacgagcgcaacccttgtccttagttaccagcacgttatggtgggcactctaaggagactgccggtgacaaaccggaggaaggtggggatgacgtcaagtcatcatggcccttacggcctgggctacacacgtgctacaatggtcggtacagagggttgccaagccgcgaggtggagctaatctcacaaaaccgatcgtagtccggatcgcagtctgcaactcgactgcgtgaagtcggaatcgctagtaatcgcgaatcagaatgtcgcggtgaatacgttcccgggccttgtacacaccgcccgtcacaccatgggagtgggttgcaccagaagtagctagtctaaccttcgggaggacggttaccacggtgtgat

SEQ ID NO: 2709 - DNA, 1459 bp, Pseudomonas composti
attgaacgctggcggcaggcctaacacatgcaagtcgagcggtagagaggagcttgcttctcttgagagcggcggacgggtgagtaatgcctaggaatctgcctagtggtgggggataacgttcggaaacggacgctaataccgcatacgtcctacgggagaaagcgggggatcttcggacctcgcgccattagatgagcctaggtcggattagctagttggtgaggtaatggctcaccaaggcgacgatccgtaactggtctgagaggatgatcagtcacactggaactgagacacggtccagactcctacgggaggcagcagtggggaatattggacaatgggcgaaagcctgatccagccatgccgcgtgtgtgaagaaggtcttcggattgtaaagcactttaagttgggaggaagggttgtagattaatactctgcaattttgacgttaccgacagaataagcaccggctaacttcgtgccagcagccgcggtaatacgaagggtgcaagcgttaatcggaattactgggcgtaaagcgcgcgtaggtggttcgttaagttggatgtgaaagccccgggctcaacctgggaactgcatccaaaactggcgagctagagtacggtagagggtggtggaatttcctgtgtagcggtgaaatgcgtagatataggaaggaacaccagtggcgaaggcgaccacctggactgatactgacactgaggtgcgaaagcgtggggagcaaacaggattagataccctggtagtccacgccgtaaacgatgtcaactagccgttgggttccttgagaacttagtggcgcagctaacgcattaagttgaccgcctggggagtacggccgcaaggttaaaactcaaatgaattgacgggggcccgcacaagcggtggagcatgtggtttaattcgaagcaacgcgaagaaccttacctggccttgacatgctgagaactttccagagatggattggtgccttcgggaactcagacacaggtgctgcatggctgtcgtcagctcgtgtcgtgagatgttgggttaagtcccgtaacgagcgcaacccttgtccttagttaccagcacgttatggtgggcactctaaggagactgccggtgacaaaccggaggaaggtggggatgacgtcaagtcatcatggcccttacggccagggctacacacgtgctacaatggtcggtacaaagggttgccaagccgcgaggtggagctaatcccataaaaccgatcgtagtccggatcgcagtctgcaactcgactgcgtgaagtcggaatcgctagtaatcgtgaatcagaatgtcacggtgaatacgttcccgggccttgtacacaccgcccgtcacaccatgggagtgggttgctccagaagtagctagtctaaccttcggggggacggttaccacggagtgattcatgactggggtg

SEQ ID NO: 2710 - DNA, 1461 bp, Pseudomonas congelans
attgaacgctggcggcaggcctaacacatgcaagtcgagcggcagcacgggtacttgtacctggtggcgagcggcggacgggtgagtaatgcctaggaatctgcctggtagtgggggataacgctcggaaacggacgctaataccgcatacgtcctacgggagaaagcaggggaccttcgggccttgcgctatcagatgagcctaggtcggattagctagttggtgaggtaatggctcaccaaggcgacgatccgtaactggtctgagaggatgatcagtcacactggaactgagacacggtccagactcctacgggaggcagcagtggggaatattggacaatgggcgaaagcctgatccagccatgccgcgtgtgtgaagaaggtcttcggattgtaaagcactttaagttgggaggaagggcagttacctaatacgtgattgttttgacgttaccgacagaataagcaccggctaactctgtgccagcagccgcggtaatacagagggtgcaagcgttaatcggaattactgggcgtaaagcgcgcgtaggtggtttgttaagttgaatgtgaaatccccgggctcaacctgggaactgcatccaaaactggcaagctagagtatggtagagggtggtggaatttcctgtgtagcggtgaaatgcgtagatataggaaggaacaccagtggcgaaggcgaccacctggactgatactgacactgaggtgcgaaagcgtggggagcaaacaggattagataccctggtagtccacgccgtaaacgatgtcaactagccgttgggagccttgagctcttagtggcgcagctaacgcattaagttgaccgcctggggagtacggccgcaaggttaaaactcaaatgaattgacgggggcccgcacaagcggtggagcatgtggtttaattcgaagcaacgcgaagaaccttaccaggccttgacatccaatgaactttccagagatggattggtgccttcgggaacattgagacaggtgctgcatggctgtcgtcagctcgtgtcgtgagatgttgggttaagtcccgtaacgagcgcaacccttgtccttagttaccagcacgttaaggtgggcactctaaggagactgccggtgacaaaccggaggaaggtggggatgacgtcaagtcatcatggcccttacggcctgggctacacacgtgctacaatggtcggtacagagggttgccaagccgcgaggtggagctaatctcacaaaaccgatcgtagtccggatcgcagtctgcaactcgactgcgtgaagtcggaatcgctagtaatcgcgaatcagaatgtcgcggtgaatacgttcccgggccttgtacacaccgcccgtcacaccatgggagtgggttgcaccagaagtagctagtctaaccttcggggggacggttaccacggtgtgattcatgactggggtg

SEQ ID NO: 2711 - DNA, 1461 bp, Pseudomonas coronafaciens
attgaacgctggcggcaggcctaacacatgcaagtcgagcggcagcacgggtacttgtacctggtggcgagcggcggacgggtgagtaatgcctaggaatctgcctggtagtgggggataacgttcggaaacggacgctaataccgcatacgtcctacgggagaaagcaggggaccttcgggccttgcgctatcagatgagcctaggtcggattagctagttggtgaggtaatggctcaccaaggcgacgatccgtaactggtctgagaggatgatcagtcacactggaactgagacacggtccagactcctacgggaggcagcagtggggaatattggacaatgggcgaaagcctgatccagccatgccgcgtgtgtgaagaaggtcttcggattgtaaagcactttaagttgggaggaagggcatttacctaatacgtaagtgttttgacgttaccgacagaataagcaccggctaactctgtgccagcagccgcggtaatacagagggtgcaagcgttaatcggaattactgggcgtaaagcgcgcgtaggtggtttgttaagttgaatgtgaaatccccgggctcaacctgggaactgcatccaaaactggcaggctagagtatggtagagggtggtggaatttcctgtgtagcggtgaaatgcgtagatataggaaggaacaccagtggcgaaggcgaccacctggactgatactgacactgaggtgcgaaagcgtggggagcaaacaggattagataccctggtagtccacgccgtaaacgatgtcaactagccgttgggagccttgagctcttagtggcgcagctaacgcattaagttgaccgcctggggagtacggccgcaaggttaaaactcaaatgaattgacgggggcccgcacaagcggtggagcatgtggtttaattcgaagcaacgcgaagaaccttaccaggccttgacatccaatgaatcctttagagatagaggagtgccttcgggagcattgagacaggtgctgcatggctgtcgtcagctcgtgtcgtgagatgttgggttaagtcccgtaacgagcgcaacccttgtccttagttaccagcacgttaaggtgggcactctaaggagactgccggtgacaaaccggaggaaggtggggatgacgtcaagtcatcatggcccttacggcctgggctacacacgtgctacaatggtcggtacagagggttgccaagccgcgaggtggagctaatctcacaaaaccgatcgtagtccggatcgcagtctgcaactcgactgcgtgaagtcggaatcgctagtaatcgcgaatcagaatgtcgcggtgaatacgttcccgggccttgtacacaccgcccgtcacaccatgggagtgggttgcaccagaagtagctagtctaaccttcggggggacggttaccacggtgtgattcatgactggggtg

SEQ ID NO: 2712 - DNA, 1438 bp, Pseudomonas corrugata
ctaacacatgcaagtcgagcggtagagaggtgcttgcacctcttgagagcggcggacgggtgagtaatgcctaggaatctgcctggtagtgggggataacgctcggaaacggacgctaataccgcatacgtcctacgggagaaagcaggggaccttcgggccttgcgctatcagatgagcctaggtcggattagctagttggtgaggtaatggctcaacaaggcgacgatccgtaactggtctgagaggatgatcagtcacactggaactgagacacggtccagactcctacgggaggcagcagtggggaatattggacaatgggcgaaagcctgatccagccatgccgcgtgtgtgaagaaggtcttcggattgtaaagcactttaagttggaggaagggcattaacctaatacgttagtgttttgacgttaccgacagaataagcaccggctaactctgtgccagcagccgcggtaatacagagggtgcaagcgttaatcggaattactgggcgtaaagcgcgcgtaggtggtttgttaagttggatgtgaaagccccgggctcaacctgggaactgcattcaaaactgacaagctagagtatggtagagggtggtggaatttcctgtgtagcggtgaaatgcgtagatataggaaggaacaccagtggcgaaggcgaccacctggactgatactgacactgaggtgcgaaagcgtggggagcaaacaggattagataccctggtagtccacgccgtaaacgatgtcaactagccgttgggagccttgagctcttagtggcgcagctaacgcattaagttgaccgcctggggagtacggccgcaaggttaaaactcaaatgaattgacgggggcccgcacaagcggtggagcatgtggtttaattcgaagcaacgcgaagaaccttaccaggccttgacatccaatgaactttccagagatggattggtgccttcgggaacattgagacaggtgctgcatggctgtcgtcagctcgtgtcgtgagatgttgggttaagtcccgtaacgagcgcaacccttgtccttagttaccagcacgttatggtgggcactctaaggagactgccggtgacaaaccggaggaaggtggggatgacgtcaagtcatcatggcccttacggcctgggctacacacgtgctacaatggtcggtacagagggttgccaagccgcgaggtggagctaatcccacaaaaccgatcgtagtccggatcgcagtctgcaactcgactgcgtgaagtcggaatcgctagtaatcgcgaatcagaatgtcgcggtgaatacgttcccgggccttgtacacaccgcccgtcacaccatgggagtgggttgcaccagaagtagctagtctaaccttcggggggacggttaccacggtgtgattcatgactggggtg

SEQ ID NO: 2713 - DNA, 1459 bp, Pseudomonas costantinii
attgaacgctggcggcaggcctaacacatgcaagtcgagcggtagagagaagcttgcttctcttgagagcggcggacgggtgagtaatgcctaggaatctgcctggtagtgggggataacgttcggaaacggacgctaataccgcatacgtcctacgggagaaagcaggggaccttcgggccttgcgctatcagatgagcctaggtcggattagctagttggtgaggtaatggctcaccaaggcgacgatccgtaactggtctgagaggatgatcagtcacactggaactgagacacggtccagactcctacgggaggcagcagtggggaatattggacaatgggcgaaagcctgatccagccatgccgcgtgtgtgaagaaggtcttcggattgtaaagcactttaagttgggaggaagggcagttgcctaatacgtaactgttttgacgttaccgacagaataagcaccggctaactctgtgccagcagccgcggtaatacagagggtgcaagcgttaatcggaattactgggcgtaaagcgcgcgtaggtggtttgttaagttggatgtgaaatccccgggctcaacctgggaactgcattcaaaactgactgactagagtatggtagagggtggtggaatttcctgtgtagcggtgaaatgcgtagatataggaaggaacaccagtggcgaaggcgaccacctggactaatactgacactgaggtgcgaaagcgtggggagcaaacaggattagataccctggtagtccacgccgtaaacgatgtcaactagccgttggaagccttgagcttttagtggcgcagctaacgcattaagttgaccgcctggggagtacggccgcaaggttaaaactcaaatgaattgacgggggcccgcacaagcggtggagcatgtggtttaattcgaagcaacgcgaagaaccttaccaggccttgacatccaatgaactttctagagatagattggtgccttcgggaacattgagacaggtgctgcatggctgtcgtcagctcgtgtcgtgagatgttgggttaagtcccgtaacgagcgcaacccttgtccttagttaccagcacgtaatggtgggcactctaaggagactgccggtgacaaaccggaggaaggtggggatgacgtcaagtcatcatggcccttacggcctgggctacacacgtgctacaatggtcggtacagagggttgccaaaccgcgaggtggagctaatcccataaaaccgatcgtagtccggatcgcagtctgcaactcgactgcgtgaagtcggaatcgctagtaatcgcgaatcagaatgtcgcggtgaatacgttcccgggccttgtacacaccgcccgtcacaccatgggagtgggttgcaccagaagtagctagtctaaccttcgggaggacggttaccacggtgtgattcatgactggggtg

SEQ ID NO: 2714 - DNA, 1459 bp, Pseudomonas cremoricolorata
attgaacgctggcggcaggcctaacacatgcaagtcgagcggatgagaagagcttgctcttcgattcagcggcggacgggtgagtaatgcctaggaatctgcctggtagtgggggacaacgtctcgaaagggacgctaataccgcatacgtcctacgggagaaagcaggggaccttcgggccttgcgctatcagatgagcctaggtcggattagcttgttggtgaggtaatggctcaccaaggcgacgatccgtaactggtctgagaggatgatcagtcacactggaactgagacacggtccagactcctacgggaggcagcagtggggaatattggacaatgggcgaaagcctgatccagccatgccgcgtgtgtgaagaaggtcttcggattgtaaagcactttaagttgggaggaagggcaatcagcgaatacctggttgttttgacgttaccgacagaataagcaccggctaactctgtgccagcagccgcggtaatacagagggtgcaagcgttaatcggaattactgggcgtaaagcgcgcgtaggtggtttgttaagttggatgtgaaagccccgggctcaacctgggaactgcatccaaaactggcaagctagagtatggtagagggtggtggaatttcctgtgtagcggtgaaatgcgtagatataggaaggaacaccagtggcgaaggcgaccacctggaccaatactgacactgaggtgcgaaagcgtggggagcaaacaggattagataccctggtagtccacgccgtaaacgatgtcaactagccgttggaatccttgagattttagtggcgcagctaacgcattaagttgaccgcctggggagtacggccgcaaggttaaaactcaaatgaattgacgggggcccgcacaagcggtggagcatgtggtttaattcgaagcaacgcgaagaaccttaccaggccttgacatgcagagaactttccagagatggattggtgccttcgggaactctgacacaggtgctgcatggctgtcgtcagctcgtgtcgtgagatgttgggttaagtcccgtaacgagcgcaacccttgtccttagttaccagcacgttatggtgggcactctaaggagactgccggtgacaaaccggaggaaggtggggatgacgtcaagtcatcatggcccttacggcctgggctacacacgtgctacaatggtcggtacagagggttgccaagccgcgaggtggagctaatctcacaaaaccgatcgtagtccggatcgcagtctgcaactcgactgcgtgaagtcggaatcgctagtaatcgcgaatcagaatgtcgcggtgaatacgttcccgggccttgtacacaccgcccgtcacaccatgggagtgggttgcaccagaagtagctagtctaaccctcgggaggacggttaccacggtgtgattcatgactggggtg

SEQ ID NO: 2715 - DNA, 1430 bp, Pseudomonas cuatrocienegasensis
attgaacgctggcggcaggcctaacacatgcaagtcgagcggtagaggggagcttgcttcccttgagagcggcggacgggtgagtaatgcctaggaatctgcctagtggtgggggataacgttcggaaacggacgctaataccgcatacgtcctacgggagaaagcgggggaccttcgggcctcgcgccattagatgagcctaggtcggattagctagttggtgaggtaacggctcaccaaggcgacgatccgtaactggtctgagaggatgatcagtcacactggaactgagacacggtccagactcctacgggaggcagcagtggggaatattggacaatgggcgaaagcctgatccagccatgccgcgtgtgtgaagaaggtcttcggattgtaaagcactttaagttgggaggaagggtagtaacttaatacgttgctattttgacgttaccgacagaataagcaccggctaactctgtgccagcagccgcggtaatacagagggtgcaagcgttaatcggaattactgggcgtaaagcgcgcgtaggtggtttgttaagttggatgtgaaagccccgggctcaacctgggaactgcatccaaaactggcaagctagagtacggtagagggtggtggaatttcctgtgtagcggtgaaatgcgtagatataggaaggaacaccagtggcgaaggcgaccacctggactgatactgacactgaggtgcgaaagcgtggggagcaaacaggattagataccctggtagtccacgccgtaaacgatgtcaactagccgttgggagtcttgaactcttagtggcgcagctaacgcattaagttgaccgcctggggagtacggccgcaaggttaaaactcaaatgaattgacgggggcccgcacaagcggtggagcatgtggtttaattcgaagcaacgcgaagaaccttacctggccttgacatgctgagaactttccagagatggattggtgccttcgggaactcagacacaggtgctgcatggctgtcgtcagctcgtgtcgtgagatgttgggttaagtcccgtaacgagcgcaacccttgtccttagttaccagcacgttatggtgggaactctaaggagactgccggtgacaaaccggaggaaggtggggatgacgtcaagtcatcatggcccttacggccagggctacacacgtgctacaatggtcggtacaaagggttgccaagccgcgaggtggagctaatcccataaaaccgatcgtagtccggatcgcagtctgcaactcgactgcgtgaagtcggaatcgctagtaatcgtgaatcagaatgtcacggtgaatacgttcccgggccttgtacacaccgcccgtcacaccatgggagtgggttgcaccagaagtagctagtctaaccgcaagggggacgg

SEQ ID NO: 2716 - DNA, 1459 bp, Pseudomonas deceptionensis
attgaacgctggcggcaggcctaacacatgcaagtcgagcggtagagaggtgcttgcacctcttgagagcggcggacgggtgagtaatatctaggaatctgcctggtagtgggggataacgttcggaaacggacgctaataccgcatacgtcctacgggagaaagcaggggaccttcgggccttgcgctatcagatgagcctagatcggattagctagttggtgaggtaatggctcaccaaggctacgatccgtaactggtctgagaggatgatcagtcacactggaactgagacacggtccagactcctacgggaggcagcagtggggaatattggacaatgggcgaaagcctgatccagccatgccgcgtgtgtgaagaaggtcttcggattgtaaagcactttaagttgggaggaagggcattaacctaatacgttagtgtcttgacgttaccgacagaataagcaccggctaactctgtgccagcagccgcggtaatacagagggtgcaagcgttaatcggaattactgggcgtaaagcgcgcgtaggtggtttgttaagttgaatgtgaaatccccgggctcaacctgggaactgcatccaaaactggcaagctagagtatggtagagggtagtggaatttcctgtgtagcggtgaaatgcgtagatataggaaggaacaccagtggcgaaggcgactacctggactgatactgacactgaggtgcgaaagcgtggggagcaaacaggattagataccctggtagtccacgccgtaaacgatgtcaactagccgttgggagtcttgaactcttagtggcgcagctaacgcattaagttgaccgcctggggagtacggccgcaaggttaaaactcaaatgaattgacgggggcccgcacaagcggtggagcatgtggtttaattcgaagcaacgcgaagaaccttaccaggccttgacatccaatgaactttctagagatagattggtgccttcgggaacattgagacaggtgctgcatggctgtcgtcagctcgtgtcgtgagatgttgggttaagtcccgtaacgagcgcaacccttgtccttagttaccagcacgtaatggtgggcactctaaggagactgccggtgacaaaccggaggaaggtggggatgacgtcaagtcatcatggcccttacggcctgggctacacacgtgctacaatggtcggtacaaagggttgccaagccgcgaggtggagctaatcccataaaaccgatcgtagtccggatcgcagtctgcaactcgactgcgtgaagtcggaatcgctagtaatcgtgaatcagaatgtcacggtgaatacgttcccgggccttgtacacaccgcccgtcacaccatgggagtgggttgcaccagaagtagctagtctaaccctcgggaggacggttaccacggtgtgattcatgactggggtg

SEQ ID NO: 2717 - DNA, 1459 bp, Pseudomonas delhiensis
attgaacgctggcggcaggcctaacacatgcaagtcgagcggatgaagggagcttgctcccggattcagcggcggacgggtgagtaatgcctaggaatctgcctggtagtgggggacaacgttccgaaaggagcgctaataccgcatacgtcctacgggagaaagtgggggatcttcggacctcacgctatcagatgagcctaggtcggattagctagtaggtggggtaatggctcacctaggcgacgatccgtaactggtctgagaggatgatcagtcacactggaactgagacacggtccagactcctacgggaggcagcagtggggaatattggacaatgggcgaaagcctgatccagccatgccgcgtgtgtgaagaaggtcttcggattgtaaagcactttaagttgggaggaagggcagtaagttaataccttgctgttttgacgttaccaacagaataagcaccggctaacttcgtgccagcagccgcggtaatacgaagggtgcaagcgttaatcggaattactgggcgtaaagcgcgcgtaggtggtttggtaagatggatgtgaaatccccgggctcaacctgggaactgcatccataactgcctgactagagtacggtagagggtggtggaatttcctgtgtagcggtgaaatgcgtagatataggaaggaacaccagtggcgaaggcgaccacctggactgatactgacactgaggtgcgaaagcgtggggagcaaacaggattagataccctggtagtccacgccgtaaacgatgtcgactagccgttgggatccttgagatcttagtggcgcagctaacgcgataagtcgaccgcctggggagtacggccgcaaggttaaaactcaaatgaattgacgggggcccgcacaagcggtggagcatgtggtttaattcgaagcaacgcgaagaaccttacctggccttgacatgtccggaatcctgcagagatgcgggagtgccttcgggaatcggaacacaggtgctgcatggctgtcgtcagctcgtgtcgtgagatgttgggttaagtcccgtaacgagcgcaacccttgtccttagttaccagcgggttatgccgggcactctaaggagactgccggtgacaaaccggaggaaggtggggatgacgtcaagtcatcatggcccttacggccagggctacacacgtgctacaatggtcggtacagagggttgccaagccgcgaggtggagctaatcccacaaaaccgatcgtagtccggatcgcagtctgcaactcgactgcgtgaagtcggaatcgctagtaatcgtgaatcagaatgtcacggtgaatacgttcccgggccttgtacacaccgcccgtcacaccatgggagtgggttgctccagaagtagctagtctaaccttcggggggacggttaccacggagtgattcatgactggggtg

SEQ ID NO: 2718 - DNA, 1459 bp, Pseudomonas donghuensis
attgaacgctggcggcaggcctaacacatgcaagtcgagcggatgagaagagcttgctcttcgattcagcggcggacgggtgagtaatacctaggaatctgcctggtagtgggggacaacgtttcgaaaggaacgctaataccgcatacgtcctacgggagaaagcaggggaccttcgggccttgcgctatcagatgagcctaggtcggattagctagttggtgaggtaatggctcaccaaggcgacgatccgtaactggtctgagaggatgatcagtcacactggaactgagacacggtccagactcctacgggaggcagcagtggggaatattggacaatgggcgaaagcctgatccagccatgccgcgtgtgtgaagaaggtcttcggattgtaaagcactttaagttgggaggaagggtacttacctaatacgtgagtattttgacgttaccgacagaataagcaccggctaactctgtgccagcagccgcggtaatacagagggtgcaagcgttaatcggaattactgggcgtaaagcgcgcgtaggtggttcgttaagttggatgtgaaatccccgggctcaacctgggaactgcatccaaaactggcgagctagagtagggcagagggtggtggaatttcctgtgtagcggtgaaatgcgtagatataggaaggaacaccagtggcgaaggcgaccacctgggctcatactgacactgaggtgcgaaagcgtggggagcaaacaggattagataccctggtagtccacgccgtaaacgatgtcaactagccgttggaatccttgagattttagtggcgcagctaacgcattaagttgaccgcctggggagtacggccgcaaggttaaaactcaaatgaattgacgggggcccgcacaagcggtggagcatgtggtttaattcgaagcaacgcgaagaaccttaccaggccttgacatgcagagaactttccagagatggattggtgccttcgggaactctgacacaggtgctgcatggctgtcgtcagctcgtgtcgtgagatgttgggttaagtcccgtaacgagcgcaacccttgtccttagttaccagcacgttatggtgggcactctaaggagactgccggtgacaaaccggaggaaggtggggatgacgtcaagtcatcatggcccttacggcctgggctacacacgtgctacaatggtcggtacagagggttgccaagccgcgaggtggagctaatctcacaaaaccgatcgtagtccggatcgcagtctgcaactcgactgcgtgaagtcggaatcgctagtaatcgcgaatcagaatgtcgcggtgaatacgttcccgggccttgtacacaccgcccgtcacaccatgggagtgggttgcaccagaagtagctagtctaaccttcgggaggacggttaccacggtgtgattcatgactggggtg

SEQ ID NO: 2719 - DNA, 1404 bp, Pseudomonas duriflava
ctacacatgcaagtcgagcggatgaggagagcttgctctctgattcagcggcggacgggtgagtaatgcctaggaatctgcctgatagtgggggacaacgtttcgaaaggaacgctaataccgcatacgtcctacgggagaaagtgggggatcttcggacctcacgctatcagatgagcctaggtcggattagctagtaggtgaggtaatggctcacctaggcgacgatccgtaactggtctgagaggatgatcagtcacactggaactgagacacggtccagactcctacgggaggcagcagtggggaatattggacaatgggcgaaagcctgatccagccatgccgcgtgtgtgaagaaggccctcgggtcgtaaagcactttaagctgggaggaagggttgtaacctaatacgttgcagctttgacgttaccagcagaataagcaccggctaactctgtgccagcagccgcggtaatacagagggtgcaagcgttaatcggaattactgggcgtaaagcgcgcgtaggtggcttgataagttggatgtgaaatccccgggctcaacctgggaactgcatccaaaactgtctggctagagtacggtagagggtggtggaatttcctgtgtagcggtgaaatgcgtagatataggaaggaacaccagtggcgaaggcgaccacctggactgatactgacactgaggtgcgaaagcgtggggagcaaacaggattagataccctggtagtccacgccgtaaacgatgtcaactagccgttgggttccttgaggacttagtggcgcagctaacgcaataagttgaccgcctggggagtacggccgcaaggttaaaactcaaatgaattgacgggggcccgcacaagcggtggagcatgtggtttaattcgaagcaacgcgaagaaccttacctggccttgacatgctgcgaatctgagagagatctcggagtgccttcgggaacgcagacacaggtgctgcatggctgtcgtcagctcgtgtcgtgagatgttgggttaagtcccgtaacgagcgcaacccttgtccttagttaccagcacgttatggtgggcactctaaggagactgccggtgacaaaccggaggaaggtggggatgacgtcaagtcatcatggcccttacggccagggctacacacgtgctacaatggtcggtacaaagggttgccaagccgcgaggtggagctaatctcagaaaaccgatcgtagtccggatcgcagtctgcaactcgactgcgtgaagtcggaatcgctagtaatcgtgaatcagaacgtcacggtgaatacgttcccgggccttgtacacaccgcccgtcacaccatgggagtgggttgcaccagaagtagctagtctaaccttcgggag

SEQ ID NO: 2720 - DNA, 1459 bp, Pseudomonas endophytica
attgaacgctggcggcaggcctaacacatgcaagtcgagcggtagagagaagcttgcttctcttgagagcggcggacgggtgagtaatacctaggaatctgcctgatagtgggggataacgttcggaaacggacgctaataccgcatacgtcctacgggagaaagcaggggaccttcgggccttgcgctatcagatgagcctaggtcggattagctagttggtgaggtaatggctcaccaaggctacgatccgtaactggtctgagaggatgatcagtcacactggaactgagacacggtccagactcctacgggaggcagcagtggggaatattggacaatgggcgaaagcctgatccagccatgccgcgtgtgtgaagaaggtcttcggattgtaaagcactttaagttgggaggaagggtattaacctaatacgttagtactttgacgttaccgacagaataagcaccggctaactctgtgccagcagccgcggtaatacagagggtgcaagcgttaatcggaattactgggcgtaaagcgcgcgtaggtggtttgttaagttgaatgtgaaatccccgggctcaacctgggaactgcatccaaaactggcaagctagagtatggtagagggtagtggaatttcctgtgtagcggtgaaatgcgtagatataggaaggaacaccagtggcgaaggcgactacctggactgatactgacactgaggtgcgaaagcgtggggagcaaacaggattagataccctggtagtccacgccgtaaacgatgtcaactagccgttgggagtcttgaactcttagtggcgcagctaacgcattaagttgaccgcctggggagtacggccgcaaggttaaaactcaaatgaattgacgggggcccgcacaagcggtggagcatgtggtttaattcgaagcaacgcgaagaaccttaccaggccttgacatccaatgaactttctagagatagattggtgccttcgggaacattgagacaggtgctgcatggctgtcgtcagctcgtgtcgtgagatgttgggttaagtcccgtaacgagcgcaacccttgtccttagttaccagcacgtaatggtgggcactctaaggagactgccggtgacaaaccggaggaaggtggggatgacgtcaagtcatcatggcccttacggcctgggctacacacgtgctacaatggtcggtacaaagggttgccaagccgcgaggtggagctaatcccataaaaccgatcgtagtccggatcgcagtctgcaactcgactgcgtgaagtcggaatcgctagtaatcgtgaatcagaatgtcacggtgaatacgttcccgggccttgtacacaccgcccgtcacaccatgggagtgggttgcaccagaagtagctagtctaaccttcgggaggacggttaccacggtgtgattcatgactggggtg

SEQ ID NO: 2721 - DNA, 1459 bp, Pseudomonas entomophila
attgaacgctggcggcaggcctaacacatgcaagtcgagcggatgacgggagcttgctccttgattcagcggcggacgggtgagtaatgcctaggaatctgcctggtagtgggggacaacgtttcgaaaggaacgctaataccgcatacgtcctacgggagaaagcaggggaccttcgggccttgcgctatcagatgagcctaggtcggattagctagttggtggggtaatggctcaccaaggcgacgatccgtaactggtctgagaggatgatcagtcacactggaactgagacacggtccagactcctacgggaggcagcagtggggaatattggacaatgggcgaaagcctgatccagccatgccgcgtgtgtgaagaaggtcttcggattgtaaagcactttaagttgggaggaagggcagtaagttaataccttgctgttttgacgttaccgacagaataagcaccggctaactctgtgccagcagccgcggtaatacagagggtgcaagcgttaatcggaattactgggcgtaaagcgcgcgtaggtggttcgttaagttggatgtgaaagccccgggctcaacctgggaactgcatccaaaactggcgagctagagtatggtagagggtggtggaatttcctgtgtagcggtgaaatgcgtagatataggaaggaacaccagtggcgaaggcgaccacctggactgatactgacactgaggtgcgaaagcgtggggagcaaacaggattagataccctggtagtccacgccgtaaacgatgtcaactagccgttggaatccttgagattttagtggcgcagctaacgcattaagttgaccgcctggggagtacggccgcaaggttaaaactcaaatgaattgacgggggcccgcacaagcggtggagcatgtggtttaattcgaagcaacgcgaagaaccttaccaggccttgacatgcagagaactttccagagatggattggtgccttcgggaactctgacacaggtgctgcatggctgtcgtcagctcgtgtcgtgagatgttgggttaagtcccgtaacgagcgcaacccttgtccttagttaccagcacgttatggtgggcactctaaggagactgccggtgacaaaccggaggaaggtggggatgacgtcaagtcatcatggcccttacggcctgggctacacacgtgctacaatggtcggtacagagggttgccaagccgcgaggtggagctaatctcacaaaaccgatcgtagtccggatcgcagtctgcaactcgactgcgtgaagtcggaatcgctagtaatcgcaaatcagaatgttgcggtgaatacgttcccgggccttgtacacaccgcccgtcacaccatgggagtgggttgcaccagaagtagctagtctaaccttcggggggacggttaccacggtgtgattcatgactggggtg

SEQ ID NO: 2722 - DNA, 1459 bp, Pseudomonas extremaustralis
attgaacgctggcggcaggcctaacacatgcaagtcgagcggtagagagaagcttgcttctcttgagagcggcggacgggtgagtaatgcctaggaatctgcctggtagtgggggataacgttcggaaacggacgctaataccgcatacgtcctacgggagaaagcaggggaccttcgggccttgcgctatcagatgagcctaggtcggattagctagttggtgaggtaatggctcaccaaggcgacgatccgtaactggtctgagaggatgatcagtcacactggaactgagacacggtccagactcctacgggaggcagcagtggggaatattggacaatgggcgaaagcctgatccagccatgccgcgtgtgtgaagaaggtcttcggattgtaaagcactttaagttgggaggaagggcagttacctaatacgtgattgttttgacgttaccgacagaataagcaccggctaactctgtgccagcagccgcggtaatacagagggtgcaagcgttaatcggaattactgggcgtaaagcgcgcgtaggtggtttgttaagttggatgtgaaatccccgggctcaacctgggaactgcattcaaaactgactgactagagtatggtagagggtggtggaatttcctgtgtagcggtgaaatgcgtagatataggaaggaacaccagtggcgaaggcgaccacctggactgatactgacactgaggtgcgaaagcgtggggagcaaacaggattagataccctggtagtccacgccgtaaacgatgtcaactagccgttgggagccttgagctcttagtggcgcagctaacgcattaagttgaccgcctggggagtacggccgcaaggttaaaactcaaatgaattgacgggggcccgcacaagcggtggagcatgtggtttaattcgaagcaacgcgaagaaccttaccaggccttgacatccaatgaactttctagagatagattggtgccttcgggaacattgagacaggtgctgcatggctgtcgtcagctcgtgtcgtgagatgttgggttaagtcccgtaacgagcgcaacccttgtccttagttaccagcacgtaatggtgggcactctaaggagactgccggtgacaaaccggaggaaggtggggatgacgtcaagtcatcatggcccttacggcctgggctacacacgtgctacaatggtcggtacagagggttgccaagccgcgaggtggagctaatcccagaaaaccgatcgtagtccggatcgcagtctgcaactcgactgcgtgaagtcggaatcgctagtaatcgcgaatcagaatgtcgcggtgaatacgttcccgggccttgtacacaccgcccgtcacaccatgggagtgggttgcaccagaagtagctagtctaaccctcgggaggacggttaccacggtgtgattcatgactggggtg

SEQ ID NO: 2723 - DNA, 1457 bp, Pseudomonas extremorientalis
attgaacgctggcggcaggcctaacacatgcaagtcgagcggtagagagaagcttgcttctcttgagagcggcggacgggtgagtaatgcctaggaatctgcctggtagtgggggataacgttcggaaacgaacgctaataccgcatacgtcctacgggagaaagcaggggaccttcgggccttgcgctatcagatgagcctaggtcggattagctagttggtgaggtaatggctcaccaaggcgacgatccgtaactggtctgagaggatgatcagtcacactggaactgagacacggtccagactcctacgggaggcagcagtggggaatattggacaatgggcgaaagcctgatccagccatgccgcgtgtgtgaagaaggtcttcggattgtaaagcactttaagttgggaggaagggcagttacctaatacgtgattgttttgacgttaccgacagaataagcaccggctaactctgtgccagcagccgcggtaatacagagggtgcaagcgttaatcggaattactgggcgtaaagcgcgcgtaggtggtttgttaagttggatgtgaaatccccgggctcaacctgggaactgcattcaaaactgactgactagagtatggtagagggtggtggaatttcctgtgtagcggtgaaatgcgtagatataggaaggaacaccagtggcgaaggcgaccacctggactaatactgacactgaggtgcgaaagcgtggggagcaaacaggattagataccctggtagtccacgccgtaaacgatgtcaactagccgttggaagccttgagcttttagtggcgcagctaacgcattaagttgaccgcctggggagtacggccgcaaggttaaaactcaaatgaattgacgggggcccgcacaagcggtggagcatgtggtttaattcgaagcaacgcgaagaaccttaccaggccttgacatccatgaactttccagagatggattggtgccttcggaacattgagacaggtgctgcatggctgtcgtcagctcgtgtcgtgagatgttgggttaagtcccgtaacgagcgcaacccttgtccttagttaccagcacgtaatggtgggcactctaaggagactgccggtgacaaaccggaggaaggtggggatgacgtcaagtcatcatggcccttacggcctgggctacacacgtgctacaatggtcggtacagagggttgccaagccgcgaggtggagctaatcccataaaaccgatcgtagtccggatcgcagtctgcaactcgactgcgtgaagtcggaatcgctagtaatcgcgaatcagaatgtcgcggtgaatacgttcccgggccttgtacacaccgcccgtcacaccatgggagtgggttgcaccagaagtagctagtctaaccttcggggggacggttaccacggtgtgattcatgactggggtg

SEQ ID NO: 2724 - DNA, 1442 bp, Pseudomonas ficuserectae
  misc_feature (80)..(80): n is a, c, g, or t
  misc_feature (811)..(812): n is a, c, g, or t
  misc_feature (856)..(859): n is a, c, g, or t
cctaacacatgcaagtcgagcggcagcacgggtacttgtacctggtggcgagcggcggacgggtgagtaatgcctaggantctgcctggtagtgggggataacgctcggaaacggacgctaataccgcatacgtcctacgggagaaagcaggggaccttcgggccttgcgctatcagatgagcctaggtcggattagctagttggtgaggtaatggctcaccaaggcgacgatccgtaactggtctgagaggatgatcagtcacactggaactgagacacggtccagactcctacgggaggcagcagtggggaatattggacaatgggcgaaagcctgatccagccatgccgcgtgtgtgaagaaggtcttcggattgtaaagcactttaagttgggaggaagggcagttacctaatacgtgattgttttgacgttaccgacagaataagcaccggctaactctgtgccagcagccgcggtaatacagagggtgcaagcgttaatcggaattactgggcgtaaagcgcgcgtaggtggtttgttaagttgaatgtgaaatccccgggctcaacctgggaactgcatccaaaactggcaagctagagtatggtagagggtggtggaatttcctgtgtagcggtgaaatgcgtagatataggaaggaacaccagtggcgaaggcgaccacctggactgatactgacactgaggtgcgaaagcgtggggagcaaacaggattagataccctggtagtccacgccgtaaacgatgtcaactagccgttgggagccttgagctcttagtggcgcanntaacgcattaagttgaccgcctggggagtacggccgcaaggttnnnnctcaaatgaattgacgggggcccgcacaagcggtggagcatgtggtttaattcgaagcaacgcgaagaaccttaccaggccttgacatccaatgaactttccagagatggattggtgccttcgggaacattgagacaggtgctgcatggctgtcgtcagctcgtgtcgtgagatgttgggttaagtcccgtaacgagcgcaacccttgtccttagttaccagcacgttatggtgggcactctaaggagactgccggtgacaaaccggaggaaggtggggatgacgtcaagtcatcatggcccttacggcctgggctacacacgtgctacaatggtcggtacagagggttgccaagccgcgaggtggagctaatctcacaaaaccgatcgtagtccggatcgcagtctgcaactcgactgcgtgaagtcggaatcgctagtaatcgcgaatcagaatgtcgcggtgaatacgttcccgggccttgtacacaccgcccgtcacaccatgggagtgggttgcaccagaagtagctagtctaaccttcgggaggacggttaccacggtgtgattcatgactggggtg

SEQ ID NO: 2725 - DNA, 1459 bp, Pseudomonas flavescens
attgaacgctggcggcaggcctaacacatgcaagtcgagcggttgaggggagcttgctccctgattcagcggcggacgggtgagtaatgcctaggaatctgcctattagtgggggacaacgtttcgaaaggaacgctaataccgcatacgtcctacgggagaaagcaggggaccttcgggccttgcgctaatagatgagcctaggtcggattagctagttggtggggtaaaggctcaccaaggcgacgatccgtaactggtctgagaggatgatcagtcacactggaactgagacacggtccagactcctacgggaggcagcagtggggaatattggacaatgggcgaaagcctgatccagccatgccgcgtgtgtgaagaaggtcttcggattgtaaagcactttaagttgggaggaagggcagtaagcgaataccttgctgttttgacgttaccgacagaataagcaccggctaactctgtgccagcagccgcggtaatacagagggtgcaagcgttaatcggaattactgggcgtaaagcgcgcgtaggtggtttgttaagttggatgtgaaagccccgggctcaacctgggaactgcatccaaaactggcaagctagagtacggtagagggtggtggaatttcctgtgtagcggtgaaatgcgtagatataggaaggaacaccagtggcgaaggcgaccacctggactgatactgacactgaggtgcgaaagcgtggggagcaaacaggattagataccctggtagtccacgccgtaaacgatgtcaactagccgttggaatccttgagattttagtggcgcagctaacgcattaagttgaccgcctggggagtacggccgcaaggttaaaactcaaatgaattgacgggggcccgcacaagcggtggagcatgtggtttaattcgaagcaacgcgaagaaccttacctggccttgacatgctgagaactttccagagatggattggtgccttcgggaactcagacacaggtgctgcatggctgtcgtcagctcgtgtcgtgagatgttgggttaagtcccgtaacgagcgcaacccttgtccttagttaccagcacgttatggtgggaactctaaggagactgccggtgacaaaccggaggaaggtggggatgacgtcaagtcatcatggcccttacggccagggctacacacgtgctacaatggtcggtacaaagggttgccaagccgcgaggtggagctaatcccataaaaccgatcgtagtccggatcgcagtctgcaactcgactgcgtgaagtcggaatcgctagtaatcgtgaatcagaatgtcacggtgaatacgttcccgggccttgtacacaccgcccgtcacaccatgggagtgggttgcaccagaagtagctagtctaaccttcggggggacggttaccacggtgtgattcatgactggggtg

SEQ ID NO: 2726 - DNA, 1459 bp, Pseudomonas flexibilis
attgaacgctggcggcaggcctaacacatgcaagtcgagcggatgagggtagcttgctacctgattcagcggcggacgggtgagtaatgcctaggaatctgcccgatagtgggggataacgttccgaaaggaacgctaataccgcatacgtcctacgggagaaagcgggggatcttcggacctcgcgctatcggatgagcctaggtcggattagctagttggtggggtaaaggctcaccaaggcgacgatccgtagctggtctgagaggatgatcagccacactggaactgagacacggtccagactcctacgggaggcagcagtggggaatattggacaatgggcgaaagcctgatccagccatgccgcgtgtgtgaagaaggtcttcggattgtaaagcactttaagttgggaggaagggttgtaacctaatacgttgcaactttgacgttaccgacagaataagcaccggctaacttcgtgccagcagccgcggtaatacgaagggtgcaagcgttaatcggaattactgggcgtaaagcgcgcgtaggtggtttgataagttggatgtgaaagccccgggctcaacctgggaattgcatccaaaactgtctgactagagtacggtagagggtagtggaatttcctgtgtagcggtgaaatgcgtagatataggaaggaacaccagtggcgaaggcgactacctggactgatactgacactgaggtgcgaaagcgtggggagcaaacaggattagataccctggtagtccacgccgtaaacgatgtcaactagttgttgggttccttgaggacttagtaacgcagctaacgcattaagttgaccgcctggggagtacggccgcaaggttaaaactcaaatgaattgacgggggcccgcacaagcggtggagcatgtggtttaattcgaagcaacgcgaagaaccttacctggccttgacatgctgagaactttccagagatggattggtgccttcgggaactcagacacaggtgctgcatggctgtcgtcagctcgtgtcgtgagatgttgggttaagtcccgtaacgagcgcaacccttgtccttagttaccagcacgttatggtgggcactctaaggagactgccggtgacaaaccggaggaaggtggggatgacgtcaagtcatcatggcccttacggccagggctacacacgtgctacaatggtcggtacaaagggttgccaagccgcgaggtggagctaatcccataaaaccgatcgtagtccggatcgcagtctgcaactcgactgcgtgaagtcggaatcgctagtaatcgtgaatcagaatgtcacggtgaatacgttcccgggccttgtacacaccgcccgtcacaccatgggagtgggttgctccagaagtagctagtctaaccttcggggggacggttaccacggagtgattcatgactggggtg

SEQ ID NO: 2727 - DNA, 1459 bp, Pseudomonas floridensis
attgaacgctggcggcaggcctaacacatgcaagtcgagcggtagagaggtgcttgcacctcttgagagcggcggacgggtgagtaatgcctaggaatctgcctggtagtgggggataacgctcggaaacggacgctaataccgcatacgtcctacgggagaaagcaggggaccttcgggccttgcgctatcagatgagcctaggtcggattagctagttggtgaggtaatggctcaccaaggcgacgatccgtaactggtctgagaggatgatcagtcacactggaactgagacacggtccagactcctacgggaggcagcagtggggaatattggacaatgggcgcaagcctgatccagccatgccgcgtgtgtgaagaaggtcttcggattgtaaagcactttaagttgggaggaagggccattacctaatacgtggtggttttgacgttaccgacagaataagcaccggctaactctgtgccagcagccgcggtaatacagagggtgcaagcgttaatcggaattactgggcgtaaagcgcgcgtaggtggtttgttaagttgaatgtgaaatccccgggctcaacctgggaactgcatccaaaactggcaagctagagtagggcagagggtggtggaatttcctgtgtagcggtgaaatgcgtagatataggaaggaacaccagtggcgaaggcgaccacctgggctcatactgacactgaggtgcgaaagcgtggggagcaaacaggattagataccctggtagtccacgccgtaaacgatgtcaactagccgttggaatccttgagattttagtggcgcagctaacgcattaagttgaccgcctggggagtacggccgcaaggttaaaactcaaatgaattgacgggggcccgcacaagcggtggagcatgtggtttaattcgaagcaacgcgaagaaccttaccaggccttgacatccaatgaaccttccagagatggaggggtgccttcgggagcattgagacaggtgctgcatggctgtcgtcagctcgtgtcgtgagatgttgggttaagtcccgtaacgagcgcaacccttgtccttagttaccagcacgttaaggtgggcactctaaggagactgccggtgacaaaccggaggaaggtggggatgacgtcaagtcatcatggcccttacggcctgggctacacacgtgctacaatggtcggtacagagggttgccaagccgcgaggtggagctaatctcacaaaaccgatcgtagtccggatcgcagtctgcaactcgactgcgtgaagtcggaatcgctagtaatcgcgaatcagaatgtcgcggtgaatacgttcccgggccttgtacacaccgcccgtcacaccatgggagtgggttgcaccagaagtagctagtctaaccttcgggaggacggttaccacggtgtgattcatgactggggtg

SEQ ID NO: 2728 - DNA, 1460 bp, Pseudomonas frederiksbergensis
attgaacgctggcggcaggcctaacacatgcaagtcgagcggcagcacgggtacttgtacctggtggcgagcggcggacgggtgagtaatgcctaggaatctgcctggtagtgggggataacgctcggaaacggacgctaataccgcatacgtcctacgggagaaagcaggggaccttcgggccttgcgctatcagatgagcctaggtcggattagctagttggtgaggtaatggctcaccaaggcgacgatccgtaactggtctgagaggatgatcagtcacactggaactgagacacggtccagactcctacgggaggcagcagtggggaatattggacaatgggcgaaagcctgatccagccatgccgcgtgtgtgaagaaggtcttcggattgtaaagcactttaagttgggaggaagggcatttacctaatacgtaagtgttttgacgttaccgacagaataagcaccggctaactctgtgccagcagccgcggtaatacagagggtgcaagcgttaatcggaattactgggcgtaaagcgcgcgtaggtggttcgttaagttggatgtgaaatccccgggctcaacctgggaactgcattcaaaactgtcgagctagagtatggtagagggtggtggaatttcctgtgtagcggtgaaatgcgtagatataggaaggaacaccagtggcgaaggcgaccacctggactgatactgacactgaggtgcgaaagcgtggggagcaaacaggattagataccctggtagtccacgccgtaaacgatgtcaactagccgttgggagccttgagctcttagtggcgcagctaacgcattaagttgaccgcctggggagtacggccgcaaggttaaaactcaaatgaattgacgggggcccgcacaagcggtggagcatgtggtttaattcgaagcaacgcgaagaaccttaccaggccttgacatccaatgaactttccagagatggattggtgccttcgggaacattgagacaggtgctgcatggctgtcgtcagctcgtgtcgtgagatgttgggttaagtcccgtaacgagcgcaacccttgtccttagttaccagcacgtaatggtgggcactctaaggagactgccggtgacaaaccggaggaaggtggggatgacgtcaagtcatcatggcccttacggcctgggctacacacgtgctacaatggtcggtacagagggttgccaagccgcgaggtggagctaatcccagaaaaccgatcgtagtccggatcgcagtctgcaactcgactgcgtgaagtcggaatcgctagtaatcgcgaatcagaatgtcgcggtgaatacgttcccgggccttgtacacaccgccgtcacaccatgggaatgggttgcaccagaagtagctagtctaaccttcgggaggacggttaccacggtgtgattcatgactggggtg

SEQ ID NO: 2729 - DNA, 1459 bp, Pseudomonas fuscovaginae
attgaacgctggcggcaggcctaacacatgcaagtcgagcggatgagaagagcttgctcttcgattcagcggcggacgggtgagtaatgcctaggaatctgcctggtagtgggggacaacgtttcgaaaggaacgctaataccgcatacgtcctacgggagaaagcaggggaccttcgggccttgcgctatcagatgagcctaggtcggattagctagttggtgaggtaatggctcaccaaggcgacgatccgtaactggtctgagaggatgatcagtcacactggaactgagacacggtccagactcctacgggaggcagcagtggggaatattggacaatgggcgaaagcctgatccagccatgccgcgtgtgtgaagaaggtcttcggattgtaaagcactttaagttgggaggaagggcattaacctaatacgttagtgttttgacgttaccgacagaataagcaccggctaactctgtgccagcagccgcggtaatacagagggtgcaagcgttaatcggaattactgggcgtaaagcgcgcgtaggtggttcgttaagttggatgtgaaatccccgggctcaacctgggaactgcatccaaaactggcgagctagagtagggtagagggtggtggaatttcctgtgtagcggtgaaatgcgtagatataggaaggaacaccagtggcgaaggcgaccacctggactcatactgacactgaggtgcgaaagcgtggggagcaaacaggattagataccctggtagtccacgccgtaaacgatgtcaactagccgttgggaaccttgagttcttagtggcgcagctaacgcattaagttgaccgcctggggagtacggccgcaaggttaaaactcaaatgaattgacgggggcccgcacaagcggtggagcatgtggtttaattcgaagcaacgcgaagaaccttaccaggccttgacatgcagagaactttccagagatggatcggtgccttcgggaactctgacacaggtgctgcatggctgtcgtcagctcgtgtcgtgagatgttgggttaagtcccgtaacgagcgcaacccttgtccttagttaccagcacgtcatggtgggcactctaaggagactgccggtgacaaaccggaggaaggtggggatgacgtcaagtcatcatggcccttacggcctgggctacacacgtgctacaatggtcggtacagagggttgccaagccgcgaggtggagctaatcccacaaaaccgatcgtagtccggatcgcagtctgcaactcgactgcgtgaagtcggaatcgctagtaatcgcgaatcagaatgtcgcggtgaatacgttcccgggccttgtacacaccgcccgtcacaccatgggagtgggttgcaccagaagtagctagtctaaccttcgggaggacggttaccacggtgtgattcatgactggggtg

SEQ ID NO: 2730 - DNA, 1425 bp, Pseudomonas geniculata
  misc_feature (83)..(83): n is a, c, g, or t
  misc_feature (109)..(109): n is a, c, g, or t
  misc_feature (152)..(152): n is a, c, g, or t
  misc_feature (810)..(811): n is a, c, g, or t
acatgcaagtcgaacggcagcacagaggagcttgctccttgggtggcgagtggcggacgggtgaggaatacatcggaatctantctgtcgtgggggataacgtaggganacttacgctaataccgcatacgacctacgggtgaaagcagggnaccttcgggccttgcgcgattgaatgagccgatgtcggattagctagttggcggggtaaaggcccaccaaggcgacgatccgtagctggtctgagaggatgatcagccacactggaactgagacacggtccagactcctacgggaggcagcagtggggaatattggacaatgggcgcaagcctgatccagccataccgcgtgggtgaagaaggccttcgggttgtaaagcccttttgttgggaaagaaatccagctggctaatacccggttgggatgacggtacccaaagaataagcaccggctaacttcgtgccagcagccgcggtaatacgaagggtgcaagcgttactcggaattactgggcgtaaagcgtgcgtaggtggtcgtttaagtccgttgtgaaagccctgggctcaacctgggaactgcagtggatactgggcgactagagtgtggtagagggtagcggaattcctggtgtagcagtgaaatgcgtagagatcaggaggaacatccatggcgaaggcagctacctggaccaacactgacactgaggcacgaaagcgtggggagcaaacaggattagataccctggtagtccacgccctaaacgatgcgaactggatgttgggtgcaatttggcacgcagtatcgaanntaacgcgttaagttcgccgcctggggagtacggtcgcaagactgaaactcaaaggaattgacgggggcccgcacaagcggtggagtatgtggtttaattcgatgcaacgcgaagaaccttacctggccttgacatgtcgagaactttccagagatggattggtgccttcgggaactcgaacacaggtgctgcatggctgtcgtcagctcgtgtcgtgagatgttgggttaagtcccgcaacgagcgcaacccttgtccttagttgccagcacgtaatggtgggaactctaaggagaccgccggtgacaaaccggaggaaggtggggatgacgtcaagtcatcatggcccttacggccagggctacacacgtactacaatggtagggacagagggctgcaagccggcgacggtaagccaatcccagaaaccctatctcagtccggattggagtctgcaactcgactccatgaagtcggaatcgctagtaatcgcagatcagcattgctgcggtgaatacgttcccgggccttgtacacaccgcccgtcacaccatgggagtttgttgcaccagaagcaggtagcttaaccttcgggagggcgcttgccacggtgt

SEQ ID NO: 2731 - DNA, 1459 bp, Pseudomonas graminis
attgaacgctggcggcaggcctaacacatgcaagtcgagcggatgaagagagcttgctctctgattcagcggcggacgggtgagtaatgcctaggaatctgcctggtagtgggggacaacgtctcgaaagggacgctaataccgcatacgtcctacgggagaaagcaggggaccttcgggccttgcgctatcagatgagcctaggtcggattagctagttggtgaggtaatggctcaccaaggcgacgatccgtaactggtctgagaggatgatcagtcacactggaactgagacacggtccagactcctacgggaggcagcagtggggaatattggacaatgggcgaaagcctgatccagccatgccgcgtgtgtgaagaaggtcttcggattgtaaagcactttaagttgggaggaagggcagtaagcgaataccttgctgttttgacgttaccgacagaataagcaccggctaactctgtgccagcagccgcggtaatacagagggtgcaagcgttaatcggaattactgggcgtaaagcgcgcgtaggtggtttgttaagttgaatgtgaaatccccgggctcaacctgggaactgcatccaaaactggcaagctagagtagggcagagggtggtggaatttcctgtgtagcggtgaaatgcgtagatataggaaggaacaccagtggcgaaggcgaccacctgggctcatactgacactgaggtgcgaaagcgtggggagcaaacaggattagataccctggtagtccacgccgtaaacgatgtcaactagccgttggaagccttgagcttttagtggcgcagctaacgcattaagttgaccgcctggggagtacggccgcaaggttaaaactcaaatgaattgacgggggcccgcacaagcggtggagcatgtggtttaattcgaagcaacgcgaagaaccttaccaggccttgacatccaatgaactttccagagatggattggtgccttcgggaacattgagacaggtgctgcatggctgtcgtcagctcgtgtcgtgagatgttgggttaagtcccgtaacgagcgcaacccttgtccttagttaccagcacattatggtgggcactctaaggagactgccggtgacaaaccggaggaaggtggggatgacgtcaagtcatcatggcccttacggcctgggctacacacgtgctacaatggtcggtacagagggttgctaagccgcgaggtggagctaatcccagaaaaccgatcgtagtccggatcgcagtctgcaactcgactgcgtgaagtcggaatcgctagtaatcgcgaatcagaatgtcgcggtgaatacgttcccgggccttgtacacaccgcccgtcacaccatgggagtgggttgcaccagaagtagctagtctaaccttcgggaggacggttaccacggtgtgattcatgactggggtg

SEQ ID NO: 2732 - DNA, 1451 bp, Pseudomonas grimontii
  misc_feature (419)..(419): n is a, c, g, or t
ctggcggcaggcctaacacatgcaagtcgagcggtagagagaagcttgcttctcttgagagcggcggacgggtgagtaatgcctaggaatctgcctggtagtgggggataacgttcggaaacggacgctaataccgcatacgtcctacgggagaaagcaggggaccttcgggccttgcgctatcagatgagcctaggtcggattagctagttggtgaggtaatggctcaccaaggcgacgatccgtaactggtctgagaggatgatcagtcacactggaactgagacacggtccagactcctacgggaggcagcagtggggaatattggacaatgggcgaaagcctgatccagccatgccgcgtgtgtgaagaaggtcttcggattgtaaagcactttaagttgggaggaagggccatnacctaatacgtgatggttttgacgttaccgacagaataagcaccggctaactctgtgccagcagccgcggtaatacagagggtgcaagcgttaatcggaattactgggcgtaaagcgcgcgtaggtggtttgttaagttggatgtgaaatccccgggctcaacctgggaactgcattcaaaactgactgactagagtatggtagagggtggtggaatttcctgtgtagcggtgaaatgcgtagatataggaaggaacaccagtggcgaaggcgaccacctggactgatactgacactgaggtgcgaaagcgtggggagcaaacaggattagataccctggtagtccacgccgtaaacgatgtcaactagccgttgggagccttgagctcttagtggcgcagctaacgcattaagttgaccgcctggggagtacggccgcaaggttaaaactcaaatgaattgacgggggcccgcacaagcggtggagcatgtggtttaattcgaagcaacgcgaagaaccttaccaggccttgacatccaatgaactttctagagatagattggtgccttcgggaacattgagacaggtgctgcatggctgtcgtcagctcgtgtcgtgagatgttgggttaagtcccgtaacgagcgcaacccttgtccttagttaccagcacgtaatggtgggcactctaaggagactgccggtgacaaaccggaggaaggtggggatgacgtcaagtcatcatggcccttacggcctgggctacacacgtgctacaatggtcggtacagagggttgccaagccgcgaggtggagctaatcccagaaaaccgatcgtagtccggatcgcagtctgcaactcgactgcgtgaagtcggaatcgctagtaatcgcgaatcagaatgtcgcggtgaatacgttcccgggccttgtacacaccgcccgtcacaccatgggagtgggttgcaccagaagtagctagtctaaccttcgggaggacggttaccacggtgtgattcatgactggggtg

SEQ ID NO: 2733 - DNA, 1459 bp, Pseudomonas guangdongensis
attgaacgctggcggcaggcctaacacatgcaagtcgagcggatgaaggtagcttgctaccggattcagcggcggacgggtgagtaatgcctaggaatctgcccggtaatgggggataacgtttcgaaaggaacgctaataccgcatacgtcctacgggagaaagcaggggaccttcgggccttgcgttatcggatgagcctaggtcggattagctagttggtgaggtaatggctcaccaaggcgacgatccgtaactggtctgagaggatgatcagtcacactggaactgagacacggtccagactcctacgggaggcagcagtggggaatattggacaatgggcgaaagcctgatccagccatgccgcgtgtgtgaagaaggtcttcggattgtaaagcactttaagttgggaggaagggcagtcagttaataccttgctgtcttgacgttaccaacagaataagcaccggctaacttcgtgccagcagccgcggtaatacgaagggtgcaagcgttaatcggaattactgggcgtaaagcgcgcgtaggtggttcagcaagttggatgtgaaagccccgggctcaacctgggaactgcatccaaaactactgagctagagtacggtagagggtggtggaatttcctgtgtagcggtgaaatgcgtagatataggaaggaacaccagtggcgaaggcgaccacctggactgatactgacactgaggtgcgaaagcgtggggagcaaacaggattagataccctggtagtccacgccgtaaacgatgtcaactagttgttgggttccttgagaacttagtaacgaagctaacgcgataagttgaccgcctggggagtacggccgcaaggttaaaactcaaatgaattgacgggggcccgcacaagcggtggagcatgtggtttaattcgaagcaacgcgaagaaccttacctggccttgacatgcagagaactttccagagatggattggtgccttcgggagctctgacacaggtgctgcatggctgtcgtcagctcgtgtcgtgagatgttgggttaagtcccgtaacgagcgcaacccttgtccttagttaccagcacgttatggtgggcactctaaggagactgccggtgacaaaccggaggaaggtggggatgacgtcaagtcatcatggcccttacggccagggctacacacgtgctacaatggtcggtacagagggttgccaagccgcgaggtggagctaatcccacaaaaccgatcgtagtccggatcgcagtctgcaactcgactgcgtgaagtcggaatcgctagtaatcgtgaatcagaatgtcacggtgaatacgttcccgggccttgtacacaccgcccgtcacaccatgggagtgggttgctccagaagtagctagtctaaccttagggagggcggttaccacggagtgattcatgactggggtg

SEQ ID NO: 2734 - DNA, 1459 bp, Pseudomonas guariconensis
attgaacgctggcggcaggcctaacacatgcaagtcgagcggatgacgggagcttgctccttgattcagcggcggacgggtgagtaatgcctaggaatctgcctggtagtgggggacaacgttccgaaaggagcgctaataccgcatacgtcctacgggagaaagtgggggatcttcggacctcacgctatcagatgagcctaggtcggattagctagttggtgaggtaaaggctcaccaaggcgacgatccgtaactggtctgagaggatgatcagtcacactggaactgagacacggtccagactcctacgggaggcagcagtggggaatattggacaatgggcgaaagcctgatccagccatgccgcgtgtgtgaagaaggtcttcggattgtaaagcactttaagttgggaggaagggcagtaagttaataccttgctgttttgacgttaccgacagaataagcaccggctaactctgtgccagcagccgcggtaatacagagggtgcaagcgttaatcggaattactgggcgtaaagcgcgcgtaggtggttcgttaagttggatgtgaaagccccgggctcaacctgggaactgcatccaaaactggcgagctagagtatggtagagggtggtggaatttcctgtgtagcggtgaaatgcgtagatataggaaggaacaccagtggcgaaggcgaccacctggactgatactgacactgaggtgcgaaagcgtggggagcaaacaggattagataccctggtagtccacgccgtaaacgatgtcaactagccgttggaatccttgagattttagtggcgcagctaacgcattaagttgaccgcctggggagtacggccgcaaggttaaaactcaaatgaattgacgggggcccgcacaagcggtggagcatgtggtttaattcgaagcaacgcgaagaaccttaccaggccttgacatgcagagaactttccagagatggattggtgccttcgggaactctgacacaggtgctgcatggctgtcgtcagctcgtgtcgtgagatgttgggttaagtcccgtaacgagcgcaacccttgtccttagttaccagcacgttatggtgggcactctaaggagactgccggtgacaaaccggaggaaggtggggatgacgtcaagtcatcatggcccttacggcctgggctacacacgtgctacaatggtcggtacagagggttgccaagccgcgaggtggagctaatctcacaaaaccgatcgtagtccggatcgcagtctgcaactcgactgcgtgaagtcggaatcgctagtaatcgcgaatcagaatgtcgcggtgaatacgttcccgggccttgtacacaccgcccgtcacaccatgggagtgggttgcaccagaagtagctagtctaaccttcggggggacggttaccacggtgtgattcatgactggggtg

SEQ ID NO: 2735 - DNA, 1458 bp, Pseudomonas guguanensis
attgaacgctggcggcaggcctaacacatgcaagtcgagcggatgaggggagcttgctccctgatttagcggcggacgggtgagtaatgcctaggaatctgcctggtagtgggggataacgttccgaaaggaacgctaataccgcatacgtcctacgggagaaagcaggggaccttcgggccttgcgctatcagatgagcctaggtcggattagctagttggtgaggtaatggctcaccaaggcgacgatccgtaactggtctgagaggatgatcagtcacactggaactgagacacggtccagactcctacgggaggcagcagtggggaatattggacaatgggcgaaagcctgatccagccatgccgcgtgtgtgaagaaggtcttcggattgtaaagcactttaagttgggaggaagggctgctggttaataccctgcagttttgacgttaccaacagaataagcaccggctaacttcgtgccagcagccgcggtaatacgaagggtgcaagcgttaatcggaattactgggcgtaaagcgcgcgtaggtggttttgtaagttggaggtgaaatccccgggctcaacctgggaactgcctccaaaactgcatgactagagtacggtagagggtggtggaatttcctgtgtagcggtgaaatgcgtagatataggaaggaacaccagtggcgaaggcgaccacctggactgatactgacactgaggtgcgaaagcgtggggagcaaacaggattagataccctggtagtccacgccgtaaacgatgtcaactagccgttggaatccttgagattttagtggcgcagctaacgcattaagttgaccgcctggggagtacggccgcaaggttaaaactcaaatgaattgacgggggcccgcacaagcggtggagcatgtggtttaattcgaagcaacgcgaagaaccttacctggccttgacatgctgagaactttccagagatggattggtgccttcgggaactcagacacaggtgctgcatggctgtcgtcagctcgtgtcgtgagatgttgggttaagtcccgtaacgagcgcaacccttgtccttagttaccagcacctcgggtgggcactctaaggagactgccggtgacaaaccggaggaaggtggggatgacgtcaagtcatcatggcccttacggccagggctacacacgtgctacaatggtcggtacaaagggttgccaagccgcgaggtggagctaatcccataaaaccgatcgtagtccggatcgcagtctgcaactcgactgcgtgaagtcggaatcgctagtaatcgtgaatcagaatgtcacggtgaatacgttcccgggccttgtacacaccgcccgtcacaccatgggagtgggttgctccagaagtagctagtctaaccttcggggggacggttaccacggagtgattcatgactggggtg

SEQ ID NO: 2736 - DNA, 1459 bp, Pseudomonas guineae
attgaacgctggcggcaggcctaacacatgcaagtcgagcggtagagagaagcttgcttctcttgagagcggcggacgggtgagtaatgcctaggaatctgcctagtggtgggggataacgttcggaaacggacgctaataccgcatacgtcctacgggagaaagcgggggaccttcgggcctcgcgccattagatgagcctaggtcggattagctagttggtgaggtaatggctcaccaaggctacgatccgtaactggtctgagaggatgatcagtcacactggaactgagacacggtccagactcctacgggaggcagcagtggggaatattggacaatgggcgaaagcctgatccagccatgccgcgtgtgtgaagaaggtcttcggattgtaaagcactttaagttgggaggaagggtagtaacttaatacgttgctactttgacgttaccgacagaataagcaccggctaacttcgtgccagcagccgcggtaatacgaagggtgcaagcgttaatcggaattactgggcgtaaagcgcgcgtaggtggttcagtaagttgaatgtgaaatccccgggctcaacctgggaactgcatccaaaactgctgaactagagtacggtagagggtagtggaatttcctgtgtagcggtgaaatgcgtagatataggaaggaacaccagtggcgaaggcgactacctggactggtactgacactgaggtgcgaaagcgtggggagcaaacaggattagataccctggtagtccacgccgtaaacgatgtcaactagccgttgggagtcttgaactcttagtggcgcagctaacgcattaagttgaccgcctggggagtacggccgcaaggttaaaactcaaatgaattgacgggggcccgcacaagcggtggagcatgtggtttaattcgaagcaacgcgaagaaccttacctggccttgacatgctgagaactttctagagatagattggtgccttcgggaactcagacacaggtgctgcatggctgtcgtcagctcgtgtcgtgagatgttgggttaagtcccgtaacgagcgcaacccttgtccttagttaccagcacgtaatggtgggaactctaaggagactgccggtgacaaaccggaggaaggtggggatgacgtcaagtcatcatggcccttacggccagggctacacacgtgctacaatggtcggtacaaagggttgccaagccgcgaggtggagctaatcccataaaaccgatcgtagtccggatcgcagtctgcaactcgactgcgtgaagtcggaatcgctagtaatcgtgaatcagaatgtcacggtgaatacgttcccgggccttgtacacaccgcccgtcacaccatgggagtgggttgcaccagaagtagctagtctaaccttcgggaggacggttaccacggtgtgattcatgactggggtg

SEQ ID NO: 2737 - DNA, 1459 bp, Pseudomonas helleri
attgaacgctggcggcaggcctaacacatgcaagtcgagcggtagagagaagcttgcttctcttgagagcggcggacgggtgagtaatacctaggaatctgcctgatagtgggggataacgttcggaaacggacgctaataccgcatacgtcctacgggagaaagcaggggaccttcgggccttgcgctatcagatgagcctaggtcggattagctagttggtgaggtaatggctcaccaaggctacgatccgtaactggtctgagaggatgatcagtcacactggaactgagacacggtccagactcctacgggaggcagcagtggggaatattggacaatgggcgaaagcctgatccagccatgccgcgtgtgtgaagaaggtcttcggattgtaaagcactttaagttgggaggaagggcagtaaattaatactttgctgttttgacgttaccgacagaataagcaccggctaactctgtgccagcagccgcggtaatacagagggtgcaagcgttaatcggaattactgggcgtaaagcgcgcgtaggtggtttgttaagttgaatgtgaaatccccgggctcaacctgggaactgcatccaaaactggcaagctagagtatggtagagggtagtggaatttcctgtgtagcggtgaaatgcgtagatataggaaggaacaccagtggcgaaggcgactacctggactgatactgacactgaggtgcgaaagcgtggggagcaaacaggattagataccctggtagtccacgccgtaaacgatgtcaactagccgttgggagtcttgaactcttagtggcgcagctaacgcattaagttgaccgcctggggagtacggccgcaaggttaaaactcaaatgaattgacgggggcccgcacaagcggtggagcatgtggtttaattcgaagcaacgcgaagaaccttaccaggccttgacatccaatgaactttctagagatagattggtgccttcgggaacattgagacaggtgctgcatggctgtcgtcagctcgtgtcgtgagatgttgggttaagtcccgtaacgagcgcaacccttgtccttagttaccagcacgtaatggtgggcactctaaggagactgccggtgacaaaccggaggaaggtggggatgacgtcaagtcatcatggcccttacggcctgggctacacacgtgctacaatggtcggtacaaagggttgccaagccgcgaggtggagctaatcccataaaaccgatcgtagtccggatcgcagtctgcaactcgactgcgtgaagtcggaatcgctagtaatcgtgaatcagaatgtcacggtgaatacgttcccgggccttgtacacaccgcccgtcacaccatgggagtgggttgcaccagaagtagctagtctaaccttcgggaggacggttaccacggtgtgattcatgactggggtg

SEQ ID NO: 2738 - DNA, 1459 bp, Pseudomonas helmanticensis
attgaacgctggcggcaggcctaacacatgcaagtcgagcggatgagaggagcttgctcctggattcagcggcggacgggtgagtaatgcctaggaatctgcctggtagtgggggacaacgtttcgaaaggaacgctaataccgcatacgtcctacgggagaaagcaggggaccttcgggccttgcgctatcagatgagcctaggtcggattagctagttggtgaggtaatggctcaccaaggcgacgatccgtaactggtctgagaggatgatcagtcacactggaactgagacacggtccagactcctacgggaggcagcagtggggaatattggacaatgggcgaaagcctgatccagccatgccgcgtgtgtgaagaaggtcttcggattgtaaagcactttaagttgggaggaagggcagtaacttaatacgttgctgttttgacgttaccgacagaataagcaccggctaactctgtgccagcagccgcggtaatacagagggtgcaagcgttaatcggaattactgggcgtaaagcgcgcgtaggtggttcgttaagttggatgtgaaatccccgggctcaacctgggaactgcattcaaaactgtcgagctagagtatggtagagggtggtggaatttcctgtgtagcggtgaaatgcgtagatataggaaggaacaccagtggcgaaggcgaccacctggactgatactgacactgaggtgcgaaagcgtggggagcaaacaggattagataccctggtagtccacgccgtaaacgatgtcaactagccgttgggagccttgagctcttagtggcgcagctaacgcattaagttgaccgcctggggagtacggccgcaaggttaaaactcaaatgaattgacgggggcccgcacaagcggtggagcatgtggtttaattcgaagcaacgcgaagaaccttaccaggccttgacatccaatgaactttccagagatggattggtgccttcgggaacattgagacaggtgctgcatggctgtcgtcagctcgtgtcgtgagatgttgggttaagtcccgtaacgagcgcaacccttgtccttagttaccagcacgtaatggtgggcactctaaggagactgccggtgacaaaccggaggaaggtggggatgacgtcaagtcatcatggcccttacggcctgggctacacacgtgctacaatggtcggtacaaagggttgccaagccgcgaggtggagctaatcccataaaaccgatcgtagtccggatcgcagtctgcaactcgactgcgtgaagtcggaatcgctagtaatcgtgaatcagaatgtcacggtgaatacgttcccgggccttgtacacaccgcccgtcacaccatgggagtgggttgcaccagaagtagctagtctaaccttcgggaggacggttaccacggtgtgattcatgactggggtg

SEQ ID NO: 2739 - DNA, 1414 bp, Pseudomonas hunanensis
acccatgcaagtcgagcggatgacgggagcttgctccttgattcagcggcggacgggtgagtaatgcctaggaatctgcctggtagtgggggacaacgtttcgaaaggaacgctaataccgcatacgtcctacgggagaaagcaggggaccttcgggccttgcgctatcagatgagcctaggtcggattagctagttggtgaggtaatggctcaccaaggcgacgatccgtaactggtctgagaggatgatcagtcacactggaactgagacacggtccagactcctacgggaggcagcagtggggaatattggacaatgggcgaaagcctgatccagccatgccgcgtgtgtgaagaaggtcttcggattgtaaagcactttaagttgggaggaagggcagtaagctaataccttgctgttttgacgttaccgacagaataagcaccggctaactctgtgccagcagccgcggtaatacagagggtgcaagcgttaatcggaattactgggcgtaaagcgcgcgtaggtggtttgttaagttggatgtgaaagccccgggctcaacctgggaactgcatccaaaactggcaagctagagtacggtagagggtggtggaatttcctgtgtagcggtgaaatgcgtagatataggaaggaacaccagtggcgaaggcgaccacctggactgatactgacactgaggtgcgaaagcgtggggagcaaacaggattagataccctggtagtccacgccgtaaacgatgtcaactagccgttggaatccttgagattttagtggcgcagctaacgcattaagttgaccgcctggggagtacggccgcaaggttaaaactcaaatgaattgacgggggcccgcacaagcggtggagcatgtggtttaattcgaagcaacgcgaagaaccttaccaggccttgacatgcagagaactttccagagatggattggtgccttcgggaactctgacacaggtgctgcatggctgtcgtcagctcgtgtcgtgagatgttgggttaagtcccgtaacgagcgcaacccttgtccttagttaccagcacgttatggtgggcactctaaggagactgccggtgacaaaccggaggaaggtggggatgacgtcaagtcatcatggcccttacggcctgggctacacacgtgctacaatggtcggtacagagggttgccaagccgcgaggtggagctaatctcacaaaaccgatcgtagtccggatcgcagtctgcaactcgactgcgtgaagtcggaatcgctagtaatcgcgaatcagaatgtcgcggtgaatacgttcccgggccttgtacacaccgcccgtcacaccatgggagtgggttgcaccagaagtagctagtctaaccttcgggaggacggtaccacg

SEQ ID NO: 2740 - DNA, 1459 bp, Pseudomonas hussainii
attgaacgctggcggcaggcctaacacatgcaagtcgagcggatgaagagagcttgctcttggattcagcggcggacgggtgagtaatgcctaggaatctgcctagtagtgggggacaacagttggaaacgactgctaataccgcatacgtcctacgggagaaagtgggggatcttcggacctcacgctattagatgagcctaggtacgattagctagttggtagggtaaaggcctaccaaggcgacgatcgttaactggtctgagaggatgatcagtcacactggaactgagacacggtccagactcctacgggaggcagcagtggggaatattggacaatgggggaaaccctgatccagccatgccgcgtgtgtgaagaaggtcttcggattgtaaagcactttaagttgggaggaagggcagtaagttaataccttgctgttttgacgttaccgacagaataagcaccggctaactctgtgccagcagccgcggtaatacagagggtgcaagcgttaatcggaattactgggcgtaaagcgcgcgtaggtggttacgtaagttgaaggtgaaatccccgggcttaacctgggaactgcctccaaaactgcgtggctagagtacggtagagggtagtggaatttcctgtgtagcggtgaaatgcgtagatataggaaggaacaccagtggcgaaggcgactacctggactgatactgacactgaggtgcgaaagcgtggggagcaaacaggattagataccctggtagtccacgccgtaaacgatgtcaactagccgttgggctccttgagagcttagtggcgcagctaacgcattaagttgaccgcctggggagtacggccgcaaggttaaaactcaaatgaattgacgggggcccgcacaagcggtggagcatgtggtttaattcgaagcaacgcgaagaaccttacctggccttgacatgctgagaactttccagagatggattggtgccttcgggaactcagacacaggtgctgcatggctgtcgtcagctcgtgtcgtgagatgttgggttaagtcccgtaacgagcgcaacccttgtccttagttaccagcacgttatggtgggcactctaaggagactgccggtgacaaaccggaggaaggtggggatgacgtcaagtcatcatggcccttacggccagggctacacacgtgctacaatggtaggtacagagggttgccaagccgcgaggtggagctaatctcacaaaacctatcgtagtccggattggagtctgcaactcgactccatgaagtcggaatcgctagtaatcgtgaatcagaatgtcacggtgaatacgttcccgggccttgtacacaccgcccgtcacaccatgggagtgggttgctccagaagtagctagtctaaccttcggggggacggttaccacggagtgattcatgactggggtg

SEQ ID NO: 2741 - DNA, 1458 bp, Pseudomonas indica
attgaacgctggcggcaggcctaacacatgcaagtcgagcggcagcgggtccttcgggatgccggcgagcggcggacgggtgagtaatgcctaggaatctgcctggtagtgggggataacgcggggaaactcgcgctaataccgcatacgtcctacgggagaaagtgggggaccttcgggcctcacgctatcagatgagcctaggtcggattagctagttggtagggtaaaggcctaccaaggcgacgatccgtaactggtctgagaggatgatcagtcacactggaactgagacacggtccagactcctacgggaggcagcagtggggaatattggacaatgggcgaaagcctgatccagccatgccgcgtgtgtgaagaaggtcttcggattgtaaagcactttaagttgggaggaagggcagtaagttaataccttgctgttttgacgttaccgacagaataagcaccggctaactctgtgccagcagccgcggtaatacagagggtgcaagcgttaatcggaattactgggcgtaaagcgcgcgtaggtggttcagcaagttggatgtgaaatccccgggctcaacctgggaactgcatccaaaactactgagctagagtacggtagagggtggtggaatttcctgtgtagcggtgaaatgcgtagatataggaaggaacaccagtggcgaaggcgaccacctggactgatactgacactgaggtgcgaaagcgtggggagcaaacaggattagataccctggtagtccacgccgtaaacgatgtcgactagccgttggaatccttgagattttagtggcgcagctaacgcattaagtcgaccgcctggggagtacggccgcaaggttaaaactcaaatgaattgacgggggcccgcacaagcggtggagcatgtggtttaattcgaagcaacgcgaagaaccttacctggccttgacatcctgcgaacctttcagagatgagagggtgccttcgggaacgcagagacaggtgctgcatggctgtcgtcagctcgtgtcgtgagatgttgggttaagtcccgtaacgagcgcaacccttgtccttagttaccagcacctcgggtgggcactctaaggagactgccggtgacaaaccggaggaaggtggggatgacgtcaagtcatcatggcccttacggccagggctacacacgtgctacaatggtcggtacagagggttgccaagccgcgaggtggagctaatcccagaaaaccgatcgtagtccggatcgcagtctgcaactcgactgcgtgaagtcggaatcgctagtaatcgcgaatcagaatgtcgcggtgaatacgttcccgggccttgtacacaccgcccgtcacaccatgggagtgggttgctccagaagtagctagtctaaccttcggggggacggttaccacggagtgattcatgactggggtg

SEQ ID NO: 2742 - DNA, 1417 bp, Pseudomonas indoloxydans
acacatgcaagtcgagcggatgagaggagcttgctccttgatttagcggcggacgggtgagtaatgcctaggaatctgcctggtagtgggggataacgtccggaaacgaacgctaataccgcatacgtcctacgggagaaagcaggggaccttcgggccttgcgctatcagatgagcctaggtcggattagctagttggtgaggtaatggctcaccaaggcgacgatccgtaactggtctgagaggatgatcagtcacactggaactgagacacggtccagactcctacgggaggcagcagtggggaatattggacaatgggcgaaagcctgatccagccatgccgcgtgtgtgaagaaggtcttcggattgtaaagcactttaagttgggaggaagggcagtaagctaataccttgctgttttgacgttaccgacagaataagcaccggctaacttcgtgccagcagccgcggtaatacgaagggtgcaagcgttaatcggaattactgggcgtaaagcgcgcgtaggtggttcgttaagttggatgtgaaagccccgggctcaacctgggaactgcatccaaaactggcgagctagagtacggtagagggtggtggaatttcctgtgtagcggtgaaatgcgtagatataggaaggaacaccagtggcgaaggcgaccacctggactgatactgacactgaggtgcgaaagcgtggggagcaaacaggattagataccctggtagtccacgccgtaaacgatgtcaactagccgttgggttccttgagaacttagtggcgcagctaacgcattaagttgaccgcctggggagtacggccgcaaggttaaaactcaaatgaattgacgggggcccgcacaagcggtggagcatgtggtttaattcgaagcaacgcgaagaaccttacctggccttgacatgctgagaactttccagagatggattggtgccttcgggaactcagacacaggtgctgcatggctgtcgtcagctcgtgtcgtgagatgttgggttaagtcccgtaacgagcgcaacccttgtccttagttaccagcacgtaatggtgggcactctaaggagactgccggtgacaaaccggaggaaggtggggatgacgtcaagtcatcatggcccttacggccagggctacacacgtgctacaatggtcggtacaaagggttgccaagccgcgaggtggagctaatcccataaaaccgatcgtagtccggatcgcagtctgcaactcgactgcgtgaagtcggaatcgctagtaatcgtgaatcagaatgtcacggtgaatacgttcccgggccttgtacacaccgcccgtcacaccatgggagtgggttgctccagaagtagctagtctaaccttcggggggacggtaccacggag

SEQ ID NO: 2743 - DNA, 1459 bp, Pseudomonas jessenii
attgaacgctggcggcaggcctaacacatgcaagtcgagcggatgacaggagcttgctcctgaattcagcggcggacgggtgagtaatgcctaggaatctgcctggtagtgggggacaacgtttcgaaaggaacgctaataccgcatacgtcctacgggagaaagcaggggaccttcgggccttgcgctatcagatgagcctaggtcggattagctagttggtgaggtaatggctcaccaaggcgacgatccgtaactggtctgagaggatgatcagtcacactggaactgagacacggtccagactcctacgggaggcagcagtggggaatattggacaatgggcgaaagcctgatccagccatgccgcgtgtgtgaagaaggtcttcggattgtaaagcactttaagttgggaggaagggttgtagattaatactctgcaattttgacgttaccgacagaataagcaccggctaactctgtgccagcagccgcggtaatacagagggtgcaagcgttaatcggaattactgggcgtaaagcgcgcgtaggtggtttgttaagttggatgtgaaagccccgggctcaacctgggaactgcattcaaaactgacaagctagagtatggtagagggtggtggaatttcctgtgtagcggtgaaatgcgtagatataggaaggaacaccagtggcgaaggcgaccacctggactgatactgacactgaggtgcgaaagcgtggggagcaaacaggattagataccctggtagtccacgccgtaaacgatgtcaactagccgttgggagccttgagctcttagtggcgcagctaacgcattaagttgaccgcctggggagtacggccgcaaggttaaaactcaaatgaattgacgggggcccgcacaagcggtggagcatgtggtttaattcgaagcaacgcgaagaaccttaccaggccttgacatccaatgaactttccagagatggattggtgccttcgggaacattgagacaggtgctgcatggctgtcgtcagctcgtgtcgtgagatgttgggttaagtcccgtaacgagcgcaacccttgtccttagttaccagcacgtaatggtgggcactctaaggagactgccggtgacaaaccggaggaaggtggggatgacgtcaagtcatcatggcccttacggcctgggctacacacgtgctacaatggtcggtacagagggttgccaagccgcgaggtggagctaatcccataaaaccgatcgtagtccggatcgcagtctgcaactcgactgcgtgaagtcggaatcgctagtaatcgcgaatcagaatgtcgcggtgaatacgttcccgggccttgtacacaccgcccgtcacaccatgggagtgggttgcaccagaagtagctagtctaaccttcgggaggacggttaccacggtgtgattcatgactggggtg

SEQ ID NO: 2744 - DNA, 1459 bp, Pseudomonas jinjuensis
attgaacgctggcggcaggcctaacacatgcaagtcgagcggatgagaggagcttgctccttgattcagcggcggacgggtgagtaatgcctaggaatctgcctgatagtgggggacaacgtttcgaaaggaacgctaataccgcatacgtcctacgggagaaagcaggggaccttcgggccttgcgctatcagatgagcctaggtcggattagctagtaggtgaggtaatggctcacctaggcgacgatccgtaactggtctgagaggatgatcagtcacactggaactgagacacggtccagactcctacgggaggcagcagtggggaatattggacaatgggcgaaagcctgatccagccatgccgcgtgtgtgaagaaggtcttcggattgtaaagcactttaagttgggaggaagggctgcaagttaataccttgtagttttgacgttaccaacagaataagcaccggctaacttcgtgccagcagccgcggtaatacgaagggtgcaagcgttaatcggaattactgggcgtaaagcgcgcgtaggtggtttgttaagttggaggtgaaatccccgggctcaacctgggaactgcctccaaaactggctgactagagtacggtagagggtggtggaatttcctgtgtagcggtgaaatgcgtagatataggaaggaacaccagtggcgaaggcgaccacctggactgatactgacactgaggtgcgaaagcgtggggagcaaacaggattagataccctggtagtccacgccgtaaacgatgtcgactagccgttgggatccttgagatcttagtggcgcagctaacgcgataagtcgaccgcctggggagtacggccgcaaggttaaaactcaaatgaattgacgggggcccgcacaagcggtggagcatgtggtttaattcgaagcaacgcgaagaaccttacctggccttgacatgtccggaatcctgcagagatgcgggagtgccttcgggaatcggaacacaggtgctgcatggctgtcgtcagctcgtgtcgtgagatgttgggttaagtcccgtaacgagcgcaacccttgtccttagttaccagcacgttaaggtgggcactctaaggagactgccggtgacaaaccggaggaaggtggggatgacgtcaagtcatcatggcccttacggccagggctacacacgtgctacaatggtcggtacagagggttgccaagccgcgaggtggagctaatcccagaaaaccgatcgtagtccggatcgcagtctgcaactcgactgcgtgaagtcggaatcgctagtaatcgtgaatcagaatgtcacggtgaatacgttcccgggccttgtacacaccgcccgtcacaccatgggagtgggttgctccagaagtagctagtctaaccgcaagggggacggttaccacggagtgattcatgactggggtg

SEQ ID NO: 2745 - DNA, 1459 bp, Pseudomonas kilonensis
attgaacgctggcggcaggcctaacacatgcaagtcgagcggtagagaggtgcttgcacctcttgagagcggcggacgggtgagtaatgcctaggaatctgcctggtagtgggggataacgctcggaaacggacgctaataccgcatacgtcctacgggagaaagcaggggaccttcgggccttgcgctatcagatgagcctaggtcggattagctagttggtggggtaatggctcaccaaggcgacgatccgtaactggtctgagaggatgatcagtcacactggaactgagacacggtccagactcctacgggaggcagcagtggggaatattggacaatgggcgaaagcctgatccagccatgccgcgtgtgtgaagaaggtcttcggattgtaaagcactttaagttgggaggaagggcattaacctaatacgttagtgttttgacgttaccgacagaataagcaccggctaactctgtgccagcagccgcggtaatacagagggtgcaagcgttaatcggaattactgggcgtaaagcgcgcgtaggtggtttgttaagttggatgtgaaagccccgggctcaacctgggaactgcattcaaaactgacaagctagagtatggtagagggtggtggaatttcctgtgtagcggtgaaatgcgtagatataggaaggaacaccagtggcgaaggcgaccacctggactgatactgacactgaggtgcgaaagcgtggggagcaaacaggattagataccctggtagtccacgccgtaaacgatgtcaactagccgttgggagccttgagctcttagtggcgcagctaacgcattaagttgaccgcctggggagtacggccgcaaggttaaaactcaaatgaattgacgggggcccgcacaagcggtggagcatgtggtttaattcgaagcaacgcgaagaaccttaccaggccttgacatccaatgaactttccagagatggattggtgccttcgggaacattgagacaggtgctgcatggctgtcgtcagctcgtgtcgtgagatgttgggttaagtcccgtaacgagcgcaacccttgtccttagttaccagcacgtaatggtgggcactctaaggagactgccggtgacaaaccggaggaaggtggggatgacgtcaagtcatcatggcccttacggcctgggctacacacgtgctacaatggtcggtacagagggttgccaagccgcgaggtggagctaatcccacaaaaccgatcgtagtccggatcgcagtctgcaactcgactgcgtgaagtcggaatcgctagtaatcgcgaatcagaatgtcgcggtgaatacgttcccgggccttgtacacaccgcccgtcacaccatgggagtgggttgcaccagaagtagctagtctaaccttcggggggacggttaccacggtgtgattcatgactggggtg

SEQ ID NO: 2746 - DNA, 1459 bp, Pseudomonas knackmussii
attgaacgctggcggcaggcctaacacatgcaagtcgagcggatgaagggagcttgctctctgattcagcggcggacgggtgagtaatgcctaggaatctgcctggtagtgggggacaacgtttcgaaaggaacgctaataccgcatacgtcctacgggagaaagtgggggatcttcggacctcacgctatcagatgagcctaggtcggattagctagtaggtgaggtaatggctcacctaggcgacgatccgtaactggtctgagaggatgatcagtcacactggaactgagacacggtccagactcctacgggaggcagcagtggggaatattggacaatgggcgaaagcctgatccagccatgccgcgtgtgtgaagaaggtcttcggattgtaaagcactttaagttgggaggaagggcagtaagttaataccttgctgttttgacgttaccaacagaataagcaccggctaacttcgtgccagcagccgcggtaatacgaagggtgcaagcgttaatcggaattactgggcgtaaagcgcgcgtaggtggtttggtaagatggatgtgaaatccccgggctcaacctgggaactgcatccataactgcctgactagagtacggtagagggtggtggaatttcctgtgtagcggtgaaatgcgtagatataggaaggaacaccagtggcgaaggcgaccacctggactgatactgacactgaggtgcgaaagcgtggggagcaaacaggattagataccctggtagtccacgccgtaaacgatgtcgactagccgttggaatccttgagattttagtggcgcagctaacgcgataagtcgaccgcctggggagtacggccgcaaggttaaaactcaaatgaattgacgggggcccgcacaagcggtggagcatgtggtttaattcgaagcaacgcgaagaaccttacctggccttgacatgtccggaatcttgcagagatgcgagagtgccttcgggaatcggaacacaggtgctgcatggctgtcgtcagctcgtgtcgtgagatgttgggttaagtcccgtaacgagcgcaacccttgtccttagttaccagcacgttatggtgggcactctaaggagactgccggtgacaaaccggaggaaggtggggatgacgtcaagtcatcatggcccttacggccagggctacacacgtgctacaatggtcggtacagagggttgccaagccgcgaggtggagctaatcccataaaaccgatcgtagtccggatcgcagtctgcaactcgactgcgtgaagtcggaatcgctagtaatcgtgaatcagaatgtcacggtgaatacgttcccgggccttgtacacaccgcccgtcacaccatgggagtgggttgctccagaagtagctagtctaaccgcaagggggacggttaccacggagtgattcatgactggggtg

SEQ ID NO: 2747 - DNA, 1455 bp, Pseudomonas koreensis
aacgctggcggcaggcctaacacatgcaagtcgagcggatgaaaggagcttgctcctggattcagcggcggacgggtgagtaatgcctaggaatctgcctggtagtgggggacaacgtttcgaaaggaacgctaataccgcatacgtcctacgggagaaagcaggggaccttcgggccttgcgctatcagatgagcctaggtcggattagctagttggtgaggtaatggctcaccaaggcgacgatccgtaactggtctgagaggatgatcagtcacactggaactgagacacggtccagactcctacgggaggcagcagtggggaatattggacaatgggcgaaagcctgatccagccatgccgcgtgtgtgaagaaggtcttcggattgtaaagcactttaagttgggaggaagggttgtagattaatactctgcaattttgacgttaccgacagaataagcaccggctaactctgtgccagcagccgcggtaatacagagggtgcaagcgttaatcggaattactgggcgtaaagcgcgcgtaggtggtttgttaagttggatgtgaaatccccgggctcaacctgggaactgcatccaaaactggcaagctagagtatggtagagggtggtggaatttcctgtgtagcggtgaaatgcgtagatataggaaggaacaccagtggcgaaggcgaccacctggactgatactgacactgaggtgcgaaagcgtggggagcaaacaggattagataccctggtagtccacgccgtaaacgatgtcaactagccgttgggagccttgagctcttagtggcgcagctaacgcattaagttgaccgcctggggagtacggccgcaaggttaaaactcaaatgaattgacgggggcccgcacaagcggtggagcatgtggtttaattcgaagcaacgcgaagaaccttaccaggccttgacatccaatgaactttccagagatggattggtgccttcgggaacattgagacaggtgctgcatggctgtcgtcagctcgtgtcgtgagatgttgggttaagtcccgtaacgagcgcaacccttgtccttagttaccagcacgtaatggtgggcactctaaggagactgccggtgacaaaccggaggaaggtggggatgacgtcaagtcatcatggcccttacggcctgggctacacacgtgctacaatggtcggtacagagggttgccaagccgcgaggtggagctaatcccacaaaaccgatcgtagtccggatcgcagtctgcaactcgactgcgtgaagtcggaatcgctagtaatcgcgaatcagaatgtcgcggtgaatacgttcccgggccttgtacacaccgcccgtcacaccatgggagtgggttgcaccagaagtagctagtctaaccttcgggaggacggttaccacggtgtgattcatgactggggtg

SEQ ID NO: 2748 - DNA, 1459 bp, Pseudomonas kunmingensis
attgaacgctggcggcaggcctaacacatgcaagtcgagcggatgaggagagcttgctctctgattcagcggcggacgggtgagtaatgcctaggaatccgcctgatagtgggggacaacgtttcgaaaggaacgctaataccgcatacgtcctacgggagaaagcaggggaccttcgggccttgcgctatcagatgagcctaggtcggattagctagttggtgaggtaatggctcaccaaggcgacgatccgtaactggtctgagaggatgatcagtcacactggaactgagacacggtccagactcctacgggaggcagcagtggggaatattggacaatgggcgaaagcctgatccagccatgccgcgtgtgtgaagaaggtcttcggattgtaaagcactttaagttgggaggaagggcattaacctaatacgttagtgttttggcgttaccgacagaataagcaccggctaacttcgtgccagcagccgcggtaatacgaagggtgcaagcgttaatcggaattactgggcgtaaagcgcgcgtaggtggtttgttaagttgaatgtgaaagccccgggctcaacctgggaactgcatccaaaactggcaaactagagtatggcagagggtggtggaatttcctgtgtagcggtgaaatgcgtagatataggaaggaacaccagtggcgaaggcgaccacctgggctaatactgacactgaggtgcgaaagcgtggggagcaaacaggattagataccctggtagtccacgccgtaaacgatgtcgactagccgttgggatccttgagatcttagtggcgcagctaacgcattaagtcgaccgcctggggagtacggccgcaaggttaaaactcaaatgaattgacgggggcccgcacaagcggtggagcatgtggtttaattcgaagcaacgcgaagaaccttaccaggccttgacatgcagagaactttccagagatggattggtgccttcgggaactctgacacaggtgctgcatggctgtcgtcagctcgtgtcgtgagatgttgggttaagtcccgtaacgagcgcaacccttgtccttagttaccagcacgctaaggtgggcactctaaggagactgccggtgacaaaccggaggaaggtggggatgacgtcaagtcatcatggcccttacggcctgggctacacacgtgctacaatggtcggtacaaagggttgccaagccgcgaggtggagctaatcccataaaaccgatcgtagtccggatcgcagtctgcaactcgactgcgtgaagtcggaatcgctagtaatcgtgaatcagaatgtcacggtgaatacgttcccgggccttgtacacaccacccgtcacaccatgggagtgggttgctccagaagtagctagtctaaccttcggggggacggttaccacggagtgattcatgactggggtg

SEQ ID NO: 2749 - DNA, 1420 bp, Pseudomonas lactis
attgaacgctggcggcaggcctaacacatgcaagtcgagcggtagagagaagcttgcttctcttgagagcggcggacgggtgagtaatgcctaggaatctgcctggtagtgggggataacgttcggaaacggacgctaataccgcatacgtcctacgggagaaagcaggggaccttcgggccttgcgctatcagatgagcctaggtcggattagctagttggtggggtaatggctcaccaaggcgacgatccgtaactggtctgagaggatgatcagtcacactggaactgagacacggtccagactcctacgggaggcagcagtggggaatattggacaatgggcgaaagcctgatccagccatgccgcgtgtgtgaagaaggtcttcggattgtaaagcactttaagttgggaggaagggttgtagattaatactctgcaattttgacgttaccgacagaataagcaccggctaactctgtgccagcagccgcggtaatacagagggtgcaagcgttaatcggaattactgggcgtaaagcgcgcgtaggtggtttgttaagttggatgtgaaatccccgggctcaacctgggaactgcattcaaaactgactgactagagtatggtagagggtggtggaatttcctgtgtagcggtgaaatgcgtagatataggaaggaacaccagtggcgaaggcgaccacctggactaatactgacactgaggtgcgaaagcgtggggagcaaacaggattagataccctggtagtccacgccgtaaacgatgtcaactagccgttggaagccttgagcttttagtggcgcagctaacgcattaagttgaccgcctggggagtacggccgcaaggttaaaactcaaatgaattgacgggggcccgcacaagcggtggagcatgtggtttaattcgaagcaacgcgaagaaccttaccaggccttgacatccaatgaactttctagagatagattggtgccttcgggaacattgagacaggtgctgcatggctgtcgtcagctcgtgtcgtgagatgttgggttaagtcccgtaacgagcgcaacccttgtccttagttaccagcacgtaatggtgggcactctaaggagactgccggtgacaaaccggaggaaggtggggatgacgtcaagtcatcatggcccttacggcctgggctacacacgtgctacaatggtcggtacagagggttgccaagccgcgaggtggagctaatcccataaaaccgatcgtagtccggatcgcagtctgcaactcgactgcgtgaagtcggaatcgctagtaatcgcgaatcagaatgtcgcggtgaatacgttcccgggccttgtacacaccgcccgtcacaccatgggagtgggttgcaccagaagtagctagtctaaccttc

SEQ ID NO: 2750 - DNA, 1459 bp, Pseudomonas lini
  misc_feature (51)..(51): n is a, c, g, or t
attgaacgctggcggcaggcctaacacatgcaagtcgagcggtagagaggngcttgcacctcttgagagcggcggacgggtgagtaatgcctaggaatctgcctggtagtgggggataacgctcggaaacggacgctaataccgcatacgtcctacgggagaaagcaggggaccttcgggccttgcgctatcagatgagcctaggtcggattagctagttggtgaggtaatggctcaccaaggcgacgatccgtaactggtctgagaggatgatcagtcacactggaactgagacacggtccagactcctacgggaggcagcagtggggaatattggacaatgggcgaaagcctgatccagccatgccgcgtgtgtgaagaaggtcttcggattgtaaagcactttaagttgggaggaagggcagttacctaatacgtatctgttttgacgttaccgacagaataagcaccggctaactctgtgccagcagccgcggtaatacagagggtgcaagcgttaatcggaattactgggcgtaaagcgcgcgtaggtggttcgttaagttggatgtgaaatccccgggctcaacctgggaactgcattcaaaactgacgagctagagtatggtagagggtggtggaatttcctgtgtagcggtgaaatgcgtagatataggaaggaacaccagtggcgaaggcgaccacctggactgatactgacactgaggtgcgaaagcgtggggagcaaacaggattagataccctggtagtccacgccgtaaacgatgtcaactagccgttgggagccttgagctcttagtggcgcagctaacgcattaagttgaccgcctggggagtacggccgcaaggttaaaactcaaatgaattgacgggggcccgcacaagcggtggagcatgtggtttaattcgaagcaacgcgaagaaccttaccaggccttgacatccaatgaactttccagagatggattggtgccttcgggaacattgagacaggtgctgcatggctgtcgtcagctcgtgtcgtgagatgttgggttaagtcccgtaacgagcgcaacccttgtccttagttaccagcacgtcatggtgggcactctaaggagactgccggtgacaaaccggaggaaggtggggatgacgtcaagtcatcatggcccttacggcctgggctacacacgtgctacaatggtcggtacagagggttgccaagccgcgaggtggagctaatcccagaaaaccgatcgtagtccggatcgcagtctgcaactcgactgcgtgaagtcggaatcgctagtaatcgcgaatcagaatgtcgcggtgaatacgttcccgggccttgtacacaccgcccgtcacaccatgggagtgggttgcaccagaagtagctagtctaaccttcgggaggacggttaccacggtgtgattcatgactggggtg

SEQ ID NO: 2751 - DNA, 1456 bp, Pseudomonas linyingensis
gaacgctggcggcaggcctaacacatgcaagtcgagcggatgagggtagcttgctacctgattcagcggcggacgggtgagtaatgcctaggaatctgcccgatagtgggggacaacgtttcgaaaggaacgctaataccgcatacgtcctacgggagaaagcaggggaccttcgggccttgcgctatcggatgagcctaggtcggattagctagttggtggggtaaaggctcaccaaggcgacgatccgtaactggtctgagaggatgatcagtcacactggaactgagacacggtccagactcctacgggaggcagcagtggggaatattggacaatgggcgaaagcctgatccagccatgccgcgtgtgtgaagaaggtcttcggattgtaaagcactttaagctgggaggaagggcagtaagttaataccttgctgttttgacgttaccagcagaataagcaccggctaacttcgtgccagcagccgcggtaatacgaagggtgcaagcgttaatcggaattactgggcgtaaagcgcgcgtaggtggttcagcaagttggatgtgaaagccccgggctcaacctgggaactgcatccaaaactactgggctagagtatggtagagggtggtggaatttcctgtgtagcggtgaaatgcgtagatataggaaggaacaccagtggcgaaggcgaccacctggactaatactgacactgaggtgcgaaagcgtggggagcaaacaggattagataccctggtagtccacgccgtaaacgatgtcaactagttgttgggttccttgaggacttagtaacgaagctaacgcgataagttgaccgcctggggagtacggccgcaaggttaaaactcaaatgaattgacgggggcccgcacaagcggtggagcatgtggtttaattcgaagcaacgcgaagaaccttacctggccttgacatgctgagaactttccagagatggattggtgccttcgggaactcagacacaggtgctgcatggctgtcgtcagctcgtgtcgtgagatgttgggttaagtcccgtaacgagcgcaacccttgtccttagttaccagcacgtaatggtgggcactctaaggagactgccggtgacaaaccggaggaaggtggggatgacgtcaagtcatcatggcccttacggccagggctacacacgtgctacaatggtcggtacagagggttgccaagccgcgaggtggagctaatctcacaaaaccgatcgtagtccggatcgcagtctgcaactcgactgcgtgaagtcggaatcgctagtaatcgtgaatcagaatgtcacggtgaatacgttcccgggccttgtacacaccgcccgtcacaccatgggagtgggttgctccagaagtagctagtctaaccttcggggggacggttaccacggagtgattcatgactggggtg

SEQ ID NO: 2752 - DNA, 1459 bp, Pseudomonas lurida
attgaacgctggcggcaggcctaacacatgcaagtcgagcggtagagagaagcttgcttctcttgagagcggcggacgggtgagtaatgcctaggaatctgcctggtagtgggggataacgttcggaaacggacgctaataccgcatacgtcctacgggagaaagcaggggaccttcgggccttgcgctatcagatgagcctaggtcggattagctagttggtggggtaatggctcaccaaggcgacgatccgtaactggtctgagaggatgatcagtcacactggaactgagacacggtccagactcctacgggaggcagcagtggggaatattggacaatgggcgaaagcctgatccagccatgccgcgtgtgtgaagaaggtcttcggattgtaaagcactttaagttgggaggaagggcagttgcctaatacgtaactgttttgacgttaccgacagaataagcaccggctaactctgtgccagcagccgcggtaatacagagggtgcaagcgttaatcggaattactgggcgtaaagcgcgcgtaggtggtttgttaagttggatgtgaaatccccgggctcaacctgggaactgcattcaaaactgactgactagagtatggtagagggtggtggaatttcctgtgtagcggtgaaatgcgtagatataggaaggaacaccagtggcgaaggcgaccacctggactaatactgacactgaggtgcgaaagcgtggggagcaaacaggattagataccctggtagtccacgccgtaaacgatgtcaactagccgttggaagccttgagcttttagtggcgcagctaacgcattaagttgaccgcctggggagtacggccgcaaggttaaaactcaaatgaattgacgggggcccgcacaagcggtggagcatgtggtttaattcgaagcaacgcgaagaaccttaccaggccttgacatccaatgaactttctagagatagattggtgccttcgggaacattgagacaggtgctgcatggctgtcgtcagctcgtgtcgtgagatgttgggttaagtcccgtaacgagcgcaacccttgtccttagttaccagcacgtaatggtgggcactctaaggagactgccggtgacaaaccggaggaaggtggggatgacgtcaagtcatcatggcccttacggcctgggctacacacgtgctacaatggtcggtacagagggttgccaagccgcgaggtggagctaatcccataaaaccgatcgtagtccggatcgcagtctgcaactcgactgcgtgaagtcggaatcgctagtaatcgcgaatcagaatgtcgcggtgaatacgttcccgggccttgtacacaccgcccgtcacaccatgggagtgggttgcaccagaagtagctagtctaaccttcgggaggacggttaccacggtgtgattcatgactggggtg

SEQ ID NO: 2753 - DNA, 1459 bp, Pseudomonas lutea
attgaacgctggcggcaggcctaacacatgcaagtcgagcggatgaagggagcttgctccctgattcagcggcggacgggtgagtaatgcctaggaatctgcctggtagtgggggacaacgtctcgaaagggacgctaataccgcatacgtcctacgggagaaagcaggggaccttcgggccttgcgctatcagatgagcctaggtcggattagctagttggtgaggtaatggctcaccaaggcgacgatccgtaactggtctgagaggatgatcagtcacactggaactgagacacggtccagactcctacgggaggcagcagtggggaatattggacaatgggcgaaagcctgatccagccatgccgcgtgtgtgaagaaggtcttcggattgtaaagcactttaagttgggaggaagggcagctaattaatacttcgctgttttgacgttaccgacagaataagcaccggctaactctgtgccagcagccgcggtaatacagagggtgcaagcgttaatcggaattactgggcgtaaagcgcgcgtaggtggtttgttaagttgaatgtgaaatccccgggctcaacctgggaactgcatccaaaactggcaagctagagtagggcagagggtggtggaatttcctgtgtagcggtgaaatgcgtagatataggaaggaacaccagtggcgaaggcgaccacctgggctcatactgacactgaggtgcgaaagcgtggggagcaaacaggattagataccctggtagtccacgccgtaaacgatgtcaactagccgttggaagccttgagcttttagtggcgcagctaacgcattaagttgaccgcctggggagtacggccgcaaggttaaaactcaaatgaattgacgggggcccgcacaagcggtggagcatgtggtttaattcgaagcaacgcgaagaaccttaccaggccttgacatccaatgaactttccagagatggattggtgccttcgggaacattgagacaggtgctgcatggctgtcgtcagctcgtgtcgtgagatgttgggttaagtcccgtaacgagcgcaacccttgtccttagttaccagcacgttaaggtgggcactctaaggagactgccggtgacaaaccggaggaaggtggggatgacgtcaagtcatcatggcccttacggcctgggctacacacgtgctacaatggtcggtacagagggttgccaagccgcgaggtggagctaatcccagaaaaccgatcgtagtccggatcgcagtctgcaactcgactgcgtgaagtcggaatcgctagtaatcgcgaatcagaatgtcgcggtgaatacgttcccgggccttgtacacaccgcccgtcacaccatgggagtgggttgcaccagaagtagctagtctaaccttcgggaggacggttaccacggtgtgattcatgactggggtg

SEQ ID NO: 2754 - DNA, 1461 bp, Pseudomonas mandelii
attgaacgctggcggcaggcctaacacatgcaagtcgagcggcagcacgggtacttgtacctggtggcgagcggcggacgggtgagtaatgcctaggaatctgcctggtagtgggggataacgctcggaaacggacgctaataccgcatacgtcctacgggagaaagcaggggaccttcgggccttgcgctatcagatgagcctaggtcggattagctagttggtgaggtaatggctcaccaaggcgacgatccgtaactggtctgagaggatgatcagtcacactggaactgagacacggtccagactcctacgggaggcagcagtggggaatattggacaatgggcgaaagcctgatccagccatgccgcgtgtgtgaagaaggtcttcggattgtaaagcactttaagttgggaggaagggcagttacctaatacgtatctgttttgacgttaccgacagaataagcaccggctaactctgtgccagcagccgcggtaatacagagggtgcaagcgttaatcggaattactgggcgtaaagcgcgcgtaggtggtttgttaagttggatgtgaaatccccgggctcaacctgggaactgcattcaaaactgacaagctagagtatggtagagggtggtggaatttcctgtgtagcggtgaaatgcgtagatataggaaggaacaccagtggcgaaggcgaccacctggactgatactgacactgaggtgcgaaagcgtggggagcaaacaggattagataccctggtagtccacgccgtaaacgatgtcaactagccgttgggagccttgagctcttagtggcgcagctaacgcattaagttgaccgcctggggagtacggccgcaaggttaaaactcaaatgaattgacgggggcccgcacaagcggtggagcatgtggtttaattcgaagcaacgcgaagaaccttaccaggccttgacatccaatgaactttccagagatggattggtgccttcgggaacattgagacaggtgctgcatggctgtcgtcagctcgtgtcgtgagatgttgggttaagtcccgtaacgagcgcaacccttgtccttagttaccagcacgtaatggtgggcactctaaggagactgccggtgacaaaccggaggaaggtggggatgacgtcaagtcatcatggcccttacggcctgggctacacacgtgctacaatggtcggtacagagggttgccaagccgcgaggtggagctaatcccagaaaaccgatcgtagtccggatcgcagtctgcaactcgactgcgtgaagtcggaatcgctagtaatcgcgaatcagaatgtcgcggtgaatacgttcccgggccttgtacacaccgcccgtcacaccatgggagtgggttgcaccagaagtagctagtctaaccttcggggggacggttaccacggtgtgattcatgactggggtg

SEQ ID NO: 2755 - DNA, 1351 bp, Pseudomonas marginalis
agtgggggataacgttcggaaacggacgctaataccgcatacgtcctacgggagaaagcaggggaccttcgggccttgcgctatcagatgagcctaggtcggattagctagttggtggggtaatggctcaccaaggcgacgatccgtaactggtctgagaggatgatcagtcacactggaactgagacacggtccagactcctacgggaggcagcagtggggaatattggacaatgggcgaaagcctgatccagccatgccgcgtgtgtgaagaaggtcttcggattgtaaagcactttaagttgggaggaagggccattacctaatacgtgatggttttgacgttaccgacagaataagcaccggctaactctgtgccagcagccgcggtaatacagagggtgcaagcgttaatcggaattactgggcgtaaagcgcgcgtaggtggtttgttaagttggatgtgaaatccccgggctcaacctgggaactgcattcaaaactgactgactagagtatggtagaggtgggtggaatttcctgtgtagcggtgaaatgcgtagatataggaaggaacaccagtggcgaaggcgaccacctggactgatactgacactgaggtgcgaaagcgtggggagcaaacaggattagataccctggtagtccacgccgtaaacgatgtcaactagccgttgggagccttgagctcttagtggcgcagctaacgcattaagttgaccgcctggggagtacggccgcaaggttaaaactcaaatgaattgacgggggcccgcacaagcggtggagcatgtggtttaattcgaagcaacgcgaagaaccttaccaggccttgacatccaatgaactttccagagatggattggtgccttcgggaacattgagacaggtgctgcatggctgtcgtcagctcgtgtcgtgagatgttgggttaagtcccgtaacgagcgcaacccttgtccttagttaccagcacgtgatggtggcactctaaggagactgccggtgacaaaccggaggaaggtggggatgacgtcaagtcatcatggcccttacggcctgggctacacacgtgctacaatggtcggtacagagggttgccaagccgcgaggtggagctaatcccagaaaaccgatcgtagtccggatcgcagtctgcaactcgactgcgtgaagtcggaatcgctagtaatcgcgaatcagaatgtcgcggtgaatacgttcccgggccttgtacacaccgcccgtcacaccatgggagtgggttgcaccagaagtagctagtctaaccttcgggaggacggttaccacggtgtgattcatgactggggtg

SEQ ID NO: 2756 - DNA, 1434 bp, Pseudomonas marincola
aagtcgagcggtaacagagagtagcttgctactttgctgacgagcggcggacgggtgagtaatgcctaggaatctgcctagtagtgggggataacgttcggaaacgaacgctaataccgcatacgtcctacgggagaaagtgggggaccttcgggcctcacgctattagatgagcctaggtcggattagctagttggtgaggtaatggctcaccaaggcgacgatccgtaactggtctgagaggatgatcagtcacactggaactgagacacggtccagactcctacgggaggcagcagtggggaatattggacaatgggcgaaagcctgatccagccatgccgcgtgtgtgaagaaggtcttcggattgtaaagcactttaagttgggaggaagggcagtaaattaatactttgctgttttgacgttaccgacagaataagcaccggctaactctgtgccagcagccgcggtaatacagagggtgcaagcgttaatcggaattactgggcgtaaagcgcgcgtaggcggtttgttaagttggatgtgaaagccccgggctcaacctgggaactgcatccaaaactggcaagctagagtacagtagagggtggtggaatttcctgtgtagcggtgaaatgcgtagatataggaaggaacaccagtggcgaaggcgaccacctggactgatactgacgctgaggtgcgaaagcgtggggagcaaacaggattagataccctggtagtccacgccgtaaacgatgtcaactagccgttggattccttgagaatttagtggcgcagctaacgcattaagttgaccgcctggggagtacggccgcaaggttaaaactcaaatgaattgacgggggcccgcacaagcggtggagcatgtggtttaattcgaagcaacgcgaagaaccttacctggccttgacatgctgagaactttccagagatggattggtgccttcgggaactcagacacaggtgctgcatggctgtcgtcagctcgtgtcgtgagatgttgggttaagtcccgtaacgagcgcaacccttgtccttagttaccagcacgttatggtgggaactctaaggagactgccggtgacaaaccggaggaaggtggggatgacgtcaagtcatcatggcccttacggccagggctacacacgtgctacaatggtcggtacaaagggttgccaagccgcgaggtggagctaatcccataaaaccgatcgtagtccggatcgcagtctgcaactcgactgcgtgaagtcggaatcgctagtaatcgtgaatcagaatgtcacggtgaatacgttcccgggccttgtacacaccgcccgtcacaccatgggagtgggttgcaccagaagtagctagtctaaccgcaagggggacggttaccacggtgtgattcatgactggggtg

SEQ ID NO: 2757 - DNA, 1459 bp, Pseudomonas mediterranea
attgaacgctggcggcaggcctaacacatgcaagtcgagcggtagagaggtgcttgcacctcttgagagcggcggacgggtgagtaatgcctaggaatctgcctggtagtgggggataacgctcggaaacggacgctaataccgcatacgtcctacgggagaaagcaggggaccttcgggccttgcgctatcagatgagcctaggtcggattagctagttggtgaggtaatggctcaccaaggcgacgatccgtaactggtctgagaggatgatcagtcacactggaactgagacacggtccagactcctacgggaggcagcagtggggaatattggacaatgggcgaaagcctgatccagccatgccgcgtgtgtgaagaaggtcttcggattgtaaagcactttaagttgggaggaagggccattacctaatacgtgatggttttgacgttaccgacagaataagcaccggctaactctgtgccagcagccgcggtaatacagagggtgcaagcgttaatcggaattactgggcgtaaagcgcgcgtaggtggttcgttaagttggatgtgaaagccccgggctcaacctgggaactgcattcaaaactgtcgagctagagtatggtagagggtggtggaatttcctgtgtagcggtgaaatgcgtagatataggaaggaacaccagtggcgaaggcgaccacctggactgatactgacactgaggtgcgaaagcgtggggagcaaacaggattagataccctggtagtccacgccgtaaacgatgtcaactagccgttgggagccttgagctcttagtggcgcagctaacgcattaagttgaccgcctggggagtacggccgcaaggttaaaactcaaatgaattgacgggggcccgcacaagcggtggagcatgtggtttaattcgaagcaacgcgaagaaccttaccaggccttgacatccaatgaactttccagagatggattggtgccttcgggagcattgagacaggtgctgcatggctgtcgtcagctcgtgtcgtgagatgttgggttaagtcccgtaacgagcgcaacccttgtccttagttaccagcacgtgatggtgggcactctaaggagactgccggtgacaaaccggaggaaggtggggatgacgtcaagtcatcatggcccttacggcctgggctacacacgtgctacaatggtcggtacagagggttgccaagccgcgaggtggagctaatcccataaaaccgatcgtagtccggatcgcagtctgcaactcgactgcgtgaagtcggaatcgctagtaatcgcgaatcagaatgtcgcggtgaatacgttcccgggccttgtacacaccgcccgtcacaccatgggagtgggttgcaccagaagtagctagtctaaccttcggggggacggttaccacggtgtgattcatgactggggtg

SEQ ID NO: 2758 - DNA, 1461 bp, Pseudomonas meliae
attgaacgctggcggcaggcctaacacatgcaagtcgagcggcagcacgggtacttgtacctggtggcgagcggcggacgggtgagtaatgcctaggaatctgcctggtagtgggggataacgctcggaaacggacgctaataccgcatacgtcctacgggagaaagcaggggaccttcgggccttgcgctatcagatgagcctaggtcggattagctagttggtgaggtaatggctcaccaaggcgacgatccgtaactggtctgagaggatgatcagtcacactggaactgagacacggtccagactcctacgggaggcagcagtggggaatattggacaatgggcgaaagcctgatccagccatgccgcgtgtgtgaagaaggtcttcggattgtaaagcactttaagttgggaggaagggcagttacctaatacgtgattgttttgacgttaccgacagaataagcaccggctaactctgtgccagcagccgcggtaatacagagggtgcaagcgttaatcggaattactgggcgtaaagcgcgcgtaggtggtttgttaagttggatgtgaaatccccgggctcaacctgggaactgcatccaaaactggcaagctagagtatggtagagggtggtggaatttcctgtgtagcggtgaaatgcgtagatataggaaggaacaccagtggcgaaggcgaccacctggactgatactgacactgaggtgcgaaagcgtggggagcaaacaggattagataccctggtagtccacgccgtaaacgatgtcaactagccgttgggagccttgagctcttagtggcgcagctaacgcattaagttgaccgcctggggagtacggccgcaaggttaaaactcaaatgaattgacgggggcccgcacaagcggtggagcatgtggtttaattcgaagcaacgcgaagaaccttaccaggccttgacatccaatgaactttccagagatggattggtgccttcgggaacattgagacaggtgctgcatggctgtcgtcagctcgtgtcgtgagatgttgggttaagtcccgtaacgagcgcaacccttgtccttagttaccagcacgtaatggtgggcactctaaggagactgccggtgacaaaccggaggaaggtggggatgacgtcaagtcatcatggcccttacggcctgggctacacacgtgctacaatggtcggtacagagggttgccaagccgcgaggtggagctaatctcacaaaaccgatcgtagtccggatcgcagtctgcaactcgactgcgtgaagtcggaatcgctagtaatcgcgaatcagaatgtcgcggtgaatacgttcccgggccttgtacacaccgcccgtcacaccatgggagtgggttgcaccagaagtagctagtctaaccttcggggggacggttaccacggtgtgattcatgactggggtg

SEQ ID NO: 2759 - DNA, 1458 bp, Pseudomonas mendocina
attgaacgctggcggcaggcctaacacatgcaagtcgagcggatgaagagagcttgctctctgatttagcggcggacgggtgagtaatgcctaggaatctgcctggtagtgggggataacgttccgaaaggaacgctaataccgcgtacgtcctacgggagaaagcaggggaccttcgggccttgcgctatcagatgagcctaggtcggattagctagttggtgaggtaatggctcaccaaggcgacgatccgtaactggtctgagaggatgatcagtcacactggaactgagacacggtccagactcctacgggaggcagcagtggggaatattggacaatgggcgaaagcctgatccagccatgccgcgtgtgtgaagaaggtcttcggattgtaaagcactttaagttgggaggaagggcattaacctaatacgttagtgttttgacgttaccaacagaataagcaccggctaacttcgtgccagcagccgcggtaatacgaagggtgcaagcgttaatcggaattactgggcgtaaagcgcgcgtaggtggttcgttaagttggatgtgaaagccccgggctcaacctgggaactgcatccaaaactggcgagctagagtacggtagagggtggtggaatttcctgtgtagcggtgaaatgcgtagatataggaaggaacaccagtggcgaaggcgaccacctggactgatactgacactgaggtgcgaaagcgtggggagcaaacaggattagataccctggtagtccacgccgtaaacgatgtcaactagccgttggaatccttgagattttagtggcgcagctaacgcattaagttgaccgcctggggagtacggccgcaaggttaaaactcaaatgaattgacgggggcccgcacaagcggtggagcatgtggtttaattcgaagcaacgcgaagaaccttacctggccttgacatgctgagaactttccagagatggattggtgccttcgggaactcagacacaggtgctgcatggctgtcgtcagctcgtgtcgtgagatgttgggttaagtcccgtaacgagcgcaacccttgtccttagttaccagcacctcgggtgggcactctaaggagactgccggtgacaaaccggaggaaggtggggatgacgtcaagtcatcatggcccttacggccagggctacacacgtgctacaatggtcggtacaaagggttgccaagccgcgaggtggagctaatcccataaaaccgatcgtagtccggatcgcagtctgcaactcgactgcgtgaagtcggaatcgctagtaatcgtgaatcagaatgtcacggtgaatacgttcccgggccttgtacacaccgcccgtcacaccatgggagtgggttgctccagaagtagctagtctaaccttcggggggacggttaccacggagtgattcatgactggggtg

SEQ ID NO: 2760 - DNA, 1454 bp, Pseudomonas mesoacidophila
attgaacgctggcggcatgccttacacatgcaagtcgaacggcagcacgggtgcttgcacctggtggcgagtggcgaacgggtgagtaatacatcggaacatgtcctgtagtgggggatagcccggcgaaagccggattaataccgcatacgatctacggatgaaagcgggggaccttcgggcctcgcgctatagggttggccgatggctgattagctagttggtggggtaaaggcctaccaaggcgacgatcagtagctggtctgagaggacgaccagccacactgggactgagacacggcccagactcctacgggaggcagcagtggggaattttggacaatgggggaaaccctgatccagcaatgccgcgtgtgtgaagaaggccttcgggttgtaaagcacttttgtccggaaagaaatccttgatcctaatatggtcgggggatgacggtaccggaagaataagcaccggctaactacgtgccagcagccgcggtaatacgtagggtgcgagcgttaatcggaattactgggcgtaaagcgtgcgcaggcggtttgctaagaccgatgtgaaatccccgggctcaacctgggaactgcattggtgactggcaggctagagcatggcagaggggggtagaattccacgtgtagcagtgaaatgcgtagagatgtggaggaataccgatggcgaaggcagccccctgggccaatactgacgctcatgcacgaaagcgtggggagcaaacaggattagataccctggtagtccacgccctaaacgatgtcaactagttgttggggattcatttccttagtaacgtagctaacgcgtgaagttgaccgcctggggagtacggtcgcaagattaaaactcaaaggaattgacggggacccgcacaagcggtggatgatgtggattaattcgatgcaacgcgaaaaaccttacctacccttgacatggtcggaatcccgaagagattcgggagtgctcgaaagagaaccggcgcacaggtgctgcatggctgtcgtcagctcgtgtcgtgagatgttgggttaagtcccgcaacgagcgcaacccttgtccttagttgctacgcaagagcactctaaggagactgccggtgacaaaccggaggaaggtggggatgacgtcaagtcctcatggcccttatgggtagggcttcacacgtcatacaatggtcggaacagagggtcccaacccgcgagggggagctaatcccagaaaaccgatcgtagtccggattgcactctgcaactcgagtgcatgaagctggaatcgctagtaatcgcggatcagcatgccgcggtgaatacgttcccgggtcttgtacacaccgcccgtcacaccatgggagtgggttttaccagaagtggctagtctaaccgcaaggaggacggtcaccacggtaggattcatgactggggtg

SEQ ID NO: 2761 - DNA, 1459 bp, Pseudomonas mohnii
attgaacgctggcggcaggcctaacacatgcaagtcgagcggatgaagagagcttgctctctgattcagcggcggacgggtgagtaatgcctaggaatctgcctggtagtgggggacaacgtctcgaaagggacgctaataccgcatacgtcctacgggagaaagcaggggaccttcgggccttgcgctatcagatgagcctaggtcggattagctagttggtgaggtaatggctcaccaaggcgacgatccgtaactggtctgagaggatgatcagtcacactggaactgagacacggtccagactcctacgggaggcagcagtggggaatattggacaatgggcgaaagcctgatccagccatgccgcgtgtgtgaagaaggtcttcggattgtaaagcactttaagttgggaggaagggcagtaacttaatacgttgctgttttgacgttaccgacagaataagcaccggctaactctgtgccagcagccgcggtaatacagagggtgcaagcgttaatcggaattactgggcgtaaagcgcgcgtaggtggtttgttaagttggatgtgaaagccccgggctcaacctgggaactgcattcaaaactgacaagctagagtatggtagagggtggtggaatttcctgtgtagcggtgaaatgcgtagatataggaaggaacaccagtggcgaaggcgaccacctggactgatactgacactgaggtgcgaaagcgtggggagcaaacaggattagataccctggtagtccacgccgtaaacgatgtcaactagccgttgggagccttgagctcttagtggcgcagctaacgcattaagttgaccgcctggggagtacggccgcaaggttaaaactcaaatgaattgacgggggcccgcacaagcggtggagcatgtggtttaattcgaagcaacgcgaagaaccttaccaggccttgacatccaatgaactttccagagatggattggtgccttcgggaacattgagacaggtgctgcatggctgtcgtcagctcgtgtcgtgagatgttgggttaagtcccgtaacgagcgcaacccttgtccttagttaccagcacgttatggtgggcactctaaggagactgccggtgacaaaccggaggaaggtggggatgacgtcaagtcatcatggcccttacggcctgggctacacacgtgctacaatggtcggtacagagggttgccaagccgcgaggtggagctaatcccacaaaaccgatcgtagtccggatcgcagtctgcaactcgactgcgtgaagtcggaatcgctagtaatcgcgaatcagaatgtcgcggtgaatacgttcccgggccttgtacacaccgcccgtcacaccatgggagtgggttgcaccagaagtagctagtctaaccttcgggaggacggttaccacggtgtgattcatgactggggtg

SEQ ID NO: 2762 - DNA, 1459 bp, Pseudomonas moorei
  misc_feature (423)..(424): n is a, c, g, or t
  misc_feature (428)..(429): n is a, c, g, or t
  misc_feature (434)..(434): n is a, c, g, or t
  misc_feature (437)..(438): n is a, c, g, or t
  misc_feature (442)..(443): n is a, c, g, or t
  misc_feature (973)..(974): n is a, c, g, or t
  misc_feature (976)..(976): n is a, c, g, or t
  misc_feature (978)..(978): n is a, c, g, or t
  misc_feature (985)..(985): n is a, c, g, or t
  misc_feature (987)..(990): n is a, c, g, or t
attgaacgctggcggcaggcctaacacatgcaagtcgagcggatgaagagagcttgctctctgattcagcggcggacgggtgagtaatgcctaggaatctgcctggtagtgggggacaacgtttcgaaaggaacgctaataccgcatacgtcctacgggagaaagcaggggaccttcgggccttgcgctatcagatgagcctaggtcggattagctagttggtgaggtaatggctcaccaaggcgacgatccgtaactggtctgagaggatgatcagtcacactggaactgagacacggtccagactcctacgggaggcagcagtggggaatattggacaatgggcgaaagcctgatccagccatgccgcgtgtgtgaagaaggtcttcggattgtaaagcactttaagttgggaggaagggnngtannttaanacnntgcnnttttgacgttaccgacagaataagcaccggctaactctgtgccagcagccgcggtaatacagagggtgcaagcgttaatcggaattactgggcgtaaagcgcgcgtaggtggtttgttaagttggatgtgaaagccccgggctcaacctgggaactgcattcaaaactgacaagctagagtatggtagagggtggtggaatttcctgtgtagcggtgaaatgcgtagatataggaaggaacaccagtggcgaaggcgaccacctggactgatactgacactgaggtgcgaaagcgtggggagcaaacaggattagataccctggtagtccacgccgtaaacgatgtcaactagccgttgggagccttgagctcttagtggcgcagctaacgcattaagttgaccgcctggggagtacggccgcaaggttaaaactcaaatgaattgacgggggcccgcacaagcggtggagcatgtggtttaattcgaagcaacgcgaagaaccttaccaggccttgacatccaatgaanntncnagagatngnnnngtgccttcgggaacattgagacaggtgctgcatggctgtcgtcagctcgtgtcgtgagatgttgggttaagtcccgtaacgagcgcaacccttgtccttagttaccagcacgttatggtgggcactctaaggagactgccggtgacaaaccggaggaaggtggggatgacgtcaagtcatcatggcccttacggcctgggctacacacgtgctacaatggtcggtacagagggttgccaagccgcgaggtggagctaatcccataaaaccgatcgtagtccggatcgcagtctgcaactcgactgcgtgaagtcggaatcgctagtaatcgcgaatcagaatgtcgcggtgaatacgttcccgggccttgtacacaccgcccgtcacaccatgggagtgggttgcaccagaagtagctagtctaaccttcggggggacggttaccacggtgtgattcatgactggggtg

SEQ ID NO: 2763 - DNA, 1459 bp, Pseudomonas moraviensis
attgaacgctggcggcaggcctaacacatgcaagtcgagcggatgaaaggagcttgctcctggattcagcggcggacgggtgagtaatgcctaggaatctgcctggtagtgggggacaacgtttcgaaaggaacgctaataccgcatacgtcctacgggagaaagcaggggaccttcgggccttgcgctatcagatgagcctaggtcggattagctagttggtgaggtaatggctcaccaaggcgacgatccgtaactggtctgagaggatgatcagtcacactggaactgagacacggtccagactcctacgggaggcagcagtggggaatattggacaatgggcgaaagcctgatccagccatgccgcgtgtgtgaagaaggtcttcggattgtaaagcactttaagttgggaggaagggttgtagattaatactaatgcattttgacgttaccgacagaataagcaccggctaactctgtgccagcagccgcggtaatacagagggtgcaagcgttaatcggaattactgggcgtaaagcgcgcgtaggtggtttgttaagttggatgtgaaatccccgggctcaacctgggaactgcatccaaaactggcaagctagagtatggtagagggtggtggaatttcctgtgtagcggtgaaatgcgtagatataggaaggaacaccagtggcgaaggcgaccacctggactgatactgacactgaggtgcgaaagcgtggggagcaaacaggattagataccctggtagtccacgccgtaaacgatgtcaactagccgttgggagccttgagctcttagtggcgcagctaacgcattaagttgaccgcctggggagtacggccgcaaggttaaaactcaaatgaattgacgggggcccgcacaagcggtggagcatgtggtttaattcgaagcaacgcgaagaaccttaccaggccttgacatccaatgaactttccagagatggattggtgccttcgggaacattgagacaggtgctgcatggctgtcgtcagctcgtgtcgtgagatgttgggttaagtcccgtaacgagcgcaacccttgtccttagttaccagcacgttatggtgggcactctaaggagactgccggtgacaaaccggaggaaggtggggatgacgtcaagtcatcatggcccttacggcctgggctacacacgtgctacaatggtcggtacaaagggttgccaagccgcgaggtggagctaatcccataaaaccgatcgtagtccggatcgcagtctgcaactcgactgcgtgaagtcggaatcgctagtaatcgcgaatcagaatgtcgcggtgaatacgttcccgggccttgtacacaccgcccgtcacaccatgggagtgggttgcaccagaagtagctagtctaaccttcgggaggacggttaccacggtgtgattcatgactggggtg

SEQ ID NO: 2764 - DNA, 1459 bp, Pseudomonas mucidolens
attgaacgctggcggcaggcctaacacatgcaagtcgagcggtagagagaagcttgcttctcttgagagcggcggacgggtgagtaatgcctaggaatctgcctggtagtgggggataacgttcggaaacggacgctaataccgcatacgtcctacgggagaaagcaggggaccttcgggccttgcgctatcagatgagcctaggtcggattagctagttggtggggtaatggctcaccaaggcgacgatccgtaactggtctgagaggatgatcagtcacactggaactgagacacggtccagactcctacgggaggcagcagtggggaatattggacaatgggcgaaagcctgatccagccatgccgcgtgtgtgaagaaggtcttcggattgtaaagcactttaagttgggaggaagggttgtagattaatactctgcaattttgacgttaccgacagaataagcaccggctaactctgtgccagcagccgcggtaatacagagggtgcaagcgttaatcggaattactgggcgtaaagcgcgcgtaggtggtttgttaagttggatgtgaaatccccgggctcaacctgggaactgcattcaaaactgactgactagagtatggtagagggtggtggaatttcctgtgtagcggtgaaatgcgtagatataggaaggaacaccagtggcgaaggcgaccacctggactgatactgacactgaggtgcgaaagcgtggggagcaaacaggattagataccctggtagtccacgccgtaaacgatgtcaactagccgttgggagccttgagctcttagtggcgcagctaacgcattaagttgaccgcctggggagtacggccgcaaggttaaaactcaaatgaattgacgggggcccgcacaagcggtggagcatgtggtttaattcgaagcaacgcgaagaaccttaccaggccttgacatccaatgaactttctagagatagattggtgccttcgggaacattgagacaggtgctgcatggctgtcgtcagctcgtgtcgtgagatgttgggttaagtcccgtaacgagcgcaacccttgtccttagttaccagcacgtaatggtgggcactctaaggagactgccggtgacaagccggaggaaggtggggatgacgtcaagtcatcatggcccttacggcctgggctacacacgtgctacaatggtcggtacaaagggttgccaagccgcgaggtggagctaatcccataaaaccgatcgtagtccggatcgcagtctgcaactcgactgcgtgaagtcggaatcgctagtaatcgcgaatcagaatgtcgcggtgaatacgttcccgggccttgtacacaccgcccgtcacaccatgggagtgggttgcaccagaagtagctagtctaaccttcgggaggacggttaccacggtgtgattcatgactggggtg

SEQ ID NO: 2765 - DNA, 1459 bp, Pseudomonas nitroreducens
  misc_feature (1361)..(1361): n is a, c, g, or t
attgaacgctggcggcaggcctaacacatgcaagtcgagcggatgatgggagcttgctcccggattcagcggcggacgggtgagtaatgcctaggaatctgcctggtagtgggggacaacgtttcgaaaggaacgctaataccgcatacgtcctacgggagaaagcaggggaccttcgggccttgcgctatcagatgagcctaggtcggattagctagttggtggggtaaaggcctaccaaggcgacgatccgtaactggtctgagaggatgatcagtcacactggaactgagacacggtccagactcctacgggaggcagcagtggggaatattggacaatgggcgaaagcctgatccagccatgccgcgtgtgtgaagaaggtcttcggattgtaaagcactttaagttgggaggaagggcagtaagttaataccttgctgttttgacgttaccaacagaataagcaccggctaacttcgtgccagcagccgcggtaatacgaagggtgcaagcgttaatcggaattactgggcgtaaagcgcgcgtaggtggtttggtaagatggatgtgaaatccccgggctcaacctgggaactgcatccataactgcctgactagagtacggtagagggtggtggaatttcctgtgtagcggtgaaatgcgtagatataggaaggaacaccagtggcgaaggcgaccacctggactgatactgacactgaggtgcgaaagcgtggggagcaaacaggattagataccctggtagtccacgccgtaaacgatgtcgactagccgttggaatccttgagattttagtggcgcagctaacgcgataagtcgaccgcctggggagtacggccgcaaggttaaaactcaaatgaattgacgggggcccgcacaagcggtggagcatgtggtttaattcgaagcaacgcgaagaaccttacctggccttgacatgtccggaaccttgcagagatgcgagggtgccttcgggaatcggaacacaggtgctgcatggctgtcgtcagctcgtgtcgtgagatgttgggttaagtcccgtaacgagcgcaacccttgtccttagttaccagcacgttatggtgggcactctaaggagactgccggtgacaaaccggaggaaggtggggatgacgtcaagtcatcatggcccttacggccagggctacacacgtgctacaatggtcggtacagagggttgccaagccgcgaggtggagctaatcccataaaaccgatcgtagtccggatcgcagtctgcaactcgactgcgtgaagtcggaatcgctagtaatcgtgaatcagaatgtcacggtgaatacgttcccgggccttgnacacaccgcccgtcacaccatgggagtgggttgctccagaagtagctagtctaaccgcaagggggacggttaccacggagtgattcatgactggggtg

SEQ ID NO: 2766 - DNA, 1459 bp, Pseudomonas orientalis
attgaacgctggcggcaggcctaacacatgcaagtcgagcggtagagagaagcttgcttctcttgagagcggcggacgggtgagtaaagcctaggaatctgcctggtagtgggggataacgttcggaaacggacgctaataccgcatacgtcctacgggagaaagcaggggaccttcgggccttgcgctatcagatgagcctaggtcggattagctagttggtgaggtaatggctcaccaaggcgacgatccgtaactggtctgagaggatgatcagtcacactggaactgagacacggtccagactcctacgggaggcagcagtggggaatattggacaatgggcgaaagcctgatccagccatgccgcgtgtgtgaagaaggtcttcggattgtaaagcactttaagttgggaggaagggcagttacttaatacgtgattgttttgacgttaccgacagaataagcaccggctaactctgtgccagcagccgcggtaatacagagggtgcaagcgttaatcggaattactgggcgtaaagcgcgcgtaggtggtttgttaagttggatgtgaaatccccgggctcaacctgggaactgcattcaaaactgactgactagagtgtggtagagggtggtggaatttcctgtgtagcggtgaaatgcgtagatataggaaggaacaccagtggcgaaggcgaccacctggaccaacactgacactgaggtgcgaaagcgtggggagcaaacaggattagataccctggtagtccacgccgtaaacgatgtcaactagccgttgggagccttgagctcttagtggcgcagctaacgcattaagttgaccgcctggggagtacggccgcaaggttaaaactcaaatgaattgacgggggcccgcacaagcggtggagcatgtggtttaattcgaagcaacgcgaagaaccttaccaggccttgacatccaatgaactttctagagatagattggtgccttcgggaacattgagacaggtgctgcatggctgtcgtcagctcgtgtcgtgagatgttgggttaagtcccgtaacgagcgcaacccttgtccttagttaccagcacgtaatggtgggcactctaaggagactgccggtgacaaaccggaggaaggtggggatgacgtcaagtcatcatggcccttacggcctgggctacacacgtgctacaatggtcggtacagagggttgccaagccgcgaggtggagctaatcccacaaaaccgatcgtagtccggatcgcagtctgcaactcgactgcgtgaagtcggaatcgctagtaatcgcgaatcagaatgtcgcggtgaatacgttcccgggccttgtacacaccgcccgtcacaccatgggagtgggttgcaccagaagtagctagtctaaccttcgggaggacggttaccacggtgtgattcatgactggggtg

SEQ ID NO: 2767 - DNA, 1459 bp, Pseudomonas oryzae
attgaacgctggcggcaggcctaacacatgcaagtcgagcggatgaggggagcttgcttcctgattcagcggcggacgggtgagtaatgcctaggaatctgcccgatagtgggggacaacgtttcgaaaggaacgctaataccgcatacgtcctacgggagaaagtgggggatcttcggacctcacgctatcggatgagcctaggtcggattagctagttggtggggtaatggctcaccaaggcgacgatccgtaactggtctgagaggatgatcagtcacactggaactgagacacggtccagactcctacgggaggcagcagtggggaatattggacaatgggcgaaagcctgatccagccatgccgcgtgtgtgaagaaggtcttcggattgtaaagcactttaagttgggaggaagggctgccggttaataccctgcagttttgacgttaccaacagaataagcaccggctaacttcgtgccagcagccgcggtaatacgaagggtgcaagcgttaatcggaattactgggcgtaaagcgcgcgtaggtggttcagcaagttggatgtgaaagccccgggctcaacctgggaactgcatccaaaactactgggctagagtacggtagagggtggtggaatttcctgtgtagcggtgaaatgcgtagatataggaaggaacaccagtggcgaaggcgaccacctggactgatactgacactgaggtgcgaaagcgtggggagcaaacaggattagataccctggtagtccacgccgtaaacgatgtcaactagctgttgggttccttgagaacttagtagcgcagctaacgcgataagttgaccgcctggggagtacggccgcaaggttaaaactcaaatgaattgacgggggcccgcacaagcggtggagcatgtggtttaattcgaagcaacgcgaagaaccttacctggccttgacatgctgagaactttccagagatggattggtgccttcgggaactcagacacaggtgctgcatggctgtcgtcagctcgtgtcgtgagatgttgggttaagtcccgtaacgagcgcaacccttgtccttagttaccagcacgttatggtgggcactctaaggagactgccggtgacaaaccggaggaaggtggggatgacgtcaagtcatcatggcccttacggccagggctacacacgtgctacaatggtcggtacagagggttgccaagccgcgaggtggagctaatctcacaaaaccgatcgtagtccggatcgcagtctgcaactcgactgcgtgaagtcggaatcgctagtaatcgtgaatcagaatgtcacggtgaatacgttcccgggccttgtacacaccgcccgtcacaccatgggagtgggttgctccagaagtagctagtctaaccttcggggggacggttaccacggagtgattcatgactggggtg

SEQ ID NO: 2768 - DNA, 1458 bp, Pseudomonas otitidis
attgaacgctggcggcaggcctaacacatgcaagtcgagcggatgagtggagcttgctccatgattcagcggcggacgggtgagtaatgcctaggaatctgcctggtagtgggggataacgtttcgaaaggaacgctaataccgcatacgtcctacgggagaaagtgggggatcttcggacctcacgctatcagatgagcctaggtcggattagctagttggtggggtaatggcccaccaaggcgacgatccgtaactggtctgagaggatgatcagtcacactggaactgagacacggtccagactcctacgggaggcagcagtggggaatattggacaatgggcgaaagcctgatccagccatgccgcgtgtgtgaagaaggtcttcggattgtaaagcactttaagttgggaggaagagcagtaagttaataccttgctgttttgacgttaccaacagaataagcaccggctaacttcgtgccagcagccgcggtaatacgaagggtgcaagcgttaatcggaattactgggcgtaaagcgcgcgtaggtggttcagcaagttggatgtgaaagccccgggctcaacctgggaattgcatccaaaactactgagctagagtacggtagagggtggtggaatttcctgtgtagcggtgaaatgcgtagatataggaaggaacaccagtggcgaaggcgaccacctggactgatactgacactgaggtgcgaaagcgtggggagcaaacaggattagataccctggtagtccacgccgtaaacgatgtcgactagccgttgggatccttgagatcttagtggcgcagctaacgcgataagtcgaccgcctggggagtacggccgcaaggttaaaactcaaatgaattgacgggggcccgcacaagcggtggagcatgtggtttaattcgaagcaacgcgaagaaccttacctggccttgacatgcagagaactttccagagatggattggtgccttcgggaactctgacacaggtgctgcatggctgtcgtcagctcgtgtcgtgagatgttgggttaagtcccgtaacgagcgcaacccttgtccttagttaccagcacctcgggtgggcactctaaggagactgccggtgacaaaccggaggaaggtggggatgacgtcaagtcatcatggcccttacggccagggctacacacgtgctacaatggtcggtacaaagggttgccaagccgcgaggtggagctaatcccataaaaccgatcgtagtccggatcgcagtctgcaactcgactgcgtgaagtcggaatcgctagtaatcgtgaatcagaatgtcacggtgaatacgttcccgggccttgtacacaccgcccgtcacaccatgggagtgggttgctccagaagtagctagtctaaccgcaaggaggacggttaccacggagtgattcatgactggggtg

SEQ ID NO: 2769 - DNA, 1408 bp, Pseudomonas palleroniana
agtcgagcggtagagagaagcttgcttctcttgagagcggcggacgggtgagtaatgcctaggaatctgcctggtagtgggggataacgtccggaaacggacgctaataccgcatacgtcctacgggagaaagcaggggaccttcgggccttgcgctatcagatgagcctaggtcggattagctagttggtgaggtaatggctcaccaaggcgacgatccgtaactggtctgagaggatgatcagtcacactggaactgagacacggtccagactcctacgggaggcagcagtggggaatattggacaatgggcgaaagcctgatccagccatgccgcgtgtgtgaagaaggtcttcggattgtaaagcactttaagttgggaggaagggcagttgcctaatacgtaactgttttgacgttaccgacagaataagcaccggctaactctgtgccagcagccgcggtaatacagagggtgcaagcgttaatcggaattactgggcgtaaagcgcgcgtaggtggtttgttaagttggatgtgaaatccccgggctcaacctgggaactgcattcaaaactgactgactagagtatggtagagggtggtggaatttcctgtgtagcggtgaaatgcgtagatataggaaggaacaccagtggcgaaggcgaccacctggactgatactgacactgaggtgcgaaagcgtggggagcaaacaggattagataccctggtagtccacgccgtaaacgatgtcaactagccgttggaagccttgagcttttagtggcgcagctaacgcattaagttgaccgcctggggagtacggccgcaaggttaaaactcaaatgaattgacgggggcccgcacaagcggtggagcatgtggtttaattcgaagcaacgcgaagaaccttaccaggccttgacatccaatgaactttccagagatggattggtgccttcgggaacattaagacaggtgctgcatggctgtcgtcagctcgtgtcgtgagatgttgggttaagtcccgtaacgagcgcaacccttgtccttagttaccagcacgttatggtgggcactctaaggagactgccggtgacaaaccggaggaaggtggggatgacgtcaagtcatcatggcccttacggcctgggctacacacgtgctacaatggtcggtacaaagggttgccaagccgcgaggtgaagctaatcccataaaaccgatcgtagtccggatcgcagtctgcaactcgactgcgtgaagtcggaatcgctagtaatcgcgaatcagaatgtcgcggtgaatacgttcccgggccttgtacacaccgcccgtcacaccatgggagtgggttgcaccagaagtagctagtctaacctcgggaggacggttaccacggtg

SEQ ID NO: 2770 - DNA, 1459 bp, Pseudomonas panacis
  misc_feature (1016)..(1016): n is a, c, g, or t
attgaacgctggcggcaggcctaacacatgcaagtcgagcggtagagagaagcttgcttctcttgagagcggcggacgggtgagtaatgcctaggaatctgcctggtagtgggggataacgttcggaaacggacgctaataccgcatacgtcctacgggagaaagcaggggaccttcgggccttgcgctatcagatgagcctaggtcggattagctagttggtggggtaatggctcaccaaggcgacgatccgtaactggtctgagaggatgatcagtcacactggaactgagacacggtccagactcctacgggaggcagcagtggggaatattggacaatgggcgaaagcctgatccagccatgccgcgtgtgtgaagaaggtcttcggattgtaaagcactttaagttgggaggaagggcagtaaattaatactttgctgttttgacgttaccgacagaataagcaccggctaactctgtgccagcagccgcggtaatacagagggtgcaagcgttaatcggaattactgggcgtaaagcgcgcgtaggtggtttgttaagttggatgtgaaatccccgggctcaacctgggaaccgcattcaaaactgactgactagagtatggtagagggtggtggaatttcctgtgtagcggtgatatgcgtagatataggaaggaacaccagtggcgaaggcgaccacctggactgatactgacactgaggtgcgaaagcgtggggagcaaacaggattagataccctggtagtccacgccgtaaacgatgtcaactagccgttgggagccttgagctcttagtggcgcagctaacgcattaagttgaccgcctggggagtacggccgcaaggttaaaactcaaatgaattgacgggggcccgcacaagcggtggagcatgtggtttaattcgaagcaacgcgaagaaccttaccaggccttgacatccaatgaactttccagagatggatgggtgccttcgggaacattgagacaggngctgcatggctgtcgtcagctcgtgtcgtgagatgttgggttaagtcccgtaacgagcgcaacccttgtccttagttaccagcacgtaatggtgggcactctaaggagactgccggtgacaaaccggaggaaggtggggatgacgtcaagtcatcatggcccttacggcctgggctacacacgtgctacaatggtcggtacagagggttgccaagccgcgaggtggagctaatcccagaaaaccgatcgtagtccggatcgcagtctgcaactcgactgcgtgaagtcggaatcgctagtaaccgcgaatcagaatgtcgcggtgaatacgttcccgggccttgtacacaccgcccgtcacaccatgggagtgggttgcaccagaagtagctagtctaaccttcgggaggacggttaccacggtgtgattcatgactggggtg

SEQ ID NO: 2771 - DNA, 1459 bp, Pseudomonas panipatensis
attgaacgctggcggcaggcctaacacatgcaagtcgagcggatgaagagagcttgctctctgattcagcggcggacgggtgagtaatgcctaggaatctgcctggtagtgggggacaacgtttcgaaaggaacgctaataccgcatacgtcctacgggagaaagtgggggatcttcggacctcacgctatcagatgagcctaggtcggattagctagttggtggggtaaaggcctaccaaggcgacgatccgtaactggtctgagaggatgatcagtcacactggaactgagacacggtccagactcctacgggaggcagcagtggggaatattggacaatgggcgaaagcctgatccagccatgccgcgtgtgtgaagaaggtcttcggattgtaaagcactttaagttgggaggaagggcagtaagttaataccttgctgttttgacgttaccgacagaataagcaccggctaacttcgtgccagcagccgcggtaatacgaagggtgcaagcgttaatcggaattactgggcgtaaagcgcgcgtaggtggtttggtaagatggatgtgaaatccccgggctcaacctgggaactgcatccataactgcctgactagagtacggtagagggtggtggaatttcctgtgtagcggtgaaatgcgtagatataggaaggaacaccagtggcgaaggcgaccacctggactgatactgacactgaggtgcgaaagcgtggggagcaaacaggattagataccctggtagtccacgccgtaaacgatgtcgactagccgttgggatccttgagatcttagtggcgcagctaacgcgataagtcgaccgcctggggagtacggccgcaaggttaaaactcaaatgaattgacgggggcccgcacaagcggtggagcatgtggtttaattcgaagcaacgcgaagaaccttacctggccttgacatgtccggaatcctgcagagatgcgggagtgccttcgggaatcggaacacaggtgctgcatggctgtcgtcagctcgtgtcgtgagatgttgggttaagtcccgtaacgagcgcaacccttgtccttagttaccagcacgttaaggtgggcactctaaggagactgccggtgacaaaccggaggaaggtggggatgacgtcaagtcatcatggcccttacggccagggctacacacgtgctacaatggtcggtacagagggttgccaagccgcgaggtggagctaatcccacaaaaccgatcgtagtccggatcgcagtctgcaactcgactgcgtgaagtcggaatcgctagtaatcgtgaatcagaatgtcacggtgaatacgttcccgggccttgtacacaccgcccgtcacaccatgggagtgggttgctccagaagtagctagtctaaccgcaagggggacggttaccacggagtgattcatgactggggtg

SEQ ID NO: 2772 - DNA, 1459 bp, Pseudomonas parafulva
attgaacgctggcggcaggcctaacacatgcaagtcgagcggatgacgggagcttgctccttgattcagcggcggacgggtgagtaatgcctaggaatctgcctggtagtgggggacaacgtttcgaaaggaacgctaataccgcatacgtcctacgggagaaagcaggggaccttcgggccttgcgctatcagatgagcctaggtcggattagcttgttggtgaggtaatggctcaccaaggcgacgatccgtaactggtctgagaggatgatcagtcacactggaactgagacacggtccagactcctacgggaggcagcagtggggaatattggacaatgggcgaaagcctgatccagccatgccgcgtgtgtgaagaaggtcttcggattgtaaagcactttaagttgggaggaagggttgtagattaatactctgcaattttgacgttaccgacagaataagcaccggctaactctgtgccagcagccgcggtaatacagagggtgcaagcgttaatcggaattactgggcgtaaagcgcgcgtaggtggtttgttaagttggatgtgaaagccccgggctcaacctgggaactgcatccaaaactggcaagctagagtacggtagagggtggtggaatttcctgtgtagcggtgaaatgcgtagatataggaaggaacaccagtggcgaaggcgaccacctggactgatactgacactgaggtgcgaaagcgtggggagcaaacaggattagataccctggtagtccacgccgtaaacgatgtcaactagccgttggaatccttgagattttagtggcgcagctaacgcattaagttgaccgcctggggagtacggccgcaaggttaaaactcaaatgaattgacgggggcccgcacaagcggtggagcatgtggtttaattcgaagcaacgcgaagaaccttaccaggccttgacatgcagagaactttccagagatggattggtgccttcgggaactctgacacaggtgctgcatggctgtcgtcagctcgtgtcgtgagatgttgggttaagtcccgtaacgagcgcaacccttgtccttagttaccagcacgttatggtgggcactctaaggagactgccggtgacaaaccggaggaaggtggggatgacgtcaagtcatcatggcccttacggcctgggctacacacgtgctacaatggtcggtacagagggttgccaagccgcgaggtggagctaatctcacaaaaccgatcgtagtccggatcgcagtctgcaactcgactgcgtgaagtcggaatcgctagtaatcgcgaatcagaatgtcgcggtgaatacgttcccgggccttgtacacaccgcccgtcacaccatgggagtgggttgcaccagaagtagctagtctaaccttcgggaggacggttaccacggtgtgattcatgactggggtg

SEQ ID NO: 2773 - DNA, 1420 bp, Pseudomonas paralactis
attgaacgctggcggcaggcctaacacatgcaagtcgagcggtagagagaagcttgcttctcttgagagcggcggacgggtgagtaatgcctaggaatctgcctggtagtgggggataacgttcggaaacggacgctaataccgcatacgtcctacgggagaaagcaggggaccttcgggccttgcgctatcagatgagcctaggtcggattagctagttggtgaggtaatggctcaccaaggcgacgatccgtaactggtctgagaggatgatcagtcacactggaactgagacacggtccagactcctacgggaggcagcagtggggaatattggacaatgggcgaaagcctgatccagccatgccgcgtgtgtgaagaaggtcttcggattgtaaagcactttaagttgggaggaagggttgtagattaatactctgcaattttgacgttaccgacagaataagcaccggctaactctgtgccagcagccgcggtaatacagagggtgcaagcgttaatcggaattactgggcgtaaagcgcgcgtaggtggtttgttaagttggatgtgaaatccccgggctcaacctgggaactgcattcaaaactgactgactagagtatggtagagggtggtggaatttcctgtgtagcggtgaaatgcgtagatataggaaggaacaccagtggcgaaggcgaccacctggactaatactgacactgaggtgcgaaagcgtggggagcaaacaggattagataccctggtagtccacgccgtaaacgatgtcaactagccgttggaagccttgagcttttagtggcgcagctaacgcattaagttgaccgcctggggagtacggccgcaaggttaaaactcaaatgaattgacgggggcccgcacaagcggtggagcatgtggtttaattcgaagcaacgcgaagaaccttaccaggccttgacatccaatgaactttctagagatagattggtgccttcgggaacattgagacaggtgctgcatggctgtcgtcagctcgtgtcgtgagatgttgggttaagtcccgtaacgagcgcaacccttgtccttagttaccagcacgtaatggtgggcactctaaggagactgccggtgacaaaccggaggaaggtggggatgacgtcaagtcatcatggcccttacggcctgggctacacacgtgctacaatggtcggtacagagggttgccaagccgcgaggtggagctaatcccataaaaccgatcgtagtccggatcgcagtctgcaactcgactgcgtgaagtcggaatcgctagtaatcgcgaatcagaatgtcgcggtgaatacgttcccgggccttgtacacaccgcccgtcacaccatgggagtgggttgcaccagaagtagctagtctaaccttc

SEQ ID NO: 2774 - DNA, 1459 bp, Pseudomonas pelagia
attgaacgctggcggcaggcctaacacatgcaagtcgagcggtagagagaagcttgcttctcttgagagcggcggacgggtgagtaatacctgggaatctgcctgatagtgggggataacgttcggaaacggacgctaataccgcatacgtcctacgggagaaagcaggggatcttcggaccttgcgctatcagatgagcccaggtcggattagcttgttggtgaggtaaaggctcaccaaggcgacgatccgtaactggtctgagaggatgatcagtcacactggaactgagacacggtccagactcctacgggaggcagcagtggggaatattggacaatgggcgcaagcctgatccagccatgccgcgtgtgtgaagaaggtcttcggattgtaaagcactttaagttgggaggaagggctgatgcttaatacgtatcagtcttgacgttaccgacagaataagcaccggctaactctgtgccagcagccgcggtaatacagagggtgcaagcgttaatcggaattactgggcgtaaagcgcgcgtaggtggctaagtaagatgggtgtgaaatccccgggctcaacctgggaactgcatccataactgcttagctagagtacggtagagggtagtggaatttcctgtgtagcggtgaaatgcgtagatataggaaggaacaccagtggcgaaggcgactacctggactgatactgacactgaggtgcgaaagcgtggggagcaaacaggattagataccctggtagtccacgccgtaaacgatgtcaactagccgttgggaaccttgagttcttagtggcgcagctaacgcactaagttgaccgcctggggagtacggtcgcaagattaaaactcaaatgaattgacgggggcccgcacaagcggtggagcatgtggtttaattcgaagcaacgcgaagaaccttacctggccttgacatgctgagaactttccagagatggattggtgccttcgggaactcagacacaggtgctgcatggctgtcgtcagctcgtgtcgtgagatgttgggttaagtcccgtaacgagcgcaacccttgtccttagttaccagcacgtaatggtgggcactctaaggagactgccggtgacaaaccggaggaaggtggggatgacgtcaagtcatcatggcccttacggccagggctacacacgtgctacaatggggggtacaaagggttgccaagccgcgaggtggagctaatcccataaaacctctcgtagtccggatcggagtctgcaactcgactccgtgaagtcggaatcgctagtaatcgtggatcagaacgccacggtgaatacgttcccgggccttgtacacaccgcccgtcacaccatgggagtgggttgcaccagaagtagctagtctaaccttcgggaggacggttaccacggtgtgattcatgactggggtg

SEQ ID NO: 2775 - DNA, 1459 bp, Pseudomonas peli
attgaacgctggcggcaggcctaacacatgcaagtcgagcggtagagagaagcttgcttctcttgagagcggcggacgggtgagtaatgcctaggaatctgcctagtggtgggggataacgttcggaaacggacgctaataccgcatacgtcctacgggagaaagcgggggaccttcgggcctcgcgccattagatgagcctaggtcggattagctagttggtgaggtaatggctcaccaaggcgacgatccgtaactggtctgagaggatgatcagtcacactggaactgagacacggtccagactcctacgggaggcagcagtggggaatattggacaatgggcgaaagcctgatccagccatgccgcgtgtgtgaagaaggtcttcggattgtaaagcactttaagttgggaggaagggtagtaacttaatacgttgctactttgacgttaccgacagaataagcaccggctaacttcgtgccagcagccgcggtaatacgaagggtgcaagcgttaatcggaattactgggcgtaaagcgcgcgtaggtggttcagtaagttggaagtgaaatccccgggctcaacctgggaactgctttcaaaactgctgagctagagtacggtagagggtggtggaatttcctgtgtagcggtgaaatgcgtagatataggaaggaacaccagtggcgaaggcgaccacctggactgatactgacactgaggtgcgaaagcgtggggagcaaacaggattagataccctggtagtccacgccgtaaacgatgtcaactagccgttgggagtcttgaactcttagtggcgcagctaacgcattaagttgaccgcctggggagtacggccgcaaggttaaaactcaaatgaattgacgggggcccgcacaagcggtggagcatgtggtttaattcgaagcaacgcgaagaaccttacctggccttgacatgctgagaactttctagagatagattggtgccttcgggaactcagacacaggtgctgcatggctgtcgtcagctcgtgtcgtgagatgttgggttaagtcccgtaacgagcgcaacccttgtccttagttaccagcacgtaatggtgggaactctaaggagactgccggtgacaaaccggaggaaggtggggatgacgtcaagtcatcatggcccttacggccagggctacacacgtgctacaatggtcggtacaaagggttgccaagccgcgaggtggagctaatcccataaaaccgatcgtagtccggatcgcagtctgcaactcgactgcgtgaagtcggaatcgctagtaatcgtgaatcagaatgtcacggtgaatacgttcccgggccttgtacacaccgcccgtcacaccatgggagtgggttgcaccagaagtagctagtctaaccgcaagggggacggttaccacggtgtgattcatgactggggtg

SEQ ID NO: 2776 - DNA, 1459 bp, Pseudomonas plecoglossicida
attgaacgctggcggcaggcctaacacatgcaagtcgagcggatgacgggagcttgctccttgattcagcggcggacgggtgagtaatgcctaggaatctgcctggtagtgggggacaacgtttcgaaaggaacgctaataccgcatacgtcctacgggagaaagcaggggaccttcgggccttgcgctatcagatgagcctaggtcggattagctagttggtggggtaatggctcaccaaggcgacgatccgtaactggtctgagaggatgatcagtcacactggaactgagacacggtccagactcctacgggaggcagcagtggggaatattggacaatgggcgaaagcctgatccagccatgccgcgtgtgtgaagaaggtcttcggattgtaaagcactttaagttgggaggaagggcagtaagctaataccttgctgttttgacgttaccgacagaataagcaccggctaactctgtgccagcagccgcggtaatacagagggtgcaagcgttaatcggaattactgggcgtaaagcgcgcgtaggtggttcgttaagttggatgtgaaagccccgggctcaacctgggaactgcatccaaaactggcgagctagagtacggtagagggtggtggaatttcctgtgtagcggtgaaatgcgtagatataggaaggaacaccagtggcgaaggcgaccacctggactgatactgacactgaggtgcgaaagcgtggggagcaaacaggattagataccctggtagtccacgccgtaaacgatgtcaactagccgttggaatccttgagattttagtggcgcagctaacgcattaagttgaccgcctggggagtacggccgcaaggttaaaactcaaatgaattgacgggggcccgcacaagcggtggagcatgtggtttaattcgaagcaacgcgaagaaccttaccaggccttgacatgcagagaactttccagagatggattggtgccttcgggaactctgacacaggtgctgcatggctgtcgtcagctcgtgtcgtgagatgttgggttaagtcccgtaacgagcgcaacccttgtccttagttaccagcacgttatggtgggcactctaaggagactgccggtgacaaaccggaggaaggtggggatgacgtcaagtcatcatggcccttacggcctgggctacacacgtgctacaatggtcggtacagagggttgccaagccgcgaggtggagctaatctcacaaaaccgatcgtagtccggatcgcagtctgcaactcgactgcgtgaagtcggaatcgctagtaatcgcgaatcagaatgtcgcggtgaatacgttcccgggccttgtacacaccgcccgtcacaccatgggagtgggttgcaccagaagtagctagtctaaccttcgggaggacggttaccacggtgtgattcatgactggggtg

SEQ ID NO: 2777 - DNA, 1459 bp, Pseudomonas poae
attgaacgctggcggcaggcctaacacatgcaagtcgagcggtagagagaagcttgcttctcttgagagcggcggacgggtgagtaatgcctaggaatctgcctggtagtgggggataacgttcggaaacggacgctaataccgcatacgtcctacgggagaaagcaggggaccttcgggccttgcgctatcagatgagcctaggtcggattagctagttggtggggtaatggctcaccaaggcgacgatccgtaactggtctgagaggatgatcagtcacactggaactgagacacggtccagactcctacgggaggcagcagtggggaatattggacaatgggcgaaagcctgatccagccatgccgcgtgtgtgaagaaggtcttcggattgtaaagcactttaagttgggaggaagggcagttacctaatacgtgattgttttgacgttaccgacagaataagcaccggctaactctgtgccagcagccgcggtaatacagagggtgcaagcgttaatcggaattactgggcgtaaagcgcgcgtaggtggtttgttaagttggatgtgaaatccccgggctcaacctgggaactgcattcaaaactgactgactagagtatggtagagggtggtggaatttcctgtgtagcggtgaaatgcgtagatataggaaggaacaccagtggcgaaggcgaccacctggactaatactgacactgaggtgcgaaagcgtggggagcaaacaggattagataccctggtagtccacgccgtaaacgatgtcaactagccgttggaagccttgagcttttagtggcgcagctaacgcattaagttgaccgcctggggagtacggccgcaaggttaaaactcaaatgaattgacgggggcccgcacaagcggtggagcatgtggtttaattcgaagcaacgcgaagaaccttaccaggccttgacatccaatgaactttctagagatagattggtgccttcgggaacattgagacaggtgctgcatggctgtcgtcagctcgtgtcgtgagatgttgggttaagtcccgtaacgagcgcaacccttgtccttagttaccagcacgtaatggtgggcactctaaggagactgccggtgacaaaccggaggaaggtggggatgacgtcaagtcatcatggcccttacggcctgggctacacacgtgctacaatggtcggtacagagggttgccaagccgcgaggtggagctaatcccataaaaccgatcgtagtccggatcgcagtctgcaactcgactgcgtgaagtcggaatcgctagtaatcgcgaatcagaatgtcgcggtgaatacgttcccgggccttgtacacaccgcccgtcacaccatgggagtgggttgcaccagaagtagctagtctaaccttcgggaggacggttaccacggtgtgattcatgactggggtg

SEQ ID NO: 2778 - DNA, 1459 bp, Pseudomonas pohangensis
attgaacgctggcggcaggcctaacacatgcaagtcgagcggtagaagggagcttgcttcctttgagagcggcggacgggtgagtaaagcctaggaatctgcctggtagtgggggataacgttcggaaacggacgctaataccgcatacgtcctacgggagaaagtgggggatcttcggacctcacgctatcagatgagcctaggtcggattagctagttggtgaggtaatggctcaccaaggcgacgatccgtaactggtctgagaggatgatcagtcacactggaactgagacacggtccagactcctacgggaggcagcagtggggaatattggacaatgggcgcaagcctgatccagccatgccgcgtgtgtgaagaaggtcttcggattgtaaagcactttaagttgggaggaagggtagtagcttaatacgttgctactttgacgttaccgacagaataagcaccggctaactctgtgccagcagccgcggtaatacagagggtgcaagcgttaatcggaattactgggcgtaaagcgcgcgtaggtggttatgtaagttgaatgtgaaatccccgggctcaacctgggaactgcatccaaaactgcatggctagagtacggtagagggtggtggaatttcctgtgtagcggtgaaatgcgtagatataggaaggaacaccagtggcgaaggcgaccacctggactgatactgacactgaggtgcgaaagcgtggggagcaaacaggattagataccctggtagtccacgccgtaaacgatgtcaactagccgttgggttccttgagaacttagtggcgcagctaacgcattaagttgaccgcctggggagtacggccgcaaggttaaaactcaaatgaattgacgggggcccgcacaagcggtggagcatgtggtttaattcgaagcaacgcgaagaaccttaccaggccttgacatgcagagaactttccagagatggattggtgccttcgggaactctgacacaggtgctgcatggctgtcgtcagctcgtgtcgtgagatgttgggttaagtcccgtaacgagcgcaacccttgcccttagttaccagcacgtaatggtgggcactctaaggggactgccggtgacaaaccggaggaaggtggggatgacgtcaagtcatcatggcccttacggcctgggctacacacgtgctacaatggtcggtacagagggttgccaagccgcgaggtggagctaatcccacaaaaccgatcgtagtccggatcggagtctgcaactcgactccgtgaagtcggaatcgctagtaatcgtgaatcagaatgtcacggtgaatacgttcccgggccttgtacacaccgcccgtcacaccatgggagtgggttgctccagaagtagctagtctaaccgcaagggggacggttaccacggagtgattcatgactggggtg

SEQ ID NO: 2779 - DNA, 1459 bp, Pseudomonas prosekii
attgaacgctggcggcaggcctaacacatgcaagtcgagcggtagagagaagcttgcttctcttgagagcggcggacgggtgagtaatgcctaggaatctgcctggtagtgggggataacgctcggaaacggacgctaataccgcatacgtcctacgggagaaagcaggggaccttcgggccttgcgctatcagatgagcctaggtcggattagctagttggtgaggtaatggctcaccaaggcgacgatccgtaactggtctgagaggatgatcagtcacactggaactgagacacggtccagactcctacgggaggcagcagtggggaatattggacaatgggcgaaagcctgatccagccatgccgcgtgtgtgaagaaggtcttcggattgtaaagcactttaagttgggaggaagggcagttacctaatacgtatctgttttgacgttaccgacagaataagcaccggctaactctgtgccagcagccgcggtaatacagagggtgcaagcgttaatcggaattactgggcgtaaagcgcgcgtaggtggtttgttaagttggatgtgaaatccccgggctcaacctgggaactgcattcaaaactgacaagctagagtatggtagagggtggtggaatttcctgtgtagcggtgaaatgcgtagatataggaaggaacaccagtggcgaaggcgaccacctggactgatactgacactgaggtgcgaaagcgtggggagcaaacaggattagataccctggtagtccacgccgtaaacgatgtcaactagccgttgggagccttgagctcttagtggcgcagctaacgcattaagttgaccgcctggggagtacggccgcaaggttaaaactcaaatgaattgacgggggcccgcacaagcggtggagcatgtggtttaattcgaagcaacgcgaagaaccttaccaggccttgacatccaatgaactttccagagatggattggtgccttcgggagcattgagacaggtgctgcatggctgtcgtcagctcgtgtcgtgagatgttgggttaagtcccgtaacgagcgcaacccttgtccttagttaccagcacgtaatggtgggcactctaaggagactgccggtgacaaaccggaggaaggtggggatgacgtcaagtcatcatggcccttacggcctgggctacacacgtgctacaatggtcggtacagagggttgccaagccgcgaggtggagctaatcccagaaaaccgatcgtagtccggatcgcagtctgcaactcgactgcgtgaagtcggaatcgctagtaatcgcgaatcagaatgtcgcggtgaatacgttcccgggccttgtacacaccgcccgtcacaccatgggagtgggttgcaccagaagtagctagtctaaccttcgggaggacggttaccacggtgtgattcatgactggggtg

SEQ ID NO: 2780 - DNA, 1461 bp, Pseudomonas protegens
attgaacgctggcggcaggcctaacacatgcaagtcgagcggcagcacgggtacttgtacctggtggcgagcggcggacgggtgagtaatgcctaggaatctgcctagtagtgggggataacgtccggaaacgggcgctaataccgcatacgtcctacgggagaaagtgggggatcttcggacctcacgctattagatgagcctaggtcggattagctagttggtgaggtaatggctcaccaaggcgacgatccgtaactggtctgagaggatgatcagtcacactggaactgagacacggtccagactcctacgggaggcagcagtggggaatattggacaatgggcgaaagcctgatccagccatgccgcgtgtgtgaagaaggtcttcggattgtaaagcactttaagttgggaggaagggcagttacctaatacgtgattgttttgacgttaccgacagaataagcaccggctaactctgtgccagcagccgcggtaatacagagggtgcaagcgttaatcggaattactgggcgtaaagcgcgcgtaggtggtttgttaagttggatgtgaaagccccgggctcaacctgggaactgcatccaaaactggcaagctagagtatggtagagggtggtggaatttcctgtgtagcggtgaaatgcgtagatataggaaggaacaccagtggcgaaggcgaccacctggactgatactgacactgaggtgcgaaagcgtggggagcaaacaggattagataccctggtagtccacgccgtaaacgatgtcaactagccgttgggagccttgagctcttagtggcgcagctaacgcattaagttgaccgcctggggagtacggccgcaaggttaaaactcaaatgaattgacgggggcccgcacaagcggtggagcatgtggtttaattcgaagcaacgcgaagaaccttaccaggccttgacatccaatgaactttctagagatagattggtgccttcgggaacattgagacaggtgctgcatggctgtcgtcagctcgtgtcgtgagatgttgggttaagtcccgtaacgagcgcaacccttgtccttagttaccagcacgttatggtgggcactctaaggagactgccggtgacaaaccggaggaaggtggggatgacgtcaagtcatcatggcccttacggcctgggctacacacgtgctacaatggtcggtacaaagggttgccaagccgcgaggtggagctaatcccataaaaccgatcgtagtccggatcgcagtctgcaactcgactgcgtgaagtcggaatcgctagtaatcgcgaatcagaatgtcgcggtgaatacgttcccgggccttgtacacaccgcccgtcacaccatgggagtgggttgcaccagaagtagctagtctaaccttcgggaggacggttaccacggtgtgattcatgactggggtg

SEQ ID NO: 2781 - DNA, 1462 bp, Pseudomonas pseudoalcaligenes
  misc_feature (281)..(281): n is a, c, g, or t
  misc_feature (815)..(815): n is a, c, g, or t
attgaacgctggcggcaggcctaacacatgcaagtcgagcggatgaagggagcttgctccctgatttagcggcggacgggtgagtaatgcctaggaatctgcctggtagtgggggataacgttccgaaaggaacgctaataccgcatacgtcctacgggagaaagcaggggaccttcgggccttgcgctatcagatgagcctaggtcggattagctagttggtgaggtaatggctcaccaaggcgacgatccgtaactggtctgagaggatgatcagtcanactggaactgagacacggtccagactcctacgggaggcagcagtggggaatattggacaatgggcgaaagcctgatccagccatgccgcgtgtgtgaagaaggtcttcggattgtaaagcactttaagttgggaggaagggcagtaagctaataccttgctgttttgacgttaccgacagaataagcaccggctaacttcgtgccagcagccgcggtaatacgaagggtgcaagcgttaatcggaattactgggcgtaaagcgcgcgtaggtggttcgttaagttggatgtgaaagccccgggctcaacctgggaactgcatccaaaactggcgagctagagtacggtagagggtggtggaatttcctgtgtagcggtgaaatgcgtagatataggaaggaacaccagtggcgaaggcgaccacctggactgatactgacactgaggtgcgaaagcgtggggagcaaacaggattagataccctggtagtccacgccgtaaacgatgtcaactagccgttgggttccttgagancttagtggcgcagctaacgcattaagttgaccgcctggggagtacggccgcaaggttaaaactcaaatgaattgacgggggcccgcacaagcggtggagcatgtggtttaattcgaagcaacgcgaagaaccttacctggccttgacatgctgagaactttccagagatggattggtgccttcgggaactcagacacaggtgctgcatggctgtcgtcagctcgtgtcgtgagatgttgggttaagtcccgtaacgagcgcaacccttgtccttagttaccagcacgtaatggtgggcactctaaggagactgccggtgacaaaccggaggaaggtggggatgacgtcaagtcatcatggcccttacggccagggctacacacgtgctacaatggtcggtacaaagggttgccaagccgcgaggtggagctaatcccataaaaccgatcgtagtccggatcgcagtctgcaactcgactgcgtgaagtcggaatcgctagtaatcgtgaatcagaatgtcacggtgaatacgttcccgggccttgtacacaccgcccgtcacaccatgggagtgggttgctccagaagtagctagtctaaccttcggggggacggttaccacggagtgattcatgactggggtgaag

SEQ ID NO: 2782 - DNA, 1457 bp, Pseudomonas psychrophila
  misc_feature (39)..(39): n is a, c, g, or t
attgaacgctggcggcaggcctaacacatgcaagtcgancggtagagagaagcttgcttctcttgagagcggcggacgggtgagtaatacctaggaatctgcctgatagtgggggataacgttcggaaacggacgctaataccgcatacgtcctacgggagaaagcaggggaccttcgggccttgcgctatcagatgagcctaggtcggattagctagttggtgaggtaatggctcaccaaggctacgatccgtaactggtctgagaggatgatcagtcacactggaactgagacacggtccagactcctacgggaggcagcagtggggaatattggacaatgggcgaaagcctgatccagccatgccgcgtgtgtgaagaaggtcttcggattgtaaagcactttaagttgggaggaagggcattaacctaatacgttagtgttttgacgttaccgacagaataagcaccggctaactctgtgccagcagccgcggtaatacagagggtgcaagcgttaatcggaattactgggcgtaaagcgcgcgtaggtggtttgttaagttgaatgtgaaatccccgggctcaacctgggaactgcatccaaaactggcaagctagagtatggtagagggtagtggaatttcctgtgtagcggtgaaatgcgtagatataggaaggaacaccagtggcgaaggcgactacctggactgatactgacactgaggtgcgaaagcgtggggagcaaacaggattagataccctggtagtccacgccgtaaacgatgtcaactagccgttgggagtcttgaactcttagtggcgcagctaacgcattaagttgaccgcctggggagtacggccgcaaggttaaaactcaaatgaattgacgggggcccgcacaagcggtggagcatgtggtttaattcgaagcaacgcgaagaaccttaccaggccttgacatccaatgaactttctagagatagattggtgccttcgggaacattgagacaggtgctgcatggctgtcgtcagctcgtgtcgtgagatgttgggttaagtcccgtaacgagcgcaacccttgtccttagttaccagcacgtaatggtgggcactctaaggagactgccggtgacaaaccggaggaaggtggggatgacgtcaagtcatcatggccttacggcctgggctacacacgtgctacaatggtcggtacaaagggttgccaagccgcgaggtggagctaatcccataaaaccgatcgtagtccggatcgcagtctgcaactcgactgcgtgaagtcggaatcgctagtaatcgtgaatcagaatgtcacggtgaatacgttcccgggccttgtacacaccgcccgtcacaccatgggagtggttgcaccagaagtagctagtctaaccctcgggaggacggttaccacggtgtgattcatgactggggtg

SEQ ID NO: 2783 - DNA, 1459 bp, Pseudomonas psychrotolerans; identical to SEQ ID NO: 312

SEQ ID NO: 2784 - DNA, 1459 bp, Pseudomonas punonensis
attgaacgctggcggcaggcctaacacatgcaagtcgagcggatgacgggagcttgctccctgattcagcggcggacgggtgagtaatgcctaggaatctgcctattagtgggggacaacgtttcgaaaggaacgctaataccgcatacgtcctacgggagaaagcaggggaccttcgggccttgcgctaatagatgagcctaggtcggattagctagttggtgaggtaatggctcaccaaggcgacgatccgtaactggtctgagaggatgatcagtcacactggaactgagacacggtccagactcctacgggaggcagcagtggggaatattggacaatgggcgaaagcctgatccagccatgccgcgtgtgtgaagaaggtcttcggattgtaaagcactttaagttgggaggaagggttgtagattaatactctgcaattttgacgttaccgacagaataagcaccggctaactctgtgccagcagccgcggtaatacagagggtgcaagcgttaatcggaattactgggcgtaaagcgcgcgtaggtggtttgttaagttggatgtgaaagccccgggctcaacctgggaactgcatccaaaactggcaagctagagtacggtagagggtggtggaatttcctgtgtagcggtgaaatgcgtagatataggaaggaacaccagtggcgaaggcgaccacctggactgatactgacactgaggtgcgaaagcgtggggagcaaacaggattagataccctggtagtccacgccgtaaacgatgtcaactagccgttgggttccttgagaacttagtggcgcagctaacgcattaagttgaccgcctggggagtacggccgcaaggttaaaactcaaatgaattgacgggggcccgcacaagcggtggagcatgtggtttaattcgaagcaacgcgaagaaccttacctggccttgacatgctgagaactttccagagatggattggtgccttcgggaactcagacacaggtgctgcatggctgtcgtcagctcgtgtcgtgagatgttgggttaagtcccgtaacgagcgcaacccttgtccttagttaccagcacgttatggtgggaactctaaggagactgccggtgacaaaccggaggaaggtggggatgacgtcaagtcatcatggcccttacggccagggctacacacgtgctacaatggtcggtacaaagggttgccaagccgcgaggtggagctaatcccataaaaccgatcgtagtccggatcgcagtctgcaactcgactgcgtgaagtcggaatcgctagtaatcgtgaatcagaatgtcacggtgaatacgttcccgggccttgtacacaccgcccgtcacaccatgggagtgggttgcaccagaagtagctagtctaaccttcggggggacggttaccacggtgtgattcatgactggggtg

SEQ ID NO: 2785 - DNA, 1459 bp, Pseudomonas reidholzensis
attgaacgctggcggcaggcctaacacatgcaagtcgagcggatgagaagagcttgctcttcgattcagcggcggacgggtgagtaatgcctaggaatctgcctggtagtgggggacaacgtttcgaaaggaacgctaataccgcatacgtcctacgggagaaagcaggggaccttcgggccttgcgctatcagatgagcctaggtcggattagctagttggtgaggtaatggctcaccaaggcgacgatccgtaactggtctgagaggatgatcagtcacactggaactgagacacggtccagactcctacgggaggcagcagtggggaatattggacaatgggcgaaagcctgatccagccatgccgcgtgtgtgaagaaggtcttcggattgtaaagcactttaagttgggaggaagggcagttggttaataccttgctgctttgacgttaccgacagaataagcaccggctaactctgtgccagcagccgcggtaatacagagggtgcaagcgttaatcggaattactgggcgtaaagcgcgcgtaggtggtttgttaagttggatgtgaaagccccgggctcaacctgggaactgcatccaaaactggcaagctagagtacagtagagggtggtggaatttcctgtgtagcggtgaaatgcgtagatataggaaggaacaccagtggcgaaggcgaccacctggactgatactgacactgaggtgcgaaagcgtggggagcaaacaggattagataccctggtagtccacgccgtaaacgatgtcaactagccgttggaatccttgagattttagtggcgcagctaacgcattaagttgaccgcctggggagtacggccgcaaggttaaaactcaaatgaattgacgggggcccgcacaagcggtggagcatgtggtttaattcgaagcaacgcgaagaaccttaccaggccttgacatgcagagaactttctagagatagattggtgccttcgggaactctggcacaggtgctgcatggctgtcgtcagctcgtgtcgtgagatgttgggttaagtcccgtaacgagcgcaacccttgtccttagttaccagcacgttatggtgggcactctaaggagactgccggtgacaaaccggaggaaggtggggatgacgtcaagtcatcatggcccttacggcctgggctacacacgtgctacaatggtcggtacagagggtcgccaagccgcgaggtggagctaatctcacaaaaccgatcgtagtccggatcgcagtctgcaactcgactgcgtgaagtcggaatcgctagtaatcgcgaatcagaatgtcgcggtgaatacgttcccgggccttgtacacaccgcccgtcacaccatgggagtgggttgcaccagaagtagctagtctaaccttcgggaggacggttaccacggtgtgattcatgactggggtg

SEQ ID NO: 2786 - DNA, 1459 bp, Pseudomonas reinekei
  misc_feature (106)..(106): n is a, c, g, or t
attgaacgctggcggcaggcctaacacatgcaagtcgagcggatgacaggagcttgctcctgaattcagcggcggacgggtgagtaatgcctaggaatctgcctgntagtgggggacaacgtttcgaaaggaacgctaataccgcatacgtcctacgggagaaagcaggggaccttcgggccttgcgctatcagatgagcctaggtcggattagctagttggtgaggtaatggctcaccaaggcgacgatccgtaactggtctgagaggatgatcagtcacactggaactgagacacggtccagactcctacgggaggcagcagtggggaatattggacaatgggcgaaagcctgatccagccatgccgcgtgtgtgaagaaggtcttcggattgtaaagcactttaagttgggaggaagggttgtagattaatactctgcaattttgacgttaccgacagaataagcaccggctaactctgtgccagcagccgcggtaatacagagggtgcaagcgttaatcggaattactgggcgtaaagcgcgcgtaggtggtttgttaagttggatgtgaaatccccgggctcaacctgggaactgcattcaaaactgacaagctagagtatggtagagggtggtggaatttcctgtgtagcggtgaaatgcgtagatataggaaggaacaccagtggcgaaggcgaccacctggactgatactgacactgaggtgcgaaagcgtggggagcaaacaggattagataccctggtagtccacgccgtaaacgatgtcaactagccgttgggagccttgagctcttagtggcgcagctaacgcattaagttgaccgcctggggagtacggccgcaaggttaaaactcaaatgaattgacgggggcccgcacaagcggtggagcatgtggtttaattcgaagcaacgcgaagaaccttaccaggccttgacatccaatgaactttccagagatggattggtgccttcgggaacattgagacaggtgctgcatggctgtcgtcagctcgtgtcgtgagatgttgggttaagtcccgtaacgagcgcaacccttgtccttagttaccagcacgttatggtgggcactctaaggagactgccggtgacaaaccggaggaaggtggggatgacgtcaagtcatcatggcccttacggcctgggctacacacgtgctacaatggtcggtacagagggttgccaagccgcgaggtggagctaatcccataaaaccgatcgtagtccggatcgcagtctgcaactcgactgcgtgaagtcggaatcgctagtaatcgcgaatcagaatgtcgcggtgaatacgttcccgggccttgtacacaccgcccgtcacaccatgggagtgggttgcaccagaagtagctagtctaaccttcgggaggacggttaccacggtgtgattcatgactggggtg

SEQ ID NO: 2787 - DNA, 1459 bp, Pseudomonas resinovorans
  misc_feature (644)..(644): n is a, c, g, or t
  misc_feature (661)..(661): n is a, c, g, or t
  misc_feature (691)..(691): n is a, c, g, or t
  misc_feature (725)..(725): n is a, c, g, or t
  misc_feature (814)..(814): n is a, c, g, or t
  misc_feature (825)..(825): n is a, c, g, or t
  misc_feature (1218)..(1218): n is a, c, g, or t
  misc_feature (1325)..(1325): n is a, c, g, or t
attgaacgctggcggcagccctaacaaatccaagtcgagcggcagcgggtccttcgggatgccggcgagcggcggacgggtgagtaatgcctaggaatctgcctgatagtgggggataacgttcggaaacggacgctaataccgcatacgtcctacgggagaaagcgggggatcttcggacctcgcgctatcagatgagcctaggtcggattagctagttggtggggtaatggctcaccaaggcgacgatccgtaactggtctgagaggatgatcagtcacactggaactgagacacggtccagactcctacgggaggcagcagtggggaatattggacaatgggcgaaagcctgatccagccatgccgcgtgtgtgaagaaggtcttcggattgtaaagcactttaagttgggaggaagggcagtaagctaatatcttgctgttttgacgttaccaacagaataagcaccggctaacttcgtgccagcagccgcggtaatacgaagggtgcaagcgttaatcggaattactgggcgtaaagcgcgcgtaggtggttcagcaagttggatgtgaaagccccgggctcaacctgggaactgcatccaaaactactgagctagagtacggtagagggtggtggaanttcctgtgtagcggtgnactgcgtagatataggaaggaacaccagtngtgaagccgaccacctggactgatactgtaactnaggtgcgaaagtgtgggcagcaaacaggattagataccctggtagtccacgccgtaaacgatgtcgactagccgttgggttccttgagnacttagtggcncagctaacgcgataagtcgacctcctggggagtacgaccgcaaggttaaaactcaaatgaattgacgggggcccgcacaagcggtggagcatgtggtttaattcgaagcaacgcgaagaaccttacctggccttgacatgctgagaactttccagagatggattggtgccttcgggaactcagacacaggtgctgcatggctgtcgtcagctcgtgtcgtgagatgttgggttaagtcccgtaacgagcgcaacccttgtccttagttaccagcacgttatggtgggcactctaaggagactgccggtgacaaaccggaggaaggtggggatgacgtcaagtcatcatggcccttacggccagggctacacacgtgctacaatggtcggtacnaagggttgccaagccgcgaggtggagctaatcccataaaaccgatcgtagtccggatcgcagtctgcaactcgactgcgtgaagtcggaatcgctagtaatcgtgantcagaatgtcacggtgaatacgttcccgggccttgtacacaccgcccgtcacaccatgggagtgggttgctccagaagtagctagtctaaccgcaagggggacggttaccacggagtgattcatgactggggtg

SEQ ID NO: 2788 - DNA, 1459 bp, Pseudomonas rhizosphaerae
attgaacgctggcggcaggcctaacacatgcaagtcgagcggttgaaggaagcttgcttcctgattcagcggcggacgggtgagtaatgcctaggaatctgcctggtagtgggggacaacgtttcgaaaggaacgctaataccgcatacgtcctacgggagaaagcaggggaccttcgggccttgcgctatcagatgagcctaggtcggattagctagttggtgaggtaatggctcaccaaggcgacgatccgtaactggtctgagaggatgatcagtcacactggaactgagacacggtccagactcctacgggaggcagcagtggggaatattggacaatgggcgaaagcctgatccagccatgccgcgtgtgtgaagaaggtcttcggattgtaaagcactttaagttgggaggaagggcagtaagcgaataccttgctgttttgacgttaccgacagaataagcaccggctaactctgtgccagcagccgcggtaatacagagggtgcaagcgttaatcggaattactgggcgtaaagcgcgcgtaggtggtttgttaagttgaatgtgaaatccccgggctcaacctgggaactgcatccaaaactggcaagctagagtagggcagagggtggtggaatttcctgtgtagcggtgaaatgcgtagatataggaaggaacaccagtggcgaaggcgaccacctgggctcatactgacactgaggtgcgaaagcgtggggagcaaacaggattagataccctggtagtccacgccgtaaacgatgtcaactagccgttgggagtcttgaactcttagtggcgcagctaacgcattaagttgaccgcctggggagtacggccgcaaggttaaaactcaaatgaattgacgggggcccgcacaagcggtggagcatgtggtttaattcgaagcaacgcgaagaaccttaccaggccttgacatccaatgaactttccagagatggattggtgccttcgggaacattgagacaggtgctgcatggctgtcgtcagctcgtgtcgtgagatgttgggttaagtcccgtaacgagcgcaacccttgtccttagttaccagcacgttatggtgggcactctaaggagactgccggtgacaaaccggaggaaggtggggatgacgtcaagtcatcatggcccttacggcctgggctacacacgtgctacaatggtcggtacagagggtcgccaagccgcgaggtggagctaatctcacaaaaccgatcgtagtccggatcgcagtctgcaactcgactgcgtgaagtcggaatcgctagtaatcgcgaatcagaatgtcgcggtgaatacgttcccgggccttgtacacaccgcccgtcacaccatgggagtgggttgcaccagaagtagctagtctaaccttcgggaggacggttaccacggtgtgattcatgactggggtg

SEQ ID NO: 2789 - DNA, 1459 bp, Pseudomonas sagittaria
attgaacgctggcggcaggcctaacacatgcaagtcgagcggatgagggtagcttgctacctgattcagcggcggacgggtgagtaatgcctaggaatctgcccgatagtgggggacaacgtttcgaaaggaacgctaataccgcatacgtcctacgggagaaagcaggggaccttcgggccttgcgctatcggatgagcctaggtcggattagctagttggtggggtaaaggctcaccaaggcgacgatccgtaactggtctgagaggatgatcagtcacactggaactgagacacggtccagactcctacgggaggcagcagtggggaatattggacaatgggcgaaagcctgatccagccatgccgcgtgtgtgaagaaggtcttcggattgtaaagcactttaagctgggaggaagggcagtaagttaataccttgctgctttgacgttaccagcagaataagcaccggctaacttcgtgccagcagccgcggtaatacgaagggtgcaagcgttaatcggaattactgggcgtaaagcgcgcgtaggtggttcagcaagttggatgtgaaagccccgggctcaacctgggaactgcatccaaaactactgggctagagtatggtagagggtggtggaatttcctgtgtagcggtgaaatgcgtagatataggaaggaacaccagtggcgaaggcgaccacctggactaatactgacactgaggtgcgaaagcgtggggagcaaacaggattagataccctggtagtccacgccgtaaacgatgtcaactagttgttgggttccttgaggacttagtaacgaagctaacgcgataagttgaccgcctggggagtacggccgcaaggttaaaactcaaatgaattgacgggggcccgcacaagcggtggagcatgtggtttaattcgaagcaacgcgaagaaccttacctggccttgacatgctgagaactttccagagatggattggtgccttcgggaactcagacacaggtgctgcatggctgtcgtcagctcgtgtcgtgagatgttgggttaagtcccgtaacgagcgcaacccttgtccttagttaccagcacgtaatggtgggcactctaaggagactgccggtgacaaaccggaggaaggtggggatgacgtcaagtcatcatggcccttacggccagggctacacacgtgctacaatggtcggtacagagggttgccaaaccgcgaggtggagctaatctcacaaaaccgatcgtagtccggatcgcagtctgcaactcgactgcgtgaagtcggaatcgctagtaatcgtgaatcagaatgtcacggtgaatacgttcccgggccttgtacacaccgcccgtcacaccatgggagtgggttgctccagaagtagctagtctaaccttcggggggacggttaccacggagtgattcatgactggggtg

SEQ ID NO: 2790 - DNA, 1459 bp, Pseudomonas salegens
attgaacgctggcggcaggcctaacacatgcaagtcgagcgattgaagggagcttgctccctgatttagcggcggacgggtgagtaatgcctaggaatctgcctggtagtgggggacaactcggggaaacccgagctaataccgcatacgtcctacgggagaaagtgggggatcttcggacctcacgctatcagatgagcctaggtcggattagcttgttggtgaggtaacggctcaccaaggcagcgatccgtaactggtctgagaggatgatcagtcacactggaactgagacacggtccagactcctacgggaggcagcagtggggaatattggacaatgggggcaaccctgatccagccatgccgcgtgtgtgaagaaggtcttcggattgtaaagcactttaagttgggaggaagggttgtacgttaatagcgtgcaattttgacgttaccaacagaataagcaccggctaactctgtgccagcagccgcggtaatacagagggtgcaagcgttaatcggaattactgggcgtaaagcgcgcgtaggcggtcaagtaagatgggtgtgaaatccccgggctcaacctgggaactgcatccataactgcttgactagagtacagtagagggtggtggaatttcctgtgtagcggtgaaatgcgtagatataggaaggaacaccagtggcgaaggcgaccacctggactgatactgacgctgaggtgcgaaagcgtggggagcaaacaggattagataccctggtagtccacgccgtaaacgatgtcaactagccgttggggaccttgagtctttagtggcgcagctaacgcactaagttgaccgcctggggagtacggccgcaaggttaaaactcaaatgaattgacgggggcccgcacaagcggtggagcatgtggtttaattcgaagcaacgcgaagaaccttacctggccttgacatgctgagaactttccagagatggattggtgccttcgggaactcagacacaggtgctgcatggctgtcgtcagctcgtgtcgtgagatgttgggttaagtcccgtaacgagcgcaacccttgtccttagttaccagcacgttatggtgggcactctaaggagactgccggtgacaaaccggaggaaggtggggatgacgtcaagtcatcatggcccttacggccagggctacacacgtgctacaatgggcggtacagagggttgccaagccgcgaggtggagctaatctctcaaaaccgttcgtagtccggattggagtctgcaactcgactccatgaagtcggaatcgctagtaatcgcgaatcagaatgtcgcggtgaatacgttcccgggccttgtacacaccgcccgtcacaccatgggagtgggttgctccagaagtagctagtctaactttcgagaggacggttaccacggagtgattcatgactggggtg

SEQ ID NO: 2791 - DNA, 1374 bp, Pseudomonas salomonii
tcttgagagcggcggacgggtgagtaatgcctaggaatctgcctggtgttgggggataacgctcggaaacggacgctaataccgcatacgtcctacgggagaaagcaggggaccttcgggccttgcgctatcagatgagcctaggtcggattagctagttggtcaggtaatggctcaccaaggcgacgatccgtaactggtctgagaggatgatcagtcacactggaactgagacacggtccagactcctacgggaggcagcagtggggaatattggacaatgggcgaaagcctgatccagccatgccgcgtgtgtgaagaaggtcttcggattgtaaagcactttaagttgggaggaagggcattaacctaatacgttagtgttttgacgttaccgacagaataagcaccggctaactctgtgccagcagccgcggtaatacagagggtgcaagcgttaatcggaattactgggcgtaaagcgcgcgtaggtggtttgttaagttggatgtgaaatccccgggctcaacctgggaactgcattcaaaactgacttactagagtatggtagagggtggtggaatttcctgtgtagcggtgaaatgcgtagatataggaaggaacaccagtggcgaaggcgaccacctggactaatactgacactgaggtgcgaaagcgtggggagcaaacaggattagataccctggtagtccacgccgtaaacgatgtcaactagccgttggaagccttgagcttttagtggcgcagctaacgcattaagttgaccgcctggggagtacggccgcaaggttaaaactcaaatgaattgacgggggcccgcacaagcggtggagcatgtggtttaattcgaagcaacgcgaagaaccttaccaggccttgacatccaatgaactttctagagatagattggtgccttagggaacattgagacaggtgctgcatggctgtcgtcagctcgtgtcgtgagatgttgggttaagtcccgtaacgagcgcaacccttgtccttagttaccagcacgttatggtgggcactctaaggagactgccggtgacaaaccggaggaaggtggggatgacgtcaagtcatcatggcccttacggcctgggctacacacgtgctacaatggtcggtacagagggttgccaagccgcgaggtggagctaatcccacaaaaccgatcgtagtccggatcgcagtctgcaactcgactgcgtgaagtcggaatcgctagtaatcgcgaatcagaatgtcgcggtgaatacgttcccgggccttgtacacaccgcccgtcacaccatgggagtgggttgcaccagaagtagctagtctaacctcgggaggacggttacc

SEQ ID NO: 2792 - DNA, 1461 bp, Pseudomonas saponiphila
attgaacgctggcggcaggcctaacacatgcaagtcgagcggcagcacgggtacttgtacctggtggcgagcggcggacgggtgagtaatgcctaggaatctgcctagtagtgggggataacgtccggaaacgggcgctaataccgcatacgtcctacgggagaaagtgggggatcttcggacctcacgctattagatgagcctaggtcggattagctagttggtgaggtaatggctcaccaaggcgacgatccgtaactggtctgagaggatgatcagtcacactggaactgagacacggtccagactcctacgggaggcagcagtggggaatattggacaatgggcgaaagcctgatccagccatgccgcgtgtgtgaagaaggtcttcggattgtaaagcactttaagttgggaggaagggtacttacctaatacgtgagtattttgacgttaccgacagaataagcaccggctaactctgtgccagcagccgcggtaatacagagggtgcaagcgttaatcggaattactgggcgtaaagcgcgcgtaggtggtttgttaagttggatgtgaaagccccgggctcaacctgggaactgcatccaaaactggcaagctagagtatggtagagggtggtggaatttcctgtgtagcggtgaaatgcgtagatataggaaggaacaccagtggcgaaggcgaccacctggactgatactgacactgaggtgcgaaagcgtggggagcaaacaggattagataccctggtagtccacgccgtaaacgatgtcaactagccgttgggagccttgagctcttagtggcgcagctaacgcattaagttgaccgcctggggagtacggccgcaaggttaaaactcaaatgaattgacgggggcccgcacaagcggtggagcatgtggtttaattcgaagcaacgcgaagaaccttaccaggccttgacatccaatgaactttccagagatggattggtgccttcgggaacattgagacaggtgctgcatggctgtcgtcagctcgtgtcgtgagatgttgggttaagtcccgtaacgagcgcaacccttgtccttagttaccagcacgttatggtgggcactctaaggagactgccggtgacaaaccggaggaaggtggggatgacgtcaagtcatcatggcccttacggcctgggctacacacgtgctacaatggtcggtacaaagggttgccaagccgcgaggtggagctaatcccataaaaccgatcgtagtccggatcgcagtctgcaactcgactgcgtgaagtcggaatcgctagtaatcgcgaatcagaatgtcgcggtgaatacgttcccgggccttgtacacaccgcccgtcacaccatgggagtgggttgcaccagaagtagctagtctaaccttcggggggacggttaccacggtgtgattcatgactggggtg

SEQ ID NO: 2793 - DNA, 1461 bp, Pseudomonas savastanoi
  misc_feature (830)..(831): n is a, c, g, or t
attgaacgctggcggcaggcctaacacatgcaagtcgagcggcagcacgggtacttgtacctggtggcgagcggcggacgggtgagtaatgcctaggaatctgcctggtagtgggggataacgctcggaaacggacgctaataccgcatacgtcctacgggagaaagcaggggaccttcgggccttgcgctatcagatgagcctaggtcggattagctagttggtgaggtaatggctcaccaaggcgacgatccgtaactggtctgagaggatgatcagtcacactggaactgagacacggtccagactcctacgggaggcagcagtggggaatattggacaatgggcgaaagcctgatccagccatgccgcgtgtgtgaagaaggtcttcggattgtaaagcactttaagttgggaggaagggcagttacctaatacgtgattgttttgacgttaccgacagaataagcaccggctaactctgtgccagcagccgcggtaatacagagggtgcaagcgttaatcggaattactgggcgtaaagcgcgcgtaggtggtttgttaagttggatgtgaaatccccgggctcaacctgggaactgcatccaaaactggcaagctagagtatggtagagggtggtggaatttcctgtgtagcggtgaaatgcgtagatataggaaggaacaccagtggcgaaggcgaccacctggactgatactgacactgaggtgcgaaagcgtggggagcaaacaggattagataccctggtagtccacgccgtaaacgatgtcaactagccgttgggagccttgagccttgagtggcgcanntaacgcattaagttgaccgcctggggagtacggccgcaaggttaaaactcaaatgaattgacgggggcccgcacaagcggtggagcatgtggtttaattcgaagcaacgcgaagaaccttaccaggccttgacatccaatgaactttccagagatggattggtgccttcgggagcattgagacaggtgctgcatggctgtcgtcagctcgtgtcgtgagatgttgggttaagtcccgtaacgagcgcaacccttgtccttagttaccagcacgtaatggtgggcactctaaggagactgccggtgacaaaccggaggaaggtggggatgacgtcaagtcatcatggcccttacggcctgggctacacacgtgctacaatggtcggtacagagggttgccaagccgcgaggtggagctaatctcacaaaaccgatcgtagtccggatcgcagtctgcaactcgactgcgtgaagtcggaatcgctagtaatcgcgaatcagaatgtcgcggtgaatacgttcccgggccttgtacacaccgcccgtcacaccatgggagtgggttgcaccagaagtagctagtctaaccttcggggggacggttaccacggtgtgattcatgactggggtg

SEQ ID NO: 2794 - DNA, 1463 bp, Pseudomonas segetis
attgaacgctggcggcaggcctaacacatgcaagtcgagcggaaacgatgagagcttgctctcaggcgtcgagcggcggacgggtgagtaatgcctaggaatctgcctagtagtgggggataacgttcggaaacggacgctaataccgcatacgtcctacgggagaaagtgggggatcttcggacctcacgctattagatgagcctaggtcggattagctagttggtgaggtaatggctcaccaaggcgacgatccgtaactggtctgagaggatgatcagtcacactggaactgagacacggtccagactcctacgggaggcagcagtggggaatattggacaatgggcgaaagcctgatccagccatgccgcgtgtgtgaagaaggtcttcggattgtaaagcactttaagttgggaggaagggcagtaagttaataccttgctgttttgacgttaccgacagaataagcaccggctaactctgtgccagcagccgcggtaatacagagggtgcaagcgttaatcggaattactgggcgtaaagcgcgcgtaggcggtttgttaagttggatgtgaaagccccgggctcaacctgggaactgcatccaaaactggcaagctagagtacagtagagggtggtggaatttcctgtgtagcggtgaaatgcgtagatataggaaggaacaccagtggcgaaggcgaccacctggactgatactgacgctgaggtgcgaaagcgtggggagcaaacaggattagataccctggtagtccacgccgtaaacgatgtcaactagccgttggattccttgagaatttagtggcgcagctaacgcattaagttgaccgcctggggagtacggccgcaaggttaaaactcaaatgaattgacgggggcccgcacaagcggtggagcatgtggtttaattcgaagcaacgcgaagaaccttacctggccttgacatgctgagaactttccagagatggattggtgccttcgggaactcagacacaggtgctgcatggctgtcgtcagctcgtgtcgtgagatgttgggttaagtcccgtaacgagcgcaacccttgtccttagttaccagcacgttatggtgggaactctaaggagactgccggtgacaaaccggaggaaggtggggatgacgtcaagtcatcatggcccttacggccagggctacacacgtgctacaatggtcggtacaaagggttgccaagccgcgaggtggagctaatcccataaaaccgatcgtagtccggatcgcagtctgcaactcgactgcgtgaagtcggaatcgctagtaatcgtgaatcagaatgtcacggtgaatacgttcccgggccttgtacacaccgcccgtcacaccatgggagtgggttgcaccagaagtagctagtctaaccttcggggggacggttaccacggtgtgattcatgactggggtg

SEQ ID NO: 2795 - DNA, 1459 bp, Pseudomonas seleniipraecipitans
attgaacgctggcggcaggcctaacacatgcaagtcgagcggttgacgggagcttgctccctgattcagcggcggacgggtgagtaatgcctaggaatctgcctattagtgggggacaacgtttcgaaaggaacgctaataccgcatacgtcctacgggagaaagcaggggaccttcgggccttgcgctaatagatgagcctaggtcggattagctagttggtggggtaatggctcaccaaggcgacgatccgtaactggtctgagaggatgatcagtcacactggaactgagacacggtccagactcctacgggaggcagcagtggggaatattggacaatgggcgaaagcctgatccagccatgccgcgtgtgtgaagaaggtcttcggattgtaaagcactttaagttgggaggaagggcagtaaattaatactttgctgttttgacgttaccgacagaataagcaccggctaactctgtgccagcagccgcggtaatacagagggtgcaagcgttaatcggaattactgggcgtaaagcgcgcgtaggtggtttgttaagttggatgtgaaagccccgggctcaacctgggaactgcatccaaaactggcaagctagagtacggtagagggtggtggaatttcctgtgtagcggtgaaatgcgtagatataggaaggaacaccagtggcgaaggcgaccacctggactgatactgacactgaggtgcgaaagcgtggggagcaaacaggattagataccctggtagtccacgccgtaaacgatgtcaactagccgttgggttccttgagaacttagtggcgcagctaacgcattaagttgaccgcctggggagtacggccgcaaggttaaaactcaaatgaattgacgggggcccgcacaagcggtggagcatgtggtttaattcgaagcaacgcgaagaaccttaccaggccttgacatgctgagaactttccagagatggattggtgccttcgggaactcagacacaggtgctgcatggctgtcgtcagctcgtgtcgtgagatgttgggttaagtcccgtaacgagcgcaacccttgtccttagttaccagcacgtaatggtgggaactctaaggagactgccggtgacaaaccggaggaaggtggggatgacgtcaagtcatcatggcccttacggcctgggctacacacgtgctacaatggtcggtacaaagggttgccaagccgcgaggtggagctaatcccataaaaccgatcgtagtccggatcgcagtctgcaactcgactgcgtgaagtcggaatcgctagtaatcgtgaatcagaatgtcacggtgaatacgttcccgggccttgtacacaccgcccgtcacaccatgggagtgggttgcaccagaagtagctagtctaaccttcgggaggacggttaccacggtgtgattcatgactggggtg

SEQ ID NO: 2796 - DNA, 1443 bp, Pseudomonas sihuiensis
ttgctggcggcaggctaacacatgcaagtcgagcggatgagaggagcttgctccttgatttagcggcggacgggtgagtaatgcctaggaatctgcctggtagtgggggataacgttccgaaaggaacgctaataccgcgtacgtcctacgggagaaagcaggggaccttcgggccttgcgctatcagatgagcctaggtcggattagctagttggtgaggtaatggctcaccaaggcgacgatccgtaactggtctgagaggatgatcagtcacactggaactgagacacggtccagactcctacgggaggcagcagtggggaatattggacaatgggcgaaagcctgatccagccatgccgcgtgtgtgaagaaggtcttcggattgtaaagcactttaagttgggaggaagggctgctggttaataccctgcagttttgacgttaccaacagaataagcaccggctaacttcgtgccagcagccgcggtaatacgaagggtgcaagcgttaatcggaattactgggcgtaaagcgcgcgtaggtggttcgttaagttggatgtgaaagccccgggctcaacctgggaactgcatccaaaactggcgagctagagtacggtagagggtggtggaatttcctgtgtagcggtgaaatgcgtagatataggaaggaacaccagtggcgaaggcgaccacctggactgatactgacactgaggtgcgaaagcgtggggagcaaacaggattagataccctggtagtccacgccgtaaacgatgtcaactagccgttggaatccttgagatcttagtggcgccagctaagcgcattaagttgaccgcctggggagtacggccgcaaggtttaaaactcaaatgaattgacgggggcccgcaccaacggtggagccatgtggtttaattcgaagcaacgcggagaaccttacctggccttgacctggtgagaactttccagaggatggattggtgcctttgggaactcagacaccggtgctgccatggcgtcgtcaggtcgtgtcgtgaggaggttgggttagtcccgtaacgagcgcaacccttgtccttagtttcccagcacctctggtgggcactctaaggagactgccggtgacaaaccggaggaaggtggggatgacgtcaagtcatcatggcccttacggccagggctacacacgtgctacaatggtcggtacaaagggttgccaagccgcgaggtggagctaatcccataaaaccgatcgtagtccggatcgcagtctgcaactcgactgcgtgaagtcggaatcgctagtaatcgtgaatcagaatgtcacggtgaatacgttcccgggccttgtacacaccgcccgtcacaccatgggagtgggttgctccagaagtagctagtctaaccttcgggggacggtaccacgacgatacg

SEQ ID NO: 2797 - DNA, 1539 bp, Pseudomonas silesiensis
gaactgaagagtttgatcatggctcagattgaacgctggcggcaggcctaacacatgcaagtcgagcggcagcacgggtacttgtacctggtggcgagcggcggacgggtgagtaatgcctaggaatctgcctggtagtgggggataacgctcggaaacggacgctaataccgcatacgtcctacgggagaaagcaggggaccttcgggccttgcgctatcagatgagcctaggtcggattagctagttggtgaggtaatggctcaccaaggcgacgatccgtaactggtctgagaggatgatcagtcacactggaactgagacacggtccagactcctacgggaggcagcagtggggaatattggacaatgggcgaaagcctgatccagccatgccgcgtgtgtgaagaaggtcttcggattgtaaagcactttaagttgggaggaagggcagttacctaatacgtatctgttttgacgttaccgacagaataagcaccggctaactctgtgccagcagccgcggtaatacagagggtgcaagcgttaatcggaattactgggcgtaaagcgcgcgtaggtggtttgttaagttggatgtgaaatccccgggctcaacctgggaactgcattcaaaactgacaagctagagtatggtagagggtggtggaatttcctgtgtagcggtgaaatgcgtagatataggaaggaacaccagtggcgaaggcgaccacctggactgatactgacactgaggtgcgaaagcgtggggagcaaacaggattagataccctggtagtccacgccgtaaacgatgtcaactagccgttgggagccttgagctcttagtggcgcagctaacgcattaagttgaccgcctggggagtacggccgcaaggttaaaactcaaatgaattgacgggggcccgcacaagcggtggagcatgtggtttaattcgaagcaacgcgaagaaccttaccaggccttgacatccaatgaactttccagagatggattggtgccttcgggaacattgagacaggtgctgcatggctgtcgtcagctcgtgtcgtgagatgttgggttaagtcccgtaacgagcgcaacccttgtccttagttaccagcacgtaatggtgggcactctaaggagactgccggtgacaaaccggaggaaggtggggatgacgtcaagtcatcatggcccttacggcctgggctacacacgtgctacaatggtcggtacagagggttgccaagccgcgaggtggagctaatcccagaaaaccgatcgtagtccggatcgcagtctgcaactcgactgcgtgaagtcggaatcgctagtaatcgcgaatcagaatgtcgcggtgaatacgttcccgggccttgtacacaccgcccgtcacaccatgggagtgggttgcaccagaagtagctagtctaaccttcgggaggacggttaccacggtgtgattcatgactggggtgaagtcgtaacaaggtagccgtaggggaacctgcggctggatcacctcctta

SEQ ID NO: 2798 - DNA, 1343 bp, Pseudomonas simiae
gttgcttctcttgagagcggcggacgggtgagtaatgcctaggaatctgcctggtagtgggggataacgttcggaaacggacgctaataccgcatacgtcctacgggagaaagcaggggaccttcgggccttgcgctatcagatgagcctaggtcggattagctagttggtgaggtaatggctcaccaaggcgacgatccgtaactggtctgagaggatgatcagtcacactggaactgagacacggtccagactcctacgggaggcagcagtggggaatattggacaatgggcgaaagcctgatccagccatgccgcgtgtgtgaagaaggtcttcggattgtaaagcactttaagttgggaggaagggcagttacctaatacgtgattgttttgacgttaccgacagaataagcaccggctaactctgtgccagcagccgcggtaatacagagggtgcaagcgttaatcggaattactgggcgtaaagcgcgcgtaggtggtttgttaagttggatgtgaaatccccgggctcaacctgggaactgcattcaaaactgactgactagagtatggtagagggtggtggaatttcctgtgtagcggtgaaatgcgtagatataggaaggaacaccagtggcgaaggcgaccacctggactaatactgacactgaggtgcgaaagcgtggggagcaaacaggattagataccctggtagtccacgccgtaaacgatgtcaactagccgttggaagccttgagcttttagtggcgcagctaacgcattaagttgaccgcctggggagtacggccgcaaggttaaaactcaaatgaattgacgggggcccgcacaagcggtggagcatgtggtttaattcgaagcaacgcgaagaaccttaccaggccttgacatccaatgaactttctagagatagattggtgccttcgggaacattgagacaggtgctgcatggctgtcgtcagctcgtgtcgtgagatgttgggttaagtcccgtaacgagcgcaacccttgtccttagttaccagcacgtaatggtgggcactctaaggagactgccggtgacaaaccggaggaaggtggggatgacgtcaagtcatcatggcccttacggcctgggctacacacgtgctacaatggtcggtacagagggttgccaagccgcgaggtggagctaatcccataaaaccgatcgtagtccggatcgcagtctgcaactcgactgcgtgaagtcggaatcgctagtaatcgcgaatcagaatgtcgcggtgaatacgttcccgggccttgtacacaccgcccgtcacaccatgggagtgggttgc

SEQ ID NO: 2799 - DNA, 1421 bp, Pseudomonas soli
gcggatgacgggagcttgctccttgattcagcggcggacgggtgagtaatgcctaggaatctgcctggtagtgggggacaacgtttcgaaaggaacgctaataccgcatacgtcctacgggagaaagcaggggaccttcgggccttgcgctatcagatgagcctaggtcggattagctagtaggtgaggtaatggctcacctaggcgacgatccgtaactggtctgagaggatgatcagtcacactggaactgagacacggtccagactcctacgggaggcagcagtggggaatattggacaatgggcgaaagcctgatccagccatgccgcgtgtgtgaagaaggtcttcggattgtaaagcactttaagttgggaggaagggttgtacgctaataccgtgcaattttgacgttaccgacagaataagcaccggctaactctgtgccagcagccgcggtaatacagagggtgcaagcgttaatcggaattactgggcgtaaagcgcgcgtaggtggttcgttaagttggatgtgaaagccccgggctcaacctgggaactgcatccaaaactggcgagctagagtatggtagagggtggtggaatttcctgtgtagcggtgaaatgcgtagatataggaaggaacaccagtggcgaaggcgaccacctggactgatactgacactgaggtgcgaaagcgtggggagcaaacaggattagataccctggtagtccacgccgtaaacgatgtcaactagccgttggaatccttgagattttagtggcgcagctaacgcattaagttgaccgcctggggagtacggccgcaaggttaaaactcaaatgaattgacgggggcccgcacaagcggtggagcatgtggtttaattcgaagcaacgcgaagaaccttaccaggccttgacatgcagagaactttccagagatggattggtgccttcgggaactctgacacaggtgctgcatggctgtcgtcagctcgtgtcgtgagatgttgggttaagtcccgtaacgagcgcaacccttgtccttagttaccagcacgttatggtgggcactctaaggagactgccggtgacaaaccggaggaaggtggggatgacgtcaagtcatcatggcccttacggcctgggctacacacgtgctacaatggtcggtacagagggttgccaagccgcgaggtggagctaatctcacaaaaccgatcgtagtccggatcgcagtctgcaactcgactgcgtgaagtcggaatcgctagtaatcgcaaatcagaatgttgcggtgaatacgttcccgggccttgtacacaccgcccgtcacaccatgggagtgggttgcaccagaagtagctagtctaaccttcgggaggacggttaccacggtgtgattcatgactggggtg

SEQ ID NO: 2800 - DNA, 1458 bp, Pseudomonas songnenensis
attgaacgctggcggcaggcgctacacatgcagtcgagcggatgaagggagcttgctctctgattcagcggcggacgggtgagtaatgcctaggaatctgcctggtagtgggggacaacgtttcgaaaggaacgctaataccgcatacgtcctacgggagaaagcaggggaccttcgggccttgcgctatcagatgagcctaggtcggattagctagttggtgaggtaaaggctcaccaaggcgacgatccgtaactggtctgagaggatgatcagtcacactggaactgagacacggtccagactcctacgggaggcagcagtggggaatattggacaatgggcgaaagcctgatccagccatgccgcgtgtgtgaagaaggtcttcggattgtaaagcactttaagttgggaggaagggcagtaagctaataccttgctgttttgacgttaccgacagaataagcaccggctaacttcgtgccagcagccgcggtaatacgaagggtgcaagcgttaatcggaattactgggcgtaaagcgcgcgtaggtggttcgttaagttggatgtgaaagccccgggctcaacctgggaactgcatccaaaactggcgagctagagtatggcagagggtggtggaatttcctgtgtagcggtgaaatgcgtagatataggaaggaacaccagtggcgaaggcgaccacctgggctaatactgacactgaggtgcgaaagcgtggggagcaaacaggattagataccctggtagtccacgccgtaaacgatgtcgactagccgttgggatccttgagatcttagtggcgcagctaacgcattaagtcgaccgcctggggagtacggccgcaaggttaaaactcaaatgaattgacgggggcccgcacaagcggtggagcatgtggtttaattcgaagcaacgcgaagaaccttaccaggccttgacatgcagagaactttccagagatggattggtgccttcgggaactctgacacaggtgctgcatggctgtcgtcagctcgtgtcgtgagatgttgggttaagtcccgtaacgagcgcaacccttgtccttagttaccagcacgttaaggtgggcactctaaggagactgccggtgacaaaccggaggaaggtggggatgacgtcaagtcatcatggcccttacggcctgggctacacacgtgctacaatggtcggtacaaagggttgccaagccgcgaggtggagctaatcccataaaaccgatcgtagtccggatcgcagtctgcaactcgactgcgtgaagtcggaatcgctagtaatcgtgaatcagaatgtcacggtgaatacgttcccgggccttgtacacaccgcccgtcacaccatgggagtgggttgctccagaagtagctagtctaaccttcgcggggacggttaccacggagtgattcatgactggggtg

SEQ ID NO: 2801 - DNA, 1458 bp, Pseudomonas straminea
attgaacgctggcggcaggcctaacacatgcaagtcgagcggttgaggggagcttgctccctgattcagcggcggacgggtgagtaatgcctaggaatctgcctattagtgggggacaacgtttcgaaaggaacgctaataccgcatacgtcctacgggagaaagcaggggaccttcgggccttgcgctaatagatgagcctaggtcggattagcttgttggtgaggtaatggctcaccaaggcgacgatccgtaactggtctgagaggatgatcagtcacactggaactgagacacggtccagactcctacgggaggcagcagtggggaatattggacaatgggcgaaagcctgatccagccatgccgcgtgtgtgaagaaggtcttcggattgtaaagcactttaagttgggaggaagggttgtagattaatactctgcaattttgacgttaccgacagaataagcaccggctaactctgtgccagcagccgcggtaatacagagggtgcaagcgttaatcggaattactgggcgtaaagcgcgcgtaggtggtttgttaagttggatgtgaaagccccgggctcaacctgggaactgcatccaaaactggcaagctagagtacggtagagggtggtggaatttcctgtgtagcggtgaaatgcgtagatataggaaggaacaccagtggcgaaggcgaccacctggactgatactgacactgaggtgcgaaagcgtggggagcaaacaggattagataccctggtagtccacgccgtaaacgatgtcaactagccgttggaatccttgagattttagtggcgcagctaacgcattaagttgaccgcctggggagtacggccgcaaggttaaaactcaaatgaattgacgggggcccgcacaagcggtggagcatgtggtttaattcgaagcaacgcgaagaaccttacctggccttgacatgctgagaactttccagagatggattggtgccttcgggaactcagacacaggtgctgcatggctgtcgtcagctcgtgtcgtgagatgttgggttaagtcccgtaacgagcgcaacccttgtccttagttaccagcacctcgggtgggaactctaaggagactgccggtgacaaaccggaggaaggtggggatgacgtcaagtcatcatggcccttacggccagggctacacacgtgctacaatggtcggtacaaagggttgccaagccgcgaggtggagctaatcccataaaaccgatcgtagtccggatcgcagtctgcaactcgactgcgtgaagtcggaatcgctagtaatcgtgaatcagaatgtcacggtgaatacgttcccgggccttgtacacaccgcccgtcacaccatgggagtgggttgcaccagaagtagctagtctaaccttcgggaggacggttaccacggtgtgattcatgactggggtg

SEQ ID NO: 2802 - DNA, 1459 bp, Pseudomonas synxantha
attgaacgctggcggcaggcctaacacatgcaagtcgagcggtagagagaagcttgcttctcttgagagcggcggacgggtgagtaatgcctaggaatctgcctggtagtgggggataacgttcggaaacggacgctaataccgcatacgtcctacgggagaaagcaggggaccttcgggccttgcgctatcagatgagcctaggtcggattagctagttggtggggtaatggctcaccaaggcgacgatccgtaactggtctgagaggatgatcagtcacactggaactgagacacggtccagactcctacgggaggcagcagtggggaatattggacaatgggcgaaagcctgatccagccatgccgcgtgtgtgaagaaggtcttcggattgtaaagcactttaagttgggaggaagggttgtagattaatactctgcaattttgacgttaccgacagaataagcaccggctaactctgtgccagcagccgcggtaatacagagggtgcaagcgttaatcggaattactgggcgtaaagcgcgcgtaggtggtttgttaagttggatgtgaaatccccgggctcaacctgggaactgcattcaaaactgactgactagagtatggtagagggtggtggaatttcctgtgtagcggtgaaatgcgtagatataggaaggaacaccagtggcgaaggcgaccacctggactgatactgacactgaggtgcgaaagcgtggggagcaaacaggattagataccctggtagtccacgccgtaaacgatgtcaactagccgttgggagccttgagctcttagtggcgcagctaacgcattaagttgaccgcctggggagtacggccgcaaggttaaaactcaaatgaattgacgggggcccgcacaagcggtggagcatgtggtttaattcgaagcaacgcgaagaaccttaccaggccttgacatccaatgaactttctagagatagattggtgccttcgggaacattgagacaggtgctgcatggctgtcgtcagctcgtgtcgtgagatgttgggttaagtcccgtaacgagcgcaacccttgtccttagttaccagcacgtaatggtgggcactctaaggagactgccggtgacaaaccggaggaaggtggggatgacgtcaagtcatcatggcccttacggcctgggctacacacgtgctacaatggtcggtacagagggttgccaagccgcgaggtggagctaatcccagaaaaccgatcgtagtccggatcgcagtctgcaactcgactgcgtgaagtcggaatcgctagtaatcgcgaatcagaatgtcgcggtgaatacgttcccgggccttgtacacaccgcccgtcacaccatgggagtgggttgcaccagaagtagctagtctaaccttcgggaggacggttaccacggtgtgattcatgactggggtg

SEQ ID NO: 2803 - DNA, 1461 bp, Pseudomonas syringae
attgaacgctggcggcaggcctaacacatgcaagtcgagcggcagcacgggtacttgtacctggtggcgagcggcggacgggtgagtaatgcctaggaatctgcctggtagtgggggataacgctcggaaacggacgctaataccgcatacgtcctacgggagaaagcaggggaccttcgggccttgcgctatcagatgagcctaggtcggattagctagttggtgaggtaatggctcaccaaggcgacgatccgtaactggtctgagaggatgatcagtcacactggaactgagacacggtccagactcctacgggaggcagcagtggggaatattggacaatgggcgaaagcctgatccagccatgccgcgtgtgtgaagaaggtcttcggattgtaaagcactttaagttgggaggaagggcagttacctaatacgtgattgttttgacgttaccgacagaataagcaccggctaactctgtgccagcagccgcggtaatacagagggtgcaagcgttaatcggaattactgggcgtaaagcgcgcgtaggtggtttgttaagttgaatgtgaaatccccgggctcaacctgggaactgcatccaaaactggcaagctagagtatggtagagggtggtggaatttcctgtgtagcggtgaaatgcgtagatataggaaggaacaccagtggcgaaggcgaccacctggactgatactgacactgaggtgcgaaagcgtggggagcaaacaggattagataccctggtagtccacgccgtaaacgatgtcaactagccgttgggagccttgagctcttagtggcgcagctaacgcattaagttgaccgcctggggagtacggccgcaaggttaaaactcaaatgaattgacgggggcccgcacaagcggtggagcatgtggtttaattcgaagcaacgcgaagaaccttaccaggccttgacatccaatgaactttccagagatggattggtgccttcgggagcattgagacaggtgctgcatggctgtcgtcagctcgtgtcgtgagatgttgggttaagtcccgtaacgagcgcaacccttgtccttagttaccagcacgttaaggtgggcactctaaggagactgccggtgacaaaccggaggaaggtggggatgacgtcaagtcatcatggcccttacggcctgggctacacacgtgctacaatggtcggtacagagggttgccaagccgcgaggtggagctaatctcacaaaaccgatcgtagtccggatcgcagtctgcaactcgactgcgtgaagtcggaatcgctagtaatcgcgaatcagaatgtcgcggtgaatacgttcccgggccttgtacacaccgcccgtcacaccatgggagtgggttgcaccagaagtagctagtctaaccttcggggggacggttaccacggtgtgattcatgactggggtg

SEQ ID NO: 2804 - DNA, 1459 bp, Pseudomonas taeanensis
attgaacgctggcggcaggcctaacacatgcaagtcgagcggtagaaagtagcttgctacttttgagagcggcggacgggtgagtaatgcctaggaatctgcctagtggtgggggataacgttcggaaacggacgctaataccgcatacgtcctacgggagaaagcgggggaccttcgggcctcgcgccattagatgagcctaggtcggattagctagttggtgaggtaatggctcaccaaggcgacgatccgtaactggtctgagaggatgatcagtcacactggaactgagacacggtccagactcctacgggaggcagcagtggggaatattggacaatgggcgaaagcctgatccagccatgccgcgtgtgtgaagaaggtcttcggattgtaaagcactttaagttgggaggaagggttgtaacttaatacgttgcaattttgacgttaccgacagaataagcaccggctaactctgtgccagcagccgcggtaatacagagggtgcaagcgttaatcggaattactgggcgtaaagcgcgcgtaggtggtttgttaagttgaatgtgaaagccccgggctcaacctgggaactgcatccaaaactggcaagctagagtacggtagagggtggtggaatttcctgtgtagcggtgaaatgcgtagatataggaaggaacaccagtggcgaaggcgaccacctggactgatactgacactgaggtgcgaaagcgtggggagcaaacaggattagataccctggtagtccacgccgtaaacgatgtcaactagccgttggattccttgaggatttagtggcgcagctaacgcattaagttgaccgcctggggagtacggccgcaaggttaaaactcaaatgaattgacgggggcccgcacaagcggtggagcatgtggtttaattcgaagcaacgcgaagaaccttaccaggccttgacatctacagaactttccagagatggattggtgccttcgggaactgtaagacaggtgctgcatggctgtcgtcagctcgtgtcgtgagatgttgggttaagtcccgtaacgagcgcaacccttgtccttagttaccagcacgtaatggtgggcactctaaggagactgccggtgacaaaccggaggaaggtggggatgacgtcaagtcatcatggcccttacggcctgggctacacacgtgctacaatggtcggtacaaagggttgccaagccgcgaggtggagctaatcccataaaaccgatcgtagtccggatcgcagtctgcaactcgactgcgtgaagtcggaatcgctagtaatcgtgaatcagaatgtcacggtgaatacgttcccgggccttgtacacaccgcccgtcacaccatgggagtgggttgcaccagaagtagctagtctaaccgcaagggggacggttaccacggtgtgattcatgactggggtg

SEQ ID NO: 2805 - DNA, 1451 bp, Pseudomonas taiwanensis
attgaacgctggcggcaggcctaacacatgcaagtcgagcggatgacgggagcttgctccttgattcagcggcggacgggtgagtaatgcctaggaatctgcctggtagtgggggacaacgtttcgaaaggaacgctaataccgcatacgtcctacgggagaaagcaggggaccttcgggccttgcgctatcagatgagcctaggtcggattagctagttggtgaggtaatggctcaccaaggcgacgatccgtaactggtctgagaggatgatcagtcacactggaactgagacacggtccagactcctacgggaggcagcagtggggaatattggacaatgggcgaaagcctgatccagccatgccgcgtgtgtgaagaaggtcttcggattgtaaagcactttaagttgggaggaagggcagtaagttaataccttgctgttttgacgttaccgacagaataagcaccggctaactctgtgccagcagccgcggtaatacagagggtgcaagcgttaatcggaattactgggcgtaaagcgcgcgtaggtggttcgttaagttggatgtgaaagccccgggctcaacctgggaactgcatccaaaactggcgagctagagtacggtagagggtggtggaatttcctgtgtagcggtgaaatgcgtagatataggaaggaacaccagtggcgaaggcgaccacctggactgatactgacactgaggtgcgaaagcgtggggagcaaacaggattagataccctggtagtccacgccgtaaacgatgtcaactagccgttggaatccttgagattttagtggcgcagctaacgcattaagttgaccgcctggggagtacggccgcaaggttaaaactcaaatgaattgacgggggcccgcacaagcggtggagcatgtggtttaattcgaagcaacgcgaagaaccttaccaggccttgacatgcagagaactttccagagatggattggtgccttcgggaactctgacacaggtgctgcatggctgtcgtcagctcgtgtcgtgagatgttgggttaagtcccgtaacgagcgcaacccttgtccttagttaccagcacgttatggtgggcactctaaggagactgccggtgacaaaccggaggaaggtggggatgacgtcaagtcatcatggcccttacggcctgggctacacacgtgctacaatggtcggtacagagggttgccaagccgcgaggtggagctaatctcacaaaaccgatcgtagtccggatcgcagtctgcaactcgactgcgtgaagtcggaatcgctagtaatcgcgaatcagaatgtcgcggtgaatacgttcccgggccttgtacacaccgcccgtcacaccatgggagtgggttgcaccagaagtagctagtctaaccttcgggaggacggttaccacggtgtgattcatga

SEQ ID NO: 2806 - DNA, 1428 bp, Pseudomonas thermotolerans
ctggcggcaggcctaacacatgcaagtcgagcggcagcacgggagcttgctcctggtggcgagcggcggacgggtgagtaatgcctaggaatctgcctgttagtgggggataactcggggaaactcgagctaataccgcatacgtcctacgggagaaagtgggggaccttcgggcctcacgctaacagatgagcctaggtcggattagctagttggtggggtaaaggcctaccaaggcgacgatccgtagctggtctgagaggatgatcagccacactggaactgagacacggtccagactcctacgggaggcagcagtggggaatattggacaatgggcgaaagcctgatccagccatgccgcgtgtgtgaagaaggtcttcggattgtaaagcactttaagttgggaggaagggcgcttggctaatacccaagggttttgacgttaccaacagaataagcaccggctaacttcgtgccagcagccgcggtaatacgaagggtgcgagcgttaatcggaattactgggcgtaaagcgcgcgtaggcggtttgttaagttggaggtgaaatccccgggctcaacctgggaagtgcctccaaaactggctgactagagtacggtagagggtggtggaatttcctgtgtagcggtgaaatgcgtagatataggaaggaacaccagtggcgaaggcgaccacctggactgatactgacgctgaggtgcgaaagcgtggggagcaaacaggattagataccctggtagtccacgccgtaaacgatgtcgactagccgttgggctccttgagagcttagtggcgcagctaacgcattaagtcgaccgcctggggagtacggccgcaaggttaaaactcaaatgaattgacgggggcccgcacaagcggtggagcatgtggtttaattcgaagcaacgcgaagaaccttacctggccttgacatgcagagaactttccagagatggattggtgccttcgggaactctgacacaggtgctgcatggctgtcgtcagctcgtgtcgtgagatgttgggttaagtcccgtaacgagcgcaacccttgtccttagttaccagcgattcggtcgggcactctaaggagactgccggtgacaaaccggaggaaggtggggatgacgtcaagtcatcatggcccttacggccagggctacacacgtgctacaatggtcggtacagagggttgccaagccgcgaggcggagctaatcccagaaaaccgatcgtagtccggatcgcagtctgcaactcgactgcgtgaagtcggaatcgctagtaatcgcgaatcagaatgtcgcggtgaatacgttcccgggccttgtacacaccgcccgtcacaccatgggagtgggttgctccagaagtagctagtctaaccgcaagggggacggttacc

SEQ ID NO: 2807 - DNA, 1459 bp, Pseudomonas thivervalensis
  misc_feature (444)..(444): n is a, c, g, or t
  misc_feature (1003)..(1003): n is a, c, g, or t
attgaacgctggcggcaggcctaacacatgcaagtcgagcggtagagaggtgcttgcacctcttgagagcggcggacgggtgagtaatgcctaggaatctgcctggtagtgggggataacgctcggaaacggacgctaataccgcatacgtcctacgggagaaagcaggggaccttcgggccttgcgctatcagatgagcctaggtcggattagctagttggtggggtaatggctcaccaaggcgacgatccgtaactggtctgagaggatgatcagtcacactggaactgagacacggtccagactcctacgggaggcagcagtggggaatattggacaatgggcgaaagcctgatccagccatgccgcgtgtgtgaagaaggtcttcggattgtaaagcactttaagttgggaggaagggcattaacctaatacgttggtgncttgacgttaccgacagaataagcaccggctaactctgtgccagcagccgcggtaatacagagggtgcaagcgttaatcggaattactgggcgtaaagcgcgcgtaggtggttcgttaagttggatgtgaaagccccgggctcaacctgggaactgcattcaaaactgtcgagctagagtatggtagagggtggtggaatttcctgtgtagcggtgaaatgcgtagatataggaaggaacaccagtggcgaaggcgaccacctggactgatactgacactgaggtgcgaaagcgtggggagcaaacaggattagataccctggtagtccacgccgtaaacgatgtcaactagccgttgggagccttgagctcttagtggcgcagctaacgcattaagttgaccgcctggggagtacggccgcaaggttaaaactcaaatgaattgacgggggcccgcacaagcggtggagcatgtggtttaattcgaagcaacgcgaagaaccttaccaggccttgacatccaatgaactttccagagatggattggtgccttcgggancattgagacaggtgctgcatggctgtcgtcagctcgtgtcgtgagatgttgggttaagtcccgtaacgagcgcaacccttgtccttagttaccagcacgtaatggtgggcactctaaggagactgccggtgacaaaccggaggaaggtggggatgacgtcaagtcatcatggcccttacggcctgggctacacacgtgctacaatggtcggtacagagggttgccaagccgcgaggtggagctaatcccacaaaaccgatcgtagtccggatcgcagtctgcaactcgactgcgtgaagtcggaatcgctagtaatcgcgaatcagaatgtcgcggtgaatacgttcccgggccttgtacacaccgcccgtcacaccatgggagtgggttgcaccagaagtagctagtctaaccttcgggaggacggttaccacggtgtgattcatgactggggtg

SEQ ID NO: 2808 - DNA, 1459 bp, Pseudomonas toyotomiensis
attgaacgctggcggcaggcctaacacatgcaagtcgagcggatgagaggagcttgctccttgatttagcggcggacgggtgagtaatgcctaggaatctgcctggtagtgggggataacgttccgaaaggaacgctaataccgcatacgtcctacgggagaaagcaggggaccttcgggccttgcgctatcagatgagcctaggtcggattagctggttggtgaggtaatggctcaccaaggcgacgatccgtaactggtctgagaggatgatcagtcacactggaactgagacacggtccagactcctacgggaggcagcagtggggaatattggacaatgggcgaaagcctgatccagccatgccgcgtgtgtgaagaaggtcttcggattgtaaagcactttaagttgggaggaagggcattaacctaatacgttagtgttttgacgttaccgacagaataagcaccggctaacttcgtgccagcagccgcggtaatacgaagggtgcaagcgttaatcggaattactgggcgtaaagcgcgcgtaggtggttcgttaagttggatgtgaaagccccgggctcaacctgggaactgcatccaaaactggcgagctagagtacggtagagggtggtggaatttcctgtgtagcggtgaaatgcgtagatataggaaggaacaccagtggcgaaggcgaccacctggactgatactgacactgaggtgcgaaagcgtggggagcaaacaggattagataccctggtagtccacgccgtaaacgatgtcaactagccgttgggttccttgagaacttagtggcgcagctaacgcattaagttgaccgcctggggagtacggccgcaaggttaaaactcaaatgaattgacgggggcccgcacaagcggtggagcatgtggtttaattcgaagcaacgcgaagaaccttacctggccttgacatgctgagaactttccagagatggattggtgccttcgggaactcagacacaggtgctgcatggctgtcgtcagctcgtgtcgtgagatgttgggttaagtcccgtaacgagcgcaacccttgtccttagttaccagcacgttatggtgggcactctaaggagactgccggtgacaaaccggaggaaggtggggatgacgtcaagtcatcatggcccttacggccagggctacacacgtgctacaatggtcggtacaaagggttgccaagccgcgaggtggagctaatcccataaaaccgatcgtagtccggatcgcagtctgcaactcgactgcgtgaagtcggaatcgctagtaatcgtgaatcagaatgtcacggtgaatacgttcccgggccttgtacacaccgcccgtcacaccatgggagtgggttgctccagaagtagctagtctaaccttcggggggacggttaccacggagtgattcatgactggggtg

SEQ ID NO: 2809 - DNA, 1461 bp, Pseudomonas tremae
attgaacgctggcggcaggcctaacacatgcaagtcgagcggcagcacgggtacttgtacctggtggcgagcggcggacgggtgagtaatgcctaggaatctgcctggtagtgggggataacgctcggaaacggacgctaataccgcatacgtcctacgggagaaagcaggggaccttcgggccttgcgctatcagatgagcctaggtcggattagctagttggtgaggtaatggctcaccaaggcgacgatccgtaactggtctgagaggatgatcagtcacactggaactgagacacggtccagactcctacgggaggcagcagtggggaatattggacaatgggcgaaagcctgatccagccatgccgcgtgtgtgaagaaggtcttcggattgtaaagcactttaagttgggaggaagggcagttacctaatacgtgattgttttgacgttaccgacagaataagcaccggctaactctgtgccagcagccgcggtaatacagagggtgcaagcgttaatcggaattactgggcgtaaagcgcgcgtaggtggtttgttaagttggatgtgaaatccccgggctcaacctgggaactgcatccaaaactggcaagctagagtatggtagagggtggtggaatttcctgtgtagcggtgaaatgcgtagatataggaaggaacaccagtggcgaaggcgaccacctggactgatactgacactgaggtgcgaaagcgtggggagcaaacaggattagataccctggtagtccacgccgtaaacgatgtcaactagccgttgggagccttgagctcttagtggcgcagctaacgcattaagttgaccgcctggggagtacggccgcaaggttaaaactcaaatgaattgacgggggcccgcacaagcggtggagcatgtggtttaattcgaagcaacgcgaagaaccttaccaggccttgacatccaatgaactttccagagatggattggtgccttcgggaacattgagacaggtgctgcatggctgtcgtcagctcgtgtcgtgagatgttgggttaagtcccgtaacgagcgcaacccttgtccttagttaccagcacgtaatggtgggcactctaaggagactgccggtgacaaaccggaggaaggtggggatgacgtcaagtcatcatggcccttacggcctgggctacacacgtgctacaatggtcggtacagagggttgccaagccgcgaggtggagctaatctcacaaaaccgatcgtagtccggatcgcagtctgcaactcgactgcgtgaagtcggaatcgctagtaatcgcgaatcagaatgtcgcggtgaatacgttcccgggccttgtacacaccgcccgtcacaccatgggagtgggttgcaccagaagtagctagtctaaccttcgtggggacggttaccacggtgtgattcatgactggggtg

SEQ ID NO: 2810 - DNA, 1459 bp, Pseudomonas trivialis
attgaacgctggcggcaggcctaacacatgcaagtcgagcggtagagagaagcttgcttctcttgagagcggcggacgggtgagtaatgcctaggaatctgcctggtagtgggggataacgttcggaaacggacgctaataccgcatacgtcctacgggagaaagcaggggaccttcgggccttgcgctatcagatgagcctaggtcggattagctagttggtggggtaatggctcaccaaggcgacgatccgtaactggtctgagaggatgatcagtcacactggaactgagacacggtccagactcctacgggaggcagcagtggggaatattggacaatgggcgaaagcctgatccagccatgccgcgtgtgtgaagaaggtcttcggattgtaaagcactttaagttgggaggaagggcagttacctaatacgtgattgttttgacgttaccgacagaataagcaccggctaactctgtgccagcagccgcggtaatacagagggtgcaagcgttaatcggaattactgggcgtaaagcgcgcgtaggtggtttgttaagttggatgtgaaatccccgggctcaacctgggaactgcattcaaaactgactgactagagtatggtagagggtggtggaatttcctgtgtagcggtgaaatgcgtagatataggaaggaacaccagtggcgaaggcgaccacctggactaatactgacactgaggtgcgaaagcgtggggagcaaacaggattagataccctggtagtccacgccgtaaacgatgtcaactagccgttggaagccttgagcttttagtggcgcagctaacgcattaagttgaccgcctggggagtacggccgcaaggttaaaactcaaatgaattgacgggggcccgcacaagcggtggagcatgtggtttaattcgaagcaacgcgaagaaccttaccaggccttgacatccaatgaactttctagagatagattggtgccttcgggaacattgagacaggtgctgcatggctgtcgtcagctcgtgtcgtgagatgttgggttaagtcccgtaacgagcgcaacccttgtccttagttaccagcacgtaatggtgggcactctaaggagactgccggtgacaaaccggaggaaggtggggatgacgtcaagtcatcatggcccttacggcctgggctacacacgtgctacaatggtcggtacagagggttgccaagccgcgaggtggagctaatcccacaaaaccgatcgtagtccggatcgcagtctgcaactcgactgcgtgaagtcggaatcgctagtaatcgcgaatcagaatgtcgcggtgaatacgttcccgggccttgtacacaccgcccgtcacaccatgggagtgggttgcaccagaagtagctagtctaaccttcgggaggacggttaccacggtgtgattcatgactggggtg

SEQ ID NO: 2811 - DNA, 1459 bp, Pseudomonas umsongensis
attgaacgctggcggcaggcctaacacatgcaagtcgagcggatgatgagagcttgctctctgattcagcggcggacgggtgagtaatgcctaggaatctgcctggtagtgggggacaacgtctcgaaagggacgctaataccgcatacgtcctacgggagaaagcaggggaccttcgggccttgcgctatcagatgagcctaggtcggattagctagttggtgaggtaatggctcaccaaggcgacgatccgtaactggtctgagaggatgatcagtcacactggaactgagacacggtccagactcctacgggaggcagcagtggggaatattggacaatgggcgaaagcctgatccagccatgccgcgtgtgtgaagaaggtcttcggattgtaaagcactttaagttgggaggaagggcagtaaattaatactttgctgttttgacgttaccgacagaataagcaccggctaactctgtgccagcagccgcggtaatacagagggtgcaagcgttaatcggaattactgggcgtaaagcgcgcgtaggtggtttgttaagttggatgtgaaatccccgggctcaacctgggaactgcattcaaaactgacaagctagagtatggtagagggtggtggaatttcctgtgtagcggtgaaatgcgtagatataggaaggaacaccagtggcgaaggcgaccacctggactgatactgacactgaggtgcgaaagcgtggggagcaaacaggattagataccctggtagtccacgccgtaaacgatgtcaactagccgttgggagccttgagctcttagtggcgcagctaacgcattaagttgaccgcctggggagtacggccgcaaggttaaaactcaaatgaattgacgggggcccgcacaagcggtggagcatgtggtttaattcgaagcaacgcgaagaaccttaccaggccttgacatccaatgaactttccagagatggattggtgccttcgggaacattgagacaggtgctgcatggctgtcgtcagctcgtgtcgtgagatgttgggttaagtcccgtaacgagcgcaacccttgtccttagttaccagcacgtaatggtgggcactctaaggagactgccggtgacaaaccggaggaaggtggggatgacgtcaagtcatcatggcccttacggcctgggctacacacgtgctacaatggtcggtacagagggttgccaagccgcgaggtggagctaatcccataaaaccgatcgtagtccggatcgcagtctgcaactcgactgcgtgaagtcggaatcgctagtaatcgcgaatcagaatgtcgcggtgaatacgttcccgggccttgtacacaccgcccgtcacaccatgggagtgggttgcaccagaagtagctagtctaaccttcgggaggacggttaccacggtgtgattcatgactggggtg

SEQ ID NO: 2812 - DNA, 1459 bp, Pseudomonas vancouverensis
attgaacgctggcggcaggcctaacacatgcaagtcgagcggatgaagagagcttgctctctgattcagcggcggacgggtgagtaatgcctaggaatctgcctggtagtgggggacaacgtttcgaaaggaacgctaataccgcatacgtcctacgggagaaagcaggggaccttcgggccttgcgctatcagatgagcctaggtcggattagctagttggtgaggtaatggctcaccaaggcgacgatccgtaactggtctgagaggatgatcagtcacactggaactgagacacggtccagactcctacgggaggcagcagtggggaatattggacaatgggcgaaagcctgatccagccatgccgcgtgtgtgaagaaggtcttcggattgtaaagcactttaagttgggaggaagggttgtagattaatactctgcaattttgacgttaccgacagaataagcaccggctaactctgtgccagcagccgcggtaatacagagggtgcaagcgttaatcggaattactgggcgtaaagcgcgcgtaggtggtttgttaagttggatgtgaaagccccgggctcaacctgggaactgcattcaaaactgacaagctagagtatggtagagggtggtggaatttcctgtgtagcggtgaaatgcgtagatataggaaggaacaccagtggcgaaggcgaccacctggactgatactgacactgaggtgcgaaagcgtggggagcaaacaggattagataccctggtagtccacgccgtaaacgatgtcaactagccgttgggagccttgagctcttagtggcgcagctaacgcattaagttgaccgcctggggagtacggccgcaaggttaaaactcaaatgaattgacgggggcccgcacaagcggtggagcatgtggtttaattcgaagcaacgcgaagaaccttaccaggccttgacatccaatgaactttccagagatggattggtgccttcgggaacattgagacaggtgctgcatggctgtcgtcagctcgtgtcgtgagatgttgggttaagtcccgtaacgagcgcaacccttgtccttagttaccagcacgttatggtgggcactctaaggagactgccggtgacaaaccggaggaaggtggggatgacgtcaagtcatcatggcccttacggcctgggctacacacgtgctacaatggtcggtacagagggttgccaagccgcgaggtggagctaatcccataaaaccgatcgtagtccggatcgcagtctgcaactcgactgcgtgaagtcggaatcgctagtaatcgcgaatcagaatgtcgcggtgaatacgttcccgggccttgtacacaccgcccgtcacaccatgggagtgggttgcaccagaagtagctagtctaaccttcggggggacggttaccacggtgtgattcatgactggggtg

SEQ ID NO: 2813 - DNA, 1459 bp, Pseudomonas veronii
attgaacgctggcggcaggcctaacacatgcaagtcgagcggtagagagaagcttgcttctcttgagagcggcggacgggtgagtaatgcctaggaatctgcctggtagtgggggataacgttcggaaacggacgctaataccgcatacgtcctacgggagaaagcaggggaccttcgggccttgcgctatcagatgagcctaggtcggattagctagttggtgaggtaatggctcaccaaggcgacgatccgtaactggtctgagaggatgatcagtcacactggaactgagacacggtccagactcctacgggaggcagcagtggggaatattggacaatgggcgaaagcctgatccagccatgccgcgtgtgtgaagaaggtcttcggattgtaaagcactttaagttgggaggaagggcagttacctaatacgtaattgttttgacgttaccgacagaataagcaccggctaactctgtgccagcagccgcggtaatacagagggtgcaagcgttaatcggaattactgggcgtaaagcgcgcgtaggtggttagttaagttggatgtgaaatccccgggctcaacctgggaactgcattcaaaactgactgactagagtatggtagagggtggtggaatttcctgtgtagcggtgaaatgcgtagatataggaaggaacaccagtggcgaaggcgaccacctggactgatactgacactgaggtgcgaaagcgtggggagcaaacaggattagataccctggtagtccacgccgtaaacgatgtcaactagccgttgggagccttgagctcttagtggcgcagctaacgcattaagttgaccgcctggggagtacggccgcaaggttaaaactcaaatgaattgacgggggcccgcacaagcggtggagcatgtggtttaattcgaagcaacgcgaagaaccttaccaggccttgacatccaatgaactttccagagatggattggtgccttcgggaacattgagacaggtgctgcatggctgtcgtcagctcgtgtcgtgagatgttgggttaagtcccgtaacgagcgcaacccttgtccttagttaccagcacgtaatggtgggcactctaaggagactgccggtgacaaaccggaggaaggtggggatgacgtcaagtcatcatggcccttacggcctgggctacacacgtgctacaatggtcggtacagagggttgccaagccgcgaggtggagctaatcccagaaaaccgatcgtagtccggatcgcagtctgcaactcgactgcgtgaagtcggaatcgctagtaatcgcgaatcagaatgtcgcggtgaatacgttcccgggccttgtacacaccgcccgtcacaccatgggagtgggttgcaccagaagtagctagtctaaccttcggggggacggttaccacggtgtgattcatgactggggtg

SEQ ID NO: 2814 - DNA, 1459 bp, Pseudomonas versuta
attgaacgctggcggcaggcctaacacatgcaagtcgagcggtagagaggtgcttgcacctcttgagagcggcggacgggtgagtaatacctaggaatctgcctggtagtgggggataacgttcggaaacggacgctaataccgcatacgtcctacgggagaaagcaggggaccttcgggccttgcgctatcagatgagcctaggtcggattagctagttggtgaggtaatggctcaccaaggctacgatccgtaactggtctgagaggatgatcagtcacactggaactgagacacggtccagactcctacgggaggcagcagtggggaatattggacaatgggcgaaagcctgatccagccatgccgcgtgtgtgaagaaggtcttcggattgtaaagcactttaagttgggaggaagggcattaacctaatacgttagtgctttgacgttaccgacagaataagcaccggctaactctgtgccagcagccgcggtaatacagagggtgcaagcgttaatcggaattactgggcgtaaagcgcgcgtaggtggtttgttaagttgaatgtgaaatccccgggctcaacctgggaactgcatccaaaactggcaagctagagtatggtagagggtggtggaatttcctgtgtagcggtgaaatgcgtagatataggaaggaacaccagtggcgaaggcgaccacctggactgatactgacactgaggtgcgaaagcgtggggagcaaacaggattagataccctggtagtccacgccgtaaacgatgtcaactagccgttgggagtcttgaactcttagtggcgcagctaacgcattaagttgaccgcctggggagtacggccgcaaggttaaaactcaaatgaattgacgggggcccgcacaagcggtggagcatgtggtttaattcgaagcaacgcgaagaaccttaccaggccttgacatccaatgaactttctagagatagattggtgccttcgggaacattgagacaggtgctgcatggctgtcgtcagctcgtgtcgtgagatgttgggttaagtcccgtaacgagcgcaacccttgtccttagttaccagcacgtaatggtgggcactctaaggagactgccggtgacaaaccggaggaaggtggggatgacgtcaagtcatcatggcccttacggcctgggctacacacgtgctacaatggtcggtacaaagggttgccaagccgcgaggtggagctaatcccataaaaccgatcgtagtccggatcgcagtctgcaactcgactgcgtgaagtcggaatcgctagtaatcgtgaatcagaatgtcacggtgaatacgttcccgggccttgtacacaccgcccgtcacaccatgggagtgggttgcaccagaagtagctagtctaaccttcgggaggacggttaccacggtgtgattcatgactggggtg

SEQ ID NO: 2815 - DNA, 1459 bp, Pseudomonas viridiflava
attgaacgctggcggcaggcctaacacatgcaagtcgagcggtagagagaagcttgcttctcttgagagcggcggacgggtgagtaatgcctaggaatctgcctggtagtgggggataacgctcggaaacggacgctaataccgcatacgtcctacgggagaaagcaggggaccttcgggccttgcgctatcagatgagcctaggtcggattagctagttggtgaggtaatggctcaccaaggcgacgatccgtaactggtctgagaggatgatcagtcacactggaactgagacacggtccagactcctacgggaggcagcagtggggaatattggacaatgggcgaaagcctgatccagccatgccgcgtgtgtgaagaaggtcttcggattgtaaagcactttaagttgggaggaagggcagtaacctaatacgttattgttttgacgttaccgacagaataagcaccggctaactctgtgccagcagccgcggtaatacagagggtgcaagcgttaatcggaattactgggcgtaaagcgcgcgtaggtggtttgttaagttgaatgtgaaatccccgggctcaacctgggaactgcatccaaaactggcaagctagagtagggcagagggtggtggaatttcctgtgtagcggtgaaatgcgtagatataggaaggaacaccagtggcgaaggcgaccacctgggctcatactgacactgaggtgcgaaagcgtggggagcaaacaggattagataccctggtagtccacgccgtaaacgatgtcaactagccgttggaatccttgagattttagtggcgcagctaacgcattaagttgaccgcctggggagtacggccgcaaggttaaaactcaaatgaattgacgggggcccgcacaagcggtggagcatgtggtttaattcgaagcaacgcgaagaaccttaccaggccttgacatccaatgaatcctttagagatagaggagtgccttcgggagcattgagacaggtgctgcatggctgtcgtcagctcgtgtcgtgagatgttgggttaagtcccgtaacgagcgcaacccttgtccttagttaccagcacgttaaggtgggcactctaaggagactgccggtgacaaaccggaggaaggtggggatgacgtcaagtcatcatggcccttacggcctgggctacacacgtgctacaatggtcggtacagagggttgccaagccgcgaggtggagctaatctcacaaaaccgatcgtagtccggatcgcagtctgcaactcgactgcgtgaagtcggaatcgctagtaatcgcgaatcagaatgtcgcggtgaatacgttcccgggccttgtacacaccgcccgtcacaccatgggagtgggttgcaccagaagtagctagtctaaccttcgggaggacggttaccacggtgtgattcatgactggggtg

SEQ ID NO: 2816 - DNA, 1459 bp, Pseudomonas vranovensis
attgaacgctggcggcaggcctaacacatgcaagtcgagcggatgagaagagcttgctcttcgattcagcggcggacgggtgagtaatacctaggaatctgcctggtagtgggggacaacgttttgaaagggacgctgataccgcatacgccctacgggggcaagcaggggaccttcgggccttgcgctatcagatgagcctaggtcggattagctagttggtgaggtaatggctcaccaaggcgacgatccgtaactggtctgagaggatgatcagtcacactggaactgagacacggtccagactcctacgggaggcagcagtggggaatattggacaatgggcgaaagcctgatccagccatgccgcgtgtgtgaagaaggtcttcggattgtaaagcactttaagttgggaggaagggcattaacctaatacgttagtgttttgacgttaccgacagaataagcaccggctaactctgtgccagcagccgcggtaatacagagggtgcaagcgttaatcggaattactgggcgtaaagcgcgcgtaggtggttcgttaagttggatgtgaaatccccgggctcaacctgggaactgcatccaaaactggcgagctagagtagggcagagggtggtggaatttcctgtgtagcggtgaaatgcgtagatataggaaggaacaccagtggcgaaggcgaccacctgggctcatactgacactgaggtgcgaaagcgtggggagcaaacaggattagataccctggtagtccacgccgtaaacgatgtcaactagccgttgggaaccttgagattttagtggcgcagctaacgcattaagttgaccgcctggggagtacggccgcaaggttaaaactcaaatgaattgacgggggcccgcacaagcggtggagcatgtggtttaattcgaagcaacgcgaagaaccttaccaggccttgacatgcagagaactttccagagatggattggtgccttcgggaactctgacacaggtgctgcatggctgtcgtcagctcgtgtcgtgagatgttgggttaagtcccgtaacgagcgcaacccttgtccttagttaccagcacgttatggtgggcactctaaggagactgccggtgacaaaccggaggaaggtggggatgacgtcaagtcatcatggcccttacggcctgggctacacacgtgctacaatggtcggtacagagggtcgccaagccgcgaggtggagctaatctcacaaaaccgatcgtagtccggatcgcagtctgcaactcgactgcgtgaagtcggaatcgctagtaatcgcgaatcagaatgtcgcggtgaatacgttcccgggccttgtacacaccgcccgtcacaccatgggagtgggttgcaccagaagtagctagtctaaccttcgggaggacggttaccacggtgtgattcatgactggggtg

SEQ ID NO: 2817 - DNA, 1459 bp, Pseudomonas wadenswilerensis
attgaacgctggcggcaggcctaacacatgcaagtcgagcggatgagaagagcttgctcttcgattcagcggcggacgggtgagtaatacctaggaatctgcctggtagtgggggacaacgtttcgaaaggaacgctaataccgcatacgccctacgggggaaagcaggggaccttcgggccttgcgctatcagatgagcctaggtcggattagctagttggtgaggtaatggctcaccaaggcgacgatccgtaactggtctgagaggatgatcagtcacactggaactgagacacggtccagactcctacgggaggcagcagtggggaatattggacaatgggcgaaagcctgatccagccatgccgcgtgtgtgaagaaggtcttcggattgtaaagcactttaagttgggaggaagggtacttacctaatacgtgagtattttgacgttaccgacagaataagcaccggctaactctgtgccagcagccgcggtaatacagagggtgcaagcgttaatcggaattactgggcgtaaagcgcgcgtaggtggttcgttaagttggatgtgaaatccccgggctcaacctgggaactgcatccaaaactggcgagctagagtagggcagagggtggtggaatttcctgtgtagcggtgaaatgcgtagatataggaaggaacaccagtggcgaaggcgaccacctgggctcatactgacactgaggtgcgaaagcgtggggagcaaacaggattagataccctggtagtccacgccgtaaacgatgtcaactagccgttggaatccttgagattttagtggcgcagctaacgcattaagttgaccgcctggggagtacggccgcaaggttaaaactcaaatgaattgacgggggcccgcacaagcggtggagcatgtggtttaattcgaagcaacgcgaagaaccttaccaggccttgacatgcagagaactttccagagatggattggtgccttcgggaactctgacacaggtgctgcatggctgtcgtcagctcgtgtcgtgagatgttgggttaagtcccgtaacgagcgcaacccttgtccttagttaccagcacgttatggtgggcactctaaggagactgccggtgacaaaccggaggaaggtggggatgacgtcaagtcatcatggcccttacggcctgggctacacacgtgctacaatggtcggtacagagggttgccaagccgcgaggtggagctaatctcacaaaaccgatcgtagtccggatcgcagtctgcaactcgactgcgtgaagtcggaatcgctagtaatcgcgaatcagaatgtcgcggtgaatacgttcccgggccttgtacacaccgcccgtcacaccatgggagtgggttgcaccagaagtagctagtctaaccttcgggaggacggttaccacggtgtgattcatgactggggtg

SEQ ID NO: 2818 - DNA, 1459 bp, Pseudomonas weihenstephanensis
attgaacgctggcggcaggcctaacacatgcaagtcgagcggtagagaggtgcttgcacctcttgagagcggcggacgggtgagtaatacctaggaatctgcctgatagtgggggataacgttcggaaacggacgctaataccgcatacgtcctacgggagaaagcaggggaccttcgggccttgcgctatcagatgagcctaggtcggattagctagttggtgaggtaatggctcaccaaggctacgatccgtaactggtctgagaggatgatcagtcacactggaactgagacacggtccagactcctacgggaggcagcagtggggaatattggacaatgggcgaaagcctgatccagccatgccgcgtgtgtgaagaaggtcttcggattgtaaagcactttaagttgggaggaagggcattaacctaatacgttagtgttttgacgttaccgacagaataagcaccggctaactctgtgccagcagccgcggtaatacagagggtgcaagcgttaatcggaattactgggcgtaaagcgcgcgtaggtggtttgttaagttgaatgtgaaatccccgggctcaacctgggaactgcatccaaaactggcaagctagagtatggtagagggtagtggaatttcctgtgtagcggtgaaatgcgtagatataggaaggaacaccagtggcgaaggcgactacctggactgatactgacactgaggtgcgaaagcgtggggagcaaacaggattagataccctggtagtccacgccgtaaacgatgtcaactagccgttgggagtcttgaactcttagtggcgcagctaacgcattaagttgaccgcctggggagtacggccgcaaggttaaaactcaaatgaattgacgggggcccgcacaagcggtggagcatgtggtttaattcgaagcaacgcgaagaaccttaccaggccttgacatccaatgaactttctagagatagattggtgccttcgggaacattgagacaggtgctgcatggctgtcgtcagctcgtgtcgtgagatgttgggttaagtcccgtaacgagcgcaacccttgtccttagttaccagcacgtaatggtgggcactctaaggagactgccggtgacaaaccggaggaaggtggggatgacgtcaagtcatcatggcccttacggcctgggctacacacgtgctacaatggtcggtacaaagggttgccaagccgcgaggtggagctaatcccataaaaccgatcgtagtccggatcgcagtctgcaactcgactgcgtgaagtcggaatcgctagtaatcgtgaatcagaatgtcacggtgaatacgttcccgggccttgtacacaccgcccgtcacaccatgggagtgggttgcaccagaagtagctagtctaaccctcgggaggacggttaccacggtgtgattcatgactggggtg

SEQ ID NO: 2819 - DNA, 1459 bp, Pseudomonas xinjiangensis
attgaacgctggcggcaggcctaacacatgcaagtcgagcggtagaggggagcttgctccccttgagagcggcggacgggtgagtaacacctgggaatctgcctggtagtgggggataacgttccgaaaggaacgctaataccgcatacgtcctacgggagaaagcaggggatcttcggaccttgcgctatcagatgagcccaggtcggattagctagtaggtgaggtaatggctcacctaggcgacgatccgtaactggtctgagaggatgatcagtcacactggaactgagacacggtccagactcctacgggaggcagcagtggggaatattggacaatgggcgcaagcctgatccagccatgccgcgtgtgtgaagaaggtcttcggattgtaaagcactttaagttgggaggaagggaagtaagctaataccttgctttcttgacgttaccaacagaataagcaccggctaactctgtgccagcagccgcggtaatacagagggtgcaagcgttaatcggaattactgggcgtaaagcgcgcgtaggtggctaagtaagatgggtgtgaaatccccgggctcaacctgggaactgcatccataactgcttagctagagtacggtagagggtagtggaatttcctgtgtagcggtgaaatgcgtagatataggaaggaacaccagtggcgaaggcgactacctggactgatactgacactgaggtgcgaaagcgtggggagcaaacaggattagataccctggtagtccacgccgtaaacgatgtcaactagccgttggaatccttgagattttagtggcgcagctaacgcaataagttgaccgcctggggagtacggtcgcaagattaaaactcaaatgaattgacgggggcccgcacaagcggtggagcatgtggtttaattcgaagcaacgcgaagaaccttacctggccttgacatgctgagaaccttccagagatggaagggtgccttcgggaactcagacacaggtgctgcatggctgtcgtcagctcgtgtcgtgagatgttgggttaagtcccgtaacgagcgcaacccttgtccttagttaccagcacattatggtgggcactctaaggagactgccggtgacaaaccggaggaaggtggggatgacgtcaagtcatcatggcccttacggccagggctacacacgtgctacaatggtcggtacagagggtcgccaagccgcgaggtggagctaatcccttaaaaccgatcgtagtccggattggagtctgcaactcgactccatgaagtcggaatcgctagtaatcgcgaatcagaacgtcgcggtgaatacgttcccgggccttgtacacaccgcccgtcacaccatgggagtgggttgcaccagaagtagctagtctaaccttcgggaggacggttaccacggtgtgattcatgactggggtg

SEQ ID NO: 2820 - DNA, 1436 bp, Pseudomonas yamanorum
attgaacgctggcggcaggcctaacacatgcaagtcgagcggtagagagaagcttgcttctcttgagagcggcggacgggtgagtaatgcctaggaatctgcctggtagtgggggataacgttcggaaacggacgctaataccgcatacgtcctacgggagaaagcaggggaccttcgggccttgcgctatcagatgagcctaggtcggattagctagttggtggggtaatggctcaccaaggcgacgatccgtaactggtctgagaggatgatcagtcacactggaactgagacacggtccagactcctacgggaggcagcagtggggaatattggacaatgggcgaaagcctgatccagccatgccgcgtgtgtgaagaaggtcttcggattgtaaagcactttaagttgggaggaagggcagtaaattaatactttgctgttttgacgttaccgacagaataagcaccggctaactctgtgccagcagccgcggtaatacagagggtgcaagcgttaatcggaattactgggcgtaaagcgcgcgtaggtggttcgttaagttggatgtgaaatccccgggctcaacctgggaactgcattcaaaactgacgagctagagtatggtagagggtggtggaatttcctgtgtagcggtgaaatgcgtagatataggaaggaacaccagtggcgaaggcgaccacctggactgatactgacactgaggtgcgaaagcgtggggagcaaacaggattagataccctggtagtccacgccgtaaacgatgtcaactagccgttgggagccttgagctcttagtggcgcagctaacgcattaagttgaccgcctggggagtacggccgcaaggttaaaactcaaatgaattgacgggggcccgcacaagcggtggagcatgtggtttaattcgaagcaacgcgaagaaccttaccaggccttgacatccaatgaactttctagagatagattggtgccttcgggaacattgagacaggtgctgcatggctgtcgtcagctcgtgtcgtgagatgttgggttaagtcccgtaacgagcgcaacccttgtccttagttaccagcacgtaatggtgggcactctaaggagactgccggtgacaaaccggaggaaggtggggatgacgtcaagtcatcatggcccttacggcctgggctacacacgtgctacaatggtcggtacagagggttgccaagccgcgaggtggagctaatcccagaaaaccgatcgtagtccggatcgcagtctgcaactcgactgcgtgaagtcggaatcgctagtaatcgcgaatcagaatgtcgcggtgaatacgttcccgggccttgtacacaccgcccgtcacaccatgggagtgggttgcaccagaagtagctagtctaaccttcgggaggacggttacca

SEQ ID NO: 2821 - DNA, 1459 bp, Pseudomonas zeshuii
attgaacgctggcggcaggcctaacacatgcaagtcgagcggatgaggagagcttgctctctgattcagcggcggacgggtgagtaatgcctaggaatctgcctggtagtgggggacaacgtttcgaaaggaacgctaataccgcatacgtcctacgggagaaagtgggggatcttcggacctcacgctatcagatgagcctaggtcggattagctagttggtggggtaacggctcaccaaggcgacgatccgtaactggtctgagaggatgatcagtcacactggaactgagacacggtccagactcctacgggaggcagcagtggggaatattggacaatgggcgaaagcctgatccagccatgccgcgtgtgtgaagaaggccctcgggtcgtaaagcactttaagctgggaggaagggttgtaacctaatacgttgcagctttgacgttaccagcagaataagcaccggctaactctgtgccagcagccgcggtaatacagagggtgcaagcgttaatcggaattactgggcgtaaagcgcgcgtaggtggcttggtaagttgaatgtgaaatccccgggctcaacctgggaactgcatccaaaactgcctggctagagtacggtagagggtggtggaatttcctgtgtagcggtgaaatgcgtagatataggaaggaacaccagtggcgaaggcgaccacctggactgatactgacactgaggtgcgaaagcgtggggagcaaacaggattagataccctggtagtccacgccgtaaacgatgtcaactagccgttggggtccttgagactttagtggcgcagctaacgcaataagttgaccgcctggggagtacggccgcaaggttaaaactcaaatgaattgacgggggcccgcacaagcggtggagcatgtggtttaattcgaagcaacgcgaagaaccttaccaggccttgacatgcagagaactttccagagatggagaggtgccttcgggagctctgacacaggtgctgcatggctgtcgtcagctcgtgtcgtgagatgttgggttaagtcccgtaacgagcgcaacccttgtccttagttaccagcacatcatggtgggcactctaaggagactgccggtgacaaaccggaggaaggtggggatgacgtcaagtcatcatggcccttacggcctgggctacacacgtgctacaatggtcggtacaaagggttgccaaaccgcgaggtggagctaatcccataaaaccgatcgtagtccggatcgcagtctgcaactcgactgcgtgaagtcggaatcgctagtaatcgtgaatcagaacgtcacggtgaatacgttcccgggccttgtacacaccgcccgtcacaccatgggagtgggttgcaccagaagtagctagtctaaccttcgggaggacggttaccacggtgtgattcatgactggggtg

SEQ ID NO: 2822 - DNA, 1403 bp, Pseudomonas zhaodongensis
catgcagtcgagcggatgaatggagcttgctccatgattcagcggcggacgggtgagtaatgcctaggaatctgcctattagtgggggacaacgtttcgaaaggaacgctaataccgcatacgtcctacgggagaaagcaggggaccttcgggccttgcgctaatagatgagcctaggtcggattagctagttggtgaggtaatggctcaccaaggcgacgatccgtaactggtctgagaggatgatcagtcacactggaactgagacacggtccagactcctacgggaggcagcagtggggaatattggacaatgggcgaaagcctgatccagccatgccgcgtgtgtgaagaaggtcttcggattgtaaagcactttaagttgggaggaagggcattaacctaatacgttagtgttttgacgttaccgacagaataagcaccggctaacttcgtgccagcagccgcggtaatacgaagggtgcaagcgttaatcggaattactgggcgtaaagcgcgcgtaggtggtttgttaagttggatgtgaaagccccgggctcaacctgggaactgcatccaaaactggcaagctagagtatggcagagggtggtggaatttcctgtgtagcggtgaaatgcgtagatataggaaggaacaccagtggcgaaggcgaccacctgggctaatactgacactgaggtgcgaaagcgtggggagcaaacaggattagataccctggtagtccacgccgtaaacgatgtcgactagccgttgggatccttgagatcttagtggcgcagctaacgcattaagtcgaccgcctggggagtacggccgcaaggttaaaactcaaatgaattgacgggggcccgcacaagcggtggagcatgtggtttaattcgaagcaacgcgaagaaccttaccaggccttgacatgcagagaactttccagagatggattggtgccttcgggaactctgacacaggtgctgcatggctgtcgtcagctcgtgtcgtgagatgttgggttaagtcccgtaacgagcgcaacccttgtccttagttaccagcacgtaatggtgggcactctaaggagactgccggtgacaaaccggaggaaggtggggatgacgtcaagtcatcatggcccttacggcctgggctacacacgtgctacaatggtcggtacaaagggttgccaagccgcgaggtggagctaatcccataaaaccgatcgtagtccggatcgcagtctgcaactcgactgcgtgaagtcggaatcgctagtaatcgtgaatcagaatgtcacggtgaatacgttcccgggccttgtacacaccgcccgtcacaccatgggagtgggttgctccagaagtagctagtctaaccttcgcaggacggt

SEQ ID NO: 2823 - DNA, 1451 bp, Pseudopedobacter saltans
gatgaacgctagcggcaggcctaatacatgcaagtcgaacgggattcagtttaaagcttgctttaggctgatgagagtggcgaacgggtgcgtaacgcgtatgcaacctacctatcacagggggatagctcggcgaaagtcggattaacaccgcatgacatcatgatatggcatcatattatgatcaaatctgaggaggtgatagatgggcatgcgtgccattagctagttggcggggtaacggcccaccaaggcgacgatggctaggggatctgagaggattgccccccacactggtactgagacacggaccagactcctacgggaggcagcagtaaggaatattggtcaatggagggaactctgaaccagccatgccgcgtgcaggaagactgccctatgggttgtaaactgcttttgttagggaataaaccttcttacgagtaggaagctgaatgtacctaaagaataaggatcggctaactccgtgccagcagccgcggtaatacggaggatccgagcgttatccggatttattgggtttaaagggagcgtaggcggctggataagtcaggggtgaaagacggcagctcaactgtcgcagtgcccttgatactgtttggcttgaatatagttgaggtaggcggaatgtgacaagtagcggtgaaatgcatagatatgtcacagaacaccgattgcgaaggcagcttgctaagctataattgacgctgaggctcgaaagcgtgggtatcgaacaggattagataccctggtagtccacgccctaaacgatgatgactcgatgttagcgatataccgttagcgtccaagcgaaagcgttaagtcatccacctggggagtacgtccgcaagggtgaaactcaaaggaattgacgggggcccgcacaagcggaggagcatgtggtttaattcgatgatacgcgaggaaccttacccgggcttgaaagttactgaatgatttagagatagatcagtccttcgggacaggaaactaggtgctgcatggctgtcgtcagctcgtgccgtgaggtgttgggttaagtcccgcaacgagcgcaacccctatgtttagttgccagcatttaaggtggggactctaaacagactgcctgcgcaagcagtgaggaaggatgggacgacgtcaagtcatcatggcccttacgtccggggctacacacgtgctacaatggtcggtacagagggctgctacctggcaacaggatgccaatctcaaaaagccgatcacagttcggatcggagcctgcaactcggctccgtgaagttggattcgctagtaatcgcgtatcagcaatgacgcggtgaatacgttcccgggccttgtacacaccgcccgtcaagccatggaaattgggggtgcctaaagtccgtaaccgcaaggagcggcctagggtaaaaccgataactggggct

SEQ ID NO: 2824 - DNA, 1453 bp, Pseudorhodoferax soli
attgaacgctggcggcatgccttacacatgcaagtcgaacggcagcacgggagcaatcctggtggcgagtggcgaacgggtgagtaatatatcggaacgtgcccagtcgtgggggataacgcagcgaaagctgtgctaataccgcatacgatctatggatgaaagcgggggatcgcaagacctcgcgcgattggagcggccgatatcagattaggtagttggtggggtaaaggctcaccaagccgacgatctgtagctggtctgagaggacgaccagccacactggaactgagacacggtccagactcctacgggaggcagcagtggggaattttggacaatgggcgcaagcctgatccagcaatgccgcgtgcaggatgaaggccttcgggttgtaaactgcttttgtacggaacgaaaaggctctggttaatacctggggcccatgacggtaccgtaagaataagcaccggctaactacgtgccagcagccgcggtaatacgtagggtgcgagcgttaatcggaattactgggcgtaaagcgtgcgcaggcggtaatgcaagacagatgtgaaatccccgggcttaacctgggaactgcatttgtgactgcattgctggagtgcggcagagggggattgaattccgcgtgtagcagtgaaatgcgtagatatgcggaggaacaccgatggcgaaggcaatcccctgggcctgcactgacgctcatgcacgaaagcgtggggagcaaacaggattagataccctggtagtccacgccctaaacgatgtcaactggttgttgggtcttaactgactcagtaacgaagctaacgcgtgaagttgaccgcctggggagtacggccgcaaggttgaaactcaaaggaattgacggggacccgcacaagcggtggatgatgtggtttaattcgatgcaacgcgaaaaaccttacccacctttgacatgtatggaatcctttagagatgaaggagtgctcgaaagagagccataacacaggtgctgcatggctgtcgtcagctcgtgtcgtgagatgttgggttaagtcccgcaacgagcgcaacccttgccattagttgctacgaaagggcactctaatgggactgccggtgataaaccggaggaaggtggggatgacgtcaagtcctcatggcccttataggtggggctacacacgtcatacaatggctggtacaaagggttgccaacccgcgagggggagctaatcccataaaaccagtcgtagtccggatcgcagtctgcaactcgactgcgtgaagtcggaatcgctagtaatcgtggatcagaatgtcacggtgaatacgttcccgggtcttgtacacaccgcccgtcacaccatgggagcgggttctgccagaagtagttagcctaaccgcaaggagggcgattaccacggcagggttcgtgattggggtg

SEQ ID NO: 2825 - DNA, 1406 bp, Pseudovibrio axinellae
aacgaacgctggcggcaggcctaacacatgcaagtcgaacgattccttcgggaatagtggcagacgggtgagtaacgcgtgggaaattaccttatggtagggaacaacagttggaaacgactgctaataccctatgtgccctacgggggaaagatttatcgccataagatgtgcccgcgttagattagctagttggtgaggtaagagctcaccaaggcgacgatctatagctggtctgagaggatgatcagccacactgggactgagacacggcccagactcctacgggaggcagcagtggggaatattggacaatgggggcaaccctgatccagccatgccgcgtgtgtgatgacggccttagggttgtaaagcactttcagcagtgaagataatgacattaactgcagaagaagccccggctaacttcgtgccagcagccgcggtaatacgaagggggctagcgttgttcggaatcactgggcgtaaagagtacgtaggcggactaataagttaggggtgaaatcccaaggctcaaccttggaactgcctttaatactgttagtcttgagatcgagagaggtgagtggaactccgagtgtagaggtgaaattcgtagatattcggaagaacaccagtggcgaaggcggctcactggctcgatactgacgctgaggtacgaaagcgtggggagcaaacaggattagataccctggtagtccacgccgtaaacgatgaatgctagttgtcaggtagcttgctatttggtgacgcagctaacgcattaagcattccgcctggggagtacggtcgcaagattaaaactcaaaggaattgacgggggcccgcacaagcggtggagcatgtggtttaattcgaagcaacgcgcagaaccttaccagcccttgacatttgacgctacatcgggagaccgatggttcccttcggggacgtcaggacaggtgctgcatggctgtcgtcagctcgtgtcgtgagatgttgggttaagtcccgcaacgagcgcaaccctcgcccttagttgccagcatttagttgggcactctagggggactgccggtgataagccggaggaaggtggggatgacgtcaagtcctcatggcccttacgggctgggctacacacgtgctacaatggcggtgacagtgggcagcgacctcgcgaggggtagctaatctctaaaagccgtctcagttcggattgttctctgcaactcgagagcatgaagttggaatcgctagtaatcgcgtaacagcatgacgcggtgaatacgttcccgggccttgtacacaccgcccgtcacaccatgggagttggttttacccgaaggcgctgcgctaacccgtaaggggggcaggcgaccacggtagggtcagcgactggggtg

SEQ ID NO: 2826 - DNA, 1404 bp, Pseudovibrio denitrificans
aacgaacgctggcggcaggcctaacacatgcaagtcgaacggatccttcgggattagtggcagacgggtgagtaacgcgtgggaagctaccttgtggtagggaacaacagttggaaacgactgctaataccctatgagccctatgggggaaagatttatcgccatgagatgtgcccgcgttagattagctagttggtaaggtaatggcttaccaaggcgacgatctatagctggtctgagaggatgatcagccacactgggactgagacacggcccagactcctacgggaggcagcagtggggaatattggacaatgggggcaaccctgatccagccatgccgcgtgagtgatgacggccttagggttgtaaagctctttcagcagtgaagataatgacattaactgcagaagaagccccggctaacttcgtgccagcagccgcggtaatacgaagggggctagcgttgttcggaatcactgggcgtaaagcgtacgtaggcggactgatcagtcaggggtgaaatcccggggctcaaccccggaactgcctttgatactgtcagtcttgagatcgagagaggtgagtggaactccgagtgtagaggtgaaattcgtagatattcggaagaacaccagtggcgaaggcggctcactggctcgatactgacgctgaggtacgaaagcgtggggagcaaacaggattagataccctggtagtccacgccgtaaacgatgaatgctagttgtcaggtagcttgctatttggtgacgcagctaacgcattaagcattccgcctggggagtacggtcgcaagattaaaactcaaaggaattgacgggggcccgcacaagcggtggagcatgtggtttaattcgaagcaacgcgcagaaccttaccagcccttgacatttggcgctacaaccggagacggttggttcccttcggggacgtcaggacaggtgctgcatggctgtcgtcagctcgtgtcgtgagatgttgggttaagtcccgcaacgagcgcaaccctcgcccttagttgccagcatttagttgggcactctagggggactgccggtgataagccggaggaaggtggggatgacgtcaagtcctcatggcccttacgggctgggctacacacgtgctacaatggcggtgacagtgggcagcgacctcgcgaggggaagctaatctccaaaagccgtctcagttcggattgttctctgcaactcgagagcatgaagttggaatcgctagtaatcgcgtaacagcatgacgcggtgaatacgttcccgggccttgtacacaccgcccgtcacaccatgggagttggttttacccgaaggcgctgtgctaaccgcaaggaggcaggcgaccacggtagggtcagcgactggggtg

SEQ ID NO: 2827 - DNA, 1467 bp, Pseudoxanthomonas dokdonensis
agtgaacgctggcggtaggcctaacacatgcaagtcgaacggcagcacaggagagcttgctctctgggtggcgagtggcggacgggtgaggaatacatcggaatctaccttttcgtgggggataacgtagggaaacttacgctaataccgcatacgacctacgggtgaaagtgggggaccttcgggcctcacgcggatagatgagccgatgtcggattagctagttggaggggtaatggcccaccaaggcgacgatccgtagctggtctgagaggatgatcagccacactggaactgagacacggtccagactcctacgggaggcagcagtggggaatattggacaatgggcgcaagcctgatccagccataccgcgtgggtgaagaaggccttcgggttgtaaagcccttttgttgggaaagaaaagcagtcgattaatactcgattgttctgacggtacccaaagaataagcaccggctaacttcgtgccagcagccgcggtaatacgaagggtgcaagcgttactcggaattactgggcgtaaagcgtgcgtaggtggttgtttaagtctgctgtgaaagccctgggctcaacctgggaattgcagtggatactgggcgactagagtgtggtagaggatagtggaatttccggtgtagcagtgaaatgcgtagagatcggaaggaacatctgtggcgaaggcgactatctgggccaacactgacactgaggcacgaaagcgtggggagcaaacaggattagataccctggtagtccacgccctaaacgatgcgaactggatgttgggcacaacttggtgcccagtatcgaagctaacgcgttaagttcgccgcctggggagtacggtcgcaagactgaaactcaaaggaattgacgggggcccgcacaagcggtggagtatgtggtttaattcgatgcaacgcgaagaaccttacctggtcttgacatctagcgaactttccagagatggattggtgccttcgggaacgctaagacaggtgctgcatggctgtcgtcagctcgtgtcgtgagatgttgggttaagtcccgcaacgagcgcaacccttgtccttagttgccagcacgtaatggtgggaactctaaggagaccgccggtgacaaaccggaggaaggtggggatgacgtcaagtcatcatggcccttacgaccagggctacacacgtactacaatggttaggacagagggctgcaaacccgcgagggcaagccaatcccagaaacctaatctcagtccggattggagtctgcaactcgactccatgaagtcggaatcgctagtaatcgcagatcagcattgctgcggtgaatacgttcccgggccttgtacacaccgcccgtcacaccatgggagtttgttgcaccagaagcaggtagcttaaccttcgggagggcgcttgccacggtgtggccgatgactggggtg

SEQ ID NO: 2828 - DNA, 1467 bp, Pseudoxanthomonas indica
agtgaacgctggcggtaggcctaacacatgcaagtcgaacggcagcacaggagagcttgctctctgggtggcgagtggcggacgggtgaggaatacatcggaatctaccttgtcgtgggggataacgtagggaaacttacgctaataccgcatacgaccttcgggtgaaagtgggggaccgcaaggcctcacgcgattagatgagccgatgtcggattagctagttggcggggtaaaagcccaccaaggcgacgatccgtagctggtctgagaggatgatcagccacactggaactgagacacggtccagactcctacgggaggcagcagtggggaatattggacaatgggcgcaagcctgatccagccataccgcgtgggtgaagaaggccttcgggttgtaaagcccttttgttgggaaagaaatcctgtcgattaatacttggcggggatgacggtacccaaagaataagcaccggctaacttcgtgccagcagccgcggtaatacgaagggtgcaagcgttactcggaattactgggcgtaaagcgtgcgtaggtggtggtttaagtctgctgtgaaagccctgggctcaacctgggaattgcagtggatactgggtcactagagtgtggtagagggatgcggaatttccggtgtagcagtgaaatgcgtagagatcggaaggaacatccgtggcgaaggcggcatcctgggccaacactgacactgaggcacgaaagcgtggggagcaaacaggattagataccctggtagtccacgccctaaacgatgcgaactggatgttgggtgcaacttggcacccagtatcgaagctaacgcgttaagttcgccgcctggggagtacggtcgcaagactgaaactcaaaggaattgacgggggcccgcacaagcggtggagtatgtggtttaattcgatgcaacgcgaagaaccttacctggccttgacatgtcgcgaactttccagagatggattggtgccttcgggaacgcgaacacaggtgctgcatggctgtcgtcagctcgtgtcgtgagatgttgggttaagtcccgcaacgagcgcaacccttgtccttagttgccagcacgtaatggtgggaactctaaggagaccgccggtgacaaaccggaggaaggtggggatgacgtcaagtcatcatggcccttacggccagggctacacacgtactacaatgggaaggacagagggctgcaaacccgcgagggcaagccaatcccagaaaccttctctcagtccggattggagtctgcaactcgactccatgaagtcggaatcgctagtaatcgcagatcagcattgctgcggtgaatacgttcccgggccttgtacacaccgcccgtcacaccatgggagtttgttgcaccagaagcaggtagcttaaccttcgggagggcgcttgccacggtgtggccgatgactggggtg

SEQ ID NO: 2829 - DNA, 1468 bp, Pseudoxanthomonas spadix
gaacgctggcggtaggcctaacacatgcaagtcgaacggcagcacagtaagagcttgctcttatgggtggcgagtggcggacgggtgaggaatacatcggaatctaccttttggtgggggataacgtagggaaacttacgctaataccgcatacgcccttcgggggaaagccggggaccagcaatggcctggtgctgatagatgagccgatgtcggattagctagttggtgaggtaatggctcaccaaggcgacgatccgtagctggtctgagaggatgatcagccacactggaactgagacacggtccagactcctacgggaggcagcagtggggaatattggacaatgggcgcaagcctgatccagccataccgcgtgggtgaagaaggccttcgggttgtaaagcccttttgttgggaaagaaaagcattcggttaatacccgggtgttctgacggtacccaaagaataagcaccggctaacttcgtgccagcagccgcggtaatacgaagggtgcaagcgttactcggaattactgggcgtaaagcgtgcgtaggtggtggtttaagtccgttgtgaaagccctgggctcaacctgggaattgcagtggatactgggtcactagagtgtggtagaggatagtggaatttccggtgtagcagtgaaatgcgtagagatcggaaggaacatctgtggcgaaggcgactatctgggccaacactgacactgaggcacgaaagcgtggggagcaaacaggattagataccctggtagtccacgccctaaacgatgcgaactggatgttgggttcaacttggaacccagtatcgaagctaacgcgttaagttcgccgcctggggagtacggtcgcaagactgaaactcaaaggaattgacgggggcccgcacaagcggtggagtatgtggtttaattcgatgcaacgcgaagaaccttacctggtcttgacatccacggaactttccagagatggattggtgccttcgggaaccgtgagacaggtgctgcatggctgtcgtcagctcgtgtcgtgagatgttgggttaagtcccgcaacgagcgcaacccttgtccttagttgccagcacgtaaaggtgggaactctaaggagaccgccggtgacaaaccggaggaaggtggggatgacgtcaagtcatcatggcccttacgaccagggctacacacgtactacaatggtcaggacagagggctgcaagccggcgacggtgagccaatcccagaaacctgatctcagtccggattggagtctgcaactcgactccatgaagtcggaatcgctagtaatcgcagatcagcattgctgcggtgaatacgttcccgggccttgtacacaccgcccgtcacaccatgggagtttgttgcaccagaagcaggtagcttaaccgcaaggagggcgcttgccacggtgtggccgatgactggggtg

SEQ ID NO: 2830 - DNA, 1467 bp, Pseudoxanthomonas suwonensis
agagaacgctggcggtaggcctaacacatgcaagtcgaacggcagcacaggagagcttgctctctgggtggcgagtggcggacaggtgaggaatacatcggaatctactctgtcgtgggggataacgtagggaaacttacgctaataccgcatacgacctacgggtgaaagtgggggaccgcaaggcctcacgcgatagaatgagccgatgtcggattagctagttggcggggtaaaggcccaccaaggcgacgatccgtagctggtctgagaggatgatcagccacactggaactgagacacggtccagactcctacgggaggcagcagtggggaatattggacaatgggcgcaagcctgatccagccataccgcgtgagtgaagaaggccctcgggttgtaaagctcttttgttgggaaagaaatcctgttggctaatacccggcagggatgacggtacccaaagaataagcaccggctaacttcgtgccagcagccgcggtaatacgaagggtgcaagcgttactcggaattactgggcgtaaagcgtgcgtaggtggtggtttaagtctgttgtgaaagccctgggctcaacctgggaattgcagtggatactggatcactagagtgtggtagagggtggcggaattcccggtgtagcagtgaaatgcgtagagatcgggaggaacatccgtggcgaaggcggccacctgggccaacactgacactgaggcacgaaagcgtggggagcaaacaggattagataccctggtagtccacgccctaaacgatgcgaactggatgttgggttcaacttggaacccagtatcgaagctaacgcgttaagttcgccgcctggggagtacggtcgcaagactgaaactcaaaggaattgacgggggcccgcacaagcggtggagtatgtggtttaattcgatgcaacgcgaagaaccttacctggtcttgacatccacggaactttccagagatggattggtgccttcgggaaccgtgagacaggtgctgcatggctgtcgtcagctcgtgtcgtgagatgttgggttaagtcccgcaacgagcgcaacccttgtccttagttgccagcacgtaatggtgggaactctaaggagaccgccggtgacaaaccggaggaaggtggggatgacgtcaagtcatcatggcccttacgaccagggctacacacgtactacaatggtggggacagagggctgcaatcccgcgagggtgagccaatcccagaaaccccatctcagtccggattggagtctgcaactcgactccatgaagtcggaatcgctagtaatcgcagatcagcattgctgcggtgaatacgttcccgggccttgtacacaccgcccgtcacaccatgggagtttgttgcaccagaagcaggtagcttaaccttcgggagggcgcttgccacggtgtggccgatgactggggtg

SEQ ID NO: 2831 - DNA, 1469 bp, Pseudoxanthomonas taiwanensis
  misc_feature (621)..(621): n is a, c, g, or t
agtgaacgctggcggcaggcctaacacatgcaagtcgaacggcagcgggtaggaagcttgcttcctatgccggcgagtggcggacgggtgaggaacacatcggaatctactccgtcgtgggggataacgtagggaaacttacgctaataccgcatacgacctaagggtgaaagtgggggaccgcaaggcctcacgcgatggaatgagccgatgtccgattagctagttggcggggtaaaggcccaccaaggcgacgatcggtagctggtctgagaggatgatcagccacactgggactgagacacggcccagactcctacgggaggcagcagtggggaatattggacaatgggcgaaagcctgatccagccatgccgcgtgggtgaagaaggccttcgggttgtaaagcccttttgttggggaagaaatcctgctggctaatacccggcggggatgacggtacccaaagaataagcaccggctaacttcgtgccagcagccgcggtaatacgaagggtgcaagcgttactcggaattactgggcgtaaagcgtgcgtaggtggtggcttaagtccgttgtgaaagccctgggctcaacctgggaattgcagtggatactgngtcactagagtgtggtagagggtggcggaattcccggtgtagcagtgaaatgcgtagagatcgggaggaacacccgtggcgaaggcggccacctgggccaacactgacactgaggcacgaaagcgtggggagcaaacaggattagataccctggtagtccacgccctaaacgatgcgaactggatgttgggttcaatttgggactcagtatcgaagctaacgcgttaagttcgccgcctggggagtacggtcgcaagactgaaactcaaaggaattgacgggggcccgcacaagcggtggagtatgtggtttaattcgatgcaacgcgaagaaccttacctggtcttgacatccgcggaactgcccagagatgggcgggtgccttcgggagccgcgagacaggtgctgcatggctgtcgtcagctcgtgtcgtgagatgttgggttaagtcccgcaacgagcgcaacccttgtccttagttgccagcacgtaatggtgggaactctaaggagaccgccggtgacaaaccggaggaaggtggggatgacgtcaagtcatcatggcccttacgaccagggctacacacgtactacaatggtggggacagagggctgcgaacccgcgagggggagccaatcccagaaaccccatctcagtccggattggagtctgcaactcgactccatgaagtcggaatcgctagtaatcgcagatcagcattgctgcggtgaatacgttcccgggccttgtacacaccgcccgtcacaccatgggagttggttgcaccagaagcaggtagcttaaccgcaaggagggcgcttgccacggtgtggccaatgactggggtg

SEQ ID NO: 2832 - DNA, 1426 bp, Pseudoxanthomonas wuyuanensis
ctacacatgcaagtcgaacggcagcacaggagagcttgctctctgggtggcgagtggcggacgggtgaggaatacatcggaatctacctagtcgtgggggataacgtagggaaacttacgctaataccgcatacgacctacgggtgaaagtgggggaccttcgggcctcacgcgattagatgagccgatgtcggattagctagttggaggggtaatggcccaccaaggcgacgatccgtagctggtctgagaggatgatcagccacactggaactgagacacggtccagactcctacgggaggcagcagtggggaatattggacaatgggcgcaagcctgatccagccataccgcgtgggtgaagaaggccttcgggttgtaaagcccttttgttgggaaagaaatcctattgattaatactcggtggggatgacggtacccaaagaataagcaccggctaacttcgtgccagcagccgcggtaatacgaagggtgcaagcgttactcggaattactgggcgtaaagcgtgcgtaggtggttgtttaagtctgctgtgaaagccctgggctcaacctgggaattgcagtggatactgggcgactagagtgtggtagaggatagtggaatttccggtgtagcagtgaaatgcgtagagatcggaaggaacatctgtggcgaaggcgactatctgggccaacactgacactgaggcacgaaagcgtggggagcaaacaggattagataccctggtagtccacgccctaaacgatgcgaactggatgttgggtgcaacttggcacccagtatcgaagctaacgcgttaagttcgccgcctggggagtacggtcgcaagactgaaactcaaaggaattgacgggggcccgcacaagcggtggagtatgtggtttaattcgatgcaacgcgaagaaccttacctggtcttgacatccacggaactttccagagatggattggtgccttcgggaaccgtgagacaggtgctgcatggctgtcgtcagctcgtgtcgtgagatgttgggttaagtcccgcaacgagcgcaacccttgtccttagttgccagcacgtaatggtgggaactctaaggagaccgccggtgacaaaccggaggaaggtggggatgacgtcaagtcatcatggcccttacgaccagggctacacacgtactacaatggtgaggacagagggctgcaaacccgcgagggcaagccaatcccagaaacctcatctcagtccggattggagtctgcaactcgactccatgaagtcggaatcgctagtaatcgcagatcagcattgctgcggtgaatacgttcccgggccttgtacacaccgcccgtcacaccatgggagtttgttgcaccagaagcaggtagcttaaccttcgggagggcgcttgccacgg

SEQ ID NO: 2833 - DNA, 1475 bp, Psychrobacillus insolitus
gacgaacgctggcggcatgcctaatacatgcaagtcgagcgaatgatgaagaagcttgcttcttctgatttagcggcggacgggtgagtaacacgtgggcaacctgccctgtagattgggataactccgggaaaccggggctaataccgaataatccatttcctctcatggggaaatgttaaaagacggtttcggctgtcactacaggatgggcccgcggcgcattagctagttggtgaggtaacggctcaccaaggcgacgatgcgtagccgacctgagagggtgatcggccacactgggactgagacacggcccagactcctacgggaggcagcagtagggaatcttccacaatggacgaaagtctgatggagcaatgccgcgtgagtgaagaaggttttcggatcgtaaaactctgttgtgagggaagaacaactccgcgagtaactgctcgtaccttgacggtacctcattagaaagccacggctaactacgtgccagcagccgcggtaatacgtaggtggcaagcgttgtccggaattattgggcgtaaagcgcgcgcaggcggtcctttaagtctgatgtgaaatcccacggctcaaccgtggaaggtcattggaaactgggggacttgagtacagaagaggaaagtggaattccaagtgtagcggtgaaatgcgtagagatttggaggaacaccagtggcgaaggcgactttctggtctgtaactgacgctgaggcgcgaaagcgtggggagcaaacaggattagataccctggtagtccagggcgtaaacgatgagtgctaagtgttagggggtttccgccccttagtgctgcagctaacgcattaagcactccgcctggggagtacggtcgcaagactgaaactcaaaggaattgacgggggcccgcacaagcggtggagcatgtggtttaattcgaagcaacgcgaagaaccttaccaggtcttgacatcccactgaccggtctagagatagatctttcccttcggggacagtggtgacaggtggtgcatggttgtcgtcagctcgtgtcgtgagatgttgggttaagtcccgcaacgagcgcaacccttgatcttagttgccagcattcagttgggcactctaaggtgactgccggtgataaaccggaggaaggtggggatgacgtcaaatcatcatgccccttatgacctgggctacacacgtgctacaatggacggtacagagggtcgcaaccccgcgagggtgagctaatcccataaaaccgttctcagttcggattgtaggctgcaactcgcctacatgaagccggaatcgctagtaatcgtggatcagcatgccacggtgaggggttcccgggccttgtacacaccgcccgtcacaccacgagagtttgtaacacccgaagtcggtggggtaacccttacgggagccagccgccgaaggtgggacagatgattggggtg

SEQ ID NO: 2834 - DNA, 1476 bp, Psychrobacillus lasiicapitis
gacgaacgctggcggcgtgcctaatacatgcaagtcgagcgaatgatgaagaagcttgcttcttctgatttagcggcggacgggtgagtaacacgtgggcaacctgccctgtagattgggataactccgggaaaccggggctaataccgaataatccattccctcacatgtgggaatgttaaaagacggtttcgactgtcactacaggatgggcccgcggcgcattagctagttggtgaggtaacggctcaccaaggcgacgatgcgtagccgacctgagagggtgatcggccacactgggactgagacacggcccagactcctacgggaggcagcagtagggaatcttccacaatggacgaaagtctgatggagcaacgccgcgtgagtgaagaaggttttcggatcgtaaaactctgttgtgagggaagaacaagtacgagagtaactgctcgtaccttgacggtacctcattagaaagccacggctaactacgtgccagcagccgcggtaatacgtaggtggcaagcgttgtccggaattattgggcgtaaagcgcgcgcaggcggtcctttaagtctgatgtgaaagcccacggctcaaccgtggaaggtcattggaaactgggggacttgagtgcagaagaggaaagtggaattccaagtgtagcggtgaaatgcgtagagatttggaggaacaccagtggcgaaggcgactttctggtctgtaactgacgctgaggcgcgaaagcgtggggagcaaacaggattagataccctggtagtccacgccgtaaacgatgagtgctaagtgttagggggtttccgccccttagtgctgcagctaacgcattaagcactccgcctggggagtacggtcgcaagactgaaactcaaaggaattgacgggggcccgcacaagcggtggagcatgtggtttaattcgaagcaacgcgaagaaccttaccaggtcttgacatcccgctgaccgctctagagatagagttttcccttcggggacagcggtgacaggtggtgcatggttgtcgtcagctcgtgtcgtgagatgttgggttaagtcccgcaacgagcgcaacccttgatcttagttgccagcattcagttgggcactctaaggtgactgccggtgataaaccggaggaaggtggggatgacgtcaaatcatcatgccccttatgacctgggctacacacgtgctacaatggacggtacagagggtcgcaaccccgcgagggtgagctaatcccataaaaccgttctcagttcggattgtaggctgcaactcgcctacatgaagccggaatcgctagtaatcgtggatcagcatgccacggtgaatacgttcccgggccttgtacacaccgcccgtcacaccacgagagtttgtaacacccgaagtcggtggggtaacccttacgggagccagccgccgaaggtgggacagatgattggggtg

SEQ ID NO: 2835 - DNA, 1477 bp, Psychrobacillus psychrodurans
gacgaacgctggcggcatgcctaatacatgcaagtcgagcgaatgacgaagaagcttgcttcttctgatttagcggcggacgggtgagtaacacgtgggcaacctgccctgtagattgggataactccgggaaaccggggctaataccgaataatccatttcctcacatggggagatgttaaaagacggcatctcgctgtcactacaggatgggcccgcggcgcattagctagttggtgaggtaacggctcaccaaggcgacgatgcgtagccgacctgagagggtgatcggccacactgggactgagacacggcccagactcctacgggaggcagcagtagggaatcttccacaatggacgaaagtctgatggagcaatgccgcgtgagtgaagaaggttttcggatcgtaaaactctgttgtgagggaagaacaagtacgagagtaactgctcgtaccttgacggtacctcattagaaagccacggctaactacgtgccagcagccgcggtaatacgtaggtggcaagcgttgtccggaattattgggcgtaaagcgcgcgcaggcggtcctttaagtctgatgtgaaatcccacggctcaaccgtggaaggtcattggaaactgggggacttgagtacagaagaggaaagcggaattccaagtgtagcggtgaaatgcgtagagatttggaggaacaccagtggcgaaggcggctttctggtctgtaactgacgctgaggcgcgaaagcgtggggagcaaacaggattagataccctggtagtccacgccgtaaacgatgagtgctaagtgttagggggtttccgccccttagtgctgcagctaacgcattaagcactccgcctggggagtacggtcgcaagactgaaactcaaaggaattgacgggggcccgcacaagcggtggagcatgtggtttaattcgaagcaacgcgaagaaccttaccaggtcttgacatcccgctgaccggcctagagataggcttttcccttcggggacagcggtgacaggtggtgcatggttgtcgtcagctcgtgtcgtgagatgttgggttaagtcccgcaacgagcgcaacccttgatcttagttgccagcattcagttgggcactctaaggtgactgccggtgataaaccggaggaaggtggggatgacgtcaaatcatcatgccccttatgacctgggctacacacgtgctacaatggacggtacagagggtcgcaaccccgcgagggtgagcaaatcccataaaaccgttctcagttcggattgtaggctgcaactcgcctacatgaagccggaatcgctagtaatcgtggatcagcatgccacggtgaatacgttcccgggccttgtacacaccgcccgtcacaccacgagagtttgtaacacccgaagtcggtggggtaacccttacgggagccagccgccgaaggtgggacagatgattggggtg

SEQ ID NO: 2836 - DNA, 1290 bp, Psychrobacillus soli
taatccatttcctcacatgaggaaatgttaaaagacggtctcggctgtcactacaggatgggcccgcggcgcattagctagttggtggggtaatggctcaccaaggcgacgatgcgtagccgacctgagagggtgatcggccacactgggactgagacacggcccagactcctacgggaggcagcagtagggaatcttccacaatggacgaaagtctgatggagcaacgccgcgtgagtgaagaaggttttcggatcgtaaaactctgttgtgagggaagaacaagtacgagagtaactgctcgtaccttgacggtacctcattagaaagccacggctaactacgtgccagcagccgcggtaatacgtaggtggcaagcgttgtccggaattattgggcgtaaagcgcgcgcaggcggtcctttaagtctgatgtgaaagcccacggctcaaccgtggaaggtcattggaaactgggggacttgagtgcagaagaggaaagtggaattccaagtgtagcggtgaaatgcgtagagatttggaggaacaccagtggcgaaggcgactttctggtctgtaactgacgctgaggcgcgaaagcgtggggagcaaacaggattagataccctggtagtccacgccgtaaacgatgagtgctaagtgttagggggtttccgccccttagtgctgcagctaacgcattaagcactccgcctggggagtacggtcgcaagactgaaactcaaaggaattgacgggggcccgcacaagcggtggagcatgtggtttaattcgaagcaacgcgaagaaccttaccaggtcttgacatcccgctgaccggtctagagatagatctttcccttcggggacagcggtgacaggtggtgcatggttgtcgtcagctcgtgtcgtgagatgttgggttaagtcccgcaacgagcgcaacccttgatcttagttgccagcattcagttgggcactctaaggtgactgccggtgataaaccggaggaaggtggggatgacgtcaaatcatcatgccccttatgacctgggctacacacgtgctacaatggacggtacagagggtcgcaaccccgcgagggtgagctaatcccataaaaccgttctcagttcggattgtaggctgcaactcgcctacatgaagccggaatcgctagtaatcgtggatcagcatgccacggtgaatacgttcccgggccttgtacacaccgcccgtcacaccacgagagtttgtaacacccgaagtcggtggggaaccctacggagcc

SEQ ID NO: 2837 - DNA, 1461 bp, Psychrobacter alimentarius
attgaacgctggcggcaggcttaacacatgcaagtcgagcggtaacatttctagcttgctagaagatgacgagcggcggacgggtgagtaatacttaggaatctacctagtagtgggggatagctcggggaaactcgaattaataccgcatacgacctacgggagaaagggggcaacttgttgctctcgctattagatgagcctaagtcggattagctagatggtggggtaaaggcctaccatggcgacgatctgtagctggtctgagaggatgatcagccacaccgggactgagacacggcccggactcctacgggaggcagcagtggggaatattggacaatgggggaaaccctgatccagccatgccgcgtgtgtgaagaaggccttttggttgtaaagcactttaagcagtgaagaagactcttcggttaatacctggagacgatgacattagctgcagaataagcaccggctaactctgtgccagcagccgcggtaatacagagggtgcaagcgttaatcggaattactgggcgtaaagcgagcgtaggtggcttgataagtcagatgtgaaatccccgggcttaacctgggaactgcatctgatactgtcaggctagagtaggtgagaggaaggtagaattccaggtgtagcggtgaaatgcgtagagatctggaggaataccgatggcgaaggcagccttctggcatcatactgacactgaggctcgaaagcgtgggtagcaaacaggattagataccctggtagtccacgccgtaaacgatgtctactagtcgttgggtcccttgaggacttagtgacgcagctaacgcaataagtagaccgcctggggagtacggccgcaaggttaaaactcaaatgaattgacgggggcccgcacaagcggtggagcatgtggtttaattcgatgcaacgcgaagaaccttacctggtcttgacatatctagaatcctgcagagatgcgggagtgccttcgggaattagaatacaggtgctgcatggctgtcgtcagctcgtgtcgtgagatgttgggttaagtcccgcaacgagcgcaacccttgtccttagttaccagcgggttaagccgggaactctaaggatactgccagtgacaaactggaggaaggcggggacgacgtcaagtcatcatggcccttacgaccagggctacacacgtgctacaatggtaggtacagagggcagctacacagcgatgtgatgcgaatctcaaaaagcctatcgtagtccagattggagtctgcaactcgactccatgaagtaggaatcgctagtaatcgcggatcagaatgccgcggtgaatacgttcccgggccttgtacacaccgcccgtcacaccatgggagttgattgcaccagaagtggttagcctaaccgtaaggaaggcgatcaccacggtgtggttgatgactggggtg

SEQ ID NO: 2838 - DNA, 1461 bp, Psychrobacter aquaticus
attgaacgctggcggcaggcttaacacatgcaagtcgagcggaaacgatgatagcttgctatcaggcgtcgagcggcggacgggtgagtaatacttaggaatctacctagtagtgggggatagctcggggaaactcgaattaataccgcatacgacctacgggagaaagggggcaacttgttgctctcgctattagatgagcctaagtcggattagctagatggtggggtaaaggcctaccatggcgacgatctgtagctggtctgagaggatgatcagccacaccgggactgagacacggcccggactcctacgggaggcagcagtggggaatattggacaatgggggaaaccctgatccagccatgccgcgtgtgtgaagaaggccttttggttgtaaagcactttaagcagtgaagaagactcttcggttaatacccggagacgatgacattagctgcagaataagcaccggctaactctgtgccagcagccgcggtaatacagagggtgcaagcgttaatcggaattactgggcgtaaagcgagcgtaggtggcttgataagtcagatgtgaaatccccgggcttaacctgggaactgcatctgaaactgtcaggctagagtaggtgagaggaaggtagaattccaggtgtagcggtgaaatgcgtagagatctggaggaataccgatggcgaaggcagccttctggcatcatactgacactgaggctcgaaagcgtgggtagcaaacaggattagataccctggtagtccacgccgtaaacgatgtctactagtcgttgggtcccttgaggacttagtgacgcagctaacgcaataagtagaccgcctggggagtacggccgcaaggttaaaactcaaatgaattgacgggggcccgcacaagcggtggagcatgtggtttaattcgatgcaacgcgaagaaccttacctggtcttgacatatctagaatcctgcagagatgcgggagtgccttcgggaattagaatacaggtgctgcatggctgtcgtcagctcgtgtcgtgagatgttgggttaagtcccgcaacgagcgcaacccttgtccttagttaccagcgggttaagccgggaactctaaggatactgccagtgacaaactggaggaaggcggggacgacgtcaagtcatcatggcccttacgaccagggctacacacgtgctacaatggtaggtacagagggcagctacacagcgatgtgatgcgaatctcaaaaagcctatcgtagtccagattggagtctgcaactcgactccatgaagtaggaatcgctagtaatcgcggatcagaatgccgcggtgaatacgttcccgggccttgtacacaccgcccgtcacaccatgggagttgattgcaccagaagtggatagcttaaccttcggggaggcgttcaccacggtgtggttgatgactggggtg

SEQ ID NO: 2839 - DNA, 1461 bp, Psychrobacter arcticus
attgaacgctggcggcaggcttaacacatgcaagtcgagcggaaacgatggtagcttgctaccaggcgtcgagcggcggacgggtgagtaatacttaggaatctacctagtagtgggggatagcacggggaaactcgtattaataccgcatacgacctacgggagaaagggggcagtttactgctctcgctattagatgagcctaagtcggattagctagatggtggggtaaaggcctaccatggcgacgatctgtagctggtctgagaggatgatcagccacaccgggactgagacacggcccggactcctacgggaggcagcagtggggaatattggacaatgggggaaaccctgatccagccatgccgcgtgtgtgaagaaggccttttggttgtaaagcactttaagcagtgaagaagactccatggttaatacccatggacgatgacattagctgcagaataagcaccggctaactctgtgccagcagccgcggtaatacagagggtgcaagcgttaatcggaattactgggcgtaaagggagcgtaggtggctcgataagtcagatgtgaaatccccgggctcaacctgggaactgcatctgatactgttgagctagagtatgtgagaggaaggtagaattccaggtgtagcggtgaaatgcgtagagatctggaggaataccgatggcgaaggcagccttctggcataatactgacactgaggctcgaaagcgtgggtagcaaacaggattagataccctggtagtccacgccgtaaacgatgtctactagtcgttgggtcccttgaggacttagtgacgcagctaacgcaataagtagaccgcctggggagtacggccgcaaggttaaaactcaaatgaattgacgggggcccgcacaagcggtggagcatgtggtttaattcgatgcaacgcgaagaaccttacctggtcttgacatatctagaatcctgcagagatgcgggagtgccttcgggaattagaatacaggtgctgcatggctgtcgtcagctcgtgtcgtgagatgttgggttaagtcccgcaacgagcgcaacccttgtccttagttaccagcgggttaagccgggaactctaaggatactgccagtgacaaactggaggaaggcggggacgacgtcaagtcatcatggcccttacgaccagggctacacacgtgctacaatggtaggtacagagggcagctacacagcgatgtgatgcgaatctcaaaaagcctatcgtagtccagattggagtctgcaactcgactccatgaagtaggaatcgctagtaatcgcggatcagaatgccgcggtgaatacgttcccgggccttgtacacaccgcccgtcacaccatgggagttgattgcaccagaagtggatagcttaaccttcgggaaggcgttcaccacggtgtggttgatgactggggtg

SEQ ID NO: 2840 - DNA, 1461 bp, Psychrobacter cryohalolentis
attgaacgctggcggcaggcttaacacatgcaagtcgagcggaaacgatgatagcttgctatcaggcgtcgagcggcggacgggtgagtaatacttaggaatctacctagtagtgggggatagcacggggaaactcgtattaataccgcatacgacctacgggagaaagggggcagtttactgctctcgctattagatgagcctaagtcggattagctagatggtggggtaaaggcctaccatggcgacgatctgtagctggtctgagaggatgatcagccacaccgggactgagacacggcccggactcctacgggaggcagcagtggggaatattggacaatgggggaaaccctgatccagccatgccgcgtgtgtgaagaaggccttttggttgtaaagcactttaagcagtgaagaagactcttcggttaatacccggagacgatgacattagctgcagaataagcaccggctaactctgtgccagcagccgcggtaatacagagggtgcaagcgttaatcggaattactgggcgtaaagggagcgtaggtggctcgataagtcagatgtgaaatccccgggctcaacctgggaactgcatctgatactgttgagctagagtatgtgagaggaaggtagaattccaggtgtagcggtgaaatgcgtagagatctggaggaataccgatggcgaaggcagccttctggcataatactgacactgaggctcgaaagcgtgggtagcaaacaggattagataccctggtagtccacgccgtaaacgatgtctactagtcgttgggtcccttgaggacttagtgacgcagctaacgcaataagtagaccgcctggggagtacggccgcaaggttaaaactcaaatgaattgacgggggcccgcacaagcggtggagcatgtggtttaattcgatgcaacgcgaagaaccttacctggtcttgacatatctagaatcctgcagagatgcgggagtgccttcgggaattagaatacaggtgctgcatggctgtcgtcagctcgtgtcgtgagatgttgggttaagtcccgcaacgagcgcaacccttgtccttagttaccagcgggttaagccgggaactctaaggatactgccagtgacaaactggaggaaggcggggacgacgtcaagtcatcatggcccttacgaccagggctacacacgtgctacaatggtaggtacagagggcagctacacagcgatgtgatgcgaatctcaaaaagcctatcgtagtccagattggagtctgcaactcgactccatgaagtaggaatcgctagtaatcgcggatcagaatgccgcggtgaatacgttcccgggccttgtacacaccgcccgtcacaccatgggagttgattgcaccagaagtggatagcttaaccttcgggggagcgttcaccacggtgtggttgatgactggggtg

SEQ ID NO: 2841 - DNA, 1461 bp, Psychrobacter fozii
attgaacgctggcggcaggcttaacacatgcaagtcgagcggaaacgatgatagcttgctatcaggcgtcgagcggcggacgggtgagtaatacttaggaatctacctagtagtgggggatagcacggggaaactcgtattaataccgcatacgacctacgggagaaagggggcagtttactgctctcgctattagatgagcctaagtcggattagctagatggtggggtaaaggcctaccatggcgacgatctgtagctggtctgagaggatgatcagccacaccgggactgagacacggcccggactcctacgggaggcagcagtggggaatattggacaatgggggaaaccctgatccagccatgccgcgtgtgtgaagaaggccttttggttgtaaagcactttaagcagtgaagaagactccgtggttaatacccacggacgatgacattagctgcagaataagcaccggctaactctgtgccagcagccgcggtaatacagagggtgcaagcgttaatcggaattactgggcgtaaagggagcgtaggtggctctataagtcagatgtgaaatccccgggctcaacctgggaactgcatctgaaactgtagagctagagtatgtgagaggaaggtagaattccaggtgtagcggtgaaatgcgtagagatctggaggaataccgatggcgaaggcagccttctggcataatactgacactgaggctcgaaagcgtgggtagcaaacaggattagataccctggtagtccacgccgtaaacgatgtctactagtcgttgggtcccttgaggacttagtgacgcagctaacgcaataagtagaccgcctggggagtacggccgcaaggttaaaactcaaatgaattgacgggggcccgcacaagcggtggagcatgtggtttaattcgatgcaacgcgaagaaccttacctggtcttgacatatctagaatcctgcagagatgcgggagtgccttcgggaattagaatacaggtgctgcatggctgtcgtcagctcgtgtcgtgagatgttgggttaagtcccgcaacgagcgcaacccttgtccttagttaccagcgggttaagccgggaactctaaggatactgccagtgacaaactggaggaaggcggggacgacgtcaagtcatcatggcccttacgaccagggctacacacgtgctacaatggtaggtacagagggcagctacacagcgatgtgatgcgaatctcaaaaagcctatcgtagtccagattggagtctgcaactcgactccatgaagtaggaatcgctagtaatcgcggatcagaatgccgcggtgaatacgttcccgggccttgtacacaccgcccgtcacaccatgggagttgattgcaccagaagtggatagcttaaccttcggggaggcgttcaccacggtgtggttgatgactggggtg

SEQ ID NO: 2842 - DNA, 1461 bp, Psychrobacter frigidicola
attgaacgctggcggcaggcttaacacatgcaagtcgagcggtaacatttctagcttgctagaagatgacgagcggcggacgggtgagtaatacttaggaatctacctagtagtgggggatagctcggggaaactcgaattaataccgcatacgacctacgggagaaagggggcaacttgttgctctcgctattagatgagcctaagtcggattagctagatggtggggtaaaggcctaccatggcgacgatctgtagctggtctgagaggatgatcagccacaccgggactgagacacggcccggactcctacgggaggcagcagtggggaatattggacaatgggggcaaccctgatccagccatgccgcgtgtgtgaagaaggccttttggttgtaaagcactttaagcagtgaagaagactccgtggttaatacccacggacgatgacattagctgcagaataagcaccggctaactctgtgccagcagccgcggtaatacagagggtgcaagcgttaatcggaattactgggcgtaaagggagcgtaggtggctcgataagtcagatgtgaaatccccgggcttaacctgggaactgctactgatactgttgagctagagtatgtgagaggaaggtagaattccaggtgtagcggtgaaatgcgtagagatctggaggaataccgatggcgaaggcagccttctggcataatactgacactgaggctcgaaagcgtgggtagcaaacaggattagataccctggtagtccacgccgtaaacgatgtctactagtcgttgggtcccttgaggacttagtgacgcagctaacgcaataagtagaccgcctggggagtacggccgcaaggttaaaactcaaatgaattgacgggggcccgcacaagcggtggagcgtgtggtttaattcgatgcaacgcgaagaaccttacctggtcttgacatatctagaatcctgcagagatgcgggagtgccttcgggaattagaatacaggtgctgcatggctgtcgtcagctcgtgtcgtgagatgttgggttaagtcccgcaacgagcgcaacccttgtccttagttaccagcgggttaagccgggaactctaaggatactgccagtgacaaactggaggaaggcggggacgacgtcaagtcatcatggcccttacgaccagggctacacacgtgctacaatggtaggtacagagggcagctacacagcgatgtgatgcgaatctcaaaaagcctatcgtagtccagattggagtctgcaactcgactccatgaagtaggaatcgctagtaatcgcggatcagaatgccgcggtgaatacgttcccgggccttgtacacaccgcccgtcacaccatgggagttgattgcaccagaagtggatagcctaaccttcgggaaggcgttcaccacggtgtggttgatgactggggtg

SEQ ID NO: 2843 - DNA, 1458 bp, Psychrobacter immobilis
  misc_feature (42)..(42): n is a, c, g, or t
  misc_feature (49)..(49): n is a, c, g, or t
  misc_feature (63)..(63): n is a, c, g, or t
ttgaacgctggcggcaggcttaacacatgcaagtcgagcggnaacgatnggagcttgctattngctgtcgagcggcggacgggtgagtaatacttaggaatctacctagtagtgggggatagcacggggaaactcgtattaataccgcatacgacctacgggagaaagggggcagtttactgctctcgctattagatgagcctaagtcggattagctagatggtggggtaaaggcctaccatggcgacgatctgtagctggtctgagaggatgatcagccacaccgggactgagacacggcccggactcctacgggaggcagcagtggggaatattggacaatgggggaaaccctgatccagccatgccgcgtgtgtgaagaaggccttttggttgtaaagcactttaagcagtgaagaagactccgtggttaatacccatggacgatgacattagctgcagaataagcaccggctaactctgtgccagcagccgcggtaatacagagggtgcaagcgttaatcggaattactgggcgtaaagggagcgtaggtggctctataagtcagatgtgaaatccccgggcttaacctgggaactgcatctgaaactgtagagctagagtatgtgagaggaaggtagaattccaggtgtagcggtgaaatgcgtagagatctggaggaataccgatggcgaaggcagccttctggcataatactgacactgaggctcgaaagcgtgggtagcaaacaggattagataccctggtagtccacgccgtaaacgatgtctactagtcgttgggtcccttgaggacttagtgacgcagctaacgcaataagtagtccgcctggggagtacggccgcaaggttaaaactcaaatgaattgacgggggcccgcacaagcggtggagcatgtggtttaattcgatgcaacgcgaagaaccttacctggtcttgacatatctagaatcctgcagagatgcgggagtgccttcgggaattagaatacaggtgctgcatggctgtcgtcagctcgtgtcgtgagatgttgggttaagtcccgcaacgagcgcaacccttgtccttagttaccagcgggttagccgggaactctaaggatactgccagtgacaaactggaggaaggcggggacgacgtcaagtcatcatggcccttacgaccagggctacacacgtgctacaatggtaggtacagagggcagctacacagcgatgtgatgcgaatctcaaaaagcctatcgtagtccagattggagtctgcaactcgactccatgaagtaggaatcgctagtaatcgcggtacagaatgccgcggtgaatacgttcccgggccttgtacacaccgcccgtcacaccatgggagttgattgcaccagaagtggatagcttaaccttcgggggagcgttcacacggtgtggttgatgactggggtg

SEQ ID NO: 2844 - DNA, 1449 bp, Psychrobacter lutiphocae
ggcggcaggcttaacacatgcaagtcgagcggaaacgatgggagcttgctcccaggcgtcgagcggcggacgggtgagtaacacttaggaatctgcccagtagtgggggatagctcggggaaactcgaattaataccgcatacaccctacggggaaaagggggcgcttgcgctctcgctattggatgagcctaagacggattagctagttggtggggtaaaggcctaccaaggcgacgatctgtagctggtctgagaggatgatcagccacaccgggactgagacacggcccggactcctacgggaggcagcagtggggaatattggacaatgggggcaaccctgatccagccatgccgcgtgtgtgaagaaggccttttggttgtaaagcactttaagcagtgaagaagaccttatggttaatacccataagcgatgacattagctgcagaataagcaccggctaactctgtgccagcagccgcggtaatacagagggtgcaagcgttaatcggaattactgggcgtaaagcgagcgtaggtggtttaataagtcagatgtgaaatccccgggcttaacctgggaactgcatctgatactgttaagctagagtaggtgagagggaggtagaatttcaggtgtagcggtgaaatgcgtagagatctgaaggaataccgatggcgaaggcagcctcctggcatcatactgacactgaggttcgaaagcgtgggtagcaaacaggattagataccctggtagtccacgccgtaaacgatgtctactagtcgttgggggacttgatcccttagtgacgcagctaacgcaataagtagaccgcctggggagtacggccgcaaggttaaaactcaaatgaattgacgggggcccgcacaagcggtggagcatgtggtttaattcgatgcaacgcgaagaaccttacctggtcttgacatacacagaatcttgtagagatacgagagtgccttcgggaattgtgatacaggtgctgcatggctgtcgtcagctcgtgtcgtgagatgttgggttaagtcccgcaacgagcgcaacccttttccttagttaccagcggttaggccggggactctaaggatactgccagtgacaaactggaggaaggcggggacgacgtcaagtcatcatggcccttacgaccagggctacacacgtgctacaatggtaggtacagagggcagctacacagcgatgtgatgcgaatctcaaaaagcctatcgtagtccggattggagtctgcaactcgactccatgaagtcggaatcgctagtaatcgcggatcagaatgccgcggtgaatacgttcccgggccttgtacacaccgcccgtcacaccatgggagttgattgcaccagaagtgggtagcctaaccttttagggaggcgctcaccacggtgtggtcgatgactggggtg

SEQ ID NO: 2845 - DNA, 1459 bp, Psychrobacter pacificensis
  misc_feature (75)..(75): n is a, c, g, or t
  misc_feature (175)..(175): n is a, c, g, or t
  misc_feature (347)..(347): n is a, c, g, or t
attgaacgctggcggcaggcttaacacatgcaagtcgagcggaaacgatgatagcttgctattaggcgtcgagcngcggacgggtgagtaatacttaggaatctacctagtagtgggggatagctcggggaaactcgaattaataccgcatacgtctacgggagaaagcaggggntcattagaccttgcgctattagatgagcctaagtcggattagctagatggtggggtaaaggcctaccatggcgacgatctgtagctggtctgagaggatgatcagccacaccgggactgagacacggcccggactctacgggaggcagcagtggggaatattggacaatggngggaaccctgatccagccatgccgcgtgtgtgaagaaggccttttggttgtaaagcactttaagcagtgaagaagactcttcggttaatacccggggacgatgacattagctgcagaataagcaccggctaactctgtgccagcagccgcggtaatacagagggtgcaagcgttaatcggaattactgggcgtaaagcgagcgtaggtggcttgataagtcagatgtgaaatccccgggcttaacctgggaactgcatctgaaactgttaggctagagtaggtgagagggaagtagaatttcaggtgtagcggtgaaatgcgtagagatctgaaggaataccgatggcgaaggcagcttcctggcatcatactgacactgaggctcgaaagcgtgggtagcaaacaggattagataccctggtagtccacgccgtaaacgatgtctactagtcgttgggtcccttgaggacttagtgacgcagctaacgcaataagtagaccgcctggggagtacggccgcaaggttaaaactcaaatgaattgacgggggcccgcacaagcggtggagcatgtggtttaattcgatgcaacgcgaagaaccttacctggtcttgacatacacagaatcttgtagagatacgagagtgccttcgggaattgtgatacaggtgctgcatggctgtcgtcagctcgtgtcgtgagatgttgggttaagtcccgcaacgagcgcaacccttgtccttagttaccagcacttcgggtgggaactctaaggatactgccagtgacaaactggaggaaggcggggacgacgtcaagtcatcatggcccttacgaccagggctacacacgtgctacaatggtaggtacagagggcagctacacagcgatgtgatgcgaatctcaaaaagcctatcgtagtccagattggagtctgcaactcgactccatgaagtaggaatcgctagtaatcgcggatcagaatgccgcggtgaatacgttcccgggccttgtacacaccgcccgtcacaccatgggagttgattgcaccagaagtggttagcctaacttagtgagggcgatcaccacggtgtggtcgatgactggggtg

SEQ ID NO: 2846 - DNA, 1457 bp, Psychrobacter pasteurii
attgaacgctggcggcaggcttaacacatgcaagtcgagcggaaacgatggtagcttgctaccaggcgtcgagcggcggacgggtgagtaatacttaggaatctgcccagtagtgggggatagctcggggaaactcgaattaataccgcatacaccctacggggaaaagggggcgcttgcgctctcgctattggatgagcctaagacggattagctagttggtggggtaaaggcctaccaaggcgacgatctgtagctggtctgagaggatgatcagccacaccgggactgagacacggcccggactcctacgggaggcagcagtggggaatattggacaatgggggcaaccctgatccagccatgccgcgtgtgtgaagaaggccttttggttgtaaagcactttaagcagtgaagaagacctaacggttaatacccgttagcgatgacattagctgcagaataagcaccggctaactctgtgccagcagccgcggtaatacagagggtgcaagcgttaatcggaattactgggcgtaaagcgagcgtaggtggcttgataagtcagatgtgaaatccccgggcttaacctgggaactgcatctgatactgttgggctagagtaggtgagagggaggtagaatttcaggtgtagcggtgaaatgcgtagagatctgaaggaataccgatggcgaaggcagcctcctggcatcatactgacactgaggttcgaaagcgtgggtagcaaacaggattagataccctggtagtccacgccgtaaacgatgtctactagtcgttggggaacttgattccttagtgacgcagctaacgcaataagtagaccgcctggggagtacggccgcaaggttaaaactcaaatgaattgacgggggcccgcacaagcggtggagcatgtggtttaattcgatgcaacgcgaagaaccttacctggtcttgacatatctagaatcctgcagagatgcgggagtgccttcgggaattagaatacaggtgctgcatggctgtcgtcagctcgtgtcgtgagatgttgggttaagtcccgcaacgagcgcaacccttttccttagttaccagcggtttggccggggactctaaggatactgccagtgacaaactggaggaaggcggggacgacgtcaagtcatcatggcccttacgaccagggctacacacgtgctacaatggtaggtacagagggcagctacacagcgatgtgatgcgaatctcaaaaagcctatcgtagtccagattggagtctgcaactcgactccatgaagtcggaatcgctagtaatcgcggatcagaatgccgcggtgaatacgttcccgggccttgtacacaccgcccgtcacaccatgggagttgattgcaccagaagtgggtagcctaacttttagagggcgctcaccacggtgtggttgatgactggggtg

SEQ ID NO: 2847 - DNA, 1458 bp, Psychrobacter piechaudii
attgaacgctggcggcaggcttaacacatgcaagtcgagcggtaacaggagaagcttgcttcttgctgacgagcggcggacgggtgagtaatacttaggaatctgcccagtagtgggggatagctcggggaaactcgaattaataccgcatacaccctacggggaaaagggggcactttgtgctctcgctattggatgagcctaagtcggattagctagttggtggggtaaaggcctaccaaggcgacgatctgtagctggtctgagaggatgatcagccacaccgggactgagacacggcccggactcctacgggaggcagcagtggggaatattggacaatgggggcaaccctgatccagccatgccgcgtgtgtgaagaaggccttttggttgtaaagcactttaagcagtgaagaagactctatggttaatacccatagacgatgacattagctgcagaataagcaccggctaactctgtgccagcagccgcggtaatacagagggtgcaagcgttaatcggaattactgggcgtaaagcgagcgtaggtggcttaataagtcagatgtgaaatccccgggcttaacctgggaactgcatctgatactgttaggctagagtaggtgagagggaggtagaatttcaggtgtagcggtgaaatgcgtagagatctgaaggaataccgatggcgaaggcagcctcctggcatcatactgacactgaggttcgaaagcgtgggtagcaaacaggattagataccctggtagtccacgccgtaaacgatgtctactagtcgttggggaacttgattccttagtgacgcagctaacgcaataagtagaccgcctggggagtacggccgcaaggttaaaactcaaatgaattgacgggggcccgcacaagcggtggagcatgtggtttaattcgatgcaacgcgaagaaccttacctggtcttgacatatctagaatcctgcagagatgcgggagtgccttcgggaattagaatacaggtgctgcatggctgtcgtcagctcgtgtcgtgagatgttgggttaagtcccgcaacgagcgcaacccttttccttagttaccagcggttaggccggggactctaaggatactgccagtgacaaactggaggaaggcggggacgacgtcaagtcatcatggcccttacgaccagggctacacacgtgctacaatggtaggtacagagggcagctacacagcgatgtgatgcgaatctcaaaaagcctatcgtagtccagattggagtctgcaactcgactccatgaagtcggaatcgctagtaatcgcggatcagaatgccgcggtgaatacgttcccgggccttgtacacaccgcccgtcacaccatgggagttgattgcaccagaagtgggtagcctaacttttagagggcgctcaccacggtgtggtcgatgactggggtg

SEQ ID NO: 2848 - DNA, 1457 bp, Psychrobacter piscatorii
aacgctggcggcaggcttaacacatgcaagtcgagcggaaacgatgatagcttgctatcaggcgtcgagcggcggacgggtgagtaatacttaggaatctacctagtagtgggggatagcacggggaaactcgtattaataccgcatacgtcctacgggagaaagggggcaacttgttgctctcgctattagatgagcctaagtcggattagctagatggtggggtaaaggcctaccatggcgacgatctgtagctggtctgagaggatgatcagccacaccgggactgagacacggcccggactcctacgggaggcagcagtggggaatattggacaatgggggaaaccctgatccagccatgccgcgtgtgtgaagaaggccttttggttgtaaagcactttaagcagtgaagaagactcttcggttaatacccggagacgatgacattagctgcagaataagcaccggctaactctgtgccagcagccgcggtaatacagagggtgcaagcgttaatcggaattactgggcgtaaagcgagcgtaggtggcttgataagtcagatgtgaaatccccgggcttaacctgggaactgcatctgaaactgttaggctagagtaggtgagagggaagtagaatttcaggtgtagcggtgaaatgcgtagagatctgaaggaataccgatggcgaaggcagcttcctggcatcatactgacactgaggctcgaaagcgtgggtagcaaacaggattagataccctggtagtccacgccgtaaacgatgtctactagtcgttgggtcccttgaggacttagtgacgcagctaacgcaataagtagaccgcctggggagtacggccgcaaggttaaaactcaaatgaattgacgggggcccgcacaagcggtggagcatgtggtttaattcgatgcaacgcgaagaaccttacctggtcttgacatatctagaatcctgcagagatgcgggagtgccttcgggaattagaatacaggtgctgcatggctgtcgtcagctcgtgtcgtgagatgttgggttaagtcccgcaacgagcgcaacccttgtccttagttaccagcgggttaagccgggaactctaaggatactgccagtgacaaactggaggaaggcggggacgacgtcaagtcatcatggcccttacgaccagggctacacacgtgctacaatggtaggtacagagggcagctacacagcgatgtgatgcgaatctcaaaaagcctatcgtagtccagattggagtctgcaactcgactccatgaagtaggaatcgctagtaatcgcggatcagaatgccgcggtgaatacgttcccgggccttgtacacaccgcccgtcacaccatgggagttgattgcaccagaagtggatagcttaaccgtaaggggagcgttcaccacggtgtggttgatgactggggtg

SEQ ID NO: 2849 - DNA, 1461 bp, Psychrobacter urativorans
attgaacgctggcggcaggcttaacacatgcaagtcgagcggtaacaggagaagcttgcttctcgctgacgagcggcggacgggtgagtaatacttaggaatctacctagtagtgggggatagcacggggaaactcgtattaataccgcatacgacctacgggagaaagggggcagtttactgctctcgctattagatgagcctaagtcggattagctagatggtggggtaaaggcctaccatggcgacgatctgtagctggtctgagaggatgatcagccacaccgggactgagacacggcccggactcctacgggaggcagcagtggggaatattggacaatgggggaaaccctgatccagccatgccgcgtgtgtgaagaaggccttttggttgtaaagcactttaagcagtgaagaagactccgtggttaatacccacggacgatgacattagctgcagaataagcaccggctaactctgtgccagcagccgcggtaatacagagggtgcaagcgttaatcggaattactgggcgtaaagggagcgtaggtggctcgataagtcagatgtgaaatccccgggcttaacctgggaactgcatctgatactgttgagctagagtatgtgagaggaaggtagaattccaggtgtagcggtgaaatgcgtagagatctggaggaataccgatggcgaaggcagccttctggcataatactgacactgaggctcgaaagcgtgggtagcaaacaggattagataccctggtagtccacgccgtaaacgatgtctactagtcgttgggtcccttgaggacttagtgacgcagctaacgcaataagtagaccgcctggggagtacggccgcaaggttaaaactcaaatgaattgacgggggcccgcacaagcggtggagcatgtggtttaattcgatgcaacgcgaagaaccttacctggtcttgacatatctagaatcctgcagagatgcgggagtgccttcgggaattagaatacaggtgctgcatggctgtcgtcagctcgtgtcgtgagatgttgggttaagtcccgcaacgagcgcaacccttgtccttagttaccagcgggttaagccgggaactctaaggatactgccagtgacaaactggaggaaggcggggacgacgtcaagtcatcatggcccttacgaccagggctacacacgtgctacaatggtaggtacagagggcagctacacagcgatgtgatgcgaatctcaaaaagcctatcgtagtccagattggagtctgcaactcgactccatgaagtaggaatcgctagtaatcgcggatcagaatgccgcggtgaatacgttcccgggccttgtacacaccgcccgtcacaccatgggagttgattgcaccagaagtggatagcttaaccttcgggggagcgttcaccacggtgtggttgatgactggggtg

SEQ ID NO: 2850 - DNA, 1469 bp, Psychromonas ingrahami
attgaacgctggcggcaggcttaacacatgcaagtcgaacggtaacagagaatagcttgctattttgctgacgagtggcggacgggtgagtaatgcttgggaatttgccttgttgcgggggacaacagttggaaacgactgctaataccgcataatgtctccggaccaaaggtggcctctatttatatgctatcgcgacaagatgagcccaagtgggattagctagttggtaaggtaatggcttaccaaggcgtcgatccctagctggtcttagaggatgaccagccacactggaactgagacacggtccagactcctacgggaggcagcagtggggaatattgcacaatggaggaaactctgatgcagccatgccgcgtgtgtgaagaaggctttcgggttgtaaagcactttcagcgaggaggaaagggtaatggttaatatccattatctgtgacgttactcgcagaagaagcaccggctaactccgtgccagcagccgcggtaatacggagggtgcgagcgttaatcggaattactgggcgtaaagcgcgcgtaggcggttaattaagtcagatgtgaaagcccagggctcaaccttggaactgcatttgaaactggttaactagagttttgtagagggtggtagaatttcaggtgtagcggtgaaatgcgtagagatctgaaggaataccagtggcgaaggcggccacctggacaaagactgacgctgaggcgcgaaggcgtggggagcaaacgggattagataccccggtagtccacgcagtaaacgatgtctattagaagtttgtggctatatgccgtgggtttcaaagctaacgcattaaatagaccgcctggggagtacggccgcaaggttaaaactcaaatgaattgacgggggcccgcacaagcggtggagcatgtggtttaattcgatgcaacgcgaagaaccttaccatcccttgacatccagagaatctgttagagatagtagagtgccttcgggaactctgagacaggtgctgcatggctgtcgtcagctcgtgttgtgaaatgttgggttaagtcccgcaacgagcgcaacccttatccttagttgccagcacgtaatggtgggaactctagggagactgccggtgataaaccggaggaaggtggggacgacgtcaagtcatcatggcccttacgggatgggctacacacgtgctacaatggcaaatacaaagggttgctagcctgcgaaggtatgcgaatctcataaagtttgtcgtagtccggatcggagtctgcaactcgactccgtgaagttggaatcgctagtaatcgtggatcagaatgccacggtgaatacgttcccgggccttgtacacaccgcccgtcacaccatgggagtgggctgcaccagaagtcattagcttaacctttcggggatggcgatgaccacggtgtggttcatgactggggtg

SEQ ID NO: 2851 - DNA, 1469 bp, Psychromonas ingrahamii; identical to SEQ ID NO: 2850

SEQ ID NO: 2852 - DNA, 1446 bp, Psychrosphaera saromensis
attgaacgctggcggcaggcctaacacatgcaagtcgaacggtaacagaactagcttgctagttgctgacgagtggcggacgggtgagtaatgcttgggaatttgcctttaggtgggggacaacagttggaaacgactgctaataccgcataatagctacggcttaaagggggcttcggctctcgcctttagagaagcccaagtgggattagatagttggtgtggtaatggcgcaccaagtcaacgatccctagctggtctgagaggatgatcagccacactggaactgagacacggtccagactcctacgggaggcagcagtggggaatattgcacaatgggcgcaagcctgatgcagccatgccgcgtgtgtgaagaaggccttcgggttgtaaagcactttcagcgaggaggaaagcttagtggttaatacctactaggtgtgacgttactcgcagaagaaggaccggctaactccgtgccagcagccgcggtaatacggagggtccgagcgttaatcggaattactgggcgtaaagcgtacgcaggcggtcatttaagtcagatgtgaaagccccgggctcaacctgggaactgcatttgaaactggatgactagagtgcgacagagggtggtagaatttcaggtgtagcggtgaaatgcgtagagatctgaaggaataccaatggcgaaggcagccacctgggtcgacactgacgctcatgtacgaaagcgtgggtagcaaacaggattagataccctggtagtccacgccgtaaacgatgtctactagcagcttggcgcttaagcgctgttttgcgaagctaacgcgataagtagaccgcctggggagtacggccgcaaggttaaaactcaaatgaattgacgggggcccgcacaagcggtggagcatgtggtttaattcgatgcaacgcgaagaaccttaccatctcttgacatccagagaattttctagagatagattagtgccttcgggaactctgagacaggtgctgcatggctgtcgtcagctcgtgttgtgaaatgttgggttaagtcccgcaacgagcgcaacccttatccttagttgctagcaggttatgctgagaactctaaggagactgccggtgacaaaccggaggaaggtggggacgacgtcaagtcatcatggcccttacgagatgggctacacacgtgctacaatggcaagtacaaagggttgcaaactcgcgagagtaagcggatcccataaagcttgtcgtagtccggattggagtctgcaactcgactccatgaagtcggaatcgctagtaatcgtggatcagaatgccacggtgaatacgttcccgggccttgtacacaccgcccgtcacaccatgggagtgggctgcaaaagaagtaggtagtttaaccttcgggaggacgcttaccactttgtggttcat

SEQ ID NO: 2853 - DNA, 1435 bp, Pyrinomonas methylaliphatogenes
aatcaacgctggcggcgtgcctcagacatgcaagtcgtacgcgaaagagggcttcggccctcgagtagagtggcgtccgggtgagtaacacgtgggtaatctgcctctgggtggggaataacccggggaaacccgggctaataccgcatacagcgacgcagcctgcgggccgcgtcgtgaaagcgggggacctcggcaacgaggcctcgcgcccggagaggagcctgcggcggattagctagttggtgaggtaatggctcaccaaggcgacgatccgtagccggcctgagagggcggtcggccacactggcactgacacacgggccagactcctacgggaggcagcagtcgggaatcttgggcaatgggcgcaagcctgacccagcaacgccgcgtggaggatgaagtccttcgggatgtaaactccgaaagaaggggacgaataagcatgggctaataccccgtgcgatgacggtaccctttgtaagccccggctaactacgtgccagcagccgcggtaatacgtagggggcaagcgttgttcggatttactgggcgtaaagcgcgcgtaggcggcactgcaagtcacttgtgaaatctccgggcttaacccggtaggggccaagtgatactgcagagctagagtgcggaagaggcagctggaattctcggtgtagcggtgaaatgcgtagatatcgagaggaacaccggtggcgaaggcgggctgctgggccgacactgacgctgaggcgcgaaagctaggggagcaaacaggattagataccctggtagtcctagccctaaacgatggatgcttggtgttcggggttctttagtccccgagtgccgcagctaacgcggtaagcatcccgcctggggagtacggtcgcaaggctgaaactcaaaggaattgacggggacccgcacaagcggtggagcatgtggtttaattcgacgcaacgcgaagaaccttacctgggctagaatgcccctgacagccccagagatggggtcttccgggtaacaccggacagggtgcaaggtgctgcatggctgtcgtcagctcgtgtcgtgagatgttgggttaagtcccgcaacgagcgcaacccttgccaacagttgccagcggttcggccgggcactctgttgggactgccgttgataaaacggaggaaggtggggatgacgtcaagtcctcatggcctttatgcccagggctacacacgtgctacaatggccggtacaaagcgctgcgaacccgtgagggggagccaatcgcaaaaagccggtcccagttcggattgcagtctgcaactcgactgcatgaagctggaatcgctagtaatcgcggatcagcatgccgcggtgaatacgttcccgggtcttgtacacaccgcccgtcacatcacgaaagcgggctgtactagaagtggcc

SEQ ID NO: 2854 - DNA, 1475 bp, Quasibacillus thermotolerans
gacgaacgctggcggcgtgcctaatacatgcaagtcgagcggacggaagggagcttgctcccggaagtcagcggcggacgggtgagtaacacgtgggtaacctgcctgtaagactgggataactccgggaaaccggggctaataccggatagcttcttcctccgcatggaggaagaatgaaaggcggcctttggctgtcacttacagatggacccgcggcgcattagctagttggtggggtaacggcccaccaaggcgacgatgcgtagccgacctgagagggtgatcggccacactgggactgagacacggcccagactcctacgggaggcagcagtagggaatcttccgcaatggacgaaagtctgacggagcaacgccgcgtgagtgaagaaggttttcggatcgtaaagctctgttgtcagggaagaacaagtaccggagtcactgccggtaccttgacggtacctgaccagaaagccacggctaactacgtgccagcagccgcggtaatacgtaggtggcaagcgttgtccggaattattgggcgtaaagcgcgcgcaggcggccttttaagtctgatgtgaaagcccacggctcaaccgtggagggtcattggaaactggaaggcttgagtgcagaagaggagagcggaattccacgtgtagcggtgaaatgcgtagagatgtggaggaacaccagcggcgaaggcggctctctggtctgtaactgacgctgaggcgcgaaagcgtggggagcgaacaggattagataccctggtagtccacgccgtaaacgatgagtgctaagtgttggagggtttccgcccttcagtgctgcagctaacgcattaagcactccgcctggggagtacggccgcaaggctgaaactcaaaggaattgacgggggcccgcacaagcggtggagcatgtggtttaattcgaagcaacgcgaagaaccttaccaggtcttgacatcctctgacacctctggagacagagcgttccccttcgggggacagagtgacaggtggtgcatggttgtcgtcagctcgtgtcgtgagatgttgggttaagtcccgcaacgagcgcaacccttgaccttagttgccagcattcagttgggcactctaaggtgactgccggtgacaaaccggaggaaggtggggatgacgtcaaatcatcatgccccttatgacctgggctacacacgtgctacaatggatggtacaaagggcagcgaagccgcgaggtgaagccaatcccataaaaccattctcagttcggattgcaggctgcaactcgcctgcatgaagccggaatcgctagtaatcgcggatcagcatgccgcggtgaatacgttcccgggccttgtacacaccgcccgtcacaccacgagagtttgcaacacccgaagtcggtggggtaacccttacgggagccagccgcctaaggtggggcagatgattggggtg

SEQ ID NO: 2855 - DNA, 1465 bp, Rahnella aquatilis
attgaacgctggcggcaggcctaacacatgcaagtcgagcggcagcgggaagtagcttgctactttgccggcgagcggcggacgggtgagtaatgtctgggaaactgcctgatggagggggataactactggaaacggtagctaataccgcatgacctcgaaagagcaaagtgggggatcttcggacctcacgccatcggatgtgcccagatgggattagctagtaggtgaggtaatggctcacctaggcgacgatccctagctggtctgagaggatgaccagccacactggaactgagacacggtccagactcctacgggaggcagcagtggggaatattgcacaatgggcgcaagcctgatgcagccatgccgcgtgtgtgaagaaggccttagggttgtaaagcactttcagcgaggaggaaggcatcacacttaatacgtgtggtgattgacgttactcgcagaagaagcaccggctaactccgtgccagcagccgcggtaatacggagggtgcaagcgttaatcggaattactgggcgtaaagcgcacgcaggcggtttgttaagtcagatgtgaaatccccgcgcttaacgtgggaactgcatttgaaactggcaagctagagtcttgtagaggggggtagaattccaggtgtagcggtgaaatgcgtagagatctggaggaataccggtggcgaaggcggccccctggacaaagactgacgctcaggtgcgaaagcgtggggagcaaacaggattagataccctggtagtccacgctgtaaacgatgtcgacttggaggttgtgcccttgaggcgtggcttccggagctaacgcgttaagtcgaccgcctggggagtacggccgcaaggttaaaactcaaatgaattgacgggggcccgcacaagcggtggagcatgtggtttaattcgatgcaacgcgaagaaccttacctactcttgacatccacggaattcgccagagatggcttagtgccttcgggaaccgtgagacaggtgctgcatggctgtcgtcagctcgtgttgtgaaatgttgggttaagtcccgcaacgagcgcaacccttatcctttgttgccagcgagtaatgtcgggaactcaaaggagactgccggtgataaaccggaggaaggtggggatgacgtcaagtcatcatggcccttacgagtagggctacacacgtgctacaatggcatatacaaagagaagcgaactcgcgagagcaagcggacctcataaagtatgtcgtagtccggattggagtctgcaactcgactccatgaagtcggaatcgctagtaatcgtagatcagaatgctacggtgaatacgttcccgggccttgtacacaccgcccgtcacaccatgggagtgggttgcaaaagaagtaggtagcttaaccttcgggagggcgcttaccactttgtgattcatgactggggtg

SEQ ID NO: 2856 - DNA, 1461 bp, Rahnella inusitata
tgaacgctggcggcaggcctaacacatgcaagtcgagcggtagcacaggagagcttgctctttgggtgacgagcggcggacgggtgagtaatgtctgggaaactgcctgatggaggggataactactggaaacggtagctaataccgcatgacctcgcaagagcaaagtgggggaccttcgggcctcacgccatcggatgtgcccagatgggattagctagtaggtggggtaatggctcacctaggcgacgatccctagctggtctgagaggatgaccagccacactggaactgagacacggtccagactcctacgggaggcagcagtggggaatattgcacaatgggcgcaagcctgatgcagccatgccgcgtgtgtgaagaaggccttagggttgtaaagcactttcagcgaggaggaaggcgttgtagttaatagctgcagcgattgacgttactcgcagaagaagcaccggctaactccgtgccagcagccgcggtaatacggagggtgcaagcgttaatcggaattactgggcgtaaagcgcacgcaggcggtttgttaagtcagatgtgaaatccccgagcttaacttgggaactgcatttgaaactggcaagctagagtcttgtagaggggggtagaattccaggtgtagcggtgaaatgcgtagagatctggaggaataccggtggcgaaggcggccccctggacaaagactgacgctcaggtgcgaaagcgtggggagcaaacaggattagataccctggtagtccacgctgtaaacgatgtcgacttggaggttgtgcccttgaggcgtggcttccggagctaacgcgttaagtcgaccgcctggggagtacggccgcaaggttaaaactcaaatgaattgacgggggcccgcacaagcggtggagcatgtggtttaattcgatgcaacgcgaagaaccttacctactcttgacatccacggaattcgctagagatagcttagtgccttcgggaaccgtgagacaggtgctgcatggctgtcgtcagctcgtgttgtgaaatgttgggttaagtcccgcaacgagcgcaacccttatcctttgttgccagcacgtaatgttgggaactcaaaggagactgccggtgataaaccggaggaaggtggggatgacgtcaagtcatcatggcccttacgagtagggctacacacgtgctacaatggcatatacaaagagaagcaaactcgcgagagcaagcggacctcataaagtatgtcgtagtccggattggagtctgcaactcgactccatgaagtcggaatcgctagtaatcgtagatcagaatgctacggtgaatacgtcccgggccttgtacacaccgcccgtcacaccatgggagtgggttgcaaaagaagtaggtagcttaaccttcgggagggcgcttaccactttgtgattcatgactggggtg

SEQ ID NO: 2857 - DNA, 1345 bp, Rahnella woolbedingensis
ggacgggtgagtaatgtctgggaaactgcctgatggagggggataactactggaaacggtagctaataccgcatgacctcgcaagagcaaagtgggggaccttcgggcctcacgccatcggatgtgcccagatgggattagctagtaggtgaggtaatggctcacctaggcgacgatccctagctggtctgagaggatgaccagccacactggaactgagacacggtccagactcctacgggaggcagcagtggggaatattgcacaatgggcgcaagcctgatgcagccatgccgcgtgtgtgaagaaggccttagggttgtaaagcactttcagcgaggaggaagggttcagtgttaatagcactgtgcattgacgttactcgcagaagaagcaccggctaactccgtgccagcagccgcggtaatacggagggtgcaagcgttaatcggaattactgggcgtaaagcgcacgcaggcggtttgttaagtcagatgtgaaatccccgagcttaacttgggaactgcatttgaaactggcaagctagagtcttgtagaggggggtagaattccaggtgtagcggtgaaatgcgtagagatctggaggaataccggtggcgaaggcggccccctggacaaagactgacgctcaggtgcgaaagcgtggggagcaaacaggattagataccctggtagtccacgctgtaaacgatgtcgacttggaggttgtgcccttgaggcgtggcttccggagctaacgcgttaagtcgaccgcctggggagtacggccgcaaggttaaaactcaaatgaattgacgggggcccgcacaagcggtggagcatgtggtttaattcgatgcaacgcgaagaaccttacctactcttgacatccagagaattcgctagagatagcttagtgccttcgggaactctgagacaggtgctgcatggctgtcgtcagctcgtgttgtgaaatgttgggttaagtcccgcaacgagcgcaacccttatcctttgttgccagcacgtaatggtgggaactcaaaggagactgccggtgacaaaccggaggaaggtggggatgacgtcaagtcatcatggcccttacgagtagggctacacacgtgctacaatggcatatacaaagagaagcaaactcgcgagagcaagcggacctcataaagtatgtcgtagtccggattggagtctgcaactcgactccatgaagtcggaatcgctagtaatcgtagatcagaatgctacggtgaatacgttcccgggccttgtacacaccgcccgtcacaccatgggagtgggttgcaaaagaagtaggtagcttaacct

SEQ ID NO: 2858 - DNA, 1436 bp, Ralstonia insidiosa
ctggcggcatgccttacacatgcaagtcgaacggcagcatgatctagcttgctagattgatggcgagtggcgaacgggtgagtaatacatcggaacgtgccctgtagtgggggataactagtcgaaagattagctaataccgcatacgacctgagggtgaaagtgggggaccgcaaggcctcatgctataggagcggccgatgtctgattagctagttggtgaggtaaaggctcaccaaggcgacgatcagtagctggtctgagaggacgatcagccacactgggactgagacacggcccagactcctacgggaggcagcagtggggaattttggacaatgggggcaaccctgatccagcaatgccgcgtgtgtgaagaaggccttcgggttgtaaagcacttttgtccggaaagaaatcgcacttactaatattaggtgtggatgacggtaccggaagaataaggaccggctaactacgtgccagcagccgcggtaatacgtagggtccaagcgttaatcggaattactgggcgtaaagcgtgcgcaggcggttgtgcaagaccgatgtgaaatccccgggcttaacctgggaattgcattggtgactgcacggctagagtgtgtcagaggggggtagaattccacgtgtagcagtgaaatgcgtagagatgtggaggaataccgatggcgaaggcagccccctgggataacactgacgctcatgcacgaaagcgtggggagcaaacaggattagataccctggtagtccacgccctaaacgatgtcaactagttgttggggattcatttccttagtaacgtagctaacgcgtgaagttgaccgcctggggagtacggtcgcaagattaaaactcaaaggaattgacggggacccgcacaagcggtggatgatgtggattaattcgatgcaacgcgaaaaaccttacctacccttgacatgccactaacgaagcagagatgcattaggtgctcgaaagagaaagtggacacaggtgctgcatggctgtcgtcagctcgtgtcgtgagatgttgggttaagtcccgcaacgagcgcaacccttgtctctagttgctacgaaagggcactctagagagactgccggtgacaaaccggaggaaggtggggatgacgtcaagtcctcatggcccttatgggtagggcttcacacgtcatacaatggtgcatacagagggttgccaagccgcgaggtggagctaatcccagaaaatgcatcgtagtccggatcgtagtctgcaactcgactacgtgaagctggaatcgctagtaatcgcggatcagcatgccgcggtgaatacgttcccgggtcttgtacacaccgcccgtcacaccatgggagtgggttttgccagaagtagttagcctaaccgcaaggggggcgattaccacggcagg

SEQ ID NO: 2859 - DNA, 1442 bp, Ralstonia mannitolilytica
gccttacacatgcaagtcgaacggcagcgggggaaagcttgctttcctgccggcgagtggcgaacgggtgagtaatacatcggaacgtgccctgtagtgggggataactagtcgaaagattagctaataccgcatacgacctgagggtgaaagtgggggaccgcaaggcctcatgctataggagcggccgatgtctgattagctagttggtggggtaaaggcctaccaaggcgacgatcagtagctggtctgagaggacgatcagccacactgggactgagacacggcccagactcctacgggaggcagcagtggggaattttggacaatgggcgaaagcctgatccagcaatgccgcgtgtgtgaagaaggccttcgggttgtaaagcacttttgtccggaaagaaatggctctggttaatacccggagttgatgacggtaccggaagaataaggaccggctaactacgtgccagcagccgcggtaatacgtagggtccaagcgttaatcggaattactgggcgtaaagcgtgcgcaggcggttgtgcaagaccgatgtgaaatccccgggcttaacctgggaattgcattggtgactgcacggctagagtgtgtcagagggaggtagaattccacgtgtagcagtgaaatgcgtagagatgtggaggaataccgatggcgaaggcagcctcctgggataacactgacgctcatgcacgaaagcgtggggagcaaacaggattagataccctggtagtccacgccctaaacgatgtcaactagttgttggggattcatttccttagtaacgtagctaacgcgtgaagttgaccgcctggggagtacggtcgcaagattaaaactcaaaggaattgacggggacccgcacaagcggtggatgatgtggattaattcgatgcaacgcgaaaaaccttacctacccttgacatgccactaacgaagcagagatgcattaggtgctcgaaagagaaagtggacacaggtgctgcatggctgtcgtcagctcgtgtcgtgagatgttgggttaagtcccgcaacgagcgcaacccttgtctctagttgctacgaaagggcactctagagagactgccggtgacaaaccggaggaaggtggggatgacgtcaagtcctcatggcccttatgggtagggcttcacacgtcatacaatggtgcatacagagagttgccaagccgcgaggtggagctaatcccagaaaatgcatcgtagtccggatcgtagtctgcaactcgactacgtgaagctggaatcgctagtaatcgcggatcagcatgccgcggtgaatacgttcccgggtcttgtacacaccgcccgtcacaccatgggagtgggctttaccagaagtagttagcctaaccgcaaggagggcgattaccacggtagggttcatgactgggacg

SEQ ID NO: 2860 - DNA, 1460 bp, Ralstonia pickettii
attgaacgctggcggcatgccttacacatgcaagtcgaacggcagcatgatctagcttgctagattgatggcgagtggcgaacgggtgagtaatacatcggaacgtgccctgtagtgggggataactagtcgaaagattagctaataccgcatacgacctgagggtgaaagtgggggaccgcaaggcctcatgctataggagcggccgatgtctgattagctagttggtgaggtaaaggctcaccaaggcgacgatcagtagctggtctgagaggacgatcagccacactgggactgagacacggcccagactcctacgggaggcagcagtggggaattttggacaatgggcgaaagcctgatccagcaatgccgcgtgtgtgaagaaggccttcgggttgtaaagcacttttgtccggaaagaaatggctctggttaatacctggggtcgatgacggtaccggaagaataaggaccggctaactacgtgccagcagccgcggtaatacgtagggtccaagcgttaatcggaattactgggcgtaaagcgtgcgcaggcggttgtgcaagaccgatgtgaaatccccgagcttaacttgggaattgcattggtgactgcacggctagagtgtgtcagaggggggtagaattccacgtgtagcagtgaaatgcgtagagatgtggaggaataccgatggcgaaggcagccccctgggataacactgacgctcatgcacgaaagcgtggggagcaaacaggattagataccctggtagtccacgccctaaacgatgtcaactagttgttggggattcatttccttagtaacgtagctaacgcgtgaagttgaccgcctggggagtacggtcgcaagattaaaactcaaaggaattgacggggacccgcacaagcggtggatgatgtggattaattcgatgcaacgcgaaaaaccttacctacccttgacatgccactaacgaagcagagatgcattaggtgctcgaaagagaaagtggacacaggtgctgcatggctgtcgtcagctcgtgtcgtgagatgttgggttaagtcccgcaacgagcgcaacccttgtctctagttgctacgaaagggcactctagagagactgccggtgacaaaccggaggaaggtggggatgacgtcaagtcctcatggcccttatgggtagggcttcacacgtcatacaatggtgcatacagagggttgccaagccgcgaggtggagctaatcccagaaaatgcatcgtagtccggatcgtagtctgcaactcgactacgtgaagctggaatcgctagtaatcgcggatcagcatgccgcggtgaatacgttcccgggtcttgtacacaccgcccgtcacaccatgggagtgggctttaccagaagtagttagcctaaccgcaaggagggcgattaccacggtagggttcatgactggggtg

SEQ ID NO: 2861 - DNA, 1394 bp, Ralstonia pseudosolanacearum
cggcagcgggggtagcttgctacctgccggcgagtggcgaacgggtgagtaatacatcggaacgtgccctgtagtgggggataactagtcgaaagattagctaataccgcatacgacctgagggtgaaagtgggggaccgcaaggcctcatgctataggagcggccgatgtctgattagctagttggtggggtaaaggcccaccaaggcgacgatcagtagctggtctgagaggacgatcagccacactgggactgagacacggcccagactcctacgggaggcagcagtggggaattttggacaatgggggcaaccctgatccagcaatgccgcgtgtgtgaagaaggccttcgggttgtaaagcacttttgtccggaaagaaatcgctctggttaatacctggagtggatgacggtaccggaagaataaggaccggctaactacgtgccagcagccgcggtaatacgtagggtccaagcgttaatcggaattactgggcgtaaagcgtgcgcaggcggttgtgcaagaccgatgtgaaatccccgggcttaacctgggaattgcattggtgactgcacggctagagtgtgtcagagggaggtagaattccacgtgtagcagtgaaatgcgtagagatgtggaggaataccgatggcgaaggcagcctcctgggataacactgacgctcatgcacgaaagcgtggggagcaaacaggattagataccctggtagtccacgccctaaacgatgtcaactagttgttggggattcatttccttagtaacgtagctaacgcgtgaagttgaccgcctggggagtacggtcgcaagattaaaactcaaaggaattgacggggacccgcacaagcggtggatgatgtggattaattcgatgcaacgcgaaaaaccttacctacccttgacatgccactaacgaagcagagatgcattaggtgctcgaaagagaaagtggacacaggtgctgcatggctgtcgtcagctcgtgtcgtgagatgttgggttaagtcccgcaacgagcgcaacccttgtctctagttgctacgaaagggcactctagagagactgccggtgacaaaccggaggaaggtggggatgacgtcaagtcctcatggcccttatgggtagggcttcaaacgtcatacaatggtgcatacagagggttgccaagccgcgaggtggagctaatcccagaaatgcatcgtagtccggatcgtagtctgcaactcgactacgtgaagctggaatcgctagtaatcgcggatcagcatgccgcggtgaatacgttcccgggtcttgtacacaccgcccgtcacaccatgggagtgggttttgccagaagtagttagcctaccgtaaggggggcgatacacg

SEQ ID NO: 2862 - DNA, 1458 bp, Ralstonia solanacearum
attgaacgctggcggcatgccttacacatgcaagtcgaacggcagcgggggtagcttgctacctgccggcgagtggcgaacgggtgagtaatacatcggaacgtgccctgtagtgggggataactagtcgaaagactggctaataccgcatacgacctgagggtgaaagtgggggaccgcaaggcctcatgctataggagcggccgatgtctgattagctagttggtggggtaaaggcctaccaaggcgacgatcagtagctggtctgagaggacgatcagccacactgggactgagacacggcccagactcctacgggaggcagcagtggggaattttggacaatgggggcaaccctgatccagcaatgccgcgtgtgtgaagaaggccttcgggttgtaaagcacttttgtccggaaagaaatcgcttcggttaatacctggagtggatgacggtaccggaagaataaggaccggctaactacgtgccagcagccgcggtaatacgtagggtccaagcgttaatcggaattactgggcgtaaagcgtgcgcaggcggttgtgcaagaccgatgtgaaatccccgggcttaacctgggaattgcattggtgactgcacggctagagtgtgtcagagggaggtagaattccacgtgtagcagtgaaatgcgtagagatgtggaggaataccgatggcgaaggcagcctcctgggataacactgacgctcatgcacgaaagcgtggggagcaaacaggattagataccctggtagtccacgccctaaacgatgtcaactagttgttggggattcatttccttagtaacgtagctaacgcgtgaagttgaccgcctggggagtacggtcgcaagattaaaactcaaaggaattgacggggacccgcacaagcggtggatgatgtggattaattcgatgcaacgcgaaaaaccttacctacccttgacatgccactaacgaagcagagatgcattaggtgctcgaaagagaaagtggacacaggtgctgcatggctgtcgtcagctcgtgtcgtgagatgttgggttaagtcccgcaacgagcgcaacccttgtctctagttgctacgaaagggcactctagagagactgccggtgacaaaccggaggaaggtggggatgacgtcaagtcctcatggcccttatgggtagggcttcacacgtcatacaatggtgcatacagagggttgccaagccgcgaggtggagctaatcccagaaaatgcatcgtagtccggatcgtagtctgcaactcgactacgtgaagctggaatcgctagtaatcgcggatcagcatgccgcggtgaatacgttcccgggtcttgtacacaccgcccgtcacaccatgggagtgggttttgccagaagtagttagcctaaccgtaaggggggcgattaccacggcagggttcatgactggggtg

SEQ ID NO: 2863 - DNA, 1445 bp, Ralstonia syzygii
aacgctggcggcatgccttacacatgcaagtcgaacggcagcgggggtagcttgctacctccggcgagtggcgaacgggtgagtaatacatcggaacgtgccctgtagtgggggataactatcgaaagactggctaataccgcatacgacctgagggtgaaagtggggcccgcaaggcctcatgctataggagcggccgatgtctgattagctagttggtggggtaaaggcccaccaaggcgacgatcagtagctggtctgagaggacgatcagccacactgggactgagagacggcccagactcctacgggaggcagcagtggggaattttggacaatgggggcaaccctgatccagcaatgccgcgtgtgtgaagaaggccttcgggttgtaaagcacttttgtccggaaagaaatcgcttcggttaatacctggagtggatgacggtaccggaagaataaggaccggctaactacgtgccagcagccgcggtaatacgtagggtccaagcgttaatcggaattactgggcgtaaagcgtgcgcaggcggttgtgcaagaccgatgtgaaatccccgggcttaacctgggaattgcattggtgactgcacggctagagtgtgtcagaggggggtagaattccacgtgtagcagtgaaatgcgtagagatgtggaggaataccgatggcgaaggcagccccctgggataacactgacgctcatgcacgaaagcgtggggagcaaacaggattagataccctggtagtccacgccctaaacgatgtcaactagttgttggggattcatttccttagtaacgtagctaacgcgtgaagttgaccgcctggggagtacggtcgcaagattaaaactcaaaggaattgacggggacccgcacaagcggtggatgatgtggattaattcgatgcaacgcgaaaaaccttacctacccttgacatgccactaacgaagcagagatgcattaggtgtcgaaagagaaagtggacacaggtgctgcatggctgtcgtcagctcgtgtcgtgagatgttgggttaagtcccgcaacgagcgcaacccttgtctctagttgctacgaaagggcactctagagagactgccggtgacaaaccggaggaaggtggggatgacgtcaagtcctcatggcccttatgggtagggcttcacacgtcatacaatggtgcatacagagggttgccaagccgcgaggtggagctaatcccagaaaatgcatcgtagtccggatcgtagtctgcaactcgactacgtgaagctggaatcgctagtaatcgcggatcagcatgccgcggtgaatacgttcccgggtcttgtacacaccgcccgtcacaccatgggagtgggctttaccagaagtagttagcctaaccgcaaggagggcgattaccacgtagggttcatgactgg

SEQ ID NO: 2864 - DNA, 1452 bp, Raoultella electrica
tgaacgctggcggcaggcctaacacattcaagtcaagcggtagcacagagagcttgctctcgggtgacgagtggcggacgggtgagtaatgtctgggaaactgcctgatggagggggataactactggaaacggtagctaataccgcataacgtcgcaagaccaaagtgggggaccttcgggcctcatgccatcagatgtgcccagatgggattagctagtaggtggggtaacggctcacctaggcgacgatccctagctggtctgagaggatgaccagccacactggaactgagacacggtccagactcctacgggaggcagcagtggggaatattgcacaatgggcgcaagcctgatgcagccatgccgcgtgtatgaagaaggccttcgggttgtaaagtactttcagcgaggaggaaggcgttgaggttaataacctcatcgattgacgttactcgcagaagaagcaccggctaactccgtgccagcagccgcggtaatacggagggtgcaagcgttaatcggaattactgggcgtaaagcgcacgcaggcggtctgttaagtcagatgtgaaatccccgggctcaacctgggaactgcatttgaaactggcaggcttgagtcttgtagaggggggtagaattccaggtgtagcggtgaaatgcgtagagatctggaggaataccggtggcgaaggcggccccctggacaaagactgacgctcaggtgcgaaagcgtggggagcaaacaggattagataccctggtagtccacgctgtaaacgatgtcgacttggaggttgttcccttgaggagtggcttccggagctaacgcgttaagtcgaccgcctggggagtacggccgcaaggttaaaactcaaatgaattgacgggggcccgcacaagcggtggagcatgtggtttaattcgatgcaacgcgaagaaccttacctactcttgacatccagagaacttagcagagatgctttggtgccttcgggaactctgagacaggtgctgcatggctgtcgtcagctcgtgttgtgaaatgttgggttaagtcccgcaacgagcgcaacccttatcctttgttgccagcgatttggtcgggaactcaaaggagactgccagtgataaactggaggaaggtggggatgacgtcaagtcatcatggcccttacgagtagggctacacacgtgctacaatggcatatacaaagagaagcgacctcgcgagagcaagcggacctcataaagtatgtcgtagtccggattggagtctgcaactcgactccatgaagtcggaatcgctagtaatcgtagatcagaatgctacggtgaatacgttcccgggccttgtacacaccgcccgtcacaccatgggagtgggttgcaaaagaagtaggtagcttaaccttcgggagggcgcttaccactttgtgattcatga

SEQ ID NO: 2865 - DNA, 1454 bp, Raoultella terrigena
tgaacgctggcggcaggcctaacacatgcaagtcgagcggtagcacagaagagcttgctcttcgggtgacgagcggcggacgggtgagtaatgtctgggaaactgcctgatggagggggataactactggaaacggtagctaataccgcataacgtcgcaagaccaaagtgggggaccttcgggcctcatgccatcagatgtgcccagatgggattagctagtaggtgaggtaatggctcacctaggcgacgatccctagctggtctgagaggatgaccagccacactggaactgagacacggtccagactcctacgggaggcagcagtggggaatattgcacaatgggcgcaagcctgatgcagccatgccgcgtgtatgaagaaggccttcgggttgtaaagtactttcagcgaggaggaaggcgttaaggttaataaccttagcgattgacgttactcgcagaagaagcaccggctaactccgtgccagcagccgcggtaatacggagggtgcaagcgttaatcggaattactgggcgtaaagcgcacgcaggcggtctgtcaagtcggatgtgaaatccccgggctcaacctgggaactgcatccgaaactggcaggctagagtcttgtagaggggggtagaattccaggtgtagcggtgaaatgcgtagagatctggaggaataccggtggcgaaggcggccccctggacaaagactgacgctcaggtgcgaaagcgtggggagcaaacaggattagataccctggtagtccacgctgtaaacgatgtcgacttggaggttgttcccttgaggagtggcttccggagctaacgcgttaagtcgaccgcctggggagtacggccgcaaggttaaaactcaaatgaattgacgggggcccgcacaagcggtggagcatgtggtttaattcgatgcaacgcgaagaaccttacctactcttgacatccagagaacttagcagagatgctttggtgccttcgggaactctgagacaggtgctgcatggctgtcgtcagctcgtgttgtgaaatgttgggttaagtcccgcaacgagcgcaacccttatcctttgttgccagcggttcggccgggaactcaaaggagactgccagtgataaactggaggaaggtggggatgacgtcaagtcatcatggcccttacgagtagggctacacacgtgctacaatggcatatacaaagagaagcgacctcgcgagagcaagcggacctcataaagtatgtcgtagtccggatcggagtctgcaactcgactccgtgaagtcggaatcgctagtaatcgtggatcagaatgccacggtgaatacgttcccgggccttgtacacaccgcccgtcacaccatgggagtgggttgcaaaagaagtaggtagcttaaccttcgggagggcgcttaccactttgtgattcatga

SEQ ID NO: 2866 - DNA, 1410 bp, Raphidiopsis brookii
gatgaacgctggcggtatgcttaacacatgcaagtcgaacgagatgcttaggcatctagtggcggacgggtgagtaacgcgtgagaatctggctccaggtcggggacaacagttggaaacgactgctaataccggatgtgccgagaggtgaaagatttatcgcctggagatgagctcgcgtctgattagctagttggtggtgtaagggactaccaaggcatcgatcagtagctggtctgagaggatgatcagccacactgggactgagacacggcccagactcctacgggaggcagcagtggggaattttccgcaatgggcgaaagcctgacggagcaataccgcgtgagggaggaaggctcttgggtcgtaaacctcttttctcaaggaagaagaaagtgacggtacttgaggaataagcatcggctaactccgtgccagcagccgcggtaatacggaggatgcaagcgttatccggaatgattgggcgtaaagggtctgcaggtggaactgaaagtctgctgttaaagagtttggcttaaccaaataaaagcggtggaaactacagaactagagtgcggtaggggcaaaaggaattcctggtgtagcggtgaaatgcgtagatatcaggaagaacaccggtggcgaaagcgttttgctagaccgtaactgacactgagggacgaaagctaggggagcgaatgggattagataccccagtagtcctagccgtaaacgatggatactaggcgtggcttgtatcgacccgagccgtgccggagctaacgcgttaagtatcccgcctggggagtacgcacgcaagtgtgaaactcaaaggaattgacgggggcccgcacaagcggtggagtatgtggtttaattcgatgcaacgcgaagaaccttaccaagacttgacatcctgcgaatcccagtgaaagctgggagtgccttagggagcgcagagacaggtggtgcatggctgtcgtcagctcgtgtcgtgagatgttgggttaagtcccgcaacgagcgcaaccctcgtttttagttgccagcattaagttgggcactctagagagactgccggtgacaaaccggaggaaggtgaggatgacgtcaagtcagcatgccccttacgtcttgggctacacacgtactacaatgctacggacagagggcagcgagccagggatggcaagcgaatccagaaaccgtagctcagttcagatcgaaggctgcaactcgccttcgtgaaggaggaatcgctagtaattgcaggtcagcatactgcagtgaattcgttcccgggccttgtacacaccgcccgtcacaccatggaagttggtcacgcccgaagtcattaccccaaccgaaaggagggggatgcctaaggtaggactggtgactggggtg

SEQ ID NO: 2867 - DNA, 1397 bp, Raphidiopsis curvata
gatgaacgctggcggtatgcttaacacatgcaagtcgaacgggatgcttaggcatctagtggcggacgggtgagtaacgcgtgagaatctggctccaggtcggggataacagttggaaacgactgctaataccggatgtgccgagaggtgaaagatttatcgcctggagatgagctcgcgtctgattagctagttggtggtgtaagggaccaccaaggcttcgatcagtagctggtctgagaggatgatcagccacactgggactgagacacggcccagactcctacgggaggcagcagtggggaattttccgcaatgggcgaaagcctgacggagcaataccgcgtgagggaggaaggctcttgggtcgtaaacctcttttctcaaggaagaagaaagtgacggtacttgaggaataagcatcggctaactccgtgccagcagccgcggtaatacggaggatgcaagcgttatccggaatgattgggcgtaaagggtctgcaggtggaactgaaagtctgctgttaaagagtttggctcaaccaaataaaagcggtggaaactacagaactagagtgtggtaggggcaaaaggaattcctggtgtagcggtgaaatgcgtagatatcaggaagaacaccggtggcgaaagcgttttgctagaccataactgacactgagggacgaaagctaggggagcgaatgggattagataccccagtagtcctagccgtaaacgatggatactaggcgtggcttgtatcgacccgagccgtgccggagctaacgcgttaagtatcccgcctggggagtacgcacgcaagtgtgaaactcaaaggaattgacgggggcccgcacaagcggtggagtatgtggtttaattcgatgcaacgcgaagaaccttaccaagacttgacatcctgcgaatcccggtgaaagccgggagtgccttcgggagcgcagagacaggtggtgcatggctgtcgtcagctcgtgtcgtgagatgttgggttaagtcccgcaacgagcgcaaccctcgtttttagttgccagcattaagttgggcactctagagagactgccggtgacaaaccggaggaaggtgaggatgacgtcaagtcagcatgccccttacgtcttgggctacacacgtactacaatgctacggacagagggcagcaagccagggatggcaagcgaatccacaaaccgtagctcagttcagatcgaaggctgcaactcgccttcgtgaaggaggaatcgctagtaattgcaggtcagcatactgcagtgaattcgttcccgggccttgtacacaccgcccgtcacgccatggaagttggtcacgcccgaagtcattaccccaaccgaaaggagggggatgcctaaggtaggact

SEQ ID NO: 2868 - DNA, 1451 bp, Reinekea blandensis
attgaacgctggcggtaggcttaacacatgcaagtcgagcggaaacgatcctagcttgctaggaggcgtcgagcggcggacgggtgagtaacgcgtaggaacctgcccggtagttggggatagcccggagaaatccggattaataccgaataatctctacggaggaaaggcggcttcggctgtcgctactggatgggcctgcgttggattagctagttggtgaggtaagagctcaccaaggcgacgatccatagctggtctgagaggatgatcagccacactgggactgagacacggcccagactcctacgggaggcagcagtggggaatattgggcaatgggcgcaagcctgacccagccataccgcgtgtgtgaagaaggccttcgggttgtaaagcacttcagcgaggaggaaaggttgatggttaatacccatcagctgtgacgttactcgcagaagaagcaccggctaactccgtgccagcagccgcggtaatacggagggtgcaagcgttaatcggaattactgggcgtaaagcgcgcgtaggtggtttgttaagttggatgtgaaagccccgggctcaacctgggaattgcatccaaaactggcagacttgagtacggcagaggcaagtggaatttccagtgtagcggtgaaatgcgtagagattggaaagaacaccagtggcgaaggcgacttgctgggctgatactgacactgaggtgcgaaagcgtggggagcaaacaggattagataccctggtagtccacgccgtaaacgctgtctattagccgttgggcctgttatgggcttggtggcgaagctaacgcgataaatagaccgcctggggagtacggccgcaaggttaaaactcaaatgaattgacgggggcccgcacaagcggtggagcatgtggtttaattcgaagcaacgcgaagaaccttacctactcttgaaatccagtgaacttagcagagatgctttggtgccttcgggaacactgagacaggtgctgcatggctgtcgtcagctcgtgttgtgaaatgttgggttaagtcccgtaacgagcgcaacccctatccttagttgccagcgagtaatgtcggggactctaaggagactgccggtgacaaaccggaggaaggcggggatgacgtcaagtcatcatggcccttacgagtagggctacacacgtgctacaatggcgtatacagagggttgcgaagccgcgaggtggagctaatctcacaaagtacgtcgtagtccggattggagtctgcaactcgactccatgaagtcggaatcgctagtaatcgtgaatcagaatgtcacggtgaatacgttcccgggccttgtacacaccgcccgtcacaccatgggagttgattgcaccagaagtgggtagcttaaaattgggcgctcaccacggtgtggttaatgactggggtg

SEQ ID NO: 2869 - DNA, 1466 bp, Reinekea forsetii
attgaacgctggcggtaggcttaacacatgcaagtcgagcggaaacgactctagcttgctagaaggcgtcgagcggcggacgggtgagtaacgcgtaggaatctacccggtagttggggatagcccggagaaatccggattaataccgaataatctctacggaggaaagggggcttcggctctcgctactggatgagcctgcgttggattagctagttggtgaggtaaatgctcaccaaggcgacgatccatagctggtctgagaggatgatcagccacactgggactgagacacggcccagactcctacgggaggcagcagtggggaatattggacaatgggggcaaccctgatccagccataccgcgtgtgtgaagaaggccttcgggttgtaaagcactttcagcgaggaggaaaagctatcggttaatacccgttagccttgacgttactcgcagaagaagcaccggctaactccgtgccagcagccgcggtaatacggagggtgcaagcgttaatcggaattactgggcgtaaagcgcgcgtaggcggttggttaagttggatgtgaaagccctgggctcaacctaggaactgcatacaaaactggccaactagagtacagcagaggcaagtggaatttccagtgtagcggtgaaatgcgtagagattggaaggaacaccagtggcgaaggcgacttgctgggctgatactgacgctgaggtgcgaaagcgtggggagcaaacaggattagataccctggtagtccacgccgtaaacgatgtctattagccgttgggtctgttacggacttggtggcgaagctaacgcgataaatagaccgcctggggagtacggccgcaaggttaaaactcaaatgaattgacgggggcccgcacaagcggtggagcatgtggtttaattcgaagcaacgcgaagaaccttacctactcttgaaatcctgtgaacttactagagatagtttggtgccttcgggaacacagtgacaggtgctgcatggctgtcgtcagctcgtgttgtgaaatgttgggttaagtcccgtaacgagcgcaacccctatccttagttgccagcgagtaatgtcggggactctaaggagactgccggtgacaaaccggaggaaggcggggatgacgtcaagtcatcatggcccttacgagtagggctacacacgtgctacaatggccggtacagacggttgcgaagccgcgaggtgaagctaatccgagaaagccggtcgtagtccggattggagtctgcaactcgactccatgaagtcggaatcgctagtaatcgtgaatcagaacgtcacggtgaatacgttcccgggccttgtacacaccgcccgtcacaccatgggagttgattgcaccagaagtgggtagcttaacttcatcttcggatgaaagggcgcttaccacggtgtggttgacgactggggtg

SEQ ID NO: 2870 - DNA, 1452 bp, Reinekea marinisedimentorum
attgaacgctggcggtaggcttaacacatgcaagtcgagcggtaacatttctagcttgctagaagatgacgagcggcggacgggtgagtaacgcgtaggaacttacccagtagttggggatagcccggagaaatccggattaataccgaataatctctacggaggaaagggggcttcggctctcgctactggatgggcctgcgttggattagctagttggtgtggtaaaggcgcaccaaggcgacgatccatagctggtctgagaggatgatcagccacactgggactgagacacggcccagactcctacgggaggcagcagtggggaatattggacaatgggcggaagcctgatccagccataccgcgtgtgtgaagaaggccttcgggttgtaaagcactttcaatgaggaggaaaggttattggttaatacccaatagctgtgacgttactcatagaagaagcaccggctaactccgtgccagcagccgcggtaatacggagggtgcaagcgttaatcggaattactgggcgtaaagcgcgcgtaggcggcttgttaagttggatgtgaaagccccgggctcaacctgggaactgcattcaaaactgacaagctggagtacagcagaggcaagtggaatttcaggtgtagcggtgaaatgcgtagagatctgaaggaacaccagtggcgaaggcgacttgctgggctgatactgacgctgaggtgcgaaagcgtggggagcaaacaggattagataccctggtagtccacgccgtaaacgatgtctattagccgttgggtctgttacggacttggtggcgaagctaacgcgataaatagaccgcctggggagtacggccgcaaggttaaaactcaaatgaattgacgggggcccgcacaagcggtggagcatgtggtttaattcgaagcaacgcgaagaaccttacctactcttgaaatcctgtgaagtctgtagagatacggatgtgccttcgggaacacagtgacaggtgctgcatggctgtcgtcagctcgtgttgtgaaatgttgggttaagtcccgtaacgagcgcaacccctatccttagttgccagcgagtaatgtcggggactctaaggagactgccggtgacaaaccggaggaaggcggggatgacgtcaagtcatcatggcccttacgagtagggctacacacgtgctacaatggcgcatacagacggtggcgaagcagcgatgtggagctaatctgagaaagtgcgtcgtagtccggattggagtctgcaactcgactccatgaagtcggaatcgctagtaatcgtgaatcagaatgtcacggtgaatacgttcccgggccttgtacacaccgcccgtcacaccatgggagttgattgcaccagaagtgggtagcttaaaattgggcgctcaccacggtgtggttaatgactggggtg

SEQ ID NO: 2871 - DNA, 1447 bp, Rheinheimera nanhaiensis
attgaacgctggcggcaggcctaacacatgcaagtcgagcgggaacttcggttctagcggcggacgggtgagtaatgtatagggagctgcccgacagagggggataccagttggaaacgactgttaataccgcataacgtctacggaccaaagtatgggaccttcgggccatatgctgtcggatgcacctatatgggattagctagttggtggggtaacggctcaccaaggcgacgatccctagctggtttgagaggatgatcagccacactggaactgagacacggtccagactcctacgggaggcagcagtggggaatattggacaatgggcgcaagcctgatccagccatgccgcgtgtgtgaagaaggccttcgggttgtaaagcactttcagcgaggaggaaggggtgtgtgttaatagcacacatctttgacgttactcgcagaagaagcaccggctaactccgtgccagcagccgcggtaatacggagggtgcaagcgttaatcggaattactgggcgtaaagcgcacgtaggcggtgtgttaagttggatgtgaaagccccgggctcaacctgggaattgcattcaaaactggcacgctagagtatgtgagaggggggtagaattccaagtgtagcggtgaaatgcgtagagatttggaggaataccagtggcgaaggcggccccctggcacaatactgacgctgaggtgcgaaagcgtggggagcaaacaggattagataccctggtagtccacgccgtaaacgatgtctactagctgttcgtggtcttgtactgtgagtagcgcagctaacgcactaagtagaccgcctggggagtacggtcgcaagattaaaactcaaatgaattgacgggggcccgcacaagcggtggagcatgtggtttaattcgacgcaacgcgaagaaccttacctactcttgacatctagcgaagattgtagagatacgattgtgccttcgggaacgctaagacaggtgctgcatggctgtcgtcagctcgtgttgtgaaatgttgggttaagtcccgcaacgagcgcaacccttatccttagttgccagcgagtaatgtcgggaactctagggagactgccggtgataaaccggaggaaggtggggacgacgtcaagtcatcatggcccttacgagtagggctacacacgtgctacaatggtacgtacagagggaggcaagctggcgacagtgagcggatctcttaaagcgtatcgtagtccggatcgcagtctgcaactcgactgcgtgaagtcggaatcgctagtaatcgcaaatcagaatgttgcggtgaatacgttcccgggccttgtacacaccgcccgtcacaccatgggagtgggttgcaaaagaagtaggtagcttaaccttcgggagggcgcttaccactttgtgattcatgactggggtg

SEQ ID NO: 2872 - DNA, 1400 bp, Rheinheimera pacifica
  misc_feature (394)..(394): n is a, c, g, or t
  misc_feature (405)..(406): n is a, c, g, or t
ctacacatgcaagtcgagcggggttttcggacctagcggcggacgggtgagtaatgtatagggagctgcccgacagagggggataccagttggaaacgactgttaataccgcataacgtctacggaccaaagtatgggaccttcgggccatatgctgtcggatgcacctatatgggattagctagttggtggggtaatggctcaccaaggcgacgatccctagctggtttgagaggatgatcagccacactggaactgagacacggtccagactcctacgggaggcagcagtggggaatattggacaatgggcgcaagcctgatccagcctgccgcgtgtgtgaagaaggccttcgggttgtaaagcactttcagcgaggaggaagggtgttgngttaatagccnnctttttgacgttactcgcagaagaagcaccggctaactccgtgccagcagccgcggtaatacggagggtgcaagcgttaatcggaattactgggcgtaaagcgcacgtaggcggtttgttaagttggatgtgaaagccccgggctcaacctgggaattgcattcaagactggcaagctagagtatgtgagaggggggtagaattccaagtgtagcggtgaaatgcgtagagatttggaggaataccagtggcgaaggcggccccctggcacaatactgacgctcaggtgcgaaagcgtggggagcaaacaggattagataccctggtagtccacgccgtaaacgatgtctactagctgttcgtggtcttgtactgtgagtagcgcagctaacgcactaagtagaccgcctggggagtcggtcgcaagattaaaactcaaatgaattgacgggggcccgcacaagcggtggagcatgtggtttaattcgacgcaacgcgaagaaccttacctactcttgacatctagcgaagattgtagagatacgattgtgccttcgggaacgctaagacaggtgctgcatggctgtcgtcagctcgtgttgtgaaatgttgggttaagtcccgcaacgagcgcaacccttatccttagttgccagcacgtaatggtgggaactctagggagactgccggtgataaaccggaggaaggtggggacgacgtcaagtcatcatggcccttacgagtagggctacacacgtgctacaatggtacgtacagagggaggcaagctggcgacagtgagcggatctcataaagcgtatcgtagtccggattggagtctgcaactcgactccatgaagtcggaatcgctagtaatcgtgaatcagaatgtcacggtgaatacgttcccgggccttgtacacaccgcccgtcacaccatgggagtgggttgcaaaagaagtaggtagcttaaccttcgggagggcgcttacca

SEQ ID NO: 2873 - DNA, 1457 bp, Rheinheimera salexigens
attgaacgctggcggcaggcctaacacatgcaagtcgagcggtaacatgccttcgggtgatgacgagcggcggacgggtgagtaatgcgtaggaaactgccaagcagagggggataccagttggaaacggctgttaataccgcataacgtctacggaccaaagaatgggaccttcgggccattcgctgtttgatgtgcctacgtgagattagctagttggtggggtaatggctcaccaaggcgacgatctctagctggtttgagaggatgatcagccacactgggactgagacacggcccagactcctacgggaggcagcagtggggaatattggacaatgggcgcaagcctgatccagccatgccgcgtgtgtgaagaaggccttcgggttgtaaagcactttcagcgaggaggaagggataagcgttaatagcggttatttttgacgttactcgcagaagaagcaccggctaacttcgtgccagcagccgcggtaatacgaggggtgcaagcgttaatcggaattactgggcgtaaagcgtacgtaggcggttgattaagttggatgtgaaagccccgggctcaacctgggaattgcattcaaaactggtcgactagagtatgtgagaggggggtagaattccaagtgtagcggtgaaatgcgtagagatttggaggaataccagtggcgaaggcggccccctggcacaatactgacgctgaggtacgaaagcgtggggagcaaacaggattagataccctggtagtccacgccgtaaacgatgtctactagctgttcgtggtcttgtaccgtgagtagcgcagctaacgcactaagtagaccgcctggggagtacggtcgcaagattaaaactcaaatgaattgacgggggcccgcacaagcggtggagcatgtggtttaattcgacgcaacgcgaagaaccttacctactcttgacatctagcgaagattgtagagatacagttgtgccttcgggaacgctaagacaggtgctgcatggctgtcgtcagctcgtgttgtgaaatgttgggttaagtcccgcaacgagcgcaacccttatccttagttgccagcacgtaatggtgggaactctagggagactgccggtgataaaccggaggaaggtggggacgacgtcaagtcatcatggcccttacgagtagggctacacacgtgctacaatggtacgtacagagggaggcaagctggcgacagtgagcggatctcttaaagcgtatcgtagtccggatcgcagtctgcaactcgactgcgtgaagtcggaatcgctagtaatcgcgaatcagaatgtcgcggtgaatacgttcccgggccttgtacacaccgcccgtcacaccatgggagtgggttgcaaaagaagtagatagcttaaccttcgggagggcgtttaccactttgtgattcatgactggggtg

SEQ ID NO: 2874 - DNA, 1457 bp, Rheinheimera tuosuensis
attgaacgctggcggcaggcctaacacatgcaagtcgagcggtaacatgccttcgggtgatgacgagcggcggacgggtgagtaatgtataggaagctgcccgatagagggggataaccactggaaacggtggctaataccgcataatgtctacggaccaaagtatgggaccttcgggccatatgctatcggatgcgcctatatgggattagctagttggtgtggtaatggcgcaccaaggcgacgatccctagctggtttgagaggatgatcagccacactgggactgagacacggcccagactcctacgggaggcagcagtggggaatattggacaatgggcgcaagcctgatccagccatgccgcgtgtgtgaagaaggccttcgggttgtaaagcactttcagcgaggaggaagggtgttgttttaatagaacagcattttgacgttactcgcagaagaagcaccggctaactccgtgccagcagccgcggtaatacggagggtgcaagcgttaatcggaattactgggcgtaaagcgcacgcaggcggctttttaagtcggatgtgaaagccccgggctcaacctgggaattgcattcgatactggggagctagagtatgtgagaggggggtagaattccaagtgtagcggtgaaatgcgtagagatttggaggaataccagtggcgaaggcggccccctggcacaatactgacgctcaggtgcgaaagcgtggggagcaaacaggattagataccctggtagtccacgccgtaaacgatgtctactagatgttcgtggtcttgtaccgtgagtatcgcagctaacgcattaagtagaccgcctggggagtacggtcgcaagattaaaactcaaatgaattgacgggggcccgcacaagcggtggagcatgtggtttaattcgacgcaacgcgaagaaccttacctactcttgacatctagcgaagattgtagagatacgattgtgccttcgggaacgctaagacaggtgctgcatggctgtcgtcagctcgtgttgtgaaatgttgggttaagtcccgcaacgagcgcaacccttatccttagttgccagcacgtaaaggtgggaactctagggagactgccggtgataaaccggaggaaggtggggacgacgtcaagtcatcatggcccttacgagtagggctacacacgtgctacaatggtacgtacagagggaggcaagctggcgacagtgagcggatctcataaagcgtatcgtagtccggattggagtctgcaactcgactccatgaagtcggaatcgctagtaatcgtgaatcagaatgtcacggtgaatacgttcccgggccttgtacacaccgcccgtcacaccatgggagtgggttgcaaaagaagtaggtagcttaaccttcgggagggcgcttaccactttgtgattcatgactggggtg

SEQ ID NO: 2875 - DNA, 1305 bp, Rhizobium acidisoli
ggagcggcagacgggtgagtaacgcgtgggaatctacccttgactacggaataacgcagggaaacttgtgctaataccgtatgtgtccttcgggagaaagatttatcggtcaaggatgagcccgcgttggattagctagttggtggggtaaaggcctaccaaggcgacgatccatagctggtctgagaggatgatcagccacattgggactgagacacggcccaaactcctacgggaggcagcagtggggaatattggacaatgggcgcaagcctgatccagccatgccgcgtgagtgatgaaggccctagggttgtaaagctctttcaccggagaagataatgacggtatccggagaagaagccccggctaacttcgtgccagcagccgcggtaatacgaagggggctagcgttgttcggaattactgggcgtaaagcgcacgtaggcggatcgatcagtcaggggtgaaatcccagggctcaaccctggaactgcctttgatactgtcgatctggagtatggaagaggtgagtggaattccgagtgtagaggtgaaattcgtagatattcggaggaacaccagtggcgaaggcggctcactggtccattactgacgctgaggtgcgaaagcgtggggagcaaacaggattagataccctggtagtccacgccgtaaacgatgaatgttagccgtcgggcagtatactgttcggtggcgcagctaacgcattaaacattccgcctggggagtacggtcgcaagattaaaactcaaaggaattgacgggggcccgcacaagcggtggagcatgtggtttaattcgaagcaacgcgcagaaccttaccagcccttgacatgcccggctacttgcagagatgcaaggttcccttcggggaccgggacacaggtgctgcatggctgtcgtcagctcgtgtcgtgagatgttgggttaagtcccgcaacgagcgcaaccctcgcccttagttgccagcattcagttgggcactctaaggggactgccggtgataagccgagaggaaggtggggatgacgtcaagtcctcatggcccttacgggctgggctacacacgtgctacaatggtggtgacagtgggcagcgagcacgcgagtgtgagctaatctccaaaagccatctcagttcggattgcactctgcaactcgagtgcatgaagttggaatcgctagtaatcgcggatcagcatgccgcggtgaatacgttcccgggccttgtacacaccgcccgtcacaccatgggagttggttttacccgaaggtagtgcgc

SEQ ID NO: 2876 - DNA, 903 bp, Rhizobium aethiopicum
tcgagcgccccgcaaggggagcggcagacgggtgagtaacgcgtgggaacgtaccctttactacggaataacgcagggaaacttgtgctaataccgtatgtgccctttgggggaaagatttatcggtaaaggatcggcccgcgttggattagctagttggtggggtaaaggcctaccaaggcgacgatccatagctggtctgagaggatgatcagccacattgggactgagacacggcccaaactcctacgggaggcagcagtggggaatattggacaatgggcgcaagcctgatccagccatgccgcgtgagtgatgaaggccctagggttgtaaagctctttcaccggagaagataatgacggtatccggagaagaagccccggctaacttcgtgccagcagccgcggtaatacgaagggggctagcgttgttcggaattactgggcgtaaagcgcacgtaggcggatcgatcagtcaggggtgaaatcccagggctcaaccctggaactgcctttgatactgtcgatctggagtatggaagaggtgagtggaattccgagtgtagaggtgaaattcgtagatattcggaggaacaccagtggcgaaggcggctcactggtccattactgacgctgaggtgcgaaagcgtggggagcaaacaggattagataccctggtagtccacgccgtaaacgatgaatgttagccgtcgggcagtatactgttcggtggcgcagctaacgcattaaacattccgcctggggagtacggtcgcaagattaaaactcaaaggaattgacggggggcccgcacaagcggtggagcatgtggtttaattcgaagcaacgcgcagaaccttaccagcccttgacatgcccggctacctgcagagatgcaggg

SEQ ID NO: 2877 - DNA, 1403 bp, Rhizobium altiplani
aacgaacgctggcggcaggcttaacacatgcaagtcgagcgccccgcaaggggagcggcagacgggtgagtaacgcgtgggaacgtacccttttctacggaataacccagggaaacttggactaataccgtatgtgcccttcgggggaaagatttatcggaaaaggatcggcccgcgttggattagctagttggtggggtaaaggcctaccaaggcgacgatccatagctggtctgagaggatgatcagccacattgggactgagacacggcccaaactcctacgggaggcagcagtggggaatattggacaatgggcgcaagcctgatccagccatgccgcgtgagtgatgaaggccctagggttgtaaagctctttcaccggtgaagataatgacggtaaccggagaagaagccccggctaacttcgtgccagcagccgcggtaatacgaagggggctagcgttgttcggatttactgggcgtaaagcgcacgtaggcggatcgatcagtcaggggtgaaatcccagagctcaactctggaactgcctttgatactgtcgatctggagtatggaagaggtgagtggaattccgagtgtagaggtgaaattcgtagatattcggaggaacaccagtggcgaaggcggctcactggtccattactgacgctgaggtgcgaaagcgtggggagcaaacaggattagataccctggtagtccacgccgtaaacgatgaatgttagccgtcgggcagtatactgttcggtggcgcagctaacgcattaaacattccgcctggggagtacggtcgcaagattaaaactcaaaggaattgacgggggcccgcacaagcggtggagcatgtggtttaattcgaagcaacgcgcagaaccttaccagcccttgacatgtccggctagctgcagagatgcagtgttcccttcggggaccggaacacaggtgctgcatggctgtcgtcagctcgtgtcgtgagatgttgggttaagtcccgcaacgagcgcaaccctcgcccttagttgccagcattcagttgggcactctaaggggactgccggtgataagccgagaggaaggtggggatgacgtcaagtcctcatggcccttacgggctgggctacacacgtgctacaatggtggtgacagtgggcagcgagaccgcgaggtcgagctaatctccaaaagccatctcagttcggattgcactctgcaactcgagtgcatgaagttggaatcgctagtaatcgcggatcagcatgccgcggtgaatacgttcccgggccttgtacacaccgcccgtcacaccatgggagttggttttacccgaaggtagtgtgctaaccgcaaggaggcagctaaccacggtagggtcagcgactggggtg

SEQ ID NO: 2878 - DNA, 1403 bp, Rhizobium anhuiense
aacgaacgctggcggcaggcttaacacatgcaagtcgagcgccccgcaaggggagcggcagacgggtgagtaacgcgtgggaatctacccttgactacggaataacgcagggaaacttgtgctaataccgtatgtgtccttcgggagaaagatttatcggtcaaggatgagcccgcgttggattagctagttggtggggtaaaggcctaccaaggcgacgatccatagctggtctgagaggatgatcagccacattgggactgagacacggcccaaactcctacgggaggcagcagtggggaatattggacaatgggcgcaagcctgatccagccatgccgcgtgagtgatgaaggccctagggttgtaaagctctttcaccggagaagataatgacggtatccggagaagaagccccggctaacttcgtgccagcagccgcggtaatacgaagggggctagcgttgttcggaattactgggcgtaaagcgcacgtaggcggatcgatcagtcaggggtgaaatcccagggctcaaccctggaactgcctttgatactgtcgatctggagtatggaagaggtgagtggaattccgagtgtagaggtgaaattcgtagatattcggaggaacaccagtggcgaaggcggctcactggtccattactgacgctgaggtgcgaaagcgtggggagcaaacaggattagataccctggtagtccacgccgtaaacgatgaatgttagccgtcgggcagtatactgttcggtggcgcagctaacgcattaaacattccgcctggggagtacggtcgcaagattaaaactcaaaggaattgacgggggcccgcacaagcggtggagcatgtggtttaattcgaagcaacgcgcagaaccttaccagcccttgacatgcccggctacttgcagagatgcaaggttcccttcggggaccgggacacaggtgctgcatggctgtcgtcagctcgtgtcgtgagatgttgggttaagtcccgcaacgagcgcaaccctcgcccttagttgccagcattcagttgggcactctaaggggactgccggtgataagccgagaggaaggtggggatgacgtcaagtcctcatggcccttacgggctgggctacacacgtgctacaatggtggtgacagtgggcagcgagcacgcgagtgtgagctaatctccaaaagccatctcagttcggattgcactctgcaactcgagtgcatgaagttggaatcgctagtaatcgcggatcagcatgccgcggtgaatacgttcccgggccttgtacacaccgcccgtcacaccatgggagttggttttacccgaaggtagtgcgctaaccgcaaggaggcagctaaccacggtagggtcagcgactggggtg

SEQ ID NO: 2879 - DNA, 1403 bp, Rhizobium azibense
aacgaacgctggcggcaggcttaacacatgcaagtcgagcgccccgcaaggggagcggcagacgggtgagtaacgcgtgggaacgtaccctttactacggaataacgcagggaaacttgtgctaataccgtatgtgcccttcgggggaaagatttatcggtaagggatcggcccgcgttggattagctagttggtggggtaaaggcctaccaaggcgacgatccatagctggtctgagaggatgatcagccacattgggactgagacacggcccaaactcctacgggaggcagcagtggggaatattggacaatgggcgcaagcctgatccagccatgccgcgtgagtgatgaaggccctagggttgtaaagctctttcaccggagaagataatgacggtatccggagaagaagccccggctaacttcgtgccagcagccgcggtaatacgaagggggctagcgttgttcggaattactgggcgtaaagcgcacgtaggcggacatttaagtcaggggtgaaatcccagagctcaactctggaactgcctttgatactgggtgtctggagtatggaagaggtgagtggaattccgagtgtagaggtgaaattcgtagatattcggaggaacaccagtggcgaaggcggctcactggtccattactgacgctgaggtgcgaaagcgtggggagcaaacaggattagataccctggtagtccacgccgtaaacgatgaatgttagccgtcggcaagtttacttgtcggtggcgcagctaacgcattaaacattccgcctggggagtacggtcgcaagattaaaactcaaaggaattgacgggggcccgcacaagcggtggagcatgtggtttaattcgaagcaacgcgcagaaccttaccagcccttgacatccggtgctacatccagagatggatggtttccttcgggaacgccgagacaggtgctgcatggctgtcgtcagctcgtgtcgtgagatgttgggttaagtcccgcaacgagcgcaaccctcgcccttagttgccagcattcagttgggcactctaaggggactgccggtgataagccgagaggaaggtggggatgacgtcaagtcctcatggcccttacgggctgggctacacacgtgctacaatggtggtgacagtgggcagcgagcacgcgagtgtgagctaatctccaaaagccatctcagttcggattgcactctgcaactcgagtgcatgaagttggaatcgctagtaatcgcggatcagcatgccgcggtgaatacgttcccgggccttgtacacaccgcccgtcacaccatgggagttggttttacccgaaggtagtgcgctaaccgcaaggaggcagctaaccacggtagggtcagcgactggggtg

SEQ ID NO: 2880 - DNA, 1236 bp, Rhizobium esperanzae
ggggaaagatttatcggtaaaggatcggcccgcgttggattagctagttggtggggtaaaggcctaccaaggcgacgatccatagctggtctgagaggatgatcagccacattgggactgagacacggcccaaactcctacgggaggcagcagtggggaatattggacaatgggcgcaagcctgatccagccatgccgcgtgagtgatgaaggccctagggttgtaaagctctttcaccggagaagataatgacggtatccggagaagaagccccggctaacttcgtgccagcagccgcggtaatacgaagggggctagcgttgttcggaattactgggcgtaaagcgcacgtaggcggatcgatcagtcaggggtgaaatcccagggctcaaccctggaactgcctttgatactgtcgatctggagtatggaagaggtgagtggaattccgagtgtagaggtgaaattcgtagatattcggaggaacaccagtggcgaaggcggctcactggtccattactgacgctgaggtgcgaaagcgtggggagcaaacaggattagataccctggtagtccacgccgtaaacgatgaatgttagccgtcgggcagtatactgttcggtggcgcagctaacgcattaaacattccgcctggggagtacggtcgcaagattaaaactcaaaggaattgacgggggcccgcacaagcggtggagcatgtggtttaattcgaagcaacgcgcagaaccttaccagcccttgacatgcccggctacttgcagagatgcaaggttcccttcggggaccgggacacaggtgctgcatggctgtcgtcagctcgtgtcgtgagatgttgggttaagtcccgcaacgagcgcaaccctcgcccttagttgccagcattcagttgggcactctaaggggactgccggtgataagccgagaggaaggtggggatgacgtcaagtcctcatggcccttacgggctgggctacacacgtgctacaatggtggtgacagtgggcagcgagcacgcgagtgtgagctaatctccaaaagccatctcagttcggattgcactctgcaactcgagtgcatgaagttggaatcgctagtaatcgcggatcagcatgccgcggtgaatacgttcccgggccttgtacacaccgcccgtcacaccatgggagttggttttacccgaaggtagtgcgctaaccgcaaggaggcagctaacc

SEQ ID NO: 2881 - DNA, 1403 bp, Rhizobium etli
aacgaacgctggcggcaggcttaacacatgcaagtcgagcgccccgcaaggggagcggcagacgggtgagtaacgcgtgggaacgtaccctttactacggaataacgcagggaaacttgtgctaataccgtatgtgccctttgggggaaagatttatcggtaaaggatcggcccgcgttggattagctagttggtggggtaaaggcctaccaaggcgacgatccatagctggtctgagaggatgatcagccacattgggactgagacacggcccaaactcctacgggaggcagcagtggggaatattggacaatgggcgcaagcctgatccagccatgccgcgtgagtgatgaaggccctagggttgtaaagctctttcaccggagaagataatgacggtatccggagaagaagccccggctaacttcgtgccagcagccgcggtaatacgaagggggctagcgttgttcggaattactgggcgtaaagcgcacgtaggcggatcgatcagtcaggggtgaaatcccagggctcaaccctggaactgcctttgatactgtcgatctggagtatggaagaggtgagtggaattccgagtgtagaggtgaaattcgtagatattcggaggaacaccagtggcgaaggcggctcactggtccattactgacgctgaggtgcgaaagcgtggggagcaaacaggattagataccctggtagtccacgccgtaaacgatgaatgttagccgtcgggcagtatactgttcggtggcgcagctaacgcattaaacattccgcctggggagtacggtcgcaagattaaaactcaaaggaattgacgggggcccgcacaagcggtggagcatgtggtttaattcgaagcaacgcgcagaaccttaccagcccttgacatgcccggcgacctgcagagatgcagggttcccttcggggaccgggacacaggtgctgcatggctgtcgtcagctcgtgtcgtgagatgttgggttaagtcccgcaacgagcgcaaccctcgcccttagttgccagcatttggttgggcactctaaggggactgccggtgataagccgagaggaaggtggggatgacgtcaagtcctcatggcccttacgggctgggctacacacgtgctacaatggtggtgacagtgggcagcgagcacgcgagtgtgagctaatctccaaaagccatctcagttcggattgcactctgcaactcgagtgcatgaagttggaatcgctagtaatcgcggatcagcatgccgcggtgaatacgttcccgggccttgtacacaccgcccgtcacaccatgggagttggttttacccgaaggtagtgcgctaaccgcaaggaggcagctaaccacggtagggtcagcgactggggtg

SEQ ID NO: 2882 - DNA, 1403 bp, Rhizobium favelukesii
aacgaacgctggcggcaggcttaacacatgcaagtcgagcgccccgcaaggggagcggcagacgggtgagtaacgcgtgggaacgtaccctttactacggaataacgcatggaaacgtgtgctaataccgtatgtgccctttgggggaaagatttatcggtaaaggatcggcccgcgttggattagctagttggtggggtaaaggcctaccaaggcgacgatccatagctggtctgagaggatgatcagccacattgggactgagacacggcccaaactcctacgggaggcagcagtggggaatattggacaatgggcgcaagcctgatccagccatgccgcgtgagtgatgaaggccctagggttgtaaagctctttcaccggtgaagataatgacggtaaccggagaagaagccccggctaacttcgtgccagcagccgcggtaatacgaagggggctagcgttgttcggatttactgggcgtaaagcgcacgtaggcggatcgatcagtcaggggtgaaatcccagagctcaactctggaactgcctttgatactgtcgatctggagtatggaagaggtgagtggaattccgagtgtagaggtgaaattcgtagatattcggaggaacaccagtggcgaaggcggctcactggtccattactgacgctgaggtgcgaaagcgtggggagcaaacaggattagataccctggtagtccacgccgtaaacgatgaatgttagccgtcgggcagtatactgttcggtggcgcagctaacgcattaaacattccgcctggggagtacggtcgcaagattaaaactcaaaggaattgacgggggcccgcacaagcggtggagcatgtggtttaattcgaagcaacgcgcagaaccttaccagcccttgacatgcccggctagctacagagatgtagtgttcccttcggggaccgggacacaggtgctgcatggctgtcgtcagctcgtgtcgtgagatgttgggttaagtcccgcaacgagcgcaaccctcgcccttagttgccagcattcagttgggcactctaaggggactgccggtgataagccgagaggaaggtggggatgacgtcaagtcctcatggcccttacgggctgggctacacacgtgctacaatggtggtgacagtgggcagcgagacagcgatgtcgagctaatctccaaaagccatctcagttcggattgcactctgcaactcgagtgcatgaagttggaatcgctagtaatcgcggatcagcatgccgcggtgaatacgttcccgggccttgtacacaccgcccgtcacaccatgggagttggttttacccgaaggtagtgtgctaaccgcaaggaggcagctaaccacggtagggtcagcgactggggtg

SEQ ID NO: 2883 - DNA, 1403 bp, Rhizobium freirei
aacgaacgctggcggcaggcttaacacatgcaagtcgagcgccccgcaaggggagcggcagacgggtgagtaacgcgtgggaatctaccttttgctacggaataacgcagggaaacttgtgctaataccgtatgtgtccttcgggagaaagatttatcggcaagagatgagcccgcgttggattagctagttggtggggtaaaggcctaccaaggcgacgatccatagctggtctgagaggatgatcagccacattgggactgagacacggcccaaactcctacgggaggcagcagtggggaatattggacaatgggcgcaagcctgatccagccatgccgcgtgagtgatgaaggccctagggttgtaaagctctttcaccggagaagataatgacggtatccggagaagaagccccggctaacttcgtgccagcagccgcggtaatacgaagggggctagcgttgttcggaattactgggcgtaaagcgcacgtaggcggatcgatcagtcaggggtgaaatcccagggctcaaccctggaactgcctttgatactgtcgatctggagtatggaagaggtgagtggaattccgagtgtagaggtgaaattcgtagatattcggaggaacaccagtggcgaaggcggctcactggtccattactgacgctgaggtgcgaaagcgtggggagcaaacaggattagataccctggtagtccacgccgtaaacgatgaatgttagccgtcgggcagtatactgttcggtggcgcagctaacgcattaaacattccgcctggggagtacggtcgcaagattaaaactcaaaggaattgacgggggcccgcacaagcggtggagcatgtggtttaattcgaagcaacgcgcagaaccttaccagcccttgacatcctgtgttacctctagagatagggggtccacttcggtggcgcagagacaggtgctgcatggctgtcgtcagctcgtgtcgtgagatgttgggttaagtcccgcaacgagcgcaaccctcgcccttagttgccagcatttagttgggcactctaaggggactgccggtgataagccgagaggaaggtggggatgacgtcaagtcctcatggcccttacgggctgggctacacacgtgctacaatggtggtgacagtgggcagcgagcacgcgagtgtgagctaatctccaaaagccatctcagttcggattgcactctgcaactcgagtgcatgaagttggaatcgctagtaatcgcggatcagcatgccgcggtgaatacgttcccgggccttgtacacaccgcccgtcacaccatgggagttggttttacccgaaggtagtgcgctaaccgcaaggaggcagctaaccacggtagggtcagcgactggggtg

SEQ ID NO: 2884 - DNA, 1404 bp, Rhizobium gallicum
aacgaacgctggcggcaggcttaacacatgcaagtcgagcgccccgcaaggggagcggcagacgggtgagtaacgcgtgggaacgtaccctttactacggaataacgcagggaaacttgtgctaataccgtatgtgcccttcgggggaaagatttatcggtaagggatcggcccgcgttggattagctagttggtggggtaaaggcctaccaaggcgacgatccatagctggtctgagaggatgatcagccacattgggactgagacacggcccaaactcctacgggaggcagcagtggggaatattggacaatgggcgcaagcctgatccagccatgccgcgtgagtgatgaaggccctagggttgtaaagctctttcaccggagaagataatgacggtatccggagaagaagccccggctaacttcgtgccagcagccgcggtaatacgaagggggctagcgttgttcggaattactgggcgtaaagcgcacgtaggcggacatttaagtcaggggtgaaatcccagagctcaactctggaactgcctttgatactgggtgtctggagtatggaagaggtgagtggaattccgagtgtagaggtgaaattcgtagatgttcggaggaacaccagtggcgaaggcggctcactggtccattactgacgctgaggtgcgaaagcgtggggagcaaacaggattagataccctggtagtccacgccgtaaacgatgaatgttagccgtcggcaagtttacttgtcggtggcgcacgtaacgcattaaacattccgcctggggagtacggtcgcaagattaaaactcaaaggaattgacgggggcccgcacaagcggtggagcatgtggtttaattcgaagcaacgcgcagaaccttaccagcccttgacatgccccggctacctacagagatgtagggttcccttcggggaccgggacacaggtgctgcatggctgtcgtcagctcgtgtcgtgagatgttgggttaagtcccgcaacgagcgcaaccctcgcccttagttgccagcatttagttgggcactctaaggggactgccggtgataagccgagaggaaggtggggatgacgtcaagtcctcatggcccttacgggctgggctacacacgtgctacaatggtggtgacagtgggcagcgagcacgcgagtgtgagctaatctccaaaagccatctcagttcggattgcactctgcaactcgagtgcatgaagttggaatcgctagtaatcgcggatcagcatgccgcggtgaatacgttcccgggccttgtacacaccgcccgtcacaccatgggagttggttttacccgaaggtagtgcgctaaccgcaaggaggcagctaaccacggtagggtcagcgactggggtg

SEQ ID NO: 2885 - DNA, 1430 bp, Rhizobium giardinii
gcggcaggcttaacacatgccaattgcgagcgcccccgcaaggggagcggcagacgggtgagtaacgcgtgggaatctacccatctctacggaataactcagggaaacttgtgctaataccgtatacgcccttcgggggaaagatttatcggagatggatgagcccgcgttggattagctagttggtggggtaaaggcctaccaaggcgacgatccatagctggtctgagaggatgatcagccacattgggactgaaacacggcccaaactccttacggaaggcagcagtggggaatattggacaatgggcgcaagcctgatccagccatgccgcgtgagtgatgaaggccttagggttgtaaagctctttcaccggagaagataatgacggtatccggagaagaagccccggctaacttcgtgccagcagccgcggtaatacgaagggggctagcgttgttcggaattactgggcgtaaagcgcacgtaggcggatcgatcagtcaggggtgaaatcccagagctcaactctggaactgcctttgatactgtcgatctagagtatggaagaggtgagtggaattccgagtgtagaggtgaaattcgtagatattcggaggaacaccagtggcgaaggcggctcactggtccattactgacgctgaggtgcgaaagcgtggggagcaaacaggattagataccctggtagtccacgccgtaaacgatgaatgttagccgtcggcaagtttacttgtcggtggcgcagctaacgcattaaacattccgcctggggagtacggtcgcaagattaaaactcaaaggaattgacgggggcccgcacaagcggtggagcatgtggtttaattcgaagcaacgcgcagaaccttaccagctcttgacatcccgatcgcggacagtggagacattgtccttcagttaggctggatcggtgacaggtgctgcatggctgtcgtcagctcgtgtcgtgagatgttgggttaagtcccgcaacgagcgcaaccctcgcccttagttgccagcattcagttgggcactctaaggggactgccggtgataagccgagaggaaggtggggatgacgtcaagtcctcatggcccttacgggctgggctacacacgtgctacaatggtggtgacagtgggcagcgagaccgcgaggtcgagctaatctccaaaagccatctcagttcggattgcactctgcaactcgagtgcatgaagttggaatcgctagtaatcgcagatcagcatgctgcggtgaatacgttcccgggccttgtacacaccgcccgtcacaccatgggagttggttttacccgaaggtagtgcgctaaccgcaaggaggcagctaaccacggtagggtcagcgactggggtgaagtcgtaacaaggtagccgtaggggaacc

SEQ ID NO: 2886 - DNA, 1403 bp, Rhizobium grahamii
aacgaacgctggcggcaggcttaacacatgcaagtcgagcgccccgcaaggggagcggcagacgggtgagtaacgcgtgggaacgtaccctttactacggaataacgcatggaaacgtgtgctaataccgtatgtgcccttcgggggaaagatttatcggtaaaggatcggcccgcgttggattagctagttggtggggtaaaggcctaccaaggcgacgatccatagctggtctgagaggatgatcagccacattgggactgagacacggcccaaactcctacgggaggcagcagtggggaatattggacaatgggcgcaagcctgatccagccatgccgcgtgagtgatgaaggccttagggttgtaaagctctttcaccggtgaagataatgacggtaaccggagaagaagccccggctaacttcgtgccagcagccgcggtaatacgaagggggctagcgttgttcggatttactgggcgtaaagcgcacgtaggcggatcgatcagtcaggggtgaaatcccagagctcaactctggaactgcctttgatactgtcgatctggagtatggaagaggtgagtggaattccgagtgtagaggtgaaattcgtagatattcggaggaacaccagtggcgaaggcggctcactggtccattactgacgctgaggtgcgaaagcgtggggagcaaacaggattagataccctggtagtccacgccgtaaacgatgaatgttagccgtcgggcagtatactgttcggtggcgcagctaacgcattaaacattccgcctggggagtacggtcgcaagattaaaactcaaaggaattgacgggggcccgcacaagcggtggagcatgtggtttaattcgaagcaacgcgcagaaccttaccagcccttgacatgtccggctacttgcagagatgcaaggttcccttcggggaccggaacacaggtgctgcatggctgtcgtcagctcgtgtcgtgagatgttgggttaagtcccgcaacgagcgcaaccctcgcccttagttgccagcattcagttgggcactctaaggggactgccggtgataagccgagaggaaggtggggatgacgtcaagtcctcatggcccttacgggctgggctacacacgtgctacaatggtggtgacagtgggcagcgagacagcgatgtcgagctaatctccaaaagccatctcagttcggattgcactctgcaactcgagtgcatgaagttggaatcgctagtaatcgcggatcagcatgccgcggtgaatacgttcccgggccttgtacacaccgcccgtcacaccatgggagttggttttacccgaaggtagtgtgctaaccgcaaggaggcagctaaccacggtagggtcagcgactggggtg

SEQ ID NO: 2887 - DNA, 1403 bp, Rhizobium hainanense
aacgaacgctggcggcaggcttaacacatgcaagtcgagcgccccgcaaggggagcggcagacgggtgagtaacgcgtgggaatctaccttttgctacggaataacgcagggaaacttgtgctaataccgtatgtgtccttcgggagaaagatttatcggcaagagatgagcccgcgttggattagctagttggtggggtaaaggcctaccaaggcgacgatccatagctggtctgagaggatgatcagccacattgggactgagacacggcccaaactcctacgggaggcagcagtggggaatattggacaatgggcgcaagcctgatccagccatgccgcgtgagtgatgaaggccctagggttgtaaagctctttcaccggagaagataatgacggtatccggagaagaagccccggctaacttcgtgccagcagccgcggtaatacgaagggggctagcgttgttcggaattactgggcgtaaagcgcacgtaggcggatcgatcagtcaggggtgaaatcccagggctcaaccctggaactgcctttgatactgtcgatctggagtatggaagaggtgagtggaattccgagtgtagaggtgaaattcgtagatattcggaggaacaccagtggcgaaggcggctcactggtccattactgacgctgaggtgcgaaagcgtggggagcaaacaggattagataccctggtagtccacgccgtaaacgatgaatgttagccgtcgggcagtatactgttcggtggcgcagctaacgcattaaacattccgcctggggagtacggtcgcaagattaaaactcaaaggaattgacgggggcccgcacaagcggtggagcatgtggtttaattcgaagcaacgcgcagaaccttaccagcccttgacatcctgtgttacccctagagatagggggtccacttcggtggcgcagagacaggtgctgcatggctgtcgtcagctcgtgtcgtgagatgttgggttaagtcccgcaacgagcgcaaccctcgcccttagttgccagcatttagttgggcactctaaggggactgccggtgataagccgagaggaaggtggggatgacgtcaagtcctcatggcccttacgggctgggctacacacgtgctacaatggtggtgacagtgggcagcgagcacgcgagtgtgagctaatctccaaaagccatctcagttcggattgcactctgcaactcgagtgcatgaagttggaatcgctagtaatcgcggatcagcatgccgcggtgaatacgttcccgggccttgtacacaccgcccgtcacaccatgggagttggttttacccgaaggtagtgcgctaaccgcaaggaggcagctaaccacggtagggtcagcgactggggtg

SEQ ID NO: 2888 - DNA, 1400 bp, Rhizobium ipomoeae
aacgaacgctggcggcaggcttaacacatgcaagtcgagcgccccgcaaggggagtggcagacgggtgagtaacgcgtgggaatctaccgtaccctacggaacaacagttggaaacgactgctaataccgtatacgccctacgggggaaagatttatcggggtatgatgagcccgcgttggattagctagttggtggggtaaaggcctaccaaggcgacgatccatagctggtctgagaggatgatcagccacattgggactgagacacggcccaaactcctacgggaggcagcagtggggaatattggacaatgggcgcaagcctgatccagccatgccgcgtgagtgatgaaggtcttaggattgtaaagctctttcaccgatgaagataatgacggtagtcggagaagaagccccggctaacttcgtgccagcagccgcggtaatacgaagggggctagcgttgttcggaattactgggcgtaaagcgcacgtaggcggatatttaagtcaggggtgaaatcccagagctcaactctggaactgcctttgatactgggtatcttgagtatggaagaggtgagtggaattccgagtgtagaggtgaaattcgtagatattcggaggaacaccagtggcgaaggcggctcactggtccattactgacgctgaggtgcgaaagcgtggggagcaaacaggattagataccctggtagtccacgccgtaaacgatgaatgttagccgtcggcaagtttacttgtcggtggcgcagctaacgcattaaacattccgcctggggagtacggtcgcaagattaaaactcaaaggaattgacgggggcccgcacaagcggtggagcatgtggtttaattcgaagcaacgcgcagaaccttaccagctcttgacatctgggtcgcggttaccggagacggtatccttcagttcggctggacccaagacaggtgctgcatggctgtcgtcagctcgtgtcgtgagatgttgggttaagtcccgcaacgagcgcaaccctcgcccttagttgccagcattcagttgggcactctaaggggactgccggtgataagccgagaggaaggtggggatgacgtcaagtcctcatggcccttacgggctgggctacacacgtgctacaatggtggtgacagtgggcagcgagacagcgatgtcgagctaatctccaaaagccatctcagttcggattgcactctgcaactcgagtgcatgaagttggaatcgctagtaatcgcggatcagcatgccgcggtgaatacgttcccgggccttgtacacaccgcccgtcacaccatgggagttggttttacccgaaggtagtgcgctaacccgcaagggaggcagctaaccacggtagggtcagcg

SEQ ID NO: 2889 - DNA, 1371 bp, Rhizobium jaguaris
agtcgagcgccccgcaaggggagcggcagacgggtgagtaacgcgtgggaatctacccttttctacggaataacgcagggaaacttgtgctaataccgtatgtgtccttcgggagaaagatttatcgggaaaggatgagcccgcgttggattagctagttggtggggtaaaggcctaccaaggcgacgatccatagctggtctgagaggatgatcagccacattgggactgagacacggcccaaactcctacgggaggcagcagtggggaatattggacaatgggcgcaagcctgatccagccatgccgcgtgagtgatgaaggccctagggttgtaaagctctttcaccggagaagataatgacggtatccggagaagaagccccggctaacttcgtgccagcagccgcggtaatacgaagggggctagcgttgttcggaattactgggcgtaaagcgcacgtaggcggatcgatcagtcaggggtgaaatcccagggctcaaccctggaactgcctttgatactgtcgatctggagtatggaagaggtgagtggaattccgagtgtagaggtgaaattcgtagatattcggaggaacaccagtggcgaaggcggctcactggtccattactgacgctgaggtgcgaaagcgtggggagcaaacaggattagataccctggtagtccacgccgtaaacgatgaatgttagccgtcgggcagtatactgttcggtggcgcagctaacgcattaaacattccgcctggggagtacggtcgcaagattaaaactcaaaggaattgacgggggcccgcacaagcggtggagcatgtggtttaattcgaagcaacgcgcagaaccttaccagcccttgacatcctgtgttacccagagagatttggggtccacttcggtggcgcagagacaggtgctgcatggctgtcgtcagctcgtgtcgtgagatgttgggttaagtcccgcaacgagcgcaaccctcgcccttagttgccagcatttagttgggcactctaaggggactgccggtgataagccgagaggaaggtggggatgacgtcaagtcctcatggcccttacgggctgggctacacacgtgctacaatggtggtgacagtgggcagcgagcacgcgagtgtgagctaatctccaaaagccatctcagttcggattgcactctgcaactcgagtgcatgaagttggaatcgctagtaatcgcggatcagcatgccgcggtgaatacgttcccgggccttgtacacaccgcccgtcacaccatgggagttggttttacccgaaggtagtgcgctaaccgcaaggaggcagctaaccacggtagggtcagcgactggggtg

SEQ ID NO: 2890 - DNA, 1403 bp, Rhizobium laguerreae; identical to SEQ ID NO: 2878

SEQ ID NO: 2891 - DNA, 1403 bp, Rhizobium leguminosarum; identical to SEQ ID NO: 2878

SEQ ID NO: 2892 - DNA, 1403 bp, Rhizobium loessense
aacgaacgctggcggcaggcttaacacatgcaagtcgagcgccccgcaaggggagcggcagacgggtgagtaacgcgtgggaacgtaccctttactacggaataacgcagggaaacttgtgctaataccgtatgtgcccttcgggggaaagatttatcggtaagggatcggcccgcgttggattagctagttggtggggtaaaggcctaccaaggcgacgatccatagctggtctgagaggatgatcagccacattgggactgagacacggcccaaactcctacgggaggcagcagtggggaatattggacaatgggcgcaagcctgatccagccatgccgcgtgagtgatgaaggccctagggttgtaaagctctttcaccggagaagataatgacggtatccggagaagaagccccggctaacttcgtgccagcagccgcggtaatacgaagggggctagcgttgttcggaattactgggcgtaaagcgcacgtaggcggacatttaagtcaggggtgaaatcccagagctcaactctggaactgcctttgatactgggtgtctggagtatggaagaggtgagtggaattccgagtgtagaggtgaaattcgtagatattcggaggaacaccagtggcgaaggcggctcactggtccattactgacgctgaggtgcgaaagcgtggggagcaaacaggattagataccctggtagtccacgccgtaaacgatgaatgttagccgtcggcaagtttacttgtcggtggcgcagctaacgcattaaacattccgcctggggagtacggtcgcaagattaaaactcaaaggaattgacgggggcccgcacaagcggtggagcatgtggtttaattcgaagcaacgcgcagaaccttaccagcccttgacatgcccggcgacctacagagatgtagggttcccttcggggaccgggacacaggtgctgcatggctgtcgtcagctcgtgtcgtgagatgttgggttaagtcccgcaacgagcgcaaccctcgcccttagttgccagcattgagttgggcactctaaggggactgccggtgataagccgagaggaaggtggggatgacgtcaagtcctcatggcccttacgggctgggctacacacgtgctacaatggtggtgacagtgggcagcgagcacgcgagtgtgagctaatctccaaaagccatctcagttcggattgcactctgcaactcgagtgcatgaagttggaatcgctagtaatcgcggatcagcatgccgcggtgaatacgttcccgggccttgtacacaccgcccgtcacaccatgggagttggttttacccgaaggtagtgcgctaaccgcaaggaggcagctaaccacggtagggtcagcgactggggtg

SEQ ID NO: 2893 - DNA, 1403 bp, Rhizobium lusitanum
aacgaacgctggcggcaggcttaacacatgcaagtcgagcgccccgcaaggggagcggcagacgggtgagtaacgcgtgggaatctacccttttctacggaataacgcagggaaacttgtgctaataccgtatgtgtccttcgggagaaagatttatcgggaaaggatgagcccgcgttggattagctagttggtggggtaaaggcctaccaaggcgacgatccatagctggtctgagaggatgatcagccacattgggactgagacacggcccaaactcctacgggaggcagcagtggggaatattggacaatgggcgcaagcctgatccagccatgccgcgtgagtgatgaaggccctagggttgtaaagctctttcaccggagaagataatgacggtatccggagaagaagccccggctaacttcgtgccagcagccgcggtaatacgaagggggctagcgttgttcggaattactgggcgtaaagcgcacgtaggcggatcgatcagtcaggggtgaaatcccagggctcaaccctggaactgcctttgatactgtcgatctggagtatggaagaggtgagtggaattccgagtgtagaggtgaaattcgtagatattcggaggaacaccagtggcgaaggcggctcactggtccattactgacgctgaggtgcgaaagcgtggggagcaaacaggattagataccctggtagtccacgccgtaaacgatgaatgttagccgtcgggcagtatactgttcggtggcgcagctaacgcattaaacattccgcctggggagtacggtcgcaagattaaaactcaaaggaattgacgggggcccgcacaagcggtggagcatgtggtttaattcgaagcaacgcgcagaaccttaccagcccttgacatcctgtgttacccgtagagatatggggtccacttcggtggcgcagagacaggtgctgcatggctgtcgtcagctcgtgtcgtgagatgttgggttaagtcccgcaacgagcgcaaccctcgcccttagttgccagcatttagttgggcactctaaggggactgccggtgataagccgagaggaaggtggggatgacgtcaagtcctcatggcccttacgggctgggctacacacgtgctacaatggtggtgacagtgggcagcgagcacgcgagtgtgagctaatctccaaaagccatctcagttcggattgcactctgcaactcgagtgcatgaagttggaatcgctagtaatcgcggatcagcatgccgcggtgaatacgttcccgggccttgtacacaccgcccgtcacaccatgggagttggttttacccgaaggtagtgcgctaaccgcaaggaggcagctaaccacggtagggtcagcgactggggtg

SEQ ID NO: 2894 - DNA, 1349 bp, Rhizobium mesoamericanum
gcggcagacgggtgagtaacgcgtgggaacgtaccctttgctacggaataacccagggaaacttggactaataccgtatgtgcccttcgggggaaagatttatcggcaaaggatcggcccgcgttggattagctagttggtggggtaaaggcctaccaaggcgacgatccatagctggtctgagaggatgatcagccacattgggactgagacacggcccaaactcctacgggaggcagcagtggggaatattggacaatgggcgcaagcctgatccagccatgccgcgtgagtgatgaaggccctagggttgtaaagctctttcaccggtgaagataatgacggtaaccggagaagaagccccggctaacttcgtgccagcagccgcggtaatacgaagggggctagcgttgttcggaattactgggcgtaaagcgcacgtaggcggatcgatcagtcaggggtgaaatcccagagctcaactctggaactgcctttgatactgtcgatctggagtatggaagaggtgagtggaattccgagtgtagaggtgaaattcgtagatattcggaggaacaccagtggcgaaggcggctcactggtccattactgacgctgaggtgcgaaagcgtggggagcaaacaggattagataccctggtagtccacgccgtaaacgatgaatgttagccgtcgggcagtatactgttcggtggcgcagctaacgcattaaacattccgcctggggagtacggtcgcaagattaaaactcaaaggaattgacgggggcccgcacaagcggtggagcatgtggtttaattcgaagcaacgcgcagaaccttaccagcccttgacatcctcggacagctgcagagatgcagtctccacttcggtggccgagagacaggtgctgcatggctgtcgtcagctcgtgtcgtgagatgttgggttaagtcccgcaacgagcgcaaccctcgcccttagttgccagcatttagttgggcactctaaggggactgccggtgataagccgagaggaaggtggggatgacgtcaagtcctcatggcccttacgggctgggctacacacgtgctacaatggtggtgacagtgggcagcgagaccgcgaggtcgagctaatctccaaaagccatctcagttcggattgcactctgcaactcgagtgcatgaagttggaatcgctagtaatcgcggatcagcatgccgcggtgaatacgttcccgggccttgtacacaccgcccgtcacaccatgggagttggttttacccgaaggtagtgtgctaaccgcaaggaggcagctaaccacggtagggtcagcgactggggtg

SEQ ID NO: 2895 - DNA, 1403 bp, Rhizobium miluonense
aacgaacgctggcggcaggcttaacacatgcaagtcgagcgccccgcaaggggagcggcagacgggtgagtaacgcgtgggaatctaccttttgctacggaataacgcagggaaacttgtgctaataccgtatgtgtccttcgggagaaagatttatcggcaagagatgagcccgcgttggattagctagttggtggggtaaaggcctaccaaggcgacgatccatagctggtctgagaggatgatcagccacattgggactgagacacggcccaaactcctacgggaggcagcagtggggaatattggacaatgggcgcaagcctgatccagccatgccgcgtgagtgatgaaggccctagggttgtaaagctctttcaccggagaagataatgacggtatccggagaagaagccccggctaacttcgtgccagcagccgcggtaatacgaagggggctagcgttgttcggaattactgggcgtaaagcgcacgtaggcggatcgatcagtcaggggtgaaatcccagggctcaaccctggaactgcctttgatactgtcgatctggagtatggaagaggtgagtggaattccgagtgtagaggtgaaattcgtagatattcggaggaacaccagtggcgaaggcggctcactggtccattactgacgctgaggtgcgaaagcgtggggagcaaacaggattagataccctggtagtccacgccgtaaacgatgaatgttagccgtcgggcagtatactgttcggtggcgcagctaacgcattaaacattccgcctggggagtacggtcgcaagattaaaactcaaaggaattgacgggggcccgcacaagcggtggagcatgtggtttaattcgaagcaacgcgcagaaccttaccagcccttgacatcctgtgttacccgtagagatatggggtccacttcggtggcgcagagacaggtgctgcatggctgtcgtcagctcgtgtcgtgagatgttgggttaagtcccgcaacgagcgcaaccctcgcccttagttgccagcatttagttgggcactctaaggggactgccggtgataagccgagaggaaggtggggatgacgtcaagtcctcatggcccttacgggctgggctacacacgtgctacaatggtggtgacagtgggcagcgagcacgcgagtgtgagctaatctccaaaagccatctcagttcggattgcactctgcaactcgagtgcatgaagttggaatcgctagtaatcgcggatcagcatgccgcggtgaatacgttcccgggccttgtacacaccgcccgtcacaccatgggagttggttttacccgaaggtagtgcgctaaccgcaaggaggcagctaaccacggtagggtcagcgactggggtg

SEQ ID NO: 2896 - DNA, 1403 bp, Rhizobium mongolense
aacgaacgctggcggcaggcttaacacatgcaagtcgagcgccccgcaaggggagcggcagacgggtgagtaacgcgtgggaacgtaccctttactacggaataacgcagggaaacttgtgctaataccgtatgtgcccttcgggggaaagatttatcggtaagggatcggcccgcgttggattagctagttggtggggtaaaggcctaccaaggcgacgatccatagctggtctgagaggatgatcagccacattgggactgagacacggcccaaactcctacgggaggcagcagtggggaatattggacaatgggcgcaagcctgatccagccatgccgcgtgagtgatgaaggccctagggttgtaaagctctttcaccggagaagataatgacggtatccggagaagaagccccggctaacttcgtgccagcagccgcggtaatacgaagggggctagcgttgttcggaattactgggcgtaaagcgcacgtaggcggacatttaagtcaggggtgaaatcccagagctcaactctggaactgcctttgatactgggtgtctggagtatggaagaggtgagtggaattccgagtgtagaggtgaaattcgtagatattcggaggaacaccagtggcgaaggcggctcactggtccattactgacgctgaggtgcgaaagcgtggggagcaaacaggattagataccctggtagtccacgccgtaaacgatgaatgttagccgtcggcaagtttacttgtcggtggcgcagctaacgcattaaacattccgcctggggagtacggtcgcaagattaaaactcaaaggaattgacgggggcccgcacaagcggtggagcatgtggtttaattcgaagcaacgcgcagaaccttaccagcccttgacatgcccggccacctacagagatgtagggttcccttcggggaccgggacacaggtgctgcatggctgtcgtcagctcgtgtcgtgagatgttgggttaagtcccgcaacgagcgcaaccctcgcccttagttgccagcattcagttgggcactctaaggggactgccggtgataagccgagaggaaggtggggatgacgtcaagtcctcatggcccttacgggctgggctacacacgtgctacaatggtggtgacagtgggcagcgagcacgcgagtgtgagctaatctccaaaagccatctcagttcggattgcactctgcaactcgagtgcatgaagttggaatcgctagtaatcgcggatcagcatgccgcggtgaatacgttcccgggccttgtacacaccgcccgtcacaccatgggagttggttttacccgaaggtagtgcgctaaccgcaaggaggcagctaaccacggtagggtcagcgactggggtg

SEQ ID NO: 2897 - DNA, 1403 bp, Rhizobium multihospitium; identical to SEQ ID NO: 2883

SEQ ID NO: 2898 - DNA, 1407 bp, Rhizobium nepotum
aacgaacgctggcggcaggcttaacacatgcaagtcgaacgccccgcaaggggagtggcagacgggtgagtaacgcgtgggaatctaccgtgccctgcggaatagctctgggaaactggaattaataccgcatacgccctacgggggaaagatttatcggggtatgatgagcccgcgttggattagctagttggtggggtaatggcctaccaaggcgacgatccatagctggtctgagaggatgatcagccacattgggactgagacacggcccaaactcctacgggaggcagcagtggggaatattggacaatgggcgcaagcctgatccagccatgccgcgtgagtgatgaaggccttagggttgtaaagctctttcaccggagaagataatgacggtatccggagaagaagccccggctaacttcgtgccagcagccgcggtaatacgaagggggctagcgttgttcggaattactgggcgtaaagcgcacgtaggcggatatttaagtcaggggtgaaatcccagagctcaactctggaactgcctttgatactgggtatcttgagtatggaagaggtaagtggaattccgagtgtagaggtgaaattcgtagatattcggaggaacaccagtggcgaaggcggcttactggtccattactgacgctgaggtgcgaaagcgtggggagcaaacaggattagataccctggtagtccacgccgtaaacgatgaatgttagccgtcgggcagtatactgttcggtggcgcagctaacgcattaaacattccgcctggggagtacggtcgcaagattaaaactcaaaggaattgacgggggcccgcacaagcggtggagcatgtggtttaattcgaagcaacgcgcagaaccttaccagctcttgacattcggggtttgggcagtggagacattgtccttcagttaggctggccccagaacaggtgctgcatggctgtcgtcagctcgtgtcgtgagatgttgggttaagtcccgcaacgagcgcaaccctcgcccttagttgccagcatttagttgggcactctaaggggactgccggtgataagccgagaggaaggtggggatgacgtcaagtcctcatggcccttacgggctgggctacacacgtgctacaatggtggtgacagtgggcagcgagacagcgatgtcgagctaatctccaaaagccatctcagttcggattgcactctgcaactcgagtgcatgaagttggaatcgctagtaatcgcagatcagcatgctgcggtgaatacgttcccgggccttgtacacaccgcccgtcacaccatgggagttggttttacccgaaggtagtgcgctaaccgcaaggaggcagctaaccacggtagggtcagcgactggggtg

SEQ ID NO: 2899 - DNA, 1425 bp, Rhizobium oryzae
cgaacgctggcggcaggcttaacacatgcaagtcgagcgcgtagcaatacgagcggcagacgggtgagtaacgcgtgggaacgtaccctttactacggaatagctccgggaaactggaattaataccgtatgtgccctttgggggaaagatttatcggtaaaggatcggcccgcgttggattagctagttggtggggtaaaggcctaccaaggcgacgatccatagctggtctgagaggatgatcagccacattgggactgagacacggcccaaactcctacgggaggcagcagtggggaatattggacaatgggcgcaagcctgatccagccatgccgcgtgagtgatgaaggccttagggttgtaaagctctttcaccggagaagataatgacggtatccggagaagaagccccggctaacttcgtgccagcagccgcggtaatacgaagggggctagcgttgttcggaattactgggcgtaaagcgcacgtaggcggacatttaagtcaggggtgaaatcccggggctcaaccccggaactgcctttgatactgggtgtcttgagtgtggaagaggtgagtggaattgcgagtgtagaggtgaaattcgtagatattcgcaggaacaccagtggcgaaggcggctcactggtccacaactgacgctgaggtgcgaaagcgtggggagcaaacaggattagataccctggtagtccacgccgtaaacgatgaatgctagccgtcgggcagtttactgttcggtggcgccgctaacgctttaagcattccgcctggggagtacggtcgcaagattaaaactcaaaggaattgacgggggcccgcacaagcggtggagcatgtggtttaattcgaagcaacgcgcagaaccttaccagcccttgacatcccgtgaccggtgcagagatgcacttttcccttcggggacgcggagacaggtgctgcatggctgtcgtcagctcgtgtcgtgagatgttgggttaagtcccgcaacgagcgcaaccctcgcccttagttgccagcatttggttgggcactctaaggggactgccggtgataagccgagaggaaggtggggatgacgtcaagtcctcatggcccttacgggctgggctacacacgtgctacaatggtggtgacagtgggcagcgagcgcgcgagcgtgagctaatctccaaaagccatctcagttcggattgcactctgcaactcgagtgcatgaagttggaatcgctagtaatcgcggatcagcatgccgcggtgaatacgttcccgggccttgtacacaccgcccgtcacaccatgggagttggttttacccgaaggtcgtgcgctaaccgcaaggaggcagcgaaccacggtagggtcagcgactggggtgaagtcgtaacaaggtaaaccgtaa

SEQ ID NO: 2900 - DNA, 1405 bp, Rhizobium oryziradicis
aacgaacgctggcggcaggcttaacacatgcaagtcgaacgcatccttcggggtgagtggcagacgggtgagtaacgcgtgggaatctaccgtaccctacggaatagctctgggaaactggaagtaataccgtatacgcccgcaaggggaaagatttatcggggtatgatgagcccgcgttggattagctagttggtggggtaaaggcctaccaaggcgacgatccatagctggtctgagaggatgatcagccacattgggactgagacacggcccaaactcctacgggaggcagcagtggggaatattggacaatgggcgcaagcctgatccagccatgccgcgtgagtgatgaaggtcttaggattgtaaagctctttcaccggagaagataatgacggtatccggagaagaagccccggctaacttcgtgccagcagccgcggtaatacgaagggggctagcgttgttcggaattactgggcgtaaagcgcacgtaggcgggtatttaagtcaggggtgaaatcccagagctcaactctggaactgcctttgatactgggtatcttgagtatggaagaggtaagtggaattgcgagtgtagaggtgaaattcgtagatattcgcaggaacaccagtggcgaaggcggcttactggtccattactgacgctgaggtgcgaaagcgtggggagcaaacaggattagataccctggtagtccacgccgtaaacgatgaatgttagccgtcggcaagttgacttgtcggtggcgcagctaacgcattaaacattccgcctggggagtacggtcgcaagattaaaactcaaaggaattgacgggggcccgcacaagcggtggagcatgtggtttaattcgaagcaacgcgcagaaccttaccagctcttgacatcctacgcccgctacagagatgtagttttcccttcggggacgtagagacaggtgctgcatggctgtcgtcagctcgtgtcgtgagatgttgggttaagtcccgcaacgagcgcaaccctcgcccttagttgccagcattaggttgggcactctaaggggactgccggtgataagccgagaggaaggtggggatgacgtcaagtcctcatggcccttacgggctgggctacacacgtgctacaatggtggtgacagtgggcagcgagaccgcgaggtcgagctaatctccaaaagccatctcagttcggattgcactctgcaactcgagtgcatgaagttggaatcgctagtaatcgcagatcagcatgctgcggtgaatacgttcccgggccttgtacacaccgcccgtcacaccatgggagttggttttacccgaaggtcgtgcgctaaccgcaaggaggcagcgaaccacggtagggtcagcgactggggtg

SEQ ID NO: 2901 - DNA, 1403 bp, Rhizobium phaseoli
aacgaacgctggcggcaggcttaacacatgcaagtcgagcgccccgcaaggggagcggcagacgggtgagtaacgcgtgggaacgtaccctttactacggaataacgcagggaaacttgtgctaataccgtatgtgcccttcgggggaaagatttatcggtaaaggatcggcccgcgttggattagctagttggtggggtaaaggcctaccaaggcgacgatccatagctggtctgagaggatgatcagccacattgggactgagacacggcccaaactcctacgggaggcagcagtggggaatattggacaatgggcgcaagcctgatccagccatgccgcgtgagtgatggaggccctagggttgtaaagctctttcaccggagaagataatgacggtatccggagaagaagccccggctaacttcgtgccagcagccgcggtaatacgaagggggctagcgttgttcggaattactgggcgtaaagcgcacgtaggcggatcgatcagtcaggggtgaaatcccagggctcaaccctggaactgcctttgatactgtcgatctggagtatggaagaggtgagtggaattccgagtgtagaggtgaaattcgtagatattcggaggaacaccagtggcgaaggcggctcactggtccattactgacgctgaggtgcgaaagcgtggggagcaaacaggattagataccctggtagtccacgccgtaaacgatgaatgttagccgtcgggcagtatactgttcggtggcgcagctaacgcattaaacattccgcctggggagtacggtcgcaagattaaaactcaaaggaattgacgggggcccgcacaagcggtggagcatgtggtttaattcgaagcaacgcgcagaaccttaccagcccttgacatgcccggctacttgcagagatgcaaggttcccttcggggaccgggacacaggtgctgcatggctgtcgtcagctcgtgtcgtgagatgttgggttaagtcccgcaacgagcgcaaccctcgcccttagttgccagcattcagttgggcactctaaggggactgccggtgataagccgagaggaaggtggggatgacgtcaagtcctcatggcccttacgggctgggctacacacgtgctacaatggtggtgacagtgggcagcgagcacgcgagtgtgagctaatctccaaaagccatctcagttcggattgcactctgcaactcgagtgcatgaagttggaatcgctagtaatcgcggatcagcatgccgcggtgaatacgttcccgggccttgtacacaccgcccgtcacaccatgggagttggttttacccgaaggtagtgcgctaaccgcaaggaggcagctaaccacggtagggtcagcgactggggtg

SEQ ID NO: 2902 - DNA, 1403 bp, Rhizobium pisi
aacgaacgctggcggcaggcttaacacatgcaagtcgagcgccccgcaaggggagcggcagacgggtgagtaacgcgtgggaacgtaccctttactacggaataacgcagggaaacttgtgctaataccgtatgtgccctttgggggaaagatttatcggtaaaggatcggcccgcgttggattagctagttggtggggtaaaggcctaccaaggcgacgatccatagctggtctgagaggatgatcagccacattgggactgagacacggcccaaactcctacgggaggcagcagtggggaatattggacaatgggcgcaagcctgatccagccatgccgcgtgagtgatgaaggccctagggttgtaaagctctttcaccggagaagataatgacggtatccggagaagaagccccggctaacttcgtgccagcagccgcggtaatacgaagggggctagcgttgttcggaattactgggcgtaaagcgcacgtaggcggatcgatcagtcaggggtgaaatcccagggctcaaccctggaactgcctttgatactgtcgatctggagtatggaagaggtgagtggaattccgagtgtagaggtgaaattcgtagatattcggaggaacaccagtggcgaaggcggctcactggtccattactgacgctgaggtgcgaaagcgtggggagcaaacaggattagataccctggtagtccacgccgtaaacgatgaatgttagccgtcgggcagtatactgttcggtggcgcagctaacgcattaaacattccgcctggggagtacggtcgcaagattaaaactcaaaggaattgacgggggcccgcacaagcggtggagcatgtggtttaattcgaagcaacgcgcagaaccttaccagcccttgacatgcccggctacttgcagagatgcaaggttcccttcggggaccgggacacaggtgctgcatggctgtcgtcagctcgtgtcgtgagatgttgggttaagtcccgcaacgagcgcaaccctcgcccttagttgccagcattcagttgggcactctaaggggactgccggtgataagccgagaggaaggtggggatgacgtcaagtcctcatggcccttacgggctgggctacacacgtgctacaatggtggtgacagtgggcagcgagcacgcgagtgtgagctaatctccaaaagccatctcagttcggattgcactctgcaactcgagtgcatgaagttggaatcgctagtaatcgcggatcagcatgccgcggtgaatacgttcccgggccttgtacacaccgcccgtcacaccatgggagttggttttacccgaaggtagtgcgctaaccgcaaggaggcagctaaccacggtagggtcagcgactggggtg

SEQ ID NO: 2903 - DNA, 1407 bp, Rhizobium pusense
aacgaacgctggcggcaggcttaacacatgcaagtcgaacgccccgcaaggggagtggcagacgggtgagtaacgcgtgggaacataccctttcctgcggaatagctccgggaaactggaattaataccgcatacgccctacgggggaaagatttatcggggaaggattggcccgcgttggattagctagttggtggggtaaaggcctaccaaggcgacgatccatagctggtctgagaggatgatcagccacattgggactgagacacggcccaaactcctacgggaggcagcagtggggaatattggacaatgggcgcaagcctgatccagccatgccgcgtgagtgatgaaggccttagggttgtaaagctctttcaccgatgaagataatgacggtagtcggagaagaagccccggctaacttcgtgccagcagccgcggtaatacgaagggggctagcgttgttcggaattactgggcgtaaagcgcacgtaggcggatatttaagtcaggggtgaaatcccgcagctcaactgcggaactgcctttgatactgggtatcttgagtatggaagaggtaagtggaattccgagtgtagaggtgaaattcgtagatattcggaggaacaccagtggcgaaggcggcttactggtccattactgacgctgaggtgcgaaagcgtggggagcaaacaggattagataccctggtagtccacgccgtaaacgatgaatgttagccgtcgggcagtatactgttcggtggcgcagctaacgcattaaacattccgcctggggagtacggtcgcaagattaaaactcaaaggaattgacgggggcccgcacaagcggtggagcatgtggtttaattcgaagcaacgcgcagaaccttaccagctcttgacattcggggtatgggcattggagacgatgtccttcagttaggctggccccagaacaggtgctgcatggctgtcgtcagctcgtgtcgtgagatgttgggttaagtcccgcaacgagcgcaaccctcgcccttagttgccagcatttagttgggcactctaaggggactgccggtgataagccgagaggaaggtggggatgacgtcaagtcctcatggcccttacgggctgggctacacacgtgctacaatggtggtgacagtgggcagcgagacagcgatgtcgagctaatctccaaaagccatctcagttcggattgcactctgcaactcgagtgcatgaagttggaatcgctagtaatcgcagatcagcatgctgcggtgaatacgttcccgggccttgtacacaccgcccgtcacaccatgggagttggttttacccgaaggtagtgcgctaaccgcaaggaggcagctaaccacggtagggtcagcgactggggtg

SEQ ID NO: 2904 - DNA, 1407 bp, Rhizobium radiobacter
aacgaacgctggcggcaggcttaacacatgcaagtcgaacgccccgcaaggggagtggcagacgggtgagtaacgcgtgggaacataccctttcctgcggaatagctccgggaaactggaattaataccgcatacgccctacgggggaaagatttatcggggaaggattggcccgcgttggattagctagttggtggggtaaaggcctaccaaggcgacgatccatagctggtctgagaggatgatcagccacattgggactgagacacggcccaaactcctacgggaggcagcagtggggaatattggacaatgggcgcaagcctgatccagccatgccgcgtgagtgatgaaggccttagggttgtaaagctctttcaccggagaagataatgacggtatccggagaagaagccccggctaacttcgtgccagcagccgcggtaatacgaagggggctagcgttgttcggaattactgggcgtaaagcgcacgtaggcggatatttaagtcaggggtgaaatcccagagctcaactctggaactgcctttgatactgggtatcttgagtatggaagaggtaagtggaattccgagtgtagaggtgaaattcgtagatattcggaggaacaccagtggcgaaggcggcttactggtccattactgacgctgaggtgcgaaagcgtggggagcaaacaggattagataccctggtagtccacgccgtaaacgatgaatgttagccgtcgggcagtatactgttcggtggcgcagctaacgcattaaacattccgcctggggagtacggtcgcaagattaaaactcaaaggaattgacgggggcccgcacaagcggtggagcatgtggtttaattcgaagcaacgcgcagaaccttaccagctcttgacattcggggtttgggcagtggagacattgtccttcagttaggctggccccagaacaggtgctgcatggctgtcgtcagctcgtgtcgtgagatgttgggttaagtcccgcaacgagcgcaaccctcgcccttagttgccagcatttagttgggcactctaaggggactgccggtgataagccgagaggaaggtggggatgacgtcaagtcctcatggcccttacgggctgggctacacacgtgctacaatggtggtgacagtgggcagcgagacagcgatgtcgagctaatctccaaaagccatctcagttcggattgcactctgcaactcgagtgcatgaagttggaatcgctagtaatcgcagatcagcatgctgcggtgaatacgttcccgggccttgtacacaccgcccgtcacaccatgggagttggttttacccgaaggtagtgcgctaaccgcaaggaggcagctaaccacggtagggtcagcgactggggtg

SEQ ID NO: 2905 - DNA, 1403 bp, Rhizobium rhizosphaerae
aacgaacgctggcggcaggcttaacacatgcaagtcgagcgcgtagcaatacgagcggcagacgggtgagtaacgcgtgggaacgtaccctttactacggaatagctccgggaaactggaattaataccgtatgtgccctttgggggaaagatttatcggtaaaggatcggcccgcgttggattagctagttggtggggtaaaggcctaccaaggcgacgatccatagctggtctgagaggatgatcagccacattgggactgagacacggcccaaactcctacgggaggcagcagtggggaatattggacaatgggcgcaagcctgatccagccatgccgcgtgagtgatgaaggccttagggttgtaaagctctttcaccggagaagataatgacggtatccggagaagaagccccggctaacttcgtgccagcagccgcggtaatacgaagggggctagcgttgttcggaattactgggcgtaaagcgcacgtaggcggacatttaagtcaggggtgaaatcccggggctcaaccccggaactgcctttgatactgggtgtcttgagtgtggaagaggtgagtggaattgcgagtgtagaggtgaaattcgtagatattcgcaggaacaccagtggcgaaggcggctcactggtccacaactgacgctgaggtgcgaaagcgtggggagcaaacaggattagataccctggtagtccacgccgtaaacgatgaatgctagccgtcgggcagtttactgttcggtggcgccgctaacgctttaagcattccgcctggggagtacggtcgcaagattaaaactcaaaggaattgacgggggcccgcacaagcggtggagcatgtggtttaattcgaagcaacgcgcagaaccttaccagcccttgacatcccgagaccggtccagagatggactttccacttcggtggctcggagacaggtgctgcatggctgtcgtcagctcgtgtcgtgagatgttgggttaagtcccgcaacgagcgcaaccctcgcccttagttgccagcatttggttgggcactctaaggggactgccggtgataagccgagaggaaggtggggatgacgtcaagtcctcatggcccttacgggctgggctacacacgtgctacaatggtggtgacagtgggcagcgagaccgcgaggtcgagctaatctccaaaagccatctcagttcggattgcactctgcaactcgagtgcatgaagttggaatcgctagtaatcgcggatcagcatgccgcggtgaatacgttcccgggccttgtacacaccgcccgtcacaccatgggagttggttttacccgaaggcgctgcgctaaccgcaaggaggcaggcgaccacggtagggtcagcgactggggtg

SEQ ID NO: 2906 - DNA, 1409 bp, Rhizobium selenitireducens
aacgaacgctggcggcaggcttaacacatgcaagtcgagcgccccgcaaggggagcggcagacgggtgagtaacgcgtgggaatctaccgagccctacggaataacgcatggaaacgtgtgctaataccgtatacgccctacgggggaaagatttatcggggtttgatgagcccgcgttggattagctagttggtggggtaaaggcctaccaaggcgacgatccatagctggtctgagaggatgatcagccacattgggactgagacacggcccaaactcctacgggaggcagcagtggggaatattggacaatgggcgcaagcctgatccagccatgccgcgtgagtgatgaaggtcttaggattgtaaagctctttcaccggagaagataatgacggtatccggagaagaagccccggctaacttcgtgccagcagccgcggtaatacgaagggggctagcgttgttcggaattactgggcgtaaagcgcacgtaggcggatatttaagtcaggggtgaaatcccagagctcaactctggaactgcctttgatactgggtatctagagtatggaagaggtgagtggaattccgagtgtagaggtgaaattcgtagatattcggaggaacaccagtggcgaaggcggctcactggtccattactgacgctgaggtgcgaaagcgtggggagcaaacaggattagataccctggtagtccacgccgtaaacgatgaatgttagccgtcgggcagcttgctgttcggtggcgcagctaacgcattaaacattccgcctggggagtacggtcgcaagattaaaactcaaaggaattgacgggggcccgcacaagcggtggagcatgtggtttaattcgaagcaacgcgcagaaccttaccagctcttgacattcggggtatgggcagtggagacattgtccttcagttcggctggccccagaacaggtgctgcatggctgtcgtcagctcgtgtcgtgagatgttgggttaagtcccgcaacgagcgcaaccctcgcccttagttgccagcattcagttgggcactctaaggggactgccggtgataagccgagaggaaggtggggatgacgtcaagtcctcatggcccttacgggctgggctacacacgtgctacaatggtggtgacagtgggcagcgagaccgcgaggtcgagctaatctccaaaagccatctcagttcggattgcactctgcaactcgagtgcatgaagttggaatcgctagtaatcgcagatcagcatgctgcggtgaatacgttcccgggccttgtacacaccgcccgtcacaccatgggagttggttttacccgaaggtagtgcgctaacccgcaagggaggcagctaaccacggtagggtcagcgactggggtg

SEQ ID NO: 2907 - DNA, 1336 bp, Rhizobium smilacinae
tgcaagtcgagcgcctcgcaagaggagcggcagacgggtgagtaacacgtgggaacataccctttactacggaacaactccgggaaactggagctaataccgtatgtgcccttcgggggaaagatttatcggtaaaggattggcccgcgttggattagctagttggtggggtaaaggcctaccaaggcgacgatccatagctggtctgagaggatgatcagccacattgggactgagacacggcccaaactcctacgggaggcagcagtggggaatattggacaatgggcgcaagcctgatccagccatgccgcgtgtgtgatgaaggccttagggttgtaaagcactttcaccgatgaagataatgacggtagtcggagaagaagccccggctaacttcgtgccagcagccgcggtaatacgaagggggctagcgttgttcggaattactgggcgtaaagcgcacgtaggcggatatttaagtcaggggtgaaatcccgcagctcaactgcggaactgcctttgatactgggtatcttgagtatggaagaggttagtggaattgcgagtgtagaggtgaaattcgtagatattcgcaggaacaccagtggcgaaggcggctaactggtccataactgacgctgaggtgcgaaagcgtggggagcaaacaggattagataccctggtagtccacgccgtaaacgatgaatgttagccgtcggcaagtttacttgtcggtggcgcagctaacgcattaaacattccgcctggggagtacggtcgcaagattaaaactcaaaggaattgacgggggcccgcacaagcggtggagcatgtggtttaattcgaagcaacgcgcagaaccttaccagcccttgacatgccctgacagccagagagatttggtttccacttcggtggcagggacacaggtgctgcatggctgtcgtcagctcgtgtcgtgagatgttgggttaagtcccgcaacgagcgcaaccctcgcccttagttgccagcattcagttgggcactctaaggggactgccggtgataagccgagaggaaggtggggatgacgtcaagtcctcatggcccttacgggctgggctacacacgtgctacaatggtggtgacagtgggcagcgaaggagcgatcccgagctaatctccaaaagccatctcagttcggattgcactctgcaactcgagtgcatgaagttggaatcgctagtaatcgcggatcagcacgccgcggtgaatacgttcccgggccttgtacacaccgcccgtcacaccatgggagttggttttacccgaaggtagtgcgctaaccgca

SEQ ID NO: 2908 - DNA, 1362 bp, Rhizobium sophoriradicis
aacatgcaagtcgagcgccccgcaaggggagcggcagacgggtgagtaacgcgtgggaacgtaccctttactacggaataacgcagggaaacttgtgctaataccgtatgtgcccttcgggggaaagatttatcggtaaaggatcggcccgcgttggattagctagttggtggggtaaaggcctaccaaggcgacgatccatagctggtctgagaggatgatcagccacattgggactgagacacggcccaaactcctacgggaggcagcagtggggaatattggacaatgggcgcaagcctgatccagccatgccgcgtgagtgatgaaggccctagggttgtaaagctctttcaccggagaagataatgacggtatccggagaagaagccccggctaacttcgtgccagcagccgcggtaatacgaagggggctagcgttgttcggaattactgggcgtaaagcgcacgtaggcggatcgatcagtcaggggtgaaatcccagggctcaaccctggaactgcctttgatactgtcgatctggagtatggaagaggtgagtggaattccgagtgtagaggtgaaattcgtagatattcggaggaacaccagtggcgaaggcggctcactggtccattactgacgctgaggtgcgaaagcgtggggagcaaacaggattagataccctggtagtccacgccgtaaacgatgaatgttagccgtcgggcagtatactgttcggtggcgcagctaacgcattaaacattccgcctggggagtacggtcgcaagattaaaactcaaaggaattgacgggggcccgcacaagcggtggagcatgtggtttaattcgaagcaacgcgcagaaccttaccagcccttgacatgcccggcgacctgcagagatgcagggttcccttcggggaccgggacacaggtgctgcatggctgtcgtcagctcgtgtcgtgagatgttgggttaagtcccgcaacgagcgcaaccctcgcccttagttgccagcatttagttgggcactctaaggggactgccggtgataagccgagaggaaggtggggatgacgtcaagtcctcatggcccttacgggctgggctacacacgtgctacaatggtggtgacagtgggcagcgagcacgcgagtgtgagctaatctccaaaagccatctcagttcggattgcactctgcaactcgagtgcatgaagttggaatcgctagtaatcgcggatcagcatgccgcggtgaatacgttcccgggccttgtacacaccgcccgtcacaccatgggagttggttttacccgaaggtagtgcgctaaccgcaaggaggcagctaaccacgtagt

SEQ ID NO: 2909 - DNA, 1405 bp, Rhizobium straminoryzae
aacgaacgctggcggcaggcttaacacatgcaagtcgagcgcatccttcggggtgagcggcagacgggtgagtaacgcgtgggaacgtacccttatcttcggaatagctccgggaaactggaattaataccgaatgtgccctttgggggaaagatttatcggataaggatcggcccgcgttggattagctagttggtggggtaaaggcctaccaaggcgacgatccatagctggtctgagaggatgatcagccacattgggactgagacacggcccaaactcctacgggaggcagcagtggggaatattggacaatgggcgcaagcctgatccagccatgccgcgtgagtgatgaaggccctagggttgtaaagctctttcagtagggaagataatgacggtacctacagaagaagccccggctaacttcgtgccagcagccgcggtaatacgaagggggctagcgttgttcggaattactgggcgtaaagcgcacgtaggcggacatttaagtcaggggtgaaatcccggggctcaacctcggaactgcctttgatactgggtgtcttgagtgtggaagaggtcagtggaattgcgagtgtagaggtgaaattcgtagatattcgcaggaacaccagtggcgaaggcggctgactggtccacaactgacgctgaggtgcgaaagcgtggggagcaaacaggattagataccctggtagtccacgccgtaaacgatgaatgttagccgtcgggcagtttactgttcggtggcgccgctaacgcattaaacattccgcctggggagtacggtcgcaagattaaaactcaaaggaattgacgggggcccgcacaagcggtggagcatgtggtttaattcgaagcaacgcgcagaaccttaccagcccttgacatcctacgatcgctgcagagatgcagttttcccttcggggacgtagagacaggtgctgcatggctgtcgtcagctcgtgtcgtgagatgttgggttaagtcccgcaacgagcgcaaccctcgcccttagttgccagcatttggttgggcactctaaggggactgccggtgataagccgagaggaaggtggggatgacgtcaagtcctcatggcccttacgggctgggctacacacgtgctacaatggtggtgacagtgggcagcgagcacgcgagtgtgagctaatctccaaaagccatctcagttcggattgcactctgcaactcgagtgcatgaagttggaatcgctagtaatcgcggatcagcacgccgcggtgaatacgttcccgggccttgtacacaccgcccgtcacaccatgggagttggttttacccgaaggcgctgcgctaaccgcaagggggcaggcgaccacggtagggtcagcgactggggtg

SEQ ID NO: 2910 - DNA, 1403 bp, Rhizobium sullae
aacgaacgctggcggcaggcttaacacatgcaagtcgagcgccccgcaaggggagcggcagacgggtgagtaacgcgtgggaacgtaccctttactacggaataacgcatggaaacgtgtgctaataccgtatgtgcccttcgggggaaagatttatcggtaagggatcggcccgcgttggattagctagttggtggggtaaaggcctaccaaggcgacgatccatagctggtctgagaggatgatcagccacattgggactgagacacggcccaaactcctacgggaggcagcagtggggaatattggacaatgggcgcaagcctgatccagccatgccgcgtgagtgatgaaggccctagggttgtaaagctctttcaccggagaagataatgacggtatccggagaagaagccccggctaacttcgtgccagcagccgcggtaatacgaagggggctagcgttgttcggatttactgggcgtaaagcgcacgtaggcggacatttaagtcaggggtgaaatcccagagctcaactctggaactgcctttgatactgggtgtctggagtatggaagaggtgagtggaattccgagtgtagaggtgaaattcgtagatattcggaggaacaccagtggcgaaggcggctcactggtccattactgacgctgaggtgcgaaagcgtggggagcaaacaggattagataccctggtagtccacgccgtaaacgatgaatgttagccgtcgggcagtttactgttcggtggcgcagctaacgcattaaacattccgcctggggagtacggtcgcaagattaaaactcaaaggaattgacgggggcccgcacaagcggtggagcatgtggtttaattcgaagcaacgcgcagaaccttaccagcccttgacatgcccggctacttgcagagatgcaaggttcccttcggggaccgggacacaggtgctgcatggctgtcgtcagctcgtgtcgtgagatgttgggttaagtcccgcaacgagcgcaaccctcgcccttagttgccagcattcagttgggcactctaaggggactgccggtgataagccgagaggaaggtggggatgacgtcaagtcctcatggcccttacgggctgggctacacacgtgctacaatggtggtgacagtgggcagcgagcacgcgagtgtgagctaatctccaaaagccatctcagttcggattgcactctgcaactcgagtgcatgaagttggaatcgctagtaatcgcggatcagcatgccgcggtgaatacgttcccgggccttgtacacaccgcccgtcacaccatgggagttggttttacccgaaggtagtgcgctaaccgcaaggaggcagctaaccacggtagggtcagcgactggggtg

SEQ ID NO: 2911 - DNA, 1324 bp, Rhizobium taibaishanense
ggcagacgggtgagtaacgcgtgggaatctaccgtaccctacggaatagctccgggaaactggaattaataccgtatacgcccttcgggggaaagatttatcggggtatgatgagcccgcgttggattagctagttggtggggtaaaggcctaccaaggcgacgatccatagctggtctgagaggatgatcagccacattgggactgagacacggcccaaactcctacgggaggcagcagtggggaatattggacaatgggcgcaagcctgatccagccatgccgcgtgagtgatgaaggtcttaggattgtaaagctctttcaccgatgaagataatgacggtagtcggagaagaagccccggctaacttcgtgccagcagccgcggtaatacgaagggggctagcgttgttcggaattactgggcgtaaagcgcacgtaggcggataattaagtcaggggtgaaatcccgcagctcaactgcggaactgcctttgatactggttatcttgagtatggaagaggtaagtggaattgcgagtgtagaggtgaaattcgtagatattcgcaggaacaccagtggcgaaggcggcttactggtccattactgacgctgaggtgcgaaagcgtggggagcaaacaggattagataccctggtagtccacgccgtaaacgatgaatgttagccgtcggcaagttgacttgtcggtggcgcagctaacgcattaaacattccgcctggggagtacggtcgcaagattaaaactcaaaggaattgacgggggcccgcacaagcggtggagcatgtggtttaattcgaagcaacgcgcagaaccttaccagctcttgacatcctgtgaccgctacggagacgtagttttcccttcggggacacagagacaggtgctgcatggctgtcgtcagctcgtgtcgtgagatgttgggttaagtcccgcaacgagcgcaaccctcgcccttagttgccagcatttagttgggcactctaaggggactgccggtgataagccgagaggaaggtggggatgacgtcaagtcctcatggcccttacgggctgggctacacacgtgctacaatggtggtgacagtgggcagcgagacggcgacgtcgagctaatctccaaaagccatctcagttcggattgcactctgcaactcgagtgcatgaagttggaatcgctagtaatcgcagatcagcatgctgcggtgaatacgttcccgggccttgtacacaccgcccgtcacaccatgggagttggttttacccgaaggtagtgcgctaaccgcaaggaggcagctaacca

SEQ ID NO: 2912 - DNA, 1403 bp, Rhizobium tibeticum
aacgaacgctggcggcaggcttaacacatgcaagtcgagcgccccgcaaggggagcggcagacgggtgagtaacgcgtgggaacgtaccctttactacggaataacgcatggaaacgtgtgctaataccgtatgtgccctttgggggaaagatttatcggtaaaggatcggcccgcgttggattagctagttggtggggtaaaggcctaccaaggcgacgatccatagctggtctgagaggatgatcagccacattgggactgagacacggcccaaactcctacgggaggcagcagtggggaatattggacaatgggcgcaagcctgatccagccatgccgcgtgagtgatgaaggccctagggttgtaaagctctttcaccggtgaagataatgacggtaaccggagaagaagccccggctaacttcgtgccagcagccgcggtaatacgaagggggctagcgttgttcggatttactgggcgtaaagcgcacgtaggcggatcgatcagtcaggggtgaaatcccagagctcaactctggaactgcctttgatactgtcgatctggagtatggaagaggtgagtggaattccgagtgtagaggtgaaattcgtagatattcggaggaacaccagtggcgaaggcggctcactggtccattactgacgctgaggtgcgaaagcgtggggagcaaacaggattagataccctggtagtccacgccgtaaacgatgaatgttagccgtcgggcagtatactgttcggtggcgcagctaacgcattaaacattccgcctggggagtacggtcgcaagattaaaactcaaaggaattgacgggggcccgcacaagcggtggagcatgtggtttaattcgaagcaacgcgcagaaccttaccagcccttgacatgcccggccagctacagagatgtagtgttcccttcggggaccgggacacaggtgctgcatggctgtcgtcagctcgtgtcgtgagatgttgggttaagtcccgcaacgagcgcaaccctcgcccttagttgccagcattcagttgggcactctaaggggactgccggtgataagccgagaggaaggtggggatgacgtcaagtcctcatggcccttacgggctgggctacacacgtgctacaatggtggtgacagtgggcagcgagacagcgatgtcgagctaatctccaaaagccatctcagttcggattgcactctgcaactcgagtgcatgaagttggaatcgctagtaatcgcggatcagcatgccgcggtgaatacgttcccgggccttgtacacaccgcccgtcacaccatgggagttggttttacccgaaggtagtgtgctaaccgcaaggaggcagctaaccacggtagggtcagcgactggggtg

SEQ ID NO: 2913 - DNA, 1403 bp, Rhizobium tropici
aacgaacgctggcggcaggcttaacacatgcaagtcgagcgccccgcaaggggagcggcagacgggtgagtaacgcgtgggaatctaccttttgctacggaataacgcagggaaacttgtgctaataccgtatgtgtccttcgggagaaagatttatcggcaagagatgagcccgcgttggattagctagttggtggggtaaaggcctaccaaggcgacgatccatagctggtctgagaggatgatcagccacattgggactgagacacggcccaaactcctacgggaggcagcagtggggaatattggacaatgggcgcaagcctgatccagccatgccgcgtgagtgatgaaggccctagggttgtaaagctctttcaccggagaagataatgacggtatccggagaagaagccccggctaacttcgtgccagcagccgcggtaatacgaagggggctagcgttgttcggaattactgggcgtaaagcgcacgtaggcggatcgatcagtcaggggtgaaatcccagggctcaaccctggaactgcctttgatactgtcgatctggagtatggaagaggtgagtggaattccgagtgtagaggtgaaattcgtagatattcggaggaacaccagtggcgaaggcggctcactggtccattactgacgctgaggtgcgaaagcgtggggagcaaacaggattagataccctggtagtccacgccgtaaacgatgaatgttagccgtcgggcagtatactgttcggtggcgcagctaacgcattaaacattccgcctggggagtacggtcgcaagattaaaactcaaaggaattgacgggggcccgcacaagcggtggagcatgtggtttaattcgaagcaacgcgcagaaccttaccagcccttgacatcctgtgttacctctagagatagggggtccacttcggtggcgcagagacaggtgctgcatggctgtcgtcagctcgtgtcgtgagatgttgggttaagtcccgcaacgagcgcaaccctcgcccttagttgccagcattcagttgggcactctaaggggactgccggtgataagccgagaggaaggtggggatgacgtcaagtcctcatggcccttacgggctgggctacacacgtgctacaatggtggtgacagtgggcagcgagcacgcgagtgtgagctaatctccaaaagccatctcagttcggattgcactctgcaactcgagtgcatgaagttggaatcgctagtaatcgcggatcagcatgccgcggtgaatacgttcccgggccttgtacacaccgcccgtcacaccatgggagttggttttacccgaaggtagtgcgctaaccgcaaggaggcagctaaccacggtagggtcagcgactggggtg

SEQ ID NO: 2914 - DNA, 1360 bp, Rhizobium tubonense
acatgcaagtcgagcgcctcgcaagaggagcggcagacgggtgagtaacgcgtgggaatctacccatccttacggaacaactccgggaaactggagctaataccgtatacgcccttcgggggaaagatttatcgaggatggatgagcccgcgttggattagctagttggtggggtaaaggcctaccaaggcgacgatccatagctggtctgagaggatgatcagccacattgggactgagacacggcccaaactcctacgggaggcagcagtggggaatattggacaatgggcgcaagcctgatccagccatgccgcgtgagtgatgaaggccctagggttgtaaagctctttcaccggagaagataatgacggtatccggagaagaagccccggctaacttcgtgccagcagccgcggtaatacgaagggggctagcgttgttcggatttactgggcgtaaagcgcacgtaggcggatcgatcagtcaggggtgaaatcccagagctcaactctggaactgcctttgatactgtcgatctggagtatggaagaggtgagtggaattccgagtgtagaggtgaaattcgtagatattcggaggaacaccagtggcgaaggcggctcactggtccattactgacgctgaggtgcgaaagcgtggggagcaaacaggattagataccctggtagtccacgccgtaaacgatgaatgttagccgtcgggcagtatactgttcggtggcgcagctaacgcattaaacattccgcctggggagtacggtcgcaagattaaaactcaaaggaattgacgggggcccgcacaagcggtggagcatgtggtttaattcgaagcaacgcgcagaaccttaccagcccttgacatgcccggccagccacagagatgtggtgttcccttcggggaccgggacacaggtgctgcatggctgtcgtcagctcgtgtcgtgagatgttgggttaagtcccgcaacgagcgcaaccctcgcccttagttgccagcattcagttgggcactctaaggggactgccggtgataagccgagaggaaggtggggatgacgtcaagtcctcatggcccttacgggctgggctacacacgtgctacaatggtggtgacagtgggcagcgagcgcgcgagcgtgagctaatctccaaaagccatctcagttcggattgcactctgcaactcgagtgcatgaagttggaatcgctagtaatcgcggatcagcatgccgcggtgaatacgttcccgggccttgtacacaccgcccgtcacaccatgggagttggttttacccgaaggtagtgcgctaaccgcaaggaggcagctaaccacggta

SEQ ID NO: 2915 - DNA, 1378 bp, Rhizobium vallis
acatgcaagtcgagcgccccgcaaggggagcggcagacgggtgagtaacgcgtgggaacgtaccctttactacggaataacgcagggaaacttgtgctaataccgtatgtgccctttgggggaaagatttatcggtaaaggatcggcccgcgttggattagctagttggtggggtaaaggcctaccaaggcgacgatccatagctggtctgagaggatgatcagccacattgggactgagacacggcccaaactcctacgggaggcagcagtggggaatattggacaatgggcgcaagcctgatccagccatgccgcgtgagtgatgaaggccctagggttgtaaagctctttcaccggagaagataatgacggtatccggagaagaagccccggctaacttcgtgccagcagccgcggtaatacgaagggggctagcgttgttcggaattactgggcgtaaagcgcacgtaggcggatcgatcagtcaggggtgaaatcccagggctcaaccctggaactgcctttgatactgtcgatctggagtatggaagaggtgagtggaattccgagtgtagaggtgaaattcgtagatattcggaggaacaccagtggcgaaggcggctcactggtccattactgacgctgaggtgcgaaagcgtggggagcaaacaggattagataccctggtagtccacgccgtaaacgatgaatgttagccgtcgggcagtatactgttcggtggcgcagctaacgcattaaacattccgcctggggagtacggtcgcaagattaaaactcaaaggaattgacgggggcccgcacaagcggtggagcatgtggtttaattcgaagcaacgcgcagaaccttaccagcccttgacatcctgtgttacccagagagatttggggtccacttcggtggcgcagagacaggtgctgcatggctgtcgtcagctcgtgtcgtgagatgttgggttaagtcccgcaacgagcgcaaccctcgcccttagttgccagcatttagttgggcactctaaggggactgccggtgataagccgagaggaaggtggggatgacgtcaagtcctcatggcccttacgggctgggctacacacgtgctacaatggtggtgacagtgggcagcgagcacgcgagtgtgagctaatctccaaaagccatctcagttcggattgcactctgcaactcgagtgcatgaagttggaatcgctagtaatcgcggatcagcatgccgcggtgaatacgttcccgggccttgtacacaccgcccgtcacaccatgggagttggttttacccgaaggtagtgcgctaaccgcaaggaggcagctaaccacggtagggtcagcgactggggtg

SEQ ID NO: 2916 - DNA, 1409 bp, Rhizorhabdus dicambivorans
aacgaacgctggcggcatgcctaacacatgcaagtcgaacgaacctttcggggttagtggcgcacgggtgcgtaacgcgtgggaatctgccttcaggtacggaataactcatggaaacgtgtgctaataccgtatgatgtctacggaccaaagatttatcgcctggagatgagcccgcgttggattagctagttggtggggtaaaggcctaccaaggcgacgatccatagctggtctgagaggatgatcagccacactgggactgagacacggcccagactcctacgggaggcagcagtggggaatattggacaatgggcgcaagcctgatccagcaatgccgcgtgagtgatgaaggccttagggttgtaaagctcttttacccgggaagataatgactgtaccgggagaataagccccggctaactccgtgccagcagccgcggtaatacggagggggctagcgttgttcggaattactgggcgtaaagcgcacgtaggcggctttgtaagttagaggtgaaagcccggggctcaaccccggaactgcctttaagactgcatcgcttgaacgtcggagaggtgagtggaattccgagtgtagaggtgaaattcgtagatattcggaagaacaccagtggcgaaggcggctcactggacgactgttgacgctgaggtgcgaaagcgtggggagcaaacaggattagataccctggtagtccacgccgtaaacgatgataactagctgtccgggcacttggtgcttgggtggcgcagctaacgcattaagttatccgcctggggagtacggccgcaaggttaaaactcaaagaaattgacgggggcctgcacaagcggtggagcatgtggtttaattcgaagcaacgcgcagaaccttaccaacgtttgacatccctagtatggattttggagacaatttccttcagttcggctggctaggtgacaggtgctgcatggctgtcgtcagctcgtgtcgtgagatgttgggttaagtcccgcaacgagcgcaaccctcgcctttagttgccatcatttagttgggtactctaaaggaaccgccggtgataagccggaggaaggtggggatgacgtcaagtcctcatggcccttacgcgttgggctacacacgtgctacaatggcaactacagtgggcagcgaactcgcgagggtgagctaatctccaaaagttgtctcagttcggattgttctctgcaactcgagagcatgaaggcggaatcgctagtaatcgcggatcagcatgccgcggtgaatacgttcccaggccttgtacacaccgcccgtcacaccatgggagttggattcacccgaaggcgctgcgctaaccgcaaggaggcaggcgaccacggtgggtttagcgactggggtg

SEQ ID NO: 2917 - DNA, 1467 bp, Rhodanobacter denitrificans
attgaacgctggcggcatgcctaacacatgcaagtcgaacggcagcacagcagtagcaatactgtgggtggcgagtggcggacgggtgagtaatgcatcgggatctaccctgacgtgggggataacctcgggaaaccgggactaataccgcatacgtcctacgggagaaagcgggggaccttcgggcctcgcgcggcaggacgaaccgatgtgcgattagctagttggcggggtaatggcccaccaaggcgacgatcgctagctggtctgagaggatgatcagccacactgggactgagacacggcccagactcctacgggaggcagcagtggggaatattggacaatgggcgcaagcctgatccagcaatgccgcgtgtgtgaagaaggccttcgggttgtaaagcacttttatcaggagcgaaataccacgggttaataccctatggggctgacggtacctgaggaataagcaccggctaacttcgtgccagcagccgcggtaatacgaagggtgcaagcgttaatcggaattactgggcgtaaagggtgcgtaggcggttacttaagtctgtcgtgaaatccccgggctcaacctgggaatggcgatggatactgggtggctagagtgtgtcagaggatggtggaattcccggtgtagcggtgaaatgcgtagagatcgggaggaacatcagtggcgaaggcggccatctgggacaacactgacgctgaagcacgaaagcgtggggagcaaacaggattagataccctggtagtccacgccctaaacgatgcgaactggatgttggtctcaactcggagatcagtgtcgaagctaacgcgttaagttcgccgcctggggagtacggtcgcaagactgaaactcaaaggaattgacgggggcccgcacaagcggtggagtatgtggtttaattcgatgcaacgcgaagaaccttacctggccttgacatgtccggaatcctgcagagatgcgggagtgccttcgggaatcggaacacaggtgctgcatggctgtcgtcagctcgtgtcgtgagatgttgggttaagtcccgcaacgagcgcaacccttgtccttagttgccagcacgtaatggtgggaactctaaggagactgccggtgacaaaccggaggaaggtggggatgacgtcaagtcatcatggcccttacggccagggctacacacgtactacaatggtcggtacagagggttgcaataccgcgaggtggagccaatcccagaaagccgatcccagtccggattggagtctgcaactcgactccatgaagtcggaatcgctagtaatcgcggatcagctatgccgcggtgaatacgttcccgggccttgtacacaccgcccgtcacaccatgggagtgggttgctccagaaggcgttagtctaaccgcaagggggacgacgcccacggagtggtccatgactggggtg

SEQ ID NO: 2918 - DNA, 1467 bp, Rhodanobacter fulvus
attgaacgctggcggcatgcctaacacatgcaagtcgaacggcagcacagaggagcttgctccttgggtggcgagtggcggacgggtgagtaatgcatcgggacctacccagacgtgggggataacctcgggaaaccgggactaataccgcatacgtcctacgggagaaagcgggggaccttcgggcctcgcgcggttggacggaccgatgtgcgattagctagttggtaaggtaatggcttaccaaggcgacgatcgctagctggtctgagaggatgatcagccacactgggactgagacacggcccagactcctacgggaggcagcagtggggaatattggacaatgggcgaaagcctgatccagcaatgccgcgtgtgtgaagaaggccctcgggttgtaaagcacttttatcaggaacgaaataccacgggttaataacctatggggctgacggtacctgaggaataagcaccggctaacttcgtgccagcagccgcggtaatacgaagggtgcaagcgttaatcggaattactgggcgtaaagggtgcgtaggcggttgtttaagtctgtcgtgaaatccccgggctcaacctgggaatggcgatggatactgggcagctagagtgtgtcagaggatggtggaattcccggtgtagcggtgaaatgcgtagagatcgggaggaacatcagtggcgaaggcggccatctgggacaacactgacgctgaagcacgaaagcgtggggagcaaacaggattagataccctggtagtccacgccctaaacgatgcgaactggatgttggtctcaactcggagatcagtgtcgaagctaacgcgttaagttcgccgcctggggagtacggtcgcaagactgaaactcaaaggaattgacgggggcccgcacaagcggtggagtatgtggtttaattcgatgcaacgcgaagaaccttacctggccttgacatgtccggaatccttgagagatcgaggagtgccttcgggaatcggaacacaggtgctgcatggctgtcgtcagctcgtgtcgtgagatgttgggttaagtcccgcaacgagcgcaacccttgtccttagttgccagcacgtaatggtgggaactctaaggagactgccggtgacaaaccggaggaaggtggggatgacgtcaagtcatcatggcccttacggccagggctacacacgtactacaatggtcggtacagagggttgcaataccgcgaggtggagccaatcccagaaagccgatcccagtccggatcggagtctgcaactcgactccgtgaagtcggaatcgctagtaatcgcggatcagctatgccgcggtgaatacgttcccgggccttgtacacaccgcccgtcacaccatgggagtgggttgctccagaaggcgttagtctaaccgcaaggaggacgacgcccacggagtggtccatgactggggtg

SEQ ID NO: 2919 - DNA, 1467 bp, Rhodanobacter glycinis
attgaacgctggcggcatgcctaacacatgcaagtcgaacggcagcacagcagagcttgctctgtgggtggcgagtggcggacgggtgagtaatgcatcgggacctacccagacgtgggggataacgtagggaaacttacgctaataccgcatacgtcctacgggagaaagcgggggaccttcgggcctcgcgcggttggatggaccgatgttcgattagctagttggtagggtaatggcctaccaaggcgacgatcgatagctggtctgagaggatgatcagccacactgggactgagacacggcccagactcctacgggaggcagcagtggggaatattggacaatgggcgcaagcctgatccagcaatgccgcgtgtgtgaagaaggccttcgggttgtaaagcacttttatcaggagcgaaatactatcggttaataaccggtggggctgacggtacctgaggaataagcaccggctaacttcgtgccagcagccgcggtaatacgaagggtgcaagcgttaatcggaattactgggcgtaaagggtgcgtaggcggttagttaagtctgttgtgaaatccccgggctcaacctgggaatggcaatggatactggctagctagagtgtgtcagaggatggtggaattcccggtgtagcggtgaaatgcgtagagatcgggaggaacatcagtggcgaaggcggccatctgggacaacactgacgctgaagcacgaaagcgtggggagcaaacaggattagataccctggtagtccacgccctaaacgatgcgaactggatgttggtctcaactcggagatcagtgtcgaagctaacgcgttaagttcgccgcctggggagtacggtcgcaagactgaaactcaaaggaattgacgggggcccgcacaagcggtggagtatgtggtttaattcgatgcaacgcgaagaaccttacctggccttgacatgtccggaatccagcagagatgcaggagtgccttcgggaatcggaacacaggtgctgcatggctgtcgtcagctcgtgtcgtgagatgttgggttaagtcccgcaacgagcgcaacccttgtccttagttgccagcacgtaatggtgggaactctaaggagactgccggtgacaaaccggaggaaggtggggatgacgtcaagtcatcatggcccttacggccagggctacacacgtactacaatggtcggtacagagggttgcgataccgcgaggtggagccaatcccagaaagccgatcccagtccggatcgaagtctgcaactcgacttcgtgaagtcggaatcgctagtaatcgcggatcagctatgccgcggtgaatacgttcccgggccttgtacacaccgcccgtcacaccatgggagtgagttgctccagaagccgttagtctaaccgcaagggggacgacgaccacggagtggttcatgactggggtg

SEQ ID NO: 2920 - DNA, 1467 bp, Rhodanobacter spathiphylli
attgaacgctggcggcatgcctaacacatgcaagtcgaacggcagcacagcagagcttgctctgtgggtggcgagtggcggacgggtgagtaatgcatcgggacctacccagacgtgggggataacgtagggaaacttacgctaataccgcatacgtcctacgggagaaagcaggggaccttcgggccttgcgcggttggacggaccgatgtgcgattagctagttggtagggtaatggcctaccaaggcgacgatcgctagctggtctgagaggatgatcagccacactgggactgagacacggcccagactcctacgggaggcagcagtggggaatattggacaatgggcgcaagcctgatccagcaatgccgcgtgtgtgaagaaggccctcgggttgtaaagcacttttatcaggaacgaaataccacgggttaataccctatggggctgacggtacctgaggaataagcaccggctaacttcgtgccagcagccgcggtaatacgaagggtgcaagcgttaatcggaattactgggcgtaaagggtgcgtaggcggttcgttaagtctgtcgtgaaatccccgggctcaacctgggaatggcgatggatactggcgagctagagtgtgtcagaggatggtggaattcccggtgtagcggtgaaatgcgtagagatcgggaggaacatcagtggcgaaggcggccatctgggacaacactgacgctgaagcacgaaagcgtggggagcaaacaggattagataccctggtagtccacgccctaaacgatgcgaactggatgttggtctcaactcggagatcagtgtcgaagctaacgcgttaagttcgccgcctggggagtacggtcgcaagactgaaactcaaaggaattgacgggggcccgcacaagcggtggagtatgtggtttaattcgatgcaacgcgaagaaccttacctggccttgacatgtccggaatccttgagagatcgaggagtgccttcgggaatcggaacacaggtgctgcatggctgtcgtcagctcgtgtcgtgagatgttgggttaagtcccgcaacgagcgcaacccttgtccttagttgccagcacgtaatggtgggaactctaaggagactgccggtgacaaaccggaggaaggtggggatgacgtcaagtcatcatggcccttacggccagggctacacacgtactacaatggtcggtacagagggttgcaataccgcgaggtggagccaatcccagaaagccgatcccagtccggatcggagtctgcaactcgactccgtgaagtcggaatcgctagtaatcgcggatcagctatgccgcggtgaatacgttcccgggccttgtacacaccgcccgtcacaccatgggagtgggttgctccagaaggcgttagtctaaccgcaagggggacgacgcccacggagtggtccatgactggggtg

SEQ ID NO: 2921 - DNA, 1467 bp, Rhodanobacter thiooxydans
attgaacgctggcggcatgcctaacacatgcaagtcgaacggcagcacagtcgtagcaatacgatgggtggcgagtggcggacgggtgagtaatgcatcgggatctaccctgacgtgggggataacctcgggaaaccgggactaataccgcatacgtcctacgggagaaagcgggggaccttcgggcctcgcgcggcaggacgaaccgatgtgcgattagctagttggcggggtaatggcccaccaaggcgacgatcgctagctggtctgagaggatgatcagccacactgggactgagacacggcccagactcctacgggaggcagcagtggggaatattggacaatgggcgcaagcctgatccagcaatgccgcgtgtgtgaagaaggccttcgggttgtaaagcacttttatcaggagcgaaataccacgggttaataccctatggggctgacggtacctgaggaataagcaccggctaacttcgtgccagcagccgcggtaatacgaagggtgcaagcgttaatcggaattactgggcgtaaagggtgcgtaggcggttgtttaagtctgccgtgaaatccccgggctcaacctgggaatggcggtggatactgggcagctagagtgtgtcagaggatggtggaattcccggtgtagcggtgaaatgcgtagagatcgggaggaacatcagtggcgaaggcggccatctgggacaacactgacgctgaagcacgaaagcgtggggagcaaacaggattagataccctggtagtccacgccctaaacgatgcgaactggatgttggtctcaactcggagatcagtgtcgaagctaacgcgttaagttcgccgcctggggagtacggtcgcaagactgaaactcaaaggaattgacgggggcccgcacaagcggtggagtatgtggtttaattcgatgcaacgcgaagaaccttacctggccttgacatgtccggaatcctgcagagatgtgggagtgccttcgggaatcggaacacaggtgctgcatggctgtcgtcagctcgtgtcgtgagatgttgggttaagtcccgcaacgagcgcaacccttgtccttagttgccagcacgtaatggtgggaactctaaggagactgccggtgacaaaccggaggaaggtggggatgacgtcaagtcatcatggcccttacggccagggctacacacgtactacaatggtcggtacagagggttgccataccgcgaggtggagccaatcccagaaagccgatcccagtccggattggagtctgcaactcgactccatgaagtcggaatcgctagtaatcgcggatcagctatgccgcggtgaatacgttcccgggccttgtacacaccgcccgtcacaccatgggagtgggttgctccagaaggcgttagtctaaccgcaagggggacgacgcccacggagtggtccatgactggggtg

SEQ ID NO: 2922 - DNA, 1409 bp, Rhodoblastus acidophilus
aacgaacgctggcggcaggcctaacacatgcaagtcgaacgggcatagcaatatgtcagtggcagacgggtgaggaacacgtgggaacatgccctttggttcggaacaactcagggaaacttgagctaataccggataagcctttcgagggaaagatttatcgccgaaggagtggcccgcgtccgattagctagttggtgaggtaatggctcaccaaggcgacgatcggtagctggtctgagaggatgatcagccacattgggactgagacacggcccaaactcctacgggaggcagcagtggggaatattggacaatgggcgcaagcctgatccagccatgccgcgtgagtgatgacggccctagggttgtaaagctctttcacccacgacgataatgacggtagtgggagaagaagccccggctaacttcgtgccagcagccgcggtaatacgaagggggctagcgttgttcggatttactgggcgtaaagcgcacgtaggcggatctttaagtcaggggtgaaatgccggagctcaacttcggaactgcctttgatactggagatcttgagttcgagagaggtgagtggaactgcgagtgtagaggtgaaattcgtagatattcgcaagaacaccagtggcgaaggcggctcactggctcgatactgacgctgaggtgcgaaagcgtggggagcaaacaggattagataccctggtagtccacgccgtaaacgatggatgctagccgttaggcagcttgctgcttagtggcgcagctaacgctttaagcatcccgcctggggagtacggtcgcaagattaaaactcaaaggaattgacgggggcccgcacaagcggtggagcatgtggtttaattcgaagcaacgcgcagaaccttaccagcttttgacatgtcttggacggatagcagagatgttatcttctcttcggagccgagaacacaggtgctgcatggctgtcgtcagctcgtgtcgtgagatgttgggttaagtcccgcaacgagcgcaacccacgtccttagttgccatcattaagttgggcactctagggagactgccggtgataagccgagaggaaggtgtggatgacgtcaagtcctcatggcccttacaggctgggctacacacgtgctacaatggcggtgacaatgggaagcgaaagggcgacctctagcaaatctcaaaaaaccgtctcagttcggattgtactctgcaactcgagtgcatgaaggtggaatcgctagtaatcgcagatcagaacgctgcggtgaatacgttcccgggccttgtacacaccgcccgtcacaccatgggagttggctttacccgaaggcgtttcgctaaccgcaaggaggcagacgaccacggtagggtcagcgactggggtg

SEQ ID NO: 2923 - DNA, 1406 bp, Rhodoblastus sphagnicola
aacgaacgctggcggcaggcctaacacatgcaagtcgaacggatgtagcaatacatcagtggcagacgggtgaggaacacgtgggaacataccctttggttcggaataactcagggaaacttgagctaataccggataagtcggcaacgagaaagattcatcgccgaaggaatggcccgcgtccgattagctagttggtgaggtaacggctcaccaaggcgacgatcggtagctggtctgagaggatgatcagccacattgggactgagacacggcccaaactcctacgggaggcagcagtggggaatattggacaatgggcgcaagcctgatccagccatgccgcgtgagtgatgacggccttagggttgtaaagctctttcacccacgacgataatgacggtagtgggagaagaagccccggctaacttcgtgccagcagccgcggtaatacgaagggggctagcgttgttcggatttactgggcgtaaagcgcacgtaggcggatctttaagtcaggggtgaaatgccggagctcaacttcggaactgcctttgatactggagatcttgagttcgagagaggtgagtggaactgcgagtgtagaggtgaaattcgtagatattcgcaagaacaccagtggcgaaggcggctcactggctcgatactgacgctgaggtgcgaaagcgtggggagcaaacaggattagataccctggtagtccacgccgtaaacgatggatgctagccgttaggcagcttgctgcttagtggcgcagctaacgctttaagcatcccgcctggggagtacggtcgcaagattaaaactcaaaggaattgacgggggcccgcacaagcggtggagcatgtggtttaattcgaagcaacgcgcagaaccttaccagcttttgacatgtcctggacggtttccagagatggattcctctcttcggagccaggaacacaggtgctgcatggctgtcgtcagctcgtgtcgtgagatgttgggttaagtcccgcaacgagcgcaacccacgtccttagttgccatcatttagttgggcactctagggagactgccggtgataagccgagaggaaggtgtggatgacgtcaagtcctcatggcccttacaggctgggctacacacgtgctacaatggcggtgacaatgggatgcgaaggggcgacccttagcaaatctcaaaaatccgtctcagttcggattgttctctgcaactcgagagcatgaaggtggaatcgctagtaatcgcagatcagaacgctgcggtgaatacgttcccgggccttgtacacaccgcccgtcacaccatgggagttggctttacccgaaggcgtttcgctaaccgcaaggaggcagacgaccacggtagggtcagcgactggg

SEQ ID NO: 2924 - DNA, 1440 bp, Rhodococcus qingshengii
gacgaacgctggcggcgtgcttaacacatgcaagtcgagcggtaaggcctttcggggtacacgagcggcgaacgggtgagtaacacgtgggtgatctgccctgcacttcgggataagcctgggaaactgggtctaataccggatatgacctcctatcgcatggtgggtggtggaaagatttatcggtgcaggatgggcccgcggcctatcagcttgttggtggggtaatggcctaccaaggcgacgacgggtagccgacctgagagggtgaccggccacactgggactgagacacggcccagactcctacgggaggcagcagtggggaatattgcacaatgggcgaaagcctgatgcagcgacgccgcgtgagggatgacggccttcgggttgtaaacctctttcagcagggacgaagcgcaagtgacggtacctgcagaagaagcaccggctaactacgtgccagcagccgcggtaatacgtagggtgcaagcgttgtccggaattactgggcgtaaagagttcgtaggcggtttgtcgcgtcgtttgtgaaaaccagcagctcaactgctggcttgcaggcgatacgggcagacttgagtactgcaggggagactggaattcctggtgtagcggtgaaatgcgcagatatcaggaggaacaccggtggcgaaggcgggtctctgggcagtaactgacgctgaggaacgaaagcgtgggtagcgaacaggattagataccctggtagtccacgccgtaaacggtgggcgctaggtgtgggttccttccacggaatccgtgccgtagctaacgcattaagcgccccgcctggggagtacggccgcaaggctaaaactcaaaggaattgacgggggcccgcacaagcggcggagcatgtggattaattcgatgcaacgcgaagaaccttacctgggtttgacatataccggaaagctgcagagatgtggccccccttgtggtcggtatacaggtggtgcatggctgtcgtcagctcgtgtcgtgagatgttgggttaagtcccgcaacgagcgcaacccctatcttatgttgccagcacgttatggtggggactcgtaagagactgccggggtcaactcggaggaaggtggggacgacgtcaagtcatcatgccccttatgtccagggcttcacacatgctacaatggccagtacagagggctgcgagaccgtgaggtggagcgaatcccttaaagctggtctcagttcggatcggggtctgcaactcgaccccgtgaagtcggagtcgctagtaatcgcagatcagcaacgctgcggtgaatacgttcccgggccttgtacacaccgcccgtcacgtcatgaaagtcggtaacacccgaagccggtggcttaaccccttgtgggagggagccgtcgaaggtgggatcggcgattgggacg

SEQ ID NO: 2925 - DNA, 1441 bp, Rhodococcus wratislaviensis
gacgaacgctggcggcgtgcttaacacatgcaagtcgagcggtaaggcccttcggggtacacgagcggcgaacgggtgagtaacacgtgggtgatctgccctgcacttcgggataagcctgggaaactgggtctaataccggatatgaccttcggctgcatggctgagggtggaaaggtttactggtgcaggatgggcccgcggcctatcagcttgttggtggggtaatggcctaccaaggcgacgacgggtagccgacctgagagggtgaccggccacactgggactgagacacggcccagactcctacgggaggcagcagtggggaatattgcacaatgggcgaaagcctgatgcagcgacgccgcgtgagggatgacggccttcgggttgtaaacctctttcagcagggacgaagcgaaagtgacggtacctgcagaagaagcaccggccaactacgtgccagcagccgcggtaatacgtagggtgcaagcgttgtccggaattactgggcgtaaagagctcgtaggcggtttgtcgcgtcgtctgtgaaaactcgaggctcaacctcgagcttgcaggcgatacgggcagacttgagtactgcaggggagactggaattcctggtgtagcggtgaaatgcgcagatatcaggaggaacaccggtggcgaaggcgggtctctgggcagtaactgacgctgaggagcgaaagcgtgggtagcgaacaggattagataccctggtagtccacgccgtaaacggtgggcgctaggtgtgggtttccttccacgggatccgtgccgtagctaacgcattaagcgccccgcctggggagtacggccgcaaggctaaaactcaaaggaattgacgggggcccgcacaagcggcggagcatgtggattaattcgatgcaacgcgaagaaccttacctgggtttgacatataccggaaagccgtagagatacggccccccttgtggtcggtatacaggtggtgcatggctgtcgtcagctcgtgtcgtgagatgttgggttaagtcccgcaacgagcgcaacccttgtcttatgttgccagcacgtaatggtggggactcgtaagagactgccggggtcaactcggaggaaggtggggacgacgtcaagtcatcatgccccttatgtccagggcttcacacatgctacaatggccggtacagagggctgcgataccgtgaggtggagcgaatcccttaaagccggtctcagttcggatcggggtctgcaactcgaccccgtgaagtcggagtcgctagtaatcgcagatcagcaacgctgcggtgaatacgttcccgggccttgtacacaccgcccgtcacgtcatgaaagtcggtaacacccgaagccggtggcctaaccccttgtgggagggagccgtcgaaggtgggatcggcgattgggacg

SEQ ID NO: 2926 - DNA, 1470 bp, Rhodoferax ferrireducens
agagtttgatcctggctcagattgaacgctggcggcatgccttacacatgcaagtcgaacggcagcacgggagcaatcctggtggcgagtggcgaacgggtgagtaatatatcggaacgtgcccagtcgtgggggataacgcagcgaaagctgtgctaataccgcatacgatctctggatgaaagcgggggactcgcaagggcctcgcgcgattggagcggccgatatcagattagctagttggtggggtaaaagcccaccaaggcgacgatctgtagctggtctgagaggacgaccagccacactggaactgagacacggtccagactcctacgggaggcagcagtggggaattttggacaatgggcgcaagcctgatccaacaatgccgcgtgcaggatgaaggccttcgggttgtaaactgcttttgtacggaacgaaacggcctgccctaatacggtgggctaatgacggtaccgtaagaataagcaccggctaactacgtgccagcagccgcggtaatacgtagggtgcgagcgttaatcggaattactgggcgtaaagcgtgcgcaggcggttatataagacagatgtgaaatccccgggctcaacctgggacctgcatttgtgactgtatagctagagtacggtagagggggatggaattccgcgtgtagcagtgaaatgcgtagatatgcggaggaacaccgatggcgaaggcaatcccctggacctgtactgacgctcatgcacgaaagcgtggggagcaaacaggattagataccctggtagtccacgccctaaacgatgtcaactggttgttgggtcttcactgactcagtaacgaagctaacgcgtgaagttgaccgcctggggagtacggccgcaaggttgaaactcaaaggaattgacggggacccgcacaagcggtggatgatgtggtttaattcgatgcaacgcgaaaaaccttacccacctttgacatgtacggaatcctttagagatagaggagtgctcgaaagagagccgtaacacaggtgctgcatggctgtcgtcagctcgtgtcgtgagatgttgggttaagtcccgcaacgagcgcaacccttgtcattagttgctacatttagttgggcactctaatgagactgccggtgacaagccggaggaaggtggggatgacgtcaagtcctcatggcccttataggtggggctacacacgtcatacaatggctggtacaaagggttgccaacccgcgagggggagctaatcccacaaagccagtcgtagtccggatcgtagtctgcaactcgactacgtgaagtcggaatcgctagtaatcgtggatcagaatgtcacggtgaatacgttcccgggtcttgtacacaccgcccgtcacaccatgggagcgggttctgccagaagtagttagcctaaccgcaaggagggcgattaccacggcagggttcgta

SEQ ID NO: 2927 - DNA, 1403 bp, Rhodomicrobium udaipurense
aacgaacgctggcggcaggcttaacacatgcaagtcgaacgcaccgcaaggtgagtggcagacgggtgagtaacgcgtgggaaccttccctttggtacggaataacttcgggaaaccgaagctaataccgtatatctcctccgggagaaagatttatcgccaaaggatgggcccgcgttggattagctagttggtgtggtaaaggcgcaccaaggcgacgatccatagctggtctgagaggatgatcagccacactgggactgagacacggcccagactcctacgggaggcagcagtggggaatcttggacaatgggggcaaccctgatccagccatgccgcgtgagtgaagaaggccttagggttgtaaagctcttttggcggggacgataatgacggtacccgcagaataagccccggctaacttcgtgccagcagccgcggtaatacgaagggggctagcgttgttcggaatcactgggcgtaaagcgtacgcaggcggatagataagtcaggggtgaaatcccggggctcaacctcggaattgcctttgatactgtctatcttcgagttcgggagaggttggcggaattcctagtgtagaggtgaaattcgtagatattaggaagaacaccagtggcgaaggcggccaactggcccgatactgacgctcatgtacgaaagcgtggggagcaaacaggattagataccctggtagtccacgctgtaaactatggatgctagccgttggggagcttgctcttcagtggcgcagctaacgtcttaagcatcccgcctggggagtacggtcgcaagattaaaactcaaaggaattgacgggggcccgcacaagcggtggagcatgtggtttaattcgaggcaacgcgaagaaccttaccagctcttgacatgtcgtgctacgtggagagattcacggttcccttcggggacgcgaacacaggtgctgcatggctgtcgtcagctcgtgtcgtgagatgttgggttaagtcccgcaacgagcgcaaccctcgcccttagttgctaccatttagttgagcactctaaggggaccgccggtgataagccggaggaaggtggggatgacgtcaagtcatcatggcccttacgggctgggctacacacgtgctacaatggcggtgacagtgggcagcgacacagcgatgtgatgctaatcccaaaaagccgtctcagttcagattgcactctgcaactcgagtgcatgaagtcggaatcgctagtaatcgcggatcagcatgccgcggtgaatacgttcccgggccttgtacacaccgcccgtcacaccatgggagttggttttacccgaaggcgttacgctaaccgcaaggaggcagacgaccacggtaaggtcagcgactggggtg

SEQ ID NO: 2928 - DNA, 1402 bp, Rhodomicrobium vannielii
aacgaacgctggcggcaggcttaacacatgcaagtcgaacgcaccgcaaggtgagtggcagacgggtgagtaacgcgtgggaaccttccctttggtacggaataacttcgggaaaccgaagctaataccgtatatctcctccgggagaaagatttatcgccaaaggatgggcccgcgttggattagctagttggtgtggtaaaggcgcaccaaggcgacgatccatagctggtctgagaggatgatcagccacactgggactgagacacggcccagactcctacgggaggcagcagtggggaatcttggacaatgggggcaaccctgatccagccatgccgcgtgagtgaagaaggccttagggttgtaaagctcttttggcggggacgataatgacggtacccgcagaataagccccggctaacttcgtgccagcagccgcggtaatacgaagggggctagcgttgttcggaatcactgggcgtaaagcgtacgcaggcggatagataagtcaggggtgaaatcccggggctcaacctcggaattgcctttgatactgtctatcttgagttcgggagaggttggcggaattcctagtgtagaggtgaaattcgtagatattaggaagaacaccagtggcgaaggcggccaactggcccgatactgacgctcatgtacgaaagcgtggggagcaaacaggattagataccctggtagtccacgctgtaaactatggatgctagccgttggggagcttgctcttcagtggcgcagctaacgtcttaagcatcccgcctggggagtacggtcgcaagattaaaactcaaaggaattgacgggggcccgcacaagcggtggagcatgtggtttaattcgaggcaacgcgaagaaccttaccagctcttgacatgtcgtgctacgtggagagattcacggttcccttcggggacgcgaacacaggtgctgcatggctgtcgtcagctcgtgtcgtgagatgttgggttaagtcccgcaacgagcgcaaccctcgcccttagttgctaccatttagttgagcactctaaggggaccgccggtgataagccggaggaaggtggggatgacgtcaagtcatcatggcccttacgggctgggctacacacgtgctacaatggcggtgacagtgggcagcgacacagcgatgtgatgctaatcccaaaaagccgtctcagttcagattgcactctgcaactcgagtgcatgaagtcggaatcgctagtaatcgcggatcagcatgccgcggtgaatacgttcccgggccttgtacacaccgcccgtcacaccatgggagttggttttacccgaaggcgttacgctaaccgcaaggaggcagacgaccacggtaaggtcagcgactggggtg

SEQ ID NO: 2929 - DNA, 1457 bp, Rhodopirellula bahusiensis
aatgaacgttggcggcatggattaggcatgcaagtcgcacgagaagctgagtagcttgctacaaagcggacagtggcgaaagggagagtaacgtgtggttacgtgccctcgagaccgggatagcgtcgggaaactggcagtaataccggataatatctacggatcaaatggtgagattccgctcgaggattggaccgcatactattagcttgttggtgaggtaatggctcaccaaggctgcgatggttaccgggtgtgagagcatggcccggctcactgggactgagacactgcccagacacctacgggtggctgcagtcgagaatcttcggcaatggacgaaagtctgaccgagcgatgccgcgtgcgggatgaaggccctcgggttgtaaaccgctgtcagttgttaggaaatgcatggtggttatccatcatgtttgaccgatcttcagaggaaggacgggctaagtacgtgccagcagccgcggtaacacgtaccgtccaaacgttattcggtatcactgggcttaaagcgttcgtaggcggcctagaaggtgagatgtgaaagcccacggctcaaccgtggaattgcgtttcaaaccactaggcttgaggaagacaggggtgatgggaacttatggtggagcggtgaaatgcgttgatatcatagggaacaccggtggcgaaagcgcatcactgggtcttttctgacgctgaggaacgaaagctagggtagcgaacgggattagataccccggtagtcctagccgtaaacgatgagcactaggctgagggaacttccacattctctcggccgcagggaaaccattaagtgctccgcctggggagtatggtcgcaaggctgaaactcaaaggaattgacgggggctcacacaagcggtggaggatgtggcttaattcgaggctacgcgaagaaccttatcctagacttgacatgcttgagaatccctatgaaagtagagagtgcccttcggggagctcttgcacaggtgctgcatggctgtcgtcagctcgtgtcgtgagatgtcgggttaagtcccttaacgagcgaaacccttatctttagttgccagcgggtaatgccggggactctaaagagactgccggtgtcaaaccggaggaaggtggggatgacgtcaagtcctcatggcctttatgtctagggctgcacacgtcctacaatggcacggacaaacggacgcaataccgcgaggtggagcaaatcctagaaaccgtgcctcagttcggattgcaggctgcaactcgcctgcatgaagccggaatcgctagtaatcgtaggtcagcatactacggtgaatgtgttcctgagccttgtacacaccgcccgtcaagccacgaaagttgggagggcccgaagtcaccaagctaacccgcaagggaggcaggtgccgaaggtcagctcgacaattgggact

SEQ ID NO: 2930 - DNA, 1457 bp, Rhodopirellula baltica; identical to SEQ ID NO: 2929

SEQ ID NO: 2931 - DNA, 1407 bp, Rhodoplanes elegans
agcgaacgctggcggcaggcttaacacatgcaagtcgagcgccccgcaaggggagcggcagacgggtgagtaacacgtgggaacgtaccctttggttcggaacaacccagggaaacttgggctaataccggataagtccgcgaggagaaagatttatcgccgaaggatcggcccgcgtctgattagctagttggtgtggtaacggcgcaccaaggcgacgatcagtagctggtctgagaggatgatcagccacactgggactgagacacggcccagactcctacgggaggcagcagtggggaatattggacaatgggggcaaccctgatccagccatgccgcgtgagtgatgaaggccctagggttgtaaagctctttcggtggggaagataatgacggtacccacagaagaagccccggctaacttcgtgccagcagccgcggtaatacgaagggggctagcgttgctcggaatcactgggcgtaaagcgcacgtaggcggctttctaagtcaggggtgaaatcccggagctcaactccggaactgcctttgatactgggaggctcgagtccgggagaggtgagtggaactgcgagtgtagaggtgaaattcgtagatattcgcaagaacaccagtggcgaaggcggctcactggcccggtactgacgctgaggtgcgaaagcgtggggagcaaacaggattagataccctggtagtccacgccgtaaacgatggatgctagccgttggcgagcttgctcgtcagtggcgcagctaacgccttaagcatcccgcctggggagtacggtcgcaagattaaaactcaaaggaattgacgggggcccgcacaagcggtggagcatgtggtttaattcgaagcaacgcgcagaaccttaccagctcttgacatgccacgacggtttccggagacggactcctccccgcaaggggcgtggacacaggtgctgcatggctgtcgtcagctcgtgtcgtgagatgttgggttaagtcccgcaacgagcgcaaccctcgcccttagttgccaccattcagttgggcactctaaggggactgccggtgataagccgcgaggaaggtggggatgacgtcaagtcctcatggcccttacgggctgggctacacacgtgctacaatggcggtgacagtgggacgcgaaggggtgacccttagcaaatctcaaaaagccgtctcagttcggattgggctctgcaactcgagcccatgaagttggaatcgctagtaatcgcagatcagcacgctgcggtgaatacgttcccgggccttgtacacaccgcccgtcacaccatgggagttggctttacctgaaggcgttgcgctaacccgcaagggaggcaggcgaccacggtagggtcagcgactggggtg

SEQ ID NO: 2932 - DNA, 1383 bp, Rhodoplanes piscinae
  misc_feature (136)..(139): n is a, c, g, or t
catgcaagtcgaacgggcgcagcaatgcgtcagtggcagacgggtgagtacacgtgggaacgtgcctttcggttcggaacaactgagggaaacttcagctaataccggatacgcccgcaaggggaaagatttatcnnnnaaagatcggcccgcgtctgattagctagttggtggggtaatggcccaccaaggcgacgatcagtagctggtctgagaggatgatcagccacactgggactgagacacggcccagactcctacgggaggcagcagtggggaatattggacaatgggggaaaccctgatccagccatgccgcgtgagtgatgaaggccctagggttgtaaagctctttcggtggggaagataatgacggtacccacagaagaagccccggctaacttcgtgccagcagccgcggtaatacgaagggggctagcgttgctcggaatcactgggcgtaaagcgcacgtaggcggctttctaagtcaggggtgaaatcccggagctcaactccggaactgcctttgatactggaaagctcgagtccgggagaggtgagtggaactgcgagtgtagaggtgaaattcgtagatattcgcaagaacaccagtggcgaaggcggctcactggcccggtactgacgctgaggtgcgaaagcgtggggagcaaacaggattagataccctggtagtccacgccgtaaacgatggatgctagccgttggcgagcttgctcgtcagtggcgcagctaacgccttaagcatcccgcctggggagtacggtcgcaagattaaaactcaaaggaattgacgggggcccgcacaagcggtggagcatgtggtttaattcgaagcaacgcgcagaaccttaccagcccttgacatgccacgacggtttccagagatggactcctccccgcaaggggcgtggacacaggtgctgcatggctgtcgtcagctcgtgtcgtgagatgttgggttaagtcccgcaacgagcgcaaccctcgcccttagttgccaccattcagttgggcactctaaggggactgccggtgataagccgcgaggaaggtggggatgacgtcaagtcctcatggcccttacgggctgggctacacacgtgctacaatggcggtgacagtgggacgcgaaggggtgacccttagcaaatctcaaaaagccgtctcagttcggattgggctctgcaactcgagcccatgaagtcggaatcgctagtaatcgcagatcagcacgctgcggtgaatacgttcccgggccttgtacacaccgcccgtcacaccatgggagttggctttacctgaagacggtgcgctaaccggaaagggggcagccggccacggtagggtcagcgactggggtg

SEQ ID NO: 2933 - DNA, 1413 bp, Rhodoplanes roseus
  misc_feature (786)..(786): n is a, c, g, or t
agcgaacgctggcggcaggcttaacacatgcaagtcgagcgcccgtagcaatacgggagcggcagacgggtgagtaacacgtgggaacgtaccctttggttcggaacaacccagggaaacttgggctaataccggataagtccgcgaggagaaagatttatcgccgaaggatcggcccgcgtctgattagctagttggtgtggtaacggcgcaccaaggcgacgatcagtagctggtctgagaggatgatcagccacactgggactgagacacggcccagactcctacgggaggcagcagtggggaatattggacaatgggggaaaccctgatccagccatgccgcgtgagtgatgaaggccttagggttgtaaagctctttcagtggggaagataatgacggtacccacagaagaagccccggctaacttcgtgccagcagccgcggtaatacgaagggggctagcgttgctcggaatcactgggcgtaaagcgcacgtaggcggctttctaagtcaggggtgaaatcccggagctcaactccggaactgcccttgatactggagagctcgagtccgggagaggtgagtggaactgcgagtgtagaggtgaaattcgtagatattcgcaagaacaccagtggcgaaggcggctcactggcccggtactgacgctgaggtgcgaaagcgtggggagcaaacaggattagataccctggtagtccacgccgtaaacgatggatgctagccgttgggcagcttgctgctcagtggcgcagctaacgcnttaagcatcccgcctggggagtacggtcgcaagattaaaactcaaaggaattgacgggggcccgcacaagcggtggagcatgtggttcaattcgaagcaacgcgcagaaccttaccagctcttgacatgccacgacggtttccggagacggactcctccccgcaaggggcgtggacacaggtgctgcatggctgtcgtcagctcgtgtcgtgagatgttgggttaagtcccgcaacgagcgcaaccctcgcccttagttgccatcattcagttgggcactctaaggggactgccggtgataagccgcgaggaaggtggggatgacgtcaagtcctcatggcccttacgggctgggctacacacgtgctacaatggcggtgacagtgggacgcgaaggggcaacccttagcaaatctcaaaaagccgtctcagttcggattggggtctgcaactcgaccccatgaagtcggaatcgctagtaatcgcagatcagcacgctgcggtgaatacgttcccgggccttgtacacaccgcccgtcacaccatgggagttggttttacctgaaggcgctgcgctaactcagcaatgagaggcaggcgaccacggtagggtcagcgactggggtg

SEQ ID NO: 2934 - DNA, 1411 bp, Rhodopseudomonas faecalis
  misc_feature (201)..(201): n is a, c, g, or t
  misc_feature (211)..(211): n is a, c, g, or t
  misc_feature (322)..(322): n is a, c, g, or t
  misc_feature (327)..(327): n is a, c, g, or t
agcgaacgctggcggcaggcttaacacatgcaagtcgaacgggcgtagcaatacgtcagtggcagacgggtgagtaacgcgtgggaacgtaccttttggttcggaacaactgagggaaacttcagctaataccggataagcccttacggggaaagatttatcgccgaaagatcggcccgcgtctgattagctagttggtgnggtaatggcncaccaaggcgacgatcagtagctggtctgagaggatgatcagccacattgggactgagacacggcccaaactcctacgggaggcagcagtggggaatattggacaatgggngaaancctgatccagccatgccgcgtgagtgatgaaggccctagggttgtaaagctcttttgtgcgggaagataatgacggtaccgcaagaataagccccggctaacttcgtgccagcagccgcggtaatacgaagggggctagcgttgctcggaatcactgggcgtaaagggtgcgtaggcgggtttctaagtcagaggtgaaagcctggagctcaactccagaactgcctttgatactggaagtcttgagtatggcagaggtgagtggaactgcgagtgtagaggtgaaattcgtagatattcgcaagaacaccagtggcgaaggcggctcactgggccattactgacgctgaggcacgaaagcgtggggagcaaacaggattagataccctggtagtccacgccgtaaacgatgaatgccagccgttagtgggtttactcactagtggcgcagctaacgctttaagcattccgcctggggagtacggtcgcaagattaaaactcaaaggaattgacgggggcccgcacaagcggtggagcatgtggtttaattcgacgcaacgcgcagaaccttaccagcccttgacatgtccaggaccggtcgcagagatgtgaccttctcttcggagcctggagcacaggtgctgcatggctgtcgtcagctcgtgtcgtgagatgttgggttaagtcccgcaacgagcgcaacccccgtccttagttgctaccatttagttgagcactctaaggagactgccggtgataagccgcgaggaaggtggggatgacgtcaagtcctcatggcccttacgggctgggctacacacgtgctacaatggcggtgacaatgggatgctaaggggcgacccctcgcaaatctcaaaaagccgtctcagttcggattgggctctgcaactcgagcccatgaagttggaatcgctagtaatcgtggatcagcatgccacggtgaatacgttcccgggccttgtacacaccgcccgtcacaccatgggagttggttttacctgaaggtagtgcgctaacccgcaagggaggcagctaaccacggtagggtcagcgactggggtg

SEQ ID NO: 2935 - DNA, 1412 bp, Rhodopseudomonas palustris
agcgaacgctggcggcaggcttaacacatgcaagtcgaacgggcgtagcaatacgtcagtggcagacgggtgagtaacgcgtgggaacgtaccttttggttcggaacaacacagggaaacttgtgctaataccggataagcccttacggggaaagatttatcgccgaaagatcggcccgcgtctgattagctagttggtgaggtaatggctcaccaaggcgacgatcagtagctggtctgagaggatgatcagccacattgggactgagacacggcccaaactcctacgggaggcagcagtggggaatattggacaatgggggaaaccctgatccagccatgccgcgtgagtgatgaaggccctagggttgtaaagctcttttgtgcgggaagataatgacggtaccgcaagaataagccccggctaacttcgtgccagcagccgcggtaatacgaagggggctagcgttgctcggaatcactgggcgtaaagggtgcgtaggcgggtttctaagtcagaggtgaaagcctggagctcaactccagaactgcctttgatactggaagtcttgagtatggcagaggtgagtggaactgcgagtgtagaggtgaaattcgtagatattcgcaagaacaccagtggcgaaggcggctcactgggccattactgacgctgaggcacgaaagcgtggggagcaaacaggattagataccctggtagtccacgccgtaaacgatgaatgccagccgttagtgggtttactcactagtggcgcagctaacgctttaagcattccgcctggggagtacggtcgcaagattaaaactcaaaggaattgacgggggcccgcacaagcggtggagcatgtggtttaattcgacgcaacgcgcagaaccttaccagcccttgacatgtccaggaccggtcgcagagacgcgaccttctcttcggagcctggagcacaggtgctgcatggctgtcgtcagctcgtgtcgtgagatgttgggttaagtcccgcaacgagcgcaacccccgtccttagttgctaccatttagttgagcactctaaggagactgccggtgataagccgcgaggaaggtggggatgacgtcaagtcctcatggcccttacgggctgggctacacacgtgctacaatggcggtgacaatgggaagctaaggggcgacccttcgcaaatctcaaaaagccgtctcagttcggattgggctctgcaactcgagcccatgaagttggaatcgctagtaatcgtggatcagcatgccacggtgaatacgttcccgggccttgtacacaccgcccgtcacaccatgggagttggctttacctgaagacggtgcgctaaccagcaagtgggggcagccggccacggtagggtcagcgactggggtg

SEQ ID NO: 2936 - DNA, 1370 bp, Rhodopseudomonas pentothenatexigens
gggcgtagcaatacgtcagtggcagacgggtgagtaacgcgtgggaacgtaccttttggttcggaacaacacagggaaacttgtgctaataccggataagcccttacggggaaagatttatcgccgaaagatcggcccgcgtctgattagctagttggtgaggtaatggctcaccaaggcgacgatcagtagctggtctgagaggatgatcagccacattgggactgagacacggcccaaactcctacgggaggcagcagtggggaatattggacaatgggggcaaccctgatccagccatgccgcgtgagtgatgaaggccctagggttgtaaagctcttttgtgcgggaagataatgacggtaccgcaagaataagccccggctaacttcgtgccagcagccgcggtaatacgaagggggctagcgttgctcggaatcactgggcgtaaagggtgcgtaggcgggtttctaagtcagaggtgaaagcctggagctcaactccagaactgcctttgatactggaagtcttgagtatggcagaggtgagtggaactgcgagtgtagaggtgaaattcgtagatattcgcaagaacaccagtggcgaaggcggctcactgggccattactgacgctgaggcacgaaagcgtggggagcaaacaggattagataccctggtagtccacgccgtaacgatgaatgccagccgttagtgggtttactcactagtggcgcagctaacgctttaagcattccgcctggggagtacggtcgcaagattaaaactcaaaggaattgacgggggcccgcacaagcggtggagcatgtggtttaattcgacgcaacgcgcagaaccttaccagcccttgacatgtccaggaccggtcgcagagacgtgaccttctcttcggagcctggagcacaggtgctgcatggctgtcgtcagctcgtgtcgtgagatgttgggttaagtcccgcaacgagcgcaacccccgtccttagttgctaccatttagttgagcactctaaggagactgccggtgataagccgcgaggaaggtggggatgacgtcaagtcctcatggcccttacgggctgggctacacacgtgctacaatggcggtgacaatgggaagctaaggggcgacccttcgcaaatctcaaaaagccgtctcagttcggattgggctctgcaactcgagcccatgaagttggaatcgctagtaatcgtggatcagcatgccacggtgaatacgttcccgggccttgtacacaccgcccgtcacaccatgggagttggctttacctgaagacggtgcgctaacccgcaaggggggcagccggccacggtagggtcagcgactggggtg

SEQ ID NO: 2937 - DNA, 1411 bp, Rhodopseudomonas pseudopalustris
agcgaacgctggcggcaggcttaacacatgcaagtcgaacgggcatagcaatatgtcagtggcagacgggtgagtaacgcgtgggaacgtaccttttggttcggaacaactgagggaaacttcagctaataccggataagcccttacggggaaagatttatcgccgaaagatcggcccgcgtctgattagctagttggtgtggtaaaggcgcaccaaggcgacgatcagtagctggtctgagaggatgatcagccacattgggactgagacacggcccaaactcctacgggaggcagcagtggggaatattggacaatgggcgaaagcctgatccagccatgccgcgtgagtgatgaaggccctagggttgtaaagctcttttgtgcgggaagataatgacggtaccgcaagaataagccccggctaacttcgtgccagcagccgcggtaatacgaagggggctagcgttgctcggaatcactgggcgtaaagggtgcgtaggcgggtctttaagtcagaggtgaaagcctggagctcaactccagaactgcctttgatactgaggatcttgagtatgggagaggtgagtggaactgcgagtgtagaggtgaaattcgtagatattcgcaagaacaccagtggcgaaggcggctcactggcccataactgacgctgaggcacgaaagcgtggggagcaaacaggattagataccctggtagtccacgccgtaaacgatgaatgccagccgttagtgggtttactcactagtggcgcagctaacgctttaagcattccgcctggggagtacggtcgcaagattaaaactcaaaggaattgacgggggcccgcacaagcggtggagcatgtggtttaattcgacgcaacgcgcagaaccttaccagcccttgacatgtccaggaccggtcgcagagatgtgaccttctcttcggagcctggagcacaggtgctgcatggctgtcgtcagctcgtgtcgtgagatgttgggttaagtcccgcaacgagcgcaacccccgtccttagttgctaccatttagttgagcactctaaggagactgccggtgataagccgcgaggaaggtggggatgacgtcaagtcctcatggcccttacgggctgggctacacacgtgctacaatggcggtgacaatgggacgctaaggggcaacccttcgcaaatctcaaaaaaccgtctcagttcggattggagtctgcaactcgactccatgaagttggaatcgctagtaatcgtggatcagcatgccacggtgaatacgttcccgggccttgtacacaccgcccgtcacaccatgggagttggttctacctgaaggcagtgcgctaacccgcaagggaggcagctgaccacggtagggtcagcgactggggtg

SEQ ID NO: 2938 - DNA, 1406 bp, Rhodospirillum rubrum
gacgaacgctggcggcaggcctaacacatgcaagtcgaacgcatccttcgggatgagtggcgcacgggtgagtaacacgtgggaacgtaccttggagtgcggaataatctttggaaacgaggactaataccgcatacgcccttagggggaaagatttatcgctccaagatcggcccgcgtccgattagctagttggcggggtaatggcccaccaaggcgacgatcggtagctggtctgagaggatggccagccacactgggactgagacacggcccagactcctacgggaggcagcagtggggaatattgcgcaatgggggcaaccctgacgcagccatgccgcgtgagtgaagaaggccttcgggttgtaaagctctttcgggtgtgaagatgatgacggtaacaccagaagaagccccggctaacttcgtgccagcagccgcggtaatacgaagggggcaagcgttgttcggaattactgggcgtaaagagcgcgtaggcggtctgattagtcagaggtgaaatcccagagctcaactttggaactgcctttgatactgttagactagaatccgtgagagggtggtggaattcccagtgtagaggtgaaattcgtagatattgggaggaacaccagtggcgaaggcggccacctggcgcggtattgacgctgaggcgcgaaagcgtggggagcaaacaggattagataccctggtagtccacgccgtaaacgatgagtgctagatgtcggggtacatgtacctcggtgtcgcagctaacgcattaagcactccgcctggggagtacggccgcaaggttaaaactcaaaggaattgacgggggcccgcacaagcggtggagcatgtggtttaattcgaagcaacgcgcagaaccttaccagcccttgacatcccgtgacacttccagagatggaaggttcccttcggggacacggtgacaggtgctgcatggctgtcgtcagctcgtgtcgtgagatgttgggttaagtcccgcaacgagcgcaaccctcatcttcagttgccagcaagtaacgttgggcactctgaagagactgccggtgacaagccggaggaaggtggggatgacgtcaagtcctcatggcccttacgggctgggctacacacgtgctacaatggcgcctacaatgggcagcgacctcgcgaggggaagctaatctccaaaaggcgtctcagttcggattgcactctgcaactcgggtgcatgaagtcggaatcgctagtaatcgtggatcagcatgccacggtgaatacgttcccgggccttgtacacaccgcccgtcacaccatgggagttggttctacccgaagacggtacgctaaccgcaaggaggcagccggccacggtagggtcagcgactggggtg

SEQ ID NO: 2939 - DNA, 1407 bp, Rhodothalassium salexigens
aacgaacgctggcggcaggcctaacacatgcaagtcgagcgcacccttcggggtgagcggcggacgggtgagtaacgcgtgggaacctgctcagggctctgggataactgctggaaacggcagctaataccggatacgccgtattgggaaagaaattcggccttggatgggcccgcgttggattagctagatggtggggtaacggcctaccatggcgacgatccatagctggtttgagaggatgatcagccacactgggactgagacacggcccagactcctacgggaggcagcagtggggaatcttagacaatgggggcaaccctgatctagccatgccgcgtgagtgatgaaggccttagggttgtaaagctctttcagcagggaagataatgactgtacctgcagaagaagctccggctaactccgtgccagcagccgcggtaatacggagggggctagcgttgttcggaattactgggcgtaaagcgcgcgtaggcggatcggtcagttgggggtgaaagcccggggctcaacctcggaactgccctcaaaactaccgatctagagttcgggagaggtaagcggaattcccagtgtagaggtgaaattcgtagatattgggaagaacaccagtggcgaaggcggcttactggaccgatactgacgctgaggtgcgaaagcgtggggagcaaacaggattagataccctggtagtccacgccgtaaacgatgggtgctagatgtcggggctcttagagtttcggtgtcgcagttaacgcattaagcaccccgcctggggagtacggccgcaaggttaaaactcaaaggaattgacgggggcccgcacaagcggtggagcatgtggtttaattcgaagcaacgcgcagaaccttaccagctcttgacatcccgggacgacttccagagatggattttttcacttcggtgacccggtgacaggtgctgcatggctgtcgtcagctcgtgtcgtgagatgttgggttaagtcccgcaacgagcgcaaccctcgcccttagttgccagcatttggttggggactctaagggaactgccggtgataagccggaggaaggtggggatgacgtcaagtcctcatggcccttatgggctgggctacacacgtgctacaatggcggtgacagagggcagcgagcctgcgagggtgagcgaatctctaaaagccgtctcagttcggattgttctctgcaactcgagagcatgaaggtggaatcgctagtaatcgcggatcagcatgccgcggtgaatacgttcccgggccttgtacacaccgcccgtcacaccatgggagttggtttgacccgaagacggtgagctaacccgaaaggggggcagccggccacggtcaggtcagcgactggggtg

SEQ ID NO: 2940 - DNA, 1462 bp, Rhodothermus marinus
ggcgaacgctggcggcgggcctaacacatgcaagtcgtacgcggggttctccttcgggagaactgccgagtggcgaacgggtgcgtaacgcgtaggtaacctgccctcgagtgggggataactccgggaaaccggggctaataccgcatattgtcccgggaccgcatggctccgggatgaaagccctctgggcgctcgaggatgggcctgcgtcggattagctagttggtggggtaacggcccaccaaggcgacgatccgtagctggtctgagaggacgaccagccacactggcactgagacacgggccagactcctacgggaggcagcagtggggaatcttgggcaatgggcgaaagcctgacccagccacgccgcgtggaggatgaagcccttcggggtgtaaactccttttctgggggaagaaatcccggctctggtcgggactgacggtaccccaggaataagcgccggctaactccgtgccagcagccgcggtaatacggagggcgcaagcgttgcccggaatcactgggtgtaaagggtgcgtaggcggggctgtaagtcagaggtgaaagcctccggctcaaccggagaattgcctctgatactgcagctcttgagtcccggagaggccgctggaattcctggtgtagcggtgaaatgcgtagatatcaggaggaacaccggaggcgaaggcgggcggctggacggggactgacgctgaggcacgaaagcgtggggagcaaacaggattagataccctggtagtccacgccgtaaacgatggatgctcggcgttgccgccttcgggcggcagtgcctaagctaacgcggtaagcatcccacctggggagtacggccgcaaggttgaaactcaaaggaattgacgggggcccgcacaagcggtggagcatgtggcttaattcgatgctacgcgaggaaccttacctgggctcgaacaccaccggacagcccccgaaagggggtctcccgcaagggctggtggtgaggtgctgcatggctgtcgtcagctcgtgccgtgaggtgttgggttaagtcccgcaacgagcgcaacccctaccgccagttaccagcgggtaatgccggggactctggcgggactgcctgcgcaagcaggaggaaggtggggatgacgtcaagtcatcatggcccttacgcccagggctgcacacgtgctacaatggccggtacaatgggcagccaccccgcgagggggagcgaatccctaaagccggtctcagttcggattggagtctgcaactcgactccatgaagccggaatcgctagtaatcgcgcatcagctacggcgcggtgaatacgttcccgggccttgtacacaccgcccgtcaacccatgggagccgggggcgcccgaagtccgtgacccaacctgcttcggcgggagggagcggcctaaggcgaacccggtgactgggggt

SEQ ID NO: 2941 - DNA, 1462 bp, Rhodothermus profundi
ggcgaacgctggcggcgggcctaacacatgcaagtcgtacgcggggccctccttcgggagggctgccgagtggcgaacgggtgagtaacgcgtaggtaacctgccctcgagtgggggataaccccgggaaaccggggctaataccgcatattgtcccggggccgcatggtgccgggatgaaagccctctgggcgctcgaggatgggcctgcgtcggattagctagttggtggggtaacggcccaccaaggcgacgatccgtagctggtctgagaggacggccagccacactggcactgagacacgggccagactcctacgggaggcagcagtggggaatcttgggcaatgggcgaaagcctgacccagccacgccgcgtggaggatgaagcccttcggggtgtaaactccttttctgggggaagaaaccccgactctggtcggggctgacggtaccccaggaataagcgccggctaactccgtgccagcagccgcggtaatacggagggcgcaagcgttgcccggaatcactgggtgtaaagggtgcgtaggcggggctgtaagtcagaggtgaaagccctcggctcaaccgaggaattgcctctgatactgcagctcttgagtcccggagaggccgctggaattcctggtgtagcggtgaaatgcgtagatatcaggaggaacaccggaggcgaaggcgggcggctggacggggactgacgctgaggcacgaaagcgtggggagcaaacaggattagataccctggtagtccacgccgtaaacgatggatgctcggcgttgccgccttcgggcggcagtgcctaagctaacgcggtaagcatcccacctggggagtacggccgcaaggttgaaactcaaaggaattgacgggggcccgcacaagcggtggagcatgtggcttaattcgatgctacgcgaggaaccttacctgggctcgaacaccaccggacagcccccgaaagggggtctcccgaaagggctggtggtgaggtgctgcatggctgtcgtcagctcgtgccgtgaggtgttgggttaagtcccgcaacgagcgcaacccctgccgccagttaccagcgggtaatgccggggactctggcgggactgcctgcgcaagcaggaggaaggtggggacgacgtcaagtcatcatggcccttatgcccagggctgcacacgtgctacaatggccggtacaatgggcagccaccccgcgagggggagcgaatccctaaagccggtctcagttcggattggagtctgcaactcgactccatgaagccggaatcgctagtaatcgcgcatcagctacggcgcggtgaatacgttcccgggccttgtacacaccgcccgtcaacccatgggagccgggggcacccgaagtccgtaacccaacccgcttcggcgggagggagcggcctaaggtgaacccggtgactgggggt

SEQ ID NO: 2942 - DNA, 1412 bp, Richelia intracellularis
gatgaacgctggcggtatgcattacacatgcaagtcgaacggactcttcggagttagtggcggacgggtgagtaacacgtgagaatctggctctaggtcggggacaacagttggaaacgactgctaataccggatatgccgaaaggtgaaagatttattgccgagagatgagctcgcgtctgattagttagttggtggggtaatagcctaccaagacatcgatcagtagctggtctgagaggatgatcagccacactgggactgagacacggcccagactcctacgggaggcagcagtggggaattttccgcaatgggcgaaagcctgacggagcaataccgcgtgagggaggaaggcttttgggttgtaaacctcttttcttaaggaagaatacaatgacggtacttaaggaataagcatcggctaactccgtgccagcagccgcggtaatacggaggatgcaagcgttatccggaataattgggcgtaaagcgtccgcaggtggttttgtaagtctgctgttaaagcgtgaggcttaacctcataacggcggtggaaactacaagacttgagtgcgttcggggcagagggaattcctggtgtagcggtgaaatgcgtagatatcaggaagaacaccggtggcgaaagcgctctgctaggccgtaactaacactgagggacgaaagctaggggagcgaatgggattagataccccagtagtcctagccgtaaacgatggatactaggcgttgtctgtatcgacccggacagtgccgtagctaacgcgttaagtatcccgcctggggagtacgcacgcaagtgtgaaactcaaaggaattgacgggggcccgcacaagcggtggagtatgtggtttaattcgatgcaacgcgaagaaccttaccagggtttgacatgtcgcgaacttcctggaaacgggaaggtgccttcgggagcgcgaacacaggtggtgcatggctgtcgtcagctcgtgtcatgagatgttgggttaagtcccgcaacgagcgcaaccctcgtttttagttgccatcacttagggtgggcactctagagagactgccggtgacaaaccggaggaaggtggggatgacgtcaagtcatcatgccccttacatcctgggctacacacgtactacaatgctatagacaaagggcagccaactcgcaagagtgagcaaatctcataaactatggctcagttcagatcgcaggctgcaactcgcctgtgtgaaggaggaatcgctagtaattgcaggtcagcatactgcagtgaattcgttcccgggccttgtacacaccgcccgtcacaccatggaagctggtcacgcccgaagtcattaccctaaccttattaggagggggatgccgaaggtaggactggtgactggggtg

SEQ ID NO: 2943 - DNA, 1421 bp, Rickettsia africae
aacgaacgctatcggtatgcttaacacatgcaagtcgaacgaactaattggggcttgctccaattagttagtggcagacgggtgagtaacacgtgggaatctacccattagtacggaataacttttagaaataaaagctaataccgtatattctctgcggaggaaagatttatcgctgatggatgagcccgcgtcagattaggtagttggtgaggtaatggctcaccaagccgacgatctgtagctggtctgagaggatgatcagccacactgggactgagacacggcccagactcctacgggaggcagcagtggggaatattggacaatgggcgaaagcctgatccagcaataccgagtgagtgatgaaggccttagggttgtaaagctcttttagcaaggaagataatgacgttacttgcagaaaaagccccggctaactccgtgccagcagccgcggtaagacggagggggctagcgttgttcggaattactgggcgtaaagagtgcgtaggcggtttagtaagttggaagtgaaagcccggggcttaacctcggaattgctttcaaaactactaatctagagtgtagtaggggatgatggaattcctagtgtagaggtgaaattcttagatattaggaggaacaccggtggcgaaggcggtcatctgggctacaactgacgctgatgcacgaaagcgtggggagcaaacaggattagataccctggtagtccacgccgtaaacgatgagtgctagatatcggaagattctctttcggtttcgcagctaacgcattaagcactccgcctggggagtacggtcgcaagattaaaactcaaaggaattgacgggggctcgcacaagcggtggagcatgcggtttaattcgatgttacgcgaaaaaccttaccaacccttgacatggtggtcgtggatcgcagagatgcttttcttcagctcggctggaccacacacaggtgttgcatggctgtcgtcagctcgtgtcgtgagatgttgggttaagtcccgcaacgagcgcaaccctcattcttatttgccagcgggtaatgccgggaactataagaaaactgccggtgataagccggaggaaggtggggacgacgtcaagtcatcatggcccttacgggttgggctacacgcgtgctacaatggtgtttacagagggaagcaagacggcgacgtggagcaaatccctaaaagacatctcagttcggattgttctctgcaactcgagagcatgaagttggaatcgctagtaatcgcggatcagcatgccgcggtgaatacgttctcgggccttgtacacactgcccgtcacgccatgggagttagttttacctgaaggtggtgagctaacgcaagaggcagccaaccacggtaaaattagcgactggggtg

SEQ ID NO: 2944 - DNA, 1405 bp, Rickettsia akari
atgcttaacacatgcaagtcggacggactgattggggttttctccagttagtgagtggcgaacgggtgagtaacacgtgggaatctgcccatcagtacggaataacttttagaaataaaagctaataccgtatattctctacggaggaaagatttatcgctgatggatgagcccgcgtcggattaggtagttggtgaggtaacggctcaccaagccgacgatctgtagttggtctgagaggatgatcagccacactgggactgagacacggcccagactcctacgggaggcagcagtggggaatattggacaatgggcgaaagcctgatccagcaataccgagtgagtgatgaaggccctagggttgtaaagctcttttagcaaggaagataatgacgttacttgcagaaaaagccccggctaactccgtgccagcagccgcggtaagacggagggggctagcgttgttcggaattactgggcgtaaagagtgcgtaggcggtttagtaagttggaagtgaaagcccggggcttaacctcggaattgctttcaaaactactaatctagagtgtagtaggggatgatggaattcctagtgtagaggtgaaattcttagatattaggaggaacaccggtggcgaaggcggtcatctgggctacgactgacgctgatgcacgaaagcgtggggagcaaacaggattagataccctggtagtccacgccgtaaacgatgagtgctagatatcggaagagtctctttcggtttcgcagctaacgcattaagcactccgcctggggagtacggtcgcaagattaaaactcaaaggaattgacgggggctcgcacaagcggtggagcatgcggtttaattcgatgttacgcgaaaaaccttaccaacctttgacatggtggttgcggatcgcagagatgctttccttcagttcggctggaccacacacaggtgttgcatggctgtcgtcagctcgtgtcgtgagatgttgggttaagtcccgcaacgagcgcaaccctcattcttatttgccagcgggtaatgccgggaactataagaaaactgccggtgataagccggaggaaggtggggacgacgtcaagtcatcatggcccttatgggttgggctacacgcgtgctacaatggtgtttacagagggaagcaagacggtaacgtggagcaaatccctaaaagacatctcagttcggattgttctctgcaactcgagagcatgaagttggaatcgctagtaatcgcggatcagcatgccgcggtgaatacgttctcgggccttgtacacactgcccgtcacgccatgggagttggttttacctgaaggtggtgagctaacgcaagaggcagccaaccacggtagaattagcgactggggtg

SEQ ID NO: 2945 - DNA, 1421 bp, Rickettsia amblyommatis
aacgaacgctatcggtatgcttaacacatgcaagtcgaacggactaattggggcttgctccaattagttagtggcagacgggtgagtaacacgtgggaatctacccatcagtacggaataacttttagaaataaaagctaataccgtatattctctacggaggaaagatttatcgctgatggatgagcccgcgtcagattaggtagttggtgaggtaatggctcaccaagccgacgatctgtagctggtttgagaggatgatcagccacactgggactgagacacggcccagactcctacgggaggcagcagtggggaatattggacaatgggcgaaagcctgatccagcaataccgagtgagtgatgaaggccttagggttgtaaaactcttttagcaaggaagataatgacgttacttgcagaaaaagccccggctaactccgtgccagcagccgcggtaagacggggggggctagcgttgttcggaattactgggcgtaaagagtgcgtaggcggtttagtaagttggaagtgaaagcccggggcttaacctcggaattgctttcaaaactactaatctagagtgtagtaggggatgatggaattcctagtgtagaggtgaaattcttagatattaggaggaacaccggtggcgaaggcggtcatctgggctacaactgacgctaatgcacgaaagcgtggggagcaaacaggattagataccctggtagtccacgccgtaaacgatgagtgctagatatcggaagattatctttcggtttcgcagctaacgcattaagcactccgcctggggagtacggtcgcaagattaaaactcaaaggaattgacgggggctcgcacaagcggtggagcatgcggtttaattcgatgttacgcgaaaaaccttaccaacccttgacatggtggtcgcggatcgcagagatgcttttcttcagcttggctggaccacacacaggtgttgcatggctgtcgtcagctcgtgtcgtgagatgttgggttaagtcccgcaacgagcgcaaccctcattcttatttgccagcgggtaatgccgggaactataagaaaactgccggtgataagccggaggaaggtggggacgacgtcaagtcatcatggcccttacgggttgggctacacgcgtgctacaatggtgtttacagagggaagcaagacggcgacgtggagcaaatccctaaaagacatctcagttcggattgttctctgcaactcgagagcatgaagttggaatcgctagtaatcgcggatcagcatgccgcggtgaatacgttctcgggccttgtacacactgcccgtcacgccatgggagttggttttacctgaaggtggtgagctaacgcaagaggcagccaaccacggtaaaattagcgactggggtg

SEQ ID NO: 2946 - DNA, 1421 bp, Rickettsia asembonensis
aacgaacgctatcggtatgcttaacacatgcaagtcggacggactaattggggcttgctccaattagttagtggcagacgggtgagtaacacgtgggaatctgcccatcagtacggaataacttttagaaataaaagctaataccgtatattctctacggaggaaagatttatcgctgatggatgagcccgcgtcagattaggtagttggtgaggtaacggctcactaagccgacgatctgtagctggtctgagaggatgatcagccacactgggactgagacacggcccagactcctacgggaggcagcagtggggaatattggacaatgggcgaaagcctgatccagcaataccgagtgagtgatgaaggccttagggttgtaaagctcttttagcaaggaagataatgacgttacttgcagaaaaagccccggctaactccgtgccagcagccgcggtaagacggagggggctagcgttgttcggaattactgggcgtaaagagtgcgtaggcggtttagtaagttggaagtgaaagcccggggcttaacctcggaattgctttcaaaactactaatctagagtgtagtaagggatgatggaattcctagtgtagaggtgaaattcttagatattaggaggaacaccggtggcgaaggcggtcatctgggctacaactgacgctgatgcacgaaagcgtggggagcaaacaggattagataccctggtagtccacgccgtaaacgatgagtgctagatatcggaagattctctttcggtttcgcagctaacgcattaagcactccgcctggggagtacggtcgcaagattaaaactcaaaggaattgacgggggctcgcacaagcggtggagcatgcggtttaattcgatgttacgcgaaaaaccttaccaacccttgacatggtggttgcggatcgcagagatgctttccttcagctcggctggaccacacacaggtgttgcatggctgtcgtcagctcgtgtcgtgagatgttgggttaagtcccgcaacgagcgcaaccctcattcttatttgccagcgggtaatgccgggaactataagaaaactgccggtgataagctggaggaaggtggggacgacgtcaagtcatcatggcccttacgggttgggctacacgcgtgctacaatggtgtttacagagggaagcaagacggcgacgtggagtaaatccctaaaagacatctcagttcggattgttctctgcaactcgagagcatgaagttggaatcgctagtaatcgcggatcagcatgccgcggtgaatacgttctcgggccttgtacacactgcccgtcacgccatgggagttggttttacctgaaggtggtgagctaacgcaagaggcagccaaccacggtaaaattagcgactggggtg

SEQ ID NO: 2947 - DNA, 1421 bp, Rickettsia asiatica
aacaaacgctatcggtatgcttaacacatgcaagtcgaacggactaattggggcttgctccaattagttagtggcagacgggtgagtaacacgtgggaatctacccatcagtacggaataacttttagaaataaaagctaataccatatattctctatggaggaaagatttatcgctgatggatgagcccgcgtcagattaggtagttggtgaggtaacggctcaccaagccaacgatctgtagctggtctgagaggatgatcagccacactgggactgagacacggcccatactcctacgggaggcagcagtggggaatattggacaatgggcgaaagcctgatccagcaataccgagtgagtgatgaaggccttaaggttgtaaagctcttttagcaaggaagataatgacgttacttgcagaaaaagtcccggctaactccgtgccagcagccgcggtaatacggagggggctagcgttgttcggaattactgggcgtaaagagtgcgtaggcggtttagtaagttggaagtgaaagcccggggcttaacctcggaattgctttcaaaactactaatctagagtgtagtaggggatgatggaattcctagtgtagaggtgaaattcttagatattaggaggaacaccggtggcgaaggcgatcatctgggctacaactgacgctgatgcacgaaagcgtggggagcaaacaggattagataccctggtagtccacgccgtaaacgatgagtgctagatatcggaagattctctttcggtttcgcagctaacgcattaagcactccgcctggggagtacggtcgcaagattaaaactcaaaggaattgacgggggctcgcacaagcggtggagcatgcggtttaattcgatgttacgcgaaaaaccttaccaacccttgacatggtggttgcggatcgcagagatgctttccttcagctcggctggaccacacacaggtgttgcatggctgtcgtcagctcgtgtcgtgagatgttgggttaagtcccgcaacgagcgcaaccctcgttcttatttgccagcgggtaatgccgggaactataagaaaactgccggtgataagccggaggaaggtggggatgacgtcaagtcatcatggcccttacgggttgggctacacgcgtgctacaatggtgtttacagagggaagcaagacggcgacgtggagcaaatccctaaaagacatctcagttcggattgttctctgcaactcgagagcatgaagttggaatcgctagtaatcgcggatcagcatgccgcggtgaatacgttctcgggccttgtacacactgcccgtcacgccaagggaattggttttacctgaaggtggtgagctaacgcaagaggcagccaaccacggtaaaattagcgactggggtg

SEQ ID NO: 2948 - DNA, 1422 bp, Rickettsia australis
aacgaacgctatcggtatgcttaacacatgcaagtcggacggactaattgggggtttactctaattagttagtggcagacgggtgagtaacacgtgggaatctgcccatcagtacggaataacttttagaaataaaagctaataccgtatattctctacggaggaaagatttatcgctgatggatgagcccgcgtcagattaggtagttggtgaggtaacggctcaccaagccgacgatctgtagctggtctgagaggatgatcagccacactgggactgagacacggcccagactcctacgggaggcagcagtggggaatattggacaatgggcgaaagcctgatccagcaataccgagtgagtgatgaaggccctagggttgtaaagctcttttagcaaggaagataatgacgttacttgcagaaaaagccccggctaactccgtgccagcagccgcggtaagacggagggggctagcgttgttcggaattactgggcgtaaagagtgcgtaggcggtttagtaagttggaagtgaaagcccggggcttaacctcggaattgctttcaaaactactaatctagagtgtagtaggggatgatggaattcctagtgtagaggtgaaattcttagatattaggaggaacaccggtggcgaaggcggtcatctgggctacaactgacgctgatgcacgaaagcgtggggagcaaacaggattagataccctggtagtccacgccgtaaacgatgagtgctagatatcggaagattttctttcggtttcgcagctaacgcattaagcactccgcctggggagtacggtcgcaagattaaaactcaaaggaattgacgggggctcgcacaagcggtggagcatgcggtttaattcgatgttacgcgaagaaccttaccaacccttgacatggtggttgcggatcgcagagatgctttccttcagctcggctggaccacacacaggtgttgcatggctgtcgtcagctcgtgtcgtgagatgttgggttaagtcccgcaacgagcgcaaccctcattcttatttgccagcgggtaatgccgggaactataagaaaactgccggtgataagccggaggaaggtggggacgacgtcaagtcatcatggcccttacgggttgggctacacgcgtgctacaatggtgtttacagagggaagcaagacggcgacgtggagcaaatccctaaaagacatctcagttcggattgttctctgcaactcgagagcatgaagttggaatcgctagtaatcgcggatcagcatgccgcggtgaatacgttctcgggccttgtacacactgcccgtcacgccatgggagttggttttacctgaaggtggtgagctaacgcaagaggcagccaaccacggtaaaattagcgactggggtg

SEQ ID NO: 2949 - DNA, 1421 bp, Rickettsia bellii
aacgaacgctatcggtatgcttaacacatgcaagtcgaacggactaattggggcttgctccaattagttagtggcagacgggtgagtaacacgtgggaatctgcccatcagtacggaataacttttagaaataaaagctaataccgtatattctctacggaggaaagatttatcgctgatggatgagcccgcgtcagattaggtagttggtgaggtaatggctcaccaagcctacgatctgtagctggtctgagaggatgatcagccacactgggactgagacacggcccagactcctacgggaggcagcagtggggaatattggacaatgggcgaaagcctgatccagcaataccgagtgagtgatgaaggccctagggttgtaaagctcttttagcaaggaagataatgacgttacttgcagaaaaagccccggctaactccgtgccagcagccgcggtaagacggagggggctagcgttgttcggaattactgggcgtaaagagtgcgtaggcggtttagtaagttggaagtgaaagcccggggcttaacctcggaattgctttcaaaactactaatctagagtgtagtaggggatgatggaattcctagtgtagaggtgaaattcttagatattaggaggaacaccggtggcgaaggcggtcatctgggctacaactgacgctgatgcacgaaagcgtggggagcaaacaggattagataccctggtagtccacgccgtaaacgatgagtgctagatattgggagattttctctcggtttcgcagctaacgcattaagcactccgcctggggagtacggtcgcaagattaaaactcaaaggaattgacgggggctcgcacaagcggtggagcatgcggtttaattcgatgttacgcgaaaaaccttaccaacccttgacatggtggtcgcggatcgcagagatgctttccttcagttcggctggaccacacacaggtgttgcatggctgtcgtcagctcgtgtcgtgagatgttgggttaagtcccgcaacgagcgcaaccctcattcttatttgccagcgggtaatgccgggaactataagaaaactgccggtgataagccggaggaaggtggggacgacgtcaagtcatcatggcccttacgggttgggctacacgcgtgctacaatggtgtttacagagggaagcaagacggcgacgtggagcaaatccctaaaagacatctcagttcggattgttctctgcaactcgagagcatgaagttggaatcgctagtaatcgcggatcagcatgccgcggtgaatacgttctcgggccttgtacacactgcccgtcacgccatgggagttggttttacctgaaggtggtgagctaacgcaagaggcagccaaccacggtaaaattagcgactggggtg

SEQ ID NO: 2950 - DNA, 1421 bp, Rickettsia buchneri
aacgaacgctatcggtatgcttaacacatgcaagtcgaacggactaattggggcttgctccaattagttagtggcagacgggtgagtaacacgtgggaatctacccatcagtacggaataacttttagaaataaaagctaataccgtatattctctacggaagaaagatttatcgctgatggatgagcccgcgtcagattaggtcgttggtgaggtaacggctcaccaagccgacgatctgtagctggtctgagaggatgatcagccacactgggactgagacacggcccagactcctacgggaggcagcagtggggaatattggacaatgggcgaaagcctgatccagcaataccgagtgagtgatgaaggccttagggttgtaaagctcttttagcaaggaagataatgacgttacttgcagaaaaagccccggctaactccgtgccagcagccgcggtaagacggagggggctagcgttgttcggaattactgggcgtaaagagtgcgtaggcggtttagtaagttggaagtgaaagcccggggcttaacctcggaattgctttcaaaactactaatctagagtgtagtaggggatgatggaattcctagtgtagaggtgaaattcttagatattaggaggaacaccggtggcgaaggcggtcatctgggctacaactgacgctaatgcacgaaagcgtggggagcaaacaggattagataccctggtagtccacgccgtaaacgatgagtgctagatatcggaagattctctttcggtttcgcagctaacgcattaagcactccgcctggagagtacggtcgcaagattaaaactcaaaggaattgacgggggctcgcacaagcggtggagcatgcggtttaattcgatgttacgcgaaaaaccttaccaacccttgacatggtggtcgcggattgcagagatacttttcttcagctcggctggaccacacacaggtgttgcacggctgtcgtcagctcgtgtcgtgagatgttgggttaagtcccgcaacgagcgcaaccctcattcttatttgccagcgggtaatgccgggaactataagaaaactgctggtgataagccagaggaaggtggggacgacgtcaagtcatcatggcccttacgggttgggctacacgcgtgctacaatggtgtttacagagggaagcaagacggcgacgtggagcaaatccctaaaagacatctcagttcggattgttctctgcaactcgagagcatgaagttggaatcgctagtaatcgcggatcagcatgccgcggtgaatacgttctcgggccttgtacacactgcccgtcacgccatgggagttggttttacctgaaggtggtgagctaacgcaagaggcagccaaccacggtaaaattagcgactggggtg

SEQ ID NO: 2951 - DNA, 1421 bp, Rickettsia canadensis
aacgaacgctatcggtatgcttaacacatgcaagtcgaacggactaattagggcttgctctaattagttagtggcagacgggtgagtaacacgtgggaatctgcccatcagtacggaataacttttagaaataaaagctaataccgtatattctctacagaggaaagatgtatcgctgatggatgagcccgcgtcagattaggtagttggtgaggtaatggctcaccaagccaacgatctgtagctggtctgagaggatgatcagccacactgggactgagacacggcccagactcctacgggaggcagcagtggggaatattggacaatgggcgaaagcctgatccagcaataccgagtgagtgatgaaggccttagggttgtaaagctcttttagcaaggaagataatgacgttacttgcagaaaaagccccggctaactccgtgccagcagccgcggtaagacggagggggctagcgttgttcggaattactgggcgtaaagagtgcgtaggcggtttagtaagttggaagtgaaagcccggggcttaacctcggaattgctttcaaaactactaatctagagtgtagtaggggatgatggaattcctagtgtagaggtgaaattcttagatattaggaggaacaccggtggcgaaggcgatcatctaggctataactgacgctgatgcacgaaagcgtggggagcaaacaggattagataccctggtagtccacgccgtaaacgatgagtgctagatatcgggagaatatctctcggtttcgcagctaacgcattaagcactccgcctggggagtacggtcgcaagattaaaactcaaaggaattgacgggggctcgcacaagcggtggagcatgcggtttaattcgatgttacgcgaaaaaccttaccaacccttgacatggtggtcgcggattgcagagatgctttccttcagttcggctggaccacacacaggtgttgcatggctgtcgtcagctcgtgtcgtgagatgttgggttaagtcccgcaacgagcgcaaccctcattcttatttgccagcggataatgccgggaactataagaaaactgccagtgataagctggaggaaggtggggacgacgtcaagtcatcatggcccttacgggttgggctacacgcgtgctacaatggtgtttacagagggaagcaaaacggcgacgtggagcaaatccctaaaagacatctcagttcggattgttctctgcaactcgagagcatgaagttggaatcgctagtaatcgcggatcagcatgccgcggtgaatacgttctcgggccttgtacacactgcccgtcacgccatgggagttggttttacctgaaggtggtgagctaacgcaagaggcagccaaccacggtaaaattagcgactggggtg

SEQ ID NO: 2952 - DNA, 1421 bp, Rickettsia conorii
aacgaacgctatcggtatgcttaacacatgcaagtcgaacggactaattggggcttgctccagttagttagtggcagacgggtgagtaacacgtgggaatctacccattagtacggaataacttttagaaataaaagctaataccgtatattctctgcggaggaaagatttatcgctgatggatgagcccgcgtcagattaggtagttggtgaggtaatggctcaccaagccgacgatctgtagctggtctgagaggatgatcagccacactgggactgagacacggcccagactcctacgggaggcagcagtggggaatattggacaatgggcgaaagcctgatccagcaataccgagtgagtgatgaaggccttagggttgtaaagctcttttagcaaggaagataatgacgttacttgcagaaaaagccccggctaactccgtgccagcagccgcggtaagacggagggggctagcgttgttcggaattactgggcgtaaagagtgcgtaggcggtttagtaagttggaagtgaaagcccggggcttaacctcggaattgctttcaaaactactaatctagagtgtagtaggggatgatggaattcctagtgtagaggtgaaattcttagatattaggaggaacaccggtggcgaaggcggtcatctgggctacaactgacgctgatgcacgaaagcgtggggagcaaacaggattagataccctggtagtccacgccgtaaacgatgagtgctagatatcggaagattctctttcggtttcgcagctaacgcattaagcactccgcctggggagtacggtcgcaagattaaaactcaaaggaattgacgggggctcgcacaagcggtggagcatgcggtttaattcgatgttacgcgaaaaaccttaccaacccttgacatggtggtcgcggatcgcagagatgcttttcttcagctcggctggaccacacacaggtgttgcatggctgtcgtcagctcgtgtcgtgagatgttgggttaagtcccgcaacgagcgcaaccctcattcttatttgccagcgggtaatgccgggaactataagaaaactgccggtgataagccggaggaaggtggggacgacgtcaagtcatcatggcccttacgggttgggctacacgcgtgctacaatggtgtttacagagggaagcaagacggcgacgtggagcaaatccctaaaagacatctcagttcggattgttctctgcaactcgagagcatgaagttggaatcgctagtaatcgcggatcagcatgccgcggtgaatacgttctcgggccttgtacacactgcccgtcacgccatgggagttagttttacctgaaggtggtgagctaacgcaagaggcagccaaccacggtaaaattagcgactggggtg

SEQ ID NO: 2953 - DNA, 1421 bp, Rickettsia felis
aacgaacgctatcggtatgcttaacacatgcaagtcggacggactaattggggcttgctccaattagttagtggcagacgggtgagtaacacgtgggaatctgcccatcagtacggaataacttttagaaataaaagctaataccgtatattctctacagaggaaagatttatcgctgatggatgagcccgcgtcagattaggtagttggtgaggtaacggctcaccaagccgacgatctgtagctggtctgagaggatgatcagccacactgggactgagacacggcccagactcctacgggaggcagcagtggggaatattggacaatgggcgaaagcctgatccagcaataccgagtgagtgatgaaggccctagggttgtaaagctcttttagcaaggaagataatgacgttacttgcagaaaaagccccggctaactccgtgccagcagccgcggtaagacggagggggctagcgttgttcggaattactgggcgtaaagagtgcgtaggcggtttagtaagttggaagtgaaagcccggggcttaacctcggaattgctttcaaaactactaatctagagtgtagtaggggatgatggaattcctagtgtagaggtgaaattcttagatattaggaggaacaccggtggcgaaggcggtcatctgggctacaactgacgctgatgcacgaaagcgtggggagcaaacaggattagataccctggtagtccacgccgtaaacgatgagtgctagatatcggaagattctctttcggtttcgcagctaacgcattaagcactccgcctggggagtacggtcgcaagattaaaactcaaaggaattgacgggggctcgcacaagcggtggagcatgcggtttaattcgatgttacgcgaaaaaccttaccaacccttgacatggtggtcgcggatcgcagagatgctttccttcagctcggctggaccacacacaggtgttgcatggctgtcgtcagctcgtgtcgtgagatgttgggttaagtcccgcaacgagcgcaaccctcattcttatttgccagcgggtaatgccgggaactataagaaaactgccggtgataagccggaggaaggtggggacgacgtcaagtcatcatggcccttacgggttgggctacacgcgtgctacaatggtgtttacagagggaagcaagacggcgacgtggagcaaatccctaaaagacatctcagttcggattgttctctgcaactcgagagcatgaagttggaatcgctagtaatcgcggatcagcatgccgcggtgaatacgttctcgggccttgtacacactgcccgtcacgccatgggagttggttttacctgaaggtggtgagctaacgcaagaggcagccaaccacggtaaaattagcgactggggtg

SEQ ID NO: 2954 - DNA, 1421 bp, Rickettsia heilongjiangensis
aacgaacgctatcggtatgcttaacacatgcaagtcgaacggactaattggggcttgctccaattagttagtggcagacgggtgagtaacacgtgggaatctacccatcagtacggaataacttttagaaataaaagctaataccgtatattctctgcggaggaaagatttattgctgatggatgagcccgcgtcagattaggtagttggtgaggtaatggctcaccaagccgacgatctgtagctggtctgagaggatgatcagccacactgggactgagacacggcccagactcctacgggaggcagcagtggggaatattggacaatgggcgaaagcctgatccagcaataccgagtgagtgatgaaggccttagggttgtaaagctcttttagcaaggaagataatgacgttacttgcagaaaaagccccggctaactccgtgccagcagccgcggtaagacggagggggctagcgttgttcggaattactgggcgtaaagagtgcgtaggcggtttagtaagttggaagtgaaagcccggggcttaacctcggaattgctttcaaaactactaatctagagtgtagtaggggatgatggaattcctagtgtagaggtgaaattcttagatattaggaggaacaccggtggcgaaggcgatcatctgggctacaactgacgctgatgcacgaaagcgtggggagcaaacaggattagataccctggtagtccacgccgtaaacgatgagtgctagatatcggaagattctctttcggtttcgcagctaacgcattaagcactccgcctggggagtacggtcgcaagattaaaactcaaaggaattgacgggggctcgcacaagcggtggagcatgcggtttaattcgatgttacgcgaaaaaccttaccaacccttgacatggtggtcgcggatcgcagagatgcttttcttcagctcggctggatcacacacaggtgttgcatggctgtcgtcagctcgtgtcgtgagatgttgggttaagtcccgcaacgagcgcaaccctcattcttatttgccagcgggtaatgccgggaactataagaaaactgccggtgataagccggaggaaggtggggacgacgtcaagtcatcatggcccttacgggttgggctacacgcgtgctacaatggtgtttacagagggaagcaagacggtgacgtggagcaaatccctaaaagacatctcagttcggattgttctctgcaactcgagagcatgaagttggaatcgctagtaatcgcggatcagcatgccgcggtgaatacgttctcgggccttgtacacactgcccgtcacgccatgggagttggttttacctgaaggtggtgagctaacgcaagaggcagccaaccacggtaaaattagcgactggggtg

SEQ ID NO: 2955 - DNA, 1421 bp, Rickettsia helvetica
aacaaacgctatcggtatgcttaacacatgcaagtcgaacggactaattggggcttgttccagttagttagtggcagacgggtgagtaacacgtgggaatctacccatcagtatggaataacttttagaaataaaagctaataccatatattctctatggaggaaagatttatcgctgatggatgagcccgcgtcagattaggtagttggtgaggtaacggctcaccaagccgacgatctgtagctggtctgagaggatgatcagccacactgggactgagacacggcccagactcctacgggaggcagcagtggggaatattggacaatgggcgaaagcctgatccagcaataccgagtgagtgatgaaggccttagggttgtaaagctcttttagcaaggaagataatgacgttacttgcagaaaaagccccggctaactccgtgccagcagccgcggtaagacggagggggctagcgttgttcggaattactgggcgtaaagagtgcgtaggcggtttagtaagttggaagtgaaagcccggggcttaacctcggaattgctttcaaaactactaatctagagtgtagtaggggatgatggaattcctagtgtagaggtgaaattcttagatattaggaggaacaccggtggcgaaggcgatcatctgggctacaactgacgctgatgcacgaaagcgtggggagcaaacaggattagataccctggtagtccacgccgtaaacgatgagtgctagatatcggaagattctctttcggtttcgcagctaacgcattaagcactccgcctggggagtacggtcgcaagattaaaactcaaaggaattgacgggggctcgcacaagcggtggagcatgcggtttaattcgatgttacgcgaaaaaccttaccaacccttgacatggtggtcgcggatcgcagagatgctttccttcagctcggctggaccacacacaggtgttgcatggctgtcgtcagctcgtgtcgtgagatgttgggttaagtcccgcaacgagcgcaaccctcattcttatttgccagcgggtaatgccaggaactataagaaaactgccggtgataagccggaggaaggtggggacgacgtcaagtcatcatggcccttacgggttgggctacacgcgtgctacaatggtgtttacagagggaagcaagacggcgacgtggagcaaatccctaaaagacatctcagttcggattgttctctgcaactcgagagcatgaagttggaatcgctagtaatcgcggatcagcatgccgcggtgaatacgttctcgggccttgtacacactgcccgtcacgccatgggagttggttttacctgaaggtggtgagctaacgcaagaggcagccaaccacggtaaaattagcgactggggtg

SEQ ID NO: 2956 - DNA, 1421 bp, Rickettsia honei
aacgaacgctatcggtatgcttaacacatgcaagtcgaacggattaattggggcttgctccaattagttagtggcagacgggtgagtaacacgtgggaatctacccatcagtacggaataacttttagaaataaaagctaataccgtatattctctgcggaggaaagatttatcgctgatggatgagcccgcgtcagattaggtagttggtgaggtaatggctcaccaagccgacgatctgtagctggtctgagaggatgatcagccacactgggactgagacacggcccagactcctacgggaggcagcagtggggaatattggacaatgggcgaaagcctgatccagcaataccgagtgagtgatgaaggccttagggttgtaaagctcttttagcaaggaagataatgacgttacttgcagaaaaagccccggctaactccgtgccagcagccgcggtaagacggagggggctagcgttgttcggaattactgggcgtaaagagtgcgtaggcggtttagtaagttggaagtgaaagcccggggcttaacctcggaattgctttcaaaactactagtctagagtgtagtaggggatgatggaattcctagtgtagaggtgaaattcttagatattaggaggaacaccagtggcgaaggcggtcatctgggctacaactgacgctgatgcacgaaagcgtggggagcaaacaggattagataccctggtagtccacgccgtaaacgatgagtgctagatatcggaagattctctttcggtttcgcagctaacgcattaagcactccgcctggggagtacggtcgcaagattaaaactcaaaggaattgacgggggctcgcacaagcggtggagcatgcggtttaattcgatgttacgcgaaaaaccttaccaacccttgacatggtggtcgcggatcgcagagatgcttttcttcagctcggctggaccacacacaggtgttgcatggctgtcgtcagctcgtgtcgtgagatgttgggttaagtcccgcaacgagcgcaaccctcattcttatttgccagcgggtaatgccgggaactataagaaaactgccggtgataagccggaggaaggtggggacgacgtcaagtcatcatggcccttacgggttgggctacacgcgtgctacaatggtgtttacagagggaagcaagacggcgacgtggagcaaatccctaaaagacatctcagttcggattgttctctgcaactcgagagcatgaagttggaatcgctagtaatcgcggatcagcatgccgcggtgaatacgttctcgggccttgtacacactgcccgtcacgccatgggagttagttttacctgaaggtggtgagctaacgcaagaggcagccaaccacggtaaaattagcgactggggtg

SEQ ID NO: 2957 - DNA, 1421 bp, Rickettsia japonica
aacgaacgctatcggtatgcttaacacatgcaagtcgaacggactaattggggcttgctccaattagttagtggcagacgggtgagtaacacgtgggaatctacccatcagtacggaataacttttagaaataaaagctaataccgtatattctctgcggaggaaagatttattgctgatggatgagcccgcgtcagattaggtagttggtgaggtaatggctcaccaagccgacgatctgtagctggtctgagaggatgatcagccacactgggactgagacacggcccagactcctacgggaggcagcagtggggaatattggacaatgggcgaaagcctgatccagcaataccgagtgagtgatgaaggccttagggttgtaaagctcttttagcaaggaagataatgacgttacttgcagaaaaagccccggctaactccgtgccagcagccgcggtaagacggagggggctagcgttgttcggaattactgggcgtaaagagtgcgtaggcggtttagtaagttggaagtgaaagcccggggcttaacctcggaattgctttcaaaactactaatctagagtgtagtaggggatgatggaattcctagtgtagaggtgaaattcttagatattaggaggaacaccggtggcgaaggcgatcatctgggctacaactgacgctgatgcacgaaagcgtggggagcaaacaggattagataccctggtagtccacgccgtaaacgatgagtgctagatatcggaagattctctttcggtttcgcagctaacgcattaagcactccgcctggggagtacggtcgcaagattaaaactcaaaggaattgacgggggctcgcacaagcggtggagcatgcggtttaattcgatgttacgcgaaaaaccttaccaacccttgacatggtggtcgcggatcgcagagatgcttttcttcagctcggctggatcacacacaggtgttgcatggctgtcgtcagctcgtgtcgtgagatgttgggttaagtcccgcaacgagcgcaaccctcattcttatttgccagcgggtaatgccgggaactataagaaaactgccggtgataagccggaggaaggtggggacgacgtcaagtcatcatggcccttacgggttgggctacacgcgtgctacaatggtgtttacagagggaagcaagacggcgacgtggagcaaatccctaaaagacatctcagttcggattgttctctgcaactcgagagcatgaagttggaatcgctagtaatcgcggatcagcatgccgcggtgaatacgttctcgggccttgtacacactgcccgtcacgccatgggagttggttttacctgaaggtggtgagctaacgcaagaggcagccaaccacggtaaaattagcgactggggtg

SEQ ID NO: 2958 - DNA, 1421 bp, Rickettsia massiliae
aacgaacgctatcggtatgcttaacacatgcaagtcgaacggactaattggggcttgctctaattagttagtggcagacgggtgagtaacacgtgggaatctacccatcagtacggaataacttttagaaataaaagctaataccgtatattctctacggaggaaagatttatcgctgatggatgagcccgcgtcagattaggtagttggtgaggtaatggctcaccaagccgacgatctgtagctggtctgagaggatgatcagccacactgggactgagacacggcccagactcctacgggaggcagcagtggggaatattggacaatgggcgaaagcctgatccagcaataccgagtgagtgatgaaggccttagggttgtaaagctcttttagcaaggaagataatgacgttacttgcagaaaaagccccggctaactccgtgccagcagccgcggtaagacggagggggctagcgttgttcggaattactgggcgtaaagagtgcgtaggcggtttagtaagttggaagtgaaagcccggggcttaacctcggaattgctttcaaaactactaatctagagtgtagtaggggatgatggaattcctagtgtagaggtgaaattcttagatattaggaggaacaccggtggcgaaggcggtcatctgggctacaactgacgctgatgcacgaaagcgtggggagcaaacaggattagataccctggtagtccacgccgtaaacgatgagtgctagatatcggaagattctctttcggtttcgcagctaacgcattaagcactccgcctggggagtacggtcgcaagattaaaactcaaaggaattgacgggggctcgcacaagcggtggagcatgcggtttaattcgatgttacgcgaaaaaccttaccaacccttgacatggtggtcgcggatcgcagagatgcttttcttcagctcggctggaccacacacaggtgttgcatggctgtcgtcagctcgtgtcgtgagatgttgggttaagtcccgcaacgagcgcaaccctcattcttatttgccagcgggtaatgccgggaactataagaaaactgccggtgataagccggaggaaggtggggatgacgtcaagtcatcatggcccttacgggttgggctacacgcgtgctacaatggtgtttacagagggaagcaagacggcgacgtggagcaaatccctaaaagacatctcagttcggattgttctctgcaactcgagagcatgaagttggaatcgctagtaatcgcggatcagcatgccgcggtgaatacgttctcgggccttgtacacactgcccgtcacgccatgggagttggttttacctgaaggtggtgagctaacgcaagaggcagccaaccacggtaaaattagcgactggggtg

SEQ ID NO: 2959 - DNA, 1421 bp, Rickettsia monacensis
aacgaacgctatcggtatgcttaacacatgcaagtcgaacggactaattggggcttgctccaattagttagtggcagacgggtgagtaacacgtgggaatctacccatcagtacggaataacttttagaaataaaagctaataccgtatattctctacggaaaaaagatttatcgctgatggatgagcccgcgtcagattaggtagttggtgaggtaacggctcaccaagccgacgatctgtagctggtctgagaggatgatcagccacactgggactgagacacggcccagactcctacgggaggcagcagtggggaatattggacaatgggcgaaagcctgatccagcaataccgagtgagtgatgaaggccttagggttgtaaagctcttttagcaaggaagataatgacgttacttgcagaaaaagccccggctaactccgtgccagcagccgcggtaagacggagggggctagcgttgttcggaattactgggcgtaaagagtgcgtaggcggtttagtaagttggaagtgaaagcccggggcttaacctcggaattgctttcaaaactactaatctagagtgtagtaggggatgatggaattcctagtgtagaggtgaaattcttagatattaggaggaacaccggtggcgaaggcggtcatctgggctacaactgacgctaatgcacgaaagcgtggggagcaaacaggattagataccctggtagtccacgccgtaaacgatgagtgctagatatcggaagattctctttcggtttcgcagctaacgcattaagcactccgcctggagagtacggtcgcaagattaaaactcaaaggaattgacgggggctcgcacaagcggtggagcatgcggtttaattcgatgttacgcgaaaaaccttaccaacccttgacatggtggtcgcggatcgcagagatgctttccttcagctcggctggaccgcacacaggtgttgcacggctgtcgtcagctcgtgtcgtgagatgttgggttaagtcccgcaacgagcgcaaccctcattcttatttgccagcgggtaatgccgggaactataagaaaactgctggtgataagccagaggaaggtggggacgacgtcaagtcatcatggcccttacgggttgggctacacgcgtgctacaatggtgtttacagagggaagcaagacggcgacgtggagcaaatccctaaaagacatctcagttcggattgttctctgcaactcgagagcatgaagttggaatcgctagtaatcgcggatcagcatgccgcggtgaatacgttctcgggccttgtacacactgcccgtcacgccatgggagttggttttacctgaaggtggtgagctaacgcaagaggcagccaaccacggtaaaattagcgactggggtg

SEQ ID NO: 2960 - DNA, 1421 bp, Rickettsia montanensis
aacgaacgctatcggtatgcttaacacatgcaagtcgaacggactaattggagcttgctccaattagttagtggcagacgggtgagtaacgcgtgggaatctacccatcagtacggaataacttttagaaataaaagctaataccgtatattctctacggaggaaaggtttatcgctgatggatgagcccgcgtcagattaggtagttggtgaggtaatggctcaccaagccgacgatctgtagctggtctgagaggatgatcagccacactgggactgagacacggcccagactcctacgggaggcagcagtggggaatattggacaatgggcgaaagcctgatccagcaataccgagtgagtgatgaaggccttagggttgtaaagctcttttagcagggaagataatgacgttacttgcagaaaaagccccggctaactccgtgccagcagccgcggtaagacggagggggctagcgttgttcggaattactgggcgtaaagagtgcgtaggcggtttagtaagttggaagtgaaagcccggggcttaacctcggaattgctttcaaaactactaatctagagtgtagtaggggatgatggaattcctagtgtagaggtgaaattcttagatattaggaggaacaccggtggcgaaggcggtcatctgggctgcaactgacgctgatgcacgaaagcgtggggagcaaacaggattagataccctggtagtccacgccgtaaacgatgagtgctagatatcggaagattctctttcggtttcgcagctaacgcattaagcactccgcctggggagtacggtcgcaagattaaaactcaaaggaattgacgggggctcgcacaagcggtggagcatgcggtttaattcgatgttacgcgaaaaaccttaccaacccttgacatggtggtcgtgaatcgcagagatgcttttcttcagctcggctggaccacacacaggtgttgcatggctgtcgtcagctcgtgtcgtgagatgttgggttaagtcccgcaacgagcgcaaccctcattcttatttgccagcgggtaatgccgggaactataagaaaactgccggtgataagccggaggaaggtggggacgacgtcaagtcatcatggcccttacgggttgggctacacgcgtgctacaatggtgtttacagagggaagcaagacggcgacgtggagcaaatccctaaaagacatctcagttcggattgttctctgcaactcgagagcatgaagttggaatcgctagtaatcgcggatcagcatgccgcggtgaatacgttctcgggccttgtacacactgcccgtcacgccatgggagttggttttacctgaaggtggtgagctaacgcaagaggcagccaaccacggtaaaattagcgactggggtg

SEQ ID NO: 2961 - DNA, 1422 bp, Rickettsia parkeri
  misc_feature (790)..(790): n is a, c, g, or t
  misc_feature (829)..(829): n is a, c, g, or t
  misc_feature (940)..(940): n is a, c, g, or t
  misc_feature (954)..(955): n is a, c, g, or t
aacgaacgctatcggtatgcttaacacatgcaagtcgaacggactaatttggggcttgctccaattagttagtggcagacgggtgagtaacacgtgggaatctacccattagtacggaataacttttagaaataaaagctaataccgtatattctctgcggaggaaagatttatcgctgatggatgagcccgcgtcagattaggtagttggtgaggtaatagctcaccaagccgacgatctgtagctggtctgagaggatgatcagccacactgggactgagacacggcccagactcctacgggaggcagcagtggggaatattggacaatgggcgaaagcctgatccagcaataccgagtgagtgatgaaggccttagggttgtaaagctcttttagcaaggaagataatgacgttacttgcagaaaaagccccggctaactccgtgccagcagccgcggtaagacggagggggctagcgttgttcggaattactgggcgtaaagagtgcgtaggcggtttagtaagttggaagtgaaagcccggggcttaacctcggaattgctttcaaaactactaatctagagtgtagtaggggatgatggaattcctagtgtagaggtgaaattcttagatattaggaggaacaccggtggcgaaggcggtcgtctgggctacaactgacgctgatgcacgaaagcgtggggagcaaacaggattagataccctggtagtccacgccgtaaacgatgagtgctagatatcggaagattctctttcggtttcgcanctaacgcattaagcactccgcctggggagtacggtcgcnagattaaaactcaaaggaattgacgggggctcgcacaagcggtggagcatgcggtttaattcgatgttacgcgaaaaaccttaccaacccttgacatggtggtcgcggatngcagagatgctttnnttcagctcggctggaccacacacaggtgttgcatggctgtcgtcagctcgtgtcgtgagatgttgggttaagtcccgcaacgagcgcaaccctcattcttatttgccagcgggtaatgccgggaactataagaaaactgccggtgagaagccggaggaaggtggggacgacgtcaagtcatcacggcccttacgggttgggctacacgcgtgctacaatggtgtttacagagggaagcaagacggcgacgtggagcaaatccctaaaagacatctcagttcggattgttctctgcaactcgagagcatgaagttggaatcgctagtaatcgcggatcagcatgccgcggtgaatacgttctcgggccttgtacacactgcccgtcacgccatgggagttagttttacctgaaggtggtgagctaacgcaagaggcagccaaccacggtaaaattagcgactggggtg

SEQ ID NO: 2962 - DNA, 1421 bp, Rickettsia peacockii
aacgaacgctatcggtatgcttaacacatgcaagtcgaacggactaattggggcttgctccaattagttagtggcagacgggtgagtaacacgtgggaatctacccatcagtacggaataacttttagaaataaaagctaataccgtatattctctgcggaggaaagatttatcgctgatggatgagcccgcgtcagattaggtagttggtgaggtaatggctcaccaagccgacgatctgtagctggtctgagaggatgatcagccacactgggactgagacacggcccagactcctacgggaggcagcagtggggaatattggacaatgggcgaaagcctgatccagcaataccgagtgagtgatgaaggccttagggttgtaaagctcttttagcaaggaagataatgacgttacttgcagaaaaagccccggctaactccgtgccagcagccgcggtaagacggagggggctagcgttgttcggaattactgggcgtaaagagtgcgtaggcggtttagtaagttggaagtgaaagcccggggcttaacctcggaattgctttcaaaactactaatctagagtgtagtaggggatgatggaattcctagtgtagaggtgaaattcttagatattaggaggaacaccggtggcgaaggcggtcatctgggctacaactgacgctgatgcacgaaagcgtggggagcaaacaggattagataccctggtagtccacgccgtaaacgatgagtgctagatatcggaagattctctttcggtttcgcagctaacgcattaagcactccgcctggggagtacggtcgcaagattaaaactcaaaggaattgacgggggctcgcacaagcggtggagcatgcggtttaattcgatgttacgcgaaaaaccttaccaacccttgacatggtggttgcggatcgcagagatgcttttcttcagctcggctggaccacacacaggtgttgcatggctgtcgtcagctcgtgtcgtgagatgttgggttaagtcccgcaacgagcgcaaccctcattcttatttgccagcgggtaatgccgggaactataagaaaactgccggtgataagccggaggaaggtggggacgacgtcaagtcatcatggcccttacgggttgggctacacgcgtgctacaatggtgtttacagagggaagcaagacggcgacgtggagcaaatccctaaaagatatctcagttcggattgttctctgcaactcgagagcatgaagttggaatcgctagtaatcgcggatcagcatgccgcggtgaatacgttctcgggccttgtacacactgcccgtcacgccatgggagttagttttacctgaaggtggtgagctaacgcaagaggcagccaaccacggtaaaattagcgactggggtg

SEQ ID NO: 2963 - DNA, 1421 bp, Rickettsia prowazekii
aacgaacgctatcggtatgcttaacacatgcaagtcgaacggattaactagagctcgctttagttaattagtggcagacgggtgagtaacacgtgggaatctacccatcagtacggaataacttttagaaataaaagctaataccgtatattctctacggaggaaagatttatcgctgatggatgggcccgcgtcagattaggtagttggtgaggtaatggctcaccaagccgacgatctgtagctggtctgagaggatgatcagccacactgggactgagacacggcccagactcctacgggaggcagcagtggggaatattggacaatgggcgaaagcctgatccagcaataccgagtgagtgatgaaggccttagggttgtaaagctcttttagcaaggaagataatgacgttacttgcagaaaaagccccggctaactccgtgccagcagccgcggtaagacggagggggctagcgttgttcggaattactgggcgtaaagagtgcgtaggcggtttagtaagttggaagtgaaagcccggggcttaacctcggaattgctttcaaaactactaatctagagtgtagtaggggatgatggaattcctagtgtagaggtgaaattcttagatattaggaggaacaccggtggcgaaggcggtcatctgggctacaactgacgctgatgcacgaaagcgtggggagcaaacaggattagataccctggtagtccacgccgtaaacgatgagtgctagatatcggaggattctctttcggtttcgcagctaacgcattaagcactccgcctggggagtacggtcgcaagattaaaactcaaaggaattgacgggggctcgcacaagcggtggagcatgcggtttaattcgatgttacgcgaaaaaccttaccaacccttgacatggtggttacggattgcagagatgctttccttcagttcggctgggccacacacaggtgttgcatggctgtcgtcagctcgtgtcgtgagatgttgggttaagtcccgcaacgagcgcaacccttattcttatttgccagtgggtaatgccgggaactataagaaaactgccggtgataagccggaggaaggtggggacgacgtcaagtcatcatggcccttacgggttgggctacacgcgtgctacaatggtgtttacagagggaagcaatacggtgacgtggagcaaatccctaaaagacatctcagttcggattgttctctgcaactcgagagcatgaagttggaatcgctagtaatcgcggatcagcatgccgcggtgaatacgttctcgggccttgtacacactgcccgtcacgccatgggagttggttttacctgaaggtggtgagctaacgcaagaggcagccaaccacggtaaaattagcgactggggtg

SEQ ID NO: 2964 - DNA, 1421 bp, Rickettsia raoultii
aacgaacgctatcggtatgcttaacacatgcaagtcgaacggactaattggggcttgctccaattagttagtggcagacgggtgagtaacacgtgggaatctacccatcagtacggaataacttttagaaataaaagctaataccgcatattctctacggaggaaagatttatcgctgatggatgagcccgcgtcagattaggtagttggtgaggtaatggcttaccaagccgacgatctgtagctggtctgagaggatgatcagccacactgggactgagacacggcccagactcctacgggaggcagcagtggggaatattggacaatgggcgaaagcctgatccagcaataccgagtgagtgatgaaggccttagggttgtaaagctcttttagcaaggaagataatgacgttacttgcagaaaaagccccggctaactccgtgccagcagccgcggtaagacggagggggctagcgttgttcggaattactgggcgtaaagagtgcgtaggcggtttagtaagttggaagtgaaagcccggggcttaacctcggaattgctttcaaaactactaatctagagtgtagtaggggatgatggaattcctagtgtagaggtgaaattcttagatattaggaggaacaccggtggcgaaggcgatcatctgggctacaactgacgctgatgcacgaaagcgtggggagcaaacaggattagataccctggtagtccacgccgtaaacgatgagtgctagatatcggaagattctctttcggtttcgcagctaacgcattaagcactccgcctggggagtacggtcgcaagattaaaactcaaaggaattgacgggggctcgcacaagcggtggagcatgcggtttaattcgatgttacgcgaaaaaccttaccaacccttgacatggtggtcgcggatcgcagagatgcttttcttcagctcggctggaccacacacaggtgttgcatggctgtcgtcagctcgtgtcgtgagatgttgggttaagtcccgcaacgagcgcaaccctcattcttatttgccagcgggtaatgccgggaactataagaaaactgccggtgataagccggaggaaggtggggacgacgtcaagtcatcatggcccttacgggttgggctacacgcgtgctacaatggtgtttacagagggaagcaagacggcgacgtggagcaaatccctaaaagacatctcagttcggattgttctctgcaactcgagagcatgaagttggaatcgctagtaatcgcggatcagcatgccgcggtgaatacgttctcgggccttgtacacactgcccgtcacgccatgggagttggttttacctgaaggtggtgagctaacgcaagaggcagccaaccacggtaaaattagcgactggggtg

SEQ ID NO: 2965 - DNA, 1421 bp, Rickettsia rhipicephali
aacgaacgctatcggtatgcttaacacatgcaagtcgaacgggctaattggggcttgctccaattagttagtggcagacgggtgagtaacacgtgggaatctacccatcagtacggaataacttttagaaataaaagctaataccgtatattctctacggaggaaagatttatcgctgatggatgagcccgcgtcagattaggtagttggtgaggtaatggctcaccaagccgacgatctgtagctggtctgagaggatgatcagccacactgggactgagacacggcccagactcctacgggaggcagcagtggggaatattggacaatgggcgaaagcctgatccagcaataccgagtgagtgatgaaggccttagggttgtaaagctcttttagcaaggaagataatgacgttacttgcagaaaaagccccggctaactccgtgccagcagccgcggtaagacggagggggctagcgttgttcggaattactgggcgtaaagagtgcgtaggcggtttagtaagttggaagtgaaagcccggggcttaacctcggaattgctttcaaaactactaatctagagtatagtaggggatgatggaattcctagtgtagaggtgaaattcttagatattaggaggaacaccggtggcgaaggcggtcatctgggctacaactgacgctgatgcacgaaagcgtggggagcaaacaggattagataccctggtagtccacgccgtaaacgatgagtgctagatatcggaagattctctttcggtttcgcagctaacgcattaagcactccgcctggggagtacggtcgcaagattaaaactcaaaggaattgacgggggctcgcacaagcggtggagcatgcggtttaattcgatgttacgcgaaaaaccttaccaacccttgacatggtggtcgcggatcgcagagatgcttttcttcagctcggctggaccacacacaggtgttgcatggctgtcgtcagctcgtgtcgtgagatgttgggttaagtcccgcaacgagcgcaaccctcattcttatttgccagcgggtaatgccgggaactataagaaaactgccggtgataagccggaggaaggtggggacgacgtcaagtcatcatggcccttacgggttgggctacacgcgtgctacaatggtgtttacagagggaagcaagacggcgacgtggagcaaatccctaaaagacatctcagttcggattgttctctgcaactcgagagcatgaagttggaatcgctagtaatcgcggatcagcatgccgcggtgaatacgttctcgggccttgtacacactgcccgtcacgccatgggagttggttttacctgaaggtggtaagctaacgcaagaggcagccaaccacggtaaaattagcgactggggtg

SEQ ID NO: 2966 - DNA, 1421 bp, Rickettsia rickettsii
aacgaacgctatcggtatgcttaacacatgcaagtcgaacggactaattggggcttgctccaattagttagtggcagacgggtgagtaacacgtgggaatctacccatcagtacggaataacttttagaaataaaagctaataccgtatattctctgcggaggaaagatttatcgctgatggatgagcccgcgtcagattaggtagttggtgaggtaatggctcaccaagccgacgatctgtagctggtctgagaggatgatcagccacactgggactgagacacggcccagactcctacgggaggcagcagtggggaatattggacaatgggcgaaagcctgatccagcaataccgagtgagtgatgaaggccttagggttgtaaagctcttttagcaaggaagataatgacgttacttgcagaaaaagccccggctaactccgtgccagcagccgcggtaagacggagggggctagcgttgttcggaattactgggcgtaaagagtgcgtaggcggtttagtaagttggaagtgaaagcccggggcttaacctcggaattgctttcaaaactactaatctagagtgtagtaggggatgatggaattcctagtgtagaggtgaaattcttagatattaggaggaacaccggtggcgaaggcggtcatctgggctaccactgacgctgatgcacgaaagcgtggggagcaaacaggattagataccctggtagtccacgccgtaaacgatgagtgctagatatcggaagattctctttcggtttcgcagctaacgcattaagcactccgcctggggagtacggtcgcaagattaaaactcaaaggaattgacgggggctcgcacaagcggtggagcatgcggtttaattcgatgttacgcgaaaaaccttaccaacccttgacatggtggttgcggatcgcagagatgcttttcttcagctcggctggaccacacacaggtgttgcatggctgtcgtcagctcgtgtcgtgagatgttgggttaagtcccgcaacgagcgcaaccctcattcttatttgccagcgggtaatgccgggaactataagaaaactgccggtgataagccggaggaaggtggggacgacgtcaagtcatcatggcccttacgggttgggctacacgcgtgctacaatggtgtttacagagggaagcaagacggcgacgtggagcaaatccctaaaagacatctcagttcggattgttctctgcaactcgagagcatgaagttggaatcgctagtaatcgcggatcagcatgccgcggtgaatacgttctcgggccttgtacacactgcccgtcacgccatgggagttagttttacctgaaggtggtgagctaacgcaagaggcagccaaccacggtaaaattagcgactggggtg

SEQ ID NO: 2967 - DNA, 1422 bp, Rickettsia sibirica
aacgaacgctatcggtatgcttaacacatgcaagtcgaacggactaatttggggcttgctcaatttagttagtggcagacgggtgagtaacacgtgggaatctacccattagtacggaataacttttagaaataaaagctaataccgtatattctctgcggaggaaagatttatcgctgatggatgagcccgcgtcagattaggtagttggtgaggtaatggctcaccaagccgacgatctgtagctggtctgagaggatgatcagccacactgggactgagacacggcccagactcctacgggaggcagcagtggggaatattggacaatgggcgaaagcctgatccagcaataccgagtgagtgatgaaggccttagggttgtaaagctcttttagcaaggaagataatgacgttacttgcagaaaaagccccggctaactccgtgccagcagccgcggtaagacggagggggctagcgttgttcggaattactgggcgtaaagagtgcgtaggcggtttagtaagttgggagtgaaagcccggggcttaacctcggaattgctttcaaaactactaatctagagtgtagtaggggatgatggaattcctagtgtagaggtgaaattcttagatattaggaggaacaccggtggcgaaggcggtcatctgggctacaactgacgctgatgcacgaaagcgtggggagcaaacaggattagataccctggtagtccacgccgtaaacgatgagtgctagatatcggaagattctctttcggtttcgcagctaacgcattaagcactccgcctggggagtacggtcgcaagattaaaactcaaaggaattgacgggggctcgcacaagcggtggagcatgcggtttaattcgatgttacgcgaaaaaccttaccaacccttgacatggtggtcgcggatcgcagagatgcttttcttcagctcggctggaccacacacaggtgttgcatggctgtcgtcagctcgtgtcgtgagatgttgggttaagtcccgcaacgagcgcaaccctcattcttatttgccagcgggtaatgccgggaactataagaaaactgccggtgataagccggaggaaggtggggacgacgtcaagtcatcatggcccttacgggttgggctacacgcgtgctacaatggtgtttacagagggaagcaagacggcgacgtggagcaaatccctaaaagacatctcagttcggattgttctctgcaactcgagagcatgaagttggaatcgctagtaatcgcggatcagcatgccgcggtgaatacgttctcgggccttgtacacactgcccgtcacgccatgggagttagttttacctgaaggtggtgagctaacgcaagaggcagccaaccacggtaaaattagcgactggggtg

SEQ ID NO: 2968 - DNA, 1421 bp, Rickettsia slovaca
aacgaacgctatcggtatgcttaacacatgcaagtcgaacggactaattggggcttgctccaattagttagtggcagacgggtgagtaacacgtgggaatctacccatcagtacggaataacttttagaaataaaagctaataccgtatattctctgcggaggaaagatttatcgctgatggatgagcccgcgtcagattaggtagttggtgaggtaatggctcaccaagccgacgatctgtagctggtctgagaggatgatcagccacactgggactgagacacggcccagactcctacgggaggcagcagtggggaatattggacaatgggcgaaagcctgatccagcaataccgagtgagtgatgaaggccttagggttgtaaagctcttttagcaaggaagataatgacgttacttgcagaaaaagccccggctaactccgtgccagcagccgcggtaagacggagggggctagcgttgttcggaattactgggcgtaaagagtgcgtaggcggtttagtaagttggaagtgaaagcccggggcttaacctcggaattgctttcaaaactactaatctagagtgtagtaggggatgatggaattcctagtgtagaggtgaaattcttagatattaggaggaacaccggtggcgaaggcggtcatctgggctacaactgacgctgatgcacgaaagcgtggggagcaaacaggattagataccctggtagtccacgccgtaaacgatgagtgctagatatcggaagattctctttcggtttcgtagctaacgcattaagcactccgcctggggagtacggtcgcaagattaaaactcaaaggaattgacgggggctcgcacaagcggtggagcatgcggtttaattcgatgttacgcgaaaaaccttaccaacccttgacatggtggtcgcggatcgcagagatgcttttcttcagctcggctggaccacacacaggtgttgcatggctgtcgtcagctcgtgtcgtgagatgttgggttaagtcccgcaacgagcgcaaccctcattcttatttgccagcgggtaatgccgggaactataagaaaactgccggtgataagccggaggaaggtggggacgacgtcaagtcatcatggcccttacgggttgggctacacgcgtgctacaatggtgtttacagagggaagcaagacggcgacgtggagcaaatccctaaaagacatctcagttcggattgttctctgcaactcgagagcatgaagttggaatcgctagtaatcgcggatcagcatgccgcggtgaatacgttctcgggccttgtacacactgcccgtcacgccatgggagttagttttacctgaaggtggtgagctaacgcaagaggcagccaaccacggtaaaattagcgactggggtg

SEQ ID NO: 2969 - DNA, 1421 bp, Rickettsia typhi
aacgaacgctatcggtatgcttaacacatgcaagtcgaacggattaattagagcttgctctagttaattagtggcagacgggtgagtaacacgtgggaatctacccatcagtacggaataacttttagaaataaaagctaataccgtatattctctacggaggaaagatttatcgctgatggatgggcccgcgtcagattaggtagttggtgtggtaatggctcaccaagccgacgatctgtagctggtctgagaggatgatcagccacactgggactgagacacggcccagactcctacgggaggcagcagtggggaatattggacaatgggcgaaagcctgatccagcaataccgagtgagtgatgaaggccttagggttgtaaagctcttttagcaaggaagataatgacgttacttgcagaaaaagccccggctaactccgtgccagcagccgcggtaagacggagggggctagcgttgttcggaattactgggcgtaaagagtgcgtaggtggtttagtaagttggaagtgaaagcccggggcttaacctcggaattgctttcaaaactactaatctagagtgtagtaggggatgatggaattcctagtgtagaggtgaaattcttagatattaggaggaacaccggtggcgaaggcggtcatctgggctacaactgacgctgatgcacgaaagcgtggggagcaaacaggattagataccctggtagtccacgccgtaaacgatgagtgctagatatcggaggattctctttcggtttcgcagctaacgcattaagcactccgcctggggagtacggtcgcaagattaaaactcaaaggaattgacgggggctcgcacaagcggtggagcatgcggtttaattcgatgttacgcgaaaaaccttaccaacccttgacatggtggttatggattgcagagatgctttccttcagttcggctgggccacacacaggtgttgcatggctgtcgtcagctcgtgtcgtgagatgttgggttaagtcccgcaacgagcgcaacccttattcttatttgccagcgggtaatgccgggaactataagaaaactgccggtgataagccggaggaaggtggggacgacgtcaagtcatcatggcccttacgggttgggctacacgcgtgctacaatggtgtttacagagggaagcaagacggtgacgtggagcaaatccctaaaagacatctcagttcggattgttctctgcaactcgagagcatgaagttggaatcgctagtaatcgcggatcagcatgccgcggtgaatacgttctcgggccttgtacacactgcccgtcacgccatgggagttggttttacctgaaggtggtgagctaacgcaagaggcagccaaccacggtaaaattagcgactggggtg

SEQ ID NO: 2970 - DNA, 1453 bp, Rivibacter subsaxonicus
  misc_feature (10)..(10): n is a, c, g, or t
attgaacgcnggcggcatgccttacacatgcaagtcgaacggcagcacgggagcaatcctggtggcgagtggcgaacgggtgagtaatacatcggaacgtgcccagtagtgggggatagcccggcgaaagccggattaataccgcatacgacctgagggtgaaagcgggggatcgcaagacctcgcgctattggagcggccgatgtcggattagctagttggtggggtaaaggctcaccaaggcaacgatccgtagctggtctgagaggacgaccagccacactgggactgagacacggcccagactcctacgggaggcagcagtggggaattttggacaatgggcgcaagcctgatccagccatgccgcgtgcgggaagaaggccttcgggttgtaaaccgcttttgtcagggaagaaacgcgctgggttaataccttggcgtaatgacggtacctgaagaataagcaccggctaactacgtgccagcagccgcggtaatacgtagggtgcaagcgttaatcggaattactgggcgtaaagcgtgcgcaggcggtcatacaagacagatgtgaaatccccgggctcaacctgggaactgcatttgtgactgtatgactggagtgcggcagagggggatggaattccgcgtgtagcagtgaaatgcgtagatatgcggaggaacaccgatggcgaaggcaatcccctgggcctgcactgacgctcatgcacgaaagcgtggggagcaaacaggattagataccctggtagtccacgccctaaacgatgtcaactagttgttggacggcttgctgttcagtaacgaagctaacgcgtgaagttgaccgcctggggagtacggccgcaaggttgaaactcaaaggaattgacggggacccgcacaagcggtggatgatgtggtttaattcgatgcaacgcgaaaaaccttacctacccttgacatgtcaagaagttaccagagatggtttcgtgctcgaaagagagcttgaacacaggtgctgcatggccgtcgtcagctcgtgtcgtgagatgttgggttaagtcccgcaacgagcgcaacccttgtcattagttgctacgaaagggcactctaatgagactgccggtgacaaaccggaggaaggtggggatgacgtcaggtcctcatggcccttatgggtagggctacacacgtcatacaatggctggtacagagggttgccaacccgcgagggggagccaatcccagaaaaccagtcgtagtccggatcgcagtctgcaactcgactgcgtgaagtctgaatcgctagtaatcgcggatcagcttgccgcggtgaatacgttcccgggtcttgtacacaccgcccgtcacaccatgggagcgggttctgccagaagtagtcagcctaaccgcaaggagggcgattaccactgcagggttcgtgactggggtg

SEQ ID NO: 2971 - DNA, 1424 bp, Rivicola pingtungensis
tgcaagtcgaacggcagcggggacttcggtccgccggcgagtggcgaacgggtgagtaatgcatcggaacgtgcctatcagtgggggataacgcttcgaaaggagtgctaataccgcatattctccgaggaggaaagcaggggaccttagggccttgcgctgatagagcggccgatgtcggattagctagttggtgaggtaaaggctcaccaaggcgacgatccgtagcgggtctgagaggatgatccgccacactgggactgagacacggcccagactcctacgggaggcagcagtggggaattttggacaatgggcgaaagcctgatccagccatgccgcgtgagtgaagaaggccttcgggttgtaaagctcttttgtccgggaggaaatcctggcctctaatacaggtcggggatgacagtactggaagaataagcaccggctaactacgtgccagcagccgcggtaatacgtagggtgcaagcgttaatcggaattactgggcgtaaagcgtgcgcaggcggttttgtaagccagatgtgaaatccccgagcttaacttgggaactgcgtttggaactacaagactagagtgtgtcagaggggggtagaattccacgtgtagcagtgaaatgcgtagagatgtggaggaataccgatggcgaaggcagccccctgggataacactgacgctcatgcacgaaagcgtggggagcaaacaggattagataccctggtagtccacgccctaaacgatgtctactagttgtcgggagaggaatctcttggtaacgcagctaacgcgtgaagtagaccgcctggggagtacggtcgcaagattaaaactcaaaggaattgacgggggcccgcacaagcggtggatgatgtggattaattcgatgcaacgcgaaaaaccttacctggtcttgacatgtagcgaatcctgcagagacgcaggagtgcccgaaagggagcgctaacacaggtgctgcatggctgtcgtcagctcgtgtcgtgagatgttgggttaagtcccgcaacgagcgcaacccttgccattagttgccatcattaagttgggcactttaatgggactgccggtgacaaaccggaggaaggtggggatgacgtcaagtcctcatggcccttatgaccagggcttcacacgtcatacaatggtcggtacagagggttgccaagccgcgaggtggagctaatctcataaaaccgatcgtagtccggatcgcagtctgcaactcgactgcgtgaagtcggaatcgctagtaatcgcggatcagcatgtcgcggtgaatacgttcccgggccttgtacacaccgcccgtcacaccatgggagtgggggataccagaagtgggtaggctaaccgcaaggaggccgcttaccacggtatgcttcatgact

SEQ ID NO: 2972 - DNA, 1453 bp, Robbsia andropogonis
attgaacgctggcggcatgccttacacatgcaagtcgaacggtaacagggagcttgctccgctgacgagtggcgaacgggtgagtaatacatcggaacgtgtcctgtagtgggggatagcccggcgaaagccggattaataccgcatacgatctaaggatgaaagcgggggatcttcggacctcgcgctataggggcggccgatggcagattagctagttggtggggtaaaggcctaccaaggcgacgatctgtagctggtctgagaggacgaccagccacactgggactgagacacggcccagactcctacgggaggcagcagtggggaattttggacaatgggcgcaagcctgatccagcaatgccgcgtgtgtgaagaaggccttcgggttgtaaagcacttttgttcgggaagaaaaggcgagggctaatatcctttgctgatgacggtaccggaagaataagcaccggctaactacgtgccagcagccgcggtaatacgtagggtgcaagcgttaatcggaattactgggcgtaaagcgtgcgcaggcggtttgttaagacagatgtgaaatccccgggcttaacctgggaactgcatttgtgactggcaggctagagtgtggcagaggggggtggaattccgcgtgtagcagtgaaatgcgtagatatgcggaggaacatcgatggcgaaggcagccccctgggccaacactgacgctcatgcacgaaagcgtggggagcaaacaggattagataccctggtagtccacgccctaaacgatgtcaactagttgttggggattcatttccttagtaacgtagctaacgcgtgaagttgaccgcctggggagtacggtcgcaagattaaaactcaaaggaattgacggggacccgcacaagcggtggatgatgtggattaattcgatgcaacgcgaaaaaccttacctacccttgacatggtcggaacccttgagagatcagggggtgctcgaaagagaaccgatacacaggtgctgcatggctgtcgtcagctcgtgtcgtgagatgttgggttaagtcccgcaacgagcgcaacccttgtccttagttgctacgcaagggcactctaaggagactgccggtgacaaaccggaggaaggtggggatgacgtcaagtcctcatggcccttatgggtagggcttcacacgtcatacaatggtcggaacagagggctgccaacccgcgagggggagctaatcccagaaaaccgatcgtagtccggattgcactctgcaactcgagtgcatgaagttggaatcgctagtaatcgcggatcagcatgccgcggtgaatacgttcccgggtcttgtacacaccgcccgtcacaccatgggagcgggtttcaccagaagtaggtagcttaaccgcaaggagggcgcttaccacggtgggattcgtgactggggtg

SEQ ID NO: 2973 - DNA, 1446 bp, Robiginitalea myxolifaciens
gatgaacgctagcggcaggcctaacacatgcaagtcgaacggtaacatagaaaagcttgcttttctgatgacgagtggcgcacgggtgcgtaacgcgtatagaacctaccttttgcagggggatagcccggagaaattcggattaataccccgtagtattatcgattggcatcgattgataattagagattcatcggcaaaagatggctatgcgtcctattagctagatggtgaggtaacggctcaccatggctacgataggtaggggccctgagagggggatcccccacactggtactgagacacggaccagactcctacgggaggcagcagtgaggaatattggacaatggtcgagagactgatccagccatgccgcgtgcaggaagacggccctacgggttgtaaactgcttttatacgggaagaataaggggcacgtgtgccctgatgacggtaccgtaagaataaggaccggctaactccgtgccagcagccgcggtaatacggagggtccgagcgttatccggaatcattgggtttaaagggtccgcaggcgggtcagtaagtcagaggtgaaagtttgcggctcaaccgtaaaattgcctttgatactgctggtcttgagttacagtgaagtggctggaatatgtggtgtagcggtgaaatgcatagagatcacatagaacaccgattgcgaaggcaggtcactaactgtatactgacgctgatggacgaaagcgtggggagcgaacgggattagataccccggtagtccacgccgtaaacgatggacactagctgtcgggcattagctcggtggccaagcgaaagtgataagtgtcccacctggggagtacgtcggcaacgatgaaactcaaaggaattgacgggggcccgcacaagcggtggagcatgtggtttaattcgatgatacgcgaggaaccttaccagggcttaaatggggagtgacaggcttagagataggcttttcttcggacactcttcaaggtgctgcatggttgtcgtcagctcgtgccgtgaggtgtcaggttaagtcctataacgagcgcaacccctaccgttagttgccagcatgtcaagatggggactctaacggaactgccggtgcaaaccgtgaggaaggtggggatgacgtcaaatcatcacggcccttacgtcctgggctacacacgtgctacaatggccggtacaatgagcagccactacgcaagtaggagcgaatctataaaaccggtcacagttcggatcgaggtctgcaacccgacctcgtgaagctggaatcgctagtaatcggatatcagccatgatccggtgaatacgttcccgggccttgtacacaccgcccgtcaagccatggaagccgggagtgcctgaagtccgtcaccgcaaggagcggcctagggcaagatcggtaactagggct

SEQ ID NO: 2974 - DNA, 1456 bp, Rodentibacter heidelbergensis
attgaacgctggcggcaggcttaacacatgcaagtcgaacggtagcaggagaaagcttgctttcttgctgacgagtggcggacgggtgagtaatgcttgggaatctggcttacggagggggataactgcgggaaactgcagctaataccgcgtataatcgagagatgaaagggggcgaaagctcttgccgtgagatgagcccaagtgggattaggtagttggtggggtaatggcctaccaagcctgcgatctctagctggtctgagaggatggccagccacaccgggactgagacacggcccggactcctacgggaggcagcagtggggaatattgcgcaatggggggaaccctgacgcagccatgccgcgtgaatgaagaaggccttcgggttgtaaagttctttcggtgatgaggaaggtaacattgctaataccaatgttaattgacgttaattacagaagaagcaccggctaactccgtgccagcagccgcggtaatacggagggtgcgagcgttaatcggaataactgggcgtaaagggcacgcaggcggatttttaagtgaggtgtgaaagccccgggcttaacctgggaattgcatttcagactgggaatctagagtactttagggaggggtagaattccacgtgtagcggtgaaatgcgtagagatgtggaggaataccgaaggcgaaggcagccccttgggaatgtactgacgctcatgtgcgaaagcgtggggagcaaacaggattagataccctggtagtccacgctgtaaacgctgtcgatttgggggttgggctttaagcttggcgcccgtagctaacgtgataaatcgaccgcctggggagtacggccgcaaggttaaaactcaaatgaattgacgggggcccgcacaagcggtggagcatgtggtttaattcgatgcaacgcgaagaaccttacctactcttgacatccagagaagaactcagagatgagtttgtgccttcgggagctttgagacaggtgctgcatggctgtcgtcagctcgtgttgtgaaatgttgggttaagtcccgcaacgagcgcaacccttatcctttgttgccagcacttcgggtgggaactcaaaggagactgccggtgataaaccggaggaaggtggggatgacgtcaagtcatcatggcccttacgagtagggctacacacgtgctacaatggcgtatacagagggaagcgaagcagcgatgtggagcgaatctcataaagtgcgtctaagtccggattggagtctgcaactcgactccatgaagtcggaatcgctagtaatcgcgaatcagaatgtcgcggtgaatacgttcccgggccttgtacacaccgcccgtcacaccatgggagtgggttgtaccagaagtagatagcttaaccgagaggggggcgtttaccacggtatgattcatgactggggtg

SEQ ID NO: 2975 - DNA, 1456 bp, Rodentibacter heylii
ataaacgcgggcggcattcttaacacatgcaagtcgaacggtagcaggaaggaagcttgctttctttgctgacgagtggcggacgggtgagtaatgcttgggaatctggcttatggagggggataactgcgggaaactgcagctaataccgcgtaaagtctttggactaaagggggcgtttgctcttgccataagatgagcccaagtgggattaggtagttggtggggtaatggctcaccaagccgtcgatctctagctggtctgagaggatgaccagccacaccgggactgagacacggcccggactcctacgggaggcagcagtggggaatattgcgcaatggggggaaccctgacgcagccatgccgcgtgaatgaagaaggccttcgggttgtaaagttctttcggtgatgaggaaggcagtttggttaatagccaagctgattgacgttagtcacagaagaagcaccggctaactccgtgccagcagccgcggtaatacggagggtgcgagcgttaatcggaataactgggcgtaaagggcacgcaggcggatttttaagtgaggtgtgaaagccccgggcttaacctgggaattgcatttcagactgggaatctagagtactttagggaggggtagaattccacgtgtagcggtgaaatgcgtagagatgtggaggaataccgaaggcgaaggcagccccttgggaatgtactgacgctcatgtgcgaaagcgtggggagcaaacaggattagataccctggtagtccacgctgtaaacgctgtcgatttgggggttggggtttaactctggcgcccgtagctaacgtgataaatcgaccgtctggggagtacggccgcaaggttaaaactcaatgaattgacgggggcccgcacaagcggtggagcatgtggtttaattcgatgcaacgcgaagaacctaacctactcttgacatccagagaatcctgtagagatacgggagtgccttagggagctttgagacaggtgctgcatggctgtcgtcagctcgtgttgtgaaatgttgggttaagtcccgcaacgagcgcaacccttatcctttgttgccagcgatacggtcgggaactcaaaggagactgccggtgataaaccggaggaaggtggggatgacgtcaagtcatcatggcccttacgagtagggctacacacgtgctacaatggcgtatacagagggaggcgaagcagcgatgtggagcgaatctcacaaagtacgtctaagtccggattggagtctgcaactcgactccatgaagtcggaatcgctagtaatcgcgaatcagaatgtcgcggtgaatacgttcccgggccttgtacacaccgcccgtcacaccatgggagtgggttgtaccagaagtagatagcttaaccgtaaggggggcgtttaccacggtatgattcatgactggggtg

SEQ ID NO: 2976 - DNA, 1456 bp, Rodentibacter mrazii
attgaacgctggcggcaggcttaacacatgcaagtcgaacggtaacaggagaaagcttgctttcttgctgacgagtggcggacgggtgagtaatgcttgggaatctggcttacggagggggataactgcgggaaactgcagctaataccgcgtattatcgggagatgaaagggggcgaaagctcctgccgtgagatgagcccaagtgggattaggtagttggtgaggtaaaggctcaccaagcctgcgatctctagctggtctgagaggatggccagccacaccgggactgagacacggcccggactcctacgggaggcagcagtggggaatattgcgcaatggggggaaccctgacgcagccatgccgcgtgaatgaagaaggccttcgggttgtaaagttctttcggtgacgaggaaggtgcttaggttaataccctaagtaattgacgttaatcacagaagaagcaccggctaactccgtgccagcagccgcggtaatacggagggtgcgagcgttaatcggaataactgggcgtaaagggcacgcaggcggatttttaagtgaggtgtgaaagccccgggcttaacctgggaatagcatttcagactgggaatctagagtactttagggaggggtagaattccacgtgtagcggtgaaatgcgtagagatgtggaggaataccgaaggcgaaggcagccccttggggatgtactgacgctcatgtgcgaaagcgtggggagcaaacaggattagataccctggtagtccacgctgtaaacgctgtcgatttgggggttgggctttgagcttggcgcccgtagctaacgtgataaatcgaccgcctggggagtacggccgcaaggttaaaactcaaatgaattgacgggggcccgcacaagcggtggagcatgtggtttaattcgatgcaacgcgaagaaccttacctactcttgacatccagagaatccgatagagatattggagtgccttagggaactttgagacaggtgctgcatggctgtcgtcagctcgtgttgtgaaatgttgggttaagtcccgcaacgagcgcaacccttatcctttgttgccagcacttcgggtgggaactcaaaggagactgccggtgataaaccggaggaaggtggggatgacgtcaagtcatcatggcccttacgagtagggctacacacgtgctacaatggcgtatacagagggaagcgaagcagcgatgtggagcgaatctcacaaagtgcgtctaagtccggattggagtctgcaactcgactccatgaagtcggaatcgctagtaatcgcgaatcagaatgtcgcggtgaatacgttcccgggccttgtacacaccgcccgtcacaccatgggagtgggttgtaccagaagtggatagcttaaccgagaggggggcgtttaccacggtatgattcatgactggggtg

SEQ ID NO: 2977 - DNA, 1358 bp, Rodentibacter myodis
  misc_feature (162)..(162): n is a, c, g, or t
attgaacgctggcggcaggcttaacacatgcaagtcgaacggtaacgggaaggagcttgctcctttgctgacgagtggcggacgggtgagtaatgcttgggaatctggcttatggagggggataactgcgggaaactgcggctaataccgcgtaatatcganagattaaagggggctttatagctcttgccataggatgagcccaagtgggattaggtagttggtggggtaaaggcctaccaagcctacgatctctagctggtctgagaggatggccagccacaccgggactgagacacggcccggactcctacgggaggcagcagtggggaatattgcgcaatggggggaaccctgacgcagccatgccgcgtgaatgaagaaggccttcgggttgtaaagttctttcggtggtgaggaaggtgtaatggttaatacccattacaattgacgttaatcacagaagaagcaccggctaactccgtgccagcagccgcggtaatacggagggtgcgagcgttaatcggaataactgggcgtaaagggcacgcaggcggacttttaagtgaggtgtgaaagccccgggcttaacctgggaatagcatttcagactgggggtctagagtactttagggaggggtagaattccacgtgtagcggtgaaatgcgtagagatgtggaggaataccgaaggcgaaggcagccccttggggatgtactgacgctcatgtgcgaaagcgtggggagcaaacaggattagataccctggtagtccacgctgtaaacgctgtcgatttgggggttgggctttaagcttggcgcccgtagctaacgtgataaatcgaccgcctggggagtacggccgcaaggttaaaactcaaatgaattgacgggggcccgcacaagcggtggagcatgtggtttaattcgatgcaacgcgaagaaccttacctactcttgacatcctaagaagagctcagagatgagcttgtgccttcgggaacttagagacaggtgctgcatggctgtcgtcagctcgtgttgtgaaatgttgggttaagtcccgcaacgagcgcaacccttatcctttgttgccagcgattaggtcgggaactcaaaggagactgccggtgataaaccggaggaaggtggggatgacgtcaagtcatcatggcccttacgagtagggctacacacgtgctacaatggcgtatacagagggaggcgaagcagcgatgtggagcgaatctcagaaagtgcgtctaagtccggattggagtctgcaactcgactccatgaagtcggaatcgctagtaatcgcgaatcagaatgtcgcggtgaatacgttcccgggcctt

SEQ ID NO: 2978 - DNA, 1456 bp, Rodentibacter pneumotropicus
attgaacgctggcggcaggcttaacacatgcaagtcgaacggtaacaggagaaagcttgctttcttgctgacgagtggcggacgggtgagtaatgcttgggaatctggcttatggagggggataactactggaaacggtagctaataccgcataaggtctaaggacaaaagggggcgtaagctcttgccataagatgagcccaagtgggattaggtagttggtgaggtaatggctcaccaagcctgcgatctctagctggtctgagaggatgaccagccacaccgggactgagacacggcccggactcctacgggaggcagcagtggggaatattgcgcaatggggggaaccctgacgcagccatgccgcgtgaatgaagaaggccttcgggttgtaaagttctttcggtgatgaggaaggtgataaggttaatacccttattaattgacgttagtcacagaagaagcaccggctaactccgtgccagcagccgcggtaatacggagggtgcgagcgttaatcggaataactgggcgtaaagggcacgcaggcggatttttaagtgaggtgtgaaagccccgggcttaacctgggaattgcatttcagactgggaatctagagtactttagggaggggtagaattccacgtgtagcggtgaaatgcgtagagatgtggaggaataccgaaggcgaaggcagccccttgggaatgtactgacgctcatgtgcgaaagcgtggggagcaaacaggattagataccctggtagtccacgctgtaaacgctgtcgatttgggggttgggctttaagcttggcgcccgtagctaacgtgataaatcgaccgcctggggagtacggccgcaaggttaaaactcaaatgaattgacgggggcccgcacaagcggtggagcatgtggtttaattcgatgcaacgcgaagaaccttacctactcttgacatccagagaagagactagagatagttttgtgccttagggaactctgagacaggtgctgcatggctgtcgtcagctcgtgttgtgaaatgttgggttaagtcccgcaacgagcgcaacccttatcctttgttgccagcgatacggtcgggaactcaaaggagactgccggtgataaaccggaggaaggtggggatgacgtcaagtcatcatggcccttacgagtagggctacacacgtgctacaatggcgtatacagagggaagcgaagcagcgatgtggagcgaatctcataaagtgcgtctaagtccggattggagtctgcaactcgactccatgaagtcggaatcgctagtaatcgcgaatcagaatgtcgcggtgaatacgttcccgggccttgtacacaccgcccgtcacaccatgggagtgggttgtaccagaagtggatagcttaaccgaagggggggcgttcaccacggtatgattcatgactggggtg

SEQ ID NO: 2979 - DNA, 1454 bp, Rodentibacter rarus
  misc_feature (179)..(179): n is a, c, g, or t
  misc_feature (246)..(246): n is a, c, g, or t
  misc_feature (588)..(588): n is a, c, g, or t
  misc_feature (638)..(638): n is a, c, g, or t
  misc_feature (757)..(757): n is a, c, g, or t
  misc_feature (810)..(810): n is a, c, g, or t
  misc_feature (1057)..(1057): n is a, c, g, or t
  misc_feature (1134)..(1134): n is a, c, g, or t
attgaacgctggcggcaggcttaacacatgcaagtcgaacggtaacaggagaaagcttgctttcttgctgacgagtggcggacgggtgagtaatgcttgggaatctggcttacggagggggataactgcgggaaactgcagctaataccgcgtataatcgagagatgaaagggggcgtnagctcctgccgtgagatgagcccaagtgggattaggtagttggtggggtaatggcctaccaagcctncgatctctagctggtctgagaggatgaccagccacaccggaactgagacacggtccggactcctacgggaggcagcagtggggaatattgcacaatggggggaaccctgacgcagccatgccgcgtgaatgaagaaggccttcgggttgtaaagttctttcggtgacgaggaaggtgataaggttaatacccttattaattgacgttaatcacagaagaagcaccggctaactccgtgccagcagcagcggtaatacggagggtgcgagcgttaatcggaataactgggcgtaaagggcacgcaggcggatttttaagtgaggtgtgaaagccccgggcttnacctgggaatagcatttcagactgggaatctagagtactttagggagggntagaattccacgtgtagcggtgaaatgcgtagagatgtggaggaataccgaaggcgaaggcagccccttgggaatgtactgacgctcatgtgcgaaagcgtggggagcaaacaggattngataccctggtagtccacgctgtaaacgctgtcgatttgggggttgggctttnagcttggcgcccgtagctaacgtgataaatcgaccgcctggggagtacggccgcaaggttaaaactcaaatgaattgacgggggcccgcacaagcggtggagcatgtggtttaattcgatgcaacgcgaagaaccttacctactcttgacatcctcagaagaactcagagatgagtttgtgcctttgggaactgagagacaggtgctgcatggctgtcgtcagctcgtgttgtgaaatgttgggttnagtcccgcaacgagcgcaacccttatcctttgttgccagcacttcgggtgggaactcaaaggagactgccggtgatnaaccggaggaaggtggggatgacgtcaagtcatcatggcccttacgagtagggctacacacgtgctacaatggcgtatacagaggggtgcgaagcagcgatgtggagcgaatctcataaagtgcgtctaagtccggattggagtctgcaactcgactccatgaagtcggaatcgctagtaatcgcgaatcagaatgtcgcggtgaatacgttcccgggccttgtacacaccgcccgtcacaccatgggagtgggttgtaccagaagtagatagcttaaccttcgggagggcgtttaccacggtatgattcatgactgggg

SEQ ID NO: 2980 - DNA, 1457 bp, Rodentibacter ratti
attgaacgctggcggcaggcttaacacatgcaagtcgaacggtaacaggagaaagcttgctttcttgctgacgagtggcggacgggtgagtaatgcttgggaatctggcttacggagggggataactgcgggaaactgcagctaataccgcgtagaatcgagagatgaaaggggggcgaaagctcctgccgtgagatgagcccaagtgggattaggtagttggtgaggtaatggctcaccaagcctgcgatctctagctggtctgagaggatggccagccacaccgggactgagacacggcccggactcctacgggaggcagcagtggggaatattgcgcaatggggggaaccctgacgcagccatgccgcgtgaatgaagaaggccttcgggttgtaaagttctttcggtgacgaggaaggtgcttaggttaataccctaagtaattgacgttaatcacagaagaagcaccggctaactccgtgccagcagccgcggtaatacggagggtgcgagcgttaatcggaataactgggcgtaaagggcacgcaggcggatttttaagtgaggtgtgaaagccccgggcttaacctgggaattgcatttcagactgggaatctagagtactttagggaggggtagaattccacgtgtagcggtgaaatgcgtagagatgtggaggaataccgaaggcgaaggcagccccttgggaatgtactgacgctcatgtgcgaaagcgtggggagcaaacaggattagataccctggtagtccacgctgtaaacgctgtcgatttgggggttgggctttgagcttggcgcccgtagctaacgtgataaatcgaccgcctggggagtacggccgcaaggttaaaactcaaatgaattgacgggggcccgcacaagcggtggagcatgtggtttaattcgatgcaacgcgaagaaccttacctactcttgacatccaaagaagagactagagatagtcttgtgccttcgggaactttgagacaggtgctgcatggctgtcgtcagctcgtgttgtgaaatgttgggttaagtcccgcaacgagcgcaacccttatcctttgttgccagcacttcgggtgggaactcaaaggagactgccggtgataaaccggaggaaggtggggatgacgtcaagtcatcatggcccttacgagtagggctacacacgtgctacaatggcgtatacagagggaagcgaagcagcgatgtggagcgaatctcataaagtgcgtctaagtccggattggagtctgcaactcgactccatgaagtcggaatcgctagtaatcgcgaatcagaatgtcgcggtgaatacgttcccgggccttgtacacaccgcccgtcacaccatgggagtgggttgtaccagaagtagatagcttaaccgcaaggggggcgtttaccacggtatgattcatgactggggtg

SEQ ID NO: 2981 - DNA, 1456 bp, Rodentibacter trehalosifermentans
attgaacgctggcggcaggcttaacacatgcaagtcgaacggtagcaggagaaagcttgctttcttgctgacgagtggcggacgggtgagtaatgcttgggaatctggcttacggagggggataactgcgggaaactgcagctaataccgcgtagaatcttaggattaaagggggcgaaagctcttgccgtgagatgagcccaagtgggattaggtagttggtggggtaatggcctaccaagcctgcgatctctagctggtctgagaggatggccagccacaccgggactgagacacggcccggactcctacgggaggcagcagtggggaatattgcgcaatggggggaaccctgacgcagccatgccgcgtgaatgaagaaggccttcgggttgtaaagttctttcggtgacgaggaaggtgataaggttaatacccttattaattgacgttaatcacagaagaagcaccggctaactccgtgccagcagccgcggtaatacggagggtgcgagcgttaatcggaataactgggcgtaaagggcacgcaggcggatttttaagtgaggtgtgaaagccccgggcttaacctgggaatagcatttcagactgggaatctagagtactttagggaggggtagaattccacgtgtagcggtgaaatgcgtagagatgtggaggaataccgaaggcgaaggcagccccttgggaatgtactgacgctcatgtgcgaaagcgtggggagcaaacaggattagataccctggtagtccacgctgtaaacgctgtcgatttggggattgggctttaagcttggtgcccgtagctaacgtgataaatcgaccgcctggggagtacggccgcaaggttaaaactcaaatgaattgacgggggcccgcacaagcggtggagcatgtggtttaattcgatgcaacgcgaagaaccttacctactcttgacatcctaagaagaactcagagatgagtttgtgccttcgggaacttagagacaggtgctgcatggctgtcgtcagctcgtgttgtgaaatgttgggttaagtcccgcaacgagcgcaacccttatcctttgttgccagcgacttggtcgggaactcaaaggagactgccggtgataaaccggaggaaggtggggatgacgtcaagtcatcatggcccttacgagtagggctacacacgtgctacaatggcgtatacagagggaggcgaagcagcgatgtggagcgaatctcataaagtgcgtctaagtccggattggagtctgcaactcgactccatgaagtcggaatcgctagtaatcgcgaatcagaatgtcgcggtgaatacgttcccgggccttgtacacaccgcccgtcacaccatgggagtgggttgtaccagaagtagatagcttaaccgaaaggggggcgtttaccacggtatgattcatgactggggtg

SEQ ID NO: 2982 - DNA, 1451 bp, Roseateles aquatilis
attgaacgctggcggcatgccttacacatgcaagtcgaacggtaacgcggggcaacctggcgacgagtggcgaacgggtgagtaatatatcggaacgtgcccagtcgtgggggataactgctcgaaagagcagctaataccgcatacgacctgagggtgaaagcgggggatcttcggacctcgcgcgattggagcggccgatatcagattaggtagttggtggggtaaaggcctaccaagccgacgatctgtagctggtctgagaggacgaccagccacactgggactgagacacggcccagactcctacgggaggcagcagtggggaattttggacaatgggggcaaccctgatccagccatgccgcgtgcgggaagaaggccttcgggttgtaaaccgcttttgtcagggaagaaatcctttgggctaataactcggagggatgacggtacctgaagaataagcaccggctaactacgtgccagcagccgcggtaatacgtagggtgcaagcgttaatcggaattactgggcgtaaagcgtgcgcaggcggttatgcaagacagatgtgaaatccccgggctcaacctgggaactgcatttgtgactgcatggctagagtacggtagagggggatggaattccgcgtgtagcagtgaaatgcgtagatatgcggaggaacaccgatggcgaaggcaatcccctggacctgtactgacgctcatgcacgaaagcgtggggagcaaacaggattagataccctggtagtccacgccctaaacgatgtcaactggttgttgggagggtttcttctcagtaacgtagctaacgcgtgaagttgaccgcctggggagtacggccgcaaggttgaaactcaaaggaattgacggggacccgcacaagcggtggatgatgtggtttaattcgatgcaacgcgaaaaaccttacctacccttgacatgtcaggaattctgcagagatgcggaagtgctcgaaagagaacctgaacacaggtgctgcatggccgtcgtcagctcgtgtcgtgagatgttgggttaagtcccgcaacgagcgcaacccttgtcattagttgctacgaaagggcactctaatgagactgccggtgacaaaccggaggaaggtggggatgacgtcaggtcatcatggcccttatgggtagggctacacacgtcatacaatggccgggacagagggctgccaacccgcgagggggagctaatcccagaaacccggtcgtagtccggatcgcagtctgcaactcgactgcgtgaagtcggaatcgctagtaatcgcggatcagcttgccgcggtgaatacgttcccgggtcttgtacacaccgcccgtcacaccatgggagcgggttctgccagaagtagttagcctaaccgcaaggagggcgattaccacggcagggttcgtgactggggtg

SEQ ID NO: 2983 - DNA, 1451 bp, Roseateles depolymerans
attgaacgctggcggcatgccttacacatgcaagtcgaacggtaacgcggggcaacctggcgacgagtggcgaacgggtgagtaatgtatcggaacgtgcccagttgtgggggataactgctcgaaagagcagctaataccgcatacgacctgagggtgaaagcgggggatcgcaagacctcgcgcaattggagcggccgatatcagattaggtagttggtggggtaaaggcctaccaagcctacgatctgtagctggtctgagaggacgaccagccacactgggactgagacacggcccagactcctacgggaggcagcagtggggaattttggacaatgggggcaaccctgatccagccatgccgcgtgcgggaagaaggccttcgggttgtaaaccgcttttgtcagggaagaaatcctttgagctaatacctcggagggatgacggtacctgaagaataagcaccggctaactacgtgccagcagccgcggtaatacgtagggtgcaagcgttaatcggaattactgggcgtaaagcgtgcgcaggcggttatgcaagacagatgtgaaatccccgggctcaacctgggaactgcatttgtgactgcatagctagagtacggtagagggggatggaattccacgtgtagcagtgaaatgcgtagatatgtggaggaacaccgatggcgaaggcaatcccctggacctgtactgacgctcatgcacgaaagcgtggggagcaaacaggattagataccctggtagtccacgccctaaacgatgtcaactggttgttgggagggtttcttctcagtaacgtagctaacgcgtgaagttgaccgcctggggagtacggccgcaaggttgaaactcaaaggaattgacggggacccgcacaagcggtggatgatgtggtttaattcgatgcaacgcgaaaaaccttacctacccttgacatgccaggaatcttgcagagatgtgagagtgctcgaaagagaacctggacacaggtgctgcatggccgtcgtcagctcgtgtcgtgagatgttgggttaagtcccgcaacgagcgcaacccttgtcattagttgctacgaaagggcactctaatgagactgccggtgacaaaccggaggaaggtggggatgacgtcaggtcatcatggcccttatgggtagggctacacacgtcatacaatggccgggacagagggctgccaacccgcgagggggagctaatcccagaaacccggtcgtagtccggatcgcagtctgcaactcgactgcgtgaagtcggaatcgctagtaatcgcggatcagcttgccgcggtgaatacgttcccgggtcttgtacacaccgcccgtcacaccatgggagcgggttctgccagaagtagttagcctaaccgcaaggagggcgattaccacggcagggttcgtgactggggtg

SEQ ID NO: 2984 - DNA, 1403 bp, Roseibium hamelinense
aacgaacgctggcggcaggcttaacacatgcaagtcgaacggtccttcgggacagtggcagacgggtgagtaacgcgtgggaatatacctttcggtacggaatagctccgggaaactggaattaataccgtatgcgccctatgggggaaagatttatcgccgaaggattagcccgcgttggattagctagttggtggggtaatggcctaccaaggcgacgatccatagctggtctgagaggatgatcagccacactgggactgagacacggcccagactcctacgggaggcagcagtggggaatattggacaatgggggcaaccctgatccagccatgccgcgtgagtgatgaaggccctagggttgtaaagctctttcagcgaggaggataatgacgttactcgcagaagaagccccggctaacttcgtgccagcagccgcggtaatacgaagggggctagcgttgttcggaatcactgggcgtaaagcgcacgtaggcggactgatcagtcaggggtgaaatcccggggctcaaccccggaactgcctttgatactgtcagtcttgagtccgagagaggtgagtggaactccgagtgtagaggtgaaattcgtagatattcggaagaacaccagtggcgaaggcggctcactggctcggtactgacgctgaggtgcgaaagcgtggggagcaaacaggattagataccctggtagtccacgccgtaaacgatggaagctagccgtcaggtagcatgctatttggtggcgcagctaacgcattaagcttcccgcctggggagtacggtcgcaagattaaaactcaaaggaattgacgggggcccgcacaagcggtggagcatgtggtttaattcgaagcaacgcgcagaaccttaccagcccttgacatttggtgctacatcgggagaccgatggttcccttcggggacgccaggacaggtgctgcatggctgtcgtcagctcgtgtcgtgagatgttgggttaagtcccgcaacgagcgcaaccctcgcccttagttgccagcattcagttgggcactctagggggactgccggtgataagccgagaggaaggtggggatgacgtcaagtcctcatggcccttacgggctgggctacacacgtgctacaatggcggtgacaatgggcagcgaacccgcgagggggagctaatctcaaaaagccgtctcagttcggattgttctctgcaactcgagagcatgaagttggaatcgctagtaatcgcgtaacagcatgacgcggtgaatacgttcccgggccttgtacacaccgcccgtcacaccatgggagttgggtttacccgaaggcagtgcgctaaccgcaagggggcagctgaccacggtaggctcagcgactggggtg

SEQ ID NO: 2985 - DNA, 1451 bp, Roseimaritima ulvae
aatgaacgttggcggcgtggattaggcatgcaagtcgcgcgagaaacctccttcgggaggcggacagcggcggaagggagagtaatgcgtggttacgtgccctgaggaccgggatagtgcgaggaaactttcagtaataccggataatatctcaggatcaaatggtgtgattccgccttgggatcggaccacgtgctattagctagttggcggggtaatggcccaccaaggctacgatggctaccgggtgtgagagcatgacccggctcactgggactgagacactgcccagacatctacggatggctgcagtcgagaatcttcggcaatggacgaaagtctgaccgagcgacgccgcgtgcgggatgaaggccttcgggttgtaaaccgctgtcagttgggaggaaatgcataagagtcatctcttatgcttgaccgatcttcagaggaaggacgggctaagttcgtgccagcagccgcggtaagacgaaccgtccaaacgttattcggtatcactgggcttaaagcgtgcgtaggcggcttggtaggtgagatgtgaaagcccacggctcaaccgtggaattgcgtttcaaaccaccaagcttgaggatggcaggggtgatgggaactgatggtggagcggtgaaatgcgttgatatcatcaggaacaccggtggcgaaggcgcatcactgggccatttctgacgctgaggcacgaaagctagggtagcgaacgggattagataccccggtagtcctagccgtaaacgatgagcactgggttggggggactctcacatcctcccggccgtagcgaaagcgttaagtgctccgcctggggagtatggtcgcaaggctgaaactcaaaggaattgacgggggctcacacaagcggtggaggatgtggcttaattcgaggctacgcgaagaaccttatcctagatttgacatgcttgagaacctcttggaaacttgagggtgcccttcggggagctcttgcacaggtgctgcatggctgtcgtcagctcgtgtcgtgagatgtcgggttaagtcccttaacgagcgaaacccttatctttagttgccagcgggtaatgccggggactctaaagagactgccggtgtcaaaccggaggaaggtggggatgacgtcaagtcctcatggcctttatgtctagggctgcacacgtcctacaatggtacggacaaatggacgcaataccgcgaggtggagctaatcccaaaaaccgtgcctcagttcggattgcaggctgcaactcgcctgcatgaagccggaatcgctagtaatcgtaggtcagcatactacggtgaatgtgttcctgagccttgtacacaccgcccgtcaagccacgaaagttgggagggcccgaagtcactgagctaacccgcaagggaggcaagtgccgaaggtcagctcgacgattgggact

SEQ ID NO: 2986 - DNA, 1457 bp, Roseimicrobium gellanilyticum
aacgaacgctggcggcgtggataagacatgcaagtcgaacgggatattttggtagcaatatcggaatattcagtggcgaacgggtgcgtaacacgtgggtaacatgccgggaagaggagaatagcccagggaaacttggattaatgctccatgtggtcgcaagactaaagacggggtaacctgtcgcttcctgattggcccgcggcctatcagctagttggtgaggtaacggctcaccaaggctacgacgggtagctggtctgagaggatgaccagccacactggaactgagacacggtccagacacctacgggtggcagcagtcgagaatctttcacaatgggggcaaccctgatggagcgacgccgcgtggaggataaggtcttcggattgtaaactcctgtcatgcgagagtaaggcccatgcgttaactgcgtgtgggattgacagtaccgcaagaggaagagacggctaactctgtgccagcagccgcggtaatacagaggtctcaagcgttgttcggaattactgggcgtaaagggtgcgtaggctgcgcagaaagtcagatgtgaaatccgggagctcaacttccgaattgcatccgatactcctgtgctagaggactggagaggagcttggaattctcggtgtagcagtgaaatgcgtagagatcgagaggaacactagtggcgaaggctgggctctggacagtatctgacgctgaggcacgaaggtcaggggagcaaacgggattagataccccggtagtcctgacagtaaacggtgcacgcttggtgtgggaagtgaccctttccgtgccgaagctaacgcgataagcgtgccgcctgggaagtacgatcgcaagattaaaactcaaagaaattgacggggacccgcacaagcggtggagtatgtggcttaattcgatgcaacgcgaagaaccttacctggccttgacatgcattgtgtcgttggtgaaagccagctagtgtagcaatacacgctttgcacaggtgctgcatggctgtcgtcagctcgtgtcgtgagatgttgggttaagtcccgcaacgagcgcaacccctgtagtccgttgccaccggttttaccgagcacttggactagactgcccagatcaactgggaggaaggtggggatgacgtcaagtccgtatggcccttacggccagggctgcacacgtactacaatgcccagcacaaagtgaaccgagaccgcgaggtggaggaaatcgagaaagctgggctcagttcagattgcaggctgcaactcgcctgcatgaagttggaatcgctagtaatggcgcatcagctacggcgccgtgaatacgttcccgggtcttgtacacaccgcccgtcacatcatggaagctggcttcgcccaaagatcgtgcgccaaccgcaaggaggcatcggtttaaggcaaggctggtaactgggatg

SEQ ID NO: 2987 - DNA, 1391 bp, Roseinatronobacter monicus
aacgaacgctggcggcaggcttaacacatgcaagtcgaacgaaatcttcggacttagtggcggacgggtgagtaacgcgtgggaacgtgccctttgctacggaatagtccctggaaacggggtttaataccgtatattctctccggaggaaagatttatcggcaaaggatcggcccgcgttggattaggtagttggtggggtaatggcctaccaagcccgcgatccatagctggtttgagaggatgatcagccacactgggactgagacacggcccagactcctacgggaggcagcagtggggaatcttagacaatgggggaaaccctgatctagccatgccgcgtgagcgatgaaggccttagggttgtaaagctctttcgctggggaagataatgacggtacccagtaaagaagccccggctaactccgtgccagcagccgcggtaatacggagggggctagcgttgttcggaattactgggcgtaaagcgcgcgtaggcggattggaaagttgggggtgaaatcccggggctcaaccccggaactgcctccaaaactatcagtctggagttcgagagaggtgagtggaattgcgagtgtagaggtgaaattcgtagatattcgcaggaacaccagtggcgaaggcggctcactggctcgatactgacgctgaggtgcgaaagtgtggggagcaaacaggattagataccctggtagtccacaccgtaaacgatgaatgccagacgtcggcaagcatgcttgtcggtgtcacacctaacggattaagcattccgcctggggagtacggtcgcaagattaaaactcaaaggaattgacgggggcccgcacaagcggtggagcatgtggtttaattcgaagcaacgcgcagaaccttaccaacccttgacatggatatcgcgggaccagagatggttctttcagttcggctggatatcacacaggtgctgcatggctgtcgtcagctcgtgtcgtgagatgttcggttaagtccggcaacgagcgcaacccacgtccttagttgccagcaggttaagctgggcactctaaggaaactgccgatgataagtcggaggaaggtgtggatgacgtcaagtcctcatggcccttacgggttgggctacacacgtgctacaatggtagtgacagtgggataatcccaaaaagctatctcagttcggattggggtctgcaactcgaccccatgaagtcggaatcgctagtaatcgcggaacagcatgccgcggtgaatacgttcccgggccttgtacacaccgcccgtcacaccatgggagttgggtctacccgaaggtggtgcgctaacctcgcaagaggaggcagccaaccacggtaggctcagcgactggggtg

SEQ ID NO: 2988 - DNA, 1391 bp, Roseinatronobacter thiooxidans
aacgaacgctggcggcaggcttaacacatgcaagtcgaacgaagccttcgggcttagtggcggacgggtgagtaacgcgtgggaacgtgccctttgctacggaatagtcccgggaaactgggtttaataccgtatattctctacggaggaaagatttatcggcaaaggatcggcccgcgttggattaggtagttggtggggtaatggcctaccaagcccgcgatccatagctggtttgagaggatgatcagccacactgggactgagacacggcccagactcctacgggaggcagcagtggggaatcttagacaatgggggaaaccctgatctagccatgccgcgtgagcgatgaaggccttagggttgtaaagctctttcgctggggaagataatgacggtacccagtaaagaagccccggctaactccgtgccagcagccgcggtaatacggagggggctagcgttgttcggaattactgggcgtaaagcgcgcgtaggcggattggaaagttgggggtgaaatcccggggctcaaccccggaactgcctccaaaactatcagtctggagttcgagagaggtgagtggaattgcgagtgtagaggtgaaattcgtagatattcgcaggaacaccagtggcgaaggcggctcactggctcgatactgacgctgaggtgcgaaagtgtggggagcaaacaggattagataccctggtagtccacaccgtaaacgatgaatgccagtcgtcggcaagcatgcttgtcggtgacacacctaacggattaagcattccgcctggggagtacggtcgcaagattaaaactcaaaggaattgacgggggcccgcacaagcggtggagcatgtggtttaattcgaagcaacgcgcagaaccttaccaacccttgacatgggtatcgcgggacgagagatcgtcctttcagttcggctggataccacacaggtgctgcatggctgtcgtcagctcgtgtcgtgagatgttcggttaagtccggcaacgagcgcaacccacgtccttagttgccagcaggtcaagctgggcactctaaggaaactgccgatgataagtcggaggaaggtgtggatgacgtcaagtcctcatggcccttacgggttgggctacacacgtgctacaatggtagtgacagtgggataatcccaaaaagctatctcagttcggattggggtctgcaactcgaccccatgaagtcggaatcgctagtaatcgcggaacagcatgccgcggtgaatacgttcccgggccttgtacacaccgcccgtcacaccatgggagttgggtctacccgaagatggtgcgctaacccagcaatgggaggcagccagccacggtaggctcagcgactggggtg

SEQ ID NO: 2989 - DNA, 1465 bp, Rosenbergiella nectarea
attgaacgctggcggcaggcctaacacatgcaagtcgaacggtaacagagagtagcttgctactctgctgacgagtggcggacgggtgagtaatgtctggggatctgcctgatggagggggataactactggaaacggtagctaataccgcataatgtcgcaagaccaaagcgggggactttcgggcctcgcaccatcagatgaacccagatgggattagctagtaggtagggtaatggcttacctaggcgacgatccctagctggtctgagaggatgaccagccacactggaactgagacacggtccagactcctacgggaggcagcagtggggaatattgcacaatgggcgcaagcctgatgcagccatgccgcgtgtatgaagaaggccttcgggttgtaaagtactttcagtcaggaggaagggtgtgaaattaatactttcatgcattgacgttactgacagaagaagcaccggctaactccgtgccagcagccgcggtaatacggagggtgcaagcgttaatcggaattactgggcgtaaagcgcacgcaggcggtttgttaagtcagatgtgaaatccccgggctcaacctgggaactgcatttgaaactggcaagcttgagtcttgtagaggggggtagaattccaggtgtagcggtgaaatgcgtagagatctggaggaataccggtggcgaaggcggccccctggacaaagactgacgctcaggtgcgaaagcgtggggagcaaacaggattagataccctggtagtccacgccgtaaacgatgtcgacttggaggctgttcccttgaggagtggcttccggagctaacgcgttaagtcgaccgcctggggagtacggccgcaaggttaaaactcaaatgaattgacgggggcccgcacaagcggtggagcatgtggtttaattcgatgcaacgcgaagaaccttacctactcttgacatccagagaatttagcagagatgctttagtgccttcgggaactctgagacaggtgctgcatggctgtcgtcagctcgtgttgtgaaatgttgggttaagtcccgcaacgagcgcaacccttatcctttgttgccagcacgtaatggtgggaactcaaaggagactgccggtgataaaccggaggaaggtggggatgacgtcaagtcatcatggcccttacgagtagggctacacacgtgctacaatggcgcatacaaagagaagcgacctcgcgagagcaagcggacctcataaagtgcgtcgtagtccggattggagtctgcaactcgactccatgaagtcggaatcgctagtaatcgtaaatcagaatgttacggtgaatacgttcccgggccttgtacacaccgcccgtcacaccatgggagtgggttgcaaaagaagtagatagcttaaccttcgggagggcgtttaccactttgtgattcatgactggggtg

SEQ ID NO: 2990 - DNA, 1388 bp, Roseomonas aestuarii
acacatgcaagtcgcacgggcagcaatgtcagtggcggacgggtgagtaacgcgtagggaagtgtccagaggtgggggacaaccccgggaactggggctaataccgcatatggcctgagggccaaagcagtgatgcgcctttggagttacctgcgtccgattaggtagttggtggggtaaaggcctaccaagccgacgatcggtagctggtctgagaggacgaccagccacactgggactgagacacggcccagactcctacgggaggcagcagtggggaatattggacaatgggcgcaagcctgatccagcaatgccgcgtgggtgaagaaggtcttcggatcgtaaagccctttcggcggggacgatgatgacggtacccgcagaagaagccccggctaacttcgtgccagcagccgcggtaatacgaagggggctagcgttactcggaattactgggcgtaaagggcgcgtaggcggcgttccaagtcaggcgtgaaagccctgggctcaacctggggactgcgcttgatactggagtgcttgaggatggaagagggttgtggaattcccagtgtagaggtgaaattcgtagatattgggaagaacaccggtggcgaaggcggcaacctggtccatttctgacgctgaggcgcgatagcgtggggagcaaacaggattagataccctggtagtccacgccgtaaacgatgtgcgctgggatgttgggtgacctagtcactcagtgtcgtagctaacgcggtaagcgcaccgcctggggagtacggccgcaaggttgaaactcaaaggaattgacgggggcccgcacaagcggtggagcatgtggtttaattcgaagcaacgcgcagaaccttaccagcccttgacatgggtaggaccgacgcagagatgcgtctttcccgcaagggacctactgcacaggtgctgcatggctgtcgtcagctcgtgtcgtgagatgttgggttaagtcccgcaacgagcgcaaccctcgcctttagttgccagcacgtttgggtgggcactctagaggaactgccggtgacaagccggaggaaggtggggatgacgtcaagtcctcatggcccttatgggctgggctacacacgtgctacaatggcggtgacagtgggaagccaggcagcgatgtcgagccgatcccaaaaagccgtctcagttcagatcgcagcctgcaactcggctgcgtgaaggtggaatcgctagtaatcgcggatcagcacgccgcggtgaatacgttcccgggccttgtacacaccgcccgtcacaccatgggagttggttctaccttaagcaggtgcgcgaacccgcaagggatgtagcttgccacggtagggtcagcgactggggtg

SEQ ID NO: 2991 - DNA, 1409 bp, Roseomonas cervicalis
agcgaacgctggcggcatgcttaacacatgcaagtcgcacgggcagcaatgtcagtggcggacgggtgagtaacgcgtagggatgtgtccaggggtgggggataactccgggaaactggagctaataccgcatatggcctgagggccaaagcagcgatgcgcctttggagtaacctgcgtccgattagctagttggtggggtaaaggcctaccaaggcgacgatcggtagctggtctgagaggacgaccagccacactgggactgagacacggcccagactcctacgggaggcagcagtggggaatattggacaatgggcgcaagcctgatccagcaatgccgcgtgggtgaagaaggtcttcggatcgtaaagccctttcggcggggacgatgatgacggtacccgcagaagaagccccggctaacttcgtgccagcagccgcggtaatacgaagggggctagcgttactcggaattactgggcgtaaagggcgcgtaggcggcgctccaagttaggcgtgaaagccctgggctcaacctggggactgcgcttaagactggagtgctagaggatggaagagggttgtggaattcccagtgtagaggtgaaattcgtagatattgggaagaacaccggtggcgaaggcggcaacctggtccatttctgacgctgaggcgcgatagcgtggggagcaaacaggattagataccctggtagtccacgccgtaaacgatgtgcgctgaatgttggggttcctagaacctcagtgttgtagctaacgcggtaagcgcaccgcctggggagtacggccgcaaggttgaaactcaaaggaattgacgggggcccgcacaagcggtggagcatgtggtttaattcgaagcaacgcgcagaaccttaccagcccttgacatggccacgaccggttcagagatgaacttttcccgcaagggacgtggtgcacaggtgctgcatggctgtcgtcagctcgtgtcgtgagatgttgggttaagtcccgcaacgagcgcaaccctcgcctttagttgccagcacgtttgggtgggcactctagaggaactgccggtgacaagccggaggaaggtggggatgacgtcaagtcctcatggcccttatgggctgggctacacacgtgctacaatggcggtgacaatgggaagccaggcagcgatgtcgagccgatcccaaaaagccgtctcagttcagatcgcagcctgcaactcggctgcgtgaaggtggaatcgctagtaatcgcggatcagcacgccgcggtgaatacgttcccgggccttgtacacaccgcccgtcacaccatgggagttggttctaccttaagcaggtgcggtaaccgcaaggagctagcctgccacggtagggtcagtgactggggtg

SEQ ID NO: 2992 - DNA, 1426 bp, Roseomonas deserti
ctcagagtgaacgctggcggcatgcttaacacatgcaagtcgcgcgggtggtttcggccatcagcggcggacgggtgagtaacgcgtagggatgtgtccagaggtgggggacaactccgggaaactggagctaataccgcatatggcctgagggccaaagcagtgatgcgcctttggagtaacctgcgtccgattagctagttggtggggtaaaggcctaccaaggcgacgatcggtagctggtctgagaggacgaccagccacactgggactgagacacggcccagactcctacgggaggcagcagtggggaatattggacaatgggcgcaagcctgatccagcaatgccgcgtgggtgaagaaggtcttcggatcgtaaagccctttcggcggggacgatgatgacggtacccgcagaagaagccccggctaacttcgtgccagcagccgcggtaatacgaagggggctagcgttactcggaattactgggcgtaaagggcgcgtaggcggcgttccaagttaggcgtgaaagtcctgggctcaacctgggaactgcgcttaagactggagtgcttgaggatggaagagggtcgtggaattcccagtgtagaggtgaaattcgtagatattgggaagaacaccggtggcgaaggcggcgacctggtccatttctgacgctgaggcgcgatagcgtggggagcaaacaggattagataccctggtagtccacgccgtaaacgatgtgcgctggatgttggggctcctagagcttcagtgtcgtagctaacgcggtaagcgcaccgcctggggagtacggccgcaaggttgaaactcaaaggaattgacgggggcccgcacaagcggtggagcatgtggtttaattcgaagcaacgcgcagaaccttaccagcccttgacatggtcaggaccggcgcagagatgcgctttccccgcaaggggcctgatgcacaggtgctgcatggctgtcgtcagctcgtgtcgtgagatgttgggttaagtcccgcaacgagcgcaaccctcgcctttagttgccagcacgtctgggtgggcactctagaggaactgccggtgacaagccggaggaaggtggggatgacgtcaagtcctcatggcccttatgggctgggctacacacgtgctacaatggcggtgacagtgggacgccaggcagcgatgtcgagccgatcccaaaaagccgtctcagttcagatcgcagcctgcaactcggctgcgtgaaggtggaatcgctagtaatcgcggatcagcacgccgcggtggaataccgttccccgggccttgtacacaccgcccgtcacaccatggggagttggttctaccttaagcaggtgcgctaacccgcaaggggggtagcttgccacggtaggatcagtgactggggtgaa

SEQ ID NO: 2993 - DNA, 1413 bp, Roseomonas nepalensis
agcgaacgctggcggcatgcttaacacatgcaagtcgcacgggcgccttcgggtgtcagtggcggacgggtgagtaacgcgtaggaacatgtccaggggtgggggataacgctgggaaactggcgctaataccgcatgtgagctgaggctcaaagccgcgaggcgcctttggagtggcctgcgtccgattagcttgttggtggggtaatggcttaccaaggcttcgatcggtagctggtctgagaggacgaccagccacactgggactgagacacggcccagactcctacgggaggcagcagtggggaatattggacaatgggcgcaagcctgatccagcaatgccgcgtgggtgaagaaggtcttcggatcgtaaagccctttcgacggggacgatgatgacggtacccgtagaagaagccccggctaacttcgtgccagcagccgcggtaatacgaagggggctagcgttgctcggaattactgggcgtaaagggcgcgtaggcggtcattttagtcaggcgtgaaattcccgggcttaacctggggactgcgcttgatactgggtgactagagggtggaagagggtcgtggaattcccagtgtagaggtgaaattcgtagatattgggaagaacaccggtggcgaaggcggcgacctggtccattactgacgctgaggcgcgacagcgtggggagcaaacaggattagataccctggtagtccacgccgtaaacgatgtgcgctggatgttgggtgacctagtcactcagtgtcgtagccaacgcggtaagcgcaccgcctggggagtacggccgcaaggttgaaactcaaaggaattgacgggggcccgcacaagcggtggagcatgtggtttaattcgaagcaacgcgcagaaccttaccagctcttgacatggacaggaccggtgtggagacacactttccccgcaaggggcctgttgcacaggtgctgcatggctgtcgtcagctcgtgtcgtgagatgttgggttaagtcccgcaacgagcgcaaccctcgccactagttgccagcacgtttgggtgggcactctagtggaactgccggtgacaagccggaggaaggtggggatgacgtcaagtcctcatggcccttatgggctgggctacacacgtgctacaatggcggtgacagtgggaagccaggtcgcgaggccgagccgatccccaaaagccgtctcagttcggattgcaccctgcaactcgggtgcatgaaggtggaatcgctagtaatcgtggatcagcacgccacggtgaatacgttcccgggccttgtacacaccgcccgtcacaccatgggagttggttctaccttaagtggctgcgctaaccgcaagggggcaggtcaccacggtagggtcagcgactggggtg

SEQ ID NO: 2994 - DNA, 1385 bp, Roseomonas oryzae
atgcagtcgcacgggtggtttcggccatcagtggcggacgggtgagtaacgcgtagggaagtgtccagaggtgggggacaaccccgggaaactggggctaataccgcatatgtcctgagggacaaagcagtgatgcgcctttggagttacctgcgtccgattagctagttggtggggtaaaggcctaccaaggcgacgatcggtagctggtctgagaggacgaccagccacactgggactgagacacggcccagactcctacgggaggcagcagtggggaatattggacaatgggcgcaagcctgatccagcaatgccgcgtgggtgaagaaggtcttcggatcgtaaagccctttcggcggggacgatgatgacggtacccgcagaagaagccccggctaacttcgtgccagcagccgcggtaatacgaagggggctagcgttactcggaattactgggcgtaaagggcgcgtaggcggcgctgcaagttaggcgtgaaagccctgggctcaacctggggactgcgcttaagactgtggtgcttgaggatggaagaggctcgtggaattcccagtgtagaggtgaaattcgtagatattgggaagaacaccggtggcgaaggcggcgagctggtccattactgacgctgaggcgcgatagcgtggggagcaaacaggattagataccctggtagtccacgccgtaaacgatgtgcgctggatgttgggtgacctagtcactcagtgtcgtagccaacgcggtaagcgcaccgcctggggagtacggccgcaaggttgaaactcaaaggaattgacgggggcccgcacaagcggtggagcatgtggtttaattcgaagcaacgcgcagaaccttaccagcccttgacatggtcaggaccggcgcagagatgcgctttccccgcaaggggcctgatgcacaggtgctgcatggctgtcgtcagctcgtgtcgtgagatgttgggttaagtcccgcaacgagcgcaaccctcgcctttagttgccagcacgtttgggtgggcactctagaggaactgccggtgacaagccggaggaaggtggggatgacgtcaagtcctcatggcccttatgggctgggctacacacgtgctacaatggcggtgacaatgggaagccaggcagcaatgtcgagccgatcccaaaaagccgtctcagttcagatcgcggcctgcaactcggccgcgtgaaggtggaatcgctagtaatcgcggatcagcacgccgcggtgaatacgttcccgggccttgtacacaccgcccgtcacaccatgggagttggttctaccttaagcaggtgcgctaaccgcaaggaggtagcctgccacggtagggtcagcgactggggtg

SEQ ID NO: 2995 - DNA, 1409 bp, Roseomonas rhizosphaerae
agtgaacgctggcggcatgcttaacacatgcaagtcgcacgggcagcaatgtcagtggcggacgggtgagtaacgcgtagggaagtgtccagaggtgggggacaaccctgggaaactggggctaataccgcatatggcctgagggccaaagcagcgatgcgcctttggagttacctgcgtccgattagctagttggtggggtaaaggcctaccaaggcgacgatcggtagctggtctgagaggacgaccagccacactgggactgagacacggcccagactcctacgggaggcagcagtggggaatattggacaatgggcgcaagcctgatccagcaatgccgcgtgggtgaagaaggtcttcggatcgtaaagccctttcggcggggacgatgatgacggtacccgcagaagaagccccggctaacttcgtgccagcagccgcggtaatacgaagggggctagcgttactcggaattactgggcgtaaagggcgcgtaggcggcgttccaagttaggcgtgaaagccctgggctcaacctggggactgcgcttaagactggaatgcttgaggatggaagagggttgtggaattcccagtgtagaggtgaaattcgtagatattgggaagaacaccggtggcgaaggcggcaacctggtccatttctgacgctgaggcgcgatagcgtggggagcaaacaggattagataccctggtagtccacgccgtaaacgatgtgcgctggatgttgggtgacctagtcactcagtgtcgtagctaacgcggtaagcgcaccgcctggggagtacggccgcaaggttgaaactcaaaggaattgacgggggcccgcacaagcggtggagcatgtggtttaattcgaagcaacgcgcagaaccttaccagcccttgacatggccacgaccggttcagagatggactttccccgcaaggggcgtggtgcacaggtgctgcatggctgtcgtcagctcgtgtcgtgagatgttgggttaagtcccgcaacgagcgcaaccctcgcctttagttgccagcatgtttgggtgggcactctagaggaactgccggtgacaagccggaggaaggtggggatgacgtcaagtcctcatggcccttatgggctgggctacacacgtgctacaatggcggtgacaacgggaagccaggcagcgatgtcgagccgatcccgaaaagccgtctcagttcagatcgcagcctgcaactcggctgcgtgaaggtggaatcgctagtaatcgcggatcagcacgccgcggtgaatacgttcccgggccttgtacacaccgcccgtcacaccatgggagttggttctaccttaagcaggtgcgctaaccgcaagggggtagcctgccacggtagggtcagcgactggggtg

SEQ ID NO: 2996 - DNA, 1409 bp, Roseomonas rosea
agcgaacgctggcggcatgcttaacacatgcaagtcgcacgggcagcaatgtcagtggcggacgggtgagtaacgcgtaggaacatgtcctgaggtgggggacaaccctgggaaactggggctaataccgcatatcggctgaggccgaaagccttcgggcgcctttggagtggcctgcgttcgattagcttgttggtggggtaatggcctaccaaggctacgatcgatagctggtctgagaggacgaccagccacactgggactgagacacggcccagactcctacgggaggcagcagtggggaatattggacaatgggcgcaagcctgatccagcaatgccgcgtgggtgaagaaggtcttcggattgtaaagccctttcgacagggacgatgatgacggtacctgtagaagaagccccggctaacttcgtgccagcagccgcggtaatacgaagggggctagcgttgctcggaattactgggcgtaaagggcgcgtaggcggcttcattagtcaggcgtgaaaatcctgggcttaacctggggactgcgcttgatacggtgaggcttgaggatggaagaggctcgtggaattcccagtgtagaggtgaaattcgtagatattgggaagaacaccggtggcgaaggcggcgagctggtccattactgacgctgaggcgcgacagcgtggggagcaaacaggattagataccctggtagtccacgccgtaaacgatgtgcgctggatgttgggtggcctagccactcagtgtcgtagccaacgcgataagcgcaccgcctggggagtacggccgcaaggttgaaactcaaaggaattgacgggggcccgcacaagcggtggagcatgtggtttaattcgaagcaacgcgcagaaccttaccagcccttgacatggccacgaccggtccagagatggatctttcccgcaagggacgtggcgcacaggtgctgcatggctgtcgtcagctcgtgtcgtgagatgttgggttaagtcccgcaacgagcgcaaccctcgcctctagttgccagcatgtttgggtgggcactctagaggaactgccggtgacaagccggaggaaggtggggatgacgtcaagtcctcatggcccttatgggctgggctacacacgtgctacaatggcggtgacagagggaagccaggtcgcgaggccgagccgatcccgaaaagccgtctcagttcagattgcaccctgcaactcgggtgcatgaaggtggaatcgctagtaatcgcggatcagcacgccgcggtgaatacgttcccgggccttgtacacaccgcccgtcacaccatgggagttggttctaccttaagtggctgcgctaaccgcaagggggcaggtcaccacggtagggtcagcgactggggtg

SEQ ID NO: 2997 - DNA, 1409 bp, Roseomonas stagni
agtgaacgctggcggcatgcttaacacatgcaagtcgcacggtcagcaatggcagtggcggacgggtgaggaacgcgtagggatgtgtccaggggtgggggataacgttgggaaactgacgctaataccgcattcgaactgaggttcaaagccgtgaggcgcctttggagcaacctgcgtccgattaggtagttggtggggtaatggcttaccaagcctgcgatcggtagctggtctgagaggacgaccagccacactgggactgagacacggcccagactcctacgggaggcagcagtggggaatattggacaatgggcgcaagcctgatccagcaatgccgcgtggatgaagaaggtcttcggattgtaaagtcctttcgacggggacgatgatgacggtacccgtagaagaagccccggctaacttcgtgccagcagccgcggtaatacgaagggggctagcgttactcggaattactgggcgtaaagggcgcgtaggcggctctgtaagtcaggcgtgaaattcctgggctcaacctgggggctgcgcttgagactgtggggctagaggatggaagagggtcgtggaattcccagtgtagaggtgaaattcgtagatattgggaagaacaccggtggcgaaggcggcgacctggtccattactgacgctgaggcgcgacagcgtggggagcaaacaggattagataccctggtagtccacgccgtaaacgatgtgcgctggatgttggggcccttagggtctcagtgtcgtagctaacgcggtaagcgcaccgcctggggagtacggccgcaaggttgaaactcaaaggaattgacgggggcccgcacaagcggtggagcatgtggtttaattcgaagcaacgcgcagaaccttaccagctcttgacatggacaggaccgacgcagagatgcgttttccccgcaaggggcctgttgcacaggtgctgcatggctgtcgtcagctcgtgtcgtgagatgttgggttaagtcccgcaacgagcgcaaccctcgcctccagttgccagcacgtctgggtgggcactctggaggaactgccggtgacaagccggaggaaggtggggatgacgtcaagtcctcatggcccttatgggctgggctacacacgtgctacaatggcggtgacagagggaagccaggtcgcgaggccgagccgatccctaaaagccgtctcagttcagatcgtaccctgcaactcgggtacgtgaaggtggaatcgctagtaatcgcggatcagcacgccgcggtgaatacgttcccgggccttgtacacaccgcccgtcacaccatgggagttggttctaccttaagtggctgcgggaaccgcaaggacctaggtcaccacggtagggtcagcgactggggtg

SEQ ID NO: 2998 - DNA, 1388 bp, Roseovarius aestuarii
aacgaacgctggcggcaggcctaacacatgcaagtcgagcgcaccttcgggtgagcggcggacgggttagtaacgcgtgggaacgtacccttttctacggaatagccattggaaacgatgagtaataccgtatacgcccttcgggggaaagatttatcggagaaggatcggcccgcgttagattagatagttggtggggtaatggcctaccaagtctacgatctatagctggttttagaggatgatcagcaacactgggactgagacacggcccagactcctacgggaggcagcagtggggaatcttagacaatgggcgcaagcctgatctagccatgccgcgtgagtgatgaaggccttagggtcgtaaagctctttcgccagggatgataatgacagtacctggtaaagaaaccccggctaactccgtgccagcagccgcggtaatacggagggggttagcgttgttcggaattactgggcgtaaagcgtacgtaggcggattagaaagttaggggtgaaatcccagggctcaaccctggaactgcctctaaaactactagtctagagttcgagagaggtgagtggaactccgagtgtagaggtgaaattcgtagatattcggaagaacaccagtggcgaaggcggctcactggctcgatactgacgctgaggtacgaaagtgtggggagcaaacaggattagataccctggtagtccacaccgtaaacgatgaatgccagtcgtcgggcagtatactgttcggtgacacacctaacggattaagcattccgcctggggagtacggtcgcaagattaaaactcaaaggaattgacgggggcccgcacaagcggtggagcatgtggtttaattcgaagcaacgcgcagaaccttaccaacccttgacatcctgatcgcggttaccggagacggtttccttcagttcggctggatcagtgacaggtgctgcatggctgtcgtcagctcgtgtcgtgagatgttcggttaagtccggcaacgagcgcaacccacatccctagttgccagcagttcggctgggcactctatggaaactgcccgtgataagcgggaggaaggtgtggatgacgtcaagtcctcatggcccttacgggttgggctacacacgtgctacaatggcagtgacaatgggttaatcccaaaaaactgtctcagttcggattggggtctgcaactcgaccccatgaagtcggaatcgctagtaatcgcgtaacagcatgacgcggtgaatacgttcccgggccttgtacacaccgcccgtcacaccatgggagttgggtttacccgaaggccgtgcgccaacctttcgagggggcagcggaccacggtgagctcagcgactggggtg

SEQ ID NO: 2999 - DNA, 1389 bp, Roseovarius albus
aacgaacgctggcggcaggcctaacacatgcaagtcgagcgcgcccttcggggtgagcggcggacgggttagtaacgcgtgggaacgtacccagatctacggaatagcctttggaaacgaagagtaataccgtatacgcccttcgggggaaagatttatcggatttggatcggcccgcgttagattagatagttggtggggtaatggcctaccaagtctacgatctatagctggttttagaggatgatcagcaacactgggactgagacacggcccagactcctacgggaggcagcagtggggaatcttagacaatgggcgcaagcctgatctagccatgccgcgtgagtgatgaaggccctagggtcgtaaagctctttcgccagagatgataatgacagtatctggtaaagaaaccccggctaactccgtgccagcagccgcggtaatacggagggggttagcgttgttcggaattactgggcgtaaagcgcgcgtaggcggaccagaaagttgggggtgaaatcccggggctcaaccccggaactgcctccaaaactcctgatctagagttcgagagaggtgagtggaactccgagtgtagaggtgaaattcgtagatattcggaagaacaccagtggcgaaggcggctcactggctcgatactgacgctgaggtgcgaaagtgtggggagcaaacaggattagataccctggtagtccacaccgtaaacgatgaatgccagtcgtcgggtagtatactattcggtgacacacctaacggattaagcattccgcctggggagtacggtcgcaagattaaaactcaaaggaattgacgggggcccgcacaagcggtggagcatgtggtttaattcgaagcaacgcgcagaaccttaccaacccttgacatcctgatcgcggatactggagacagtttccttcatttagttggatcagtgacaggtgctgcatggctgtcgtcagctcgtgtcgtgagatgttcggttaagtccggcaacgagcgcaacccacatccctagttgccagcagttcggctgggcactctatggaaactgcccgtgataagcgggaggaaggtgtggatgacgtcaagtcctcatggcccttacgggttgggctacacacgtgctacaatggcagtgacaatgggttaatcccaaaaaactgtctcagttcggattggggtctgcaactcgaccccatgaagtcggaatcgctagtaatcgcgtaacagcatgacgcggtgaatacgttcccgggccttgtacacaccgcccgtcacaccatgggagttgggtttacccgaaggccgtgcgccaacctttcgagggggcagcggaccacggtgagctcagcgactggggtg

SEQ ID NO: 3000 - DNA, 1391 bp, Roseovarius atlanticus
aacgaacgctggcggcaggcctaacacatgcaagtcgagcgagaacttcggttctagcggcggacgggttagtaacgcgtgggaacgtgcccttcactacggaatagtcccgggaaactgggtttaataccgtatacgcccttcgggggaaagaatttcggtgaaggatcggcccgcgttagattagatagttggtggggtaatggcctaccaagtctacgatctatagctggttttagaggatgatcagcaacactgggactgagacacggcccagactcctacgggaggcagcagtggggaatcttagacaatgggcgcaagcctgatctagccatgccgcgtgagtgatgaaggccttagggtcgtaaagctctttcgccagggatgataatgacagtacctggtaaagaaaccccggctaactccgtgccagcagccgcggtaatacggagggggttagcgttgttcggaattactgggcgtaaagcgcgcgtaggcggattagaaagttgggggtgaaatcccagggctcaaccctggaactgcctccaaaactactagtctagagttcgagagaggtgagtggaactccgagtgtagaggtgaaattcgtagatattcggaagaacaccagtggcgaaggcggctcactggctcgatactgacgctgaggtgcgaaagtgtggggagcaaacaggattagataccctggtagtccacaccgtaaacgatgaatgccagtcgtcggcgcgcatgcgtgtcggtgacacacctaacggattaagcattccgcctggggagtacggtcgcaagattaaaactcaaaggaattgacgggggcccgcacaagcggtggagcatgtggtttaattcgaagcaacgcgcagaaccttaccaacccttgacatcctgatcgcggtttctcgagagagattccttcagttcggctggatcagtgacaggtgctgcatggctgtcgtcagctcgtgtcgtgagatgttcggttaagtccggcaacgagcgcaacccacatccctagttgccagcagttcggctgggcactctatggaaactgcccgtgataagcgggaggaaggtgtggatgacgtcaagtcctcatggcccttacgggttgggctacacacgtgctacaatggtggtaacagagggttaatccctaaaaaccatctcagttcggattgttctctgcaactcgagagcatgaagtcggaatcgctagtaatcgcgtaacagcatgacgcggtgaatacgttcccgggccttgtacacaccgcccgtcacaccatgggagttgggtttacccgaagacggtgcgccaacctgttcgcagggggcagctggccacggtaagctcagcgactggggtg

SEQ ID NO: 3001 - DNA, 1392 bp, Roseovarius azorensis
aacgaacgctggcggcaggcctaacacatgcaagtcgagcgcgcccttcggggtgagcggcggacgggtgagtaacgcgtgggaacgtacccttttctgcggaatagcctctggaaacggagagtaataccgcatacgcccttttggggaaagatttatcggggaaggatcggcccgcgttagattaggtagttggtggggtaatggcctaccaagcctacgatctatagctggttttagaggatgatcagccacactgggactgagacacggcccagactcctacgggaggcagcagtggggaatcttagacaatgggcgcaagcctgatctagccatgccgcgtgagtgacgaaggccttagggtcgtaaagctctttcgcctgtgatgataatgacagtagcaggtaaagaaaccccggctaactccgtgccagcagccgcggtaatacggagggggttagcgttgttcggaattactgggcgtaaagcgcacgtaggcggatcagaaagttgggggtgaaatcccggggctcaaccccggaacggcctccaaaactcctgatctggagttcgagagaggtgagtggaattccgagtgtagaggtgaaattcgtagatattcggaggaacatcagtggcgaaggcggctcactggctcgatactgacgctgaggtgcgaaagtgtggggagcaaacaggattagataccctggtagtccacaccgtaaacgatgaatgccagtcgtcggatagtatactattcggtgacacacctaacggattaagcattccgcctggggagtacggtcgcaagattaaaactcaaaggaattgacgggggcccgcacaagcggtggagcatgtggtttaattcgaagcaacgcgcagaaccttaccaacccttgacatactcgtcgtagttaccagagatggtttcgtcagttcggctggacgagatacaggtgctgcatggctgtcgtcagctcgtgtcgtgagatgttcggttaagtccggcaacgagcgcaacccacatccccagttgccagcaggtcatgctgggcactctgtggaaactgcccgtgataagcgggaggaaggtgtggatgacgtcaagtcctcatggcccttacgggttgggctacacacgtgctacaatggtggtgacaatgggttaatccccaaaagccatctcagttcggattggggtctgcaactcgaccccatgaagtcggaatcgctagtaatcgcgtaacagcatgacgcggtgaatacgttcccgggccttgtacacaccgcccgtcacaccatgggagttggttttacccgaaggtggtgcgccaacctgttcgcaggaggcagccaaccacggtaggatcagcgactggggtg

SEQ ID NO: 3002 - DNA, 1391 bp, Roseovarius gaetbuli
aacgaacgctggcggcaggcctaacacatgcaagtcgagcgagaccttcgggtctagcggcggacgggttagtaacgcgtgggaacgtacccttctctaaggaatagccactggaaacggtgagtaataccttatacgcccttcgggggaaagatttatcggagaaggatcggcccgcgtaagattagatagttggtggggtaatggcctaccaagtctacgatctttagctggttttagaggatgatcagcaacactgggactgagacacggcccagactcctacgggaggcagcagtggggaatcttagacaatgggcgcaagcctgatctagccatgccgcgtgtgtgacgaaggccttagggtcgtaaagcactttcgcctgtgatgataatgacagtagcaggtaaagaaaccccggctaactccgtgccagcagccgcggtaatacggagggggttagcgttgttcggaattactgggcgtaaagcgcacgtaggcggattggaaagtatggggtgaaatcccagggctcaaccctggaactgcctcataaacttccagtctagagttcgagagaggtgagtggaattccgagtgtagaggtgaaattcgtagatattcggaggaacaccagtggcgaaggcggctcactggctcgatactgacgctgaggtgcgaaagtgtggggagcaaacaggattagataccctggtagtccacaccgtaaacgatgaatgccagtcgtcggcaagcatgcttgtcggtgacacacctaacggattaagcattccgcctggggagtacggtcgcaagattaaaactcaaaggaattgacgggggcccgcacaagcggtggagcatgtggtttaattcgaagcaacgcgcagaaccttaccaacccttgacatactcatcgtcgctccagagatggagctttcagttcggctggatgagatacaggtgctgcatggctgtcgtcagctcgtgtcgtgagatgttcggttaagtccggcaacgagcgcaacccacatccctagttgccagcaggttaagctgggcactctatggaaactgcccgtgataagcgggaggaaggtgtggatgacgtcaagtcctcatggcccttacgggttgggctacacacgtgctacaatggtggtgacaatgggttaatcccaaaaagccatctcagttcggattggggtctgcaactcgaccccatgaagtcggaatcgctagtaatcgcgtaacagcatgacgcggtgaatacgttcccgggccttgtacacaccgcccgtcacaccatgggagttggatctacccgaaggccgtgcgccaacctcttcggagggggcagcggaccacggtgggttcagcgactggggtg

SEQ ID NO: 3003 - DNA, 1389 bp, Roseovarius halotolerans
aacgaacgctggcggcaggcctaacacatgcaagtcgaacgagaccttcgggtctagtggcggacgggttagtaacgcgtgggaacgtgcctttcactacggaatagtcccgggaaactgggtttaataccgtatacgcccttcgggggaaagaatttcggtgaaagatcggcccgcgttagattaggtagttggtggggtaatggcctaccaagcctacgatctatagctggttttagaggatgatcagcaacactgggactgagacacggcccagactcctacgggaggcagcagtggggaatcttggacaatgggcgcaagcctgatccagccatgccgcgtgagtgatgaaggccttagggtcgtaaagctctttcgccagggatgataatgacagtacctggtaaagaaaccccggctaactccgtgccagcagccgcggtaatacggagggggttagcgttgttcggaattactgggcgtaaagcgcacgtaggcggattggaaagttgggggtgaaatcccagggctcaaccctggaactgcctccaaaactaccagtctagagttcgagagaggtgagtggaattccgagtgtagaggtgaaattcgtagatattcggaggaacaccagtggcgaaggcggctcactggctcgatactgacgctgaggtgcgaaagtgtggggagcaaacaggattagataccctggtagtccacaccgtaaacgatgaatgccagtcgtcggatagcatgctattcggtgacacacctaacggattaagcattccgcctggggagtacggtcgcaagattaaaactcaaaggaattgacgggggcccgcacaagcggtggagcatgtggtttaattcgaagcaacgcgcagaaccttaccaacccttgacatcctgatcgcggttacgagagatcgtttccttcagttcggctggatcagtgacaggtgctgcatggctgtcgtcagctcgtgtcgtgagatgttcggttaagtccggcaacgagcgcaacccacatccctagttgccagcagttcggctgggcactctatggaaactgcccgtgataagcgggaggaaggtgtggatgacgtcaagtcctcatggcccttacgggttgggctacacacgtgctacaatggcagtgacaatgggttaatcccaaaaaactgtctcagttcggattggggtctgcaactcgaccccatgaagtcggaatcgctagtaatcgcgtaacagcatgacgcggtgaatacgttcccgggccttgtacacaccgcccgtcacaccatgggagttgggtttacccgaaggcggtgcgccaacctttcgagggggcagccgaccacggtaagctcagcgactggggtg

SEQ ID NO: 3004 - DNA, 1389 bp, Roseovarius indicus
aacgaacgctggcggcaggcttaacacatgcaagtcgaacgagatcttcggatctagtggcggacgggtgagtaacgcgtgggaacatgcccttcactacggaatagtcccgggaaactgggtttaataccgtatacgcccttcgggggaaagaatttcggtgaaggattggcccgcgttagattaggtagttggtggggtaatggcctaccaagcctacgatctatagctggttttagaggatgatcagccacactgggactgagacacggcccagactcctacgggaggcagcagtggggaatcttagacaatgggcgaaagcctgatctagccatgccgcgtgagtgacgaaggccttagggtcgtaaagctctttcgccagggatgataatgacagtacctggtaaagaaaccccggctaactccgtgccagcagccgcggtaatacggagggggttagcgttgttcggaattactgggcgtaaagcgcgcgtaggcggattggaaagttgggggtgaaatcccagggctcaaccctggaactgcctccaaaactactagtctagagttcgagagaggtgagtggaactccgagtgtagaggtgaaattcgtagatattcggaagaacaccagtggcgaaggcggctcactggctcgatactgacgctgaggtgcgaaagtgtggggagcaaacaggattagataccctggtagtccacaccgtaaacgatgaatgccagtcgtcggatagcatgctattcggtgacacacctaacggattaagcattccgcctggggagtacggccgcaaggttaaaactcaaagaaattgacgggggcccgcacaagcggtggagcatgtggtttaattcgaagcaacgcgcagaaccttaccaacccttgacatcctgatcgcggttacgagagatcgtttccttcagttcggctggatcagtgacaggtgctgcatggctgtcgtcagctcgtgtcgtgagatgttcggttaagtccggcaacgagcgcaacccacatccctagttgccagcagttcggctgggcactctatggaaactgcccgtgataagcgggaggaaggtgtggatgacgtcaagtcctcatggcccttacgggttgggctacacacgtgctacaatggtggtgacagtgggttaatccccaaaagccatctcagttcggattgtcgtctgcaactcgacggcatgaagtcggaatcgctagtaatcgcgtaacagcatgacgcggtgaatacgttcccgggccttgtacacaccgcccgtcacaccatgggagttgggtttacccgaagacggtgcgccaacctttatagggggcagctggccacggtaagctcagcgactggggtg

SEQ ID NO: 3005 - DNA, 1389 bp, Roseovarius litoreus
aacgaacgctggcggcaggcctaacacatgcaagtcgaacgagaccttcgggtctagtggcggacgggttagtaacgcgtgggaacgtgcctttcactacggaatagtcccgggaaactgggtttaataccgtatacgcccttcgggggaaagaatttcggtgaaagatcggcccgcgttagattaggtagttggtggggtaatggcctaccaagcctacgatctatagctggttttagaggatgatcagcaacactgggactgagacacggcccagactcctacgggaggcagcagtggggaatcttggacaatgggcgcaagcctgatccagccatgccgcgtgagtgatgaaggccttagggtcgtaaagctctttcgccagggatgataatgacagtacctggtaaagaaaccccggctaactccgtgccagcagccgcggtaatacggagggggttagcgttgttcggaattactgggcgtaaagcgcgcgtaggcggattggaaagttgggggtgaaatcccagggctcaaccctggaacggcctccaaaactcccagtcttgagttcgagagaggtgagtggaattccgagtgtagaggtgaaattcgtagatattcggaggaacaccagtggcgaaggcggctcactggctcgatactgacgctgaggtgcgaaagtgtggggagcaaacaggattagataccctggtagtccacaccgtaaacgatgaatgccagtcgtcggatagcatgctattcggtgacacacctaacggattaagcattccgcctggggagtacggtcgcaagattaaaactcaaaggaattgacgggggcccgcacaagcggtggagcatgtggtttaattcgaagcaacgcgcagaaccttaccaacccttgacatccctgtcgcgggagccggagacggttcctttcagttcggctggacaggtgacaggtgctgcatggctgtcgtcagctcgtgtcgtgagatgttcggttaagtccggcaacgagcgcaacccacatccctagttgccagcagttcggctgggcactctatggaaactgcccgtgataagcgggaggaaggtgtggatgacgtcaagtcctcatggcccttacgggttgggctacacacgtgctacaatggcagtgacaatgggttaatcccaaaaagctgtctcagttcggattggggtctgcaactcgaccccatgaagtcggaatcgctagtaatcgcgtaacagcatgacgcggtgaatacgttcccgggccttgtacacaccgcccgtcacaccatgggagttgggtttacccgaaggcggtgcgccaacctttcgaggaggcagccgaccacggtaagctcagcgactggggtg

SEQ ID NO: 3006 - DNA, 1392 bp, Roseovarius lutimaris
aacgaacgctggcggcaggcctaacacatgcaagtcgagcgagaccttcgggtctagcggcggacgggttagtaacgcgtgggaacgtacccttttctaaggaatagccactggaaacggtgagtaataccttatacgcccttcgggggaaagatttatcggagaaggatcggcccgcgtaagattagatagttggtggggtaatggcctaccaagtctacgatctttagctggttttagaggatgatcagcaacactgggactgagacacggcccagactcctacgggaggcagcagtggggaatcttagacaatgggcgcaagcctgatctagccatgccgcgtgagtgacgaaggccttagggtcgtaaagctctttcgcctgtgatgataatgacagtagcaggtaaagaaaccccggctaactccgtgccagcagccgcggtaatacggagggggttagcgttgttcggaattactgggcgtaaagcgcacgtaggcggattggaaagttgggggtgaaatcccagggctcaaccctggaactgcctccaaaacttccagtctagagttcgagagaggtgagtggaattccgagtgtagaggtgaaattcgtagatattcggaggaacaccagtggcgaaggcggctcactggctcgatactgacgctgaggtgcgaaagtgtggggagcaaacaggattagataccctggtagtccacaccgtaaacgatgaatgccagtcgtcggcaagcatgcttgtcggtgacacacctaacggattaagcattccgcctggggagtacggtcgcaagattaaaactcaaaggaattgacgggggcccgcacaagcggtggagcatgtggtttaattcgaagcaacgcgcagaaccttaccaacccttgacatactcatcatactttccagagatggatcggtcagttcggctggatgagatacaggtgctgcatggctgtcgtcagctcgtgtcgtgagatgttcggttaagtccggcaacgagcgcaacccacatccctagttgccagcaggttaagctgggcactctatggaaactgcccgtgataagcgggaggaaggtgtggatgacgtcaagtcctcatggcccttacgggttgggctacacacgtgctacaatggtggtgacaatgggttaatcccaaaaagccatctcagttcggattggggtctgcaactcgaccccatgaagtcggaatcgctagtaatcgcgtaacagcatgacgcggtgaatacgttcccgggccttgtacacaccgcccgtcacaccatgggagttgggtttacccgaaggccgtgcgccaacctcttcggagggggcagcggaccacggtgagctcagcgactggggtg

SEQ ID NO: 3007 - DNA, 1391 bp, Roseovarius marisflavi; identical to SEQ ID NO: 3002

SEQ ID NO: 3008 - DNA, 1390 bp, Roseovarius mucosus
aacgaacgctggcggcaggcctaacacatgcaagtcgagcgaaccttcgggttagcggcggacgggtgagtaacgcgtgggaacgtaccctcttctgcgggatagccactggaaacggtgagtaataccgcatacgcccttcgggggaaagatttatcggaggaggatcggcccgcgttggattaggtagttggtggggtaatggcctaccaagcctacgatccatagctggttttagaggatgatcagccacactgggactgagacacggcccagactcctacgggaggcagcagtggggaatcttagacaatgggcgcaagcctgatctagccatgccgcgtgagtgacgaaggccttagggtcgtaaagctctttcgccagagatgataatgacagtatctggtaaagaaaccccggctaactccgtgccagcagccgcggtaatacggagggggttagcgttgttcggaattactgggcgtaaagcgcacgtaggcggattggaaagttgggggtgaaatcccagggctcaaccctggaactgcctccaaaactcccagtctggagttcgagagaggtgagtggaattccgagtgtagaggtgaaattcgtagatattcggaggaacaccagtggcgaaggcggctcactggctcgatactgacgctgaggtgcgaaagtgtggggagcaaacaggattagataccctggtagtccacaccgtaaacgatgaatgccagtcgtcggcaagcatgcttgtcggtgacacacctaacggattaagcattccgcctggggagtacggtcgcaagattaaaactcaaaggaattgacgggggcccgcacaagcggtggagcatgtggtttaattcgaagcaacgcgcagaaccttaccaacccttgacatggatatcgtagttaccagagatggtttcgtcagttcggctggatatcacacaggtgctgcatggctgtcgtcagctcgtgtcgtgagatgttcggttaagtccggcaacgagcgcaacccacatccctagttgccagcaggttaagctgggcactctatggaaactgcccgtgataagcgggaggaaggtgtggatgacgtcaagtcctcatggcccttacgggttgggctacacacgtgctacaatggtggtgacaatgggttaatcccaaaaagccatctcagttcggattggggtctgcaactcgaccccatgaagtcggaatcgctagtaatcgcgtaacagcatgacgcggtgaatacgttcccgggccttgtacacaccgcccgtcacaccatgggagttgggtctacccgacgacggtgcgctaacctcgcaagaggaggcagccggccacggtaggctcagcgactggggtg

SEQ ID NO: 3009 - DNA, 1389 bp, Roseovarius nanhaiticus
aacgaacgctggcggcaggcttaacacatgcaagtcgagcgcaccttcgggtgagcggcggacgggttagtaacgcgtgggaacgtgcccttctctacggaatagtctcgggaaactgagggtaataccgtatacgcccttcgggggaaagatttatcggagaaggatcggcccgcgttagattagatagttggtggggtaatggcctaccaagtctacgatctatagctggttttagaggatgatcagcaacactgggactgagacacggcccagactcctacgggaggcagcagtggggaatcttagacaatgggcgcaagcctgatctagccatgccgcgtgagtgatgaaggtcttaggatcgtaaagctctttcgccagggatgataatgacagtacctggtaaagaaaccccggctaactccgtgccagcagccgcggtaatacggagggggttagcgttgttcggaattactgggcgtaaagcgcgcgtaggcggattagaaagtatggggtgaaatcccagggctcaaccctggaactgcctcataaactactagtctagagttcgagagaggtgagtggaattgtgagtgtagaggtgaaattcgtagatattcacaggaacaccagtggcgaaggcggctcactggctcgatactgacgctgaggtgcgaaagtgtggggagcaaacaggattagataccctggtagtccacaccgtaaacgatgaatgccagtcgtcgggcagtatactgttcggtgacacacctaacggattaagcattccgcctggggagtacggtcgcaagattaaaactcaaaggaattgacgggggcccgcacaagcggtggagcatgtggtttaattcgaagcaacgcgcagaaccttaccaacccttgacatggacatcatactttcgagagatcgatcggtcagttcggctggatgtcacacaggtgctgcatggctgtcgtcagctcgtgtcgtgagatgttcggttaagtccggcaacgagcgcaacccacatccctagttgccagcagttcggctgggcactctatggaaactgcccgtgataagcgggaggaaggtgtggatgacgtcaagtcctcatggcccttacgggttgggctacacacgtgctacaatggcagtgacaatgggttaatccccaaaagctgtctcagttcggattggggtctgcaactcgaccccatgaagtcggaatcgctagtaatcgcgtaacagcatgacgcggtgaatacgttcccgggccttgtacacaccgcccgtcacaccatgggagttgggcctacccgacggccgtgcgctaacctcttcggaggaggcagcggaccacggtaagctcagcgactggggtg

SEQ ID NO: 3010 - DNA, 1388 bp, Roseovarius nubinhibens
aacgaacgctggcggcaggcctaacacatgcaagtcgagcgcaccttcgggtgagcggcggacgggttagtaacgcgtgggaacgtacccagatctaaggaatagccactggaaacggtgagtaataccttatacgcccttcgggggaaagatttatcggatttggatcggcccgcgttagattaggtagttggtggggtaatggcctaccaagcctacgatctatagctggttttagaggatgatcagcaacactgggactgagacacggcccagactcctacgggaggcagcagtggggaatcttagacaatgggggcaaccctgatctagccatgccgcgtgagtgaagaaggtcttaggatcgtaaagctctttcgccagggatgataatgacagtacctggtaaagaaaccccggctaactccgtgccagcagccgcggtaatacggagggggttagcgttgttcggaattactgggcgtaaagcgcgcgtaggcggatcagaaagttgggggtgaaatcccagggctcaaccctggaactgcctccaaaactcctggtcttgagttcgagagaggtgagtggaactccgagtgtagaggtgaaattcgtagatattcggaagaacaccagtggcgaaggcggctcactggctcgatactgacgctgaggtgcgaaagtgtggggagcaaacaggattagataccctggtagtccacaccgtaaacgatgaatgccagtcgtcgggtagtatactattcggtgacacacctaacggattaagcattccgcctggggagtacggtcgcaagattaaaactcaaaggaattgacgggggcccgcacaagcggtggagcatgtggtttaattcgaagcaacgcgcagaaccttaccaacccttgacatcctgatcgcggatcgtagagatactttccttcagttcggctggatcagtgacaggtgctgcatggctgtcgtcagctcgtgtcgtgagatgttcggttaagtccggcaacgagcgcaacccacatccctagttgccagcagttcggctgggcactctatggaaactgcccgtgataagcgggaggaaggtgtggatgacgtcaagtcctcatggcccttacgggttgggctacacacgtgctacaatggcagtgacaatgggttaatcccaaaaaactgtctcagttcggattggggtctgcaactcgaccccatgaagtcggaatcgctagtaatcgcgtaacagcatgacgcggtgaatacgttcccgggccttgtacacaccgcccgtcacaccatgggagttgggtttacccgaaggccgtgcgccaacctttcgagggggcagcggaccacggtgagctcagcgactggggtg

SEQ ID NO: 3011 - DNA, 1389 bp, Roseovarius pacificus
aacgaacgctggcggcaggcctaacacatgcaagtcgaacgaagccttcgggcttagtggcggacgggttagtaacgcgtgggaacgtgcctttcactacggaatagtcccgggaaactgggtttaataccgtatacgcccttcgggggaaagaatttcggtgaaagatcggcccgcgttagattaggtagttggtggggtaatggcctaccaagcctacgatctatagctggttttagaggatgatcagcaacactgggactgagacacggcccagactcctacgggaggcagcagtggggaatcttggacaatgggcgcaagcctgatccagccatgccgcgtgagtgatgaaggccttagggtcgtaaagctctttcgccagggatgataatgacagtacctggtaaagaaaccccggctaactccgtgccagcagccgcggtaatacggagggggttagcgttgttcggaattactgggcgtaaagcgcgcgtaggcggatcggaaagttgggggtgaaatcccggggctcaaccccggaactgcctccaaaactatcggtctagagttcgagagaggtgagtggaattccgagtgtagaggtgaaattcgtagatattcggaggaacaccagtggcgaaggcggctcactggctcgatactgacgctgaggtgcgaaagtgtggggagcaaacaggattagataccctggtagtccacaccgtaaacgatgaatgccagtcgtcgggcagtatactgttcggtgacacacctaacggattaagcattccgcctggggagtacggtcgcaagattaaaactcaaaggaattgacgggggcccgcacaagcggtggagcatgtggtttaattcgaagcaacgcgcagaaccttaccaacccttgacatcctgatcgcggttacgagagatcgtttccttcagttcggctggatcagtgacaggtgctgcatggctgtcgtcagctcgtgtcgtgagatgttcggttaagtccggcaacgagcgcaacccacatccctagttgccagcagttcggctgggcactctatggaaactgcccgtgataagcgggaggaaggtgtggatgacgtcaagtcctcatggcccttacgggttgggctacacacgtgctacaatggcagtgacaatgggttaatccccaaaaactgtctcagttcggattggggtctgcaactcgaccccatgaagtcggaatcgctagtaatcgcgtaacagcatgacgcggtgaatacgttcccgggccttgtacacaccgcccgtcacaccatgggagttgggtttacccgaaggcggtgcgccaacctttcgagggggcagccgaccacggtaagctcagcgactggggtg

SEQ ID NO: 3012 - DNA, 1392 bp, Roseovarius tolerans
aacgaacgctggcggcaggcctaacacatgcaagtcgagcgaacccttcggggttagcggcggacgggtgagtaacgcgtgggaacgtaccctcttctgcggaatagccactggaaacggtgagtaataccgcatacgcccttcgggggaaagatttatcggaggaggatcggcccgcgttggattaggtagttggtggggtaatggcctaccaagcctacgatccatagctggttttagaggatgatcagccacactgggactgagacacggcccagactcctacgggaggcagcagtggggaatcttagacaatgggcgcaagcctgatctagccatgccgcgtgtgtgacgaaggccttagggtcgtaaagcactttcgcctgtgatgataatgacagtagcaggtaaagaaaccccggctaactccgtgccagcagccgcggtaatacggagggggttagcgttgttcggaattactgggcgtaaagcgcacgtaggcggatcagaaagttgggggtgaaatcccggggctcaaccccggaactgcctccaaaacttctggtctggagttcgagagaggtgagtggaattgcgagtgtagaggtgaaattcgtagatattcgcaggaacaccagtggcgaaggcggctcactggctcgatactgacgctgaggtgcgaaagtgtggggagcaaacaggattagataccctggtagtccacaccgtaaacgatgaatgccagtcgtcggcaagcatgcttgtcggtgacacacctaacggattaagcattccgcctggggagtacggtcgcaagattaaaactcaaaggaattgacgggggcccgcacaagcggtggagcatgtggtttaattcgaagcaacgcgcagaaccttaccaacccttgacatcctgatcgcggatcgcggagacgctttccttcagttcggctggatcagtgacaggtgctgcatggctgtcgtcagctcgtgtcgtgagatgttcggttaagtccggcaacgagcgcaacccacatccctagttgccagcagttcggctgggcactctatggaaactgcccgtgataagcgggaggaaggtgtggatgacgtcaagtcctcatggcccttacgggttgggctacacacgtgctacaatggtggtgacaatgggttaatccccaaaaaccatctcagttcggattggggtctgcaactcgaccccatgaagtcggaatcgctagtaatcgcgtaacagcatgacgcggtgaatacgttcccgggccttgtacacaccgcccgtcacaccatgggagttgggtttacccgacggccgtgcgctaacctcttcggaggaggcagcggaccacggtaagctcagcgactggggtg

SEQ ID NO: 3013 - DNA, 1465 bp, Rouxiella badensis
attgaacgctggcggcaggcctaacacatgcaagtcgagcggtagcacgggagagcttgctctctgggtgacgagcggcggacgggtgagtaatgtctgggaaactgcctgatggagggggataactactggaaacggtagctaataccgcatgatgtcgcaagaccaaagtgggggaccttcgggcctcacgccatcggatgtgcccagatgggattagctagtaggtggggtaatggctcacctaggcgacgatccctagctggtctgagaggatgaccagccacactggaactgagacacggtccagactcctacgggaggcagcagtggggaatattgcacaatgggcgcaagcctgatgcagccatgccgcgtgtgtgaagaaggccttagggttgtaaagcactttcagcgaggaggaaggcgttgtagttaataactgcaacgattgacgttactcgcagaagaagcaccggctaactccgtgccagcagccgcggtaatacggagggtgcaagcgttaatcggaattactgggcgtaaagcgcacgcaggcggtttgttaagtcagatgtgaaatccccgagcttaacttgggaactgcatttgaaactggcaagctagagtcttgtagaggggggtagaattccaggtgtagcggtgaaatgcgtagagatctggaggaataccggtggcgaaggcggccccctggacaaagactgacgctcaggtgcgaaagcgtggggagcaaacaggattagataccctggtagtccacgctgtaaacgatgtcgacttggaggttgtgcccttgaggcgtggcttccggagctaacgcgttaagtcgaccgcctggggagtacggccgcaaggttaaaactcaaatgaattgacgggggcccgcacaagcggtggagcatgtggtttaattcgatgcaacgcgaagaaccttacctactcttgacatccagagaatttgctagagatagcttagtgccttcgggaactctgagacaggtgctgcatggctgtcgtcagctcgtgttgtgaaatgttgggttaagtcccgcaacgagcgcaacccttatcctttgttgccagcacgtaatggtgggaactcaaaggagactgccggtgataaaccggaggaaggtggggatgacgtcaagtcatcatggcccttacgagtagggctacacacgtgctacaatggcgtatacaaagagaagcgaactcgcgagagcaagcggacctcataaagtacgtcgtagtccggattggagtctgcaactcgactccatgaagtcggaatcgctagtaatcgtagatcagaatgctacggtgaatacgttcccgggccttgtacacaccgcccgtcacaccatgggagtgggttgcaaaagaagtaggtagcttaaccttcgggagggcgcttaccactttgtgattcatgactggggtg

SEQ ID NO: 3014 - DNA, 1465 bp, Rouxiella silvae
attgaacgctggcggcaggcctaacacatgcaagtcgagcggtagcacgggagagcttgctctctgggtgacgagcggcggacgggtgagtaatgtctgggaaactgcctgatggagggggataactactggaaacggtagctaataccgcatgatgtcgcaagaccaaagtgggggaccttcgggcctcacgccatcggatgtgcccagatgggattagctagtaggtggggtaatggctcacctaggcgacgatccctagctggtctgagaggatgaccagccacactggaactgagacacggtccagactcctacgggaggcagcagtggggaatattgcacaatgggcgcaagcctgatgcagccatgccgcgtgtgtgaagaaggccttagggttgtaaagcactttcagcgaggaggaaggcgttgcagttaataactgcaacgattgacgttactcgcagaagaagcaccggctaactccgtgccagcagccgcggtaatacggagggtgcaagcgttaatcggaattactgggcgtaaagcgcacgcaggcggtttgttaagtcagatgtgaaatccccgagcttaacttgggaactgcatttgaaactggcaagctagagtcttgtagaggggggtagaattccaggtgtagcggtgaaatgcgtagagatctggaggaataccggtggcgaaggcggccccctggacaaagactgacgctcaggtgcgaaagcgtggggagcaaacaggattagataccctggtagtccacgctgtaaacgatgtcgacttggaggttgtgcccttgaggcgtggcttccggagctaacgcgttaagtcgaccgcctggggagtacggccgcaaggttaaaactcaaatgaattgacgggggcccgcacaagcggtggagcatgtggtttaattcgatgcaacgcgaagaaccttacctactcttgacatccacggaattcgctagagatagcttagtgccttcgggaaccgtgagacaggtgctgcatggctgtcgtcagctcgtgttgtgaaatgttgggttaagtcccgcaacgagcgcaacccttatcctttgttgccagcacgtaatggtgggaactcaaaggagactgccggtgataaaccggaggaaggtggggatgacgtcaagtcatcatggcccttacgagtagggctacacacgtgctacaatggcatatacaaagagaagcaaactcgcgagagcaagcggacctcataaagtatgtcgtagtccggattggagtctgcaactcgactccatgaagtcggaatcgctagtaatcgtagatcagaatgctacggtgaatacgttcccgggccttgtacacaccgcccgtcacaccatgggagtgggttgcaaaagaagtaggtagcttaaccttcgggagggcgcttaccactttgtgattcatgactggggtg

SEQ ID NO: 3015 - DNA, 1389 bp, Rubellimicrobium roseum
aacgaacgctggcggcaggcttaacacatgcaagtcgagcgggcccttcggggtcagcggcggacgggttagtaacgcgtgggaacgtgccttttgcttcggaatagccctgggaaactgggggtaataccggatgtgccctgagggggaaagatttatcggcaagagatcggcccgcgtctgattaggtagttggtggggtaatggcccaccaagccgacgatcggtagctggtttgagaggatgatcagcaacactgggactgagacacggcccagactcctacgggaggcagcagtggggaatcttagacaatgggcgcaagcctgatctagccatgccgcgtgggtgatgaaggccttagggtcgtaaagccctttcgccggggaagataatgacggtacccggtaaagaaaccccggctaactccgtgccagcagccgcggtaatacggagggggttagcgttgttcggaatgactgggcgtaaagcgcgcgtaggcggatcatcaagtcgggggtgaaatcccggggctcaaccccggaatggccttcgagactggtggtcttgagttcgagagaggtgagtggaattccgagtgtagaggtgaaattcgtagatattcggaggaacaccagtggcgaaggcggctcactggctcgatactgacgctgaggtgcgaaagcgtggggagcaaacaggattagataccctggtagtccacgccgtaaacgatgaatgccagacgtcggagggcttgcccttcggtgtcacacctaacggattaagcattccgcctggggagtacggtcgcaagattaaaactcaaaggaattgacgggggcccgcacaagcggtggagcatgtggtttaattcgaagcaacgcgcagaaccttaccaacccttgacatcccctgaccgccggtgagagccggttttcccgcaagggacagggagacaggtgctgcatggctgtcgtcagctcgtgtcgtgagatgttcggttaagtccggcaacgagcgcaacccacacccttggttgccagcaggtcaaactgggcactttaggggaactgcccgtgataagcgggaggaaggtgtggatgacgtcaagtcctcatggcccttacgggttgggctacacacgtgctacaatggtggtgacagagggtttatccccaaaagccatctcagttcggattgtcgtctgcaactcgacggcatgaagtcggaatcgctagtaatcgcgtaacagcacgacgcggtgaatacgttcccgggccttgtacacaccgcccgtcacaccatgggagttgggttgacccgaagacggtgcgccgacctcgcaagagggggcagccggccacggtcagctcagcgactggggtg

SEQ ID NO: 3016 - DNA, 1411 bp, Rubidibacter lacunae
gatgaacgctggcggtcggcctaacacatgcaagtcgaacgaagtcttcggacttagtggcggacgggtgagtaacacgtgagaatctgccctctggagggggacaaccgttggaaacggcggctaataccccatatgccttcgggtgaaacgctccggcgccagaggaggagctcgcggccgattagctagttggtggggtaacggcctaccaaggcagcgatcggtagctggtctgagaggacgagcagccacactgggactgagacacggcccagactcctacgggaggcagcagtggggaattttccgcaatgggcgaaagcctgacggagccagaccgcgtgcgggaagaaggcctttgggttgtaaaccgcttttctcagggaagaagacagtgacggtacctgaggaatcagcctcggctaactccgtgccagcagccgcggtaatacggaggaggcaagcgttatccggaattattgggcgtaaagcgttcgcaggcggcctgacaagtctgctgtcaaagcccgcggcttaaccgcggagaggcagtggaaactgccaggctagagtgcggtaggggtagggggaattcccagtgtagcggtgaaatgcgtagagattgggaagaacaccagtggcgaaagcgccctactggaccgcaactgacgctcagggacgaaagctagggtagcgaaagggattagatacccctgtagtcctagccgtaaacgatggagactaggtgtggctcgtatcgacccgagccgtgccgtagctaacgcgttaagtctcccgcctggggagtacgcgcgcaagcgtgaaactcaaaggaattgacgggggcccgcacaagcggtggaggatgtggtttaattcgatgcaacgcgaagaaccttaccagggcttgacatccggcgaacctttgggaaaccgaagggtgccttcgggagcgccgtgacaggtggtgcatggctgtcgtcagctcgtgtcgtgagatgttgggttaagtcccgcaacgagcgcaaccctcgtccttagttgccagcatttagttgggcactctaaggagactgctggtgacaaaccggaggaaggtggggacgacgtcaagtcagcatgccccttatgccctgggctacacacgtcctacaatggtcgggacaacgggcagcgaacccgcgagggcgagcgaatcccagcaaacccggtctcagttcagattgcaggctgcaactcgcctgcatgaaggaggaatcgctagtaatcgcaggtcagcatactgcggtgaattcgttcccgggccttgtacacaccgcccgtcacaccatggaagctggccacgcccgaagtcgttactctaacctacgggaggagggcgccgaaggcagggttggtgactggggtg

SEQ ID NO: 3017 - DNA, 1422 bp, Rubinisphaera brasiliensis
aatgaacgttggcggcatggattaggcatgcaagtcgagcgagaagctctcttcggagagtggacagcggcaaacggggtagtaaggcgtcgatatgaaccctcaggtctggaatagccattggaaacgatgggtaatgccggataatccctccggggtaaaggtccgccgcctgaggaccggtcgacgtgatactaggtagttggtgaggtaatggctcaccaagcctacgatgtctagggggtgtgagagcatggcccccaccactgggactgagacactgcccagacacctacgggtggctgcagtcgagaatctttggcaatgggcgaaagcctgaccaagcgatgccgcgtgcgggatgaaggccttcgggttgtaaaccgctgtcaggggggatgaaacttcggttgacagagccccagaggaagcacgggctaagtacgtgccagcagccgcggtaacacgtactgtgcgaacgttattcggaatcactgggcttaaagggtgcgtaggcggcctggatagtcagatgtgaaatcccacggctcaaccgtggaactgcatttgaaactgccaggcttgagtgagacaggggtgtgtggaacttctcgtggagcggtgaaatgtgttgatatgagaaggaacaccggtggcgaaagcgacacactgggtcttaactgacgctgaggcacgaaagccaggggagcgaacgggattagataccccggtagtcctggctgtaaacgttgagtactagttggtgggaacttcggttctcacggacgtagcaaaagtgttaagtactccgcctggggagtatggtcgcaaggctgaaactcaaaggaattgacgggggctcacacaagcggtggagcatgtggcttaattcgaggcaacgcgaagaaccttatcctagacttgacatgcatggattagctggctgaaaggtcagtgacgccttcgggtggaacatgcacaggtgctgcatggctgtcgtcagctcgtgccgtgaggtgttgggttaagtccttgaacgagcgcaacccctgtcgccagttgccagcaagtaatgttggggactctggcgagaccgccggtgttaaaccggaggaaggtggggacgacgtcaagtcatcatggcctttatgtctagggctgcacacgtgctacaatgcggcgtacaaagggaagccaacccgcgagggggagcaaatctcagaaagcgccgctcagttcggattgtaggctgcaactcgcctacatgaagctggaatcgctagtaatcgcaggtcagcaatactgcggtgaatgtgttcctgagccttgtacacaccgcccgtcaagccacgaaaggggggggcatcctaagtcactgagctaatctggcaggtgcctaagatgaactccctgattgggact

SEQ ID NO: 3018 - DNA, 1455 bp, Rubricoccus marinus
gacgaacgctggcggcgggcttaacacatgcaagtcgaacgagaacggacccttcggggtcttagtaaagtggcgcacgggtgagtaacgcgtagacaacctgcccttaggtggggaataactacgggaaaccgtagctaataccgcataatgtcagatggccgcatggccgcctgatcaaagctttatgcgcctaaggatgggtctgcgttggattagctagttggtgaggtaatagctcaccaaggcaacgatccatagcgggtctgagaggatgatccgccacactggcactgagacacgggccagactcctacgggaggcagcagtgaggaatattgcgcaatggacgaaagtctgacgcagccacgccgcgtgcaggaagacacccctcaggggcgtaaactgcttttatacgggaagaatgccctggtttccagggagtgacggtaccgtacgaataaggaccggctaactccgtgccagcagccgcggtaatacggagggtccaagcgttgtccggaatcactgggtgtaaagggtgcgcaggcgggcgtgtaagtcaggggtgaaagccaccggcctaaccggtgaactgcccttgatactgcacgtcttgaatctcggagaggctatcggaattcgtggtgtagcggtgaaatgcgtaaatatcacgaggaacaccggatgcgtaggcggatagctggacgagtattgacgctcaggcacgaaagcgtggggagcgaacaggattagataccctggtagtccacgccgtaaacgatggatgctcggcgtcacttcactttagaagtggtgcccaagctaacgcgttaagcatcccacctggggagtacgaccgcaaggttgaaactcaaaggaattgacgggggcccgcacaagcggtggagcatgtggattaattcgatgcaacgcgaagaaccttacccaggctcgaacgctaggggacaggtcccgaaaaggacccttcttcggactcctagtgaggtgctgcatggctgtcgtcagctcgtgtcgtgagatgttgggttaagtcccgcaacgagcgcaacccctatcgttagttaccagcggattatgccggggactctaacgagactgcctgcgcaagcagtgaggaaggtggggacgacgtcaagtcatcatggcccttacgcctggggcttcacacgtgctacaatggacggtacagagggcagccaccccgcgagggggagcgaatccttaaagccgttctcagttcggatcggagtctgcaactcgactccgtgaagctggaatcgctagtaatcgcgtatcagcaatgacgcggtgaatacgttcccgggccttgtacacaccgcccgtcaagccatggaagttgagggggcccgaagtccgtgacccaacccgcaagggagggagcggccgaaggtcaactcagtaactggggct

SEQ ID NO: 3019 - DNA, 1461 bp, Rubripirellula obstinata
aatgaacgttggcggcgtggattaggcatgcaagtcgcacgagaagtctcaattagcttgctatgagagacggacagtggcgtaagggagagtaacgcgtggttacgtacctcaaagaccaggatagtagcgggaaactgctagtaatactggatgatatcttcggatcaaatggtgtgattccgctttgagatcggaccgcgtactattagtttgttggtgaggtaatggctcaccaagactgcgatggttaccgggtgtgagagcatgacccggctcactgggactgagacactgcccagacatctacggatggctgcagtcgagaatctttgtcaatgggcgaaagcctgaacaagcgacgccgcgtgcgggatgaaggccctcgggttgtaaaccgctgtcagaagctaggaaatgctaggtggttatccatctagtttgaccgaccttcagaggaaggacgggctaagttcgtgccagcagccgcggtaagacgaaccgtccaaacgttattcggtatcactgggcttaaagcgtgcgtaggcggcttggtaggtgagatgtgaaagcccacggctcaaccgtggaattgcgtttcaaacccccaagctcgagtaagataggggtgatgggaacttatggtggagcggtgaaatgcgttgatatcatagggaacaccggtggcgaaagcgcatcactggatctttactgacgctgaggcacgaaagctagggtagcgaacgggattagataccccggtagtcctagccgtaaacgatgaatactgggttgaggggactctcacatcctctcggccgtagcgaaagcgttaagtattccgcctggggagtatggtcgcaaggctgaaactcaaaggaattgacgggggctcacacaagcggtggaggatgtggcttaattcgaggctacgcgaagaaccttatcctagatttgacatgcttgagaatccctatgaaaatagagagtgctcttcggagagctcttgcacaggtgctgcatggctgtcgtcagctcgtgtcgtgagatgtcgggttaagtcccttaacgagcgaaacccttatctttagttgccagcgggtcatgccggggactctaaagagactgccggtgtcaaaccggaggaaggtggggatgacgtcaagtcctcatggcctttatgtctagggctgcacacgtcctacaatggtacggacaaacggacgcaataccgcgaggtggagcaaatcctagaaaccgtgcctcagttcggattgcaggctgcaactcgcctgcatgaagccggaatcgctagtaatcgtaggtcagcatactacggtgaatgtgttcctgagccttgtacacaccgcccgtcaagccacgaaagttggaagggcccgaagtcactaagctaactcgcaagagaggcaggtgccgaaggtcagttcgacaattgggact

SEQ ID NO: 3020 - DNA, 1457 bp, Rubrivirga marina
gacgaacgctggcggcgggcttaacacatgcaagtcgaacgagaaaggggccttcgggccctgagtaaagtggcgcacgggtgagtaacgcgtaggcaatctgccctcaggcggggaataaccacgggaaaccgtggctaataccacataacgtcggaggtccgcatggaccaccgaccaaaggcttcggccacctgaggatgagcctgcgtcggattagctagttggtgggataacagcccaccaaggcaacgatccgtagcgggtctgagaggatgatccgccacactggcactgagacacgggccagactcctacgggaggcagcagtgaggaatattgcgcaatggaggaaactctgacgcagccacgccgcgtgcaggaagacacccctcaggggcgtaaactgcttttgtacgggaagaacacctcctctcggggaggtctgacggtaccgtacgaataaggaccggctaactccgtgccagcagccgcggtaatacggagggtccaagcgttgtccggaatcactgggtgtaaagggtgcgcaggcgggcttgtaagtcaggggtgaaagccaccggcctaaccggtgaattgcccttgatactgcaagtcttgagtcccggagaggctatcggaattcgtggtgtagcggtgaaatgcgtaaatatcacgaggaacacctaatgcgtaggcagatagctggacgggtactgacgctcaggcacgaaagcgtggggagcgaacaggattagataccctggtagtccacgccgtaaacgatggatgctcgatgttgcaccgcttcaggtgcagtgtctaagctaacgcgttaagcatcccacctggggagtacgatcgcaaggttgaaactcaaaggaattgacgggggcccgcacaagcggtggagcatgtggattaattcgatgcaacgcgaagaaccttacccaggctcgaacgctaccggacaggtcctgaaagggacccttcttcggactggtagcgaggtgctgcatggctgtcgtcagttcgtgtcgtgagatgttgggttaagtcccgcaacgaacgcaacccctatcgctagttaccagcgggttatgccggggactctagcgagactgcctgcgcaagcagtgaggaaggtggggacgacgtcaagtcatcatggcccttacgcctggggcttcacacgtgctacaatggccggtacaatgggcagccactccgcgaggaggagcgaatccataaagccggtctcagttcggatcggagtctgcaacccgactccgtgaagctggaatcgctagtaatcgcgtatcagcaacgacgcggtgaatacgttcccgggccttgtacacaccgcccgtcaagccatggaagttgagggcgcccgaagtccgtgacccaacccctcggggagggagcggccgaaggtgaactcagtgactggggct

SEQ ID NO: 3021 - DNA, 1467 bp, Rudaea cellulosilytica
agtgaacgctggcggcatgcctaacacatgcaagtcgaacggcagcacagcagtagcaatactgtgggtggcgagtggcggacgggtgaggaatacatcggaatttgccctgtcgtgggggataacgtagggaaacttacgctaataccgcatacgacctaacggtgaaagcgggggatcgcaagacctcgcgcggctggagaagccgatgtcagattagctagttggcggggtaaaggcccaccaaggcgacgatctgtagctggtctgagaggatgatcagccacactgggactgagacacggcccagactcctacgggaggcagcagtggggaatattggacaatgggcgcaagcctgatccagcaatgccgcgtgtgtgaagaaggccttcgggttgtaaagcacttttatctggagcgaaatctgcagggctaatacccatgcagtctgacggtaccagaggaataagcaccggctaacttcgtgccagcagccgcggtaatacgaagggtgcaagcgttactcggaattactgggcgtaaagcgtgagtaggtggtttcttaagtctgctgtgaaagccccgggctcaacctgggaattgcagtggatactgggaagctagagtgcggtagagggtagtggaattcccggtgtagcggtgaaatgcgtagagatcgggaggaacaccagtggcgaaggcggctacctggaccagcactgacactgagtcacgaaagcgtggggagcaaacaggattagataccctggtagtccacgccctaaacgatgcgaactggatgttgggtgcaacttggcactcagtatcgaagctaacgcgttaagttcgccgcctggggagtacggtcgcaagactgaaactcaaaggaattgacgggggcccgcacaagcggtggagtatgtggtttaattcgatgcaacgcgaagaaccttacctggccttgacatgtccggaatcctgcagagatgcgggagtgccttcgggaatcggaacacaggtgctgcatggctgtcgtcagctcgtgtcgtgagatgttgggttaagtcccgcaacgagcgcaacccttgtccttagttgccagcacgtaatggtgggaactctaaggagaccgccggtgacaaaccggaggaaggtggggatgacgtcaagtcatcatggcccttacggccagggctacacacgtactacaatgggaggtacagagggttgcgaagccgcgaggcgaagccaatcccagaaaacctctctcagtccggatcgtagtctgcaactcgactacgtgaagtcggaatcgctagtaatcgcgaatcagcattgtcgcggtgaatacgttcccgggccttgtacacaccgcccgtcacaccatgggagttggttgctccagaagcaggtagtctaaccgcaagggggacgcttgccacggagtggtcaatgactggggtg

SEQ ID NO: 3022 - DNA, 1382 bp, Ruegeria atlantica
aacgaacgctggcggcaggcttaacacatgcaagtcgagcgcaccttcgggtgagcggcggacgggttagtaacgcgtgggaacataccctttggtacggaatagcctctggaaacggagagtaataccgtatgagcccttcgggggaaagatttatcgccaaaggattggcccgcgttagattaggtagttggtggggtaatggcctaccaagcctacgatctatagctggttttagaggatgatcagcaacactgggactgagacacggcccagactcctacgggaggcagcagtggggaatcttggacaatgggggcaaccctgatccagccatgccgcgtgagtgatgaaggccttagggtcgtaaagctctttcgcctgtgaagataatgacggtagcaggtaaagaaaccccggctaactccgtgccagcagccgcggtaatacggagggggttagcgttgttcggaattactgggcgtaaagcgcacgtaggcggactggaaagttgggggtgaaatcccagggctcaaccctggaactgcctccaaaactatcagtctagagttcgagagaggtgagtggaattccgagtgtagaggtgaaattcgtagatattcggaggaacaccagtggcgaaggcggctcactggctcgatactgacgctgaggtgcgaaagtgtggggagcaaacaggattagataccctggtagtccacaccgtaaacgatgaatgccagtcgtcgggtagcatgctattcggtgacacacctaacggattaagcattccgcctggggagtacggtcgcaagattaaaactcaaaggaattgacgggggcccgcacaagcggtggagcatgtggtttaattcgaagcaacgcgcagaaccttaccaacccttgacatcctaggaccggcccagagatgggtctttcacttcggtgacctagtgacaggtgctgcatggctgtcgtcagctcgtgtcgtgagatgttcggttaagtccggcaacgagcgcaacccacatccttagttgccagcagttcggctgggcactctagggaaactgcccgtgataagcgggaggaaggtgtggatgacgtcaagtcctcatggcccttacgggttgggctacacacgtgctacaatggcagtgacaatgggttaatcccaaaaaactgtctcagttcggattggggtctgcaactcgaccccatgaagtcggaatcgctagtaatcgcgtaacagcatgacgcggtgaatacgttcccgggccttgtacacaccgcccgtcacaccatgggagttggttctacccgacgacgctgcgctaaccttcggggggcaggcggccacggtaggatcagcgactggggtg

SEQ ID NO: 3023 - DNA, 1386 bp, Ruegeria intermedia
aacgaacgctggcggcaggcctaacacatgcaagtcgagcgcgcccttcggggtgagcggcggacgggttagtaacgcgtgggaacgtgccctttggtacggaatagcctctggaaacggagagtaataccgtatgagcccttcgggggaaagatttatcgccaaaggatcggcccgcgttagattaggtagttggtggggtaatggcctaccaagcctacgatctatagctggttttagaggatgatcagcaacactgggactgagacacggcccagactcctacgggaggcagcagtggggaatcttggacaatgggggcaaccctgatccagccatgccgcgtgagtgatgaaggccctagggtcgtaaagctctttcgcctgtgaagataatgacggtagcaggtaaagaaaccccggctaactccgtgccagcagccgcggtaatacggagggggttagcgttgttcggaattactgggcgtaaagcgcgcgtaggcggactattaagtcaggggtgaaatcccggggctcaaccccggaactgcctttgatactggtagtctagagttcgagagaggtgagtggaattccgagtgtagaggtgaaattcgtagatattcggaggaacaccagtggcgaaggcggctcactggctcgatactgacgctgaggtgcgaaagtgtggggagcaaacaggattagataccctggtagtccacaccgtaaacgatgaatgccagacgtcgggcagcatgctgttcggtgtcacacctaacggattaagcattccgcctggggagtacggtcgcaagattaaaactcaaaggaattgacgggggcccgcacaagcggtggagcatgtggtttaattcgaagcaacgcgcagaaccttaccaacccttgacatcccgggaccgcgccagagatggcgtttccacttcggtggctcggtgacaggtgctgcatggctgtcgtcagctcgtgtcgtgagatgttcggttaagtccggcaacgagcgcaacccacgtccttagttgccagcagttcggctgggcactctaaggaaactgcccgtgataagcgggaggaaggtgtggatgacgtcaagtcctcatggcccttacgggttgggctacacacgtgctacaatggtagtgacaatgggttaatcccaaaaagctatctcagttcggattgtcgtctgcaactcgacggcatgaagtcggaatcgctagtaatcgcgtaacagcatgacgcggtgaatacgttcccgggccttgtacacaccgcccgtcacaccatgggagttggttctacccgacgacgctgcgctaacccttcggggaggcaggcggccacggtaggatcagcgactggggtg

SEQ ID NO: 3024 - DNA, 1399 bp, Ruegeria litorea
catgcaagtcgagcgcgcccttcggggtgagcggcggacgggttagtaacgcgtgggaatatacccaaaggtagggaatagcctctggaaacggagagtaataccctatgtgcccttcgggggaaagatttatcgcctttggattagcccgcgttagattaggtagttggtggggtaatggcctaccaagcctacgatctatagctggttttagaggatgatcagcaacactgggactgagacacggcccagactcctacgggaggcagcagtggggaatcttggacaatgggcgcaagcctgatccagccatgccgcgtgagtgatgaaggccttagggtcgtaaagctctttcgccagggatgataatgacagtacctggtaaagaaaccccggctaactccgtgccagcagccgcggtaatacggagggggttagcgttgttcggaattactgggcgtaaagcgcgcgtaggcggatcagaaagtaaggggtgaaatcccagggctcaaccctggaactgcctcttaaactcctggtcttgagttcgagagaggtgagtggaattccgagtgtagaggtgaaattcgtagatattcggaggaacaccagtggcgaaggcggctcactggctcgatactgacgctgaggtgcgaaagtgtggggagcaaacaggattagataccctggtagtccacaccgtaaacgatgaatgccagtcgtcggcaagcatgcttgtcggtgacacacctaacggattaagcattccgcctggggagtacggtcgcaagattaaaactcaaaggaattgacgggggcccgcacaagcggtggagcatgtggtttaattcgaagcaacgcgcagaaccttaccaacccttgacatcctaggacaactccagagatggagccttccttcgggacctagtgacaggtgctgcatggctgtcgtcagctcgtgtcgtgagatgttcggttaagtccggcaacgagcgcaacccacatccttagttgccagcagttcggctgggcactctagggaaactgcccgtgataagcgggaggaaggtgtggatgacgtcaagtcctcatggcccttacgggttgggctacacacgtgctacaatggcaactacagtgggttaatccccaaaagttgtctcagttcggattggggtctgcaactcgaccccatgaagtcggaatcgctagtaatcgcgtaacagcatgacgcggtgaatacgttcccgggccttgtacacaccgcccgtcacaccatgggagttgggtttacccgaaggccgtgcgccaacctttcgagggggcagcggaccacggtgagctcagcgactggggtgaagtcgtaacaaggtagccgtaggggaaccagcggctggac

SEQ ID NO: 3025 - DNA, 1386 bp, Ruegeria marina
aacgaacgctggcggcaggcctaacacatgcaagtcgagcgcgcccttcggggtgagcggcggacgggttagtaacgcgtgggaacgtgcccttctctacggaatagtcccgggaaactgggggtaataccgtatacgccctttgggggaaagatttatcggagaaggatcggcccgcgttagattaggtagttggtggggtaatggcctaccaagcctacgatctatagctggttttagaggatgatcagcaacactgggactgagacacggcccagactcctacgggaggcagcagtggggaatcttggacaatgggggcaaccctgatccagccatgccgcgtgagtgaagaaggccctagggtcgtaaagctctttcgcctgtgaagataatgacggtagcaggtaaagaaaccccggctaactccgtgccagcagccgcggtaatacggagggggttagcgttgttcggaattactgggcgtaaagcgcgcgtaggcggattggaaagttgggggtgaaatcccagggctcaaccctggaactgcctccaaaactcccagtcttgagttcgagagaggtgagtggaattccgagtgtagaggtgaaattcgtagatattcggaggaacaccagtggcgaaggcggctcactggctcgatactgacgctgaggtgcgaaagtgtggggagcaaacaggattagataccctggtagtccacaccgtaaacgatgaatgccagtcgtcgggtagcatgctgctcggtgacacacctaacggattaagcattccgcctggggagtacggccgcaaggttaaaactcaaaggaattgacgggggcccgcacaagcggtggagcatgtggtttaattcgaagcaacgcgcagaaccttaccaacccttgacatcctcggaccgttccagagatggttctttcccttcggggaccgagtgacaggtgctgcatggctgtcgtcagctcgtgtcgtgagatgttcggttaagtccggcaacgagcgcaacccacacccttagttgccagcagttcggctgggcactctaggggaactgcccgtgataagcgggaggaaggtgtggatgacgtcaagtcctcatggcccttacgggttgggctacacacgtgctacaatggtagtgacaatgggttaatcccaaaaagctatctcagttcggattgtcgtctgcaactcgacggcatgaagtcggaatcgctagtaatcgcgtaacagcatgacgcggtgaatacgttcccgggccttgtacacaccgcccgtcacaccatgggagttgggtctacccgaagacggtgcgccaacctttcgaggaggcagctggccacggtaggctcagcgactggggtg

SEQ ID NO: 3026 - DNA, 1386 bp, Ruegeria marisrubri
aacgaacgctggcggcaggcctaacacatgcaagtcgagcgcgcccttcggggtgagcggcggacgggttagtaacgcgtgggaacgtgccctttggtacggaatagcctctggaaacggagagtaataccgtatgagccctacgggggaaagatttatcgccaaaggatcggcccgcgttagattaggtagttggtggggtaatggcctaccaagcctacgatctatagctggttttagaggatgatcagcaacactgggactgagacacggcccagactcctacgggaggcagcagtggggaatcttggacaatgggggcaaccctgatccagccatgccgcgtgagtgatgaaggccctagggtcgtaaagctctttcgcctgtgaagataatgacggtagcaggtaaagaaaccccggctaactccgtgccagcagccgcggtaatacggagggggttagcgttgttcggaattactgggcgtaaagcgcgcgtaggcggactggaaagttgggggtgaaatcccggggctcaaccccggaactgcctccaaaactatcagtctagagttcgagagaggtgagtggaattccgagtgtagaggtgaaattcgtagatattcggaggaacaccagtggcgaaggcggctcactggctcgatactgacgctgaggtgcgaaagtgtggggagcaaacaggattagataccctggtagtccacaccgtaaacgatgaatgccagacgtcgggcagcatgctgttcggtgtcacacctaacggattaagcattccgcctggggagtacggtcgcaagattaaaactcaaaggaattgacgggggcccgcacaagcggtggagcatgtggtttaattcgaagcaacgcgcagaaccttaccaacccttgacatcccgggaccgcgccagagatggcgtttccacttcggtggctcggtgacaggtgctgcatggctgtcgtcagctcgtgtcgtgagatgttcggttaagtccggcaacgagcgcaacccacgtccttagttgccagcagttcggctgggcactctaaggaaactgcccgtgataagcgggaggaaggtgtggatgacgtcaagtcctcatggcccttacgggttgggctacacacgtgctacaatggtggtgacagtgggttaatccccaaaagccatctcagttcggattgtcgtctgcaactcgacggcatgaagtcggaatcgctagtaatcgcgtaacagcatgacgcggtgaatacgttcccgggccttgtacacaccgcccgtcacaccatgggagttgggtctacccgaagacggtgcgccaacctttcgagggggcagctggccacggtaggctcagcgactggggtg

SEQ ID NO: 3027 - DNA, 1419 bp, Ruegeria mediterranea
ggcggcaggcctaacacatgcaagtcgagcgcgcccttcggggtgagcggcggacgggttagtaacgcgtgggaatatacccaaaggtagggaatagcctctggaaacggagagtaataccctatgagcccttcgggggaaagatttatcgcctttggattagcccgcgttagattaggtagttggtggggtaatggcctaccaagcctacgatctatagctggttttagaggatgatcagcaacactgggactgagacacggcccagactcctacgggaggcagcagtggggaatcttggacaatgggcgcaagcctgatccagccatgccgcgtgagtgatgaaggccttagggtcgtaaagctctttcgccagggatgataatgacagtacctggtaaagaaaccccggctaactccgtgccagcagccgcggtaatacggagggggttagcgttgttcggaattactgggcgtaaagcgcgcgtaggcggatcagaaagttgggggtgaaatcccggggctcaaccccggaactgcctccaaaactcctggtcttgagttcgagagaggtgagtggaattccgagtgtagaggtgaaattcgtagatattcggaggaacaccagtggcgaaggcggctcactggctcgatactgacgctgaggtgcgaaagtgtggggagcaaacaggattagataccctggtagtccacaccgtaaacgatgaatgccagtcgtcagcaagcatgcttgttggtgacacacctaacggattaagcattccgcctggggagtacggtcgcaagattaaaactcaaaggaattgacgggggcccgcacaagcggtggagcatgtggtttaattcgaagcaacgcgcagaaccttaccaacccttgacatcctaggacaactccagagatggagccttccttcgggacctagtgacaggtgctgcatggctgtcgtcagctcgtgtcgtgagatgttcggttaagtccggcaacgagcgcaacccacatccttagttgccagcagttcggctgggcactctagggaaactgcccgtgataagcgggaggaaggtgtggatgacgtcaagtcctcatggcccttacgggttgggctacacacgtgctacaatggcaactacagtgggttaatccccaaaagttgtctcagttcggattggggtctgcaactcgaccccatgaagtcggaatcgctagtaatcgcgtaacagcatgacgcggtgaatacgttcccgggccttgtacacaccgcccgtcacaccatgggagttgggtttacccgaaggccgtgcgccaacctttcgagggggcagcggaccacggtgagctcagcgactggggtgaagtcgtaacaaggtagccgtaagggaacctgcggctggatcact

SEQ ID NO: 3028 - DNA, 1385 bp, Ruegeria pomeroyi
aacgaacgctggcggcaggcctaacacatgcaagtcgagcgcgcccttcggggtgagcggcggacgggttagtaacgcgtgggaacgtaccctttggtagggaatagccactggaaacggtgagtaataccctatgagcccttcgggggaaagatttatcgccaaaggatcggcccgcgttagattaggtagttggtggggtaatggcctaccaagcctacgatctatagctggttttagaggatgatcagcaacactgggactgagacacggcccagactcctacgggaggcagcagtggggaatcttggacaatgggggcaaccctgatccagccatgccgcgtgagtgaagaaggccttagggtcgtaaagctctttcgcctgtgaagataatgacggtagcaggtaaagaaaccccggctaactccgtgccagcagccgcggtaatacggagggggttagcgttgttcggaattactgggcgtaaagcgcgcgtaggcggaccagaaagttgggggtgaaatcccggggctcaaccccggaactgcctccaaaactcctggtcttgagttcgagagaggtgagtggaattccgagtgtagaggtgaaattcgtagatattcggaggaacaccagtggcgaaggcggctcactggctcgatactgacgctgaggtgcgaaagtgtggggagcaaacaggattagataccctggtagtccacaccgtaaacgatgaatgccagtcgtcgggtagcatgctgctcggtgacacacctaacggattaagcattccgcctggggagtacggccgcaaggttaaaactcaaaggaattgacgggggcccgcacaagcggtggagcatgtggtttaattcgaagcaacgcgcagaaccttaccaacccttgacatcctcggaccgtcccagagatgggtctttcacttcggtgaccgagtgacaggtgctgcatggctgtcgtcagctcgtgtcgtgagatgttcggttaagtccggcaacgagcgcaacccacacccttagttgccagcattcagttgggcactctaggggaactgcccgtgataagcgggaggaaggtgtggatgacgtcaagtcctcatggcccttacgggttgggctacacacgtgctacaatggcagtgacaatgggttaatcccaaaaaactgtctcagttcggattggggtctgcaactcgaccccatgaagtcggaatcgctagtaatcgcgtaacagcatgacgcggtgaatacgttcccgggccttgtacacaccgcccgtcacaccatgggagttgggtctacccgaagacggtgcgccaacctttcgaggaggcagctggccacggtaggctcagcgactggggtg

SEQ ID NO: 3029 - DNA, 1451 bp, Rugamonas rubra
attgaacgctggcggcatgccttacacatgcaagtcgaacggcagcgcggggcaacctggcggcgagtggcgaacgggtgagtaatatatcggaacgtaccctggagtgggggataacgtagcgaaagttacgctaataccgcatacgatctaaggatgaaagtgggggatcgcaagacctcatgctcctggagcggccgatatctgattagctagttggtggggtaaaggcctaccaaggcatcgatcagtagctggtctgagaggacgaccagccacactggaactgagacacggtccagactcctacgggaggcagcagtggggaattttggacaatgggcgaaagcctgatccagcaatgccgcgtgagtgaagaaggccttcgggttgtaaagctcttttgtcagggaagaaacggtgggttctaatacagcctgctaatgacggtacctgaagaataagcaccggctaactacgtgccagcagccgcggtaatacgtagggtgcaagcgttaatcggaattactgggcgtaaagcgtgcgcaggcggttttgtaagtctgtcgtgaaatccccgggctcaacctgggaatggcgatggagactgcaaggctagagtttggcagaggggggtagaattccacgtgtagcagtgaaatgcgtagatatgtggaggaacaccgatggcgaaggcagccccctgggtcaagactgacgctcatgcacgaaagcgtggggagcaaacaggattagataccctggtagtccacgccctaaacgatgtctactagttgtcgggtcttaattgacttggtaacgcagctaacgcgtgaagtagaccgcctggggagtacggtcgcaagattaaaactcaaaggaattgacggggacccgcacaagcggtggatgatgtggattaattcgatgcaacgcgaaaaaccttacctacccttgacatggctggaatccttgagagatcagggagtgctcgaaagagaaccagtacacaggtgctgcatggctgtcgtcagctcgtgtcgtgagatgttgggttaagtcccgcaacgagcgcaacccttgtcattagttgctacgaaagggcactctaatgagactgccggtgacaaaccggaggaaggtggggatgacgtcaagtcctcatggcccttatgggtagggcttcacacgtcatacaatggtacatacagagcgccgccaacccgcgagggggagctaatcgcagaaagtgtatcgtagtccggattgtagtctgcaactcgactgcatgaagttggaatcgctagtaatcgcggatcagcatgtcgcggtgaatacgttcccgggtcttgtacacaccgcccgtcacaccatgggagcgggttttaccagaagtaggtagcttaaccgcaaggagggcgcttaccacggtaggattcgtgactggggtg

SEQ ID NO: 3030 - DNA, 1490 bp, Rugosibacter aromaticivorans
attgaacgctggcggaatgctttacacatgcaagtcgaacggcagcacgggagcttgctcctggtggcgagtggcgaacgggtgagtaatgtatcggaacgtaccccgtcgtgggggataactctccgaaaggagagctaataccgcatacgacccgagggtgaaagcgggggacctggggtaacctgggcctcgcgcgatgggagcggccgatatcggattagctagttggtggggtaaaggcctaccaaggcgacgatccgtagcgggtctgagaggacgacccgccacactggaactgagacacggtccagactcctacgggaggcagcagtggggaattttggacaatgggcgcaagcctgatccagccattccgcgtgagtgaagaaggccttcgggttgtaaagctctttcagcaggaacgaaacggtgggtcttaatacggcctgctaatgacggtacctgcagaagaagcaccggctaactacgtgccagcagccgcggtaatacgtagggtgcgagcgttaatcggaattactgggcgtaaagcgtgcgcaggcggcgacataagacagatgtgaaatccccgggctcaacctgggaacggcgtttgtgactgtgtggctagagtgtagcagaggggggtggaattccacgtgtagcagtgaaatgcgtagagatgtggaggaacaccgatggcgaaggcagccccctgggttaacactgacgctcatgcacgaaagcgtggggagcaaacaggattagataccctggtagtccacgccctaaacgatgccaactaggtgttgggggaggagacttccttagtaccgtagctaacgcgtgaagttggccgcctggggagtacggtcgcaagattaaaactcaaaggaattgacggggacccgcacaagcggtggatgatgtggattaattcgatgcaacgcgaaaaaccttacctacccttgacatgtccggaatcccgaagagatttgggagtgctcgaaagagagccggaacacaggtgctgcatggctgtcgtcagctcgtgtcgtgagatgttgggttaagtcccgcaacgagcgcaacccttatcattagttgccatcattgagttgggcactctaatgagactgccggtgacaaaccggaggaaggtggggatgacgtcaagtcctcatggcccttatgggtagggcttcacacgtcatacaatggtcggtacagagggttgccaacccgcgagggggagctaatctcacaaagccgatcgtagtccggatcgcagtctgcaactcgactgcgtgaagtcggaatcgctagtaatcgtggatcagcatgtcacggtgaatacgttcccgggtcttgtacacaccgcccgtcacaccatgggagtgggttccaccagaagtaggtagtctaaccgcgcaccggcgtaagttggcgtgcggagggcgcttaccacggtggggttcatgactggggtg

SEQ ID NO: 3031 - DNA, 1491 bp, Ruminiclostridium papyrosolvens
  misc_feature (28)..(28): n is a, c, g, or t
  misc_feature (46)..(46): n is a, c, g, or t
  misc_feature (153)..(154): n is a, c, g, or t
  misc_feature (197)..(197): n is a, c, g, or t
gctggcggcgtgcctaacacatgcaagncgagcggagtagagtgtnagctttcttgtgagtaacttagcggcggacgggtgagtaacgcgtgggcaacctgcctgttacagggggataacacagggaaacttgtgctaataccgcataacacnncgagaaagcagttttcttgttgtcaaaggagcaatccggtaanagatgggcccgcgtccaattagctagttggtgatgtaacggaccaccaaggcgacgattggtagccgaactgagaggttgatcggccacattgggactgagacacggcccagactcctacgggaggcagcagtggggaatattgcacaatgggggaaaccctgatgcagcaacgccgcgtgaaggatgaaggttttcggattgtaaacttctttagtcagggacgaataaatgacggtacctgaagaataagccacggctaactacgtgccagcagccgcggtaatacgtaggtggcaagcgttgtccggaattactgggtgtaaagggcgtgtaggcgggaatgtaagtcagatgtgaaatcccagagcttaactctggagctgcatctgaaactatgtttcttgagtgccggagaggaaagcggaattcctagtgtagcggtgaaatgcgtagatattaggaggaacaccagtggcgaaggcggctttctggacggtaactgacgctgaggcgcgaaagcgtggggagcaaacaggattagataccctggtagtccacgctgtaaacgatggatactaggtgtaggaggtatcgaccccttctgtgccggagttaacacaataagtatcccacctggggagtacggccgcaaggttgaaactcaaaggaattgacgggggcccgcacaagcagtggagtatgtggtttaattcgaagcaacgcgaagaaccttaccaaggcttgacataatagtgaatacggtagagatatcgtagtccttcgggacactattacaggtggtgcatggttgtcgtcagctcgtgtcgtgagatgttgggttaagtcccgcaacgagcgcaacccctgttgctagttgataacattaagatgatcactctagcgagactgccggtgataaatcggaggaaggtggggacgacgtgaaatcatcatgccccttatgtcttgggctacacacgtactacaatggctataacagagggaagctaagctgcaaagtggagcaaatccccaaaaatagtcccagttcagattgtgggctgcaacccgcccacatgaagtcggaattgctagtaatggcaggtcagcatactgccgtgaatacgttcccgggccttgtacacaccgcccgtcacaccatgagagtctgcaacacccgaagtcgatagtctaaccgcaaggaggacgtcgccgaaggtggggccgatgattggggtgaagtcgtaacaaggtagccgtatcggaaggtgcggctggatcacctcctttct

SEQ ID NO: 3032 - DNA, 1436 bp, Ruminiclostridium sufflavum
tttgaagcagcatacataaccggagtattgagtgttgaacatgaggtagcggcggacgggtgagtaacgcgtgggcaacctgcctttcacagggggataacacagggaaacttgtgctaataccgcataacacatcgaggtagcattaccatgatgtcaaaggagcaatccggtgaaagatgggcccgcgtccaattagctagttggtgatgtaacggaccaccaaggcgacgattggtagccgaactgagaggttgatcggccacattgggactgagacacggcccagactcctacgggaggcagcagtggggaatattgcacaatggggggaaccctgatgcagcaacgccgcgtgaaggatgaaggttttcggattgtaaacttctttagtcagggacgaaaaaaatgacggtacctgaagaataagccacggctaactacgtgccagcagccgcggtaatacgtaggtggcgagcgttgtccggaattactgggtgtaaagggcgtgtaggcgggaatgtaagtcagatgtgaaatcccagggcttaactctggagctgcatctgaaactatgtttcttgagtgccggagaggaaagcggaattcctagtgtagcggtgaaatgcgtagatattaggaggaacaccagtggcgaaggcggctttctggacggtaactgacgctgaggcgcgaaagcgtggggagcaaacaggattagataccctggtagtccacgctgtaaacgatggatactaggtgtaggaggtatcgaccccttctgtgccggagttaacacaataagtatcccacctggggagtacggccgcaaggttgaaactcaaaggaattgacgggggcccgcacaagcagtggagtatgtggtttaattcgaagcaacgcgaagaaccttaccaaggcttgacataatattgaatatggcagagatgtcatagtccttcgggacagtattacaggtggtgcatggttgtcgtcagctcgtgtcgtgagatgttgggttaagtcccgcaacgagcgcaacccctgttgttagttgataacattaagatgatcactctaacgagactgccggtgataaatcggaggaaggtggggacgacgtcaaatcatcatgccccttatgtcttgggctacacacgtactacaatggctattacaatgagaagcgaagctgtaaagtggagcaaatctataaaaatagtctcagttcagattgtgggctgcaacccgcccacatgaagtcggaattgctagtaatggcaggtcagcatactgccgtgaatacgttcccgggccttgtacacaccgcccgtcacaccatgagagtctgcaacacccgaagtcgatagtctaaccgcaaggaggacgttgccgaaggtggggccgatgattggggtgaagtcgtaacaaggtag

SEQ ID NO: 3033 - DNA, 1475 bp, Saccharibacillus kuerlensis
gacgaacgctggcggcatgcctaatacatgcaagtcgagcggagttgacgagaagcttgcttctctgatacttagcggcggacgggtgagtaacacgtaggcaacctgcctttcagcctgggataacttccggaaacggatgctaataccggatacatcattttctggcatcagagaatgaggaaagacggcgcaagctgtcactgagagatgggcctgcggcgcattagctagttggtggggtaacggctcaccaaggcgacgatgcgtagccgacctgagagggtgaacggccacactgggactgagacacggcccagactcctacgggaggcagcagtagggaatcttccacaatgggcgaaagcctgatggagcaatgccgcgtgagtgatgaaggttttcggatcgtaaagctctgttgccagggaagaacgtccagtagagtaactgctactggagtgacggtacctgagaagaaagccccggctaactacgtgccagcagccgcggtaatacgtagggggcaagcgttgtccggaattattgggcgtaaagcgcgtgcaggcggcttgttaagtcggatgtttaagatcggggctcaaccccgattcgcatccgaaactggcaagcttgagtgtaggagaggaaagtggaattccacgtgtagcggtgaaatgcgtagagatgtggaggaacaccagtggcgaaggcgactttctggcctataactgacgctgaggcgcgaaagcgtggggagcaaacaggattagataccctggtagtccacgctgtaaacgatgagtgctaggtgttcggggtttcgataccctgggtgccgaagttaacgcattaagcactccgcctggggagtacggtcgcaagactgaaactcaaaggaattgacggggacccgcacaagcagtggagtatgtggtttaattcgaagcaacgcgaagaaccttaccaggtcttgacatcggaatgaccggcttagagataggcctttccttcgggacattccagacaggtggtgcatggttgtcgtcagctcgtgtcgtgagatgttgggttaagtcccgcaacgagcgcaacccttgactttagttgccagcattttaagatgggcactctagagtgactgccggtgacaaaccggaggaaggcggggatgacgtcaaatcatcatgccccttatgacctgggctacacacgtactacaatggtcggtacagagggttgcgaagccgcgaggtgaagccaatcccagaaagccgatctcagttcggattgtaggctgcaactcgcctgcatgaagtcggaattgctagtaatcgcggatcagcatgccgcggtgaatacgttcccgggtcttgtacacaccgcccgtcacaccacgagagtttacaacacccgaagtcggtgaggtaaccgcaaggagccagccgccgaaggtggggtagatgattggggtg

SEQ ID NO: 3034 - DNA, 1406 bp, Saccharibacter floricola
agcgaacgctggcggcatgcttaacacatgcaagtcgcacgaacctttcggggttagtggcggacgggtgagtaacgcgtaggaacctatccagaggtgggggataacaccgggaaactggtgctaataccgcatgatacctgagggttaaaggcttttgttgcctttggaggggcctgcgtttgattagctagttggttgggtaaaggctgaccaaggcgatgatcaatagctggtttgagaggatgatcagccacactgggactgagacacggcccagactcctacgggaggcagcagtggggaatattggacaatgggggcaaccctgatccagcaatgccgcgtgtgtgaagaaggtcttcggattgtaaagcactttcactagggaagatgatgacggtacctagagaagaagccccggctaacttcgtgccagcagccgcggtaatacgaagggggctagcgttgctcggaatgactgggcgtaaagggcgcgtaggcggtttatacagtcagatgtgaaatccccgggcttaacctgggaactgcatttgatacgtatagactagagtccgagagaggattgcggaattcccagtgtagaggtgaaattcgtagatattgggaagaacaccagttgcgaaggcggcaatctggctcggaactgacgctgaggcgcgaaagcgtggggagcgaacaggattagataccctggtagtccacgctgtaaacgatgtgtgctggatgttgggaaacttagtttttcagtgtcgaagctaacgtgttaagcacaccgcctggggagtacgaccgcaaggttgaaactcaaagaaattgacgggggcccgcacaagcggtggagcatgtggtttaattcgaagcaacgcgcagaaccttaccaggtcttgtatggggaggacgtgctcagagatgagtatttcttcggacctcccgcacaggtgctgcatggctgtcgtcagctcgtgtcgtgagatgttgggttaagtcccgcaacgagcgcaacccctgtctttagttgccatcacgtttgggtgggcactctagagagactgccggtgacaagccggaggaaggtggggatgacgtcaagtcctcatggcccttatgacctgggctacacacgtgctacaatggcggtgacaatgggaagctacatggtgacatgatgccgatctcaaaaaaccgtctcagttcggattgcactctgcaactcgagtgcatgaaggtggaatcgctagtaatcgtggatcagcatgccacggtgaatacgttcccgggccttgtacacaccgcccgtcacaccatgggagttggtttgaccttaagccggtgagcgaaccgcaagggcgcagccgaccacggtcgggtcagcgactggggtg

SEQ ID NO: 3035 - DNA, 1444 bp, Saccharicrinis carchari
gatgaacgctagcgacaggcctaacacatgcaagtcgaggggtaacattgtagcttgctacagatgacgaccggcgcacgggtgagtaacgcgtatgaaacctaccttttacagggggacagcccagagaaatttggattaataccccatagtctttaaatagcacatgttattaaaagtaaagcttcggcggtaaaagatggtcatgcgtgacattagatagttggtgaggtaacggctcaccaagtctgcgatgtctaggggttctgagaggaaggtcccccacactggtactgagacacggaccagactcctacgggaggcagcagtgaggaatattggtcaatgggcgatagcctgaaccagccatgtcgcgtgcaggaagacggccctacgggttgtaaactgcttttgtacgggaagaattgtacctacgtgtaggtatttgccggtaccgtacgaataaggatcggctaactccgtgccagcagccgcggtaatacggaggatccgagcgttatccggatttattgggtttaaagggtgcgtaggcggactgataagtcagcggtgaaattttgcggctcaaccgtaacactgccgttgaaactgtttgtcttgaatttagttgaagtaggcggaatgtgttgtgtagcggtgaaatgcttagatataacacggaacaccgattgcgaaggcagcttactaagctataattgacgctgatgcacgaaagcgtgggtagcgaacaggattagataccctggtagtccacgccgtaaacgatgattactcgttgtcggccatacatcgtcggcgaccgagcgaaagcattaagtaatccacctggggagtacgttggcaacaatgaaactcaaaggaattgacgggggcccgcacaagcggaggaacatgtggtttaattcgatgatacgcgaggaaccttacctggacttaaatgtaggatgcatggagcagagatgttcctttcttcggacttcttacaaggtgctgcatggttgtcgtcagctcgtgccgtgaggtgtcgggttaagtcccataacgagcgcaacccctatctttagttaccagcacgtagtggtggggactctaaagagactgccggtgtaaaccgtgaggaaggtggggatgacgtcaaatcagcacggcccttacgtccagggctacacacgtgttacaatggccggtacaaagggcagctacctagcgataggatgctaatccccaaacccggtctcagttcggatcggagtctgcaactcgactccgtgaagctggattcgctagtaatcgcgcatcagccatggcgcggtgaatacgttcccgggccttgtacacaccgcccgtcaaaccatggaagccgggggtacctgaagtccgttaccgcaaggagcggcctagggtaaaactggtaactagggtt

SEQ ID NO: 3036 - DNA, 1444 bp, Saccharicrinis fermentans
gatgaacgctagcgacaggcctaacacatgcaagtcgaggggtaacattgtagcttgctacagatgacgaccggcgcacgggtgcgtaacgcgtatgaaacctaccttttacaggggaatagcccggagaaatttggattaatgccccatggttatactttaccgcatggtaaattatataaagcttcggcggtaaaagatggtcatgcgtgacattagctagttggtaaggtaacggcttaccaaggcgacgatgtctaggggttctgagaggaaggtcccccacactggtactgagacacggaccagactcctacgggaggcagcagtgaggaatattggtcaatggccgcaaggctgaaccagccatgtcgcgtgcaggaagacggccctatgggttgtaaactgcttttgtacgggaagaaacgtatctacgagtagatatttgccggtaccgtacgaataagcatcggctaactccgtgccagcagccgcggtaatacggaggatgcgagcgttatccggatttattgggtttaaagggtgcgtaggcggactaataagtcagtggtgaaatcttgcggctcaaccgtaaaactgccattgatactgttagtcttgaatttagttgaggtaggcggaatgtgttgtgtagcggtgaaatgcatagatataacacagaacaccgattgcgaaggcagcttactaagctataattgacgctgatgcacgaaagcgtgggtagcgaacaggattagataccctggtagtccacgccgtaaacgatgattactcgttgttggcaatacatggtcagcgactgagcgaaagcattaagtaatccacctggggagtacgttggcaacaatgaaactcaaaggaattgacgggggcccgcacaagcggaggaacatgtggtttaattcgatgatacgcgaggaaccttacctggacttaaatgtaggctgcatagagtagagatattcttttcttcggactgcttacaaggtgctgcatggttgtcgtcagctcgtgccgtgaggtgtcgggttaagtcccataacgagcgcaacccctattgttagttaccagcacgtaaaggtggggactctaacaagactgccggtgtaaaccgcgaggaaggtggggatgacgtcaaatcagcacggcccttacgtccagggctacacacgtgttacaatggccggtacaaagggcagctacatggcgacatgatgctaatccctaaacccggtctcagttcggatcggagtctgcaactcgactccgtgaagctggattcgctagtaatcgcatatcagccatgatgcggtgaatacgttcccgggccttgtacacaccgcccgtcaaaccatggaagccgagggtacctgaagtccgttaccgcaaggagcggcctagggtaaaactggtaactagggtt

SEQ ID NO: 3037 - DNA, 1456 bp, Saccharophagus degradans
attgaacgctggcggcaggcctaacacatgcaagtcgagcgagaaagccttcgggtgagtatagcggcggacgggtgagtaacgcgtgggaatctacccagtagtgggggacaacagttggaaacgactgctaataccgcatacgtcctatgggagaaaggtggcctctatttataagctatcgctactggatgagcccgcgtcggattagctagtaggtggggtaatggcccacctaggcgacgatccgtagctggtctgagaggatgatcagccacactggaactgagacacggtccagactcctacgggaggcagcagtggggaatattgcacaatgggcgaaagcctgatgcagccatgccgcgtgtgtgaagaaggctttcgggttgtaaagcactttcagtagggaggaaaggttagtagttaatacctgctagctgtgacgttacctacagaagaagcaccggctaactccgtgccagcagccgcggtaatacggagggtgcaagcgttaatcggaattactgggcgtaaagcgcgcgtaggcggttagctaagctagatgtgaaagcccagggcttaaccttggaactgcatttagaactggttgactagagtatggtagaggggtgtggaatttcaggtgtagcggtgaaatgcgtagagatctgaaggaacatcagtggcgaaggcgacaccctggaccaatactgacgctgaggtgcgaaagcgtggggagcaaacaggattagataccctggtagtccacgccgtaaacgatgtctactagccgttggggtccttgaggccttagtggcgcagctaacgcactaagtagaccgcctggggagtacggccgcaaggttaaaactcaaatgaattgacgggggcccgcacaagcggtggagcatgtggtttaattcgaagcaacgcgaagaaccttaccaggtcttgacatccagagaacttactagaaatagtttggtgccttcgggaactctgagacaggtgctgcatggctgtcgtcagctcgtgtcgtgagatgttgggttaagtcccgtaacgagcgcaacccttgtccttagttgctagcaggtaatgctgagaactctaaggagactgccggtgacaaaccggaggaaggtggggacgacgtcaagtcatcatggcccttacgacctgggctacacacgtgctacaatggtcagtacaaagggttgccaagccgcgaggtggagctaatcccataaaactgatcgtagtccggattggagtctgcaactcgactccatgaagtcggaatcgctagtaatcgtgaatcagaatgtcacggtgaatacgttcccgggccttgtacacaccgcccgtcacaccatgggagtgggttgcaccagaagtagctagtctaaccttcggggggacggttaccacggtgtgattcatgactggggtg

SEQ ID NO: 3038 - DNA, 1491 bp, Salimicrobium flavidum
gacgaacgctggcggcgtgcctaatacatgcaagtcgagcgcgggaagcgaccggaagcccttcggggtggaaggtcgtggaacgagcggcggacgggtgagtaacacgtgggcaacctacctgtaagaccggaataaccccgggaaaccggggctaatgccgggtaatcgatcggttcacctgaaccgattgtaaaaggatggcttcttgctatcgcttacagatgggcccgcggcgcattagctagttggtaaggtaacggcttaccaaggcgacgatgcgtagccgacctgagagggtgatcggccacactgggactgagacacggcccagactcctacgggaggcagcagtagggaatcttccgcaatggacgaaagtctgacggagcaacgccgcgtgaatgatgaaggtcttcggatcgtaaaattctgttgtgagggaagaacaaggaccgtgcgaacagaacggtcccttgacggtacctcacgaggaagccccggctaactacgtgccagcagccgcggtaatacgtagggggcaagcgttgtccggaattattgggcgtaaagggcacgcaggcggttccttaagtctgatgtgaaagcccgtggctcaaccacggatggccattggaaactggggaacttgagaactgaagaggagagtggaattccacgtgtagcggtgaaatgcgtagatatgtggaggaacaccagtggcgaaggcgactctctggtcggtttctgacgctgaggtgcgaaagcgtgggtagcaaacaggattagataccctggtagtccacgccgtaaacgctgagtgctaggtgttagggggcttccaccccttagtgctgaagttaacgcattaagcactccgcctggggagtacggccgcaaggctgaaactcaaaggaattgacgggggcccgcacaagcggtggagcatgtggtttaattcgaagcaacgcgaagaaccttaccaggtcttgacatccttggacacttccagagatggaaggttcccttcggggaccaagtgacaggtggtgcatggttgtcgtcagctcgtgtcgtgagatgttgggttaagtcccgcaacgagcgcaacccctaatcttagttgccagcattcagttgggcactctaaggtgactgccggtgacaaaccggaggaaggcggggacgacgtcaaatcatcatgccccttatgacctgggctacacacgtgctacaatggatgggacaaacggatgcgaacccgcgaggggtagccaatccgagaaacccattctcagttcggattgcaggctgcaactcgcctgcatgaagccggaatcgctagtaatcgcagatcagcatgctgcggtgaatacgttcccgggccttgtacacaccgcccgtcacaccacgagagttggcaacacccgaagccggtgaggtaacctttacaggagccagccgtcgaaggtggggccaatgattggggtg

SEQ ID NO: 3039 - DNA, 1425 bp, Salimicrobium halophilum
tggcggcgtgcctaatacatgcaagtcgagcgcgggaagcgagctgaagcccttcggggtggacgctcgtggaacgagcggcggacgggtgagtaacacgtgggcaacctacctgtaagaccggaataaccccgggaaaccggggctaatgccgggtaaccgaacggttctcctgaaccgaacgtaaaaggatggcttcttgctatcgcttacagatgggcccgcggcgcattagctagttggtaaggtaacggcttaccaaggcgacgatgcgtagccgacctgagagggtgatcggccacactgggactgagacacggcccagactcctacgggaggcagcagtagggaatcttccgcaatggacgaaagtctgacggagcaacgccgcgtgaacgatgaaggctttcgggtcgtaaagttctgttgtgagggaagaacaaggatcgtgcgaacacagcggtcccttgacggtacctcacgaggaagccccggctaactacgtgccagcagccgcggtaatacgtagggggcaagcgttgtccggaattattgggcgtaaagcgcacgcaggcggttccttaagtctgatgtgaaagcccgtggctcaaccacggagggccattggaaactggggaacttgagaactgaagaggagagtggaattccacgtgtagcggtgaaatgcgtagatatgtggaggaacaccagtggcgaaggcgactctctggtcggtttctgacgctgaggtgcgaaagcgtgggtagcaaacaggattagataccctggtagtccacgccgtaaacgatgagtgctaggtgttagggggcttccaacccttagtgctgaagttaacgcattaagcactccgctggggagtacggccgcaaggctgaaactcaaaggaattgacgggggcccgcacaagcggtggagcatgtggtttaattcgaagcaacgcgaagaaccttaccaggtcttgacatccttggctacttctagagatagaaggttcccttcggggaccaagtgacaggtggtgcatggttgtcgtcagctcgtgtcgtgagatgttgggttaagtcccgcaacgagcgcaacccctaatcttagttgccagcattcagttgggcactctaaggtgactgccggtgacaaaccggaggaaggcggggatgacgtcaaatcatcatgccccttatgacctgggctacacacgtgctacaatggatgggacaaacggaagcgaacccgtgaggggtagccaatccgagaaacccattctcagttcggattgcaggctgcaactcgcctgcatgaagccggaatcgctagtaatcgcagatcagcatgctgcggtgaatacgttcccgggccttgtacacaccgcccgtcacaccacgagagttggcaacacccgaagcc

SEQ ID NO: 3040 - DNA, 1468 bp, Salinibacillus aidingensis
gacgctggcggcgtgcctaatactgcaagtcgagcgcgtgaaacaagttgattccttcgggatgaaacttgtggaacgagcggcggacgggtgagtaacacgtgggcaacctgcctgtaagatcgggataactccgggaaaccggggctaataccggataacacctccgaccgcatggtcggaagttgaaagacggcttttatgctgtcacttacagatgggcccgcggcgcattagctagttggtgaggtaagagctcaccaaggcaacgatgcgtagccgacctgagagggtgatcggccacactgggactgagacacggcccagactcctacgggaggcagcagtagggaatcttccgcaatggacgaaagtctgacggagcaacgccgcgtgagtgatgaaggtcttcggatcgtaaagctctgttgtcagggaagaacaagtacaagaggaactgcttgtaccttgacggtacctgaccagaaagccacggctaactacgtgccagcagccgcggtaatacgtaggtggcaagcgttgtccggaattattgggcgtaaagcgcgcgcaggcggtttcttaagtctgatgtgaaagcccacggcttaaccgtggagggtcattggaaactgggaggcttgagtgcaggagaggagagtggaattccacgtgtagcggtgaaatgcgtagatatgtggaggaacaccagtggcgaaggcgactctctggcctgtaactgacgctgaggcgcgaaagcgtggggagcgaacaggattagataccctggtagtccacgccgtaaacgttgagtgctaggtgttagggggtttccgccccttagtgctgaagttaacgcattaagcactccgcctggggagtacggccgcaaggctgaaactcaaaggaattgacgggggcccgcacaagcggtggagcatgtggtttaattcgaagcaacgcgaagaaccttaccaggtcttgacatcctctgctacctctagagatagagggttcccttcggggacagagtgacaggtggtgcatggttgtcgtcagctcgtgtcgtgagatgttgggttaagtcccgcaacgagcgcaacccttgaccttagttgccagcattaagttgggcactctagggtgactgccggtgacaaaccggaggaaggtggggatgacgtcaaatcatcatgccccttatgacctgggctacacacgtgctacaatggatggtacaaagggcagcgaagccgcgaggtgaagctaatcccataaaaccattctcagttcggattgcaggctgcaactcgcctgtatgaagccggaatcgctagtaatcgcggatcagcatgccgcggtgaatacgttcccgggccttgtacacaccgcccgtcacaccacgagagttggcaacacccgaagtcggtggggtaaccttttggagccagccgcctaaggtggggcc

SEQ ID NO: 3041 - DNA, 1453 bp, Salinicoccus alkaliphilus
aatacatgcaagtcgagcgcgtcttcatgggagcttgctcccgtggcgacgagcggcggacgggtgagtaacacgtgggcaacctgcccatcagacggggataaccgcgggaaaccgtggctaataccggataatccttttccacgcaggtgggaaagttgaaaggcggcttcggctgccgctgatggatgggcctgcggcgcattagctggttggtggggtaacggcccaccaaggcgacgatgcgtagccgacctgagagggtgatcggccacactgggactgagacacggcccagactcctacgggaggcagcagtagggaatcttccgcaatggacgcaagtctgacggagcaacgccgcgtgagtgacgaagggtttcggctcgtaaaactctgttgtcagggaagaacgtccccgtgagtaactgcacggggagtgacggtacctgaccagaaagccacggctaactacgtgccagcagccgcggtaatacgtaggtggcaagcgttatccggaattattgggcgtaaagcgcgcgtaggcggtttcttaagtctgatgtgaaagcccccggctcaaccggggagggtcattggaaactggggaacttgagtgcagaagaggagagtggaattccatgtgtagcggtgaaatgcgcagagatatggaggaacaccagtggcgaaggcggctctctggtctgtaactgacgctgatgtgcgaaagcgtggggatcaaacaggattagataccctggtagtccacgccgtaaacgatgagtgctaagtgttagggggtttccgccccttagtgctgcagctaacgcattaagcactccgcctggggagtacggccgcaaggttgaaactcaaaggaattgacggggacccgcacaagcggtggagcatgtggtttaattcgaagcaacgcgaagaaccttaccaaatcttgacatcctctgaaccccctggagacagggcttcccttcggggcagagtgacaggtggtgcatggttgtcgtcagctcgtgtcgtgagatgttgggttaagtcccgcaacgagcgcaacccttaaacttagttgccagcattcagttgggcactctaagttgactgccggtgacaaaccggaggaaggtggggatgacgtcaaatcatcatgccccttatgatttgggctacacacgtgctacaatggacaggtgacaaagggcagctacgccgtgaggccaagcgaatcccataaaactgttctcagttcggattggagtctgcaactcgactccatgaagctggaatcgctagtaatcgtggatcagcatgccacggtgaatacgttcccgggtcttgtacacaccgcccgtcacaccacgaaagtcagtaacacctgaagccggtgggccaaccttcatggaggcagccgtcgaaggtgggattgatgattggggtg

SEQ ID NO: 3042 - DNA, 1474 bp, Salinicoccus carnicancri
gatgaacgctggcggcgtgcctaatacatgcaagtcgaacgcgagaagagggagcttggctccctcggatcgagtggcggacgggtgagtaacacgtaggcaacctgcccatcagccggggataactgcgggaaaccgtggctaataccggataatcctttccaccgcggggtggagagttgaaagacggtttcggctgtcgctgatggatgggcctgcggcgcattagctggttggtggggtaacggcccaccaaggcgacgatgcgtagccgacctgagagggtgatcggccacactgggactgagacacggcccagactcctacgggaggcagcagtagggaatcttccgcaatggacgcaagtctgacggagcaacgccgcgtgagtgaagaagggtttcggctcgtaaaactctgttgttgaggaagaacgacaggtagagtaactgctacctgtgtgacggtactcaaccagaaagccacggctaactacgtgccagcagccgcggtaatacgtaggtggcaagcgttatccggaattattgggcgtaaagcgcgcgtaggcggtctgttaagtctgatgtgaaagcccccggctcaaccggggagggtcattggaaactgggagacttgagtgcagaagaggagagtggaattccatgtgtagcggtgaaatgcgcagagatatggaggaacaccagtggcgaaggcggctctctggtctgtaactgacgctgatgtgcgaaagcgtggggatcaaacaggattagataccctggtagtccacgccgtaaacgatgagtgctaagtgttagggggtttccgccccttagtgctgcagcaaacgcattaagcactccgcctggggagtacggccgcaaggctgaaactcaaaggaattgacggggacccgcacaagcggtggagcatgtggtttaattcgaagcaacgcgaagaaccttaccaaatcttgacatcctctgaccgccctggagacagggcttcccttcggggcagagtgacaggtggtgcatggttgtcgtcagctcgtgtcgtgagatgttgggttaagtcccgcaacgagcgcaacccttatgactagttgccagcattgagttgggcactctagtgagactgccggtgacaaaccggaggaaggtggggatgacgtcaaatcatcatgccccttatgatttgggctacacacgtgctacaatggacaggaacaaagggcagcgagaccgcgaggttgagcgaatcccataaaactgttctcagttcggattggagtctgcaactcgactccatgaagctggaatcgctagtaatcgtggatcagaatgccacggtgaatacgttcccgggtcttgtacacaccgcccgtcacaccacgaaagtcagtaacacctgaagccggtgggccaacccttacgggaggcagccgtcgaaggtgggaccgatgattggggtg

SEQ ID NO: 3043 - DNA, 1474 bp, Salinicoccus halodurans
gatgaacgctggcggcgtgcctaatacatgcaagtcgaacgcgagaaggaggagcttgctcctccggatcgagtggcggacgggtgagtaacacgtaggcaacctgcccatcagccggggataactgcgggaaaccgtggctaataccggataatcccgactgtcgatggacggttggttgaaaggcggcctttggctgccgctgatggatgggcctgcggcgcattagctagttggtggggtaagggcccaccaaggcgacgatgcgtagccgacctgagagggtgatcggccacactgggactgagacacggcccagactcctacgggaggcagcagtagggaatcttccgcaatggacgcaagtctgacggagcaacgccgcgtgagtgaagaagggtttcggctcgtaaaactctgttgttaaggaagaatgacaggcagagtaactgctgcctgtgtgacggtacttaaccagaaagccacggctaactacgtgccagcagccgcggtaatacgtaggtggcaagcgttatccggaattattgggcgtaaagcgcgcgtaggcggttttttaagtctgatgtgaaagcccccggctcaaccggggagggtcattggaaactggggaacttgagtgcagaagaggagagtggaattccatgtgtagcggtgaaatgcgcagagatatggaggaacaccagtggcgaaggcggctctctggtctgtaactgacgctgatgtgcgaaagcgtggggatcaaacaggattagataccctggtagtccacgccgtaaacgatgagtgctaagtgttagggggtttccgccccttagtgctgcagcaaacgcattaagcactccgcctggggagtacggccgcaaggctgaaactcaaaggaattgacggggacccgcacaagcggtggagcatgtggtttaattcgaagcaacgcgaagaaccttaccaaatcttgacatcctctgacagccatggagacatggtttcccttcggggcagagtgacaggtggtgcatggttgtcgtcagctcgtgtcgtgagatgttgggttaagtcccgcaacgagcgcaacccttattactagttgccagcattcagttgggcactctagtgagactgccggtgacaaaccggaggaaggtggggatgacgtcaaatcatcatgccccttatgatttgggctacacacgtgctacaatgggcaggaacaaagggcagcgagaccgcgaggttcagcgaatcccataaaactgctctcagttcggattggagtctgcaactcgactccatgaagctggaatcgctagtaatcgtggatcagaatgccacggtgaatacgttcccgggtcttgtacacaccgcccgtcacaccacgaaagtcagtaacacctgaagccggtgggccaacccttttgggaggcagccgtcgaaggtgggaccgatgattggggtg

SEQ ID NO: 3044 - DNA, 1474 bp, Salinicoccus kekensis
aacgaacgctggcggcgtgcctaatacatgcaagtcgagcgcgtcttttgggggcttgcccccataaagacgagcggcggacgggtgagtaacacgtgggcaacctgcccatcagaccgggataaccacgggaaaccgtggctaataccggataatcctttgccacgcaggtggcaaagttgaaagacggtttcggctgtcactgatggatgggcctgcggcgcattagctggttggtggggtaacggcccaccaaggcgacgatgcgtagccgacctgagagggtgatcggccacactgggactgagacacggcccagactcctacgggaggcagcagtagggaatcttccgcaatggacgcaagtctgacggagcaacgccgcgtgagtgacgaagggtttcggctcgtaaaactctgttgttaaggaagaacgtccccgtgagtaactgcacggggagtgacggtacttaaccagaaagccacggctaactacgtgccagcagccgcggtaatacgtaggtggcaagcgttatccggaattattgggcgtaaagcgcgcgtaggcggtttcttaagtctgatgtgaaagcccccggctcaaccggggagggtcattggaaactggggaacttgagtgcagaagaggagagtggaattccatgtgtagcggtgaaatgcgcagagatatggaggaacaccagtggcgaaggcggctctctggtctgcaactgacgctgatgtgcgaaagcgtggggatcaaacaggattagataccctggtagtccacgccgtaaacgatgagtgctaagtgttagggggtttccgccccttagtgctgcagctaacgcattaagcactccgcctggggagtacggccgcaaggttgaaactcaaaggaattgacggggacccgcacaagcggtggagcatgtggtttaattcgaagcaacgcgaagaaccttaccaaatcttgacatcctctgaccgccctggagacagggcttcccttcggggcagagtgacaggtggtgcatggttgtcgtcagctcgtgtcgtgagatgttgggttaagtcccgcaacgagcgcaacccttaagcttagttgccagcattcagttgggcactctaagttgactgccggtgacaaaccggaggaaggtggggatgacgtcaaatcatcatgccccttatgatttgggctacacacgtgctacaatggacaggtgacaaagggcagctacgccgtgaggccaagcgaatcccataaaactgttctcagttcggattggagtctgcaactcgactccatgaagctggaatcgctagtaatcgtggatcagcatgccacggtgaatacgttcccgggtcttgtacacaccgcccgtcacaccacgaaagtccgtaacacctgaagccggtgggccaacctttatggaggcagccgtcgaaggtgggattgatgattggggtg

SEQ ID NO: 3045 - DNA, 1406 bp, Salinicoccus qingdaonensis
tcgagcgcgagattggggagcttgctccccatgatcgagcggcggacgggtgagtaacacgtaggcaacctacccatcagactgggataaccgcgggaaaccgtggctaataccggatgaccctttatgacaccggtcgtaaagttgaaaggcgcttatggtgccgctgatggatgggcctgcggcgcattagctggttggtggggtaacggcccaccaaggcgacgatgcgtagccgacctgagagggtgatcggccacactgggactgagacacggcccagactcctacgggaggcagcagtagggaatcttccgcaatggacgcaagtctgacggagcaacgccgcgtgagtgaagaagggtttcggctcgtaaaactctgttgttaaggaagaatgtcatgtatttaactgatatgtgagtgacggtacttaaccagaaagccacggctaactacgtgccagcagccgcggtaatacgtaggtggcaagcgttatccggaattattgggcgtaaagcgcgcgtaggcggtttcttaagtctgatgtgaaagcccccggctcaaccggggagggtcattggaaactggggaacttgagtgcagaagaggagagtggaattccatgtgtagcggtgaaatgcgcagagatatggaggaacaccagtggcgaaggcggctctctggtctgtaactgacgctgatgtgcgaaagcgtggggatcaaacaggattagataccctggtagtccacgccgtaaacgatgagtgctaagtgttagggggtttccgccccttagtgctgcagctaacgcattaagcactccgcctggggagtacgaccgcaaggttgaaactcaaaggaattgacggggacccgcacaagcggtggagcatgtggtttaattcgaagcaacgcgaagaaccttaccaaatcttgacatcctctgaccgccctggagacagggcttcccttcggggcagagagacaggtggtgcatggttgtcgtcagctcgtgtcgtgagatgttgggttaagtcccgcaacgagcgcaacccttaagcttagttgccagcattcagttgggcactctaagttgactgccggtgacaaaccggaggaaggtggggatgacgtcaaatcatcatgccccttatgatttgggctacacacgtgctacaatggacggtacaaagggcagcgacgccgcaaggccaagcgaatcccataaaactgttctcagttcggattggagtctgcaactcgactccatgaagctggaatcgctagtaatcgtggatcagcatgccacggtgaatacgttcccgggtcttgtacacaccgcccgtcacaccacgaaagtcagtaacacctgaagccggtgggccaaccattatggaggcagc

SEQ ID NO: 3046 - DNA, 1470 bp, Salinicoccus roseus
gatgaacgctggcggcgtgcctaatacatgcaagtcgaacgcgcggatcaggagcttgctcctgtgacgcgagtggcggacgggtgagtaacacgtaggcaacctgcccatcagactgggataaccacgggaaaccgtggctaataccggataacccttttccacacaggtggaaaagttgaaaggcggcttcggctgtcactgatggatgggcctgcggcgcattagctggttggtggggtaacggcccaccaaggcgacgatgcgtagccgacctgagagggtgatcggccacactgggactgagacacggcccagactcctacgggaggcagcagtagggaatcttccgcaatggacgaaagtctgacggagcaacgccgcgtgagtgaagaagggtttcggctcgtaaaactctgttgtcagggaagaacgccgacgggagtaactgcccgtcgggtgacggtacctgaccagaaagccacggctaactacgtgccagcagccgcggtaatacgtaggtggcaagcgttatccggaattattgggcgtaaagcgcgcgtaggcggttcgttaagtctgatgtgaaagcccccggctcaaccggggagggtcattggaaactggcggacttgagtgcagaagaggagagtggaattccatgtgtagcggtgaaatgcgcagagatatggaggaacaccagtggcgaaggcggctctctggtctgcaactgacgctgaggtgcgaaagcgtggggatcaaacaggattagataccctggtagtccacgccgtaaacgatgagtgctaagtgttagggggtttccgccccttagtgctgcagctaacgcattaagcactccgcctggggagtacggccgcaaggttgaaactcaaaggaattgacggggacccgcacaagcggtggagcatgtggtttaattcgaagcaaggcgaagaaccttaccaaatcttgacatcctctgaccaccctggagacagggtttccttcggggcagagtgacaggtggtgcatggttgtcgtcagctcgtgtcgtgagatgttgggttaagtcccgcaacgagcgcaacccttatcattagttgccagcattcagttgggcactctaatgagactgccggtgacaaaccggaggaaggtggggatgacgtcaaatcatcatgccccttatgatttgggctacacacgtgctacaatggacaggtacaaagggcagctaagccgcgaggccaagcgaatcccataaaactgttctcagttcggattggagtctgcaactcgactccatgaagctggaatcgctagtaatcgtggatcagaatgccacggtgaatacgttcccgggtcttgtacacaccgcccgtcacaccacgaaagtcggtaacacctgaagccggtgggccaacctcttggaggcagccgtcgaaggtgggaccgatgattggggtg

SEQ ID NO: 3047 - DNA, 1445 bp, Salinicoccus sediminis
gatgaacgctggcggcgtgcctaatacatgcaagtcgaacgcgagaggagggagcttgctccctctgatcgagtggcggacgggtgagtaacacgtaggcaacctgcccatcagtccgggataaccgcgggaaaccgtggctaataccggatgatcctctccaccgcggggtggggagttgaaagacggtttcggctgtcgctgatggatgggcctgcggcgcattagctggttggcggggtaacggcccaccaaggcaacgatgcgtagccgacctgagagggtgatcggccacactgggactgagacacggcccagactcctacgggaggcagcagtagggaatcttccgcaatggacgcaagtctgacggagcaacgccgcgtgagtgaagaagggtttcggctcgtaaaactctgttgttaaggaagaacgacaggtagagtaactgctacctgtgtgacggtacttaaccagaaagccacggctaactacgtgccagcagccgcggtaatacgtaggtggcaagcgttatccggaattattgggcgtaaagcgcgcgtaggcggtcttttaagtctgatgtgaaagcccccggctcaaccggggagggtcattggaaactgggagacttgagtgcagaagaggagagtggaattccatgtgtagcggtgaaatgcgcagagatatggaggaacaccagtggcgaaggcggctctctggtctgtaactgacgctgatgtgcgaaagcgtggggatcaaacaggattagataccctggtagtccacgccgtaaacgatgagtgctaagtgttagggggtttccgccccttagtgctgcagcaaacgcattaagcactccgcctggggagtacggccgcaaggctgaaactcaaaggaattgacggggacccgcacaagcggtggagcatgtggtttaattcgaagcaacgcgaagaaccttaccaaatcttgacatcctctgacccccctggagacaggggttcccttcggggcagagtgacaggtggtgcatggttgtcgtcagctcgtgtcgtgagatgttgggttaagtcccgcaacgagcgcaacccttatgactagttgccagcattgagttgggcactctagtgagactgccggtgacaaaccggaggaaggtggggatgacgtcaaatcatcatgccccttatgatttgggctacacacgtgctacaatggacaggtacaaagggcagcgagaccgcgaggttgagcgaatcccataaaactgttctcagttcggattggagtctgcaactcgactccatgaagctggaatcgctagtaatcgtggatcagaatgccacggtgaatacgttcccgggtcttgtacacaccgcccgtcacaccacgaaagtcagtaacacctgaagccggtgggccaacccttctgggaggcagcc

SEQ ID NO: 3048 - DNA, 1463 bp, Salinicola socius
attgaacgctggcggcaggcctaacacatgcaagtcgagcggcagcacggggagcttgctccctggtggcgagcggcggacgggtgagtaatgcataggaatctgcccgatagtgggggataacgtggggaaacccacgctaataccgcatatgtcctacgggagaaagcggaggatcttcggacttcgcgctatcggatgagcctatgtcggattagctagttggtaaggtaacggcttaccaaggcgacgatccgtagctggtctgagaggatgatcagccacactgggactgagacacggcccagactcctacgggaggcagcagtggggaatattggacaatgggcgaaagcctgatccagccatgccgcgtgtgtgaagaaggctttcgggttgtaaagcactttcagcgaggaagaaagcctttgggttaataccccagaggaaggacatcactcgcagaagaagcaccggctaactccgtgccagcagccgcggtaatacggagggtgcgagcgttaatcggaattactgggcgtaaagcgcgcgtaggtggcttggcacgccggttgtgaaagccccgggctcaacctgggaactgcatccggaacggccaggctagagtgcaggagaggaaggtagaattcccggtgtagcggtgaaatgcgtagagatcgggaggaataccagtggcgaaggcggccttctggcctgacactgacactgaggtgcgaaagcgtgggtagcaaacaggattagataccctggtagtccacgccgtaaacgatgtcgactagccgttgggacctttaaggacttagtggcgcagttaacgcgataagtcgaccgcctggggagtacggccgcaaggttaaaactcaaatgaattgacgggggcccgcacaagcggtggagcatgtggtttaattcgatgcaacgcgaagaaccttacctacccttgacatccagagaactttccagagatggattggtgccttcgggaactctgagacaggtgctgcatggctgtcgtcagctcgtgttgtgaaatgttgggttaagtcccgtaacgagcgcaacccttgtccttatttgccagcacgtaatggtgggaactctaaggagactgccggtgacaaaccggaggaaggtggggacgacgtcaagtcatcatggcccttacgggtagggctacacacgtgctacaatggccggtacaaagggttgcgagatcgcgagatggagcgaatcccagaaagccggcctcagttcggatcggagtctgcaactcgactccgtgaagtcggaatcgctagtaatcgtgaatcagaatgtcacggtgaatacgttcccgggccttgtacacaccgcccgtcacaccatgggagtggactgcaccagaagtggttagcttaaccttcgggagagcgatcaccacggtgtggttcatgactggggtg

SEQ ID NO: 3049 - DNA, 1407 bp, Salinimonas chungwhensis
cgctggcggcaggcctaacacatgcaagtcgagcggtagcatttctagcttgctagaagatgacgagcggcggacgggtgagtaatgcttgggaacttgcctttgcgagggggataaccactggaaacggtggctaataccgcataatgtctacggaccaaagggggctttcgggctcctgcgcaaagagaggcccaagtgagattagctagttggtggggtaaaggctcaccaaggcaacgatctctagctgttctgagaggaagatcagccacactgggactgagacacggcccagactcctacgggaggcagcagtggggaatattggacaatgggcgcaagcctgatccagccatgccgcgtgtgtgaagaaggccttcgggttgtaaagcactttcagcggggaggaaggccaagtagttaatacctgcttggattgacgttacccgcagaagaagcaccggctaactccgtgccagcagccgcggtaatacggagggtgcaagcgttaatcggaattactgggcgtaaagcgcacgcaggcggtttgttaagctagatgtgaaagccccgggctcaacctgggacggtcatttagaactggcagactagagtcttggagaggggagtggaattccaggtgtagcggtgaaatgcgtagatatctggaggaacatcagtggcgaaggcgactccctggccaaagactgacgctcatgtgcgaaagtgtgggtagcgaacaggattagataccctggtagtccacaccgtaaacgctgtctactagctgtacgcgactataagttgtgtgtagcgaagctaacgcgataagtagaccgcctggggagtacggccgcaaggttaaaactcaaatgaattgacgggggcccgcacaagcggtggagcatgtggtttaattcgatgcaacgcgaagaaccttacctacacttgacatgcagagaactttccagagatggataggtgccttcgggaactctgacacaggtgctgcatggctgtcgtcagctcgtgtcgtgagatgttgggttaagtcccgtaacgagcgcaacccttgtccttagttgccagccttaagttgggcactctaaggagaccgccggtgacaaaccggaggaaggtggggacgacgtcaagtcatcatggcccttacgggatgggctacacacgtgctacaatggcgcatacaaagggcagcaagccagcgatggtgagcggaccccttaaagaatatcgtagtccggatcggagtctgcaactcgactccgtgaagtcggaatcgctagtaatcgcaggtcagaatactgcggtgaatacgttcccgggccttgtacacgccgcccgtcacaccatgggagtgggatgcaaaagaagtggttagcctaa

SEQ ID NO: 3050 - DNA, 1373 bp, Salinisphaera hydrothermalis
cggcaggcctaacacatgcaagtcgagcggcagcagcaccaagcttgcttggtggctggcgagcggcggacgggtgagtaatgcgtagaaatctgcccttttgtggaggataacctggggaaactcaggctaatactgcataatctctacggagcaaagcggggctcttcgaccctcgcgcgaaaggatgagtctacgtctgattagctagttggtgcggtaacggcgtaccaaggcgacgatcagtagctggtctgagaggatgatcagccacaccgggactgagacacggcccggactcctacgggaggcagcagtggggaatattggacaatgggcgaaagcctgatccagccatgccgcgtgtgtgaagaaggccttagggttgtaaagcactttaagcaggaaagaaaagcgccgggttaatacctcgagacgtattgacggtacctagaataagcaccggctaactccgtgccagcagccgcggtaatacggagggtgcaagcgttaatcggaattactgggcgtaaagcgagtgcaggcggtcgcgtgtgtcgggtgtgaaagcccagggctcaaccttggaattgcactcgaaactgcgtgactagaatgtggtagaggaagacggaattccacgtgtagcggtgaaatgcgtagatatgtggaggaacaccaatggcgaaggcagtcttctgggccaacattgacgctgaggctcgaaagcgtgggtagcaaacaggattagataccctggtagtccacgccgtaaacgatgagaactagacgttggttgacatagtcgaccagtgtcgcagctaacgcgttaagttctccgcctggggagtacggccgcaaggttgaaactcaaaggaattgacgggggcccgcacaagcggtggagcatgtggtttaattcgatgcaacgcgaagaaccttacctgcccttgacatcctcggaatttggcagagatgccttagtgccttcgggaaccgagtgacaggtgctgcatggctgtcgtcagctcgtgtcgtgagatgttgggttaagtcccgcaacgagcgcaacccctatccttagttgccagcattcagttgggcactctaaggagactgccggtgacaaaccggaggaaggtggggatgacgtcaagtcatcatggcccttatgggcagggctacacacgtgctacaatggcaagtacaaagagttgcgaacccgcgaggggtagccaatctcataaagcttgtcccagtccggattgtagtctgcaactcgactacatgaagtcggaatcgctagtaatcgcagatcagcaatgctgcggtgaatacgttcccgggccttgtacacaccgcccgtcacacca

SEQ ID NO: 3051 - DNA, 1462 bp, Salinisphaera japonica
attgaacgctggcggcaggcctaacacatgcaagtcgagcggaaacgacatcttcggatgggcgtcgagcggcggacgggtgagtaatgcgtagatatctgccttttagtggaggataacctggggaaactcaggctaatactgcataatctctacggagcaaagcggaggatcttcggacttcgcgctattagatgagtctacgtctgattagctagttggtgcggtaacggcgtaccaaggcgacgatcagtagctggtctgagaggatggtcagccacaccgggactgagacacggcccggactcctacgggaggcagcagtggggaatattggacaatgggcgaaagcctgatccagccatgccgcgtgtgtgaagaaggccttagggttgtaaagcactttaagcaggaaagaaaagcgccgggttaataccccgagcgtattgacggtacctgcagaataagcaccggctaactccgtgccagcagccgcggtaatacggagggtgcaagcgttaatcggaattactgggcgtaaagcgagtgcaggcggtcgcgtgtgtcgggtgtgaaagccccgggctcaacctgggaattgcatccgaaactgcgtgactagaatatggtagaggaagacggaattccacgtgtagcggtgaaatgcgtagatatgtggaggaacaccaatggcgaaggcagtcttctgggccaatattgacgctgaggctcgaaagcgtgggtagcaaacaggattagataccctggtagtccacgccgtaaacgctgagaactagacgttggatgacatagtcgttcagtgtcgcagctaacgcgttaagttctccgcctggggagtacggccgcaaggttgaaactcaaaggaattgacgggggcccgcacaagcggtggagcatgtggtttaattcgatgcaacgcgaagaaccttacctgcccttgacatcctgtgaacctcttggagacgagagggtgctttcgagaacacagtgacaggtgctgcatggctgtcgtcagctcgtgtcgtgagatgttgggttaagtcccgcaacgagcgcaacccctatccttagttgccagcattaagttgggcactctaaggagactgccggtgacaaaccggaggaaggtggggacgacgtcaagtcatcatggcccttatgggcagggctacacacgtgctacaatggcaagtacaaagggtatgcgaactcgcgagagggtgccaatcccataaagcttgtcccagtccggatcgcagtctgcaactcgactgcgtgaagtcggaatcgctagtaatcgcagatcagcaatgctgcggtgaatacgttcccgggccttgtacacaccgcccgtcacaccatggaagtcggctgcaccagaagtggctagtctaactcttcggagaggacggtcaccacggtgtggtcgatgactggggtg

SEQ ID NO: 3052 - DNA, 1421 bp, Salinisphaera orenii
gctacacatgcagtcgagcggcagcagcaggagcttgctcctggctggcgagcggcggacgggtgagtaatgcctaggaatctgcccttttgtggaggataacccggggaaactcgggctaatactgcataatctctacggagcaaagcggggctcttcgaccctcgcgcagaaggatgagcctaggtctgattagcttgttggtggggtaacggcctaccaaggcaacgatcagtagctggtctgagaggatgatcagccacaccgggactgagacacggcccggactcctacgggaggcagcagtggggaatattggacaatgggcgaaagcctgatccagccatgccgcgtgtgtgaagaaggccttagggttgtaaagcactttaagcaggaaagaaaagcgccgagttaatagctcgagcgtgttgacggtacctgcagaataagcaccggctaactccgtgccagcagccgcggtaatacggagggtgcaagcgttaatcggaattactgggcgtaaagcgagtgcaggcggttgcgtatgtcggatgtgaaagccccgggctcaacctgggaattgcattcgaaactgcgtaactagaatatggtagaggaagacggaattccacgtgtagcggtgaaatgcgtagatatgtggaggaacaccaatggcgaaggcagtcttctgggccaatattgacgctgaggctcgaaagcgtgggtagcaaacaggattagataccctggtagtccacgccgtaaacgatgagaactagacgttgggcgacatagtcgctcagtgtcgcagcaaacgcgttaagttctccgcctggggagtacggccgcaaggttgaaactcaaaggaattgacgggggcccgcacaagcggtggagcatgtggtttaattcgatgcaacgcgaagaaccttacctgcccttgacatcctgtgaacccttcggagacgaaggggtgctttcgagaacacagtgacaggtgctgcatggctgtcgtcagctcgtgtcgtgagatgttgggttaagtcccgcaacgagcgcaacccctatccttagttgccagcattaagttgggcactctaaggagactgccggtgacaaaccggaggaaggtggggatgacgtcaagtcatcatggcccttatgggcagggctacacacgtgctacaatggcaagtacaaagggttgctaagccgcgaggtggtgctaatctcataaagcttgtcttagtccggattgcagtctgcaactcgactgcatgaagtcggaatcgctagtaatcgcagatcagcaatgctgcggtgaatacgttcccgggccttgtacacaccgcccgtcacaccatggaagtcggttgcaccagaagaggctagtctaaccttcgggaggacggtctccacgg

SEQ ID NO: 3053 - DNA, 1458 bp, Salinisphaera shabanensis
attgaacgctggcggcaggcctaacacatgcaagtcgagcggaaacgacatcttcggatgggcgtcaagcggcggacgggtgagtaatgcctaggaatctgcccttttgtggaggataacccggggaaactcgggctaatactgcataatctctacggagcaaagcggggctcttctaccctcgcgcaaaaggatgagcctaggtctgattagcttgttggtggggtaacggcctaccaaggcgacgatcagtagctggtctgagaggatgatcagccacaccgggactgagacacggcccggactcctacgggaggcagcagtggggaatattggacaatgggcggaagcctgatccagccatgccgcgtgtgtgaagaaggccttagggttgtaaagcactttaagcaggaaagaaaagcgccggattaatactccgagcgtgttgacggtacctgcagaataagcaccggctaactccgtgccagcagccgcggtaatacggagggtgcaagcgttaatcggaattactgggcgtaaagcgtgcgtaggcggttgcgtgtgtcggatgtgaaagccccgggctcaacctgggaattgcattcgaaactgcgcaactagaatgtggtagaggaagatggaattccacgtgtagcggtgaaatgcgtagatatgtggaggaacaccaatggcgaaggcaatcttctgggccaacattgacgctgaggtacgaaagcgtgggtagcaaacaggattagataccctggtagtccacgccgtaaacgatgagaactagacgttggttgacatagtcgatcagtgtcgcagcaaacgcgttaagttctccgcctggggagtacggccgcaaggttgaaactcaaaggaattgacgggggcccgcacaagcggtggagcatgtggtttaattcgatgcaacgcgaagaaccttacctgcccttgacatcctgtgaaccctccggagacggaggggtgctttcgagaacacagtgacaggtgctgcatggctgtcgtcagctcgtgtcgtgagatgttgggttaagtcccgcaacgagcgcaacccctatccttagttgccagcattaagttgggcactctaaggagactgccggtgacaaaccggaggaaggtggggatgacgtcaagtcatcatggcccttatgggcagggctacacacgtgctacaatggcaagtacaaagggttgcgaaccagcgatggggtgctaatctcataaagcttgtcttagtccggattgcagtctgcaactcgactgcatgaagtcggaatcgctagtaatcgcagatcagcaatgctgcggtgaatacgttcccgggccttgtacacaccgcccgtcacaccatggaagtcggttgcaccagaagaggctagtctaaccttagggaggacggtctccacggtgtgatcgatgactggggtg

SEQ ID NO: 3054 - DNA, 1557 bp, Salinivibrio kushneri
agagtttgatcatggctcagattgaacgctggcggcaggcctaacacatgcaagtcgagcggaaacggcagcattgaagcttcggtggatttgctggacgtcgagcggcggacgggtgagtaacggctgggaacctgccctgacgcgggggataaccgttggaaacgacggctaataccgcataatgtcttagttcattacgagctgggaccaaaggtggcctctacatgtaagctatcgcgttgggatgggcccagttaggattagctagttggtaaggtaatggcttaccaaggcaacgatccttagctggtttgagaggatgatcagccacactgggactgagacacggcccagactcctacgggaggcagcagtggggaatattgcacaatgggggagaccctgatgcagccatgccgcgtgtgtgaagaaggccttcgggttgtaaagcactttcagcagtgaggaaggtggtgtacttaataagtgcatggcttgacgttagctgcagaagaagcaccggctaactccgtgccagcagccgcggtaatacggagggtgcgagcgttaatcggaattactgggcgtaaagcgcatgcaggcggtttgttaagtcagatgtgaaagcccggggctcaacctcggaaccgcatttgaaactggcaggctagagtcttgtagaggggggtagaatttcaggtgtagcggtgaaatgcgtagagatctgaaggaataccagtggcgaaggcggccccctggacaaagactgacgctcagatgcgaaagcgtgggtagcaaacaggattagataccctggtagtccacgccgtaaacgctgtctacttggaggttgaggtttagactttggctttcggcgctaacgcattaagtagaccgcctggggagtacggccgcaaggttaaaactcaaatgaattgacgggggcccgcacaagcggtggagcatgtggtttaattcgatgcaacgcgaagaaccttacctactcttgacatccagcgaatcctttagagatagaggcgtgccttcgggagcgctgagacaggtgctgcatggctgtcgtcagctcgtgttgtgaaatgttgggttaagtcccgcaacgagcgcaacccttatccttgtttgccagcacataatggtgggaactccagggagactgccggtgataaaccggaggaaggtggggacgacgtcaagtcatcatggcccttacgagtagggctacacacgtgctacaatggcagatacagagggcagcgaagctgcgaagtggagcgaatcccttaaagtctgtcgtagtccggattggagtctgcaactcgactccatgaagtcggaatcgctagtaatcgtggatcagaatgccacggtgaatacgttcccgggccttgtacacaccgcccgtcacaccatgggagtgggctgcaccagaagtagatagcttaaccttcgggagggcgtttaccacggtgtggttcatgactggggtgaagtcgtaacaaggtagccctaggggaacctggggctggatcacct

SEQ ID NO: 3055 - DNA, 1377 bp, Salinivibrio sharmensis
  misc_feature (949)..(949): n is a, c, g, or t
gctggacgtcgagcggcggacgggtgagtaacggctgggaacctgccctgacgagggggataaccgttggaaacgacggctaataccgcataatgtcttcggaccaaaggtggcctctacatgtaagctatcgcgttgggatgggaccagttaggattagctagttggtaaggtaatggcttaccaaggcgacgatccttagctggtttgagaggatgatcagccacactgggactgagacacggcccagactcctacgggaggcagcagtggggaatattgcacaatgggggagaccctgatgcagccatgccgcgtgtgtgaagaaggccttcgggttgtaaagcactttcagcagtgaggaaggtggtgtacttaatacgtgcattgcttgacgttagctgcagaagaagcaccggctaactccgtgccagcagccgcggtaatacggagggtgcgagcgttaatcggaattactgggcgtaaagcgcatgcaggcggtttgttaagtcagatgtgaaagcccggggctcaacctcggaaccgcatttgaaactggcaggctagagtcttgtagaggggggtagaatttcaggtgtagcggtgaaatgcgtagagatctgaaggaataccagtggcgaaggcggccccctggacaaagactgacgctcagatgcgaaagcgtgggtagcaaacaggattagataccctggtagtccacgccgtaaacgctgtctacttggaggttgaggtttaagactttggctttcggcgctaacgcattaagtagaccgcctggggagtacggccgcaaggttaaaactcaaatgaattgacgggggcccgcacaagcggtggagcatgtggtttaattcgatgcaacgcgaagaaccttacctactcttgacatccagagaactttccagagatggattggtgccttcggganctctgagacaggtgctgcatggctgtcgtcagctcgtgttgtgaaatgttgggttaagtcccgcaacgagcgcaacccttatccttgtttgccagcacataatggtgggaactccagggagactgccggtgataaaccggaggaaggtggggacgacgtcaagtcatcatggcccttacgagtagggctacacacgtgctacaatggcagatacagagggcagcgaagctgcgaagtggagcgaatcccttaaagtctgtcgtagtccggattggagtctgcaactcgactccatgaagtcggaatcgctagtaatcgtggatcagaatgccacggtgaatacgttcccgggccttgtacacaccgcccgtcacaccatgggagtgggctgcaccagaagtagatagcttaaccttcgggagggcgtt

SEQ ID NO: 3056 - DNA, 1446 bp, Salinivirga cyanobacteriivorans
gatgaacgctagcggcaggcttaacacatgcaagtcgaggggtaacaggttccttcgggaatgctgacgaccggcgcacgggtgagtaacgcgtatgcaaccttcctgtatcaggaggataggccttggaaacgaggattaatactgcgtaaaattattgtatcgcatggtataataatcaaatctacggaggatacagatgggcatgcgtgccattagctagatggtaaggtaacggcttaccatggccatgatggctaggggttctgcaaggaagatcccccacactggtactgagacacggaccagactcctacgggaggcagcagtgaggaatattggtcaatggaggcaactctgaaccagccaagccgcgtgaaggaagactgttctatgaattgtaaacttcttttgtgacagagtaaagatagctacgagtagttatttgcaagtatgtcatgaataagcatcggctaactccgtgccagcagccgcggtaatacggaggatgcaggcgttatccggatttattaggtttaaagggtgttcaggctgtctggtaagtcagaggtgaaagtcggttgcttaacgatcgaattgcctttgaaactgtcagacttgagtatggatgtggtaggcggaatgtgtagtgtagcggtgaaatgcatagatattacacagaactccaattgcgaaagcagcttaccaaaccagcactgacgctgaagcacgaaagcgtgggtagcgaacaggattagataccctggtagtccacgcagtaaacgatgctcactcgctgttggcaatacaccgtcagcggctaagggaaaccgataagtgagccacctggggagtacgatcgcaagattgaaactcaaaggaattgacgggggcccgcacaagcggtggaacatgtggtttaattcgatgatacgcgaggaaccttacctgggcttaaatgtgaagtgcattgtttggaaacagacatttccttcgggactctttacaaggtgctgcatggttgtcgtcagctcgtgccgtgaggtgtcgggttaagtcccataacgagcgcaacccctattgttagttaccagcgcgtgatggcggggactctaacgagactgccggtgtaaaccgcgaggaaggtggggatgacgtcaaatcagcacggcccttatgtccagggctacacacgtgttacaatggtcggtacagagggcagctaggcagcgatgtcaagcgaatctcgaaagccgatcccagttcggattggagtctgcaacccgactccatgaaggtggaatcgctagtaatcgcgcatcagccatggcgcggtgaatacgttcccgggccttgtacacaccgcccgtcaagccatggaagtctggggtgcctgaaggccgtaaccgcaaggagcggtctagggtaaaacagatgactggggct

SEQ ID NO: 3057 - DNA, 1491 bp, Salipaludibacillus aurantiacus
gacgaacgctggcggcgtgcctaatacatgcaagtcgagcgcaggaagcaagctgatcccttcggggtgacgcttgtggaatgagcggcggacgggtgagtaacacgtgggcaacctgccttgcagactgggataaccccgggaaaccggggctaataccggatgaccatccggatcgcatgatccgggtgtaaaagtggggaatttattcctcacactgcaagatgggcccgcggcgcattagctagttggtaaggtaacggcttaccaaggcgacgatgcgtagccgacctgagagggtgatcggccacactgggactgagacacggcccagactcctacgggaggcagcagtagggaatcatccgcaatgggcgaaagcctgacggtgcaacgccgcgtgaacgatgaaggttttcggatcgtaaagttctgttatgagggaagaacaagtgccggtcgaacaggccggcgccttgacggtacctcacgagaaagccccggctaactacgtgccagcagccgcggtaatacgtagggggcaagcgttgtccggaattattgggcgtaaagcgcgcgcaggcggtctcttaagtctgatgtgaaagcccacggctcaaccgtggagggtcattggaaactgggagacttgagtgtaggagaggaaagtggaattccacgtgtagcggtgaaatgcgtagatatgtggaggaacaccagtggcgaaggcgactttctggcctacaactgacgctgaggcgcgaaagcgtggggagcaaacaggattagataccctggtagtccacgccgtaaacgttgagtgctaggtgttaggggtttcgatgcccttagtgccgaagttaacacattaagcactccgcctggggagtacggccgcaaggctgaaactcaaaggaattgacgggggcccgcacaagcagtggagcatgtggtttaattcgaagcaacgcgaagaaccttaccaggtcttgacatcctctgaccaccctggagacagggctttccccttcgggggacagagtgacaggtggtgcatggttgtcgtcagctcgtgtcgtgagatgttgggttaagtcccgcaacgagcgcaacccttaatcttagttgccagcattcagttgggcactctaaggtgactgccggtgacaaaccggaggaaggtggggacgacgtcaaatcatcatgccccttatgacctgggctacacacgtgctacaatggatggtacaaagggcagcgagaccgcgaggttaagcgaatcccataaagccattctcagttcggattgcaggctgcaactcgcctgcatgaagccggaattgctagtaatcgcggatcagcatgccgcggtgaatacgttcccgggccttgtacacaccgcccgtcacaccacgagagtttgtaacacccgaagtcggtgaggtaaccttttggagccagccgccgaaggtgggacagatgattggggtg

SEQ ID NO: 3058 - DNA, 1470 bp, Salipaludibacillus neizhouensis
ctaatacatgcaagtcgagcgcaggaaacaagttgatcccttcggggtgacgcttgtggaatgagcggcggacgggtgagtaacacgtgggcaacctgccttgtagactgggataactccgggaaaccggagctaataccggatgaccaacggaatcgcatgattctgttgtaaaagtggggatttatcctcacactacgagatgggcccgcggcgcattagctagttggtaaggtaatggcttaccaaggcaacgatgcgtagccgacctgagagggtgatcggccacactggaactgagacacggtccagactcctacgggaggcagcagtagggaatcatccgcaatgggcgaaagcctgacggtgcaacgccgcgtgaacgatgaaggttttcggatcgtaaagttctgttatgagggaagaacaagtgccgttcgaatagggcggcaccttgacggtacctcacgagaaagccccggctaactacgtgccagcagccgcggtaatacgtagggggcaagcgttgtccggaattattgggcgtaaagcgcgcgcaggcggtctcttaagtctgatgtgaaagcccacggctcaaccgtggagggtcattggaaactgggggacttgagtgtaggagaggaaagtggaattccacgtgtagcggtgaaatgcgtagatatgtggaggaacaccagtggcgaaggcgactttctggcctataactgacgctgaggtgcgaaagcgtggggagcaaacaggattagataccctggtagtccacgccgtaaacgatgagtgctaggtgttaggggtttcgatgcccttagtgccgaagttaacacattaagcactccgcctggggagtacgaccgcaaggttgaaactcaaaggaattgacgggggcccgcacaagcagtggagcatgtggtttaattcgaagcaacgcgaagaaccttaccaggtcttgacatcctctgaccacccaagagattgggatttccccttcgggggacagagtgacaggtggtgcatggttgtcgtcagctcgtgtcgtgagatgttgggttaagtcccgcaacgagcgcaacccttgatcttagttgccagcattcagttgggcactctaaggtgactgccggtgataaaccggaggaaggtggggatgacgtcaaatcatcatgccccttatgacctgggctacacacgtgctacaatggatggtacaaagggctgcaagaccgcgaggtcaagcgaatcccataaagccattctcagttcggattgcaggctgcaactcgcctgcatgaagccggaattgctagtaatcgcggatcagcatgccgcggtgaatacgttcccgggccttgtacacaccgcccgtcacaccacgagagtttgtaacacccgaagtcggtgaggtaacctttttggagccagccgccgaaggtgggacagatgattggggtg

SEQ ID NO: 3059 - DNA, 1369 bp, Salipiger thiooxidans
gctggcggcaggcctaacacatgcaagtcgagcgcaccttcgggtgagcggcggacgggtgagtaacgcgtgggaacgtgcccttctctgcggaatagccactggaaacggtgagtaataccgcatacgcccttcgggggaaagatttatcggagaaggatcggcccgcgttagattaggtagttggtggggtaatggcctaccaagcctacgatctatagctggtttgagaggatgatcagccacactgggactgagacacggcccagactcctacgggaggcagcagtggggaatcttagacaatgggcgcaagcctgatctagccatgccgcgtgagtgatgaaggccttagggtcgtaaagctctttcgctggggaagataatgactgtacccagtaaagaaaccccggctaactccgtgccagcagccgcggtaatacggagggggttagcgttgttcggaattactgggcgtaaagcgcgcgtaggcggatcagaaagttgggggtgaaatcccggggctcaacctcggaactgcctccaaaactcctggtcttgagttcgagagaggtgagtggaattccgagtgtagaggtgaaattcgtagatattcggaggaacaccagtggcgaaggcggctcactggctcgatactgacgctgaggtgcgaaagtgtggggagcaaacaggattagataccctggtagtccacaccgtaaacgatgaatgccagtcgtcggcaagcatgcttgtcggtgacacacctaacggattaagcattccgcctggggagtacggtcgcaaggttaaaactcaaaggaattgacgggggcccgcacaagcggtggagcatgtggtttaattcgaagcaacgcgcagaaccttaccaacccttgacatcctaggaccgccagagagatttggctttcacttcggtgacctagtgacaggtgctgcatggctgtcgtcagctcgtgtcgtgagatgttcggttaagtccggcaacgagcgcaacccacatcttcagttgccagcagttcggctgggcactctggagaaactgcccgtgataagcgggaggaaggtgtggatgacgtcaagtcctcatggcccttacgggttgggctacacacgtgctacaatggtgcctacagtgggttaatccccaaaaggcatctcagttcggattgtcgtctgcaactcgacggcatgaagtcggaatcgctagtaatcgcgtaacagcatgacgcggtgaatacgttcccgggccttgtacacaccgcccgtcacaccatgggagttgggtctacccgaagacggtgcgccaacctttcgagggggcagctggccacggtaggctcagcga

SEQ ID NO: 3060 - DNA, 1464 bp, Salmonella bongori
  misc_feature (430)..(430): n is a, c, g, or t
attgaacgctggcggcaggcctaacacatgcaagtcgaacggtaacaggaagcagcttgctgcttcgctgacgagtggcggacgggtgagtaatgtctgggaaactgcctggtggagggggataactactggaaacggtggctaataccgcataacgtcgcaagaccaaagagggggaccttcgggcctcttgccatcagatgtgcccagatgggattagcttgttggtggggtaacggcccaccaaggcgacgatccctagctggtctgagaggatgaccagccacactggaactgagacacggtccagactcctacgggaggcagcagtggggaatattgcacaatgggcgcaagcctgatgcagccatgccgcgtgtatgaagaaggccttcgggttgtaaagtactttcagcggggaggaaggcgncaaggttaataaccttgttgattgacgttacccgcagaagaagcaccggctaactccgtgccagcagccgcggtaatacggagggtgcaagcgttaatcggaattactgggcgtaaagcgcacgcaggcggtctgtcaagtcggatgtgaaatccccgggctcaacctgggaactgcatccgaaactggcaggcttgagtctcgtagaggggggtagaattccaggtgtagcggtgaaatgcgtagagatctggaggaataccggtggcgaaggcggccccctggacgaagactgacgctcaggtgcgaaagcgtggggagcaaacaggattagataccctggtagtccacgccgtaaacgatgtcgacttggaggttgtgcccttgaggcgtggcttccggagctaacgcgttaagtcgaccgcctggggagtacggccgcaaggttaaaactcaaatgaattgacgggggcccgcacaagcggtggagcatgtggtttaattcgatgcaacgcgaagaaccttacctggtcttgacatccacagaaccttgtagagatacgagggtgccttcgggaactgtgagacaggtgctgcatggctgtcgtcagctcgtgttgtgaaatgttgggttaagtcccgcaacgagcgcaacccttatcctttgttgccagcgattaggtcgggaactcaaaggagactgccagtgataaactggaggaaggtggggatgacgtcaagtcatcatggcccttacgaccagggctacacacgtgctacaatggcgcatacaaagagaagcgacctcgcgagagcaagcggacctcataaagtgcgtcgtagtccggattggagtctgcaactcgactccatgaagtcggaatcgctagtaatcgtggatcagaatgccacggtgaatacgttcccgggccttgtacacaccgcccgtcacaccatgggagtgggttgcaaaagaagtaggtagcttaaccttcgggagggcgcttaccactttgtgattcatgactggggtg

SEQ ID NO: 3061 - DNA, 1438 bp, Salsuginibacillus halophilus
acatgcagtcgagcgcgtgaaaccagttgattcccttcggggatgacgctggtggatcgagcggcggacgggtgagtaacacgtgggcaacctgccctgcagatcgggataaccccgggaaaccggggctaataccgaatgaccggaagaatcgcctgattctttcgtaaaagctgggatttatcctagcactgcaggatgggcccgcggcgcattagttagttggtgaggtaatggctcaccaaggcgacgatgcgtagccgacctgagagggtgatcggccacactgggactgagacacggcccagactcctacgggaggcagcagtagggaatcatccgcaatggacgaaagtctgacggtgcaacaccgcgtgagtgacgaaggcctcagggtcgtaaagctctgttatcaaggaagaaaacgtactgtgcgaatagagcagtaccttgccggtacttgatcagaaagccccggctaactacgtgccagcagccgcggtaacacgtagggggcgagcgttgtccggaattattgggcgtaaagggcacgcaggcggccttttaagtctgatgtgaaagcccgtggctcaaccacggaatggcattggaaactgaaaggcttgagtgcagaagaggagagcggaattccacgtgtagcggtgaaatgcgtagatatgtggaggaacaccagtggcgaaggcggctctctggtctgtaactgacgctgaggtgcgaaagcgtggggagcgaacaggattagataccctggtagtccacgccgtaaacgttgagtgctaggtgttaggggtttcgatacccttagtgccgaagtaaacacattaagcactccgcctggggagtacgaccgcaaggttgaaactcaaaggaattgacgggggcctgcacaagcggtggagcatgtggtttaattcgatgcaacgcgaagaaccttaccaggtcttgacatcttttgcccgctctggagacagagttttcccttcggggacaaaatgacaggtggtgcatggttgtcgtcagctcgtgtcgtgagatgttgggttaagtcccgcaacgagcgcaacccttgaccttagttgccagcattcagttgggcactctagggtgactgccggtgacaaaccggaggaaggtggggatgacgtcaaatcatcatgccccttatgacctgggctacacacgtgctacaatggatggtacaaagggttgcgaggccgcgaggccgagccaatcccaaaaagccattctcagttcggattgttctctgcaactcgagaacatgaagccggaatcgctagtaatcgcggatcagaatgccgcggtgaatacgttcccaggccttgtacacaccgcccgtcacaccacgagagcttgcaacgcccgaagtcggtcaggtaacctttttaggagccagccg

SEQ ID NO: 3062 - DNA, 1477 bp, Salsuginibacillus kocurii
gacgaacgctggcggcatgcctaatacatgcaagtcgagcgcgtgaagcaggttgatcccttcggggtgacacctgtggatcgagcggcggacgggtgagtaacacgtgggcaacctgccctgtcgatcggaataaccccgggaaaccggggctaatgccgaataccacttggaaccacatggttccaggttgaaagttggcctctggctaacacgacaggatgggcccgcggcgcattagttagttggtgaggtaatggctcaccaaggcgacgatgcgtagccgacctgagagggtgatcggccacactgggactgagacacggcccagactcctacgggaggcagcagtagggaatcatccgcaatgggcgaaagcctgacggtgcaatgccgcgtgagtgatgaaggtcttcggatcgtaaagctctgttataagggaagaaccggtgccgtgcgaatagagcggtaccttgacggtaccttatcagaaagccccggctaactacgtgccagcagccgcggtaacacgtagggggcaagcgttgtccggaattattgggcgtaaagggcacgcaggcggcttcttaagtctgatgtgaaagcccgtggctcaaccacggaatcgcattggaaactgaggagcttgagtgcaggagaggagagcggaattccacgtgtagcggtgaaatgcgtagatatgtggaggaacaccagtggcgaaggcggctctctggcctgtaactgacgctgaggtgcgaaagcgtggggagcgaacaggattagataccctggtagtccacgccgtaaacgttgagtgctaggtgttaggggtttcgatacccttagtgccgaagtcaacacattaagcactccgcctggggagtacgaccgcaaggttgaaactcaaaggaattgacgggggcccgcacaagcggtggagcatgtggtttaattcgatgcaacgcgaagaaccttaccaggtcttgacatcttctgaccgctttggagacaaagctttcccttcggggacagaatgacaggtggtgcatggttgtcgtcagctcgtgtcgtgagatgttgggttaagtcccgcaacgagcgcaacccctaaacttagttgccagcattcagttgggcactctaggttgactgccggtgacaaaccggaggaaggtggggatgacgtcaaatcatcatgccccttatgacctgggctacacacgtgctacaatggacggtacagagggttgcaagaccgcgaggtcaagccaatcccaaaaagccgttctcagttcggattgttctctgcaactcgagagcatgaagccggaatcgctagtaatcgcggatcagaatgccgcggtgaatacgttcccgggccttgtacacaccgcccgtcacaccacgagagcttgcaacacccgaagtcggttcggtaacccttttgggatgcctagccgccgaaggtggggca

SEQ ID NO: 3063 - DNA, 1464 bp, Samsonia erythrinae
attgaacgctggcggcaggcctaacacatgcaagtcgagcggcagcgggaagtagcttgctactttgccggcgagcggcggacgggtgagtaatgtctgggaaactgcctgatggcgggggataactactggaaacggtagctaataccgcataatgtcttcggaccaaagagggggaccttcgggcctcttgccatcggatgtgcccagatgggattagctggtaggtgaggtaacggctcacctaggcgacgatccctagctggtctgagaggatgaccagccacactggaactgagacacggtccagactcctacgggaggcagcagtggggaatattgcacaatgggcgcaagcctgatgcagccatgccgcgtgtgtgaagaaggccttcgggttgtaaagcactttcagcggggaggaaggggataaggcgaatacccttattcattgacgttacccgcagaagaagcaccggctaactccgtgccagcagccgcggtaatacggagggtgcaagcgttaatcggaatgactgggcgtaaagcgcacgcaggcggtctgttaagtcagatgtgaaatccccgggcttaacctgggaactgcatttgaaactggcaggctagagtcttgtagaggggggtagaattccaggtgtagcggtgaaatgcgtagagatctggaggaataccggtggcgaaggcggccccctggacaaagactgacgctcaggtgcgaaagcgtggggagcaaacaggattagataccctggtagtccacgctgtaaacgatgtcgatttggaggctgtggtcttgaaccgtggcttccggagctaacgcgttaaatcgaccgcctggggagtacggccgcaaggttaaaactcaaatgaattgacgggggcccgcacaagcggtggagcatgtggtttaattcgatgcaacgcgaagaaccttacctactcttgacatcctcagaagagactggagacagtcttgtgccttcgggaactgagagacaagtgctgcatggctgtcgtcagctcgtgttgtgaaatgttgggttaagtcccgcaacgagcgcaacccttatcctttgttgccagcgatacggtcgggaactcaaaggagactgccggtgataaaccggaggaaggtggggatgacgtcaagtcatcatggcccttacgagtagggctacacacgtgctacaatggcgtatacaaagagaagcgacctcgcgagagcaagcggacctcataaagtacgtcgtagtccggattggagtctgcaactcgactccatgaagtcggaatcgctagtaatcgtagatcagaatgctacggtgaatacgttcccgggccttgtacacaccgcccgtcacaccatgggagtgggttgcaaaagaagtaggtagcttaaccttcgggggggcgcttaccactttgtgattcatgactggggtg

SEQ ID NO: 3064 - DNA, 1479 bp, Sandarakinorhabdus cyanobacteriorum
ttgagagtttgatcctggctcagaacgaacgctggcggcatgcctaacacatgcaagtcgaacgaagccttcgggcttagtggcgcacgggtgcgtaacgcgtgggaatctgccttcaggtacggaataactcagggaaacttgtgctaataccgtatgatgacttcggtccaaagatttatcgcctgaagatgagcccgcgtaggattagctagttggtggggtaaaggcctaccaaggcgacgatccttagctggtctgagaggatgatcagccacactgggactgagacacggcccagactcctacgggaggcagcagtggggaatattggacaatgggcgaaagcctgatccagcaatgccgcgtgagtgaagaaggccttcgggttgtaaagctcttttacccgggatgataatgaccgtaccgggagaataagccccggctaactccgtgccagcagccgcggtaatacggagggggctagcgttgttcggaatcactgggcgtaaagcgtgcgtaggcggctattcaagtcagaggtgaaagcctggggctcaaccccagaactgcctttgaaactaggtagcttgaacacgggagaggtgagtggaattccgagtgtagaggtgaaattcgtagatattcggaagaacaccagtggcgaaggcggctcactggaccgttgttgacgctgaggcacgaaagcgtggggagcaaacaggattagataccctggtagtccacgccgtaaacgatgacaactagctgtcggggctcttggagctccggtggcgcagctaacgcattaagttgtccgcctggggagtacggtcgcaagattaaaactcaaaggaattgacgggggcctgcacaagcggtggagcatgtggtttaattcgaagcaacgcgcagaaccttaccagcgtttgacatcgcaggacgatttccagagatggatttcttctcgcaagagacttgcagacaggtgctgcatggctgtcgtcagctcgtgtcgtgagatgttgggttaagtcccgcaacgagcgcaaccctcgcctttagttaccatcattcagttggggactctaaaggaaccgccggtgataagccggaggaaggtggggatgacgtcaagtcctcatggcccttacgcgctgggctacacacgtgctacaatggcggtgacaatgggctgcaaacccgcgagggggagctaatctcaaaaagccgtctcagttcggattgttctctgcaactcgagagcatgaaggcggaatcgctagtaatcgcggatcagcatgccgcggtgaatacgttcccaggccttgtacacaccgcccgtcacaccatgggagttggattgacccgaaggcagtgggctaaccgcaaggaggcagctgaccacggtcggttcagtgactggggtgaagtcgtaacaaggtagccgtaggggaacctgcggctggatcacctcct

SEQ ID NO: 3065 - DNA, 1453 bp, Schlegelella thermodepolymerans
attgaacgctggcggcatgctttacacatgcaagtcgaacggcagcgcgggcttcggcctggcggcgagtggcgaacgggtgagtaatgcatcggaacgtgcccagtagtgggggatagcccggcgaaagccggattaataccgcatacgacctgagggtgaaagcgggggaccgaaaggcctcgcgctattggagcggccgatgtcggattagctagttggtggggtaaaggcctaccaaggcgacgatccgtagctggtctgagaggacgaccagccacactgggactgagacacggcccagactcctacgggaggcagcagtggggaattttggacaatgggggcaaccctgatccagccatgccgcgtgcgggaagaaggccttcgggttgtaaaccgcttttgtcagggaagaaatcctctgggctaataccccggggggatgacggtacctgaagaataagcaccggctaactacgtgccagcagccgcggtaatacgtagggtgcgagcgttaatcggaattactgggcgtaaagcgtgcgcaggcggttgtgcaagacagatgtgaaatccccgggcttaacctgggaactgcatttgtgactgcacggctagagtgcggcagaggggagtggaattccgcgtgtagcagtgaaatgcgtagatatgcggaggaacaccgatggcgaaggcagctccctgggcctgcactgacgctcatgcacgaaagcgtggggagcaaacaggattagataccctggtagtccacgccctaaacgatgtcgactagttgttggacggttcgctgttcagtaacgtagctaacgcgtgaagtcgaccgcctggggagtacggccgcaaggttgaaactcaaaggaattgacggggacccgcacaagcggtggatgatgtggtttaattcgatgcaacgcgaaaaaccttacctacccttgacatgccaggaatcctgcagagatgtgggagtgctcgaaagagaacctggacacaggtgctgcatggccgtcgtcagctcgtgtcgtgagatgttgggttaagtcccgcaacgagcgcaacccttgccattagttgctacgaaagggcactctaatgggactgccggtgacaaaccggaggaaggtggggatgacgtcaggtcctcatggcccttatgggtagggctacacacgtcatacaatggccggtacagagggcagccaacccgcgagggggagccaatcccagaaagccggtcgtagtccggatcgcagtctgcaactcgactgcgtgaagtcggaatcgctagtaatcgcggatcagcatgtcgcggtgaatacgttcccgggtcttgtacacaccgcccgtcacaccatgggagcgggttctgccagatgtgggtagcctaaccgcaaggagggcgcttaccacggcagggttcgcgactggggtg

SEQ ID NO: 3066 - DNA, 1461 bp, Schlesneria paludicola
aatgaacgttggcggcgtggattaggcatgcaagtcgagggagaacccgcaagggggacaccggcgaacggggtaggatcacgtaggtgacgtacccccagggcgaggatagccacgggaaactgtgggtaatactcgataatcttcccgatcgtgatggttgggaagcaatgggtgtgattccacctggggagcggcttacgcagtatcagctagttggtgaggtaacggctcaccaaggctttgacgcttagggggtgtgagagcatggcccccaccactggcactgagacactggccagacacctacgggtggctgcagtcgagaatcttcggcaatggacgaaagtctgaccgagcgacgccgcgtgcgggatgaaggtcttcggattgtaaaccgctgtcagaggggatgaagtatacgagagctatctcttgtatttgacagagcctcagaggaagcacgggctaagttcgtgccagcagccgcggtaatacgaactgtgcgaacgttattcggaatcactgggcttaaagggtgcgtaggtggttttctaagtcacgtgtgaaatcttctggctcaaccagaaaactgcgcgtgatactggaggacttgagtgaggtaggggtgtgtggaacttccggtggagcggtgaaatgtgtagagatcggaaggaacgccagcagcgaaagcggcacactgggccttttctgacactgaggcacgaaagctaggggagtgaacgggattagataccccggtaatcctagccgtaaacactgaacactggaggaagggggcttcggccttctttctcgtagcgaaagcgttaagtgttccgcctggggagtatggtcgcaaggctgaaactcaaaggaattgacgggggctcacacaagcggtggagcatgtggcttaattcgaggcaacgcgaagaaccttatcctgggtttgacatgcatggattaaccctgtgaaagcagggccacgctcgcaagagtggaacatgcacaggtgctgcatggctgtcgtcagctcgtgtcgtgagatgtcgcgttaagtcgctaaacgagcgaaacccttatccttagttgccagcgagttatgtcggggactctagggagactgccggtgtcaaaccggaggaaggcggggatgacgtcaagtcctcatggcctttatgcccagggctgcacacgtgctacaatggggcgtacaaagcgctgcaagcctgcgaaggcaagcgaatcgcaaaaagcgtcccccagttcggattgcaggctgcaactcgcctgcatgaagccggaatcgctagtaatcgcagatcagcattgctgcggtgaatgtgttcctgagccttgtacacaccgcccgtcaagccacgaaagcggggggcatccgaagtcgctgcgtgaaccgcaaggacacaggtgccgaagatgaactccgtgattgggact

SEQ ID NO: 3067 - DNA, 1459 bp, Schwartzia succinivorans
gacgaacgctggcggcgtgcttaacacatgcaagtcgaacgggcgatttgaaaagcttgcttttgatgagcctagtggcaaacgggtgagtaacgcgtaggcaacctgccctcaggatggggacaacggcccgaaaggaccgctaataccgaatgacgtatcgggatcgcatgatcctgataccaaaggcggagcaatccgtcacctgaggatgggcctgcgtctgattaggtagttggtgaggtaacggcccaccaagccgacgatcagtagccggtctgagaggatgaacggccacattgggactgagacacggcccagactcctacgggaggcagcagtggggaatcttccgcaatgggcgaaagcctgacggagcaacgccgcgtgagtgaagaaggtcttcggatcgtaaagctctgttgtcggggacgaaggggcagatcaggaaatgggtctgcttagacggtacctgacgaggaagccacggctaactacgtgccagcagccgcggtaatacgtaggcggcaagcgttgtccggaatcattgggcgtaaagggagcgcaggtgggacggtaagtctttcttaaaagtgcggggctcacccccgtgaggggaaagaaactatcgttcttgagtgcaggagaggaaagcggaattcctagtgtagcggtgaaatgcgtagatattaggaagaacaccagtggcgaaggcggctttctggactgtaactgacactgaggctcgaaagccaggggagcgaacgggattagataccccggtagtcctggccgtaaacgatggatactaggtgtaggaggtatcgaccccttctgtgccggagttaacgcaataagtatcccgcctggggagtacggtcgcaagattgaaactcaaaggaattgacgggggcccgcacaagcggtggagtatgtggtttaattcgacgcaacgcgaagaaccttaccagggcttgacattgatcgaaagcgccagagatggtgccctctcttcggagacgagaaaacaggtggtgcatggctgtcgtcagctcgtgtcgtgagatgttgggttaagtcccgcaacgagcgcaacccctatgctttgttgccagcacgtaaaggtgggcactcaaaggagactgccgcggagaacgcggaggaaggcggggatgacgtcaagtcatcatgccccttatgtcctgggctacacacgtactacaatgggatggacagagagcagcgaccccgcgagggtaagcgaacctcataaaccatctcccagttcggattgcaggctgaaacccgcctgcatgaagttggaatcgctagtaatcgcaggtcagcatactgcggtgaatacgttcccgggccttgtacacaccgcccgtcacaccacggaagtcattcacacccgaagccggcgcagccgtctaaggtgggggcgatgactggggtg

SEQ ID NO: 3068 - DNA, 1445 bp, Scopulibacillus darangshiensis
tgcctaatacatgcaagtcgagcgcgggaagcagctgatcccttcggggtgacgcttgtggaacgagcggcggacgggtgagtaacacgtgggtaacctgcctgtaagactgggataactccgggaaaccggggctaataccgggtaatccaacgcaccgcatggtgcgacggtaaaagatggttctgccatcacttacagatgggcccgcggcgcattagttagttggtgaggtaacggctcaccaagaccgcgatgcgtagccgacctgagagggtgatcggccacactgggactgagacacggcccagactcctacgggaggcagcagtagggaatcttccgcaatggacgaaagtctgacggagcaacgccgcgtgagtgatgaaggttttcggatcgtaaagctctgttgttagagaagaacaggtgccataggaaatgatggtgctttgacggtatctaaccagaaagccacggctaactacgtgccagcagccgcggtaatacgtaggtggcaagcgttgtccggaattattgggcgtaaagcgcgcgcaggcggcttcttaagtctgatgtgaaagcccacggctcaaccgtggagggtcattggaaactggggagcttgagtacaggagaggagagtggaattccacgtgtagcggtgaaatgcgtagatatgtggaggaacaccagtggcgaaggcggctctctggcctgtaactgacgctgaggcgcgaaagcgtggggagcgaacaggattagataccctggtagtccacgccgtaaacgatgagtgctaggtgttagggggtccaacccttagtgctgaagtcaacacattaagcactccgcctggggagtacgaccgcaaggttgaaactcaaaggaattgacgggggcccgcacaagcagtggagcatgtggtttaattcgaagcaacgcgaagaaccttaccaggtcttgacatcctctgacacctctagagatagagttttccccttcgggggacagagtgacaggtggtgcatggttgtcgtcagctcgtgtcgtgagatgttgggttaagtcccgcaacgagcgcaacccttgatcttagttgccagcattcagttgggcactctaaggtgactgccggtgacaaaccggaggaaggtggggatgacgtcaaatcatcatgccccttatgacctgggctacacacgtgctacaatgggcggtacaaagggcagcgaaaccgcgaggttaagcgaatcccataaagccgctctcagttcggattgcaggctgcaactcgcctgcatgaagccggaattgctagtaatcgcggatcagcatgccgcggtgaatccgttcccgggccttgtacacaccgcccgtcacaccacgagagtttgtaacacccgaagtcggtgaggtaacctttggaaccagccgccgaaggt

SEQ ID NO: 3069 - DNA, 1400 bp, Scytonema hofmanni
  misc_feature (1378)..(1382): n is a, c, g, or t
ggtatgcttaacacatgcaagtcgaacggaacccttaggggtttagtggcggacgggtgagtaacgcgtgagaatctggcttcaggtctgggacaacagttggaaacggctgctaataccggatgtgcccatgggtgaaaggttaactgcctgaagatgagctcgcgtccgattagttagttggtgtggtaagagcgcaccaagacggcgatcggtagctggtctgagaggacgatcagccacactggaactgagacacggtccagactcctacgggaggcagcagtggggaattttccgcaatgggcgaaagcctgacggagcaataccgcgtgagggaggaaggctcttgggttgtaaacctcttttctcagggaataaaaaaatgaaggtacttgaggaataagcatcggctaactccgtgccagcagccgcggtaatacggaggatgcaagcgttatccggaatgattgggcgtaaagcgtccgcaggtggtttatcaagtcggctgtcaaagcgtctggctcaactagataagggcagtggaaactgagagactagagtaaggtaggggtagagggaattcctggtgtagcggtgaaatgcgtagagatcaggaagaacaccggtggcgaaagcgctctgctggactattactgacactgagggacgaaagctaggggagcgaatgggattagataccccagtagtcctagccgtaaacgatggatactaggcgttacgcgtatcgacccgcgtagtgccggagccaacgcgttaagtatcccgcctggggagtacgccggcaacggtgaaactcaaaggaattgacgggggcccgcacaagcggtggagtatgtggtttaattcgatgcaacgcgaagaaccttaccagggcttgacatgtcgcgaatcccgatgaaagttgggagtgccttagggagcgcgaacacaggtggtgcatggctgtcgtcagctcgtgtcgtgagatgttgggttaagtcccgcaacgagcgcaaccctcgtacttagttgccatcattaagttgggaactctaaggagactgccggtgacaaaccggaggaaggtggggatgacgtcaagtcagcatgccccttacgtcctgggctacacacgtactacaatgctatggacagagggcagcaagcatgtgaatgcaagcaaatctcacaaaccatggctcagttcagatcgcaggctgcaactcgcctgcgtgaaggtggaatcgctagtaattgcaggtcagcatactgcagtgaattcgttcccgggccttgtacacaccgcccgtcacaccatggaagctggtagtgcccgaagtcgttactctaaccattcgtggaggaggatgccgannnnnggactggtgactggggtg

SEQ ID NO: 3070 - DNA, 1148 bp, Scytonema hofmannii
gaatctggcttcaggtctgggacaacagttggaaacggctgctaataccggatgtgcctgtgggtgaaaggttaactgcctgaagatgagctcgcgtccgattagttagttggtgtggtaagagcgcaccaagacggcgatcggtagctggtctgagaggacgatcagccacactggaactgagacacggtccagactcctacgggaggcagcagtggggaattttccgcaatgggcgaaagcctgacggagcaataccgcgtgagggaggaaggctcttgggttgtaaacctcttttctcagggaataaaaaaatgaaggtacttgaggaataagcatcggctaactccgtgccagcagccgcggtaatacggaggatgcaagcgttatccggaatgattgggcgtaaagcgtccgcaggtggtttatcaagtcggctgtcaaagcgtctggctcaactagataagggcagtggaaactgagagactagagtaaggtaggggtagagggaattcctggtgtagcggtgaaatgcgtagagatcaggaagaacaccggtggcgaaagcgctctgctggactattactgacactgagggacgaaagctaggggagcgaatgggattagataccccagtagtcctagccgtaaacgatggatactaggcgttacgcgtatcgacccgcgtagtgccggagccaacgcgttaagtatcccgcctggggagtacgccggcaacggtgaaactcaaaggaattgacgggggcccgcacaagcggtggagtatgtggtttaattcgatgcaacgcgaagaaccttaccagggcttgacatgtcgcgaatcccgatgaaagttgggagtgccttagggagcgcgaacacaggtggtgcatggctgtcgtcagctcgtgtcgtgagatgttgggttaagtcccgcaacgagcgcaaccctcgtacttagttgccatcattaagttgggaactctaaggagactgccggtgacaaaccggaggaaggtggggatgacgtcaagtcagcatgccccttacgtcctgggctacacacgtactacaatgctatggacagagggcagcaagcatgcgaatgcaagcaaatctcacaaaccatggctcagttcagatcgcag

SEQ ID NO: 3071 - DNA, 1413 bp, Scytonema tolypothrichoides
gatgaacgctggcggtatgcttaacacatgcaagtcgaacggagttcttcggaacttagtggcggacgggtgagtaacgcgtgagaatctggcttcaggttcgggacaacagttggaaacggctgctaataccggatgtgccttagggtgaaagatttatcacctgaagatgagctcgcgtctgattagctagtaggtgtggtaagagcgcacctaggcgacgatcagtagctggtctgagaggatgaccagccacactgggactgagacacggcccagactcctacgggaggcagcagtggggaattttccgcaatgggcgaaagcctgacggagcaataccgcgtgagggaggaaggctcttgggttgtaaacctcttttctcagggaataagtactgaaggtacctgaggaatcagcatcggctaactccgtgccagcagccgcggtaatacggaggatgcaagcgttatccggaatgattgggcgtaaagcgtccgcaggtggtttttcaagtctgctgtcaaagagtctggctcaaccagataaaggcagtggaaactgagagactagagtatggtaggggtagagggaattcctggtgtagcggtgaaatgcgtagagatcaggaagaacaccggtggcgaaagcgctctgctggaccataactgacactgagggacgaaagctaggggagcgaatgggattagataccccagtagtcctagccgtaaacgatggatactaggcgttgcccgtatcgacccgggcagtgtcgtagccaacgcgttaagtatcccgcctggggagtacgcacgcaagtgtgaaactcaaaggaattgacgggggcccgcacaagcggtggagtatgtggtttaattcgatgcaacgcgaagaaccttaccagggcttgacatgtccggaatctcttggaaacgagagagtgccttcgggagccggaacacaggtggtgcatggctgtcgtcagctcgtgtcgtgagatgttgggttaagtcccgcaacgagcgcaaccctcgttcttagttgccagcaattcggttgggcactctagggagactgccggtgacaaaccggaggaaggtggggatgacgtcaagtcagcatgccccttacgtcctgggctacacacgtactacaatgctatggacaaagggcagcaagctagcaatagcaagcaaatcccataaaccatggctcagttcagatcgcaggctgcaactcgcctgcgtgaaggaggaatcgctagtaattgcaggtcagcatactgcagtgaattcgttcccgggccttgtacacaccgcccgtcacaccatggaagctggtcacgcccgaagtcgttaccctaacccctcggggagggggacgccgaaggtaggactggtgactggggtg

SEQ ID NO: 3072 - DNA, 1466 bp, Sedimenticola selenatireducens
attgaacgctggcggtatgcttaacacatgcaagtcgaacggcagcacgagagagcttgctctcttggtggcgagtggcggacgggtgagtaacgcgtaagaatctgcctagtagtgggggataactcggggaaactcgagctaataccgcatacgccctacgggggaaagtgggggaccttcgggcctcacgctattagatgagcttgcgttggattagctagttggtagggtaatggcctaccaaggcgacgatccatagctggtctgagaggacgatcagccacactgggactgagacacggcccagactcctacgggaggcagcagtggggaatattggacaatgggcgcaagcctgatccagcaataccgcgtgtgtgaagaaggcctgcgggttgtaaagcactttcaattgtgaagaaaagcggaaggctaatacccttctgtcttgacgttaactttagaagaagcaccggctaactctgtgccagcagccgcggtaatacagagggtgcgagcgttaatcggaattactgggcgtaaagcgtgcgtaggcggtttagtaagtcagatgtgaaagccctgggcttaacctgggaactgcatttgaaactgctgaactagagtgtggtagagggaagtggaattccgggtgtagcggtgaaatgcgtagatatccggaggaacaccagtggcgaaggcgacttcctggaccaacactgacgctgaggtacgaaagcgtgggtagcaaacaggattagataccctggtagtccacgccgtaaacgatgtcaactagttgttgggagcatcttggctcttagtaacgtagctaacgcgataagttgaccgcctggggagtacggccgcaaggttaaaactcaaaggaattgacgggggcccgcacaagcggtggagcatgtggtttaattcgatgcaacgcgaagaaccttaccagcccttgacatcctgcgaactttctagagatagattggtgccttcgggaacgcagagacaggtgctgcatggctgtcgtcagctcgtgtcgtgagatgttgggttaagtcccgtaacgagcgcaacccttgcccttagttgccagcacgtaatggtgggaactctagggggactgccggtgataaaccggaggaaggtggggatgacgtcaagtcatcatggcccttatgggctgggctacacacgtgctacaatggccggtacagagggccgcaaacccgcgagggggagcaaatctcacaaaaccggtcgtagtccggatcggagtctgcaactcgactccgtgaagttggaatcgctagtaatcgcgaatcagaatgtcgcggtgaatacgttcccgggccttgtacacaccgcccgtcacaccatgggagtgggttgcaaaagaagtaggtagtctaaccttcgggaggacgcttaccactttgtgattcatgactggggtg

SEQ ID NO: 3073 - DNA, 1464 bp, Sedimenticola thiotaurini
attgaacgctggcggtatgcttaacacatgcaagtcgaacggtaacagcaggagcttgctcctggctgacgagtggcggacgggtgagtaacgcgtaagaatctgcctagtagtgggggataactcggggaaactcgagctaataccgcatacgccctacgggggaaagtgggggaccttcgggcctcacgctattagatgagcttgcgttggattagctagttggtgaggtaatggctcaccaaggcgacgatccatagctggtctgagaggacgatcagccacactgggactgagacacggcccagactcctacgggaggcagcagtggggaatattggacaatgggcgcaagcctgatccagcaataccgcgtgtgtgaagaaggcctgcgggttgtaaagcactttcaattgtgaagaaaagcttggggttaatagccccgagtcttgacgttaactttagaagaagcaccggctaactctgtgccagcagccgcggtaatacagagggtgcgagcgttaatcggaattactgggcgtaaagcgtgcgtaggcggtttagtaagtcagatgtgaaagccctgggcttaacctgggaactgcatttgaaactgctgaactagagtgtggtagagggaagtggaattccgggtgtagcggtgaaatgcgtagatatccggaggaacaccagtggcgaaggcgacttcctggaccaacactgacgctgaggtacgaaagcgtgggtagcaaacaggattagataccctggtagtccacgccgtaaacgatgtcaactagttgttgggagcattctggcttttagtaacgtagctaacgcgataagttgaccgcctggggagtacggccgcaaggttaaaactcaaaggaattgacgggggcccgcacaagcggtggagcatgtggtttaattcgatgcaacgcgaagaaccttaccagcccttgacatcctgcgaactttctagagatagattggtgccttcgggaacgcagagacaggtgctgcatggctgtcgtcagctcgtgtcgtgagatgttgggttaagtcccgtaacgagcgcaacccttgtccttagttgccagcacgtaaaggtgggaactctagggagactgccggtgataaaccggaggaaggtggggatgacgtcaagtcatcatggcccttatgggctgggctacacacgtgctacaatggccggtacagagggcggcgaacccgcgaggggaagcaaatctcacaaaaccggtcgtagtccggatcgcagtctgcaactcgactgcgtgaagttggaatcgctagtaatcgcgaatcagaatgtcgcggtgaatacgttcccgggccttgtacacaccgcccgtcacaccatgggagtgggttgcaaaagaagtaggtagtctaaccttcgggaggacgcttaccactttgtgattcatgactggggtg

SEQ ID NO: 3074 - DNA, 1535 bp, Sedimentisphaera cyanobacteriorum
aaattgaagagtttgatcctggctcagaacgaacgctggcggcgtggttaagacatgcaagtcgcacgagcctttcatggctagtggcgaaaggatgagtaacggataggtaacgtacccgatgcacaggtatagcgtcgagagcttgctctctaccgaaaggggcggtaatacctgataacattgccagctgcagggcaggcaatcaaagatttatcggcatcggagcggcctattccctatcagttagttggtgaggtaacggctcaccaaggcaacgacgggtagcgggactgagaggttggtccgccatatcgggactgagacactgcccggacctccacggagggctgcagtaacgaatcttgggcaatgatcgaaagattgacccagcgacgccgcgtgcaggaagaagcccctcggggtgtaaactgctgtcaagagcaagtaagcgcaagcagaactactctaaaggaagtcacggctaacttcgtgccagcagccgcggtaatacgaaggtggcgagcgttgttcggaatcactgggcttaaagcgtacgcaggcggttttctaagcgttctctgaaatcccccggctcaaccggggaattggggggcgaactggaaaacttgaggcatacaggggcgggtggaactcttcgtggagcggtggaatgcgtagatatgaagaggaacgccagaggtgaaaacggcccgctgggtatgacctgacgctgaggtacgaaagcatgggtagcgaacgggattagataccccggtagtccatgccgtaaacgatgtgcactggttcgcagtaattctgacattattgcgggcgtagcaaaagtgttaagtgcaccgcctggggagtacggtcgcaaggctaaaactcaaaggaattgacgggggctcacacaagcggtggagcatgtggattaattcgaagcaacgcgcagaaccttacctgggtttgacatgtttggatgccttcctggaaacaggaccgggctgctctcttcggagagtgaaacttacacaggtgctgcatggctgtcgtcagctcgtgtcgtgagatgttgggttaagtccttgaacgagcgaaacccttgccgttagttgccagcaggttaagctggggactctaacgggactgccggtgttaaaccggaggaaggcggggatgacgtcaagtcctcatggcctttatgcccagggcttcacacgtgctacaatggcagatacagatcgacgcaaagccgtgaggttgagcaaatcgcacaaagtctgcctcagttcggattgttctctggcaactcgagaacatgaagttggaatcgctagtaatcgcgtatcagcaatgacgcggtgaatatgttcctgagccttgtacacaccgcccgtcaagtcatggaaatcgggagcacccgaagtcggcttgtcaactcttcggagagacggctgcctacggtgaactcggtaactgggactaagtcgtaacaaggtagccgtaggggaacctgcggctggatcacctcc

SEQ ID NO: 3075 - DNA, 1518 bp, Sedimentisphaera salicampi
tggctcagaacgaacgctggcggcgtggttaagacatgcaagtcgcacgagcctttcatggctagtggcgaaaggatgagtaacggataggtaacgtacccgatgcacaggtatagcgtcgagagcttgctctctaccgaaaggggcggtaatacctgataatattgcgagctgcagggctggcaatcaaagatttatcggcatcggagcggcctattccctatcagttagttggtgaggtaacggctcaccaaggcaacgacgggtagcgggactgagaggttggtccgccatatcgggactgagacactgcccggacctccacggagggctgcagtaacgaatcttgggcaatgatcgaaagattgacccagcgacgccgcgtgcaggaagaagcccctcggggtgtaaactgctgtcaagagcaagtaagcgcaagcagaactactctaaaggaagtcacggctaacttcgtgccagcagccgcggtaatacgaaggtggcaagcgttgttcggaatcactgggcttaaagcgtacgcaggcggttttttaagcgttctctgaaatcccccggctcaaccggggaattggggggcgaactggaaaacttgaggcatacaggggcgggtggaactcttcgtggagcggtggaatgcgtagatatgaagaggaacgccagaggtgaaaacggcccgctgggtatgacctgacgctgaggtacgaaagcatgggtagcgaacgggattagataccccggtagtccatgccgtaaacgatgtgcactggttcgtggtaattctgacattatcacgggcgtagcaaaagtgttaagtgcaccgcctggggagtacggtcgcaaggctaaaactcaaaggaattgacgggggctcacacaagcggtggagcatgtggattaattcgaagcaacgcgcagaaccttacctgggtttgacatgtttgtatgcctttctggaaacagagtctggctgctctcttcggagagtgaaacttacacaggtgctgcatggctgtcgtcagctcgtgtcgtgagatgttgggttaagtccttgaacgagcgaaacccttgccgttagttgccagcaggttaagctggggactctaacgggactgccggtgttaaaccggaggaaggcggggatgacgtcaagtcctcatggcctttatgcccagggcttcacacgtgctacaatggtagatacagatcgacgcaaagccgtgaggttgagcaaatcgcacaaagtctgcctcagttcggattgttctctggcaactcgagaacatgaagttggaatcgctagtaatcgcgtatcagcaatgacgcggtgaatatgttcctgagccttgtacacaccgcccgtcaagtcatggaaatcgggagcacccgaagtcggcttgtcaactcttcggagagacggctgcctacggtgaactcggtaactgggactaagtcgtaacaaggtagccgtaggggaacctgcggctggatcacctcctt

SEQ ID NO: 3076 - DNA, 1470 bp, Sediminibacillus albus
tgctatacatgcaagtcgagcgcgtgaagcagccggatcccttcggggtgaaagctgtggaacgagcggcggacgggtgagtaacacgtgggcaacctgcctgtaagactgggataaccccgggaaaccggggctaataccgggtaatacttttcttcgcatgaagggaagttgaaaggcggcttttcggagctgtcacttacagatgggcccgcggcgcattagctagttggtagggtaatggcctaccaaggcaacgatgcgtagccgacctgagagggtgatcggccacactgggactgagacacggcccagactcctacgggaggcagcagtagggaatcttccgcaatggacgaaagtctgacggagcaacgccgcgtgaacgatgaaggttttcggatcgtaaagttctgttgttagggaagaacaagtaccgtttgaataaggcggtaccttgacggtacctaacgaggaagccccggctaactacgtgccagcagccgcggtaatacgtagggggcaagcgttgtccggaattattgggcgtaaagcgcgcgcaggcggttccttaagtctgatgtgaaagcccacggcttaaccgtggagggtcattggaaactggggaacttgagtacagaagaggagagcggaattccacgtgtagcggtgaaatgcgtagatatgtggaggaacaccagtggcgaaggcggctctctggtctgtaactgacgctgaggcgcgaaagcgtggggagcgaacaggattagataccctggtagtccacgccgtaaacgatgagtgctaggtgttagggggtttccgccccttagtgctgaagttaacgcattaagcactccgcctggggagtacggccgcaaggctgaaactcaaaagaattgacgggggcccgcacaagcggtggagcatgtggtttaattcgaagcaacgcgaagaaccttaccaggtcttgacatcctctgatccctctagagatagaggtttcccttcggggacagagtgacaggtggtgcatggttgtcgtcagctcgtgtcgtgagatgttgggttaagtcccgcaacgagcgcaacccttgaccttagttgccagcattcagttgggcactctagggtgactgccggtgacaaaccggaggaaggtggggatgacgtcaaatcatcatgccccttatgacctgggctacacacgtgctacaatggatggtacaaagggacgcgaaaccgcgaggtgaagcaaatcccataaaaccattctcagttcggattgcaggctgcaactcgcctgcatgaagccggaatcgctagtaatcgcggatcagcatgccgcggtgaatacgttcccgggccttgtacacaccgcccgtcacaccacgagagttggcaacacccgaagtcggtgaggtaacctttttggagccagccgccgaaggtggggccaatgattggggg

SEQ ID NO: 3077 - DNA, 1445 bp, Sediminibacillus halophilus
  misc_feature (411)..(411): n is a, c, g, or t
  misc_feature (466)..(466): n is a, c, g, or t
gacgaacgctggcggcgtgcctaatacatgcaagtcgagcgcgggaagcaggcggatcccttcggggtgaagcctgtggaacgagcggcggacgggtgagtaacacgtgggcaacctgcctgtaagatcgggataactccgggaaaccggggctaataccgggtaataccttcctccgcatggaggaaggttgaaaggcggccttttggctgtcacttacagatgggcccgcggcgcattagctagttggtagggtaatggcctaccaaggcaacgatgcgtagccgacctgagagggtgatcggccacactgggactgagacacggcccagactcctacgggaggcagcagtagggaatcttccgcaatggacgaaagtctgacggagcaacgccgcgtgaacgatgaangtcttcggatcgtaaagttctgttgtcagggaagaacaagtaccgtttgaataangcggtaccttgacggtacctgacgaggaagccccggctaactacgtgccagcagccgcggtaatacgtagggggcaagcgttgtccggaattattgggcgtaaagcgcgcgcaggcggttccttaagtctgatgtgaaagcccacggcttaaccgtggagggtcattggaaactggggaacttgagtacagaagaggagagcggaattccacgtgtagcggtgaaatgcgtagatatgtggaggaacaccagtggcgaaggcggctctctggtctgtaactgacgctgaggcgcgaaagcgtggggagcgaacaggattagataccctggtagtccacgccgtaaacgatgagtgctaggtgttagggggtttccgccccttagtgctgaagttaacgcattaagcactccgcctggggagtacggccgcaaggctgaaactcaaaagaattgacgggggcccgcacaagcggtggagcatgtggtttaattcgaagcaacgcgaagaaccttaccaggtcttgacatcctctgacccctctagagatagaggtttcccttcggggacagagtgacaggtggtgcatggttgtcgtcagctcgtgtcgtgagatgttgggttaagtcccgcaacgagcgcaacccttgaccttagttgccagcattcagttgggcactctagggtgactgccggtgacaaaccggaggaaggtggggatgacgtcaaatcatcatgccccttatgacctgggctacacacgtgctacaatggatggtacaaagggaagcgaaaccgcgaggtgaagcaaatcccataaaaccattctcagttcggattgcaggctgcaactcgcctgcatgaagccggaatcgctagtaatcgcggatcagcatgccgcggtgaatacgttcccgggccttgtacacaccgcccgtcacaccacgagagttggcaacacccgaagtcggtgaggtaacc

SEQ ID NO: 3078 - DNA, 1468 bp, Seinonella peptonophila
  misc_feature (151)..(151): n is a, c, g, or t
  misc_feature (202)..(202): n is a, c, g, or t
  misc_feature (455)..(455): n is a, c, g, or t
gacgaacgctggcggcgtgcctaatacatgcaagtcgagcgcgggaagcctcttcggaggtggaacgagcggcgaacgggtgagtaacacgtgggcaacctgcccgcaagactgggatagctccgggaaaccggaattaataccagataancatcttttccgcatggaaaagatgagaaaggtggcttcggctgctacttgnggatgggcccgcggcgcattagctagtaggtgaggtaaaggctcacctaggcaacgatgcgtagccgacctgagagggtgatcggccacactgggactgagacacggcccagactcctacgggaggcagcagtagggaattttccgcaatgggcgaaagcctgacggagcaacgccgcgtgagtgaggacggtcttcggattgtaaagctctgttctgtaggaagaagtcctcgtgttgaatagatacgaggngtgacgttactacagcagaaagccccggctaactacgtgccagcagccgcggtaatacgtagggggcaagcgttgtccggaatcattgggcgtaaagcgcgcgtaggcggcttcataagtccgatgtcaaaggcagtggctcaaccactgtacgcatcggaaactgtggagcttgagtgcaggagaggggagtggaattctcggtgtagcggtggaatgcgtagagatcgggaggaacaccagtggcgaaggcgactctctggcctgtaactgacgctgaggtgcgaaagcgtggggagcgaacaggattagataccctggtagtccacgccgtaaacgatgagtgctaggtgttggggggtttccgcccttcagtgccgaagttaacacattaagcactccgcctggggagtacgaccgcaaggttgaaactcaaaggaattgacgggggcccgcacaagcggtggagcatgtggtttaattcgaagcaacgcgaagaaccttaccagggcttgacatcccgctgacagatctagagatagatcctttcttcggaacagcggtgacaggtggtgcatggttgtcgtcagctcgtgtcgtgagatgttgggttcagtcccgcaacgagcgcaacccttatctttagttgccagcaggtaatgctgggcactctagagagacagccgatgaaagtcggaggaaggtggggatgacgtcaaatcatcatgccccttatgtcctgggctacacacgtgctacaatggctggaacaatgggaagcgagaccgcgaggtggagccaatcccaaaaaaccagtctcagttcggatcgcaggctgcaactcgcctgcgtgaagttggaatcgctagtaatcgcggatcagcatgccgcggtgaatacgttcccgggccttgtacacaccgcccgtcacaccacgggagtttgcaacacccgaagtcggtgagagaaccgttaggactcagctgccgaaggtggggtagatgactggggtg

SEQ ID NO: 3079 - DNA, 1388 bp, Selenihalanaerobacter shriftii
  misc_feature (1323)..(1324): n is a, c, g, or t
gacgaacgctggcggcgtgcttaacacatgcaagttgtgcgagaaagctaccttcgggtagttagtaaagcagcggacgggtgagtaacgcgtgagtaatctacctttaagttagggataactattcgaaagagtagctaatacctaatattatatcatcaccataaggcgatgatatgaaagatggccttgctatcgcttaaagatgagctcgcgtcccattagctagttggtaagataacagcttaccaaggccacaatgggtagccgacctgagagggtgatcggccacactgggactgagacacggcccagactcctacgggaggctgcagtggggaatcttccgcaatgggcgaaagcctgacggagcaacgccgcgtgagtgatgaaggccttcgggtcgtaaagctctgtcctcagggaagaacaccctagtcgtaaataacggctaggtttgacggtacctgtggaggaagctccggctaactacgtgccagcagccgcggtaatacgtagggagcaagcgttgtccggaattattgggcgtaaagggtgtgtaggcggtctagtaagtcaaatgtgaaattcatcggctcaaccgatgaactgcctttgaaactactagacttgagggtaagagaagagagtagaattcctagtgtagcggtgaaatgcgtagatattaggaagaataccagtggcgaaagcgactctctggcttactcctgacgctgagacacgaaagctagggtatcaaaccggattagatacccgggtagtcctagccgtaaacgctggatactaggtgttggaggttcgactccttcggtgccgaagttaacgcaataagtatcccgcctggggattacgaccgcaaggttgaaactcaaaggaattgacgggggcccgcacaagcggcggagcatgtggtttaattcgaagcaacgcgaagaaccttaccagggtttgacatcccgtgaccacctatgaaagtaggatttgatcttttgatcacacggagacaggtggtgcatggctgtgtcagctcgtgtcgtgagatgttgggttaagtcccgcaacgagcgcaacccttattcttagttgccagcacttttaggtggggactctaaggagactgccagtcaaaaaactggaggaaggtggggatgacgtcaagtcatcatgccccttatactctgggctacacacgtgctacaatggactgtacagagggtcgctacaccgcaaggtgatgctaatctctaaaacagttcccagttcggattgcaggctgcaactcgcctgcatgaagttggagtnnctagtaatcgtggatcagaatgccgcggtgaatacgttcccgggccttgtacacaccttcccgt

SEQ ID NO: 3080 - DNA, 1466 bp, Selenomonas artemidis
  misc_feature (113)..(113): n is a, c, g, or t
  misc_feature (754)..(754): n is a, c, g, or t
gacgaacgctggcggcgtgcttaacacatgcaagtcgaacggagcgaatgaaagcttgcttttatgagcttagtggcaaacgggtgagtaacacgtagacaacctgccgatcngatggggacaacattccgaaaggaatgctaataccgaatggcgtgtaggggaggcatcttccctacatgaaagatggcctctatatataagctatcactgatcgatgggtctgcgtctgattagctagtaggtaaggtaacggcttacctaggcgacgatcagtagccggtctgagaggatgaacggccacattgggactgagacacggcccagactcctacgggaggcagcagtggggaatcttccgcaatgggcgcaagcctgacggagcaacgccgcgtgagtgaagaaggtcttcggatcgtaaagctctgttgaaggggacgaacgatcgaggggcgaacaggctctcggtatgacggtaccttttgaggaagccacggctaactacgtgccagcagccgcggtaatacgtaggtggcgagcgttgtccggaatcattgggcgtaaagggagcgcaggcggccatgtaagtcttgcttaaaagttcggggctcaaccccgtgatgggcaagaaactatatggcttgagtgcaggagaggaaagcggaattcccagtgtagcggtgaaatgcgtagatattgggaggaacaccagtggcgaaggcggctttctggactgcaactgacgctgaggctngaaagccaggggagcgaacgggattagataccccggtagtcctggccgtaaacgatggatactaggtgtgggaggtatcgacccctaccgtgccggagttaacgcaataagtatcccgcctggggagtacggtcgcaagactgaaactcaaaggaattgacggggacccgcacaagcggtggagtatgtggtttaattcgaagcaacgcgaagaaccttaccaggtcttgacattgattgaaagacgtagagatacgtccttctcttcggagacaagaaaacaggtggtgcatggctgtcgtcagctcgtgtcgtgagatgttgggttaagtcccgcaacgagcgcaacccctgtcctttgttgccagcatgtagtggtgggcactcaaaggagactgccgcggagaacgcggaggaaggcggggatgacgtcaagtcatcatgccccttatgacctgggctacacacgtactacaatgggacggacagagagcagcgagagggcgaccttaagcgaacctcaaaaaccgtttctcagttcggattgcaggctgcaactcgcctgcatgaagtcggaatcgctagtaatcgcaggtcagcatactgcggtgaatacgttcccgggtcttgtacacaccgcccgtcacaccacggaagtcgttcacacccgaagccggcgcagccgtctaaggtggggaaggtgactggggtg

SEQ ID NO: 3081 - DNA, 1485 bp, Selenomonas bovis
gacgaacgctggcggcgtgcttaacacatgcaagtcgaacgagacgatttagaagcttgcttttattgagtcgagtggcaaacgggtgagtaacgcgtagacaacctgccgcaaagatggggacaacagtccgaaaggactgctaataccgaatgttgtatctcctccgcatggaagagatattaaagatggcctctacttgtaagctatcgctttgcgatgggtctgcgtctgattagctagttggtggggcaacggcctaccaaggcgacgatcagtagccggtctgagaggatgaacggccacattggaactgagacacggtccagactcctacgggaggcagcagtggggaatcttccgcaatgggcgaaagcctgacggagcaacgccgcgtgagtgaagaaggtcttcggattgtaaagctctgttgtcggggacgaatgttgaggcctagaacataggcttcaaatgacggtacctgacgaggaagccacggctaactacgtgccagcagccgcggtaatacgtaggtggcgagcgttgtccggaattattgggcgtaaagggagcgcaggcgggaaggtaagtctatcttaaaagtgcggggctcaaccccgtgaggggatagaaactatcattcttgagtgcaggagaggaaagcggaattcctagtgtagcggtgaaatgcgtagatattaggaggaacaccagtggcgaaggcggctttctggactgtaactgacgctgaggctcgaaagccaggggagcgaacgggattagataccccggtagtcctggccgtaaacgatgaatgctaggtgtaggaggtatcgacccctcctgtgccggagttaacgcaataagcattccgcctggggagtacggccgcaaggctgaaactcaaaggaattgacgggggcccgcacaagcggtggagtatgtggtttaattcgacgcaacgcgaagaaccttaccagggcttgacattgagtgaaaaggctagagacagcctcctcccttcggggacacgaaaacaggtggtgcatggctgtcgtcagctcgtgtcgtgagatgttgggttaagtcccgcaacgagcgcaacccctatctcttggtgccagcacggaaaggtgggaactcaagagagactgccgcggacaacgcggaggaaggcggggatgacgtcaagtcatcatgccccttatgtcctgggctacacacgtactacaatgggatggacagagagcagcgaagccgtgaggcagagcgaaccccataaaccatctcccagttcggattgcaggctgcaacccgcctgcatgaagtcggaatcgctagtaatcgcaggtcagcatactgcggtgaatacgttcccgggccttgtacacaccgcccgtcacaccacggaagtcattcacacccgaagccggtggggtaaccgcaagggaccagccgtctaaggtgggggcgatgactggggtg

SEQ ID NO: 3082 - DNA, 1462 bp, Selenomonas flueggei
  misc_feature (56)..(56): n is a, c, g, or t
  misc_feature (61)..(61): n is a, c, g, or t
  misc_feature (68)..(68): n is a, c, g, or t
  misc_feature (194)..(194): n is a, c, g, or t
  misc_feature (196)..(196): n is a, c, g, or t
  misc_feature (552)..(552): n is a, c, g, or t
  misc_feature (571)..(571): n is a, c, g, or t
  misc_feature (580)..(580): n is a, c, g, or t
  misc_feature (635)..(635): n is a, c, g, or t
  misc_feature (709)..(709): n is a, c, g, or t
  misc_feature (759)..(759): n is a, c, g, or t
  misc_feature (799)..(799): n is a, c, g, or t
  misc_feature (924)..(924): n is a, c, g, or t
  misc_feature (926)..(926): n is a, c, g, or t
  misc_feature (997)..(997): n is a, c, g, or t
  misc_feature (1126)..(1126): n is a, c, g, or t
  misc_feature (1136)..(1136): n is a, c, g, or t
  misc_feature (1283)..(1283): n is a, c, g, or t
  misc_feature (1433)..(1433): n is a, c, g, or t
gacgaacgctggcggcgtgcttaacacatgcaagtcgaacggagcgaatgaaagcntgcanttatgancttagtggcaaacgggtgagtaacacgtagacaacctgccgacaggatggggacaacattccgaaaggaatgctaataccgaatgaagcggaggagaggcatctctcttccgtgaaagatggccantntttatgctatcacctgttgatgggtctgcgtctgattagctggtaggtgaggtaacggctcacctaggcgacgatcagtagccggtctgagaggatgaacggccacattgggactgagacacggcctagactcctacgggaggcagcagtggggaatcttccgcaatgggcgcaagcctgacggagcaacgccgcgtgagtgaagaaggtcttcggatcgtaaagctctgttgttcgggacgaacgtgcgtgatgcgaacagtgtcatgcaatgacggtacctgtcgaggaagccacggctaactacgtgccagcagccgcggtaatacgtaggtggctagcgttgtccggaatcnttgggcgtaaagggagcgnaggcgggcnagtaagtctttcttaaaagtgcggggctcaaccccgtgatgggaaagaaactacntgtcttgagtacgggagaggaaagcggaattcccagtgtagcggtgaaatgcgtagatattgggaggaacgccngtggcgaaggcggctttctggactgcgactgacgctgaggctcgaaagcnaggggagcgaacgggattagataccccggtagtcctggcngtaaacgatggatactaggtgtgggaggtatcgacccctaccgtgccggagttaacgcaataagtatcccgcctggggagtacggccgcaaggctgaaactcaaaggaattgacggggacccgcncnagcggtggagtatgtggtttaattcgaagcaacgcgaacaaccttaccaggccttgacattgactgaaagngctagagatagctccctctcttcggagacaggaaaacaggtggtgcatggctgtcgtcagctcgtgtcgtgagatgttgggttaagtcccgcaacgagcgcaacccctgtcctttgttgccatcacgtnaaggtgggcnctcaaaggagactgccgcggagaacgcggaggaaggcggggatgacgtcaagtcatcatgccccttatgctctgggctacacacgtactacaatggaacggacagagagcagcgaacccgcgagggcaagcgaacctcaaaaaccgnttcccagttcggattgcaggctgcaacccgcctgcatgaagtcggaatcgctagtaatcgcaggtcagcatactgcggtgaatacgttcccgggtcttgtacacaccgcccgtcacaccacggaagtcattcacacccgaagccggctangccgtctaaggtggggaaggtgactgggg

SEQ ID NO: 3083 - DNA, 1466 bp, Selenomonas infelix
gacgaacgctggcggcgtgcttaacacatgcaagtcgaacggagcgaatgaaagcttgcttttatgagcttagtggcaaacgggtgagtaacacgtagacaacctgccgacaggatggggacaacattccgaaaggaatgctaataccgaatgaagcggaggagaggcatctctcctccgtgaaagatggcctctatttataagctatcacctgtcgatgggtctgcgtctgattagctagttggtgaggtaacggctcaccaaggcgacgatcagtagccggtctgagaggatgaacggccacattgggactgagacacggcccagactcctacgggaggcagcagtggggaatcttccgcaatgggcgcaagcctgacggagcaacgccgcgtgagtgaagaaggtcttcggatcgtaaagctctgttgatggggacgaacgtgcgaagggtgaataatcctttgcaatgacggtacctatcgaggaagccacggctaactacgtgccagcagccgcggtaatacgtaggtggcgagcgttgtccggaatcattgggcgtaaagggagcgcaggcgggcaagtaagtctttcttaaaagttcggggctcaaccccgtgatgggaaagaaactacatgtcttgagtacaggagaggaaagcggaattcccagtgtagcggtgaaatgcgtagatattgggaggaacaccagtggcgaaggcggctttctggactgcaactgacgctgaggctcgaaagccaggggagcgaacgggattagataccccggtagtcctggccgtaaacgatggatactaggtgtgggaggtatcgacccctaccgtgccggagttaacgcaataagtatcccgcctggggagtacggtcgcaagactgaaactcaaaggaattgacggggacccgcacaagcggtggagtatgtggtttaattcgaagcaacgcgaagaaccttaccaggccttgacattgactgtaagagctagagatagctccctctcttcggagacaggaaaacaggtggtgcatggctgtcgtcagctcgtgtcgtgagatgttgggttaagtcccgcaacgagcgcaacccctgttctttgttgccatcacgtaaaggtgggcactcaaaggagactgccgcggagaacgcggaggaaggcggggatgacgtcaagtcatcatgccccttatggtctgggctacacacgtactacaatggaacggacagagagcagcgaacccgcgagggcaagcgaacctcaaaaaccgtttcccagttcggattgcaggctgcaactcgcctgcatgaagtcggaatcgctagtaatcgcaggtcagcatactgcggtgaatacgttcccgggtcttgtacacaccgcccgtcacaccacggaagtcgttcacacccgaagccggcgcagccgtctaaggtggggaaggtgactggggtg

SEQ ID NO: 3084 - DNA, 1464 bp, Selenomonas noxia
gacgaacgctggcggcgtgcttaacacatgcaagtcgaacggagcgaatgaaagcttgcttttataagcttagtggcaaacgggtgagtaacacgtaggcaacctgccgacaggatggggacaacattccgaaaggaatgctaataccgaatgaagcgcaggagaggcatctctcctgcgtgaaagatggcctctatatataagctatcacctgtcgatgggcctgcgtctgattagctggtaggtgaggtaacggctcacctaggcgacgatcagtagccggtctgagaggatgaacggccacattgggactgagacacggcccagactcctacgggaggcagcagtggggaatcttccgcaatgggcgcaagcctgacggagcaacgccgcgtgagtgaagaaggtcttcggatcgtaaagctctgttgatggggacgaacgtgcctaatgcgaatagtattaggtaatgacggtacccatcgaggaagccacggctaactacgtgccagcagccgcggtaatacgtaggtggcgagcgttgtccggaatcattgggcgtaaagggagcgcaggcgggcatgtaagtctttcttaaaagtgcggggctcaaccccgtgatgggaaagaaactatgtgtcttgagtacaggagaggaaagcggaattcccagtgtagcggtgaaatgcgtagatattgggaggaacaccagtggcgaaggcggctttctggactgcaactgacgctgaggctcgaaagccaggggagcgaacgggattagataccccggtagtcctggccgtaaacgatggatactaggtgtgggaggtatcgacccctaccgtgccggagttaacgcaataagtatcccgcctggggagtacggccgcaaggctgaaactcaaaggaattgacggggacccgcacaagcggtggagtatgtggtttaattcgaagcaacgcgaagaaccttaccaggccttgacattgactgaaagagctagagatagctccctctcttcggagacaggaaaacaggtggtgcatggctgtcgtcagctcgtgtcgtgagatgttgggttaagtcccgcaacgagcgcaacccctgttctttgttgccagcatgtaaagatgggcactcaaaggagactgccgcggagaacgcggaggaaggcggggatgacgtcaagtcatcatgccccttatggtctgggctacacacgtactacaatgggacggacagagggcagcgagagagtgatcttaagcgaatctcaaaaaccgtttctcagttcggattgcaggctgcaactcgcctgcatgaagtcggaatcgctagtaatcgcaggtcagcatactgcggtgaatacgttcccgggtcttgtacacaccgcccgtcacaccacggaagtcattcacacccgaagccggctaggccgtctaaggtggggaaggtgactgggg

SEQ ID NO: 3085 - DNA, 1417 bp, Serpentinicella alkaliphila
gagatgcgggtgctaccatgcagtcgagcgaggaggaggaagcttgcttccaatcctagcggcggacgggtgagtaacgcgtgggcaacctaccctatgcagggggataacattgggaaaccagtgctaataccgcataaagccgattaggggcatccctaaatggtcaaagaacttcggcataggatgggcccgcgtctgattagttagttggtaaggtaatggcttaccaagacgatgatcagtagccgacctgagagggtgaccggccacactggaactgagacacggtccagactcctacgggaggcagcagtggggaatattgcacaatgggggaaaccctgatgcagcaacgccgcgtgagcgaagaaggccttcgggtcgtaaagctctgtcctaagggaagataatgacggtaccttaggaggaagccccggctaactacgtgccagcagccgcggtaatacgtagggggcaagcgttatccggaatcactgggcgtaaagggtgcgtaggcggccaaacaagtcaggggtgaaaggctacggctcaaccgtagtaagcctttgaaactgtttggcttgagtgcaggagaggagagtggaattcctagtgtagcggtgaaatgcgtagatattaggaggaacaccagtggcgaaggcgactctctggactgtaactgacgctgaggcacgaaagcgtggggagcaaacaggattagataccctggtagtccacgccgtaaacgatgagtgctaggtgttggagggagaccttcagtgccggagctaacgcattaagcactccgcctggggagtacgctcgcaagagtgaaactcaaaggaatatacgggggcccgcacaaaaagcggagcatgtggtttaattcgaagcgacgagaagaaccttacatggacttgacatccttttgacagaaccttaaccggttccttctcttcggagactgaagtgacaggtggtgcatggttgtcgtcagctcgtgtcgtgagatgttgggttaagtcccgcaacgagcgcaacccttatctttagttgccagcacttagggtgggcactctagagagactgccggggataactcggaggaaggtggggatgacgtcaaatcatcatgccccttatgttcagggctacacacgtgctacaatggccgatacaaagggcagcaagagagtgatcttaagcaaatcccataaagtcggtcccagttcggattgtgggctgaaactcgcccacatgaagctggagttgctagtaatcgcgaatcagaatgtcgcggtgaatgcgttcccgggtcttgtacacaccgcccgtcacaccatgggagtcggaagcacccgaagccagctacttaaccagaaatggagagagcttcgaaggaagtcgactgccg

SEQ ID NO: 3086 - DNA, 1464 bp, Serratia ficaria
attgaacgctggcggcaggcctaacacatgcaagtcgagcggtagcacaggagagcttgctctctgggtgacgagcggcggacgggtgagtaatgtctgggaaactgcctgatggagggggataactactggaaacggtagctaataccgcataacgtctacggaccaaagtgggggaccttcgggcctcacgccatcagatgtgcccagatgggattagctagtaggtggggtaatggctcacctaggcgacgatccctagctggtctgagaggatgaccagccacactggaactgagacacggtccagactcctacgggaggcagcagtggggaatattgcacaatgggcgcaagcctgatgcagccatgccgcgtgtgtgaagaaggccttcgggttgtaaagcactttcagcgaggaggaagggcgatgtcttaatacggcagcgcattgacgttactcgcagaagaagcaccggctaactccgtgccagcagccgcggtaatacggagggtgcaagcgttaatcggaattactgggcgtaaagcgcacgcaggcggtttgttaagtcagatgtgaaatccccgcgcttaacgtgggaactgcatttgaaactggcaagctagagtctcgtagaggggggtagaattccaggtgtagcggtgaaatgcgtagagatctggaggaataccggtggcgaaggcggccccctggacgaagactgacgctcaggtgcgaaagcgtggggagcaaacaggattagataccctggtagtccacgctgtaaacgatgtcgatttggaggttgtgcccttgaggcgtggcttccggagctaacgcgttaaatcgaccgcctggggagtacggccgcaaggttaaaactcaaatgaattgacgggggcccgcacaagcggtggagcatgtggtttaattcgatgcaacgcgaagaaccttacctactcttgacatccagagaacttagcagagatgctttggtgccttcgggaactctgagacaggtgctgcatggctgtcgtcagctcgtgttgtgaaatgttgggttaagtcccgcaacgagcgcaacccttatcctttgttgccagcgattcggtcgggaactcaaaggagactgccggtgataaaccggaggaaggtggggatgacgtcaagtcatcatggcccttacgagtagggctacacacgtgctacaatggcgtatacaaagagaagcgaactcgcgagagcaagcggacctcataaagtacgtcgtagtccggattggagtctgcaactcgactccatgaagtcggaatcgctagtaatcgtagatcagaatgctacggtgaatacgttcccgggccttgtacacaccgcccgtcacaccatgggagtgggttgcaaaagaagtaggtagcttaaccttcgggagggcgcttaccactttgtgattcatgactggggtg

SEQ ID NO: 3087 - DNA, 1463 bp, Serratia fonticola
attgaacgctggcggcaggcctaacacatgcaagtcgagcggtagcacaaggagcttgctcctgggtgacgagcggcggacgggtgagtaatgtctgggaaactgcccgatggagggggataactactggaaacggtagctaataccgcataacgtcttcggaccaaagtgggggaccttcgggcctcacaccatcggatgtgcccagatgggattagctagtaggtgaggtaatggctcacctaggcgacgatccctagctggtctgagaggatgaccagccacactggaactgagacacggtccagactcctacgggaggcagcagtggggaatattgcacaatgggcgcaagcctgatgcagccatgccgcgtgtgtgaagaaggccttcgggttgtaaagcactttcagcgaggaggaagggttcagtgttaatagcaccgttcattgacgttactcgcagaagaagcaccggctaactccgtgccagcagccgcggtaatacggagggtgcaagcgttaatcggaattactgggcgtaaagcgcacgcaggcggtttgttaagtcagatgtgaaatccccgagcttaacttgggaactgcatttgaaactggcaagctagagtcttgtagaggggggtagaattccaggtgtagcggtgaaatgcgtagagatctggaggaataccggtggcgaaggcggccccctggacaaagactgacgctcaggtgcgaaagcgtggggagcaaacaggattagataccctggtagtccacgctgtaaacgatgtcgacttggaggttgtgcccttgaggcgtggcttccggagctaacgcgttaagtcgaccgcctggggagtacggccgcaaggttaaaactcaaatgaattgacgggggcccgcacaagcggtggagcatgtggtttaattcgatgcaacgcgaagaaccttacctactcttgacatccacagaactttccagagatggattggtgccttcgggaactgtgagacaggtgctgcatggctgtcgtcagctcgtgttgtgaaatgttgggttaagtcccgcaacgagcgcaacccttatcctttgttgccagcacgtaatggtgggaactcaaaggagactgccggtgataaaccggaggaaggtggggatgacgtcaagtcatcatggcccttacgagtagggctacacacgtgctacaatggcatatacaaagagaagcgaactcgcgagagcaagcggacctcataaagtatgtcgtagtccggatcggagtctgcaactcgactccgtgaagtcggaatcgctagtaatcgtagatcagaatgctacggtgaatacgttcccgggccttgtacacaccgcccgtcacaccatgggagtgggttgcaaaagaagtaggtagcttaaccttcgggagggcgcttaccactttgtgattcatgactggggtg

SEQ ID NO: 3088 - DNA, 1465 bp, Serratia liquefaciens
attgaacgctggcggcaggcctaacacatgcaagtcgagcggtagcacaagagagcttgctctctgggtgacgagcggcggacgggtgagtaatgtctgggaaactgcctgatggagggggataactactggaaacggtagctaataccgcataacgtcttcggaccaaagtgggggaccttcgggcctcatgccatcagatgtgcccagatgggattagctagtaggtggggtaatggctcacctaggcgacgatccctagctggtctgagaggatgaccagccacactggaactgagacacggtccagactcctacgggaggcagcagtggggaatattgcacaatgggcgcaagcctgatgcagccatgccgcgtgtgtgaagaaggccttcgggttgtaaagcactttcagcgaggaggaagggttcagtgttaatagcactgttcattgacgttactcgcagaagaagcaccggctaactccgtgccagcagccgcggtaatacggagggtgcaagcgttaatcggaattactgggcgtaaagcgcacgcaggcggtttgttaagtcagatgtgaaatccccgcgcttaacgtgggaactgcatttgaaactggcaagctagagtcttgtagaggggggtagaattccaggtgtagcggtgaaatgcgtagagatctggaggaataccggtggcgaaggcggccccctggacaaagactgacgctcaggtgcgaaagcgtggggagcaaacaggattagataccctggtagtccacgctgtaaacgatgtcgacttggaggttgtgcccttgaggcgtggcttccggagctaacgcgttaagtcgaccgcctggggagtacggccgcaaggttaaaactcaaatgaattgacgggggcccgcacaagcggtggagcatgtggtttaattcgatgcaacgcgaagaaccttacctactcttgacatccagagaattcgctagagatagcttagtgccttcgggaactctgagacaggtgctgcatggctgtcgtcagctcgtgttgtgaaatgttgggttaagtcccgcaacgagcgcaacccttatcctttgttgccagcgcgtaatggcgggaactcaaaggagactgccggtgataaaccggaggaaggtggggatgacgtcaagtcatcatggcccttacgagtagggctacacacgtgctacaatggcgtatacaaagagaagcgaactcgcgagagcaagcggacctcataaagtacgtcgtagtccggatcggagtctgcaactcgactccgtgaagtcggaatcgctagtaatcgtagatcagaatgctacggtgaatacgttcccgggccttgtacacaccgcccgtcacaccatgggagtgggttgcaaaagaagtaggtagcttaaccttcgggagggcgcttaccactttgtgattcatgactggggtg

SEQ ID NO: 3089 - DNA, 1464 bp, Serratia nematodiphila
attgaacgctggcggcaggcttaacacatgcaagtcgagcggtagcacaggggagcttgctccccgggtgacgagcggcggacgggtgagtaatgtctgggaaactgcctgatggagggggataactactggaaacggtagctaataccgcataacgtcgcaagaccaaagagggggaccttcgggcctcttgccatcagatgtgcccagatgggattagctagtaggtggggtaatggctcacctaggcgacgatccctagctggtctgagaggatgaccagccacactggaactgagacacggtccagactcctacgggaggcagcagtggggaatattgcacaatgggcgcaagcctgatgcagccatgccgcgtgtgtgaagaaggccttcgggttgtaaagcactttcagcgaggaggaaggtggtgaacttaatacgttcatcaattgacgttactcgcagaagaagcaccggctaactccgtgccagcagccgcggtaatacggagggtgcaagcgttaatcggaattactgggcgtaaagcgcacgcaggcggtttgttaagtcagatgtgaaatccccgggctcaacctgggaactgcatttgaaactggcaagctagagtctcgtagaggggggtagaattccaggtgtagcggtgaaatgcgtagagatctggaggaataccggtggcgaaggcggccccctggacgaagactgacgctcaggtgcgaaagcgtggggagcaaacaggattagataccctggtagtccacgctgtaaacgatgtcgatttggaggttgtgcccttgaggcgtggcttccggagctaacgcgttaaatcgaccgcctggggagtacggccgcaaggttaaaactcaaatgaattgacgggggcccgcacaagcggtggagcatgtggtttaattcgatgcaacgcgaagaaccttacctactcttgacatccagagaactttccagagatggattggtgccttcgggaactctgagacaggtgctgcatggctgtcgtcagctcgtgttgtgaaatgttgggttaagtcccgcaacgagcgcaacccttatcctttgttgccagcggttcggccgggaactcaaaggagactgccagtgataaactggaggaaggtggggatgacgtcaagtcatcatggcccttacgagtagggctacacacgtgctacaatggcgtatacaaagagaagcgacctcgcgagagcaagcggacctcataaagtacgtcgtagtccggattggagtctgcaactcgactccatgaagtcggaatcgctagtaatcgtagatcagaatgctacggtgaatacgttcccgggccttgtacacaccgcccgtcacaccatgggagtgggttgcaaaagaagtaggtagcttaaccttcgggagggcgcttaccactttgtgattcatgactggggtg

SEQ ID NO: 3090 - DNA, 1464 bp, Serratia odorifera
attgaacgctggcggcaggcctaacacatgcaagtcgagcggtagcacaggagagcttgctctctgggtgacgagcggcggacgggtgagtaatgtctgggaaactgcccgatggagggggataaccactggaaacggtggctaataccgcataacgtctacggaccaaagagggggaccttcgggcctcttgccatcggatgtgcccagatgggattagctagtaggtggggtaacggctcacctaggcgacgatccctagctggtctgagaggatgaccagccacactggaactgagacacggtccagactcctacgggaggcagcagtggggaatattgcacaatgggcgcaagcctgatgcagccatgccgcgtgtgtgaagaaggccttcgggttgtaaagcactttcagcgaggaggaaggccaatagcttaatacgctgttggattgacgttactcgcagaagaagcaccggctaactccgtgccagcagccgcggtaatacggagggtgcaagcgttaatcggaattactgggcgtaaagcgcacgcaggcggtttgttaagtcagatgtgaaatccccgcgcttaacgtgggaactgcatttgaaactggcaagctagagtctcgtagaggggggtagaattccaggtgtagcggtgaaatgcgtagagatctggaggaataccggtggcgaaggcggccccctggacgaagactgacgctcaggtgcgaaagcgtggggagcaaacaggattagataccctggtagtccacgctgtaaacgatgtcgatttggaggttgtgcccttgaggcgtggcttccggagctaacgcgttaaatcgaccgcctggggagtacggccgcaaggttaaaactcaaatgaattgacgggggcccgcacaagcggtggagcatgtggtttaattcgatgcaacgcgaagaaccttacctactcttgacatccagagaactttccagagatggaagggtgccttcgggaactctgagacaggtgctgcatggctgtcgtcagctcgtgttgtgaaatgttgggttaagtcccgcaacgagcgcaacccttatcctttgttgccagcggttcggccgggaactcaaaggagactgccagtgataaactggaggaaggtggggatgacgtcaagtcatcatggcccttacgagtagggctacacacgtgctacaatggcgtatacaaagagaagcgaacttgcgagagtaagcggacctcataaagtacgtcgtagtccggattggagtctgcaactcgactccatgaagtcggaatcgctagtaatcgtagatcagaatgctacggtgaatacgttcccgggccttgtacacaccgcccgtcacaccatgggagtgggttgcaaaagaagtaggtagcttaaccttcgggagggcgcttaccactttgtgattcatgactggggtg

SEQ ID NO: 3091 - DNA, 1464 bp, Serratia oryzae
attgaacgctggcggcaggcctaacacatgcaagtcgagcggcagcggaaagtagcttgctactttgccggcgagcggcggacgggtgagtaatgtctgggaaactgcctgatggagggggataactactggaaacggtggctaataccgcataacgtcgcaagaccaaagtgggggaccttcgggcctcacgccatcggatgtgcccagatgggattagctagtaggtggggtaatggctcacctaggcgacgatccctagctggtctgagaggatgaccagccacactggaactgagacacggtccagactcctacgggaggcagcagtggggaatattgcacaatgggcgcaagcctgatgcagccatgccgcgtgtgtgaagaaggccttcgggttgtaaagcactttcagcgaggaggaaggcatcacacttaatacgtgtggtgattgacgttactcgcagaagaagcaccggctaactccgtgccagcagccgcggtaatacggagggtgcgagcgttaatcggaattactgggcgtaaagcgcacgcaggcggtttgttaagtcagatgtgaaatccccgcgcttaacgtgggaactgcatttgaaactggcaagctagagtcttgtagaggggggtagaattccaggtgtagcggtgaaatgcgtagagatctggaggaataccggtggcgaaggcggccccctggacaaagactgacgctcaggtgcgaaagcgtggggagcaaacaggattagataccctggtagtccacgctgtaaacgatgtcgacttggaggttgtgcccttgaggcgtggcttccggagctaacgcgttaagtcgaccgcctggggagtacggccgcaaggttaaaactcaaatgaattgacgggggcccgcacaagcggtggagcatgtggtttaattcgatgcaacgcgaagaaccttacctactcttgacatccacggaacttgccagagatggcttggtgccttcgggaaccgtgagacaggtgctgcatggctgtcgtcagctcgtgttgtgaaatgttgggttaagtcccgcaacgagcgcaacccttatcctttgttgccagcacttcgggtgggaactcaaaggagactgccggtgataaaccggaggaaggtggggatgacgtcaagtcatcatggcccttacgagtagggctacacacgtgctacaatggcgtatacaaagagaagcaaactcgcgagagccagcggacctcataaagtacgtcgtagtccggattggagtctgcaactcgactccatgaagtcggaatcgctagtaatcgtagatcagaatgctacggtgaatacgttcccgggccttgtacacaccgcccgtcacaccatgggagtgggttgcaaaagaagtaggtagcttaaccttcgggagggcgcttaccactttgtgattcatgactggggtg

SEQ ID NO: 3092 - DNA, 1464 bp, Serratia plymuthica
attgaacgctggcggcaggcctaacacatgcaagtcgagcggtagcacaggagagcttgctctctgggtgacgagcggcggacgggtgagtaatgtctgggaaactgcctgatggagggggataactactggaaacggtagctaataccgcataacgtctacggaccaaagtgggggaccttcgggcctcacgccatcagatgtgcccagatgggattagctagtaggtggggtaatggctcacctaggcgacgatccctagctggtctgagaggatgaccagccacactggaactgagacacggtccagactcctacgggaggcagcagtggggaatattgcacaatgggcgcaagcctgatgcagccatgccgcgtgtgtgaagaaggccttagggttgtaaagcactttcagcgaggaggaagggcagtgtgttaatagcacattgcattgacgttactcgcagaagaagcaccggctaactccgtgccagcagccgcggtaatacggagggtgcaagcgttaatcggaattactgggcgtaaagcgcacgcaggcggtttgttaagtcagatgtgaaatccccgcgcttaacgtgggaactgcatttgaaactggcaagctagagtcttgtagaggggggtagaattccaggtgtagcggtgaaatgcgtagagatctggaggaataccggtggcgaaggcggccccctggacaaagactgacgctcaggtgcgaaagcgtggggagcaaacaggattagataccctggtagtccacgctgtaaacgatgtcgatttggaggttgtgcccttgaggcgtggcttccggagctaacgcgttaaatcgaccgcctggggagtacggccgcaaggttaaaactcaaatgaattgacgggggcccgcacaagcggtggagcatgtggtttaattcgatgcaacgcgaagaaccttacctactcttgacatccagagaattcgctagagatagcttagtgccttcgggaactctgagacaggtgctgcatggctgtcgtcagctcgtgttgtgaaatgttgggttaagtcccgcaacgagcgcaacccttatcctttgttgccagcgattcggtcgggaactcaaaggagactgccggtgataaaccggaggaaggtggggatgacgtcaagtcatcatggcccttacgagtagggctacacacgtgctacaatggcgtatacaaagagaagcgaactcgcgagagcaagcggacctcataaagtacgtcgtagtccggattggagtctgcaactcgactccatgaagtcggaatcgctagtaatcgtagatcagaatgctacggtgaatacgttcccgggccttgtacacaccgcccgtcacaccatgggagtgggttgcaaaagaagtaggtagcttaaccttcgggagggcgcttaccactttgtgattcatgactggggtg

SEQ ID NO: 3093 - DNA, 1465 bp, Serratia proteamaculans
attgaacgctggcggcaggcctaacacatgcaagtcgagcggtagcacaggagagcttgctctctgggtgacgagcggcggacgggtgagtaatgtctgggaaactgcctgatggagggggataactactggaaacggtagctaataccgcataacgtcttcggaccaaagtgggggaccttcgggcctcacgccatcagatgtgcccagatgggattagctagtaggtggggtaatggctcacctaggcgacgatccctagctggtctgagaggatgaccagccacactggaactgagacacggtccagactcctacgggaggcagcagtggggaatattgcacaatgggcgcaagcctgatgcagccatgccgcgtgtgtgaagaaggccttcgggttgtaaagcactttcagcgaggaggaagggttcagtgttaatagcactgtgcattgacgttactcgcagaagaagcaccggctaactccgtgccagcagccgcggtaatacggagggtgcaagcgttaatcggaattactgggcgtaaagcgcacgcaggcggtttgttaagtcagatgtgaaatccccgcgcttaacgtgggaactgcatttgaaactggcaagctagagtcttgtagaggggggtagaattccaggtgtagcggtgaaatgcgtagagatctggaggaataccggtggcgaaggcggccccctggacaaagactgacgctcaggtgcgaaagcgtggggagcaaacaggattagataccctggtagtccacgctgtaaacgatgtcgacttggaggttgtgcccttgaggcgtggcttccggagctaacgcgttaagtcgaccgcctggggagtacggccgcaaggttaaaactcaaatgaattgacgggggcccgcacaagcggtggagcatgtggtttaattcgatgcaacgcgaagaaccttacctactcttgacatccacagaattcgctagagatagcttagtgccttcgggaactctgagacaggtgctgcatggctgtcgtcagctcgtgttgtgaaatgttgggttaagtcccgcaacgagcgcaacccttatcctttgttgccagcacgtaatggtgggaactcaaaggagactgccggtgataaaccggaggaaggtggggatgacgtcaagtcatcatggcccttacgagtagggctacacacgtgctacaatggcgtatacaaagagaagcgaactcgcgagagccagcggacctcataaagtacgtcgtagtccggatcggagtctgcaactcgactccgtgaagtcggaatcgctagtaatcgtagatcagaatgctacggtgaatacgttcccgggccttgtacacaccgcccgtcacaccatgggagtgggttgcaaaagaagtaggtagcttaaccttcgggagggcgcttaccactttgtgattcatgactggggtg

SEQ ID NO: 3094 - DNA, 1360 bp, Serratia quinivorans
  misc_feature (30)..(30): n is a, c, g, or t
caggcctaacacatgcaagtcgagcggtanacaagagagcttgctctctgggtgacgagcggcggacgggtgagtaatgtctgggaaactgcctgatggagggggataactactggaaacggtagctaataccgcataacgtcttcggaccaaagtgggggaccttcgggcctcacgccatcagatgtgcctagatgggattagctagtaggtggggtaatggctcacctaggcgacgatccctagctggtctgagaggatgaccagccacactggaactgagacacggtccagactcctacgggaggcagcagtggggaatattgcacaatgggcgcaagctgatgcagccatgccgcgtgtgtgaagaaggccttcgggttgtaaagcactttcagcgaggaggaagggtagtgtgttaatagcacattacattgacgttactcgcagaagaagcaccggctaactccgtgccagcagccgcggtaatacggagggtgcaagcgttaatcggaattactgggcgtaaagcgcacgcaggcggtttgttaagtcagatgtgaaatccccgcgcttaacgtgggaactgcatttgaaactggcaagctagagtcttgtagaggggggtagaattccaggtgtagcggtgaaatgcgtagagatctggaggaataccggtggcgaaggcggccccctggacaaagactgacgctcaggtgcgaaagcgtggggagcaaacaggattagataccctggtagtccacgctgtaaacgatgtcgacttggaggttgtgcccttgaggcgtggcttccggagctaacgcgttaagtcgaccgcctggggagtacggccgcaaggttaaaactcaaatgaattgacgggggcccgcacaagcggtggagcatgtggtttaattcgatgcaacgcgaagaaccttacctactcttgacatccagagaattcgctagagatagcttagtgcttcgggaactctgagacaggtgctgcatggctgtcgtcagctcgtgttgtgaaatgttgggttaagtcccgcaacgagcgcaacccttatcctttgttgccagcacgtaatggtgggaactcaaaggagactgccggtgataaaccggaggaaggtggggatgacgtcaagtcatcatggcccttacgagtagggctacacacgtgctacaatggcgtatacaaagagaagcgaactcgcgagagccagcggacctcataaagtacgtcgtagtccggatcggagtctgcaactcgactccgtgaagtcggaatcgctagtaatcgtagatcagaatgctacggtgaatacgttcccgggccttgtacactccgccc

SEQ ID NO: 3095 - DNA, 1442 bp, Serratia rubidaea
acgctggcggcaggcctaacacatgcaagtcgagcggcagcgggaggaagcttgcttcctcgccggcgagcggcggacgggtgagtaatgtctggggatctgcccgatggagggggataaccactggaaacggtggctaataccgcataacgtcgcaagaccaaagtgggggaccttcgggcctcacaccatcggatgaacccagatgggattagctagtaggtggggtaatggctcacctaggcgacgatccctagctggtctgagaggatgaccagccacactggaactgagacacggtccagactcctacgggaggcagcagtggggaatattgcacaatgggcgcaagcctgatgcagccatgccgcgtgtgtgaagaaggccttcgggttgtaaagcactttcagcgaggaggaaggtggtgagcttaatacgctcatcaattgacgttactcgcagaagaagcaccggctaactccgtgccagcagccgcggtaatacggagggtgcaagcgttaatcggaattactgggcgtaaagcgcacgcaggcggtttgttaagtcagatgtgaaatccccgagcttaacttgggaactgcatttgaaactggcaagctagagtctcgtagaggggggtagaattccaggtgtagcggtgaaatgcgtagagatctggaggaataccggtggcgaaggcggccccctggacgaagactgacgctcaggtgcgaaagcgtggggagcaaacaggattagataccctggtagtccacgccgtaaacgatgtcgatttggaggttgtgcccttgaggcgtggcttccggagctaacgcgttaaatcgaccgcctggggagtacggccgcaaggttaaaactcaaatgaattgacgggggcccgcacaagcggtggagcatgtggtttaattcgatgcaacgcgaagaaccttacctactcttgacatccagagaactttccagagatggattggtgccttcgggaactctgagacaggtgctgcatggctgtcgtcagctcgtgttgtgaaatgttgggttaagtcccgcaacgagcgcaacccttatcctttgttgccagcggttcggccgggaactcaaaggagactgccagtgataaactggaggaaggtggggatgacgtcaagtcatcatggcccttacgagtagggctacacacgtgctacaatggcgtatacaaagagaagcgaacctgcgagggcaagcggacctcataaagtacgtcgtagtccggattggagtctgcaactcgactccatgaagtcggaatcgctagtaatcgtagatcagaatgctacggtgaatacgttcccgggccttgtacacaccgcccgtcacaccatgggagtgggttgcaaaagaagtaggtagcttaaccttcgggagggcgcttaccactttgt

SEQ ID NO: 3096 - DNA, 1464 bp, Serratia symbiotica
attgaacgctggcggcaggcctaacacatgcaagtcgagcggtagcacaagagagcttgctctctgggtgacgagcggcggacgggtgagtaatgtctgggaaactgcctgatggcgggggataactagtggaaacggtagctaataccgcataacgtcgcaagaccaaagtgggggaccttcgggcctcacgccatcagatgtgcccaggtgggattagctggtaggtggggtaacggctcacctaggcgacgatccctagctggtctgagaggatgaccagccacactggaactgagacacggtccagactcctacgggaggcagcagtggggaatattgcacaatgggcgcaagcctgatgcagccatgccgcgtgtgtgaagaaggccttcgggttgtaaagcactttcagcgaggagaaagggtaatgtgttaataagacattgcattgacgttactcgcagaagaagcaccggctaactccgtgccagcagccgcggtaatacggagggtgcaagcgttaatcggaattactgggcgtaaagcgcacgcaggcggtttgttaagtcagatgtgaaatccccgcgctcaacgtgggaacggcatttgagactggcaagctagagtcttgtagaggggggtagaattccaggtgtagcggtgaaatgcgtagagatctggaggaataccggtggcgaaggcggccccctggacaaagactgacgctcaggtgcgaaagcgtggggagcaaacaggattagataccctggtagtccacgctgtaaacgatgtcgatttggaggttgcgcccttgaggggtggcttccgtagctaacgcgttaaatcgaccgcctggggagtacggccgcaaggttaaaactcaaatgaattgacgggggcccgcacaagcggtggagcatgtggtttaattcgatgcaacgcgaagaaccttacctactcttgacatccagagaactttccagagatggagaggtgccttcgggagctctgagacaggtgctgcatggctgtcgtcagctcgtgttgtgaaatgttgggttaagtcccgcaacgagcgcaacccttatcctttgttgccagcgataaagtcgggaactcaaaggagactgccggtgataaaccggaggaaggtggggatgacgtcaagtcatcatggcccttacgagtagggctacacacgtgctacaatggcgtatacaaagagaagcgacctcgcgagagcaagcggacctcacaaagtacgtagtagtccggattggagtctgcaactcgactccatgaagtcggaatcgctagtaatcgtagatcagaatgctgcggtgaatacgttcccgggccttgtacacaccgcccgtcacaccatgggagtgggttgcaaaagaagtaggtagcttaaccttcgggagggcgcttaccactttgtgattcatgactggggtg

SEQ ID NO: 3097 - DNA, 1467 bp, Shewanella algae
attgaacgctggcggcaggcctaacacatgcaagtcgagcggtaacatttcaaaagcttgcttttgaagatgacgagcggcggacgggtgagtaatgcctgggaatttgcccatttgtgggggataacagttggaaacgactgctaataccgcatacgccctacgggggaaagcaggggaccttcgggccttgcgctgatggataagcccaggtgggattagctagtaggtgaggtaaaggctcacctaggcgacgatccctagctggtctgagaggatgatcagccacactgggactgagacacggcccagactcctacgggaggcagcagtggggaatattgcacaatgggggaaaccctgatgcagccatgccgcgtgtgtgaagaaggccttcgggttgtaaagcactttcagcgaggaggaaagggtgtaagttaataccttacatctgtgacgttactcgcagaagaagcaccggctaactccgtgccagcagccgcggtaatacggagggtgcgagcgttaatcggaattactgggcgtaaagcgtgcgcaggcggtttgttaagcgagatgtgaaagccccgggctcaacctgggaaccgcatttcgaactggcaaactagagtcttgtagaggggggtagaattccaggtgtagcggtgaaatgcgtagagatctggaggaataccggtggcgaaggcggccccctggacaaagactgacgctcaggcacgaaagcgtggggagcaaacaggattagataccctggtagtccacgccgtaaacgatgtctactcggagtttggtgtcttgaacactgggctctcaagctaacgcattaagtagaccgcctggggagtacggccgcaaggttaaaactcaaatgaattgacgggggcccgcacaagcggtggagcatgtggtttaattcgatgcaacgcgaagaaccttacctactcttgacatccacagaacttttcagagatgaattggtgccttcgggaactgtgagacaggtgctgcatggctgtcgtcagctcgtgttgtgaaatgttgggttaagtcccgcaacgagcgcaacccctatccttacttgccagcgggtaatgccgggaactttagggagactgccggtgataaaccggaggaaggtggggacgacgtcaagtcatcatggcccttacgagtagggctacacacgtgctacaatggtcagtacagagggttgcgaagccgcgaggtggagctaatcccataaagctggtcgtagtccggattggagtctgcaactcgactccatgaagtcggaatcgctagtaatcgtggatcagaatgccacggtgaatacgttcccgggccttgtacacaccgcccgtcacaccatgggagtgggctgcaccagaagtagatagcttaaccttcgggagggcgtttaccacggtgtggttcatgactggggtg

SEQ ID NO: 3098 - DNA, 1467 bp, Shewanella amazonensis
attgaacgctggcggcaggcctaacacatgcaagtcgagcggcagcgggaagatagcttgctatctttgccggcgagcggcggacgggtgagtaatacctggggatctgcccaatcgagggggataacagttggaaacgactgctaataccgcatacgccctacgggggaaaggaggggctcttcggaccttccgcgattggatgaacccaggcgggattagctagtaggtgaggtaatggctcacctaggcgacgatccctagctgttctgagaggatggacagccacactgggactgagacacggcccagactcctacgggaggcagcagtggggaatattggacaatgggggaaaccctgatccagccatgccgcgtgtgtgaagaaggccttcgggttgtaaagcactttcagtggggaggaaaggttgtaggttaataccctatagctgtgacgttacccacagaagaagcaccggctaactccgtgccagcagccgcggtaatacggagggtgcaagcgttaatcggaattactgggcgtaaagcgtgcgcaggcggtctgttaagcgagatgtgaaagccccgggctcaacctgggaactgcatttcgaactggcagactagagtcttgtagaggggggtagaattccaggtgtagcggtgaaatgcgtagagatctggaggaataccggtggcgaaggcggccccctggacaaagactgacgctcaggcacgaaagcgtggggagcaaacaggattagataccctggtagtccacgccgtaaacgatgtctactcggagtttggtgtcttgaacactgggctctcaagctaacgcattaagtagaccgcctggggagtacggccgcaaggttaaaactcaaatgaattgacgggggcccgcacaagcggtggagcatgtggtttaattcgatgcaacgcgaagaaccttacctactcttgacatccagagaattcgctagagatagcttagtgcctttgggaactctgagacaggtgctgcatggctgtcgtcagctcgtgttgtgaaatgttgggttaagtcccgcaacgagcgcaacccttatccttatttgccagcgggtagtgccgggaactttagggagactgccggtgataaaccggaggaaggtggggacgacgtcaagtcatcatggcccttacgagtagggctacacacgtgctacaatggcgagtacagagggttgcgaagccgcgaggtggagctaatctcataaagctcgtcgtagtccggattggagtctgcaactcgactccatgaagtcggaatcgctagtaatcgtggatcagaatgccacggtgaatacgttcccgggccttgtacacaccgcccgtcacaccatgggagtgggctgcaccagaagtagatagcttaaccttcgggagggcgtttaccacggtgtggttcatgactggggtg

SEQ ID NO: 3099 - DNA, 1295 bp, Shewanella atlantica
  misc_feature (1290)..(1290): n is a, c, g, or t
cttgctactttgctgtcgagcggcggacgggtgagtaatgcctagatatctgcctagtcgtgggggataacagttggaaacgactgctaataccgcatacgccctacgggggaaaggaggggaccttcgggcctttcgcgattagatgagtctaggtgggattagctagtaggtgaggtaatggctcacctaggcgacgatccctagctgttctgagaggatgatcagccacactgggactgagacacggcccagactcctacgggaggcagcagtggggaatattgcacaatgggcgaaagcctgatgcagccatgccgcgtgtgtgaagaaggccttcgggttgtaaagcactttcagcgaggaggaaaggttggtagttaataactgccagctgtgacgttactcgcagaagaagcaccggctaacttcgtgccagcagccgcggtaatacgaggggtgcaagcgttaatcggaattactgggcgtaaagcgtacgcaggcggtttgttaagccagatgtgaaagccccgggctcaacctgggaattgcatttggaactggcaaactagagtcttgtagaggggggtagaatttcaggtgtagcggtgaaatgcgtagagatctgaaggaataccggtggcgaaggcggccccctggacaaagactgacgctcaggtacgaaagcgtggggagcaaacaggattagataccctggtagtccacgccgtaaacgatgtctactcggaatttggtgtcttgaacactgggttctcaagctaacgcattaagtagaccgcctggggagtacggccgcaaggttaaaactcaaatgaattgacgggggcccgcacaagcggtggagcatgtggtttaattcgatgcaacgcgaagaaccttacctactcttgacatccagagaattcgctagagatagcttagtgccttcgggagctctgagacaggtgctgcatggctgtcgtcagctcgtgttgtgaaatgttgggttaagtcccgcaacgagcgcaacccttatccttatttgccagcacgtaatggtgggaactttagggagactgccggtgataaaccggaggaaggtggggacgacgtcaagtcatcatggcccttacgagtagggctacacacgtgctacaatggtcggtacagagggttgcgaagccgcgaggtgaagctaatcccagaaagccggtcgtagtccggatcggagtctgcaactcgactccgtgaagtcggaatcgctagtaatcgtggatcagaatgccacgnaaacg

SEQ ID NO: 3100 - DNA, 1467 bp, Shewanella baltica
attgaacgctggcggcaggcctaacacatgcaagtcgagcggcagcgggaagatagtttactatctttgccggcgagcggcggacgggtgagtaatgcctagggatctgcccagtcgagggggataacagttggaaacgactgctaataccgcatacgccctacgggggaaaggaggggaccttcgggccttccgcgattggatgaacctaggtgggattagctagttggtgaggtaatggctcaccaaggcgacgatccctagctgttctgagaggatgatcagccacactgggactgagacacggcccagactcctacgggaggcagcagtggggaatattgcacaatgggggaaaccctgatgcagccatgccgcgtgtgtgaagaaggccttcgggttgtaaagcactttcagtagggaggaaaggtaatagtttaatacgctattactgtgacgttacctacagaagaaggaccggctaactccgtgccagcagccgcggtaatacggagggtccgagcgttaatcggaattactgggcgtaaagcgtgcgcaggcggtttgttaagcgagatgtgaaagccccgggctcaacctgggaattgcatttcgaactggcgaactagagtcttgtagaggggggtagaattccaggtgtagcggtgaaatgcgtagagatctggaggaataccggtggcgaaggcggccccctggacaaagactgacgctcaggcacgaaagcgtggggagcaaacaggattagataccctggtagtccacgccgtaaacgatgtctactcggagtttggtgtcttgaacactgggctctcaagctaacgcattaagtagaccgcctggggagtacggccgcaaggttaaaactcaaatgaattgacgggggcccgcacaagcggtggagcatgtggtttaattcgatgcaacgcgaagaaccttacctactcttgacatccacagaagccagtagagatacaggtgtgccttcgggaactgtgagacaggtgctgcatggctgtcgtcagctcgtgttgtgaaatgttgggttaagtcccgcaacgagcgcaacccctatccttatttgccagcacgtaatggtgggaactctagggagactgccggtgataaaccggaggaaggtggggacgacgtcaagtcatcatggcccttacgagtagggctacacacgtgctacaatggcgagtacagagggttgcaaagccgcgaggtggagctaatctcacaaagctcgtcgtagtccggattggagtctgcaactcgactccatgaagtcggaatcgctagtaatcgtggatcagaatgccacggtgaatacgttcccgggccttgtacacaccgcccgtcacaccatgggagtgggctgcaaaagaagtgggtagcttaaccttcgggggggcgctcaccactttgtggttcatgactggggtg

SEQ ID NO: 3101 - DNA, 1438 bp, Shewanella benthica
  misc_feature (610)..(611): n is a, c, g, or t
  misc_feature (802)..(802): n is a, c, g, or t
  misc_feature (804)..(804): n is a, c, g, or t
  misc_feature (816)..(818): n is a, c, g, or t
  misc_feature (1421)..(1421): n is a, c, g, or t
ttgaacgctggcggcaggcctaacacatgcaagtcgagcggaaacagaaagtagcttgctactttgctgtcgagcggcggacgggtgagtaatgcctagggaactgcccagtcgagggggataacagttggaaacgactgctaataccgcatacgccctacgggggaaaggaggggaccttcgggcctttcgcgattggatgtacctaggtgggattagctagttggtaaggtaatagcttaccaaggcgacgatccctagctggtctgagaggatgatcagccacactggaactgagacacggtccagactcctacgggaggcagcagtggggaatattgcacaatgggcgaaagcctgatgcagccatgccgcgtgtgtgaagaaggccttcgggttgtaaagcactttcagcgaggaggaaaggttgtagtttaataaactgcagctgtgacgttactcgcagaagaagcaccggctaacttcgtgccagcagccgcggtaatacgaggggtgcaagcgttaatcggaattactgggcgtaaagcgtacgcaggcggtttgttaagcaagatgtgaaagccccgggctcaacctgggaattgcattnngaactggcaaactagagtcttgtagaggggggtagaattccaggtgtagcggtgaaatgcgtagagatctgaaggaataccggtggcgaaggcggccccctggacaaagactgacgctcaggtacgaaagcgtggggagcaaacaggattagataccctggtagtccacgccgtaaacgatgtctactcgnantttggtgtcttnnncactgggttctcaagctaacgcattaagtagaccgcctggggagtacggccgcaaggttaaaactcaaatgaattgacgggggccgcacaagcggtggagcatgtggtttaattcgatgcaacgcgaagaaccttacctactcttgacatccacagaactcgctagagatagcttggtgccttcgggaactgtgagacaggtgctgcatggctgtcgtcagctcgtgttgtgaaatgttgggttaagtcccgcaacgagcgcaacccttatccttatttgccagcacgtaatggtgggaactttagggagactgccggtgataaaccggaggaaggtggggacgacgtcaagtcatcatggcccttacgagtagggctacacacgtgctacaatggtcggtacagagggtcgcaaagccgcgaggtctagctaatcccacaaagccggtcgtagtccggatcggagtctgcaactcgactccgtgaagtcggaatcgctagtaatcgtgaatcagaatgtcacggtgaatacgttcccgggccttgtacacaccgcccgtcacaccatgggagtgggctgcaccagaagtagatagcttaacntcggggagggcgtttac

SEQ ID NO: 3102 - DNA, 1284 bp, Shewanella canadensis
ttgctatcagacgtcgagcggcggacgggtgagtaatgcctagatatctgcctagtcgtgggggataacagttggaaacgactgctaataccgcatacgccctacgggggaaaggaggggaccttcgggcctttcgcgattagatgagtctaggtgggattagctagtaggtgaggtaatggctcacctaggcgacgatccctagctgttctgagaggatgatcagccacactgggactgagacacggcccagactcctacgggaggcagcagtggggaatattgcacaatgggcgaaagcctgatgcagccatgccgcgtgtgtgaagaaggccttcgggttgtaaagcactttcagcgaggaggaaaggttggtagttaatagctgccagctgtgacgttactcgcagaagaagcaccggctaacttcgtgccagcagccgcggtaatacgaggggtgcaagcgttaatcggaattactgggcgtaaagcgtacgcaggcggtttgttaagccagatgtgaaagccccgggctcaacctgggaattgcatttggaactggcaaactagagtcttgtagaggggggtagaatttcaggtgtagcggtgaaatgcgtagagatctgaaggaataccggtggcgaaggcggccccctggacaaagactgacgctcatgtacgaaagcgtggggagcaaacaggattagataccctggtagtccacgccgtaaacgatgtctactcggagtttggtaacttagttactgggctcccaagctaacgcattaagtagaccgcctggggagtacggccgcaaggttaaaactcaaatgaattgacgggggcccgcacaagcggtggagcatgtggtttaattcgatgcaacgcgaagaaccttacctactcttgacatccagagaattcgctagagatagcttagtgccttcgggagctctgagacaggtgctgcatggctgtcgtcagctcgtgttgtgaaatgttgggttaagtcccgcaacgagcgcaacccttatccttatttgccagcacgtaatggtgggaactttagggagactgccggtgataaaccggaggaaggtggggacgacgtcaagtcatcatggcccttacgagtagggctacacacgtgctacaatggtcggtacagagggtcgcaaagccgcgaggtggagctaatcccacaaagccggtcgtagtccggatcggagtctgcaactcgactccgtgaagtcggaatcgctagtaatcgagatcagaatgtac

SEQ ID NO: 3103 - DNA, 1441 bp, Shewanella chilikensis
catgcaagtcgagcggtacatttcaaaagcttgcttttgaagatgacgagcggcggacgggtgagtaatgcctgggaatttgcccatttgtgggggataacagttggaaacgactgctaataccgcatacgccctacgggggaaagcaggggaacttcggtccttgcgctgatggataagcccaggtgggattagctagtaggtgaggtaatggctcacctaggcaacgatccctagctggtctgagaggatgatcagccacactgggactgagacacggcccagactcctacgggaggcagcagtggggaatattgcacaatgggggaaaccctgatgcagccatgccgcgtgtgtgaagaaggccttcgggttgtaaagcactttcagcgaggaggaaaggttagtagttaatacctgctagctgtgacgttactcgcagaagaagcaccggctaactccgtgccagcagccgcggtaatacggagggtgcgagcgttaatcggaattactgggcgtaaagcgtgcgcaggcggtttgttaagcgagatgtgaaagccccgggctcaacctgggaaccgcatttcgaactggcaaactagagtcttgtagaggggggtagaattccaggtgtagcggtgaaatgcgtagagatctggaggaataccggtggcgaaggcggccccctggacaaagactgacgctcaggcacgaaagcgtggggagcaaacaggattagataccctggtagtccacgccgtaaacgatgtctactcggagtttggtgtcttgaacactgggctctcaagctaacgcattaagtagaccgcctggggagtacggccgcaaggttaaaactcaaatgaattgacgggggcccgcacaagcggtggagcatgtggtttaattcgatgcaacgcgaagaaccttacctactcttgacatcctcagaagccagcggagacgcaggtgtgccttcggggaactgagagacaggtgctgcatggctgtcgtcagctcgtgttgtgaaatgttgggttaagtcccgcaacgagcgcaacccctatccttacttgccagcgggtaatgccgggaactttagggagactgccggtgataaaccggaggaaggtggggacgacgtcaagtcatcatggcccttacgagtagggctacacacgtgctacaatggtcggtacagagggttgcgaagccgcgaggtggagctaatctcataaagccggtcgtagtccggattggagtctgcaactcgactccatgaagtcggaatcgctagtaatcgtggatcagaatgccacggtgaatacgttcccgggccttgtacacaccgcccgtcacaccatgggagtgggctgcaccagaagtagatagcttaaccttcgggagggcgtttaccacggtgtggttcatgactggggtg

SEQ ID NO: 3104 - DNA, 1465 bp, Shewanella colwelliana
attgaacgctggcggcaggcctaacacatgcaagtcgagcggtaacaggaattagcttgctaatttgctgacgagcggcggacgggtgagtaatgcctagggaactgcccagtcgagggggataacagttggaaacgactgctaataccgcatacgccctacgggggaaaagaggggaccttcgggccttctgcgattggatgtacctaggtgggattagctagttggtgaggtaatggctcaccaaggcgacgatccctagctgttctgagaggatgatcagccacactgggactgagacacggcccagactcctacgggaggcagcagtggggaatattgcacaatgggcgcaagcctgatgcagccatgccgcgtgtgtgaagaaggccttcgggttgtaaagcactttcagcgaggaggaaagcttaagcgttaatagcgtttaggtgtgacgttactcgcagaagaaggaccggctaacttcgtgccagcagccgcggtaatacgaggggtccaagcgttaatcggaattactgggcgtaaagcgtacgcaggcggtttgttaagcgagatgtgaaagccccgggctcaacctgggaactgcatttcgaactggcaaactagagtcttgtagaggggggtagaatttcaggtgtagcggtgaaatgcgtagagatctgaaggaataccggtggcgaaggcggccccctggacaaagactgacgctcatgtacgaaagcgtggggagcaaacaggattagataccctggtagtccacgccgtaaacgatgtctactcggaatttggtgtcttgaacactgggttctcaagctaacgcattaagtagaccgcctggggagtacggccgcaaggttaaaactcaaatgaattgacgggggcccgcacaagcggtggagcatgtggtttaattcgatgcaacgcgaagaaccttacctactcttgacatccagagaattcgctagagatagcttagtgccttcgggaactctgagacaggtgctgcatggctgtcgtcagctcgtgttgtgaaatgttgggttaagtcccgcaacgagcgcaacccttatccttatttgccagcacgtaatggtgggaactttagggagactgccggtgataaaccggaggaaggtggggacgacgtcaagtcatcatggcccttacgagtagggctacacacgtgctacaatggcaagtacagagggttgcgaagccgcgaggtggagctaatctcacaaagcttgtcgtagtccggattggagtctgcaactcgactccatgaagtcggaatcgctagtaatcgtggatcagaatgccacggtgaatacgttcccgggccttgtacacaccgcccgtcacaccatgggagtgggctgcaccagaagtagatagcttaaccttcgggagggcgtttaccacggtgtggttcatgactggggtg

SEQ ID NO: 3105 - DNA, 1465 bp, Shewanella decolorationis
attgaacgctggcggcaggcctaacacatgcaagtcgagcggcagcacaagtgagtttactcatgaggtggcgagcggcggacgggtgagtaatgcctagggatctgcccagtcgagggggataacagttggaaacgactgctaataccgcatacgccctacgggggaaaggaggggaccttttggccttccgcgattggatgaacctaggtgggattagctagttggtgaggtaatggctcaccaaggcgacgatccctagctgttctgagaggatgatcagccacactgggactgagacacggcccagactcctacgggaggcagcagtggggaatattgcacaatgggggaaaccctgatgcagccatgccgcgtgtgtgaagaaggccttcgggttgtaaagcactttcagtagggaggaaaggttgtaagttaataccttgcagctgtgacgttacctacagaagaaggaccggctaactccgtgccagcagccgcggtaatacggagggtccaagcgttaatcggaattactgggcgtaaagcgtgcgcaggcggtttgttaagcgagatgtgaaagccccgggctcaacctgggaattgcatttcgaactggcaaactagagtcttgtagaggggggtagaattccaggtgtagcggtgaaatgcgtagagatctggaggaataccggtggcgaaggcggccccctggacaaagactgacgctcaggcacgaaagcgtggggagcaaacaggattagataccctggtagtccacgccgtaaacgatgtctactcggagtttggtgtcttgaacactgggctctcaagctaacgcattaagtagaccgcctggggagtacggccgcaaggttaaaactcaaatgaattgacgggggcccgcacaagcggtggagcatgtggtttaattcgatgcaacgcgaagaaccttacctactcttgacatccagagaactttccagagatggattggtgccttcgggaactctgagacaggtgctgcatggctgtcgtcagctcgtgttgtgaaatgttgggttaagtcccgcaacgagcgcaacccctatccttatttgccagcgcgtaatggcgggaactctagggagactgccggtgataaaccggaggaaggtggggacgacgtcaagtcatcatggcccttacgagtagggctacacacgtgctacaatggcgagtacagagggttgcaaagccgcgaggtggagctaatctcacaaagctcgtcgtagtccggattggagtctgcaactcgactccatgaagtcggaatcgctagtaatcgtaaatcagaatgttacggtgaatacgttcccgggccttgtacacaccgcccgtcacaccatgggagtgggctgcaaaagaagtgggtagcttaaccttcgggagggcgctcaccactttgtggttcatgactggggtg

SEQ ID NO: 3106 - DNA, 1467 bp, Shewanella denitrificans
attgaacgctggcggcaggcctaacacatgcaagtcgagcggcagcgggaaggtagtttactacctttgccggcgagcggcggacgggtgagtaatgcctagggatctgcccagtcgtgggggataacagttggaaacgactgctaataccgcatacgccctacgggggaaaggaggggaccttcgggcctttcgcgattggatgaacctaggtgggattagctagttggtgaggtaatggctcaccaaggcgacgatccctagctggtctgagaggatgatcagccacactggaactgagacacggtccagactcctacgggaggcagcagtggggaatattgcacaatgggggaaaccctgatgcagccatgccgcgtgtgtgaagaaggccttcgggttgtaaagcactttcagtcaggaggaaaggtagcgtgttaatagcacgttactgtgacgttactgacagaagaaggaccggctaactccgtgccagcagccgcggtaatacggagggtccgagcgttaatcggaattactgggcgtaaagcgtgcgcaggcggtttgttaagccagatgtgaaagccccgggctcaacctgggaattgcatttggaactggcgaactagagtcttgtagagggaggtagaatttcaggtgtagcggtgaaatgcgtagatatctgaaggaataccggtggcgaaggcggcctcctggacaaagactgacgctcatgcacgaaagcgtggggagcaaacaggattagataccctggtagtccacgccgtaaacgatgtctactcggagtttggtgccttgagcactgggctcccaagctaacgcattaagtagaccgcctggggagtacggccgcaaggttaaaactcaaatgaattgacgggggcccgcacaagcggtggagcatgtggtttaattcgatgcaacgcgaagaaccttacctactcttgacatccacagaagccagcagagatgcaggtgtgccttcgggaactgtgagacaggtgctgcatggctgtcgtcagctcgtgttgtgaaatgttgggttaagtcccgcaacgagcgcaacccctatccttatttgccagcacgtaatggtgggaactctagggagactgccggtgataaaccggaggaaggtggggacgacgtcaagtcatcatggcccttacgagtagggctacacacgtgctacaatggcgagtacagagggttgcaaagccgcgaggtggagctaatctcacaaagctcgtcgtagtccggatcggagtctgcaactcgactccgtgaagtcggaatcgctagtaatcgtgaatcagaatgtcacggtgaatacgttcccgggccttgtacacaccgcccgtcacaccatgggagtgggctgcaaaagaagtgggtagtctaaccttcgggaggacgctcaccactttgtggttcatgactggggtg

SEQ ID NO: 3107 - DNA, 1444 bp, Shewanella fodinae
cctacacatgcaagtcgagcggcagcggggagtagcttgctactctgccggcgagcggcggacgggtgagtaatgcctgggaatttgcccattcgagggggataacagttggaaacgactgctaataccgcatacgccctaagggggaaagcaggggaacttaggtccttgcgcgaatggataagcccaggtgggattagctagttggtgaggtaagggctcaccaaggcgacgatctctagctggtctgagaggatgatcagccacactggaactgagacacggtccagactcctacgggaggcagcagtggggaatattgcacaatgggggaaaccctgatgcagccatgccgcgtgtgtgaagaaggccttcgggttgtaaagcactttcagtcaggaggaaggtggtgtagctaatatctgcaccaattgacgttactgacagaagaagcaccggctaactccgtgccagcagccgcggtaatacggagggtgcgagcgttaatcggaattactgggcgtaaagcgtgcgcaggcggtttgttaagcgagatgtgaaagccccgggctcaacctgggatggtcatttcgaactggcaagctagagtctcgtagaggggggtagaattccaggtgtagcggtgaaatgcgtagagatctggaggaataccggtggcgaaggcggccccctggacgaagactgacgctcaggcacgaaagcgtggggagcaaacaggattagataccctggtagtccacgccgtaaacgatgtctactcggagtttggcgtctagaacgctgggctctcaagctaacgcattaagtagaccgcctggggagtacggccgcaaggttaaaactcaaatgaattgacgggggcccgcacaagcggtggagcatgtggtttaattcgatgcaacgcgaagaaccttacctactcttgacatccagagaacttggcagagatgccttggtgccttcgggaactctgagacaggtgctgcatggctgtcgtcagctcgtgttgtgaaatgttgggttaagtcccgcaacgagcgcaacccttatccttacttgccagcgggtgatgccgggaactgtagggagactgccggtgataaaccggaggaaggtggggacgacgtcaagtcatcatggcccttacgagtagggctacacacgtgctacaatggacagtacagagggaagcaaagcggcgacgtggagcggaaccaaaaagctgttcgtagtccggattggagtctgcaactcgactccatgaagtcggaatcgctagtaatcgtggatcagaatgccacggtgaatacgttcccgggccttgtacacaccgcccgtcacaccatgggagtggtttgcaaaagaagtagctagcttaaccttcgggggggcggttaccactttgtggatcatgactggggtg

SEQ ID NO: 3108 - DNA, 1464 bp, Shewanella frigidimarina
  misc_feature (49)..(49): n is a, c, g, or t
  misc_feature (817)..(817): n is a, c, g, or t
  misc_feature (829)..(829): n is a, c, g, or t
  misc_feature (1123)..(1123): n is a, c, g, or t
  misc_feature (1257)..(1257): n is a, c, g, or t
attgaacgctggcggcaggcctaacacatgcaagtcgagcggtaacacnagggagcttgctcctgaggtgacgagcggcggacgggtgagtaatgcctagggatctgcccagtcgagggggataacagttggaaacgactgctaataccgcatacgccctacgggggaaaggaggggaccttcgggccttccgcgattggatgaacctaggtgggattagctagttggtgaggtaatggctcaccaaggcgacgatccctagctgttctgagaggatgatcagccacactgggactgagacacggcccagactcctacgggaggcagcagtggggaatattgcacaatgggggaaaccctgatgcagccatgccgcgtgtgtgaagaaggccttcgggttgtaaagcactttcagtagggaggaaaggtaatagtttaataaaatattgctgtgacgttacctacagaagaagcaccggctaacttcgtgccagcagccgcggtaatacgaggggtgcaagcgttaatcggaattactgggcgtaaagcgtgcgcaggcggtttgttaagccagatgtgaaatccccgggctcaacctgggaattgcatttggaactggcgaactagagtcttgtagaggggggtagaattccaggtgtagcggtgaaatgcgtagatatctggaggaataccggtggcgaaggcggccccctggacaaagactgacgctcatgcacgaaagcgtggggagcaaacaggattagataccctggtagtccacgccgtaaacgatgtctactcggagtttggtgacttngtcactgggttnccaagctaacgcattaagtagaccgcctggggagtacggccgcaaggttaaaactcaaatgaattgacgggggcccgcacaagcggtggagcatgtggtttaattcgatgcaacgcgaagaaccttacctactcttgacatccacagaagagaccagagatggacttgtgccttcgggaactgtgagacaggtgctgcatggctgtcgtcagctcgtgttgtgaaatgttgggttaagtcccgcaacgagcgcaacccctatccttatttgccagcacgtaatggtgggaactntagggagactgccggtgataaaccggaggaaggtggggacgacgtcaagtcatcatggcccttacgagtagggctacacacgtgctacaatggcgtatacagagggttgcaaagccgcgaggtggagctaatcncacaaagtacgtcgtagtccggatcggagtctgcaactcgactccgtgaagtcggaatcgctagtaatcgtggatcagaatgccacggtgaatacgttcccgggccttgtacacaccgcccgtcacaccatgggagtgggctgcaaaagaagtgggtagtttaacttcgggagaacgctcaccactttgtggttcatgactggggtg

SEQ ID NO: 3109 - DNA, 1465 bp, Shewanella halifaxensis
attgaacgctggcggcaggcctaacacatgcaagtcgagcggtaacacaagggagcttgctcctgaggtgacgagcggcggacgggtgagtaatgcctaggtatctgcccagtcgagggggataacagttggaaacgactgctaataccgcatacgccctacgggggaaaggaggggaccttcgggccttccgcgattggatgaacctaggtgggattagctagttggtggggtaatggctcaccaaggcgacgatccctagctggtctgagaggatgatcagccacactggaactgagacacggtccagactcctacgggaggcagcagtggggaatattgcacaatgggcgaaagcctgatgcagccatgccgcgtgtgtgaagaaggccttcgggttgtaaagcactttcagcgaggaggaaagctcaagcgttaatagcgtttgggtgtgacgttactcgcagaagaagcaccggctaacttcgtgccagcagccgcggtaatacgaggggtgcaagcgttaatcggaattactgggcgtaaagcgtacgcaggcggtttgttaagcaagatgtgaaagccccgggctcaacctgggaactgcattttgaactggcaaactagagtcttgtagaggggggtagaatttcaggtgtagcggtgaaatgcgtagagatctgaaggaataccggtggcgaaggcggccccctggacaaagactgacgctcaggtacgaaagcgtggggagcaaacaggattagataccctggtagtccacgccgtaaacgatgtctactcggagtttggtgtcttgaacactgggctctcaagctaacgcattaagtagaccgcctggggagtacggccgcaaggttaaaactcaaatgaattgacgggggcccgcacaagcggtggagcatgtggtttaattcgatgcaacgcgaagaaccttacctactcttgacatccagagaattcgctagagatagcttagtgccttcgggaactctgagacaggtgctgcatggctgtcgtcagctcgtgttgtgaaatgttgggttaagtcccgcaacgagcgcaacccttatccttatttgccagcacgtaatggtgggaactttagggagactgccggtgataaaccggaggaaggtggggacgacgtcaagtcatcatggcccttacgagtagggctacacacgtgctacaatggtcggtacagagggttgcgaagccgcgaggtggagctaatctcacaaagccggtcgtagtccggatcggagtctgcaactcgactccgtgaagtcggaatcgctagtaatcgtagatcagaatgctacggtgaatacgttcccgggccttgtacacaccgcccgtcacaccatgggagtgggctgcaccagaagtagatagcttaaccttcgggagggcgtttaccacggtgtggttcatgactggggtg

SEQ ID NO: 3110 - DNA, 1414 bp, Shewanella hanedai
  misc_feature (23)..(23): n is a, c, g, or t
  misc_feature (460)..(460): n is a, c, g, or t
gcaagtcgagcggaaacaggaangtagcttgctactttccggctgtcgagcggcggacgggtgagtaatgcctagatatctgcctagtcgtgggggataacagttggaaacgactgctaataccgcatacgccctacgggggaaaggaggggaccttcgggcctttcgcgattagatgagtctaggtgggattagctagtaggtgaggtaatggctcacctaggcgacgatccctagctggtctgagaggatgatcagccacactggaactgagacacggtccagactcctacgggaggcagcagtggggaatattgcacaatgggcgaaagcctgatgcagccatgccgcgtgtgtgaagaaggccttcgggttgtaaagcactttcagcgaggaggaaaggtaggtagttaataactgcttactgtgacgttactcgcagaagaagcaccggctaacntcgtgccagcagccgcggtaatacgaggggtgcaagcgttaatcggaattactgggcgtaaagcgtacgcaggcggtttgttaagccagatgtgaaagccctgggctcaacctaggaattgcatttggaactgacagactagagtcttgtagaggggggtagaatttcaggtgtagcggtgaaatgcgtagagatctgaaggaataccggtggcgaaggcggccccctggacaaagactgacgctcatgtacgaaagcgtggggagcaaacaggattagataccctggtagtccacgccgtaaacgatgtctactcggagtttggtaacttagttactgggctcccaagctaacgcattaagtagaccgcctggggagtacggccgcaaggttaaaactcaaatgaattgacgggggccgcacaagcggtggagcatgtggtttaattcgatgcaacgcgaagaaccttacctactcttgacatccacagaacttaccagagatggtttggtgccttcgggaactgtgagacaggtgctgcatggctgtcgtcagctcgtgttgtgaaatgttgggttaagtcccgcaacgagcgcaacccttatccttatttgccagcgagttatgtcgggaactttagggagactgccggtgataaaccggaggaaggtggggacgacgtcaagtcatcatggcccttacgagtagggctacacacgtgctacaatggtcggtacagagggtcgcaaagccgcgaggtggagctaatcccacaaagccggtcgtagtccggatcggagtctgcaactcgactccgtgaagtcggaatcgctagtaatcgtggatcagaatgccacggtgaatacgttcccgggccttgtacacaccgcccgtcacaccatgggagtgggctgcaccagaagtagatagcttaacctttcggggagggcgttt

SEQ ID NO: 3111 - DNA, 1465 bp, Shewanella livingstonensis
  misc_feature (287)..(287): n is a, c, g, or t
attgaacgctggcggcaggcctaacacatgcaagtcgagcggtaacacaagggagcttgcttctgaggtgacgagcggcggacgggtgagtaatgcctagggatctgcccagtcgagggggataacagttggaaacgactgctaataccgcatacgccctacgggggaaaggaggggaccttcgggccttccgcgattggatgaacctaggtgggattagctagttggtgaggtaatggctcaccaaggcgacgatccctagctgttctgagaggatgatcagccanactgggactgagacacggcccagactcctacgggaggcagcagtggggaatattgcacaatgggggaaaccctgatgcagccatgccgcgtgtgtgaagaaggccttcgggttgtaaagcactttcagtagggaggaaaggtgatgtgttaatagcacattgctgtgacgttacctacagaagaaggaccggctaactccgtgccagcagccgcggtaatacggagggtccgagcgttaatcggaattactgggcgtaaagcgtgcgcaggcggtttgttaagccagatgtgaaatccccgggctcaacctgggaattgcatttggaactggcgaactagagtcttgtagaggggggtagaattccaggtgtagcggtgaaatgcgtagatatctggaggaataccggtggcgaaggcggccccctggacaaagactgacgctcatgcacgaaagcgtggggagcaaacaggattagataccctggtagtccacgccgtaaacgatgtctactcggagtttggtgacttagtcactgggctcccaagctaacgcattaagtagaccgcctggggagtacggccgcaaggttaaaactcaaatgaattgacgggggcccgcacaagcggtggagcatgtggtttaattcgatgcaacgcgaagaaccttacctactcttgacatccacagaagagaccagagatggacttgtgccttcgggaactgtgagacaggtgctgcatggctgtcgtcagctcgtgttgtgaaatgttgggttaagtcccgcaacgagcgcaacccctatccttatttgccagcacgtaatggtgggaactctagggagactgccggtgataaaccggaggaaggtggggacgacgtcaagtcatcatggcccttacgagtagggctacacacgtgctacaatggcgtatacagagggttgcaaagccgcgaggtggagctaatctcacaaagtacgtcgtagtccggatcggagtctgcaactcgactccgtgaagtcggaatcgctagtaatcgtggatcagaatgccacggtgaatacgttcccgggccttgtacacaccgcccgtcacaccatgggagtgggctgcaaaagaagtgggtagtttaaccttcgggagaacgctcaccactttgtggttcatgactggggtg

SEQ ID NO: 3112 - DNA, 1467 bp, Shewanella loihica
attgaacgctggcggcaggcctaacacatgcaagtcgagcggtaacatttcaaaagcttgcttttgaagatgacgagcggcggacgggtgagtaatgcctagggaactgcccagtcgagggggataacagttggaaacgactgctaataccgcatacgccctacgggggaaaagaggggatcttcggaccttctgcgattggatgtacctaggtgggattagctagtaggtgaggtaatggctcacctaggcgacgatccctagctgttctgagaggatgatcagccacactgggactgagacacggcccagactcctacgggaggcagcagtggggaatattgcacaatgggcgcaagcctgatgcagccatgccgcgtgtgtgaagaaggccttcgggttgtaaagcactttcagcgaggaggaaaggttaacggttaatacccgttagctgtgacgttactcgcagaagaagcaccggctaacttcgtgccagcagccgcggtaatacgaggggtgcaagcgttaatcggaattactgggcgtaaagcgtacgcaggcggttgattaagcgagatgtgaaagccccgggcttaacctgggaactgcatttcgaactggtcaactagagtcttgtagaggggggtagaatttcaggtgtagcggtgaaatgcgtagagatctgaaggaataccggtggcgaaggcggccccctggacaaagactgacgctcaggtacgaaagcgtggggagcaaacaggattagataccctggtagtccacgccgtaaacgatgtctactcggaatttggtgtcttgaacactgggttctcaagctaacgcattaagtagaccgcctggggagtacggccgcaaggttaaaactcaaatgaattgacgggggcccgcacaagcggtggagcatgtggtttaattcgatgcaacgcgaagaaccttacctactcttgacatccagagaacttttcagagatgaattggtgccttcgggaactctgagacaggtgctgcatggctgtcgtcagctcgtgttgtgaaatgttgggttaagtcccgcaacgagcgcaacccttatccttacttgccagcgggtaatgccgggaactttagggagactgccggtgataaaccggaggaaggtggggacgacgtcaagtcatcatggcccttacgagtagggctacacacgtgctacaatggtcggtacagagggttgcgaagccgcgaggtggagctaatctcacaaagccggtcgtagtccggattggagtctgcaactcgactccatgaagtcggaatcgctagtaatcgtggatcagaatgccacggtgaatacgttcccgggccttgtacacaccgcccgtcacaccatgggagtgggctgcaccagaagtagatagcttaaccttcgggagggcgtttaccacggtgtggttcatgactggggtg

SEQ ID NO: 3113 - DNA, 1465 bp, Shewanella mangrovi
attgaacgctggcggcaggcctaacacatgcaagtcgagcggtaacaggaagtagcttgctactttgctgacgagcggcggacgggtgagtaatgcctgggaacttgcccatttgagggggataacagttggaaacgactgctaataccgcatacgccctacgggggaaaggaggggctcttcggaccttccgcgaatggataggcccaggtgggattagctagttggtaaggtaacggcttaccaaggcgacgatctctagctggtttgagaggatgatcagccacactggaactgagacacggtccagactcctacgggaggcagcagtggggaatattgcacaatgggggaaaccctgatgcagccatgccgcgtgtgtgaagaaggccttcgggttgtaaagcactttcagcgaggaggaaaggttagtagttaatacctgctagctgtgacgttactcgcagaagaagcaccggctaactccgtgccagcagccgcggtaatacggagggtgcgagcgttaatcggaattactgggcgtaaagcgtgcgcaggcggtttgttaagcaagatgtgaaagccccgggctcaacctgggaatcgcattttgaactggcaagctagagtcttgtagaggggggtagaatttcaggtgtagcggtgaaatgcgtagagatctgaaggaataccggtggcgaaggcggccccctggacaaagactgacgctcatgcacgaaagcgtggggagcaaacaggattagataccctggtagtccacgccgtaaacgatgtctactcggagtttggtgtcttgaacactgggttctcaagctaacgcattaagtagaccgcctggggagtacggccgcaaggttaaaactcaaatgaattgacgggggcccgcacaagcggtggagcatgtggtttaattcgatgcaacgcgaagaaccttacctactcttgacatccacagaatctggtagagatacctcagtgccttcgggaactgtgagacaggtgctgcatggctgtcgtcagctcgtgttgtgaaatgttgggttaagtcccgcaacgagcgcaacccttatccttacttgccagcgggtaatgccgggaactttagggagactgccggtgataaaccggaggaaggtggggacgacgtcaagtcatcatggcccttacgagtagggctacacacgtgctacaatggtcagtacagagggacgcgaagccgcgaggtggagccaatctcttaaagctggtcgtagtccggatcggagtctgcaacccgactccgtgaagtcggaatcgctagtaatcgcaaatcagaatgttgcggtgaatacgttcccgggccttgtacacaccgcccgtcacaccatgggagtgggttgcaccagaagtagatagcttaaccttcgggggggcgtttaccacggtgtgattcatgactggggtg

SEQ ID NO: 3114 - DNA, 1467 bp, Shewanella marisflavi
attgaacgctggcggcaggcctaacacatgcaagtcgagcggtaacaggaagaaagcttgctttctttgctgacgagcggcggacgggtgagtaatgcctagggaactgcccagtcgagggggataacagttggaaacgactgctaataccgcatacgccctacgggggaaaagaggggaccttcgggccttctgcgattggatgtacctaggtgggattagctagtaggtgaggtaatggctcacctaggcgacgatccctagctgttctgagaggatgatcagccacactgggactgagacacggcccagactcctacgggaggcagcagtggggaatattgcacaatgggcgcaagcctgatgcagccatgccgcgtgtgtgaagaaggccttcgggttgtaaagcactttcagcgaggaggaaaggttaagtgttaatagcgcttagctgtgacgttactcgcagaagaagcaccggctaacttcgtgccagcagccgcggtaatacgaggggtgcaagcgttaatcggaattactgggcgtaaagcgtacgcaggcggtttgttaagcgagatgtgaaagccccgggctcaacctgggaactgcatttcgaactggcaaactagagtcttgtagaggggggtagaatttcaggtgtagcggtgaaatgcgtagagatctgaaggaataccggtggcgaaggcggccccctggacaaagactgacgctcaggtacgaaagcgtggggagcaaacaggattagataccctggtagtccacgccgtaaacgatgtctactcggaatttggtgtcttgaacactgggttctcaagctaacgcattaagtagaccgcctggggagtacggccgcaaggttaaaactcaaatgaattgacgggggcccgcacaagcggtggagcatgtggtttaattcgatgcaacgcgaagaaccttacctactcttgacatccagagaattcgctagagatagcttagtgccttcgggaactctgagacaggtgctgcatggctgtcgtcagctcgtgttgtgaaatgttgggttaagtcccgcaacgagcgcaacccttatccttacttgccagcgggtcatgccgggaactttagggagactgccggtgataaaccggaggaaggtggggacgacgtcaagtcatcatggcccttacgagtagggctacacacgtgctacaatggcgagtacagagggttgcgaagccgcgaggtggagctaatctcagaaagctcgtcgtagtccggattggagtctgcaactcgactccatgaagtcggaatcgctagtaatcgtggatcagaatgccacggtgaatacgttcccgggccttgtacacaccgcccgtcacaccatgggagtgggctgcaccagaagtagatagcttaaccttcgggagggcgtttaccacggtgtggttcatgactggggtg

SEQ ID NO: 3115 - DNA, 1426 bp, Shewanella morhuae
ggctacacatgcaagtcgagcggcagcgcaagggagtttactcctgaggcggcgagcggcggacgggtgagtaatacctagggatctgcccagtcgagggggataacagttggaaacgactgctaataccgcatacgccctacgggggaaagaaggggaccttcgggcctttcgcgattggatgaacctaggtgggattagctagttggtgaggtaatggctcaccaaggcgacgatccctagctgttctgagaggatgatcagccacactgggactgagacacggcccagactcctacgggaggcagcagtggggaatattggacaatgggggcaaccctgatccagccatgccgcgtgtgtgaagaaggccttcgggttgtaaagcactttcagtagggaggaaaggtagcgtgttaatagcacgttactgtgacgttacctacagaagaaggaccggctaactccgtgccagcagccgcggtaatacggagggtccgagcgttaatcggaattactgggcgtaaagcgtgcgcaggcggtttgttaagcaagatgtgaaagccccgggctcaacctgggaattgcattttgaactggcgaactagagtcttgtagaggggggtagaattccaggtgtagcggtgaaatgcgtagagatctggaggaataccggtggcgaaggcggccccctggacaaagactgacgctcaggcacgaaagcgtggggagcaaacaggattagataccctggtagtccacgccgtaaacgatgtctactcggagtttggtgtcttgaacactgggctctcaagctaacgcattaagtagaccgcctggggagtacggccgcaaggttaaaactcaaatgaattgacgggggcccgcacaagcggtggagcatgtggtttaattcgatgcaacgcgaagaaccttacctactcttgacatccacagaagagaccagagatggacttgtgccttcgggaactgtgagacaggtgctgcatggctgtcgtcagctcgtgttgtgaaatgttgggttaagtcccgcaacgagcgcaacccctatccttatttgccagcacgtaatggtgggaactctagggagactgccggtgataaaccggaggaaggtggggacgacgtcaagtcatcatggcccttacgagtagggctacacacgtgctacaatggcgagtacagagggttgcaaagccgcgaggtggagctaatctcacaaagctcgtcgtagtccggattggagtctgcaactcgactccatgaagtcggaatcgctagtaatcgtgaatcagaatgtcacggtgaatacgttcccgggccttgtacacaccgcccgtcacaccatgggagtgggctgcaaaagaagtgggtagcttaaccttcgggggggcgctcaccactt

SEQ ID NO: 3116 - DNA, 1465 bp, Shewanella oneidensis
attgaacgctggcggcaggcctaacacatgcaagtcgagcggcagcacaagtgagtttactcatgaggtggcgagcggcggacgggtgagtaatgcctagggatctgcccagtcgagggggataacagttggaaacgactgctaataccgcatacgccctacgggggaaagagggggactttcgggcctctcgcgattggatgaacctaggtgggattagctagttggtgaggtaatggctcaccaaggcgacgatccctagctgttctgagaggatgatcagccacactgggactgagacacggcccagactcctacgggaggcagcagtggggaatattgcacaatgggggaaaccctgatgcagccatgccgcgtgtgtgaagaaggccttcgggttgtaaagcactttcagtagggaggaaagggtaagtcctaatacgacttatctgtgacgttacctacagaagaaggaccggctaactccgtgccagcagccgcggtaatacggagggtccgagcgttaatcggaattactgggcgtaaagcgtgcgcaggcggtttgttaagcgagatgtgaaagccctgggctcaacctaggaatcgcatttcgaactgaccaactagagtcttgtagaggggggtagaattccaggtgtagcggtgaaatgcgtagagatctggaggaataccggtggcgaaggcggccccctggacaaagactgacgctcatgcacgaaagcgtggggagcaaacaggattagataccctggtagtccacgccgtaaacgatgtctactcggagtttggtgtcttgaacactgggctctcaagctaacgcattaagtagaccgcctggggagtacggccgcaaggttaaaactcaaatgaattgacgggggcccgcacaagcggtggagcatgtggtttaattcgatgcaacgcgaagaaccttacctactcttgacatccacggaagactgcagagatgcggttgtgccttcgggaaccgtgagacaggtgctgcatggctgtcgtcagctcgtgttgtgaaatgttgggttaagtcccgcaacgagcgcaacccctatccttatttgccagcacgtaatggtgggaactctagggagactgccggtgataaaccggaggaaggtggggacgacgtcaagtcatcatggcccttacgagtagggctacacacgtgctacaatggcgagtacagagggttgcaaagccgcgaggtggagctaatctcacaaagctcgtcgtagtccggattggagtctgcaactcgactccatgaagtcggaatcgctagtaatcgtggatcagaatgccacggtgaatacgttcccgggccttgtacacaccgcccgtcacaccatgggagtgggctgcaaaagaagtgggtagcttaaccttcgggggggcgctcaccactttgtggttcatgactggggtg

SEQ ID NO: 3117 - DNA, 1465 bp, Shewanella pealeana
attgaacgctggcggcaggcctaacacatgcaagtcgagcggtaacacaagggagcttgctcctgaggtgacgagcggcggacgggtgagtaatgcctaggtatctgcccagtcgagggggataacagttggaaacgactgctaataccgcatacgccctacgggggaaaggaggggaccttcgggccttccgcgattggatgaacctaggtgggattagctagttggtgaggtaatggctcaccaaggcgacgatccctagctggtctgagaggatgatcagccacactggaactgagacacggtccagactcctacgggaggcagcagtggggaatattgcacaatgggcgaaagcctgatgcagccatgccgcgtgtgtgaagaaggccttcgggttgtaaagcactttcagcgaggaggaaagctcaagcgttaatagcgtttgggtgtgacgttactcgcagaagaagcaccggctaacttcgtgccagcagccgcggtaatacgaggggtgcaagcgttaatcggaattactgggcgtaaagcgtacgcaggcggtttgttaagcaagatgtgaaagccccgggctcaacctgggaactgcattttgaactggcaaactagagtcttgtagaggggggtagaatttcaggtgtagcggtgaaatgcgtagagatctgaaggaataccggtggcgaaggcggccccctggacaaagactgacgctcaggtacgaaagcgtggggagcaaacaggattagataccctggtagtccacgccgtaaacgatgtctactcggagtttggtgtcttgaacactgggctctcaagctaacgcattaagtagaccgcctggggagtacggccgcaaggttaaaactcaaatgaattgacgggggcccgcacaagcggtggagcatgtggtttaattcgatgcaacgcgaagaaccttacctactcttgacatccagagaattcgctagagatagcttagtgccttcgggaactctgagacaggtgctgcatggctgtcgtcagctcgtgttgtgaaatgttgggttaagtcccgcaacgagcgcaacccttatccttatttgccagcacgtaatggtgggaactttagggagactgccggtgataaaccggaggaaggtggggacgacgtcaagtcatcatggcccttacgagtagggctacacacgtgctacaatggtcggtacagagggttgcgaagccgcgaggtggagctaatctcacaaagccggtcgtagtccggatcggagtctgcaactcgactccgtgaagtcggaatcgctagtaatcgtagatcagaatgctacggtgaatacgttcccgggccttgtacacaccgcccgtcacaccatgggagtgggctgcaccagaagtagatagcttaaccttcgggagggcgtttaccacggtgtggttcatgactggggtg

SEQ ID NO: 3118 - DNA, 1465 bp, Shewanella piezotolerans
attgaacgctggcggcaggcctaacacatgcaagtcgagcggtaacacaagggagcttgctcctgaggtgacgagcggcggacgggtgagtaatgcctaggtatctgcccagtcgagggggataacagttggaaacgactgctaataccgcatacgccctacgggggaaaggaggggaccttcgggcctttcgcgattggatgaacctaggtgggattagctagtaggtggggtaatggctcacctaggcaacgatccctagctggtctgagaggatgatcagccacactggaactgagacacggtccagactcctacgggaggcagcagtggggaatattgcacaatgggcgaaagcctgatgcagccatgccgcgtgtatgaagaaggccttcgggttgtaaagtactttcagcgaggaggaaaggttgttggttaataaccaacagctgtgacgttactcgcagaagaagcaccggctaacttcgtgccagcagccgcggtaatacgaggggtgcaagcgttaatcggaattactgggcgtaaagcgtacgcaggcggtttgttaagcgagatgtgaaagccccgggctcaacctgggaactgcatttcgaactggcaaactagagtcttgtagaggggggtagaatttcaggtgtagcggtgaaatgcgtagagatctgaaggaataccggtggcgaaggcggccccctggacaaagactgacgctcaggtacgaaagcgtggggagcaaacaggattagataccctggtagtccacgccgtaaacgatgtctactcggaatttggtgtcttgaacactgggttctcaagctaacgcattaagtagaccgcctggggagtacggccgcaaggttaaaactcaaatgaattgacgggggcccgcacaagcggtggagcatgtggtttaattcgatgcaacgcgaagaaccttacctactcttgacatccacagaatttaccagagatggattagtgccttcgggaactgtgagacaggtgctgcatggctgtcgtcagctcgtgttgtgaaatgttgggttaagtcccgcaacgagcgcaacccttatccttatttgccagcacgtaatggtgggaactttagggagactgccggtgataaaccggaggaaggtggggacgacgtcaagtcatcatggcccttacgagtagggctacacacgtgctacaatggtcggtacagagggttgcaaagccgcgaggtggagctaatctcacaaagccggtcgtagtccggattggagtctgcaactcgactccatgaagtcggaatcgctagtaatcgtagatcagaatgctacggtgaatacgttcccgggccttgtacacaccgcccgtcacaccatgggagtgggctgcaccagaagtagatagcttaaccttcgggagggcgtttaccacggtgtggttcatgactggggtg

SEQ ID NO: 3119 - DNA, 1467 bp, Shewanella psychrophila
attgaacgctggcggcaggcctaacacatgcaagtcgagcggaaacaggaagtagcttgctactttgctgtcgagcggcggacgggtgagtaatgcctagggaactgcccagtcgagggggataacagttggaaacgactgctaataccgcatacgccctacgggggaaaggaggggaccttcgggcctttcgcgattggatgtacctaggtgggattagctagttggtaaggtaatggcttaccaaggcaacgatccctagctggtctgagaggatgatcagccacactggaactgagacacggtccagactcctacgggaggcagcagtggggaatattgcacaatgggcgaaagcctgatgcagccatgccgcgtgtgtgaagaaggccttcgggttgtaaagcactttcagcgaggaggaaagggtagtagttaataactgctatctgtgacgttactcgcagaagaagcaccggctaacttcgtgccagcagccgcggtaatacgaggggtgcaagcgttaatcggaattactgggcgtaaagcgtacgcaggcggtttgttaagcaagatgtgaaagccccgggctcaacctgggaattgcattttgaactggcaaactagagtcttgtagaggggggtagaatttcaggtgtagcggtgaaatgcgtagagatctgaaggaataccggtggcgaaggcggccccctggacaaagactgacgctcaggtacgaaagcgtggggagcaaacaggattagataccctggtagtccacgccgtaaacgatgtctactcggaatttggtgtcttgaacactgggttctcaagctaacgcattaagtagaccgcctggggagtacggccgcaaggttaaaactcaaatgaattgacgggggcccgcacaagcggtggagcatgtggtttaattcgatgcaacgcgaagaaccttacctactcttgacatccacagaactttccagagatggattggtgccttcgggaactgtgagacaggtgctgcatggctgtcgtcagctcgtgttgtgaaatgttgggttaagtcccgcaacgagcgcaacccttatccttatttgccagcacgtaatggtgggaactttagggagactgccggtgataaaccggaggaaggtggggacgacgtcaagtcatcatggcccttacgagtagggctacacacgtgctacaatggtcggtacagagggtcgcaaagccgcgaggtcaagctaatcccacaaagccggtcgtagtccggatcggagtctgcaactcgactccgtgaagtcggaatcgctagtaatcgtagatcagaatgctacggtgaatacgttcccgggccttgtacacaccgcccgtcacaccatgggagtgggctgcaccagaagtagatagcttaacctttcggggagggcgtttaccacggtgtggttcatgactggggtg

SEQ ID NO: 3120 - DNA, 1463 bp, Shewanella putrefaciens
attgaacgctggcggcaggcctaacacatgcaagtcgagcggcagcacaagggagtttacttctgaggtggcgagcggcggacgggtgagtaatgcctagggatctgcccagtcgagggggataacagttggaaacgactgctaataccgcatacgccctacgggggaaaggaggggaccttcgggccttccgcgattggatgaacctaggtgggattagctagttggtgaggtaatggctcaccaaggcgacgatccctagctgttctgagaggatgatcagccacactgggactgagacacggcccagactcctacgggaggcagcagtggggaatattgcacaatgggggaaaccctgatgcagccatgccgcgtgtgtgaagaaggccttcgggttgtaaagcactttcagtagggaggaaagggtgtagcttaatacgctatatctgtgacgttacctacagaagaaggaccggctaactccgtgccagcagccgcggtaatacggagggtccgagcgttaatcggaattactgggcgtaaagcgtgcgcaggcggtttgttaagcgagatgtgaaagccctgggctcaacctaggaatagcatttcgaactggcgaactagagtcttgtagaggggggtagaattccaggtgtagcggtgaaatgcgtagagatctggaggaataccggtggcgaaggcggccccctggacaaagactgacgctcatgcacgaaagcgtggggagcaaacaggattagataccctggtagtccacgccgtaaacgatgtctactcggagtttggtgtcttgaacactgggctctcaagctaacgcattaagtagaccgcctggggagtacggccgcaaggttaaaactcaaatgaattgacgggggcccgcacaagcggtggagcatgtggtttaattcgatgcaacgcgaagaaccttacctactcttgacatccacagaacttccagagatggattgtgccttcgggaactgtgagacaggtgctgcatggctgtcgtcagctcgtgttgtgaaatgttgggttaagtcccgcaacgagcgcaacccctatccttatttgccagcacgtaatggtgggaactctagggagactgccggtgataaaccggaggaaggtggggacgacgtcaagtcatcatggcccttacgagtagggctacacacgtgctacaatggcgagtacagagggttgcaaagccgcgaggtggagctaatctcacaaagctcgtcgtagtccggattggagtctgcaactcgactccatgaagtcggaatcgctagtaatcgtggatcagaatgccacggtgaatacgttcccgggccttgtacacaccgcccgtcacaccatgggagtgggctgcaaaagaagtgggtagcttaaccttcgggggggcgctcaccactttgtggttcatgactggggtg

SEQ ID NO: 3121 - DNA, 1465 bp, Shewanella sediminis
attgaacgctggcggcaggcctaacacatgcaagtcgagcggaaacggagatagcttgctatcagacgtcgagcggcggacgggtgagtaatgcctagatatctgcctagtcgtgggggataacagttggaaacgactgctaataccgcatacgccctacgggggaaaggaggggaccttcgggcctttcgcgattagatgagtctaggtgggattagctagtaggtgaggtaatggctcacctaggcgacgatccctagctgttctgagaggatgatcagccacactgggactgagacacggcccagactcctacgggaggcagcagtggggaatattgcacaatgggcgaaagcctgatgcagccatgccgcgtgtgtgaagaaggccttcgggttgtaaagcactttcagcgaggaggaaaggtaggtagttaataactgcttgctgtgacgttactcgcagaagaagcaccggctaacttcgtgccagcagccgcggtaatacgaggggtgcaagcgttaatcggaattactgggcgtaaagcgtacgcaggcggtttgttaagccagatgtgaaagccccgggctcaacctgggaattgcatttggaactggcaaactagagtcttgtagaggggggtagaatttcaggtgtagcggtgaaatgcgtagagatctgaaggaataccggtggcgaaggcggccccctggacaaagactgacgctcatgtacgaaagcgtggggagcaaacaggattagataccctggtagtccacgccgtaaacgatgtctactcggagtttggtaacttagttactgggctcccaagctaacgcattaagtagaccgcctggggagtacggccgcaaggttaaaactcaaatgaattgacgggggcccgcacaagcggtggagcatgtggtttaattcgatgcaacgcgaagaaccttacctactcttgacatccagagaattcgctagagatagcttagtgccttcgggagctctgagacaggtgctgcatggctgtcgtcagctcgtgttgtgaaatgttgggttaagtcccgcaacgagcgcaacccttatccttatttgccagcacgtaatggtgggaactttagggagactgccggtgataaaccggaggaaggtggggacgacgtcaagtcatcatggcccttacgagtagggctacacacgtgctacaatggtcggtacagagggtcgcaaagccgcgaggtggagctaatcccacaaagccggtcgtagtccggatcggagtctgcaactcgactccgtgaagtcggaatcgctagtaatcgtagatcagaatgctacggtgaatacgttcccgggccttgtacacaccgcccgtcacaccatgggagtgggctgcaccagaagtagatagcttaacctttcggggagggcgtttaccacggtgtggttcatgactggggtg

SEQ ID NO: 3122 - DNA, 1467 bp, Shewanella violacea
attgaacgctggcggcaggcctaacacatgcaagtcgagcggaaacagaaagtagcttgctactttgctgtcgagcggcggacgggtgagtaatgcctagggaactgcccagtcgagggggataacagttggaaacgactgctaataccgcatacgccctacgggggaaaggaggggaccttcgggcctttcgcgattggatgtacctaggtgggattagctagttggtaaggtaatggcttaccaaggcgacgatccctagctggtctgagaggatgatcagccacactggaactgagacacggtccagactcctacgggaggcagcagtggggaatattgcacaatgggcgaaagcctgatgcagccatgccgcgtgtgtgaagaaggccttcgggttgtaaagcactttcagcgaggaggaaaggtaggtagttaataactgcttactgtgacgttactcgcagaagaagcaccggctaacttcgtgccagcagccgcggtaatacgaggggtgcaagcgttaatcggaattactgggcgtaaagcgtacgcaggcggtttgttaagcaagatgtgaaagccccgggctcaacctgggaattgcattttgaactggcaaactagagtcttgtagaggggggtagaatttcaggtgtagcggtgaaatgcgtagagatctgaaggaataccggtggcgaaggcggccccctggacaaagactgacgctcaggtacgaaagcgtggggagcaaacaggattagataccctggtagtccacgccgtaaacgatgtctactcggaatttggtgtcttgaacactgggttcccaagctaacgcattaagtagaccgcctggggagtacggccgcaaggttaaaactcaaatgaattgacgggggcccgcacaagcggtggagcatgtggtttaattcgatgcaacgcgaagaaccttacctactcttgacatccatagaactcgctagagatagcttggtgccttcgggaactatgagacaggtgctgcatggctgtcgtcagctcgtgttgtgaaatgttgggttaagtcccgcaacgagcgcaacccttatccttatttgccagcacgtaatggtgggaactttagggagactgccggtgataaaccggaggaaggtggggacgacgtcaagtcatcatggcccttacgagtagggctacacacgtgctacaatggtcggtacagagggtcgcaacgccgcgaggtcaagctaatcccacaaagccggtcgtagtccggatcggagtctgcaactcgactccgtgaagtcggaatcgctagtaatcgtgaatcagaatgtcacggtgaatacgttcccgggccttgtacacaccgcccgtcacaccatgggagtgggctgcaccagaagtagatagcttaacccttcggggagggcgtttaccacggtgtggttcatgactggggtg

SEQ ID NO: 3123 - DNA, 1464 bp, Shewanella woodyi
attgaacgctggcggcaggcctaacacatgcaagtcgagcggaaacagaaagtagcttgctactttgctgtcgagcggcggacgggtgagtaatgcctagatatctgcctagtcgtgggggataacagttggaaacgactgctaataccgcatacgccctacgggggaaaggaggggaccttcgggcctttcgcgattagatgagtctaggtgggattagctagtaggtgaggtaatggctcacctaggcgacgatccctagctgttctgagaggatgatcagccacactgggactgagacacggcccagactcctacgggaggcagcagtggggaatattgcacaatgggcgaaagcctgatgcagccatgccgcgtgtgtgaagaaggccttcgggttgtaaagcactttcagcgaggaggaaaggttaacggttaataaccgttagctgtgacgttactcgcagaagaagcaccggctaacttcgtgccagcagccgcggtaatacgaggggtgcaagcgttaatcggaattactgggcgtaaagcgtacgcaggcggtttgttaagccagatgtgaaagccccgggctcaacctgggaattgcatttggaactggcaaactagagtcttgtagaggggggtagaatttcaggtgtagcggtgaaatgcgtagagatctgaaggaataccggtggcgaaggcggccccctggacaaagactgacgctcaggtacgaaagcgtggggagcaaacaggattagataccctggtagtccacgccgtaaacgatgtctactcggagtttggtaacttagttactgggctcccaagctaacgcattaagtagaccgcctggggagtacggccgcaaggttaaaactcaaatgaattgacgggggcccgcacaagcggtggagcatgtggtttaattcgatgcaacgcgaagaaccttacctactcttgacatccacagaacttttcagagatgaattggtgccttcgggaactgtgagacaggtgctgcatggctgtcgtcagctcgtgttgtgaaatgttgggttaagtcccgcaacgagcgcaacccttatccttatttgccagcacttcgggtgggaactttagggagactgccggtgataaaccggaggaaggtggggacgacgtcaagtcatcatggcccttacgagtagggctacacacgtgctacaatggtcggtacagagggttgcgaagccgcgaggtggagctaatcccagaaagccggtcgtagtccggattggagtctgcaactcgactccatgaagtcggaatcgctagtaatcgtggatcagaatgccacggtgaatacgttcccgggccttgtacacaccgcccgtcacaccatgggagtgggctgcaccagaagtagatagcttaaccttcgggagggcgtttaccacggtgtggttcatgactggggtg

SEQ ID NO: 3124 - DNA, 1382 bp, Shimia marina
aacgaacgctggcggcaggcctaacacatgcaagtcgagcgcgcccttcggggtgagcggcggacgggttagtaacgcgtgggaacgtacccagatctacggaatagcctttggaaacgaagagtaataccgtatacgcccttcgggggaaagatttatcggatttggatcggcccgcgttagattagatagttggtggggtaacggcctaccaagtctacgatctatagctggttttagaggatgatcagcaacactgggactgagacacggcccagactcctacgggaggcagcagtggggaatcttggacaatgggcgcaagcctgatccagccatgccgcgtgagtgatgaaggccttagggtcgtaaagctctttcgccagggatgataatgacagtacctggtaaagaaaccccggctaactccgtgccagcagccgcggtaatacggagggggttagcgttgttcggaattactgggcgtaaagcgcgcgtaggcgggttgttaagttagaggtgaaatcccggggctcaaccccggaactgcctttaatactggcaacctagagttcgagagaggtgagtggaattccgagtgtagaggtgaaattcgtagatattcggaggaacaccagtggcgaaggcggctcactggctcgatactgacgctgaggtgcgaaagtgtggggagcaaacaggattagataccctggtagtccacaccgtaaacgatgaatgccagtcgtcgggtagcatgctattcggtgacacacctaacggattaagcattccgcctggggagtacggtcgcaagattaaaactcaaaggaattgacgggggcccgcacaagcggtggagcatgtggtttaattcgaagcaacgcgcagaaccttaccaacccttgacatcctaggacaactccagagatggagccttccttcgggacctagtgacaggtgctgcatggctgtcgtcagctcgtgtcgtgagatgttcggttaagtccggcaacgagcgcaacccacatccttagttgccagcagttcggctgggcactctagggaaactgcccgtgataagcgggaggaaggtgtggatgacgtcaagtcctcatggcccttacgggttgggctacacacgtgctacaatggcagtgacaatgggttaatccccaaaaactgtctcagttcggattggggtctgcaactcgaccccatgaagtcggaatcgctagtaatcgcgtaacagcatgacgcggtgaatacgttcccgggccttgtacacaccgcccgtcacaccatgggagttggttctacccgacggccgtgcgctaaccttttggaggcagcggaccacggtaggatcagcgactggggtg

SEQ ID NO: 3125 - DNA, 1464 bp, Shimwellia blattae
attgaacgctggcggcaggcttaacacatgcaagtcgaacggtaacagaaatcagcttgctgatttgctgacgagtggcggacgggtgagtaatgtctgggaaactgcctgatggagggggataactactggaaacggtagctaataccgcataatgtcgcaagaccaaagtgggggaccttcgggcctcataccatcggatgtgcccagatgggattagctagtaggtggggtaacggctcacctaggcgacgatccctagctggtctgagaggatgaccagccacactggaactgagacacggtccagactcctacgggaggcagcagtggggaatattgcacaatgggcgcaagcctgatgcagccatgccgcgtgtatgaagaaggccttcgggttgtaaagtactttcagcggggaggaaggtgttgaggttaataacctcagcaattgacgttacccgcagaagaagcaccggctaactccgtgccagcagccgcggtaatacggagggtgcaagcgttaatcggaattactgggcgtaaagcgcacgcaggcggttgattaagtcagatgtgaaatccccgggcttaacctgggaactgcatttgaaactggtcagcttgagtctcgtagaggggggtagaattccaggtgtagcggtgaaatgcgtagagatctggaggaataccggtggcgaaggcggccccctggacgaagactgacgctcaggtgcgaaagcgtggggagcaaacaggattagataccctggtagtccacgccgtaaacgatgtcaacttggaagttgtgcccttgaggcgtggcttccggagctaacgcgttaagttgaccgcctggggagtacggccgcaaggttaaaactcaaatgaattgacgggggcccgcacaagcggtggagcatgtggtttaattcgatgcaacgcgaagaaccttacctggtcttgacatccatagaacttggcagagatgccttggtgccttcgggagctatgagacaggtgctgcatggctgtcgtcagctcgtgttgtgaaatgttgggttaagtcccgcaacgagcgcaacccctatcctctgttgccagcacttcgggtgggaactcaggggagactgccagtgataaactggaggaaggtggggatgacgtcaagtcatcatggcccttacgaccagggctacacacgtgctacaatggcgcatacaaagagaagcgacctcgcgagagcaagcggatctcataaagtgcgtcgtagtccggattggagtctgcaactcgactccatgaagtcggaatcgctagtaatcgtggatcagaatgccacggtgaatacgttcccgggccttgtacacaccgcccgtcacaccatgggagtgggttgcaaaagaagtaggtagcttaaccttcgggagggcgcttaccactttgtgattcatgactggggtg

SEQ ID NO: 3126 - DNA, 1464 bp, Siccibacter turicensis
attgaacgctggcggcaggcctaacacatgcaagtcgaacggtaacaggaagcagcttgctgcttcgctgacgagtggcggacgggtgagtaatgtctggggatctgcctgatggagggggataactactggaaacggtagctaataccgcataacgtcgcaagaccaaagagggggaccttcgggcctcttgccatcagatgaacccagatgggattagctagtaggtggggtaacggctcacctaggcgacgatccctagctggtctgagaggatgaccagccacactggaactgagacacggtccagactcctacgggaggcagcagtggggaatattgcacaatgggcgcaagcctgatgcagccatgccgcgtgtatgaagaaggccttcgggttgtaaagtactttcagcgaggaggaaggcggtaaggttaataaccttatcgattgacgttactcgcagaagaagcaccggctaactccgtgccagcagccgcggtaatacggagggtgcaagcgttaatcggaattactgggcgtaaagcgcacgcaggcggtctgtcaagtcggatgtgaaatccccgggctcaacctgggaactgcattcgaaactggcaggctagagtcttgtagaggggggtagaattccaggtgtagcggtgaaatgcgtagagatctggaggaataccggtggcgaaggcggccccctggacaaagactgacgctcaggtgcgaaagcgtggggagcaaacaggattagataccctggtagtccacgccgtaaacgatgtcgacttggaggttgttcccttgaggagtggcttccggagctaacgcgttaagtcgaccgcctggggagtacggccgcaaggttaaaactcaaatgaattgacgggggcccgcacaagcggtggagcatgtggtttaattcgatgcaacgcgaagaaccttacctggccttgacatccacggaatttggcagagatgccttagtgccttcgggaaccgtgagacaggtgctgcatggctgtcgtcagctcgtgttgtgaaatgttgggttaagtcccgcaacgagcgcaacccttatcctttgttgccagcgattcggtcgggaactcaaaggagactgccggtgataaaccggaggaaggtggggatgacgtcaagtcatcatggcccttacggccagggctacacacgtgctacaatggcgtatacaaagagaagcgaactcgcgagagcaagcggacctcataaagtacgtcgtagtccggatcggagtctgcaactcgactccgtgaagtcggaatcgctagtaatcgtggatcagaatgccacggtgaatacgttcccgggccttgtacacaccgcccgtcacaccatgggagtgggttgcaaaagaagtaggtagcttaaccttcgggagggcgcttaccactttgtgattcatgactggggtg

SEQ ID NO: 3127 - DNA, 1461 bp, Sideroxydans lithotrophicus
attgaacgctggcggcatgctttacacatgcaagtcgaacggcagcacggtgcttgcacctggtggcgagtggcgaacgggtgagtaatgtatcggaacatgtccggaagtgggggataacgtagcgaaagttacgctaataccgcatatgccctgagggggaaaggtggggatcgcaagacctatcgctttcggagtggccgatatcagattagctagttggtgaggtaaaggctcaccaaggcgacgatctgtagctggtctgagaggacgaccagccacactgggactgagacacggcccagactcctacgggaggcagcagtggggaattttggacaatgggcgcaagcctgatccagccatgccgcgtgagtgaagaaggccttcgggttgtaaagctctttcagacggaaagaaatcgtgcaggccaataccctgtatggatgacggtaccgtcagaagaagcaccggctaactacgtgccagcagccgcggtaatacgtagggtgcgagcgttaatcggaattactgggcgtaaagcgtgcgcaggcggttttgtaagacaggtgtgaaatccccgggcttaacctgggaactgcatttgtgactgcaaggctagagtatggcagaggggggtagaattccacgtgtagcagtgaaatgcgtagagatgtggaggaataccgatggcgaaggcagccccctgggtcaatactgacgctcatgcacgaaagcgtggggagcaaacaggattagataccctggtagtccacgccctaaacgatgtcaactaggtgttgggggaggagacttccttagtaccgcagctaacgcgtgaagttgaccgcctggggagtacggccgcaaggttgaaactcaaaggaattgacggggacccgcacaagcggtggattatgtggattaattcgatgcaacgcgaaaaaccttacctacccttgacatgccgagaatcctgaagagatttgggagtgcccgaaagggaacttggacacaggtgctgcatggctgtcgtcagctcgtgtcgtgagatgttgggttaagtcccgcaacgagcgcaacccttgtcattaattgccatcattcagttgggcactttaatgagactgccggtgataaaccggaggaaggtggggatgacgtcaagtcctcatggcccttatgggtagggcttcacacgtaatacaatggtcggtacagagggttgccaacccgcgagggggagccaatctcagaaagccgatcgtagtccggattgttctctgcaactcgagagcatgaagtcggaatcgctagtaatcgcggatcagcatgtcgcggtgaatacgttcccgggtcttgtacacaccgcccgtcacaccatgggagcgggttctgccagaagtagctagtctaaccgcaaggaggacggttaccacggcagggttcgtgactggggtg

SEQ ID NO: 3128 - DNA, 1463 bp, Silicibacter pomeroyi
taacttgagagtttgatcctggctcagaacgaacgctggcggcaggcctaacacatgcaagtcgagcgcgcccttcggggtgagcggcggacgggttagtaacgcgtgggaacgtaccctttggtagggaatagccactggaaacggtgagtaataccctatgagcccttcgggggaaagatttatcgccaaaggatcggcccgcgttagattaggtagttggtggggtaatggcctaccaagcctacgatctatagctggttttagaggatgatcagcaacactgggactgagacacggcccagactcctacgggaggcagcagtggggaatcttggacaatgggggcaaccctgatccagccatgccgcgtgagtgaagaaggccttagggtcgtaaagctctttcgcctgtgaagataatgacggtagcaggtaaagaaaccccggctaactccgtgccagcagccgcggtaatacggagggggttagcgttgttcggaattactgggcgtaaagcgcgcgtaggcggaccagaaagttgggggtgaaatcccggggctcaaccccggaactgcctccaaaactcctggtcttgagttcgagagaggtgagtggaattccgagtgtagaggtgaaattcgtagatattcggaggaacaccagtggcgaaggcggctcactggctcgatactgacgctgaggtgcgaaagtgtggggagcaaacaggattagataccctggtagtccacaccgtaaacgatgaatgccagtcgtcgggtagcatgctgctcggtgacacacctaacggattaagcattccgcctggggagtacggccgcaaggttaaaactcaaaggaattgacgggggcccgcacaagcggtggagcatgtggtttaattcgaagcaacgcgcagaaccttaccaacccttgacatcctcggaccgtcccagagatgggtctttcacttcggtgaccgagtgacaggtgctgcatggctgtcgtcagctcgtgtcgtgagatgttcggttaagtccggcaacgagcgcaacccacacccttagttgccagcattcagttgggcactctaggggaactgcccgtgataagcgggaggaaggtgtggatgacgtcaagtcctcatggcccttacgggttgggctacacacgtgctacaatggcagtgacaatgggttaatcccaaaaaactgtctcagttcggattggggtctgcaactcgaccccatgaagtcggaatcgctagtaatcgcgtaacagcatgacgcggtgaatacgttcccgggccttgtacacaccgcccgtcacaccatgggagttgggtctacccgaagacggtgcgccaacctttcgaggaggcagctggccacggtaggctcagcgactggggtgaagtcgtaacaaggtagccgtaggggaacctgcggctggatcacctccttt

SEQ ID NO: 3129 - DNA, 1461 bp, Simiduia agarivorans
attgaacgctggcggcaggcctaacacatgcaagtcgagcggtaacaggggtgcttgcacccgctgacgagcggcggacgggtgagtaacgcgtgggaatctgcctagtagtgggggacaacagttggaaacgactgctaataccgcatacgccctacgggggaaaggaggggatcttcggacctttcgctattagatgagcccgcgtcagattagctagttggtggggtaaaggcctaccaaggcgacgatctgtagctggtctgagaggatgatcagccacactggaactgagacacggtccagactcctacgggaggcagcagtggggaatattggacaatgggggcaaccctgatccagccatgccgcgtgtgtgaagaaggccttagggttgtaaagcactttcagcgaggaggaaaggttgtaggttaataccctgcagctgtgacgttactcgcagaagaagcaccggctaactccgtgccagcagccgcggtaatacggagggtgcaagcgttaatcggaattactgggcgtaaagcgcgcgtaggcggctacctaagccagatgtgaaagccccgggctcaacctgggaactgcatttggaactgggtggctagagtgcagaagaggatagtggaattccaggtgtagcggtgaaatgcgtagatatctggaggaacatcagtggcgaaggcgactgtctggtctgacactgacgctgaggtgcgaaagcgtggggagcaaacaggattagataccctggtagtccacgccgtaaacgatgtctactagttgtcggggtccttgagactttggtaacgcagctaacgcactaagtagaccgcctggggagtacggtcgcaagattaaaactcaaatgaattgacgggggcccgcacaagcggtggagcatgtggtttaattcgaagcaacgcgaagaaccttacctggccttgacatgctgagaactttccagagatggattggtgccttcgggaactcagacacaggtgctgcatggctgtcgtcagctcgtgtcgtgagatgttgggttaagtcccgtaacgagcgcaacccttgtccttagttgccagcacgtaatggtgggaactctaaggagactgccggtgacaaaccggaggaaggtggggatgacgtcaagtcatcatggcccttacggccagggctacacacgtgctacaatggggcgtacaaagggttgccaagccgcgaggtggagctaatcccgtaaaacgtctcgtagtccggattgaagtctgcaactcgacttcatgaagtcggaatcgctagtaatcgtgaatcagaatgtcacggtgaatacgttcccgggccttgtacacaccgcccgtcacaccatgggagtgggttgcaccagaagtagctagtctaaccttcgggaggacggttaccacggtgtgattcatgactggggtg

SEQ ID NO: 3130 - DNA, 1465 bp, Simonsiella muelleri
attgaacgctggcggcatgctttacacatgcaagtcggacggcagcggggtagtgcttgcattactgccggcgagtggcgaacgggtgagtataatattggaacgtaccgagtaatgggggataactatccgaaaggatggctaataccgcatacgtcctgagggagaaagcgggggacaggcaactgcctcgcgttatttgagcggccaatatcggattagctagttggtggggtaaaggcttaccaaggcgacgatccgtagcgggtctgagaggatgatccgccacactgggactgagacacggcccagactcctacgggaggcagcagtggggaattttggacaatggggggaaccctgatccagccatgtcgcgtgtatgaagaaggccttagggttgtaaagtacttttgttagggaagaaaaggcatttgctaatatcagatgctgatgacggtacctaaagaataagcaccggctaactacgtgccagcagccgcggtaatacgtagggtgcgagcgttaatcggaattactgggcgtaaagcgagcgcagacggttacttaagcaagatgtgaaatccccgagctcaacttgggaactgcgttttgaactgggtagctagagtgtgtcagaggggggtagaattccacgtgtagcagtgaaatgcgtagagatgtggaggaataccgatggcgaaggcagccccctgggatagcactgacgttcatgctcgaaagcgtgggtagcaaacaggattagataccctggtagtccacgccctaaacgatgtcaattagctgttggggcactagatgccttagtagcgaagctaacgcgtgaaattgaccgcctggggagtacggtcgcaagattaaaactcaaaggaattgacggggacccgcacaagcggtggatgatgtggattaattcgatgcaacgcgaagaaccttacctggtcttgacatgtacggaatctctcagagacgggagagtgccttcgggagccgtaacacaggtgctgcatggctgtcgtcagctcgtgtcgtgagatgttgggttaagtcccgcaacgagcgcaacccttgtcattagttgccatcatttggttgggcactctaatgagactgccggtgacaaaccggaggaaggtggggatgacgtcaagtcctcatggcccttatgaccagggcttcacacgtcatacaatggtcggtacagagggtagccaagccgcgaggtggagccaatcccaaaaaaccgatcgtagtccggattgcactctgcaactcgagtgcatgaagtcggaatcgctagtaatcgcaggtcagcatactgcggtgaatacgttcccgggtcttgtacacaccgcccgtcacaccatgggagtgggggataccagaagtaggtagaataaccgcgaggagttcgcttaccacggtatgcttcatgactggggtg

SEQ ID NO: 3131 - DNA, 1455 bp, Simplicispira metamorpha
attgaacgctggcggcatgccttacacatgcaagtcgaacggtaacaggtcttcggatgctgacgagtggcgaacgggtgagtaatacatcggaacgtgcccgatcgtgggggataacgcagcgaaagctgtgctaataccgcatacgatctacggatgaaagcgggggatcgcaagacctcgcgcggacggagcggccgatggcagattaggtagttggtgggataaaagcttaccaagccgacgatctgtagctggtctgagaggacgaccagccacactgggactgagacacggcccagactcctacgggaggcagcagtggggaattttggacaatgggcgaaagcctgatccagcaatgccgcgtgcaggatgaaggccttcgggttgtaaactgcttttgtacggaacgaaaagactctggttaatacctggggttcatgacggtaccgtaagaataagcaccggctaactacgtgccagcagccgcggtaatacgtagggtgcaagcgttaatcggaattactgggcgtaaagcgtgcgcaggcggtgatgtaagacagatgtgaaatccccgggctcaacctgggaactgcattagtgactgcatcgctggagtgcggcagagggggatggaattccgcgtgtagcagtgaaatgcgtagatatgcggaggaacaccgatggcgaaggcaatcccctgggcctgcactgacgctcatgcacgaaagcgtggggagcaaacaggattagataccctggtagtccacgccctaaactatgtcaactggttgttgggaattcactttctcagtaacgaagctaacgcgtgaagttgaccgcctggggagtacggccgcaaggttgaaactcaaaggaattgacggggacccgcacaagcggtggatgatgtggtttaattcgatgcaacgcgaaaaaccttacccacctttgacatgtacggaagatcgcagagacgcgattgtgctcgaaagagagccgtaacacaggtgctgcatggctgtcgtcagctcgtgtcgtgagatgttgggttaagtcccgcaacgagcgcaacccttgccattagttgctacatttagttgagcactctaatgggactgccggtgacaaaccggaggaaggtggggatgacgtcaagtcctcatggcccttataggtggggctacacacgtcatacaatggctggtacaaagggttgccaacccgcgagggggagctaatcccataaagccagtcgtagtccggatcgcagtctgcaactcgactgcgtgaagtcggaatcgctagtaatcgtggatcagaatgtcacggtgaatacgttcccgggtcttgtacacaccgcccgtcacaccatgggagcgggttctgccagaagtagttagcctaaccgcaaggagggcgattaccacggcagggttcgtgactggggtg

SEQ ID NO: 3132 - DNA, 1436 bp, Singulisphaera acidiphila
aatgaacgttggcggcgtggattaggcatgcaagtcgaacgggccgcaaggccagtggcgcaagggtgagtaaggcgacggtaaccaaccccaggattgggtatagccgcgggaaaccgcgggtaatccccagcgacgcaacgacaccggcatcggtgttttgccaaagcttcggcgtcgtgggacgggctgtcgtggtattagcttgttggcggggtaatggcccaccaaggctgtgatgcctaccgggcgtgcgagcgtggcccggcacactgggactgagacactgcccagactcctacgggaggctgcagtcgagaatcttcggcaatgggcgcaagcctgaccgagcgacgccgcgtggaggatgaaggccttcgggttgtaaactcctgtcgagggggaaaaagggctgaaaagccttgattgatccctggaggaagcacgggctaagttcgtgccagcagccgcggtaagacgaaccgtgcgaacgttattcggaatcattgggcttaaagcgcgtgtaggcggattcgtgcgtctgtcgctgaaatcccccggctcaaccggggaacgggcgtggatacgacgagtctggaggggcatagggggacctggaacttccggtggagcggtgaaatgcgttgagatcggaaggaacgcccgtggcgaaagcgaggtcctggatgcctactgacgctgagacgcgaaagccaggggagcgaacgggattagataccccggtagtcctggccgtaaacgatgggtactggatagggggctcgccgatgggctccctgtcgtagggaaaccgtgaagtaccccgcctggggagtatggtcgcaaggctgaaactcaaaggaattgacgggggctcacacaagcggtggagtatgtggcttaattcgaggctacgcgcaaaaccttatcccaggcttgacatgcacggattagccggcggaaacgtcggtgaggccgcaaggaacaacgtgcacaggtgctgcatggctgtcgtcagctcgtgccgtgaggtgttgggttaagtcccctaacgagcgaaacccctgtgtctagttgccagcgggtaaagccgggaactctagacagaccgccggcgttaagccggaggaaggcggggatgacgtcaagtcctcatggcccttatgcttggggctgcacacgtactacaatggggcggacagagcgttgctaggctgcaaagtcatgctaatcgcaaaaaccgttcctcagttcggattgcgggctgcaacccgcccgcatgaagctggaatcgctagtaatcgcggatcagcatgccgcggtgaatgtgttcctgagccttgtacacaccgcccgtcaagccaccaaagcggggggcatccgaagtcgccggagccgcaaggcaggcgccgaagatgaaacccgtgatggggact

SEQ ID NO: 3133 - DNA, 1491 bp, Sinobaca qinghaiensis
  misc_feature (349)..(349): n is a, c, g, or t
  misc_feature (351)..(351): n is a, c, g, or t
  misc_feature (354)..(354): n is a, c, g, or t
  misc_feature (361)..(361): n is a, c, g, or t
  misc_feature (384)..(384): n is a, c, g, or t
  misc_feature (418)..(418): n is a, c, g, or t
  misc_feature (427)..(427): n is a, c, g, or t
  misc_feature (433)..(433): n is a, c, g, or t
  misc_feature (497)..(498): n is a, c, g, or t
gacgaacgctggcggcgtgcctaatacatgcaagtcgagcgcatgcacccggcggacctcttcggagggaaaccggggaattgagcggcggacgggtgagtaacacgtgggcaacctgccctctagacggggataactccgggaaaccggagctaatacccgataatcaagcagatcacctgatctgcttgtaaaagcatggccttcgggccatgcactggaggatgggcccgcggcgtattagctagttggagaggtaagggctccccaaggcgacgatacgtagccgacctgagagggtgatcggccacactgggactgagacacggcccagactcctacgggagcnancantagggantcatccgcaatggacgaaagtcngacggtgcaacgccgcgtgagtgatgaaggtttncggatcgtnaagctntgttgtgagggaagaacaaggggcgttttaacagccgcccccttgacggtacctcaccagaaanncccggctaactacgtgccagcagccgcggtaatacgtagggggcaagcgttgtccggaattattgggcgtaaagcgcgcgcaggcggttccttaagtctgatgtgaaagcccacggctcaaccgtggagggtcattggaaactggggaactggaatgcagaagaggagagtggaattccacgtgtagcggtgaaatgcgtagatatgtggaggaacaccagtggcgaaggcggctctctggtctgttattgacgctgaggcgcgaaagcgtggggagcaaacaggattagataccctggtagtccacgccgtaaacgatgagtgctaggtgttaggggtttcgatgcccttagtgccgaagctaacgcattaagcactccgcctggggagtacggccgcaaggctgaaactcaaaagaattgacgggggcccgcacaagcggtggagcatgtggtttaattcgacgcaacgcgaagaaccttaccaggtcttgacatcttttgctacttctggagacagaaggttccccttcgggggacaaaatgacaggtggtgcatggttgtcgtcagctcgtgtcgtgagatgttgggttaagtcccgcaacgagcgcaacccttaatcttagttgccagcatttggttgggcactctaaggtgactgccggtgacaaaccggaggaaggtggggacgacgtcaaatcatcatgccccttatgacctgggctacacacgtgctacaatggatggtacagagggatgcgaaaccgcgaggtggagccaatctcgcaaagccattctcagttcggattgcaggctgcaactcgcctgcatgaagccggaatcgctagtaatcgtggatcagcatgccacggtgaatacgttcccgggccttgtacacaccgcccgtcacaccacgagagtttgcaacacccgaagtcggtgaggtaaccctttgggagccagccgccgaaggtggggcagatgattggggtg

SEQ ID NO: 3134 - DNA, 1437 bp, Sinorhizobium americanum
aacgaacgctggcggcaggcttaacacatgcaagtcgagcgccccgcaaggggagcggcagacgggtgagtaacgcgtgggaatctacccttttctacggaataacgcagggaaacttgtgctaataccgtatgagcccttcgggggaaagatttatcgggaaaggatgagcccgcgttggattagctagttggtggggtaaaggcctaccaaggcgacgatccatagctggtctgagaggatgatcagccacattgggactgagacacggcccaaactcctacgggaggcagcagtggggaatattggacaatgggcgcaagcctgatccagccatgccgcgtgagtgatgaaggccctagggttgtaaagctctttcaccggtgaagataatgacggtaaccggagaagaagccccggctaacttcgtgccagcagccgcggtaatacgaagggggctagcgttgttcggaattactgggcgtaaagcgcacgtaggcggacatttaagtcaggggtgaaatcccggggctcaaccccggaactgcctttgatactgggtgtctagagtccggaagaggtgagtggaattccgagtgtagaggtgaaattcgtagatattcggaggaacaccagtggcgaaggcggctcactggtccggtactgacgctgaggtgcgaaagcgtggggagcaaacaggattagataccctggtagtccacgccgtaaacgatgaatgttagccgtcgggcagtttactgttcggtggcgcagctaacgcattaaacattccgcctggggagtacggtcgcaagattaaaactcaaaggaattgacgggggcccgcacaagcggtggagcatgtggtttaattcgaagcaacgcgcagaaccttaccagcccttgacatcccgatcgcggatacgagagatcgtatccttcagttcggctggatcggagacaggtgctgcatggctgtcgtcagctcgtgtcgtgagatgttgggttaagtcccgcaacgagcgcaaccctcgcccttagttgccagcatttagttgggcactctaaggggactgccggtgataagccgagaggaaggtggggatgacgtcaagtcctcatggcccttacgggctgggctacacacgtgctacaatggtggtgacagtgggcagcgagaccgcgaggtcgagctaatctccaaaagccatctcagttcggattgcactctgcaactcgagtgcatgaagttggaatcgctagtaatcgcagatcagcatgctgcggtgaatacgttcccgggccttgtacacaccgcccgtcacaccatgggagttggttctacccgaaggtagtgcgctaaccgcaaggaggcagctaaccacggtagggtcagcgactggggtgaagtcgtaacaaggtagccgtaggggaacc

SEQ ID NO: 3135 - DNA, 1481 bp, Sinorhizobium fredii
  misc_feature (77)..(79): n is a, c, g, or t
aacttgagagtttgatcctggctcagaacgaacgctggcggcaggcttaacacatgcaagtcgagcgccccgcaagnnnagcggcagacgggtgagtaacgcgtgggaatctacccttttctacggaataacgcagggaaacttgtgctaataccgtatgagcccttcgggggaaagatttatcgggaaaggatgagcccgcgttggattagctagttggtggggtaaaggcctaccaaggcgacgatccatagctggtctgagaggatgatcagccacattgggactgagacacggcccaaactcctacgggaggcagcagtggggaatattggacaatgggcgcaagcctgatccagccatgccgcgtgagtgatgaaggccctagggttgtaaagctctttcaccggtgaagataatgacggtaaccggagaagaagccccggctaacttcgtgccagcagccgcggtaatacgaagggggctagcgttgttcggaattactgggcgtaaagcgcacgtaggcggacatttaagtcaggggtgaaatcccggggctcaaccccggaactgcctttgatactgggtgtctagagtccggaagaggtgagtggaattccgagtgtagaggtgaaattcgtagatattcggaggaacaccagtggcgaaggcggctcactggtccggtactgacgctgaggtgcgaaagcgtggggagcaaacaggattagataccctggtagtccacgccgtaaacgatgaatgttagccgtcgggcagtttactgttcggtggcgcacgtaacgcattaaacattccgcctggggagtacggtcgcaagattaaaactcaaaggaattgacgggggcccgcacaagcggtggagcatgtggtttaattcgaagcaacgcgcagaaccttaccagcccttgacatcccgatcgcggatacgagagatcgtatccttcagttcggctggatcggagacaggtgctgcatggctgtcgtcagctcgtgtcgtgagatgttgggttaagtcccgcaacgagcgcaaccctcgcccttagttgccagcatttagttgggcactctaaggggactgccggtgataagccgagaggaaggtggggatgacgtcaagtcctcatggcccttacgggctgggctacacacgtgctacaatggtggtgacagtgggcagcgagaccgcgaggtcgagctaatctccaaaagccatctcagttcggattgcactctgcaactcgagtgcatgaagttggaatcgctagtaatcgcagatcagcatgctgcggtgaatacgttcccgggccttgtacacaccgcccgtcacaccatgggagttggttctacccgaaggtagtgcgctaaccgcaaggaggcagctaaccacggtagggtcagcgactggggtgaagtcgtaacaaggtagccgtaggggaacctgcggctggatcacctcc

SEQ ID NO: 3136 - DNA, 1410 bp, Sinorhizobium medicae
aacgaacgctggcggcaggcttaacacatgcaagtcgagcgccccgcaaggggagcggcagacgggtgagtaacgcgtgggaatctacccttttctacggaataacgcagggaaacttgtgctaataccgtataagcccttcgggggaaagatttatcgggaaaggatgagcccgcgttggattagctagttggtggggtaaaggcctaccaaggcgacgatccatagctggtctgagaggatgatcagccacattgggactgagacacggcccaaactcctacgggaggcagcagtggggaatattggacaatgggcgcaagcctgatccagccatgccgcgtgagtgatgaaggccctagggttgtaaagctctttcaccggtgaagataatgacggtaaccggagaagaagccccggctaacttcgtgccagcagccgcggtaatacgaagggggctagcgttgttcggaattactgggcgtaaagcgcacgtaggcggattgttaagtgaggggtgaaatcccagggctcaaccctggaactgcctttcatactggcaatctagagtccagaagaggtgagtggaattccgagtgtagaggtgaaattcgtagatattcggaggaacaccagtggcgaaggcggctcactggtctggtactgacgctgaggtgcgaaagcgtggggagcaaacaggattagataccctggtagtccacgccgtaaacgatgaatgttagccgtcgggcagtttactgttcggtggcgcagctaacgcattaaacattccgcctggggagtacggtcgcaagattaaaactcaaaggaattgacgggggcccgcacaagcggtggagcatgtggtttaattcgaagcaacgcgcagaaccttaccagcccttgacatcccgatcgcggataggagagatcctatccttcagttcggctggatcggagacaggtgctgcatggctgtcgtcagctcgtgtcgtgagatgttgggttaagtcccgcaacgagcgcaaccctcgcccttagttgccagcattcagttgggcactctaaggggactgccggtgataagccgagaggaaggtggggatgacgtcaagtcctcatggcccttacgggctgggctacacacgtgctacaatggtggtgacagtgggcagcgagaccgcgaggtcgagctaatctccaaaagccatctcagttcggattgcactctgcaactcgagtgcatgaagttggaatcgctagtaatcgcagatcagcatgctgcggtgaatacgttcccgggccttgtacacaccgcccgtcacaccatgggagttggttctacccgaaggtagtgcgctaaccgcaaggaggcagctaaccacggtagggtcagcgactggggtgaag

SEQ ID NO: 3137 - DNA, 1437 bp, Sinorhizobium meliloti
aacgaacgctggcggcaggcttaacacatgcaagtcgagcgccccgcaaggggagcggcagacgggtgagtaacgcgtgggaatctacccttttctacggaataacgcagggaaacttgtgctaataccgtatgagcccttcgggggaaagatttatcgggaaaggatgagcccgcgttggattagctagttggtggggtaaaggcctaccaaggcgacgatccatagctggtctgagaggatgatcagccacattgggactgagacacggcccaaactcctacgggaggcagcagtggggaatattggacaatgggcgcaagcctgatccagccatgccgcgtgagtgatgaaggccctagggttgtaaagctctttcaccggtgaagataatgacggtaaccggagaagaagccccggctaacttcgtgccagcagccgcggtaatacgaagggggctagcgttgttcggaattactgggcgtaaagcgcacgtaggcggattgttaagtgaggggtgaaatcccagggctcaaccctggaactgcctttcatactggcaatctagagtccagaagaggtgagtggaattccgagtgtagaggtgaaattcgtagatattcggaggaacaccagtggcgaaggcggctcactggtctggaactgacgctgaggtgcgaaagcgtggggagcaaacaggattagataccctggtagtccacgccgtaaacgatgaatgttagccgtcgggcagtttactgttcggtggcgcagctaacgcattaaacattccgcctggggagtacggtcgcaagattaaaactcaaaggaattgacgggggcccgcacaagcggtggagcatgtggtttaattcgaagcaacgcgcagaaccttaccagcccttgacatcccgatcgcggatacgagagatcgtatccttcagttcggctggatcggagacaggtgctgcatggctgtcgtcagctcgtgtcgtgagatgttgggttaagtcccgcaacgagcgcaaccctcgcccttagttgccagcattcagttgggcactctaaggggactgccggtgataagccgagaggaaggtggggatgacgtcaagtcctcatggcccttacgggctgggctacacacgtgctacaatggtggtgacagtgggcagcgagaccgcgaggtcgagctaatctccaaaagccatctcagttcggattgcactctgcaactcgagtgcatgaagttggaatcgctagtaatcgcagatcagcatgctgcggtgaatacgttcccgggccttgtacacaccgcccgtcacaccatgggagttggttctacccgaaggtagtgcgctaaccgcaaggaggcagctaaccacggtagggtcagcgactggggtgaagtcgtaacaaggtagccgtaggggaacc

SEQ ID NO: 3138 - DNA, 1410 bp, Sinorhizobium saheli
aacgaacgctggcggcaggcttaacacatgcaagtcgagcgcgtggcaatacgagcggcagacgggtgagtaacgcgtgggaatctacccttttctacggaataacgcagggaaacttgtgctaataccgtatgagcccttcgggggaaagatttatcgggaaaggatgagcccgcgttggattagctagttggtggggtaaaggcctaccaaggcgacgatccatagctggtctgagaggatgatcagccacattgggactgagacacggcccaaactcctacgggaggcagcagtggggaatattggacaatgggcgcaagcctgatccagccatgccgcgtgagtgatgaaggccctagggttgtaaagctctttcaccggtgaagataatgacggtaaccggagaagaagccccggctaacttcgtgccagcagccgcggtaatacgaagggggctagcgttgttcggaattactgggcgtaaagcgcacgtaggcggacatttaagtcaggggtgaaatcccggggctcaaccccggaactgcctttgatactgggtgtctagagtccggaagaggtgagtggaattccgagtgtagaggtgaaattcgtagatattcggaggaacaccagtggcgaaggcggctcactggtccggaactgacgctgaggtgcgaaagcgtggggagcaaacaggattagataccctggtagtccacgccgtaaacgatgaatgttagccgtcgggcagtttactgttcggtggcgcagctaacgcattaaacattccgcctggggagtacggtcgcaagattaaaactcaaaggaattgacgggggcccgcacaagcggtggagcatgtggtttaattcgaagcaacgcgcagaaccttaccagcccttgacatcccggtcgcggatacgagagatcgtattcttcagttcggctggaccggagacaggtgctgcatggctgtcgtcagctcgtgtcgtgagatgttgggttaagtcccgcaacgagcgcaaccctcgcccttagttgccagcatttggttgggcactctaaggggactgccggtgataagccgagaggaaggtggggatgacgtcaagtcctcatggcccttacgggctgggctacacacgtgctacaatggtggtgacagtgggcagcgagaccgcgaggtcgagctaatctccaaaagccatctcagttcggattgcactctgcaactcgagtgcatgaagttggaatcgctagtaatcgcagatcagcatgctgcggtgaatacgttcccgggccttgtacacaccgcccgtcacaccatgggagttggttctacccgaaggtagtgcgctaaccgcaaggaggcagctaaccacggtagggtcagcgactggggtgaag

SEQ ID NO: 3139 - DNA, 1355 bp, Skermanella aerolata
  misc_feature (1031)..(1031): n is a, c, g, or t
tgcaagtcgaacgagggcttcggccctagtggcgcacgggtgagtaacgcgtgggaacctgccctgtggtacggaataactccgggaaactggagctaataccgtatgtgtcctgcgggacaaagatttatcgccatgggatgggcccgcgtaggattagcttgttggtggggtaacggcctaccaaggcaacgatccttagctggtctgagaggatgatcagccacactgggactgagacacggcccagactcctacgggaggcagcagtggggaatattggacaatgggcgcaagcctgatccagcaatgccgcgtgagtgatgaaggccttcgggttgtaaagctctttcgcacgcgacgatgatgacggtagcgtgagaagaagccccggctaacttcgtgccagcagccgcggtaatacgaagggggctagcgttgttcggaattactgggcgtaaagggcgcgtaggcggtacttcaagtcaggcgtgaaagccccgggctcaacctgggaaccgcgcttgagactggagaactagagttcgggagaggatggtggaattcccagtgtagaggtgaaattcgtagatattgggaagaacaccgatggcgaaggcagccatctggaccgacactgacgctgaggcgcgaaagcgtggggagcaaacaggattagataccctggtagtccacgccgtaaacgatgagtgctagacgttggggcccttagggcttcggtgtcgcagctaacgcattaagcactccgcctggggagtacggccgcaaggttaaaactcaaaggaattgacgggggcccgcacaagcggtggagcatgtggtttaattcgaagcaacgcgcagaaccttaccagcccttgacatgggcgtcgcgggtccagagatggacctttcggttcggccggacgccgcacaggtgctgcatggctgtcgtcagctcgtgtcgtgagatgttgggttaagtcccgcaacgagcgcaacccccatcttcagttgccatcaggtaaagntgggcactctggagaaaccgccggtgacaagccggaggaaggcggggatgacgtcaagtcctcatggcccttatgggctgggctacacacgtgctacaatggtggtgacagtgggcagcgagatcgcgagatcgagccaatctccaaaagccatctcagttcggatcgcactctgcaactcgggtgcgtgaagttggaatcgctagtaatcgcggatcagcacgccgcggtgaatacgttcccgggccttgtacacaccgcccgtcacaccatgggagttggttttacccgaagccggtgggctaaccgcaaggaggcagccga

SEQ ID NO: 3140 - DNA, 1408 bp, Skermanella stibiiresistens
aacgaacgctggcggcatgcctaacacatgcaagtcgaacggtgccttcgggcatagtggcgcacgggtgagtaacgcgtgggaacctgccctgtggtacggaacaactccgggaaactggagctaataccgtatgtgtcctgcgggacaaagattcatcgccatgggatgggcccgcgtaggattagctagttggcggggtaacggcccaccaaggctacgatccttagctggtctgagaggatgatcagccacactgggactgagacacggcccagactcctacgggaggcagcagtggggaatattggacaatgggcgcaagcctgatccagcaatgccgcgtgagtgatgaaggccttcgggttgtaaagctctttcgcacgcgacgatgatgacggtagcgtgagaagaagccccggctgacttcgtgccagcagccgcggtaatacgaagggggctagcgttgttcggaattactgggcgtaaagggcgcgtaggcggtgtgtcaagtcaggcgtgaaagccccgggctcaacctgggaaccgcgcttgagactggcacgctagagttcgggagaggatggtggaattcccagtgtagaggtgaaattcgtagatattgggaagaacaccgatggcgaaggcagccatctggaccgacactgacgctgaggcgcgaaagcgtggggagcaaacaggatagataccctggtagtccacgccgtaaacgatgagtgctagacgtcggggtccctagggcttcggtgtcgcagctaacgcgttaagcactccgcctggggagtacggccgcaaggttaaaactcaaaggaattgacgggggcccgcacaagcggtggagcatgtggtttaattcgaagcaacgcgcagaaccttaccagcccttgacatgggcgtcgcgggtccagagatgggcctttcggttcggccggacgccacacaggtgctgcatggctgtcgtcagctcgtgtcgtgagatgttgggttaagtcccgcaacgagcgcaacccccatcctcagttgccagcatgtgatgatgggcactctggggaaaccgccggtgacaagccggaggaaggcggggatgacgacaagtcctcatggccctcatgggctgggccacacacgtgctacgatggtggtgacagtgggcagcgagatcgcgagatcgagccaatctccaaaagccatctcagttcggatcgcactctgcaactcgggtgcgtgaagttggaatcgctagtaatcgcggatcagcacgccgcggtgaatacgttcccgggccttgtacacaccgcccgtcacaccatgggagttggttttacccgaagccggtgcgctaaccgcaaggaggcagccgaccacggtcaggtcagcgactggggtg

SEQ ID NO: 3141 - DNA, 1461 bp, Snodgrassella alvi
attgaacgctggcggcatgctttacacatgcaagtcgaacggcagcacggagagcttgctctctggtggcgagtggcgaacgggtgagtaatgcatcggaacgtaccgagtaatgggggataactgtccgaaaggatggctaataccgcatacgccctgagggggaaagcgggggatcgaaagacctcgcgttatttgagcggccgatgttggattagctagttggtggggtaaaggcctaccaaggcgacgatccatagcgggtctgagaggatgatccgccacattgggactgagacacggcccaaactcctacgggaggcagcagtggggaattttggacaatggggggaaccctgatccagccatgccgcgtgtctgaagaaggccttcgggttgtaaaggacttttgttagggaagaaaagccgggtgttaataccacctggtgctgacggtacctaaagaataagcaccggctaactacgtgccagcagccgcggtaatacgtagggtgcgagcgttaatcggaattactgggcgtaaagcgagcgcagacggttaattaagtcagatgtgaaatccccgagctcaacttgggacgtgcatttgaaactggttaactagagtgtgtcagagggaggtagaattccacgtgtagcagtgaaatgcgtagagatgtggaggaataccgatggcgaaggcagcctcctgggataacactgacgttcatgctcgaaagcgtgggtagcaaacaggattagataccctggtagtccacgccctaaacgatgacaattagctgttgggacactagatgtcttagtagcgaagctaacgcgtgaaattgtccgcctggggagtacggtcgcaagattaaaactcaaaggaattgacggggacccgcacaagcggtggatgatgtggattaattcgatgcaacgcgaagaaccttacctggtcttgacatgtacggaatctcttagagataggagagtgccttcgggaaccgtaacacaggtgctgcatggctgtcgtcagctcgtgtcgtgagatgttgggttaagtcccgcaacgagcgcaacccttgtcattagttgccatcattaagttgggcactctaatgagactgccggtgacaaaccggaggaaggtggggatgacgtcaagtcctcatggcccttatgaccagggcttcacacgtcatacaatggtcggtacagagggtagcgaagccgcgaggtgaagccaatctcagaaagccgatcgtagtccggattgcactctgcaactcgagtgcatgaagtcggaatcgctagtaatcgcaggtcagcatactgcggtgaatacgttcccgggtcttgtacacaccgcccgtcacaccatgggagtgggggataccagaattgggtagactaaccgcaaggaggtcgcttaacacggtatgcttcatgactggggtg

SEQ ID NO: 3142 - DNA, 1464 bp, Sodalis glossinidius
attgaacgctggcggcaggcctaacacatgcaagtcgagcggcagcggaaagaagcttgcttctttgccggcgagcggcggacgggtgagtaatgtctggggatctgcccgatggagggggataactactggaaacggtagctaataccgcataacgtcgcaagactaaagtgggggaccttcgggcctcacaccatcggatgaacccagatgggattagctagtaggtggggtaatggctcacctaggcgacgatccctagctggtctgagaggatgaccagccacactggaactgagacacggtccagactcctacgggaggcagcagtggggaatattgcacaatgggggaaaccctgatgcagccatgccgcgtgtgtgaagaaggccttcgggttgtaaagcactttcagcggggaagaaggcgttagcgttaacagcgctatcgattgacgttacctgcagaagaagcaccggctaactccgtgccagcagccgcggtaatacggagggtgcaagcgttaatcggaattactgggcgtaaagcgtacgcaggcggtctgttaagtcagatgtgaaatccccgggcttaacctgggaactgcatttgaaactggcaggctagagtctcgtagaggggggtagaattccaggtgtagcggtgaaatgcgtagagatctggaggaataccggtggcgaaggcggccccctggacgaagactgacgctcaggtacgaaagcgtggggagcaaacaggattagataccctggtagtccacgctgtaaacgatgtcgatttgaaggttgtggccttgagctgtggctttcggagctaacgcgttaaatcgaccgcctggggagtacggccgcaaggttaaaactcaaatgaattgacgggggcccgcacaagcggtggagcatgtggtttaattcgatgcaacgcgaagaaccttacctactcttgacatccagagaacttggcagagatgccttggtgccttcgggagctctgagacaggtgctgcatggctgtcgtcagctcgtgttgtgaaatgttgggttaagtcccgcaacgagcgcaacccttatcctttgttgccagcgatttggtcgggaactcaaaggagactgccggtgataaaccggaggaaggtggggatgacgtcaagtcatcatggcccttacgagtagggctacacacgtgctacaatggcgcatacaaagagaagcgatctcgcgagagtcagcggacctcacaaagtgcgtcgtagtccggattggagtctgcaactcgactccatgaagtcggaatcgctagtaatcgtggatcagaatgccacggtgaatacgttcctgggccttgtacacaccgcccgtcacaccatgggagtgggttgcaaaagaagtaggtagcttaaccttcgggagggcgcttaccactttgtgattcatgactggggtg

SEQ ID NO: 3143 - DNA, 1464 bp, Sodalis praecaptivus
attgaacgctggcggcaggcctaacacatgcaagtcgagcggcagcggaaagaagcttgcttctttgccggcgagcggcggacgggtgagtaatgtctggggatctgcccgatggagggggataactactggaaacggtagctaataccgcataacgtcgcaagaccaaagtgggggaccttcgggcctcacaccatcggatgaacccagatgggattagctagtaggtggggtaatggctcacctaggcgacgatccctagctggtctgagaggatgaccagccacactggaactgagacacggtccagactcctacgggaggcagcagtggggaatattgcacaatgggggaaaccctgatgcagccatgccgcgtgtgtgaagaaggccttcgggttgtaaagcactttcagcggggaggaaggcgatggcgtaaatagcgccatcgattgacgttacccgcagaagaagcaccggctaactccgtgccagcagccgcggtaatacggagggtgcgagcgttaatcggaattactgggcgtaaagcgtacgcaggcggtctgttaagtcagatgtgaaatccccgggctcaacctgggaactgcatttgaaactggcaggctagagtctcgtagaggggggtagaattccaggtgtagcggtgaaatgcgtagagatctggaggaataccggtggcgaaggcggccccctggacgaagactgacgctcaggtacgaaagcgtggggagcaaacaggattagataccctggtagtccacgctgtaaacgatgtcgatttgaaggttgtggccttgagccgtggctttcggagctaacgcgttaaatcgaccgcctggggagtacggccgcaaggttaaaactcaaatgaattgacgggggcccgcacaagcggtggagcatgtggtttaattcgatgcaacgcgaagaaccttacctactcttgacatccagagaacttggcagagatgccttggtgccttcgggagctctgagacaggtgctgcatggctgtcgtcagctcgtgttgtgaaatgttgggttaagtcccgcaacgagcgcaacccttatcctttgttgccagcgattcggtcgggaactcaaaggagactgccggtgataaaccggaggaaggtggggatgacgtcaagtcatcatggcccttacgagtagggctacacacgtgctacaatggcgcatacaaagagaagcgatctcgcgagagtcagcggacctcataaagtgcgtcgtagtccggattggagtctgcaactcgactccatgaagtcggaatcgctagtaatcgtggatcagaatgccacggtgaatacgttcccgggccttgtacacaccgcccgtcacaccatgggagtgggttgcaaaagaagtaggtagcttaaccttcgggagggcgcttaccactttgtgattcatgactggggtg

SEQ ID NO: 3144 - DNA, 1423 bp, Solibacter usitatus
aatcaacgctggcggcgcgcctaacacatgcaagtcgaacgagaaagtggagcaatccatgagtacagtggcgtacgggtgagtaacacgtgggtgatctacctcttagtgaggaataaccctgggaaaccggggctaataccgcataagcctgagaagggaaagcagcaatgcgctgagagaggagcccgcggccgattagctagttggtgaggtaagagcccaccaaggcagagatcggtagccggcctgagagggcacacggccacactggcactgaaacacgggccagactcctacgggaggcagcagtggggaatcttgcacaatgggggaaaccctgatgcagcgacgccgcgtgagcgatgaagcccttcggggtgtaaagctctttcgtcagggaagattatgacggtacctggagaagcagctgcggctaactacgtgccagcagccgcggtaatacgtaggcagcaagcgttgttcggagttactgggcgtaaagggtgtgtaggcggttctttaagtttggtgtgaaatctcccggctcaaccgggagggtgcgccgaatactgagggactagagtgtgggagaggaaagtggaattcctggtgtagcggtgaaatgcgtagatatcaggaggaacaccggtggtgtagacggctttctggaccataactgacgctgagacacgaaagcgtgggtagcaaacaggattagataccctggtagtccacgccctaaacgatgcatatttggtgtgggtcattcagttgatccgtgccggagctaacgcgttaaatatgccgcctggggagtacagtcgcaaggctgaaactcaaaggaattgacgggggcccgcacaagcggtggagcatgtggttcaattcgacgcaacgcgaagaaccttacctgggctcgaacggctggtcaacgccggtagaaataccggtaccccgcaagggggtccagtcgaggtgctgcatggctgtcgtcagctcgtgtcgtgagatgttgggttaagtcccgcaacgagcgcaacccttgtcctgtgttgccatcattcagttgggaactcgcaggagaccgccagcgataagctggaggaaggtggggatgacgtcaagtcctcatggcctttatgtccagggctacacacgtgctacaatggacggtacaaaccgcagcaaacccgcgagggggagccaatcggaaaaaaccgttctcagttcggattgcaggctgcaactcgcctgcatgaagctggaatcgctagtaatggcagatcagcacgctgccgtgaatacgttcccgggccttgtacacaccgcccgtcacatcacgaaagtggattgtactagaagtctgcaggctgacccgtaaggggggcagcggcccaaggtatgatccatgattggggtg

SEQ ID NO: 3145 - DNA, 1452 bp, Solimonas aquatica
attgaacgctggcggcatgcctaacacatgcaagtcgcgcggggtgtagcaatacatctagcggcggacgggtgaggaacacataggaatttgcctttaggtgggggatagcccagggaaacttggagtaataccgcatgatgtcgagagaccaaagcaggggatcgcaagaccttgcgcctttagaggagcctatgtctgattagctagttggtagggtaatggcctaccaaggcgacgatcagtaactggtctgagaggacgatcagtcacaccggaactgagacacggtccggactcctacgggaggcagcagtggggaatattggacaatgggcgcaagcctgatccagcaatgccgcgtgtgtgaagaaggccttcgggttgtaaagcactttaggctgggaagaaaaagtcggagctaatatctccgaccttgacggtaccagaagaataagcaccggctaactctgtgccagcagccgcggtaatacagagggtgcaagcgttaatcggatttactgggcgtaaagcgtgtgtaggtggttattcaagtcggttgtgaaatccccgggctcaacctgggaactgcttccgagactgaaagactagagtacggtagagggcggtggaatttccggtgtagcggtgaaatgcgtagatatcggaaggaacatcaatggcgaaggcagccgcctgggcctgtactgacactgagacacgaaagcgtggggatcaaacaggattagataccctggtagtccacgccgtaaacgatgagaacttgacgtcggtttgctcagcaagtcggtgtcgcagctaacgcgataagttctccgcctggggagtacggccgcaaggttgaaactcaaaggaattgacgggggcccgcacaagcggtggagtatgtggtttaattcgatgcaacgcgaagaaccttacctgggcttgacatgctaggaatcctgcagagatgtgggagtgcccgcaagggaacctagacacaggtgctgcatggctgtcgtcagctcgtgtcgtgagatgttgggttaagtcccgcaacgagcgcaacccttgcccttagttgccaccatttagttgagcactctaaggggaccgccagtgacaaactggaggaaggtggggatgacgtcaagtcatcatggcccttatgcccagggctacacacgtactacaatggacagtacagagggtcgccaaaccgcaaggtggagctaatcccaaaaagctgttcgtagtccggatcgaggtctgcaactcgacctcgtgaagtcggaatcgctagtaatcgccgatcagcatttgcggcggtgaatacgttcccgggccttgtacacaccgcccgtcacaccatggaagtctgttgcaccagaagtaggtagtctaaccgcaaggggggcgcttaccacggtgtggccgatgactggggtg

SEQ ID NO: 3146 - DNA, 1430 bp, Sphaerobacter thermophilus
gaacaacgctggcggcgtgcctaatgcatgcaagtcgtacgggagccgctttggcggtcgaccgtggcggacgggtgaggaacacgtgggtaacctgccccggcgcgggggataaccgcgggaaaccgtggctaataccccatgggctcggttgggggtgacctgatcgagcaaaggcggaagccgtgccgggaggggcctgcggcctatcagctagacggtggggtaatggcctaccgtggcgatgacgggtagctggtctgagaggacgatcagccacacggggactgagacacggccccgactcctacgggaggcagcagcaaggaattttccgcaatgggcgcaagcctgacggagcgacgccgcgtggaggatgacgcccttcggggtgtaaactccttttcggggggacgaaggcagtgacggtacccccggaagaagcaccggctaactacgtgccagcagccgcggtaagacgtagggtgcgagcgttgtccggagttactgggcgtaaagggcgcgtaggcggctgcccgcgtcgcacgtgaaagcccccggctcaaccggggagggtcgtgcgagacggggtggctagaggcagggagaggctggtggaattcccggtgtagcggtgaaatgcgtagagatcgggaggaacaccggtggcgaaggcggccagctggccctgacctgacgctgaggcgcgaaggcgcggggagcgaacgggattagataccccggtagtccgcgcagtaaacgctgtggactaggtgtgggaggtgttgaccccttccgtgccggcgctaacgcagtaagtccaccgcctggggagtacggccgcaaggctaaaactcaaaggaattgacgggggcccgcacaagcagcggagcgtgtggtttaattcgacgcaacgcgcagaaccttaccagggcttgacatccccggaacccctgggaaaccggggggtgcccttcggggagccgggagacaggtgctgcatggctgtcgtcagctcgtgtcgtgagatgttgggttaagtcccgcaacgagcgcaaccctcgtggctagttacggtggtgtctagccagactgccgggcacaacccggaggaagggggggatgacgtcaagtccgcatggccctgacgccctgggcgacacacacgctacaatggccgggacagcgggcggccaagcggcaacgcggagccaatccctcaaacccggtctcagttcggattgggggctgcaactcgcccccatgaaggcggagttgctagtaaccgcaggtcagccatactgcggtgaatatgttcccgggccttgtacacaccgcccgtcacgtcacgaaagccggcaacacctgaagccggtgggccaacccgatacgggaggcagccgtcgagggtggggctggtgattgggacg

SEQ ID NO: 3147 - DNA, 1409 bp, Sphaerospermopsis kisseleviana
gatgaacgctggcggtatgcttaacacatgcaagtcgaacggactcttaggagttagtggcggacgggtgagtaacgcgtgagaatttggcttcaggtcggggacaacagttggaaacgactgctaataccggatgtgccggaaggtgaaagatttatcgcctgaagataagctcgcgtctgattagctagttggtggtgtaagggactaccaaggcgacgatcagtagctggtctgagaggatgatcagccacactgggactgagacacggcccagactcctacgggaggcagcagtggggaattttccgcaatgggcgaaagcctgacggagcaataccgcgtgagggaggaaggctcttgggtcgtaaacctcttttctcaaggaagaatgcaatgacggtacttgaggaataagcatcggctaactccgtgccagcagccgcggtaatacggaggatgcaagcgttatccggaatgattgggcgtaaagggtctgtaggtggtactgaaagtctgctgttaaagagcaaggctcaaccttgtaagagcagtggaaactacagaactggagtgcggtaggggcaaaaggaattcctggtgtagcggtgaaatgcgtagatatcaggaagaacaccggtggcgaaagcgttttgctagaccgcaactgacactgagggacgaaagctaggggagcgaatgggattagataccccagtagtcctagccgtaaacgatggatactaggcgtggcttgtatcgacccgagccgtgccggagctaacgcgttaagtatcccgcctggggagtacgcacgcaagtgtgaaactcaaaggaattgacgggggcccgcacaagcggtggagtatgtggtttaattcgatgcaacgcgaagaaccttaccaagacttgacatcctgcgaattttcctgaaagggaaaagtgccttcgggagcgcagagacaggtggtgcatggctgtcgtcagctcgtgtcgtgagatgttgggttaagtcccgcaacgagcgcaaccctcgtttttagttgccagcattaagatgggcactctagagagactgccggtgacaaaccggaggaaggtgaggatgacgtcaagtcagcatgccccttacgtcttgggctacacacgtactacaatgctacggacaaagggcggctacacagcgatgtgatgcaaatctcagaaaccgtagctcagttcagatcgaaggctgcaactcgccttcgtgaaggaggaatcgctagtaattgcaggtcagcatactgcagtgaattcgttcccgggccttgtacacaccgcccgtcacaccatggaagttggtcacgcccgaagtcattaccccaaccgaaaggagggggatgcctaaggtaggactggtgactggggtg

SEQ ID NO: 3148 - DNA, 1404 bp, Sphaerotilus hippei
ggtatgccttacacatgcaagtcgaacggtagggggagcaatcccctgagagtggcgaacgggtgagtaatacatcggaacgtgcccagtcgtgggggataacgtagcgaaagctacgctaataccgcatacgacctgagggtgaaagcgggggaccgtaaggcctcgcgcgattggagcggccgatggcagattaggtagttggtggggtaaaggcccaccaagcctgcgatctgtagctggtctgagaggacgaccagccacactgggactgagacacggcccagactcctacgggaggcagcagtggggaattttggacaatgggcgaaagcctgatccagccataccgcgtgcaggaagaaggccttcgggttgtaaactgcttttgtcagggaagaaatactctgggctaataccctggggtgatgacggtacctgaagaataagcaccggctaactacgtgccagcagccgcggtaatacgtagggtgcaagcgttaatcggaattactgggcgtaaagcgtgcgcaggcggttctataagacagatgtgaaatccccgggctcaacctgggaactgcatttgtgactgtagagctagagtacggtagagggggatggaattccgcgtgtagcagtgaaatgcgtagatatgcggaggaacaccgatggcgaaggcaatcccctggacctgtactgacgctcatgcacgaaagcgtggggagcaaacaggattagataccctggtagtccacgccctaaacgatgtcaactggttgttgggagggtttcttctcagtaacgaagctaacgcgtgaagttgaccgcctggggagtacggccgcaaggttgaaactcaaaggaattgacggggacccgcacaagcggtggatgatgtggtttaattcgatgcaacgcgaaaaaccttacctacccttgacatgtctggaatcccgaagagatttgggagtgctcgaaagagagccagaacacaggtgctgcatggccgtcgtcagctcgtgtcgtgagatgttgggttaagtcccgcaacgagcgcaacccttgtcattagttgctacgaaagggcactctaatgagactgccggtgacaaaccggaggaaggtggggatgacgtcaggtcctcatggcccttatgggtagggctacacacgtcatacaatggccggtacagagggctgccaacccgcgagggggagccaatcccagaaaaccggtcgtagtccggatcgcagtctgcaactcgactgcgtgaagtcggaatcgctagtaatcgcggatcagcttgccgcggtgaatacgttcccgggtcttgtacacaccgcccgtcacaccatgggagcgggttctgccagaagtagttagcctaaccgcaaggaggg

SEQ ID NO: 3149 - DNA, 1426 bp, Sphaerotilus natans
tgccttacacatgcaagtcgaacggtagaggggcaacccttgagagtggcgaacgggtgagtaatacatcggaacgtgcccagtcgtgggggataacgtagcgaaagctacgctaataccgcatacgacctgagggtgaaagcgggggatcgcaagacctcgcgcgattggagcggccgatggcagattaggtagttggtggggtaaaggcctaccaagcctgcgatctgtagctggtctgagaggacgaccagccacactgggactgagacacggcccagactcctacgggaggcagcagtggggaattttggacaatgggcgcaagcctgatccagccataccgcgtgcgggaagaaggccttcgggttgtaaaccgcttttgtcagggaagaaatcttctgggctaatacctcgggaggatgacggtacctgaagaataagcaccggctaactacgtgccagcagccgcggtaatacgtagggtgcaagcgttaatcggaattactgggcgtaaagcgtgcgcaggcggttccataagacagatgtgaaatccccgggctcaacctgggaactgcatttgtgactgtggagctagagtacggtagagggggatggaattccgcgtgtagcagtgaaatgcgtagatatgcggaggaacaccaatggcgaaggcaatcccctggacctgtactgacgctcatgcacgaaagcgtggggagcaaacaggattagataccctggtagtccacgccctaaacgatgtcaactggttgttgggagggtttcttctcagtaacgaagctaacgcgtgaagttgaccgcctggggagtacggccgcaaggttgaaactcaaaggaattgacggggacccgcacaagcggtggatgatgtggtttaattcgatgcaacgcgaaaaaccttacctacccttgacatggcaggaatcccgcagagatgtgggagtgctcgaaagagaacctgcacacaggtgctgcatggccgtcgtcagctcgtgtcgtgagatgttgggttaagtcccgcaacgagcgcaacccttgtcatcagttgctacgaaagggcactctgatgagactgccggtgacaaaccggaggaaggtggggatgacgtcaggtcctcatggcccttatgggtagggctacacacgtcatacaatggccggtacagagggctgccaacccgcgagggggagccaatcccagaaaaccggtcgtagtccggatcgtagtctgcaactcgactgcgtgaagtcggaatcgctagtaatcgcggatcagaatgtcgcggtgaatacgttcccgggtcttgtacacaccgcccgtcacaccatgggagcgggttctgccagaagtagttagcctaaccgcaaggagggcgattaccacggcagggttcgtgactgg

SEQ ID NO: 3150 - DNA, 1413 bp, Sphingobium algicola
aacgaacgctggcggcatgcctaatacatgcaagtcgaacgagaccttcgggtctagtggcgcacgggtgcgtaacgcgtgggaatctgcccttgggttcggaataacgtcgggaaactgacgctaataccggatgatgacgaaagtccaaagatttatcgcccagggatgagcccgcgtaggattagctagttggtgaggtaaaggctcaccaaggctacgatccttagctggtctgagaggatgatcagccacactgggactgagacacggcccagactcctacgggaggcagcagtagggaatattggacaatgggggcaaccctgatccagcaatgccgcgtgagtgatgaaggccttagggttgtaaagctcttttacccgagatgataatgacagtatcgggagaataagctccggctaactccgtgccagcagccgcggtaatacggagggagctagcgttgttcggaattactgggcgtaaagcgcacgtaggcggcgatttaagtcagaggtgaaagcccggggctcaaccccggaactgcctttgagactggattgcttgaatcctggagaggtgagtggaattccgagtgtagaggtgaaattcgtagatattcggaagaacaccagtggcgaaggcggctcactggacaggtattgacgctgaggtgcgaaagcgtggggagcaaacaggattagataccctggtagtccacgccgtaaacgatgataactagctgccggggcacatggtgtttcggtggcgcagctaacgcattaagttatccgcctggggagtacggtcgcaagattaaaactcaaaggaattgacgggggcctgcacaagcggtggagcatgtggtttaattcgaagcaacgcgcagaaccttaccaacgtttgacatccctatcgcggatcgtggagacactttccttcagttcggctggataggtgacaggtgctgcatggctgtcgtcagctcgtgtcgtgagatgttgggttaagtcccgcaacgagcgcaaccctcgcctttagttgccatcatttagttgggtactctaaaggaaccgccggtgataagccggaggaaggtggggatgacgtcaagtcctcatggcccttacgcgttgggctacacacgtgctacaatggcgactacagtgggcagccacctcgcgagagggagctaatctccaaaagtcgtctcagttcggatcgttctctgcaactcgagagcgtgaaggcggaatcgctagtaatcgcggatcagcatgccgcggtgaatacgttcccaggccttgtacacaccgcccgtcacaccatggggagttggattcactcggaaggccgttgagcttaaccgcaaggaggcaggcgaccacagtgggtttagcgactggggtg

SEQ ID NO: 3151 - DNA, 1411 bp, Sphingobium amiense
aacgaacgctggcggcatgcctaatacatgcaagtcgaacgagatcttcggatctagtggcgcacgggtgcgtaacgcgtgggaatctgcccttgggttcggaataacgtcgggaaactgacgctaataccggatgatgacgtaagtccaaagatttatcgcccagggatgagcccgcgtaggattagctagttggtggggtaaaggcctaccaaggcgacgatccttagctggtctgagaggatgatcagccacactgggactgagacacggcccagactcctacgggaggcagcagtagggaatattggacaatgggggcaaccctgatccagcaatgccgcgtgagtgatgaaggccttagggttgtaaagctcttttacccgggatgataatgacagtaccgggagaataagctccggctaactccgtgccagcagccgcggtaatacggagggagctagcgttgttcggaattactgggcgtaaagcgcacgtaggcggcgatttaagtcagaggtgaaagcccggggctcaaccccggaactgcctttgagactggattgcttgaatcctggagaggtgagtggaattccgagtgtagaggtgaaattcgtagatattcggaagaacaccagtggcgaaggcggctcactggacaggtattgacgctgaggtgcgaaagcgtggggagcaaacaggattagataccctggtagtccacgccgtaaacgatgataactagctgccggggcacatggtgtttcggtggcgcagctaacgcattaagttatccgcctggggagtacggtcgcaagattaaaactcaaaggaattgacgggggcctgcacaagcggtggagcatgtggtttaattcgaagcaacgcgcagaaccttaccaacgtttgacatccctatcgcggatcgtggagacactttccttcagttcggctggataggtgacaggtgctgcatggctgtcgtcagctcgtgtcgtgagatgttgggttaagtcccgcaacgagcgcaaccctcgcctttagttgccagcatttagttgggtactctaaaggaaccgccggtgataagccggaggaaggtggggatgacgtcaagtcctcatggcccttacgcgttgggctacacacgtgctacaatggcgactacagtgggcagcgacctcgcgaggggaagctaatctccaaaagtcgtctcagttcggattgttctctgcaactcgagagcatgaaggcggaatcgctagtaatcgcggatcagcatgccgcggtgaatacgttcccaggccttgtacacaccgcccgtcacaccatgggagttggattcactcgaaggcgttgagctaacccgcaagggaggcaggcgaccacagtgggtttagcgactggggtg

SEQ ID NO: 3152 - DNA, 1409 bp, Sphingobium baderi
aacgaacgctggcggcatgcctaatacatgcaagtcgaacgagatcttcggatctagtggcgcacgggtgcgtaacgcgtgggaatctgcccttgggttcggaataacagttggaaacgactgctaataccggatgatgacgtaagtccaaagatttatcgcccagggatgagcccgcgtaggattagctagttggtgaggtaaaggctcaccaaggcgacgatccttagctggtctgagaggatgatcagccacactgggactgagacacggcccagactcctacgggaggcagcagtagggaatattggacaatgggggcaaccctgatccagcaatgccgcgtgagtgatgaaggccttagggttgtaaagctcttttacccgggatgataatgacagtaccgggagaataagctccggctaactccgtgccagcagccgcggtaatacggagggagctagcgttgttcggaattactgggcgtaaagcgcacgtaggcggcgatttaagtcagaggtgaaagcccggggctcaaccccggaatagcctttgagactggattgcttgaatccgggagaggtgagtggaattccgagtgtagaggtgaaattcgtagatattcggaagaacaccagtggcgaaggcggctcactggaccggcattgacgctgaggtgcgaaagcgtggggagcaaacaggattagataccctggtagtccacgccgtaaacgatgataactagctgctggggcgcatggcgcttcggtggcgcagctaacgcattaagttatccgcctggggagtacggtcgcaagattaaaactcaaaggaattgacgggggcctgcacaagcggtggagcatgtggtttaattcgaagcaacgcgcagaaccttaccaacgtttgacatccctagtatggttagtggagacactttccttcagttcggctggctaggtgacaggtgctgcatggctgtcgtcagctcgtgtcgtgagatgttgggttaagtcccgcaacgagcgcaaccctcgcctttagttgccatcatttagttgggcactctaaaggaaccgccggtgataagccggaggaaggtggggatgacgtcaagtcctcatggcccttacgcgttgggctacacacgtgctacaatggcgactacagtgggcagcgaccgtgcgagcggaagctaatctccaaaagtcgtctcagttcggatcgttctctgcaactcgagagcgtgaaggcggaatcgctagtaatcgcggatcagcatgccgcggtgaatacgttcccaggccttgtacacaccgcccgtcacaccatgggagttggattcactcgaaggcgttgagctaaccgcaaggaggcaggcgaccacagtgggtttagcgactggggtg

SEQ ID NO: 3153 - DNA, 1409 bp, Sphingobium barthaii
aacgaacgctggcggcatgcctaatacatgcaagtcgaacgagcccttcggggttagtggcgcacgggtgcgtaacgcgtgggaatctgcccttgggttcggaataacgtctggaaacggacgctaataccggatgatgacgaaagtccaaagatttatcgcccagggatgagcccgcgtaggattagctagttggtgaggtaaaggctcaccaaggcgacgatccttagctggtctgagaggatgatcagccacactgggactgagacacggcccagactcctacgggaggcagcagtagggaatattggacaatgggggcaaccctgatccagcaatgccgcgtgagtgatgaaggccttagggttgtaaagctcttttacccgggatgataatgacagtaccgggagaataagccccggctaactccgtgccagcagccgcggtaatacggagggggctagcgttgttcggaattactgggcgtaaagcgcacgtaggcggcgatttaagtcagaggtgaaagcccggggctcaaccccggaatagcctttgagactggattgcttgaacatcggagaggtgagtggaattccgagtgtagaggtgaaattcgtagatattcggaagaacaccagtggcgaaggcggctcactggacgattgttgacgctgaggtgcgaaagcgtggggagcaaacaggattagataccctggtagtccacgccgtaaacgatgataactagctgctggggctcatggagtttcggtggcgcagctaacgcattaagttatccgcctggggagtacggtcgcaagattaaaactcaaaggaattgacgggggcctgcacaagcggtggagcatgtggtttaattcgaagcaacgcgcagaaccttaccaacgtttgacatcctcatcgcgatttccagagatggatttcttcagttcggctggatgagtgacaggtgctgcatggctgtcgtcagctcgtgtcgtgagatgttgggttaagtcccgcaacgagcgcaaccctcgcctttagttgccatcatttagttgggtactctaaaggaaccgccggtgataagccggaggaaggtggggatgacgtcaagtcctcatggcccttacgcgttgggctacacacgtgctacaatggcgactacagtgggcagcgaccatgcgagtggaagctaatctccaaaagtcgtctcagttcggattgttctctgcaactcgagagcatgaaggcggaatcgctagtaatcgcggatcagcatgccgcggtgaatacgttcccaggccttgtacacaccgcccgtcacaccatgggagttggtttcacccgaaggcagtgcgctaaccgcaaggaggcagctgaccacggtgggatcagcgactggggtg

SEQ ID NO: 3154 - DNA, 1410 bp, Sphingobium chinhatense
aacgaacgctggcggcatgcctaatacatgcaagtcgaacgatcccttcggggatagtggcgcacgggtgcgtaacgcgtgggaatctgcccttgggttcggaataacgtctggaaacggacgctaataccggatgatgtcgataagaccaaagatttatcgcccagggatgagcccgcgtaggattagctagttggtggggtaaaggctcaccaaggcgacgatccttagctggtctgagaggatgatcagccacactgggactgagacacggcccagactcctacgggaggcagcagtagggaatattggacaatgggggcaaccctgatccagcaatgccgcgtgagtgatgaaggccttagggttgtaaagctcttttacccgggatgataatgacagtaccgggagaataagccccggctaactccgtgccagcagccgcggtaatacggagggggctagcgttgttcggaattactgggcgtaaagcgcacgtaggcggcgatttaagtcaggggtgaaagcccggtgctcaacaccggaactgcccttgagactggattgcttgaatcacggagaggtgggtggaattccgagtgtagaggtgaaattcgtagatattcggaagaacaccagtggcgaaggcggcccactggacgtgtattgacgctgaggtgcgaaagcgtggggagcaaacaggattagataccctggtagtccacgccgtaaacgatgataactagctgctggggcgcatggcgtttcagtggcgcagctaacgcattaagttatccgcctggggagtacggtcgcaagattaaaactcaaaggaattgacgggggcctgcacaagcggtggagcatgtggtttaattcgaagcaacgcgcagaaccttaccaacgtttgacatccctatcgcggtttccagagatggataccttcagttcggctggataggtgacaggtgctgcatggctgtcgtcagctcgtgtcgtgagatgttgggttaagtcccgcaacgagcgcaaccctcgcctttagttgccatcatttagttgggtactctaaaggaaccgccggtgataagccggaggaaggtggggatgacgtcaagtcctcatggcccttacgcgttgggctacacacgtgctacaatggcgactacagtgggcagccactccgcgaggaggagctaatctccaaaagtcgtctcagttcggatcgttctctgcaactcgagagcgtgaaggcggaatcgctagtaatcgcggatcagcatgccgcggtgaatacgttcccaggccttgtacacaccgcccgtcacaccatgggagttggattcactcgaaggcgttgagctaaccgcaaggaggcaggcgaccacagtgggtttagcgactggggtg

SEQ ID NO: 3155 - DNA, 1409 bp, Sphingobium chlorophenolicum
aacgaacgctggcggcatgcctaatacatgcaagtcgaacgagaccttcgggtctagtggcgcacgggtgcgtaacgcgtgggaatctgcccttgggttcggaataacatcgggaaactgatgctaataccggatgatgacgtaagtccaaagatttatcgcccagggatgagcccgcgtaggattagctagttggtgaggtaaaggctcaccaaggcgacgatccttagctggtctgagaggatgatcagccacactgggactgagacacggcccagactcctacgggaggcagcagtagggaatattggacaatgggcgaaagcctgatccagcaatgccgcgtgagtgatgaaggccttagggttgtaaagctcttttacccgggatgataatgacagtaccgggagaataagccccggctaactccgtgccagcagccgcggtaatacggagggggctagcgttgttcggaattactgggcgtaaagcgcacgtaggcggcgatttaagtcaggggtgaaagcccggtgctcaacaccggaactgcccttgagactggattgcttgaatcacggagaggtgggtggaattccgagtgtagaggtgaaattcgtagatattcggaagaacaccagtggcgaaggcggcccactggacgtgtattgacgctgaggtgcgaaagcgtggggagcaaacaggattagataccctggtagtccacgccgtaaacgatgataactagctgctggggtgcatggcatttcagtggcgcagctaacgcattaagttatccgcctggggagtacggtcgcaagattaaaactcaaaggaattgacgggggcctgcacaagcggtggagcatgtggtttaattcgaagcaacgcgcagaaccttaccaacgtttgacatccctatcgcggttagtggagacactttccttcagttcggctggataggtgacaggtgctgcatggctgtcgtcagctcgtgtcgtgagatgttgggttaagtcccgcaacgagcgcaaccctcgcctttagttgccatcatttagttgggtactctaaaggaaccgccggtgataagccggaggaaggtggggatgacgtcaagtcctcatggcccttacgcgttgggctacacacgtgctacaatggcgactacagtgggcagccactccgcgaggaggagctaatctccaaaagtcgtctcagttcggatcgttctctgcaactcgagagcgtgaaggcggaatcgctagtaatcgcggatcagcatgccgcggtgaatacgttcccaggccttgtacacaccgcccgtcacaccatgggagttggattcactcgaaggcgttgagctaaccgcaaggaggcaggcgaccacagtgggtttagcgactggggtg

SEQ ID NO: 3156 - DNA, 1423 bp, Sphingobium chungbukense
aacgaacgctggcggcatgcctaatacatgcaagtcgaacgagaccttcgggtctagtggcgcacgggtgcgtaacgcgtgggaatctgcccttgggttcggaataacgtttggaaacgaacgctaataccggatgatgacgccaaagagatttggagtccaaagatttatcgcccaaggatgagcccgcgtaggattagctagttggtaaggtaaaggcttaccaaggcgacgatccttagctggtctgagaggatgatcagccacactgggactgagacacggcccagactcctacgggaggcagcagtagggaatattggacaatgggggcaaccctgatccagcaatgccgcgtgagtgatgaaggccttagggttgtaaagctcttttacccgggatgataatgacagtaccgggagaataagccccggctaactccgtgccagcagccgcggtaatacggagggggctagcgttgttcggaattactgggcgtaaagcgcacgtaggcggcgatttaagtcaggggtgaaagcccagtgctcaacactggaactgcccttgagactggattgcttgaatcacggagaggtgggtggaattccgagtgtagaggtgaaattcgtagatattcggaagaacaccagtggcgaaggcggcccactggacgtgtattgacgctgaggtgcgaaagcgtggggagcaaacaggattagataccctggtagtccacgccgtaaacgatgataactagctgctggggtgcatggcatttcagtggcgcagctaacgcattaagttatccgcctggggagtacggtcgcaagattaaaactcaaaggaattgacgggggcctgcacaagcggtggagcatgtggtttaattcgaagcaacgcgcagaaccttaccaacgtttgacatccctatcgcggttaccagagatggtttccttcagttcggctggataggtgacaggtgctgcatggctgtcgtcagctcgtgtcgtgagatgttgggttaagtcccgcaacgagcgcaaccctcgcctttagttgccatcatttagttgggtactctaaaggaaccgccggtgataagccggaggaaggtggggatgacgtcaagtcctcatggcccttacgcgttgggctacacacgtgctacaatggcgactacagtgggcagccactccgcgaggaggagctaatctccaaaagtcgtctcagttcggattgttctctgcaactcgagagcatgaaggcggaatcgctagtaatcgcggatcagcatgccgcggtgaatacgttcccaggccttgtacacaccgcccgtcacaccatgggagttggattcactcgaaggcgttgagctaacccgcaagggaggcaggcgaccacagtgggtttagcgactggggtg

SEQ ID NO: 3157 - DNA, 1409 bp, Sphingobium cloacae
aacgaacgctggcggcatgcctaatacatgcaagtcgaacgagatcttcggatctagtggcgcacgggtgcgtaacgcgtgggaatctgcccttgggttcggaataacatcgggaaactgatgctaataccggatgatgacgaaagtccaaagatttatcgcccagggatgagcccgcgtaggattagctagttggtggggtaaaggctcaccaaggcgacgatccttagctggtctgagaggatgatcagccacactgggactgagacacggcccagactcctacgggaggcagcagtagggaatattggacaatgggggcaaccctgatccagcaatgccgcgtgagtgatgaaggccttagggttgtaaagctcttttacccgggatgataatgacagtaccgggagaataagctccggctaactccgtgccagcagccgcggtaatacggagggagctagcgttgttcggaattactgggcgtaaagcgcacgtaggcggcgatttaagtcagaggtgaaagcccggggctcaaccccggaatagcctttgagactggattgcttgaatccgggagaggtgagtggaattccgagtgtagaggtgaaattcgtagatattcggaagaacaccagtggcgaaggcggctcactggaccggcattgacgctgaggtgcgaaagcgtggggagcaaacaggattagataccctggtagtccacgccgtaaacgatgataactagctgctggggctcatggagtttcggtggcgcagctaacgcattaagttatccgcctggggagtacggtcgcaagattaaaactcaaaggaattgacgggggcctgcacaagcggtggagcatgtggtttaattcgaagcaacgcgcagaaccttaccaacgtttgacatccctagtatggttaccagagatggtttccttcagttcggctggctaggtgacaggtgctgcatggctgtcgtcagctcgtgtcgtgagatgttgggttaagtcccgcaacgagcgcaaccctcgcctttagttgccatcatttagttgggtactctaaaggaaccgccggtgataagccggaggaaggtggggatgacgtcaagtcctcatggcccttacgcgttgggctgcacacgtgctacaatggcgactacagtgggcagcgacctcgcgaggggaagctaatctccaaaagtcgtctcagttcggattgttctctgcaactcgagagcatgaaggcggaatcgctagtaatcgcggatcagcatgccgcggtgaatacgttcccaggccttgtacacaccgcccgtcacaccatgggagttggattcactcgaaggcgttgagctaaccgcaaggaggcaggcgaccacagtgggtttagcgactggggtg

SEQ ID NO: 3158 - DNA, 1408 bp, Sphingobium cupriresistens
aacgaacgctggcggcatgcctaatacatgcaagtcgaacgagaccttcgggtctagtggcgcacgggtgcgtaacgcgtgggaatctgcccttgggttcggaataacgtcgggaactgacgctaataccggatgatatcgaaagatcaaagatttatcgcccagggatgagcccgcgtaggattagctagttggtggggtaaaggctcaccaaggctacgatccttagctggtctgagaggatgatcagccacactgggactgagacacggcccagactcctacgggaggcagcagtagggaatattggacaatgggggcaaccctgatccagcaatgccgcgtgagtgatgaaggccttagggttgtaaagctcttttacccgagatgataatgacagtatcgggagaataagctccggctaactccgtgccagcagccgcggtaatacggagggagctagcgttgttcggaattactgggcgtaaagcgcacgtaggcggcgatttaagtcagaggtgaaagcccggggcccaaccccggaactgcctttgagactggattgctagaatcttggagaggcgggtggaattccgagtgtagaggtgaaattcgtagatattcggaagaacaccagtggcgaaggcggcccgctggacaagtattgacgctgaggtgcgaaagcgtggggagcaaacaggattagataccctggtagtccacgccgtaaacgatgataactagctgccggggcacatggtgtttcggtggcgcagctaacgcattaagttatccgcctggggagtgcggtcgcaagattaaaactcaaaggaattgacgggggcctgcacaagcggtggagcatgtggtttaattcgaagcaacgcgcagaaccttaccagcgtttgacatcctcatcgcgatttccagagatggatatcttcagttcggcttgatgagtgacaggtgctgcatggctgtcgtcagctcgtgtcgtgagatgttgggttaagtcccgcaacgagcgcaaccctcgcctttagttgccagcatttggttgggtactctaaaggaaccgccggtgataagccggaggaaggtggggatgacgtcaagtcctcatggcccttacgcgctgggctacacacgtgctacaatggcgactacagtgggcagccactccgcgaggaggagctaatctccaaaagtcgtctcagttcggatcgttctctgcaactcgagagcgtgaaggcggaatcgctagtaatcgcggatcagcatgccgcggtgaatacgttcccaggccttgtacacaccgcccgtcacaccatgggagttggattcactcgaaggcgttgagctaaccgcaaggaggcaggcgaccacagtgggtttagcgactggggtg

SEQ ID NO: 3159 - DNA, 1409 bp, Sphingobium czechense
aacgaacgctggcggcatgcctaatacatgcaagtcgaacgagatcttcgggtctagtggcgcacgggtgcgtaacgcgtgggaatctgcccttgggttcggaataacgtcgggaaactgacgctaataccggatgatatcgaaagatcaaagatttatcgcccagggatgagcccgcgtaggattagctagttggtggggtaaaggctcaccaaggctacgatccttagctggtctgagaggatgatcagccacactgggactgagacacggcccagactcctacgggaggcagcagtagggaatattggacaatgggggcaaccctgatccagcaatgccgcgtgagtgatgaaggccttagggttgtaaagctcttttacccgagatgataatgacagtatcgggagaataagctccggctaactccgtgccagcagccgcggtaatacggagggagctagcgttgttcggaattactgggcgtaaagcgcacgtaggcggcgatttaagtcagaggtgaaagcccggggctcaaccccggaactgcctttgagactggattgctagaatcttggagaggcgggtggaattccgagtgtagaggtgaaattcgtagatattcggaagaacaccagtggcgaaggcggcccgctggacaagtattgacgctgaggtgcgaaagcgtggggagcaaacaggattagataccctggtagtccacgccgtaaacgatgataactagctgccggggcacatggtgtttcggtggcgcagctaacgcattaagttatccgcctggggagtacggtcgcaagattaaaactcaaaggaattgacgggggcctgcacaagcggtggagcatgtggtttaattcgaagcaacgcgcagaaccttaccagcgtttgacatcctcatcgcgatttccagagatggatatcttcagttcggctggatgagtgacaggtgctgcatggctgtcgtcagctcgtgtcgtgagatgttgggttaagtcccgcaacgagcgcaaccctcgcctttagttgccagcatttggttgggtactctaaaggaaccgccggtgataagccggaggaaggtggggatgacgtcaagtcctcatggcccttacgcgctgggctacacacgtgctacaatggcgactacagtgggcagccactccgcgaggaggagctaatctccaaaagtcgtctcagttcggatcgttctctgcaactcgagagcgtgaaggcggaatcgctagtaatcgcggatcagcatgccgcggtgaatacgttcccaggccttgtacacaccgcccgtcacaccatgggagttggattcactcgaaggcgttgagctaaccgcaaggaggcaggcgaccacagtgggtttagcgactggggtg

SEQ ID NO: 3160 - DNA, 1409 bp, Sphingobium faniae
aacgaacgctggcggcatgcctaatacatgcaagtcgaacgagatcttcggatctagtggcgcacgggtgcgtaacgcgtgggaatctgcccttgggttcggaataacagttggaaacgactgctaataccggatgatgacgtaagtccaaagatttatcgcccagggatgagcccgcgtaggattagcttgttggtgaggtaaaggctcaccaaggcgacgatccttagctggtctgagaggatgatcagccacactgggactgagacacggcccagactcctacgggaggcagcagtagggaatattggacaatgggcgcaagcctgatccagcaatgccgcgtgagtgatgaaggccttagggttgtaaagctcttttacccgggatgataatgacagtaccgggagaataagctccggctaactccgtgccagcagccgcggtaatacggagggagctagcgttgttcggaattactgggcgtaaagcgcacgtaggcggcgatctaagtcaggggtgaaagcccggggctcaaccccggaatagcctttgagactggattgcttgaatccgggagaggtgagtggaattccgagtgtagaggtgaaattcgtagatattcggaagaacaccagtggcgaaggcggctcactggaccggcattgacgctgaggtgcgaaagcgtggggagcaaacaggattagataccctggtagtccacgccgtaaacgatgataactagctgctggggcgcatggcgcttcggtggcgcagctaacgcattaagttatccgcctggggagtacggtcgcaagattaaaactcaaaggaattgacgggggcctgcacaagcggtggagcatgtggtttaattcgaagcaacgcgcagaaccttaccaacgtttgacatccctagtatggtttccagagatggattccttcagttcggctggctaggtgacaggtgctgcatggctgtcgtcagctcgtgtcgtgagatgttgggttaagtcccgcaacgagcgcaaccctcgcctttagttgccatcattcagttgggtactctaaaggaaccgccggtgataagccggaggaaggtggggatgacgtcaagtcctcatggcccttacgcgttgggctacacacgtgctacaatggcgactacagtgggcagcgacaccgcgaggtgaagctaatctccaaaagtcgtctcagttcggattgttctctgcaactcgagagcatgaaggcggaatcgctagtaatcgcggatcagcatgccgcggtgaatacgttcccaggccttgtacacaccgcccgtcacaccatgggagttggattcactcgaaggcgttgagctaaccgcaaggaggcaggcgaccacagtgggtttagcgactggggtg

SEQ ID NO: 3161 - DNA, 1409 bp, Sphingobium francense
aacgaacgctggcggcatgcctaatacatgcaagttgaacgagaccttcgggtttagtggcgcacgggtgcgtaacgcgtgggaatctgcccttgggttcggaataacgtctggaaacggacgctaataccggatgatgtcgtaagaccaaagatttatcgcccagggatgagcccgcgtaggattagctagttggtggggtaaaggctcaccaaggcgacgatccttagctggtctgagaggatgatcagccacactgggactgagacacggcccaaactcctacgggaggcagcagtagggaatattggacaatgggggcaaccctgatccagcaatgccgcgtgagtgatgaaggccttagggttgtaaagctcttttacccgggatgataatgacagtaccgggagaataagccccggctaactccgtgccagcagccgcggtaatacggagggggctagcgttgttcggaattactgggcgtaaagcgcacgtaggcggcgatttaagtcaggggtgaaagcccggtgctcaacaccggaactgcccttgagactggattgcttgaatcacggagaggtgggtggaattccgagtgtagaggtgaaattcgtagatattcggaagaacaccagtggcgaaggcggcccactggacgtgtattgacgctgaggtgcgaaagcgtggggagcaaacaggattagataccctggtagtccacgccgtaaacgatgataactagctgctggggcgcatggcgtttcagtggcgcagctaacgcattaagttatccgcctggggagtacggtcgcaagattaaaactcaaaggaattgacgggggcctgcacaagcggtggagcatgtggtttaattcgaagcaacgcgcagaaccttaccaacgtttgacatccctatcgcggtttccagagatggataccttcagttcggctggataggtgacaggtgctgcatggctgtcgtcagctcgtgtcgtgagatgttgggttaagtcccgcaacgagcgcaaccctcgcctttagttgccatcatttagttgggtactctaaaggaaccgccggtgataagccggaggaaggtggggatgacgtcaagtcctcatggcccttacgcgttgggctacacacgtgctacaatggcgactacagtgggcagccactccgcgaggaggagctaatctccaaaagtcgtctcagttcggatcgttctctgcaactcgagagcgtgaaggcggaatcgctagtaatcgcggatcagcatgccgcggtgaatacgttcccaggccttgtacacaccgcccgtcacaccatgggagttggattcactcgaaggcgttgagctaaccgcaaggaggcaggcgaccacagtgggtttagcgactggggtg

SEQ ID NO: 3162 - DNA, 1409 bp, Sphingobium fuliginis
aacgaacgctggcggcatgcctaatacatgcaagtcgaacgagcctttcggggctagtggcgcacgggtgcgtaacgcgtgggaatctgcccttgggttcggaataacgtctggaaacggacgctaataccggatgatgacgaaagtccaaagatttatcgcccagggatgagcccgcgtaggattagctagttggtgaggtaaaggctcaccaaggcgacgatccttagctggtctgagaggatgatcagccacactgggactgagacacggcccagactcctacgggaggcagcagtagggaatattggacaatgggggcaaccctgatccagcaatgccgcgtgagtgatgaaggccttagggttgtaaagctcttttacccgggatgataatgacagtaccgggagaataagccccggctaactccgtgccagcagccgcggtaatacggagggggctagcgttgttcggaattactgggcgtaaagcgcacgtaggcggcgatttaagtcagaggtgaaagcccggggctcaaccccggaatagcctttgagactggattgcttgaacatcggagaggtgagtggaattccgagtgtagaggtgaaattcgtagatattcggaagaacaccagtggcgaaggcggctcactggacgattgttgacgctgaggtgcgaaagcgtggggagcaaacaggattagataccctggtagtccacgccgtaaacgatgataactagctgctggggctcatggagtttcggtggcgcagctaacgcattaagttatccgcctggggagtacggtcgcaagattaaaactcaaaggaattgacgggggcctgcacaagcggtggagcatgtggtttaattcgaagcaacgcgcagaaccttaccaacgtttgacatcctcatcgcgatttccagagatggatttcttcagttcggctggatgagtgacaggtgctgcatggctgtcgtcagctcgtgtcgtgagatgttgggttaagtcccgcaacgagcgcaaccctcgcctttagttgccatcatttagttgggtactctaaaggaaccgccggtgataagccggaggaaggtggggatgacgtcaagtcctcatggcccttacgcgttgggctacacacgtgctacaatggcgactacagtgggcagcgaccatgcgagtggaagctaatctccaaaagtcgtctcagttcggattgttctctgcaactcgagagcatgaaggcggaatcgctagtaatcgcggatcagcatgccgcggtgaatacgttcccaggccttgtacacaccgcccgtcacaccatgggagttggtttcacccgaaggcagtgcgctaaccgcaaggaggcagctgaccacggtgggatcagcgactggggtg

SEQ ID NO: 3163 - DNA, 1411 bp, Sphingobium herbicidovorans
aacgaacgctggcggcatgcctaacacatgcaagtcgaacgagatcttcggatctagtggcgcacgggtgcgtaacgcgtgggaatctgcccttgggttcggaataacagtgagaaattactgctaataccggatgatgtcttcggaccaaagatttatcgcccagggatgagcccgcgtaggattaggtagttggtggggtaatggcctaccaagccgacgatccttagctggtctgagaggatgatcagccacactgggactgagacacggcccagactcctacgggaggcagcagtggggaatattggacaatgggcgaaagcctgatccagcaatgccgcgtgagtgatgaaggccttagggttgtaaagctcttttaccagggatgataatgacagtacctggagaataagctccggctaactccgtgccagcagccgcggtaatacggagggagctagcgttgttcggaattactgggcgtaaagcgcgcgtaggcggttactcaagtcagaggtgaaagcccggggctcaaccccggaactgcctttgaaactaggtgactagaatcttggagaggtcagtggaattccgagtgtagaggtgaaattcgtagatattcggaagaacaccagtggcgaaggcgactgactggacaagtattgacgctgaggtgcgaaagcgtggggagcaaacaggattagataccctggtagtccacgccgtaaacgatgataactagctgtccgggtacttggtacttgggtggcgcagctaacgcattaagttatccgcctggggagtacggtcgcaagattaaaactcaaaggaattgacgggggcctgcacaagcggtggagcatgtggtttaattcgaagcaacgcgcagaaccttaccagcgtttgacatgccggtcgcggatttgggagaccatttccttcagttcggctggaccgtgcacaggtgctgcatggctgtcgtcagctcgtgtcgtgagatgttgggttaagtcccgcaacgagcgcaaccctcgtccttagttgccagcatttggttgggcactctaaggaaactgccggtgataagccggaggaaggtggggatgacgtcaagtcctcatggcccttacacgctgggctacacacgtgctacaatggcggtgacagtgggcagcaagcacgcgagtgtgagctaatctccaaaagccgtctcagttcggattgttctctgcaactcgagagcatgaaggcggaatcgctagtaatcgcggatcagcatgccgcggtgaatacgttcccaggccttgtacacaccgcccgtcacaccatgggagttggattcactcgaaggcgttgagctaacccgcaagggaggcaggcgaccacagtgggtttagcgactggggtg

SEQ ID NO: 3164 - DNA, 1411 bp, Sphingobium hydrophobicum
aacgaacgctggcggcatgcctaatacatgcaagtcgaacgagaccttcgggtctagtggcgcacgggtgcgtaacgcgtgggaatctgcccttgggttcggaataacttcgggaaactgaagctaataccggatgatgacgaaagtccaaagatttatcgcccagggatgagcccgcgtaggattagctagttggtggggtaaaggctcaccaaggcaacgatccttagctggtctgagaggatgatcagccacactgggactgagacacggcccagactcctacgggaggcagcagtagggaatattggacaatgggcgaaagcctgatccagcaatgccgcgtgagtgatgaaggccttagggttgtaaagctcttttacccgagatgataatgacagtatcgggagaataagctccggctaactccgtgccagcagccgcggtaatacggagggagctagcgttgttcggaattactgggcgtaaagcgcacgtaggcggcgatttaagtcagaggtgaaagcccggggctcaaccccggaactgcctttgagactggattgctagaatcttggagaggcgagtggaattccgagtgtagaggtgaaattcgtagatattcggaagaacaccagtggcgaaggcggctcgctggacaagtattgacgctgaggtgcgaaagcgtggggagcaaacaggattagataccctggtagtccacgccgtaaacgatgataactagctgccggggcacatggtgtttcggtggcgcagctaacgcattaagttatccgcctggggagtacggtcgcaagattaaaactcaaaggaattgacgggggcctgcacaagcggtggagcatgtggtttaattcgaagcaacgcgcagaaccttaccagcgtttgacatcctcatcgcggatttcagagatgatttccttcagttcggctggatgagtgacaggtgctgcatggctgtcgtcagctcgtgtcgtgagatgttgggttaagtcccgcaacgagcgcaaccctcgcctttagttgccagcatttagttgggtactctaaaggaaccgccggtgataagccggaggaaggtggggatgacgtcaagtcctcatggcccttacgcgctgggctacacacgtgctacaatggcgactacagtgggctgcaaccgtgcgagcggtagctaatctccaaaagtcgtctcagttcggattgttctctgcaactcgagagcatgaaggcggaatcgctagtaatcgcggatcagcatgccgcggtgaatacgttcccaggccttgtacacaccgcccgtcacaccatgggatttggattcacccgaaggcactgcgttaacccgcaagggagacaggtgaccacggtgggtttagagactggggtg

SEQ ID NO: 3165 - DNA, 1410 bp, Sphingobium indicum
aacgaacgctggcggcatgcctaatacatgcaagtcgaacgagaccttcgggtctagtggcgcacgggtgcgtaacgcgtgggaatctgcccttgggttcggaataacgtctggaaacggacgctaataccggatgatgtcgataagaccaaagatttatcgcccagggatgagcccgcgtaggattagctagttggtggggtaaaggctcaccaaggcgacgatccttagctggtctgagaggatgatcagccacactgggactgagacacggcccagactcctacgggaggcagcagtagggaatattggacaatgggggcaaccctgatccagcaatgccgcgtgagtgatgaaggccttagggttgtaaagctcttttacccgggatgataatgacagtaccgggagaataagccccggctaactccgtgccagcagccgcggtaatacggagggggctagcgttgttcggaattactgggcgtaaagcgcacgtaggcggcgatttaagtcaggggtgaaagcccggtgctcaacaccggaactgcccttgagactggattgcttgaatcacggagaggtgggtggaattccgagtgtagaggtgaaattcgtagatattcggaagaacaccagtggcgaaggcggcccactggacgtgtattgacgctgaggtgcgaaagcgtggggagcaaacaggattagataccctggtagtccacgccgtaaacgatgataactagctgctggggcgcatggcgtttcagtggcgcagctaacgcattaagttatccgcctggggagtacggtcgcaagattaaaactcaaaggaattgacgggggcctgcacaagcggtggagcatgtggtttaattcgaagcaacgcgcagaaccttaccaacgtttgacatccctatcgcggtttccagagatggataccttcagttcggctggataggtgacaggtgctgcatggctgtcgtcagctcgtgtcgtgagatgttgggttaagtcccgcaacgagcgcaaccctcgcctttagttgccatcatttagttgggtactctaaaggaaccgccggtgataagccggaggaaggtggggatgacgtcaagtcctcatggcccttacgcgttgggctacacacgtgctacaatggcgactacagtgggcagccactccgcgaggaggagctaatctccaaaagtcgtctcagttcggatcgttctctgcaactcgagagcgtgaaggcggaatcgctagtaatcgcggatcagcatgccgcggtgaatacgttcccaggccttgtacacaccgcccgtcacaccatgggagttggattcactcgaaggcgttgagctaaccgcaaggaggcaggcgaccacagtgggtttagcgactggggtg

SEQ ID NO: 3166 - DNA, 1409 bp, Sphingobium japonicum
aacgaacgctggcggcatgcctaatacatgcaagtcgaacgagaccttcgggtctagtggcgcacgggtgcgtaacgcgtgggaatctgcccttgggttcggaataacgtctggaaacggacgctaataccggatgatgacgtaagtccaaagatttatcgcccagggatgagcccgcgtaggattagctagttggtgaggtaaaggctcaccaaggcgacgatccttagctggtctgagaggatgatcagccacactgggactgagacacggcccagactcctacgggaggcagcagtagggaatattggacaatgggggcaaccctgatccagcaatgccgcgtgagtgatgaaggccttagggttgtaaagctcttttacccgggatgataatgacagtaccgggagaataagccccggctaactccgtgccagcagccgcggtaatacggagggggctagcgttgttcggaattactgggcgtaaagcgcacgtaggcggcgatttaagtcaggggtgaaagcccggtgctcaacaccggaactgcccttgagactggattgcttgaatcacggagaggtgggtggaattccgagtgtagaggtgaaattcgtagatattcggaagaacaccagtggcgaaggcggcccactggacgtgtattgacgctgaggtgcgaaagcgtggggagcaaacaggattagataccctggtagtccacgccgtaaacgatgataactagctgctggggcgcatggcgtttcagtggcgcagctaacgcattaagttatccgcctggggagtacggtcgcaagattaaaactcaaaggaattgacgggggcctgcacaagcggtggagcatgtggtttaattcgaagcaacgcgcagaaccttaccaacgtttgacatccctatcgcggtttccagagatggataccttcagttcggctggataggtgacaggtgctgcatggctgtcgtcagctcgtgtcgtgagatgttgggttaagtcccgcaacgagcgcaaccctcgcctttagttgccatcatttagttgggtactctaaaggaaccgccggtgataagccggaggaaggtggggatgacgtcaagtcctcatggcccttacgcgttgggctacacacgtgctacaatggcgactacagtgggcagccactccgcgaggaggagctaatctccaaaagtcgtctcagttcggatcgttctctgcaactcgagagcgtgaaggcggaatcgctagtaatcgcggatcagcatgccgcggtgaatacgttcccaggccttgtacacaccgcccgtcacaccatgggagttggattcactcgaaggcgttgagctaaccgcaaggaggcaggcgaccacagtgggtttagcgactggggtg

SEQ ID NO: 3167 - DNA, 1422 bp, Sphingobium lactosutens
aacgaacgctggcggcatgcctaatacatgcaagtcgaacgagatcttcggatctagtggcgcacgggtgcgtaacgcgtgggaatctgcccttgggttcggaataacagttggaaacgactgctaataccggatgatgacgccaaagagatttggagtccaaagatttatcgcccagggatgagcccgcgtaggattagctagttggtggggtaaaggcctaccaaggcgacgatccttagctggtctgagaggatgatcagccacactgggactgagacacggcccagactcctacgggaggcagcagtagggaatattggacaatgggggcaaccctgatccagcaatgccgcgtgagtgatgaaggccttagggttgtaaagctcttttaccagagatgataatgacagtatctggggaataagccccggctaactccgtgccagcagccgcggtaatacggagggggctagcgttgttcggaattactgggcgtaaagcgcacgtaggcggcgatttaagtcagaggtgaaagcccggggctcaaccccggaactgcctttgagactggattgcttgaatccgggagaggtgagtggaattccgagtgtagaggtgaaattcgtagatattcggaagaacaccagtggcgaaggcggctcactggaccggcattgacgctgaggtgcgaaagcgtggggagcaaacaggattagataccctggtagtccacgccgtaaacgatgataactagctgccggggcacatggtgtttcggtggcgcagctaacgcattaagttatccgcctggggagtacggtcgcaagattaaaactcaaaggaattgacgggggcctgcacaagcggtggagcatgtggtttaattcgaagcaacgcgcagaaccttaccagcgtttgacatcctcatcgcgatttccagagatggatttcttcagttcggctggatgagtgacaggtgctgcatggctgtcgtcagctcgtgtcgtgagatgttgggttaagtcccgcaacgagcgcaaccctcgcctttagttgccagcaagcaagttgggtactctaaaggaaccgccggtgataagccggaggaaggtggggatgacgtcaagtcctcatggcccttacgcgctgggctacacacgtgctacaatggcgactacagtgggcagcgacctcgcgagggggagctaatctccaaaagtcgtctcagttcggatcgttctctgcaactcgagagcgtgaaggcggaatcgctagtaatcgcggatcagcatgccgcggtgaatacgttcccaggccttgtacacaccgcccgtcacaccatgggagttggattcactcgaaggcgttgagctaaccgcaaggaggcaggcgaccacagtgggtttagcgactggggtg

SEQ ID NO: 3168 - DNA, 1409 bp, Sphingobium limneticum
aacgaacgctggcggcatgcctaatacatgcaagtcgaacgagaccttcgggtctagtggcgcacgggtgcgtaacgcgtgggaatctgcccttgggttcggaataacgtcgggaaactgacgctaataccggatgatgacgaaagtccaaagatttatcgcccagggatgagcccgcgtaggattagctagttggtgaggtaaaggctcaccaaggctacgatccttagctggtctgagaggatgatcagccacactgggactgagacacggcccagactcctacgggaggcagcagtagggaatattggacaatgggggcaaccctgatccagcaatgccgcgtgagtgatgaaggccttagggttgtaaagctcttttacccgagatgataatgacagtatcgggagaataagctccggctaactccgtgccagcagccgcggtaatacggagggagctagcgttgttcggaattactgggcgtaaagcgcacgtaggcggcgatttaagtcagaggtgaaagcccggggctcaaccccggaactgcctttgagactggattgcttgaatcctggagaggtgagtggaattccgagtgtagaggtgaaattcgtagatattcggaagaacaccagtggcgaaggcggctcactggacaggtattgacgctgaggtgcgaaagcgtggggagcaaacaggattagataccctggtagtccacgccgtaaacgatgataactagctgccggggcacatggtgtttcggtggcgcagctaacgcattaagttatccgcctggggagtacggtcgcaagattaaaactcaaaggaattgacgggggcctgcacaagcggtggagcatgtggtttaattcgaagcaacgcgcagaaccttaccaacgtttgacatccctatcgcggatcgtggagacactttccctcagttcggctggataggtgacaggtgctgcatggctgtcgtcagctcgtgtcgtgagatgttgggttaagtcccgcaacgagcgcaaccctcgcctttagttgccatcatttagttgggtactctaaaggaaccgccggtgataagccggaggaaggtggggatgacgtcaagtcctcatggcccttacgcgttgggctacacacgtgctacaatggcgactacagtgggcagccacctcgcgagagggagctaatctccaaaagtcgtctcagttcggatcgttctctgcaactcgagagcgtgaaggcggaatcgctagtaatcgcggatcagcatgccgcggtgaatacgttcccaggccttgtacacaccgcccgtcacaccatgggagttggattcactcgaaggcgttgagctaaccgcaaggaggcaggcgaccacagtgggtttagcgactggggtg

SEQ ID NO: 3169 - DNA, 1409 bp, Sphingobium paulinellae
aacgaacgctggcggcatgcctaatacatgcaagtcgaacgagaccttcgggtctagtggcgcacgggtgcgtaacgcgtgggaatctgcccttgggttcggaataacgtcgggaaactgacgctaataccggatgatgacgaaagtccaaagatttatcgcccagggatgagcccgcgtaggattagctagttggtgaggtaaaggctcaccaaggctacgatccttagctggtctgagaggatgatcagccacactgggactgagacacggcccagactcctacgggaggcagcagtagggaatattggacaatgggggcaaccctgatccagcaatgccgcgtgagtgatgaaggccttagggttgtaaagctcttttacccgagatgataatgacagtatcgggagaataagctccggctaactccgtgccagcagccgcggtaatacggagggagctagcgttgttcggaattactgggcgtaaagcgcacgtaggcggcgatttaagtcagaggtgaaagcccggggctcaaccccggaactgcctttgagactggattgcttgaatcctggagaggtgagtggaattccgagtgtagaggtgaaattcgtagatattcggaagaacaccagtggcgaaggcggctcactggacaggtattgacgctgaggtgcgaaagcgtggggagcaaacaggattagataccctggtagtccacgccgtaaacgatgataactagctgccggggcacatggtgtttcggtggcgcagctaacgcattaagttatccgcctggggagtacggtcgcaagattaaaactcaaaggaattgacgggggcctgcacaagcggtggagcatgtggtttaattcgaagcaacgcgcagaaccttaccaacgtttgacatccctatcgcggatcgtggagacactttccttcagttcggctggataggtgacaggtgctgcatggctgtcgtcagctcgtgtcgtgagatgttgggttaagtcccgcaacgagcgcaaccctcgcctttagttgccatcatttagttgggtactctaaaggaaccgccggtgataagccggaggaaggtggggatgacgtcaagtcctcatggcccttacgcgttgggctacacacgtgctacaatggcgactacagtgggcagccacctcgcgagagggagctaatctccaaaagtcgtctcagttcggatcgttctctgcaactcgagagcgtgaaggcggaatcgctagtaatcgcggatcagcatgccgcggtgaatacgttcccaggccttgtacacaccgcccgtcacaccatgggagttggattcactcgaaggcgttgagctaaccgcaaggaggcaggcgaccacagtgggtttagcgactggggtg

SEQ ID NO: 3170 - DNA, 1411 bp, Sphingobium quisquiliarum
aacgaacgctggcggcatgcctaatacatgcaagtcgaacgatctcttcggagatagtggcgcacgggtgcgtaacgcgtgggaatctgcccttgggttcggaataacgtcgggaaactgacgctaataccggatgatgacgtaagtccaaagatttatcgcccagggatgagcccgcgtaggattagctagttggttgggtaaaggctgaccaaggcgacgatccttagctggtctgagaggatgatcagccacactgggactgagacacggcccagactcctacgggaggcagcagtagggaatattggacaatgggggcaaccctgatccagcaatgccgcgtgagtgatgaaggccttagggttgtaaagctcttttacccgggatgataatgacagtaccgggagaataagccccggctaactccgtgccagcagccgcggtaatacggagggggctagcgttgttcggaattactgggcgtaaagcgcacgtaggcggcgatttaagtcagaggtgaaagcccggggctcaaccccggaatagcctttgagactggattgcttgaacatcggagaggtgagtggaattccgagtgtagaggtgaaattcgtagatattcggaagaacaccagtggcgaaggcggctcactggacgattgttgacgctgaggtgcgaaagcgtggggagcaaacaggattagataccctggtagtccacgccgtaaacgatgataactagctgctggggtgcatggcatttcagtggcgcagctaacgcattaagttatccgcctggggagtacggtcgcaagattaaaactcaaaggaattgacgggggcctgcacaagcggtggagcatgtggtttaattcgaagcaacgcgcagaaccttaccaacgtttgacatccctatcgcggttagtggagacactttccttcagttcggctggataggtgacaggtgctgcatggctgtcgtcagctcgtgtcgtgagatgttgggttaagtcccgcaacgagcgcaaccctcgcctttagttgccatcatttagttgggtactctaaaggaaccgccggtgataagccggaggaaggtggggatgacgtcaagtcctcatggcccttacgcgttgggctacacacgtgctacaatggcgactacagtgggcagcgaccatgcgagtggaagctaatctccaaaagtcgtctcagttcggattgttctctgcaactcgagagcatgaaggcggaatcgctagtaatcgcggatcagcatgccgcggtgaatacgttcccaggccttgtacacaccgcccgtcacaccatgggagttggattcactcgaaggcgttgagctaacccgcaagggaggcaggcgaccacagtgggtttagcgactggggtg

SEQ ID NO: 3171 - DNA, 1411 bp, Sphingobium ummariense
aacgaacgctggcggcatgcctaatacatgcaagtcgaacgaaggcttcggccttagtggcgcacgggtgcgtaacgcgtgggaatctgcccttgggttcggaataacgtctggaaacggacgctaataccggatgatgacgtaagtccaaagatttatcgcccagggatgagcccgcgtaggattagctagttggtgaggtaaaggctcaccaaggcgacgatccttagctggtctgagaggatgatcagccacactgggactgagacacggcccagactcctacgggaggcagcagtagggaatattggacaatgggcgaaagcctgatccagcaatgccgcgtgagtgatgaaggccttagggttgtaaagctcttttacccgggatgataatgacagtaccgggagaataagccccggctaactccgtgccagcagccgcggtaatacggagggggctagcgttgttcggaattactgggcgtaaagcgcacgtaggcggcgatttaagtcagaggtgaaagcccggggctcaaccccggaatagcctttgagactggattgcttgaatccgggagaggtgagtggaattccgagtgtagaggtgaaattcgtagatattcggaagaacaccagtggcgaaggcggctcactggaccggcattgacgctgaggtgcgaaagcgtggggagcaaacaggattagataccctggtagtccacgccgtaaacgatgataactagctgctggggctcatggagtttcagtggcgcagctaacgcattaagttatccgcctggggagtacggtcgcaagattaaaactcaaaggaattgacgggggcctgcacaagcggtggagcatgtggtttaattcgaagcaacgcgcagaaccttaccaacgtttgacatccctagtatggttaccagagatggtttccttcagttcggctggctaggtgacaggtgctgcatggctgtcgtcagctcgtgtcgtgagatgttgggttaagtcccgcaacgagcgcaaccctcgcctttagttgccatcattcagttgggtactctaaaggaaccgccggtgataagccggaggaaggtggggatgacgtcaagtcctcatggcccttacgcgttgggctacacacgtgctacaatggcgactacagtgggcagctatctcgcgagagtgcgctaatctccaaaagtcgtctcagttcggatcgttctctgcaactcgagagcgtgaaggcggaatcgctagtaatcgcggatcagcatgccgcggtgaatacgttcccaggccttgtacacaccgcccgtcacaccatgggagttggtttcacccgaaggcgctgcgctaactcgcaagagaggcaggcgaccacggtgggatcagcgactggggtg

SEQ ID NO: 3172 - DNA, 1409 bp, Sphingobium wenxiniae
aacgaacgctggcggcatgcctaatacatgcaagtcgaacgagatcttcggatctagtggcgcacgggtgcgtaacgcgtgggaatctgcccttgggttcggaataacagttggaaacgactgctaataccggatgatgacgaaagtccaaagatttatcgcccagggatgagcccgcgtaggattagctagttggtgaggtaaaggctcaccaaggcgacgatccttagctggtctgagaggatgatcagccacactgggactgagacacggcccagactcctacgggaggcagcagtagggaatattggacaatgggggcaaccctgatccagcaatgccgcgtgagtgatgaaggccttagggttgtaaagctcttttacccgggatgataatgacagtaccgggagaataagctccggctaactccgtgccagcagccgcggtaatacggagggagctagcgttgttcggaattactgggcgtaaagcgcacgtaggcggcgatttaagtcagaggtgaaagcccggggctcaaccccggaatagcctttgagactggattgcttgaatccgggagaggtgagtggaattccgagtgtagaggtgaaattcgtagatattcggaagaacaccagtggcgaaggcggctcactggaccggcattgacgctgaggtgcgaaagcgtggggagcaaacaggattagataccctggtagtccacgccgtaaacgatgataactagctgctggggcgcatggcgcttcggtggcgcagctaacgcattaagttatccgcctggggagtacggtcgcaagattaaaactcaaaggaattgacgggggcctgcacaagcggtggagcatgtggtttaattcgaagcaacgcgcagaaccttaccaacgtttgacatccctagtatggttttcagagatggattccttcagttcggctggctaggtgacaggtgctgcatggctgtcgtcagctcgtgtcgtgagatgttgggttaagtcccgcaacgagcgcaaccctcgcctttagttgccatcatttagttgggcactctaaaggaaccgccggtgataagccggaggaaggtggggatgacgtcaagtcctcatggcccttacgcgttgggctacacacgtgctacaatggcgactacagtgggcagcgaccgtgcgagcggaagctaatctccaaaagtcgtctcagttcggatcgttctctgcaattcgagagcgtgaaggcggaatcgctagtaatcgcggatcagcatgccgcggtgaatacgttcccaggccttgtacacaccgcccgtcacaccatgggagttggattcactcgaaggcgttgagctaaccgcaaggaggcaggcgaccacagtgggtttagcgactggggtg

SEQ ID NO: 3173 - DNA, 1411 bp, Sphingobium xenophagum
aacgaacgctggcggcatgcctaatacatgcaagtcgaacgagaccttcgggtctagtggcgcacgggtgcgtaacgcgtgggaatctgcccttgggttcggaataacttcgggaaactgaagctaataccggatgatgacgaaagtccaaagatttatcgcccagggatgagcccgcgtaggattagctagttggtggggtaaaggctcaccaaggcaacgatccttagctggtctgagaggatgatcagccacactgggactgagacacggcccagactcctacgggaggcagcagtagggaatattggacaatgggcgaaagcctgatccagcaatgccgcgtgagtgatgaaggccttagggttgtaaagctcttttacccgagatgataatgacagtatcgggagaataagctccggctaactccgtgccagcagccgcggtaatacggagggagctagcgttgttcggaattactgggcgtaaagcgcacgtaggcggcgatttaagtcagaggtgaaagcccggggctcaaccccggaactgcctttgagactggattgctagaatcttggagaggcgagtggaattccgagtgtagaggtgaaattcgtagatattcggaagaacaccagtggcgaaggcggctcgctggacaagtattgacgctgaggtgcgaaagcgtggggagcaaacaggattagataccctggtagtccacgccgtaaacgatgataactagctgccggggcacatggtgtttcggtggcgcagctaacgcattaagttatccgcctggggagtacggtcgcaagattaaaactcaaaggaattgacgggggcctgcacaagcggtggagcatgtggtttaattcgaagcaacgcgcagaaccttaccagcgtttgacatcctcatcgcggatttcagagatgatttccttcagttcggctggatgagtgacaggtgctgcatggctgtcgtcagctcgtgtcgtgagatgttgggttaagtcccgcaacgagcgcaaccctcgcctttagttgccagcatttggttgggtactctaaaggaaccgccggtgataagccggaggaaggtggggatgacgtcaagtcctcatggcccttacgcgctgggctacacacgtgctacaatggcgactacagtgggctgcaaccgtgcgagcggtagctaatctccaaaagtcgtctcagttcggattgttctctgcaactcgagagcatgaaggcggaatcgctagtaatcgcggatcagcatgccgcggtgaatacgttcccaggccttgtacacaccgcccgtcacaccatgggatttggattcacccgaaggcactgcgttaacccgcaagggagacaggtgaccacggtgggtttagagactggggtg

SEQ ID NO: 3174 - DNA, 1409 bp, Sphingobium yanoikuyae
aacgaacgctggcggcatgcctaatacatgcaagtcgaacgagatcttcggatctagtggcgcacgggtgcgtaacgcgtgggaatctgcccttgggttcggaataacttctggaaacggaagctaataccggatgatgacgtaagtccaaagatttatcgcccaaggatgagcccgcgtaggattagctagttggtgaggtaaaggctcaccaaggcgacgatccttagctggtctgagaggatgatcagccacactgggactgagacacggcccagactcctacgggaggcagcagtagggaatattggacaatgggcgaaagcctgatccagcaatgccgcgtgagtgatgaaggccttagggttgtaaagctcttttacccgggatgataatgacagtaccgggagaataagctccggctaactccgtgccagcagccgcggtaatacggagggagctagcgttgttcggaattactgggcgtaaagcgcacgtaggcggctattcaagtcagaggtgaaagcccggggctcaaccccggaactgcctttgaaactagatagcttgaatccaggagaggtgagtggaattccgagtgtagaggtgaaattcgtagatattcggaagaacaccagtggcgaaggcggctcactggactggtattgacgctgaggtgcgaaagcgtggggagcaaacaggattagataccctggtagtccacgccgtaaacgatgataactagctgtcagggcacatggtgttttggtggcgcagctaacgcattaagttatccgcctggggagtacggtcgcaagattaaaactcaaaggaattgacgggggcctgcacaagcggtggagcatgtggtttaattcgaagcaacgcgcagaaccttaccaacgtttgacatccctatcgcggatcgtggagacactttccttcagttcggctggataggtgacaggtgctgcatggctgtcgtcagctcgtgtcgtgagatgttgggttaagtcccgcaacgagcgcaaccctcgcctttagttgccagcatttagttgggtactctaaaggaaccgccggtgataagccggaggaaggtggggatgacgtcaagtcctcatggcccttacgcgttgggctacacacgtgctacaatggcgactacagtgggcagccacctcgcgagagggagctaatctccaaaagtcgtctcagttcggatcgttctctgcaactcgagagcgtgaaggcggaatcgctagtaatcgcggatcagcatgccgcggtgaatacgttcccaggccttgtacacaccgcccgtcacaccatgggagttggattcactcgaaggcgttgagctaaccgtaaggaggcaggcgaccacagtgggtttagcgactggggtg

SEQ ID NO: 3175 - DNA, 1409 bp, Sphingomonas adhaesiva
aacgaacgctggcggcatgcctaacacatgcaagtcgaacgaaggcttcggccttagtggcgcacgggtgcgtaacgcgtgggaatctgcccttgggttcggaataacagttggaaacgactgctaataccggatgatgtcgtaagaccaaagatttatcgcccagggatgagcccgcgtcggattaggtagttggtggggtaaaggcctaccaagccgacgatccgtagctggtctgagaggatgatcagccacactgggactgagacacggcccagactcctacgggaggcagcagtggggaatattggacaatgggcgaaagcctgatccagcaatgccgcgtgagtgatgaaggccttagggttgtaaagctcttttacccgggatgataatgacagtaccgggagaataagctccggctaactccgtgccagcagccgcggtaatacggagggagctagcgttgttcggaattactgggcgtaaagcgcacgtaggcggctttgtaagtcaggggtgaaagcctggagctcaactccagaactgcctttgagactgcatcgcttgaatccgggagaggtgagtggaattccgagtgtagaggtgaaattcgtagatattcggaagaacaccagtggcgaaggcggctcactggaccggtattgacgctgaggtgcgaaagcgtggggagcaaacaggattagataccctggtagtccacgccgtaaacgatgataactagctgtccgggcacttggtgcttgggtggcgcagctaacgcattaagttatccgcctggggagtacggccgcaaggttaaaactcaaaggaattgacgggggcctgcacaagcggtggagcatgtggtttaattcgaagcaacgcgcagaaccttaccagcgtttgacatgtccggacgatttccagagatggatctcttcccttcggggactggaacacaggtgctgcatggctgtcgtcagctcgtgtcgtgagatgttgggttaagtcccgcaacgagcgcaaccctcgcctttagttaccatcattcagttgggtactctaaaggaaccgccggtgataagccggaggaaggtggggatgacgtcaagtcctcatggcccttacgcgctgggctacacacgtgctacaatggcgactacagtgggctgcaatcccgcgagggtgagctaatctccaaaagtcgtctcagttcggattgctctctgcaactcgagagcatgaaggcggaatcgctagtaatcgcggatcagcatgccgcggtgaatacgttcccaggccttgtacacaccgcccgtcacaccatgggagttgggttcacccgaaggcgttgcgctaactcgcaagagaggcaggcgaccacggtgggcttagcgactggggtg

SEQ ID NO: 3176 - DNA, 1409 bp, Sphingomonas aquatilis
aacgaacgctggcggcatgcctaacacatgcaagtcgaacgagatcttcgggtctagtggcgcacgggtgcgtaacgcgtgggaatctgccctttggttcggaataacagttggaaacgactgctaataccggatgatgacgaaagtccaaagatttatcgccagaggatgagcccgcgtaggattagctagttggtgtggtaaaggcgcaccaaggcgacgatccttagctggtctgagaggatgatcagccacactgggactgagacacggcccagactcctacgggaggcagcagtggggaatattggacaatgggcgaaagcctgatccagcaatgccgcgtgagtgatgaaggccttagggttgtaaagctcttttacccgggatgataatgacagtaccgggagaataagctccggctaactccgtgccagcagccgcggtaatacggagggagctagcgttgttcggaattactgggcgtaaagcgcacgtaggcggctttgtaagttagaggtgaaagcctggagctcaactccagaactgcctttaagactgcatcgcttgaatccaggagaggtgagtggaattccgagtgtagaggtgaaattcgtagatattcggaagaacaccagtggcgaaggcggctcactggactggtattgacgctgaggtgcgaaagcgtggggagcaaacaggattagataccctggtagtccacgccgtaaacgatgataactagctgtccggggacttggtctttgggtggcgcagctaacgcattaagttatccgcctggggagtacggccgcaaggttaaaactcaaatgaattgacgggggcctgcacaagcggtggagcatgtggtttaattcgaagcaacgcgcagaaccttaccagcgtttgacatgtccggacgatttccagagatggatctcttcccttcggggactggaacacaggtgctgcatggctgtcgtcagctcgtgtcgtgagatgttgggttaagtcccgcaacgagcgcaaccctcgcctttagttaccatcatttagttggggactctaaaggaaccgccggtgataagccggaggaaggtggggatgacgtcaagtcctcatggcccttacgcgctgggctacacacgtgctacaatggcggtgacagtgggcagcaaactcgcgagagtgcgctaatctccaaaagccgtctcagttcggattgttctctgcaactcgagagcatgaaggcggaatcgctagtaatcgcggatcagcatgccgcggtgaatacgttcccaggccttgtacacaccgcccgtcacaccatgggagttgggttcacccgaaggcgttgcgctaactcgcaagagaggcaggcgaccacggtgggcttagcgactggggtg

SEQ ID NO: 3177 - DNA, 1393 bp, Sphingomonas aurantiaca
  misc_feature (1034)..(1034): n is a, c, g, or t
  misc_feature (1082)..(1082): n is a, c, g, or t
  misc_feature (1185)..(1185): n is a, c, g, or t
  misc_feature (1214)..(1214): n is a, c, g, or t
  misc_feature (1270)..(1270): n is a, c, g, or t
  misc_feature (1277)..(1277): n is a, c, g, or t
  misc_feature (1288)..(1288): n is a, c, g, or t
  misc_feature (1379)..(1379): n is a, c, g, or t
aatgaacgctggcggcatgcctaacacatgcaagtcgaacgaaggcttcggccttagtggcgcacgggtgcgtaacgcgtgggaatctgccccttggttcggaataacagttggaaacgactgctaataccggatgatgacgtaagtccaaagatttatcgccgagggatgagcccgcgtaggattaggtagttggtgtggtaaaggcgcaccaagccgacgatccttagctggtctgagaggatgatcagccacactgggactgagacacggcccagactcctacgggaggcagcagtggggaatattggacaatgggcgaaagcctgatccagcaatgccgcgtgagtgatgaaggccttagggttgtaaagctcttttacccgggatgataatgacagtaccgggagaataagctccggctaactccgtgccagcagccgcggtaatacggagggagctagcgttattcggaattactgggcgtaaagcgcacgtaggcggctttgtaagtaagaggtgaaagcccagagctcaactctggaattgccttttagactgcatcgcttgaatcatggagaggtcagtggaattccgagtgtagaggtgaaattcgtagatattcggaagaacaccagtggcgaaggcggctgactggacatgtattgacgctgaggtgcgaaagcgtggggagcaaacaggattagataccctggtagtccacgccgtaaacgatgataactagctgtccggggacttggtctttgggtggcgcagctaacgcattaagttatccgcctggggagtacggccgcaaggttaaaactcaaatgaattgacgggggcctgcacaagcggtggagcatgtggtttaattcgaagcaacgcgcagaaccttaccagcgtttgacatggcaggacgacttccggagacggatttcttcccttcggggacctgcacacaggtgctgcatggctgtcgtcagctcgtgtcgtgagatgttgggttaagtcccgcaacgagcgcaaccctngcctttagttgccatcatttaattgggcactttaaaggaaccgccggngataagccggaggaaggtggggatgaccttaagtcctcatggcccttacgcgctgggctacacacgtgctacaatggcggtgacagtgggcagcaagcacgcnagtgtgagctaatctccaaaagccgtctnagttcggattgttctctgcaactcgagagcatgaaggcggaatcgctagtaatcgnggatcancatgccgcggngaatacgttcccaggccttgtacacaccgaccgtcacaccatgggagttggattcacccgaaggcgttgcgctaactcgtaagagaggcangcgaccacggtggg

SEQ ID NO: 3178 - DNA, 1399 bp, Sphingomonas carotinifaciens
aacgaacgctggcggcatgcctaacacatgcaagtcgaacgaaggcttcggccttagtggcgcacgggtgcgtaacgcgtgggaatctgcccttgggttcggaataacagcgggaaactgctgctaataccggatgatgtcgataagaccaaagatttatcgcctgaggatgagcccgcgttggattaggtagttggtggggtaaaggcctaccaagccgacgatccatagctggtctgagaggatgatcagccacactgggactgagacacggcccagactcctacgggaggcagcagtggggaatattggacaatgggcgaaagcctgatccagcaatgccgcgtgagtgatgaaggccttagggttgtaaagctcttttacccgggatgataatgacagtaccgggagaataagccccggctaactccgtgccagcagccgcggtaatacggagggggctagcgttgttcggaattactgggcgtaaagcgcacgtaggcggctttgtaagtcagaggtgaaagcctggagctcaactccagaactgcctttgagactgcatcgcttgaatccaggagaggtgagtggaattccgagtgtagaggtgaaattcgtagatattcggaagaacaccagtggcgaaggcggctcactggactggtattgacgctgaggtgcgaaagcgtggggagcaaacaggattagataccctggtagtccacgccgtaaacgatgataactagctgtccggggacatggtctttgggtggcgcagctaacgcattaagttatccgcctggggagtacggccgcaaggttaaaactcaaaggaattgacgggggcctgcacaagcggtggagcatgtggtttaattcgaagcaacgcgcagaaccttaccagcgtttgacatgtccggacgattcccagagatgggtctcttcccttcggggactggaacacaggtgctgcatggctgtcgtcagctcgtgtcgtgagatgttgggttaagtcccgcaacgagcgcaaccctcgcctttagttaccatcatttggttgggtactctaaaggaaccgccggtgataagccggaggaaggtggggatgacgtcaagtcctcatggcccttacgcgctgggctacacacgtgctacaatggcggtgacaaagggcagccactctgcgaggaggagctaatcccaaaaagccgtctcagttcggattgttctctgcaactcgagagcatgaaggcggaatcgctagtaatcgcggatcagcacgccgcggtgaatacgttcccaggccttgtacacaccgcccgtcacaccatgggagttggtttcacccgaaggcgttgcgctgacccggaaacgggaggcaggcgacccacggtgggtt

SEQ ID NO: 3179 - DNA, 1407 bp, Sphingomonas changbaiensis
aacgaacgctggcggcatgcctaacacatgcaagtcgaacgagaccttcgggtctagtggcgcacgggtgcgtaacgcgtgggaatctgcccttgggttcggaataacttcgggaaactgaagctaataccggatgatgtcgtaagaccaaagatttatcgcccaaggatgagcccgcgtaggattagctagttggtgaggtaaaggctcaccaaggcgacgatccttagctggtctgagaggatgatcagccacactgggactgagacacggcccagactcctacgggaggcagcagtggggaatattggacaatgggcgaaagcctgatccagcaatgccgcgtgagtgatgaaggccctagggttgtaaagctcttttacccgggatgataatgacagtaccgggagaataagccccggctaactccgtgccagcagccgcggtaatacggagggggctagcgttgttcggaattactgggcgtaaagcgcacgtaggcggctttgtaagtcagaggtgaaagcccggagcttaactccggaattgcctttgagactgcatcgcttgaatccgggagaggtgagtggaattccgagtgtagaggtgaaattcgtagatattcggaagaacaccagtggcgaaggcggctcactggaccggtattgacgctgaggtgcgaaagcgtggggagcaaacaggattagataccctggtagtccacgccgtaaacgatgataactagctgtccgggcacttggtgcttgggtggcgcagctaacgcattaagttatccgcctggggagtacggccgcaaggttaaaactcaaaggaattgacgggggcctgcacaagcggtggagcatgtggtttaattcgaagcaacgcgcagaaccttaccagcgtttgacatggtaggacggtttctggagacagattccttcccttcggggacctacacacaggtgctgcatggctgtcgtcagctcgtgtcgtgagatgttgggttaagtcccgcaacgagcgcaaccctcgtccttagttgccatcatttagttgggtactctaaggaaaccgccggtgataagccggaggaaggtggggatgacgtcaagtcctcatggcccttacgcgctgggctacacacgtgctacaatggcggtgacaatgggcagcaatcccgcgagggtgagctaatctccaaaagccgtctcagttcggattgttctctgcaactcgagagcatgaaggcggaatcgctagtaatcgtggatcagcatgccacggtgaatacgttcccaggccttgtacacaccgcccgtcacaccatgggagttggattgacccgaagacagtgagctaaccgcaaggaggcagctggccacggtcggttcagcgactggggtg

SEQ ID NO: 3180 - DNA, 1408 bp, Sphingomonas desiccabilis
aacgaacgctggcggcatgcctaacacatgcaagtcgaacgagaccttcgggtctagtggcgcacgggtgcgtaacgcgtgggaatctgcccttgggttcggaataacagttggaaacgactgctaataccggatgatgacgtaagtccaaagatttatcgcccagggatgagcccgcgtaggattagctagttggtggggtaaaggcctaccaaggcgacgatccttagctggtctgagaggatgatcagccacactgggactgagacacggcccagactcctacgggaggcagcagtggggaatattggacaatgggcgaaagcctgatccagcaatgccgcgtgagtgatgaaggccttagggttgtaaagctcttttacccgggatgataatgacagtaccgggagaataagccccggctaactccgtgccagcagccgcggtaatacggagggggctagcgttgttcggaattactgggcgtaaagcgcacgtaggcggctttgtaagttagaggtgaaagcctggagcttaactccagaactgcctttaagactgcatcgcttgaatccaggagaggtgagtggaattccgagtgtagaggtgaaattcgtagatattcggaagaacaccagtggcgaaggcggctcactggactggtattgacgctgaggtgcgaaagcgtggggagcaaacaggattagataccctggtagtccacgccgtaaacgatgataactagctgtccgggtgcttggcatttgggtggcgcagctaacgcattaagttatccgcctggggagtacggtcgcaagattaaaactcaaaggaattgacgggggcctgcacaagcggtggagcatgtggtttattcgaagcaacgcgcagaaccttaccagcgtttgacatgtccggacgatttccagagatggatctcttcccttcggggactggaacacaggtgctgcatggctgtcgtcagctcgtgtcgtgagatgttgggttaagtcccgcaacgagcgcaaccctcgcctttagttaccatcatttagttgggtactctaaaggaaccgccggtgataagccggaggaaggtggggatgacgtcaagtcctcatggcccttacgcgctgggctacacacgtgctacaatggcaactacagtgggcagcaatcccgcgagggtgagctaatctccaaaagttgtctcagttcggattgttctctgcaactcgagagcatgaaggcggaatcgctagtaatcgcggatcagcatgccgcggtgaatacgttcccaggccttgtacacaccgcccgtcacaccatgggagttggattcacccgaaggcgttgcgccaacccgcaagggaagcaggcgaccacggtgggttcagcgactggggtg

SEQ ID NO: 3181 - DNA, 1408 bp, Sphingomonas dokdonensis
aacgaacgctggcggcatgcctaacacatgcaagtcgaacgagatcttcggatctagtggcgcacgggtgcgtaacgcgtgggaatctgcccttgggttcggaataacagttagaaatgactgctaataccggatgatgacgttaagtccaaagatttatcgcccgaggatgagcccgcgtaggattagctagttggtgtggtaagagcgcaccaaggcgacgatccttagctggtctgagaggatgatcagccacactgggactgagacacggcccagactcctacgggaggcagcagtggggaatattggacaatgggcgaaagcctgatccagcaatgccgcgtgagtgatgaaggccttagggttgtaaagctcttttacccgggatgataatgacagtaccgggagaataagctccggctaactccgtgccagcagccgcggtaatacggagggagctagcgttgttcggaattactgggcgtaaagcgcacgtaggcggctttgtaagttagaggtgaaagcctggagctcaactccagaattgcctttaagactgcatcgctcgaatccaggagaggtgagtggaattccgagtgtagaggtgaaattcgtagatattcggaagaacaccagtggcgaaggcggctcactggactggtattgacgctgaggtgcgaaagcgtggggagcaaacaggattagataccctggtagtccacgccgtaaacgatgataactagctgtccggggacttggtccttgggtggcgcagctaacgcattaagttatccgcctggggagtacggccgcaaggttaaaactcaaatgaattgacgggggcctgcacaagcggtggagcatgtggtttaattcgaagcaacgcgcagaaccttaccagcgtttgacatggtaggacggttttcagagatggattccttcccttcggggacctacacacaggtgctgcatggctgtcgtcagctcgtgtcgtgagatgttgggttaagtcccgcaacgagcgcaaccctcgcctttagttaccatcattcagttgggtactctaaaggaaccgccggtgataagccggaggaaggtggggatgacgtcaagtcctcatggcccttacgcgctgggctacacacgtgctacaatggcaactacagtgggcagcaatcccgcgagggtgagctaatctccaaaagttgtctcagttcggattgttctctgcaactcgagagcatgaaggcggaatcgctagtaatcgcggatcagcatgccgcggtgaatacgttcccaggccttgtacacaccgcccgtcacaccatgggagttggattcacccgaaggcgtcgcgctaaccgcaaggaggcaggcgaccacggtgggtttagcgactggggtg

SEQ ID NO: 3182 - DNA, 1375 bp, Sphingomonas endophytica
cgaacgatgctttcgggcatagtggcgcacgggtgcgtaacgcgtgggaatctgcccttgggtctgggataacagttggaaacgactgctaataccggatgatatcgcgagatcaaagatttatcgcccgaggatgagcccgcgtaggattagctagttggtggggtaaaggcctaccaaggcgacgatccttagctggtctgagaggatgatcagccacactgggactgagacacggcccagactcctacgggaggcagcagtggggaatattggacaatgggcgaaagcctgatccagcaatgccgcgtgagtgatgaaggccttagggttgtaaagctcttttacccgggatgataatgacagtaccgggagaataagccccggctaactccgtgccagcagccgcggtaatacggagggggctagcgttgttcggaattactgggcgtaaagcgcacgtaggcggctttgtaagtcaggggtgaaagcctggagctcaactccagaactgcctttgagactgcatcgcttgaatccgggagaggtaagtggaattccgagtgtagaggtgaaattcgtagatattcggaagaacaccagtggcgaaggcggcttactggaccgggattgacgctgaggtgcgaaagcgtggggagcaaacaggattagataccctggtagtccacgccgtaaacgatgataactagctgtccggggacctggtctttgggtggcgcagctaacgcattaagttatccgcctggggagtacggccgcaaggttaaaactcaaaggaattgacgggggcctgcacaagcggtggagcatgtggtttaattcgaagcaacgcgcagaaccttaccagcgtttgacatgtccggacgatttccagagatggatctcttcccttcggggactggaacacaggtgctgcatggctgtcgtcagctcgtgtcgtgagatgttgggttaagtcccgcaacgagcgcaaccctcgcctttagttaccatcatttagttgggtactctaaaggaaccgccggtgataagccggaggaaggtggggatgacgtcaagtcctcatggcccttacgcgctgggctacacacgtgctacaatggcgactacagtgggctgcaatcccgcgagggtgagctaatctccaaaagtcgtctcagttcggattgttctctgcaactcgagagcatgaaggcggaatcgctagtaatcgcggatcagcatgccgcggtgaatacgttcccaggccttgtacacaccgcccgtcacaccatgggagttgggttcacccgaaggcgttgcgctaacccgtaaggggaggcaggcgaccacggtgggcttagcgactggggtg

SEQ ID NO: 3183 - DNA, 1409 bp, Sphingomonas faeni
  misc_feature (1110)..(1110): n is a, c, g, or t
  misc_feature (1112)..(1112): n is a, c, g, or t
  misc_feature (1120)..(1120): n is a, c, g, or t
  misc_feature (1214)..(1214): n is a, c, g, or t
  misc_feature (1270)..(1270): n is a, c, g, or t
  misc_feature (1288)..(1288): n is a, c, g, or t
  misc_feature (1379)..(1379): n is a, c, g, or t
aatgaacgctggcggcatgcctaacacatgcaagtcgaacgaaggcttcggccttagtggcgcacgggtgcgtaacgcgtgggaatctgccccttggttcggaataacagttggaaacgactgctaataccggatgatgacgtaagtccaaagatttatcgccgagggatgagcccgcgtaggattaggtagttggtgtggtaaaggcgcaccaagccgacgatccttagctggtctgagaggatgatcagccacactgggactgagacacggcccagactcctacgggaggcagcagtggggaatattggacaatgggcgaaagcctgatccagcaatgccgcgtgagtgatgaaggccttagggttgtaaagctcttttacccgggatgataatgacagtaccgggagaataagctccggctaactccgtgccagcagccgcggtaatacggagggagctagcgttattcggaattactgggcgtaaagcgcacgtaggcggctttgtaagtaagaggtgaaagcccagagctcaactctggaattgccttttagactgcatcgcttgaatcatggagaggtcagtggaattccgagtgtagaggtgaaattcgtagatattcggaagaacaccagtggcgaaggcggctgactggacatgtattgacgctgaggtgcgaaagcgtggggagcaaacaggattagataccctggtagtccacgccgtaaacgatgataactagctgtccggacacttggtgtttgggtggcgcagctaacgcattaagttatccgcctggggagtacggccgcaaggttaaaactcaaatgaattgacgggggcctgcacaagcggtggagcatgtggtttaattcgaagcaacgcgcagaaccttaccagcgtttgacatggcaggacgacttccagagatggatttcttcccttcggggacctgcacacaggtgctgcatggctgtcgtcagctcgtgtcgtgagatgttgggttaagtcccgcaacgagcgcaaccctcgcctttagttgccatcatttagttgggcactttaaaggaaccgccggtgataagccggaggaaggtggggatgacntnaagtcctnatggcccttacgcgctgggctacacacgtgctacaatggcggtgacagtgggcagcaagcacgcgagtgtgagctaatctccaaaagccgtctnagttcggattgttctctgcaactcgagagcatgaaggcggaatcgctagtaatcgnggatcagcatgccgcggngaatacgttcccaggccttgtacacaccgaccgtcacaccatgggagttggattcacccgaaggcgttgcgctaactcgtaagagaggcangcgaccacggtgggtttagcgactggggtg

SEQ ID NO: 3184 - DNA, 1411 bp, Sphingomonas fennica
aacgaacgctggcggcatgcctaacacatgcaagtcgaacgatgctttcgggcatagtggcgcacgggtgcgtaacgcgtgggaatctgcctttcggtacggaataactcagggaaacttgtgctaataccgtatgacgtcgcgagaccaaagatttatcgccgaaagatgagcccgcgtaggattagctagttggtggggtaaaggcctaccaaggcgacgatccttagctggtctgagaggatgatcagccacactgggactgagacacggcccagactcctacgggaggcagcagtggggaatattggacaatgggcgaaagcctgatccagcaatgccgcgtgagtgatgaaggccctagggttgtaaagctcttttacccgggaagataatgactgtaccgggagaataagccccggctaactccgtgccagcagccgcggtaatacggagggggctagcgttgttcggaattactgggcgtaaagcgtacgtaggcggctttgtaagttagaggtgaaagcctgatgctcaacatcagaattgcctttaagactgcatcgcttgaacgtcggagaggtgagtggaattccgagtgtagaggtgaaattcgtagatattcggaagaacaccagtggcgaaggcggctcactggacgactgttgacgctgaggtacgaaagcgtggggagcaaacaggattagataccctggtagtccacgccgtaaacgatgataactagctgtccgggcacttggtgcttgggtggcgcagctaacgcattaagttatccgcctggggagtacggccgcaaggttaaaactcaaagaaattgacgggggcctgcacaagcggtggagcatgtggtttaattcgaagcaacgcgcagaaccttaccaacgtttgacatccctatcgcggttaccagagatggtttccttcagttcggctggataggtgacaggtgctgcatggctgtcgtcagctcgtgtcgtgagatgttgggttaagtcccgcaacgagcgcaaccctcgcctttagttgccatcattaagttgggcactctaaaggaaccgccggtgataagccggaggaaggtggggatgacgtcaagtcctcatggcccttacgcgttgggctacacacgtgctacaatggcggtgacagtgggcagcaaaccggcgacggtgagctaatctccaaaagccgtctcagttcggattgttctctgcaactcgagagcatgaaggcggaatcgctagtaatcgcggatcagcatgccgcggtgaatacgttcccaggccttgtacacaccgcccgtcacaccatgggagttggattcacccgaaggcgctgctctaacccgcaagggaggaaggcgaccacggtgggtttagcgactggggtg

SEQ ID NO: 3185 - DNA, 1411 bp, Sphingomonas gei
aatgaacgctggcggcatgcctaacacatgcaagtcgaacgaagccttcgggtttagtggcgcacgggtgcgtaacgcgtgggaatctgccttggggttcggaataactccccgaaaggggtgctaataccggatgatgtcgaaagaccaaagatttatcgccctgagatgagcccgcgtaagattagctagttggtggggtaaaggcctaccaaggcgacgatctttagctggtctgagaggatgatcagccacactgggactgagacacggcccagactcctacgggaggcagcagtggggaatattggacaatgggcgaaagcctgatccagcaatgccgcgtgagtgatgaaggccttagggttgtaaagctcttttacccgggatgataatgacagtaccgggagaataagccccggctaactccgtgccagcagccgcggtaatacggagggggctagcgttattcggaattactgggcgtaaagcgcacgtaggcggctttgtaagtaagaggtgaaagcccggagctcaactccggaactgccttttagactgcatcgcttgaatccaggagaggtgagtggaattccgagtgtagaggtgaaattcgtagatattcggaagaacaccagtggcgaaggcggctcactggactggtattgacgctgaggtgcgaaagcgtggggagcaaacaggattagataccctggtagtccacgccgtaaacgatgataactagctgtctgggcacttggtgttcaggtggcgcagctaacgcattaagttatccgcctggggagtacggccgcaaggttaaaactcaaatgaattgacgggggcctgcacaagcggtggagcatgtggtttaattcgaagcaacgcgcagaaccttaccagcgtttgacatgcccggacgacttccagagatggatttcttcccttcggggactgggacacaggtgctgcatggctgtcgtcagctcgtgtcgtgagatgttgggttaagtcccgcaacgagcgcaaccctcgcctctagttaccatcatttagttgggtactttagaggaaccgccggtgataagccggaggaaggtggggatgacgtcaagtcctcatggcccttacgcgctgggctacacacgtgctacaatggcgactacagtgggcagcaaactcgcgagggtgagctaatctccaaaagtcgtctcagttcggattgcactctgcaactcgagtgcatgaaggcggaatcgctagtaatcgcggatcagcatgccgcggtgaatacgttcccaggccttgtacacaccgcccgtcacaccatgggagttggattcacccgaaggcgttgcgctaacttggcaacaagaggcaggcgaccacggtgggtttagcgactggggtg

SEQ ID NO: 3186 - DNA, 1409 bp, Sphingomonas ginsenosidimutans
aacgaacgctggcggcatgcctaacacatgcaagtcgaacgaaggcttcggccttagtggcgcacgggtgcgtaacgcgtgggaatctgcccttgggttcggaataacagttggaaacgactgctaataccggatgatgtcgcgagaccaaagatttatcgcccagggatgagcccgcgtcggattaggtagttggtggggtaaaggcctaccaagccgacgatccgtagctggtctgagaggatgatcagccacactgggactgagacacggcccagactcctacgggaggcagcagtggggaatattggacaatgggcgaaagcctgatccagcaatgccgcgtgagtgatgaaggccttagggttgtaaagctcttttacccgggatgataatgacagtaccgggagaataagctccggctaactccgtgccagcagccgcggtaatacggagggagctagcgttgttcggaattactgggcgtaaagcgcacgtaggcggctttgtaagtcaggggtgaaagcctggagctcaactccagaactgcctttgagactgcatcgcttgaatccgggagaggtgagtggaattccgagtgtagaggtgaaattcgtagatattcggaagaacaccagtggcgaaggcggctcactggaccggtattgacgctgaggtgcgaaagcgtggggagcaaacaggattagataccctggtagtccacgccgtaaacgatgataactagctgtccgggcacttggtgcttgggtggcgcagctaacgcattaagttatccgcctggggagtacggccgcaaggttaaaactcaaaggaattgacgggggcctgcacaagcggtggagcatgtggtttaattcgaagcaacgcgcagaaccttaccagcgtttgacatgtccggacgattcccagagatgggtctcttcccttcggggactggaacacaggtgctgcatggctgtcgtcagctcgtgtcgtgagatgttgggttaagtcccgcaacgagcgcaaccctcgcctttagttaccatcattcagttgggtactctaaaggaaccgccggtgataagccggaggaaggtggggatgacgtcaagtcctcatggcccttacgcgctgggctacacacgtgctacaatggcgactacagtgggctgcaatcccgcgagggtgagctaatctccaaaagtcgtctcagttcggattgctctctgcaactcgagagcatgaaggcggaatcgctagtaatcgcggatcagcatgccgcggtgaatacgttcccaggccttgtacacaccgcccgtcacaccatgggagttgggttcacccgaaggcgttgcgctaactcgcaagagaggcaggcgaccacggtgggcttagcgactggggtg

SEQ ID NO: 3187 - DNA, 1411 bp, Sphingomonas ginsenosidivorax
aatgaacgctggcggcatgcctaacacatgcaagtcgaacgaagtccttcggggcttagtggcgcacgggtgcgtaacgcgtgggaatctgccctcaggttcggaataacttcgggaaactgaagctaataccggatgatgacgtaagtccaaagatttatcgcctggggatgagcccgcgtaggattagctagttggtgtggtaaaggcgcaccaaggcgacgatccttagctggtctgagaggatgatcagccacactgggactgagacacggcccagactcctacgggaggcagcagtggggaatattggacaatgggcgaaagcctgatccagcaatgccgcgtgagtgatgaaggccttagggttgtaaagctcttttacccgggatgataatgacagtaccgggagaataagctccggctaactccgtgccagcagccgcggtaatacggagggagctagcgttattcggaattactgggcgtaaagcgcacgtaggcggctttgtaagtaagaggtgaaagcccagagctcaactctggaattgccttttagactgcatcgcttgaatcatggagaggtcagtggaattccgagtgtagaggtgaaattcgtagatattcggaagaacaccagtggcgaaggcggctgactggacatgtattgacgctgaggtgcgaaagcgtggggagcaaacaggattagataccctggtagtccacgccgtaaacgatgataactagctgtccgggcacttggtgcctgggtggcgcagctaacgcattaagttatccgcctggggagtacggccgcaaggttaaaactcaaatgaattgacgggggcctgcacaagcggtggagcatgtggtttaattcgaagcaacgcgcagaaccttaccagcgtttgacatggcaggacgacttccagagatggatttcttcccttcggggacctgcacacaggtgctgcatggctgtcgtcagctcgtgtcgtgagatgttgggttaagtcccgcaacgagcgcaaccctcgaccttagttgccatcatttagttgggcactttaaggtaaccgccggtgataagccggaggaaggtggggatgacgtcaagtcctcatggcccttacgcgctgggctacacacgtgctacaatggcggtgacagtgggcagcaaactcgcaagggtgagctaatctccaaaagccgtctcagttcggattgttctctgcaactcgagagcatgaaggcggaatcgctagtaatcgcggatcagcatgccgcggtgaatacgttcccaggccttgtacacaccgcccgtcacaccatgggagttggattcacccgaaggcgttgcgctaactcgtaagagaggcaggcgaccacggtgggtttagcgactggggtg

SEQ ID NO: 3188 - DNA, 1407 bp, Sphingomonas glacialis
aatgaacgctggcggcatgcctaacacatgcaagtcgaacgaaggcttcggccttagtggcgcacgggtgcgtaacgcgtgggaatctacccttaggttcggaataacagttggaaacgactgctaataccggatgatgacgtaagtccaaagatttatcgcctagggatgagcccgcgtaggattagctagttggtgtggtaaaagcgcaccaaggcgacgatccttagctggtctgagaggatgatcagccacactgggactgagacacggcccagactcctacgggaggcagcagtggggaatattggacaatgggcgaaagcctgatccagcaatgccgcgtgagtgatgaaggccttagggttgtaaagctcttttacccgggatgataatgacagtaccgggagaataagctccggctaactccgtgccagcagccgcggtaatacggagggagctagcgttattcggaattactgggcgtaaagcgcacgtaggcggctttgtaagtaagaggtgaaagcctggtgctcaacaccagaactgccttttagactgcatcgcttgaatccaggagaggtgagtggaattccgagtgtagaggtgaaattcgtagatattcggaagaacaccagtggcgaaggcggctcactggactggtattgacgctgaggtgcgaaagcgtggggagcaaacaggattagataccctggtagtccacgccgtaaacgatgataactagctgtcggggctcttagagcttcggtggcgcagctaacgcattaagttatccgcctggggagtacggccgcaaggttaaaactcaaatgaattgacgggggcctgcacaagcggtggagcatgtggtttaattcgaagcaacgcgcagaaccttaccagcgtttgacatgtccggacgatttcgggagaccgatctcttcccttcggggactggaacacaggtgctgcatggctgtcgtcagctcgtgtcgtgagatgttgggttaagtcccgcaacgagcgcaaccctcgcctttagttaccatcattcagttggggactctaaaggaaccgccggtgataagccggaggaaggtggggatgacgtcaagtcctcatggcccttacgcgctgggctacacacgtgctacaatggcggtgacagtgggcagcaatcctgcaagggtgagctaatctccaaaagccgtctcagttcggattgttctctgcaactcgagagcatgaaggcggaatcgctagtaatcgcggatcagcatgccgcggtgaatacgttcccaggccttgtacacaccgcccgtcacaccatgggagttggattcacccgaaggcagtgcgctaaccgcaaggaggcagctgaccacggtgggttcagcgactggggtg

SEQ ID NO: 3189 - DNA, 1411 bp, Sphingomonas guangdongensis
aacgaacgctggcggcatgcctaacacatgcaagtcgaacggatgctttcgggcattagtggcgcacgggtgcgtaacgcgtgggaatctgccctggggtctgggataacttctcgaaagggaagctaataccggatgatatcgcgagatcaaagatttatcgccctgggatgagcccgcgtccgattaggtagttggtggggtaaaggcctaccaagccgacgatcggtagctggtctgagaggatgatcagccacactgggactgagacacggcccagactcctacgggaggcagcagtggggaatattggacaatgggcgcaagcctgatccagcaatgccgcgtgagtgatgaaggccttagggttgtaaagctcttttacccgggatgataatgacagtaccgggagaataagccccggctaactccgtgccagcagccgcggtaatacggagggggctagcgttgttcggaattactgggcgtaaagcgcacgtaggcggctttgtaagttaggggtgaaagcctggtgctcaacaccagaactgcctttgatactgcatggcttgaatccgagagaggtgagtggaattccgagtgtagaggtgaaattcgtagatattcggaagaacaccagtggcgaaggcggctcactggctcggtattgacgctgaggtgcgaaagcgtggggagcaaacaggattagataccctggtagtccacgccgtaaacgatgataactagctgtcggggcacttggtgtttcggtggcgcagctaacgcattaagttatccgcctggggagtacggtcgcaagattaaaactcaaaggaattgacgggggcctgcacaagcggtggagcatgtggtttaattcgaagcaacgcgcagaaccttaccagcgtttgacatggtaggacgactggcagagatgcctttcttcccttcggggacctacacacaggtgctgcatggctgtcgtcagctcgtgtcgtgagatgttgggttaagtcccgcaacgagcgcaaccctcgcctttagttaccatcatttagttgggtactctaaaggaaccgccggtgataagccggaggaaggtggggatgacgtcaagtcctcatggcccttacgcgctgggctacacacgtgctacaatggcaagtacagtgggcagcaatcccgcgagggtgagctaatctccaaaacttgtctcagttcggattgttctctgcaactcgagagcatgaaggcggaatcgctagtaatcgcggatcagcatgccgcggtgaatacgttcccaggccttgtacacaccgcccgtcacaccatgggagttgggttcacccgaaggcgttgcgctaactcgtaagagaggcaggcgaccacggtgggcttagcgactggggtg

SEQ ID NO: 3190 - DNA, 1409 bp, Sphingomonas haloaromaticamans
  misc_feature (60)..(60): n is a, c, g, or t
  misc_feature (89)..(89): n is a, c, g, or t
  misc_feature (220)..(220): n is a, c, g, or t
aacgaacgctggcggcatgcctaacacatgcaagtcgaacgaaggcttcggccttagtgncgcacgggtgcgtaacgcgtgggaatctncccttgggttcggaataacagtgagaaattactgctaataccgtatgatgtcgcgagaccaaagatttatctccaaaggatgagcccgcgtaggattagctagttggtggggtaaaggcccaccaaggcgncgatccttagctggtctgagaggatgatcagccacactgggactgagacacggcccagactcctacgggaggcagcagtggggaatattggacaatgggcgaaagcctgatccagcaatgccgcgtgagtgatgaaggccctagggttgtaaagctcttttacccgggaagataatgactgtaccgggagaataagccccggctaactccgtgccagcagccgcggtaatacggagggggctagcgttgttcggaattactgggcgtaaagcgcacgtaggcggcttggtaagttagaggtgaaagcccggagctcaactccggaatagcctttaagactgtctcgcttgaacgtcggagaggtgagtggaattccgagtgtagaggtgaaattcgtagatattcggaagaacaccagtggcgaaggcggctcactggacgactgttgacgctgaggtgcgaaagcgtggggagcaaacaggattagataccctggtagtccacgccgtaaacgatgataactagctgtccgggcacttgtgcttgggtggcgcagctaacgcattaagttatccgcctggggagtacggtcgcaaggttaaaactcaaagaaattgacgggggcctgcacaagcggtggagcatgtggtttaattcgaagcaacgcgcagaaccttaccaacgtttgacatccctatcgcggttagtggagacactttccttcagttcggctggataggtgacaggtgctgcatggctgtcgccagctcgtgtcgtgagatgttgggttaagtcccgcaacgagcgcaaccctcgcctttagttgccatcattaagttgggcactctaaaggaaccgccggtgataagccggaggaaggtggggatgacgtcaagtcctcatggcccttacgcgttgggctacacacgtgctacaatggcaactacagtgggcagcgaactcgcgagggtgagctaatctccaaaagttgtctcagttcggattgttctctgcaactcgagagcatgaaggcggaatcgctagtaatcgcggatcagcatgccgcggtgaatacgttcccaggccttgtacacaccgcccgtcacaccatgggagttggattcacccgaaggcgctgcgctaaccgcaagggaggcaggcgaccacggtgggtttagcgactggggtg

SEQ ID NO: 3191 - DNA, 1411 bp, Sphingomonas hengshuiensis
aatgaacgctggcggcatgcctaacacatgcaagtcgaacgaagtccttcggggcttagtggcgcacgggtgcgtaacgcgtgggaatctgccccttggttcggaataacagtgagaaattactgctaataccggataacgacgtaagtccaaagatttatcgccgagggatgagcccgcgtaggattagctagttggtgtggtaaaggcgcaccaaggcgacgatccttagctggtctgagaggatgatcagccacactgggactgagacacggcccagactcctacgggaggcagcagtggggaatattggacaatgggcgaaagcctgatccagcaatgccgcgtgagtgatgaaggccttagggttgtaaagctcttttacccgggatgataatgacagtaccgggagaataagctccggctaactccgtgccagcagccgcggtaatacggagggagctagcgttattcggaattactgggcgtaaagcgcacgtaggcggctttgtaagtaagaggtgaaagcccggagatcaactccggaactgccttttagactgcatcgcttgaatccaggagaggtgagtggaattccgagtgtagaggtgaaattcgtagatattcggaagaacaccagtggcgaaggcggctcactggactggtattgacgctgaggtgcgaaagcgtggggagcaaacaggattagataccctggtagtccacgccgtaaacgatgataactagctgtctgggtacttggtacttaggtggcgcagctaacgcattaagttatccgcctggggagtacggccgcaaggttaaaactcaaatgaattgacgggggcctgcacaagcggtggagcatgtggtttaattcgaagcaacgcgcagaaccttaccagcgtttgacatgtccggacgacttcgagagatcgatttcttcccttcggggactggaacacaggtgctgcatggctgtcgtcagctcgtgtcgtgagatgttgggttaagtcccgcaacgagcgcaaccctcgactttagttaccatcatttagttgggtactctaaagtaaccgccggtgataagccggaggaaggtggggatgacgtcaagtcctcatggcccttacgcgctgggctacacacgtgctacaatggcgactacagtgggctgcaaactcgcgagggtgagctaatctccaaaagtcgtctcagttcggattgcactctgcaactcgagtgcatgaaggcggaatcgctagtaatcgtggatcagcatgccacggtgaatacgttcccaggccttgtacacaccgcccgtcacaccatgggagttggattcacccgaaggcgttgcgctaactcgcaagagaggcaggcgaccacggtgggtttagcgactggggtg

SEQ ID NO: 3192 - DNA, 1409 bp, Sphingomonas histidinilytica
aacgaacgctggcggcatgcctaacacatgcaagtcgaacgaaggcttcggccttagtggcgcacgggtgcgtaacgcgtgggaatctgcccttgggtacggaataactctccgaaaggagtgctaataccgtatgatgacgaaagtccaaagatttatcgcctgaggatgagcccgcgttggattagctagttggtggggtaaaggcctaccaaggcgacgatccatagctggtctgagaggatgatcagccacactgggactgagacacggcccagactcctacgggaggcagcagtggggaatattggacaatgggcgaaagcctgatccagcaatgccgcgtgagtgatgaaggccttagggttgtaaagctcttttacccgggaagataatgactgtaccgggagaataagccccggctaactccgtgccagcagccgcggtaatacggagggggctagcgttgttcggaattactgggcgtaaagcgcacgtaggcggctttgtaagttagaggtgaaagcccggggctcaaccccggaattgcctttaagactgcatcgcttgaacgtcggagaggtgagtggaattccgagtgtagaggtgaaattcgtagatattcggaagaacaccagtggcgaaggcggctcactggacgactgttgacgctgaggtgcgaaagcgtggggagcaaacaggattagataccctggtagtccacgccgtaaacgatgataactagctgtccgggcacttggtgcttgggtggcgcagctaacgcattaagttatccgcctggggagtacggccgcaaggttaaaactcaaagaaattgacgggggcctgcacaagcggtggagcatgtggtttaattcgaagcaacgcgcagaaccttaccaacgtttgacatccctagtatggttagtggagacactttccttcagttcggctggctaggtgacaggtgctgcatggctgtcgtcagctcgtgtcgtgagatgttgggttaagtcccgcaacgagcgcaaccctcgcctttagttgccatcattaagttgggtactctaaaggaaccgccggtgataagccggaggaaggtggggatgacgtcaagtcctcatggcccttacgcgttgggctacacacgtgctacaatggcaactacagtgggcagcaatcccgcgagggcgagctaatctccaaaagttgtctcagttcggattgttctctgcaactcgagagcatgaaggcggaatcgctagtaatcgcggatcagcatgccgcggtgaatacgttcccaggccttgtacacaccgcccgtcacaccatgggagttggattcacccgaaggcgctgcgctaaccgcaaggaggcaggcgaccacggtgggtttagcgactggggtg

SEQ ID NO: 3193 - DNA, 1409 bp, Sphingomonas indica
aacgaacgctggcggcatgcctaacacatgcaagtcgaacgagaccttcgggtctagtggcgcacgggtgcgtaacgcgtgggaatctgcccttcggttcggaataacagttagaaatgactgctaataccggatgatgtcttcggaccaaagatttatcgccgagggatgagcccgcgtaggattagcttgttggtgaggtaaaggctcaccaaggcgacgatccttagctggtctgagaggatgatcagccacactgggactgagacacggcccagactcctacgggaggcagcagtggggaatattggacaatgggcgaaagcctgatccagcaatgccgcgtgagtgatgaaggccttagggttgtaaagctcttttacccgggaagataatgactgtaccgggagaataagccccggctaactccgtgccagcagccgcggtaatacggagggggctagcgttgttcggaattactgggcgtaaagcgcgcgtaggcggctttgtaagttagaggtgaaagcctggagctcaactccagaactgcctttaagactgcatcgcttgaatccgggagaggtgagtggaattccgagtgtagaggtgaaattcgtagatattcggaagaacaccagtggcgaaggcggctcactggaccggcattgacgctgaggtgcgaaagcgtggggagcaaacaggattagataccctggtagtccacgccgtaaacgatgataactagctgtcgggggtcttagactttcggtggcgcagctaacgcattaagttatccgcctggggagtacggccgcaaggttaaaactcaaagaaattgacgggggcctgcacaagcggtggagcatgtggtttaattcgaagcaacgcgcagaaccttaccaacgtttgacatgtccagtatggttagtggagacactttccttcagttcggctggctggaacacaggtgctgcatggctgtcgtcagctcgtgtcgtgagatgttgggttaagtcccgcaacgagcgcaaccctcgaccttagttgccatcattaagttgggcactctaaggtaaccgccggtgataagccggaggaaggtggggatgacgtcaagtcctcatggcccttacgcgttgggctacacacgtgctacaatggcgactacagtgggcagcaaactcgcgagggtgagctaatctccaaaagtcgtctcagttcggattgcactctgcaactcgagtgcatgaaggcggaatcgctagtaatcgcggatcagcatgccgcggtgaatacgttcccaggccttgtacacaccgcccgtcacaccatgggagttggtttcacccgaaggctgtgcgctaaccgcaaggaggcagcagaccacggtgggatcagcgactggggtg

SEQ ID NO: 3194 - DNA, 1409 bp, Sphingomonas jatrophae
aacgaacgctggcggcatgcctaacacatgcaagtcgaacgaaggcttcggccttagtggcgcacgggtgcgtaacgcgtgggaatctgcccaaaggtacggaataactcctcgaaaggggtgctaataccgtatgatgtcgcaagaccaaagatttatcgcctttggatgagcccgcgtaggattagctagttggtggggtaaaggcctaccaaggcgacgatccttagctggtctgagaggatgatcagccacactgggactgagacacggcccagactcctacgggaggcagcagtggggaatattggacaatgggcgaaagcctgatccagcaatgccgcgtgagtgatgaaggccttagggttgtaaagctcttttacccgggaagataatgactgtaccgggagaataagccccggctaactccgtgccagcagccgcggtaatacggagggggctagcgttgttcggaattactgggcgtaaagcgcacgtaggcggctttgtaagtcaggggtgaaagcctggagctcaactccagaactgcctttgagactgcatcgcttgaatcatggagaggtcagtggaattccgagtgtagaggtgaaattcgtagatattcggaagaacaccagtggcgaaggcggctgactggacatgtattgacgctgaggtgcgaaagcgtggggagcaaacaggattagataccctggtagtccacgccgtaaacgatgagaactagctgtccgggcacttggtgcttgggtggcgcagctaacgcattaagttctccgcctggggagtacggccgcaaggttaaaactcaaagaaattgacgggggcctgcacaagcggtggagcatgtggtttaattcgaagcaacgcgcagaaccttaccaacgtttgacatgcccggacgacttccagagatggatttcttcccttcggggactgggacacaggtgctgcatggctgtcgtcagctcgtgtcgtgagatgttgggttaagtcccgcaacgagcgcaaccctcgcctttagttgccatcattaagttgggcactctaaaggaaccgccggtgataagccggaggaaggtggggatgacgtcaagtcctcatggcccttacgcgttgggctacacacgtgctacaatggcggtgacagtgggcagcaaactcgcgagggtgagctaatctccaaaagccgtctcagttcggattgcactctgcaactcgagtgcatgaaggcggaatcgctagtaatcgcggatcagcatgccgcggtgaatacgttcccaggccttgtacacaccgcccgtcacaccatgggagttggattcacccgaaggcgctgcgctaacccgcaagggaggcaggcgaccacggtgggtttagcgactggggtg

SEQ ID NO: 3195 - DNA, 1410 bp, Sphingomonas jeddahensis
aacgaacgctggcggcatgcctaacacatgcaagtcgaacgatgccttcgggcatagtggcgcacgggtgcgtaacgcgtgggaatctgccccttggttcggaataacagttagaaatgactgctaataccggatgatgacgttaagtccaaagatttatcgccgagggatgagcccgcgtaggattagctagttggtgtggtaagagcgcaccaaggcgacgatccttagctggtctgagaggatgatcagccacactgggactgagacacggcccagactcctacgggaggcagcagtggggaatattggacaatgggcgaaagcctgatccagcaatgccgcgtgagtgatgaaggccttagggttgtaaagctcttttacccgggatgataatgacagtaccgggagaataagctccggctaactccgtgccagcagccgcggtaatacggagggagctagcgttgttcggaattactgggcgtaaagcgcacgtaggcggctttgtaagttagaggtgaaagcctggagctcaactccagaattgcctttaagactgcatcgctcgaatccaggagaggtgagtggaattccgagtgtagaggtgaaattcgtagatattcggaagaacaccagtggcgaaggcggctcactggactggtattgacgctgaggtgcgaaagcgtggggagcaaacaggattagataccctggtagtccacgccgtaaacgatgataactagctgtccggggacttggtccttgggtggcgcagctaacgcattaagttatccgcctggggagtacggccgcaaggttaaaactcaaatgaattgacgggggcctgcacaagcggtggagcatgtggtttaattcgaagcaacgcgcagaaccttaccagcgtttgacatggtaggacggctccgggagaccggttccttcccttcggggacctacacacaggtgctgcatggctgtcgtcagctcgtgtcgtgagatgttgggttaagtcccgcaacgagcgcaaccctcgcctttagttaccatcatttagttgggtactctaaaggaaccgccggtgataagccggaggaaggtggggatgacgtcaagtcctcatggcccttacgcgctgggctacacacgtgctacaatggcaactacagtgggcagcaatcccgcgagggtgagctaatctccaaaagttgtctcagttcggattgttctctgcaactcgagagcatgaaggcggaatcgctagtaatcgcggatcagcacgccgcggtgaatacgttcccaggccttgtacacaccgcccgtcacaccatgggagttggattcacccgaaggcgtctcgctaacccgcaagggaggcaggcgaccacggtgggtttagcgactggggtg

SEQ ID NO: 3196 - DNA, 1409 bp, Sphingomonas koreensis
aatgaacgctggcggcatgcctaacacatgcaagtcgaacgaaggcttcggccttagtggcgcacgggtgcgtaacgcgtgggaatctgcccttgggttcggaataacagttagaaatgactgctaataccggatgatgtcgtaagaccaaagatttatcgcccaaggatgagcccgcgtaggattagctagttggtgaggtaaaagctcaccaaggcgacgatccttagctggtctgagaggatgatcagccacactgggactgagacacggcccagactcctacgggaggcagcagtggggaatattggacaatgggcgaaagcctgatccagcaatgccgcgtgagtgatgaaggccttagggttgtaaagctcttttacccgggatgataatgacagtaccgggagaataagctccggctaacttcgtgccagcagccgcggtaatacgaggggagctagcgttattcggaattactgggcgtaaagcgcacgtaggcggctttgtaagttagaggtgaaagcccggggctcaactccggaattgcctttaagactgcatcgcttgaatccaggagaggtgagtggaattccgagtgtagaggtgaaattcgtagatattcggaagaacaccagtggcgaaggcggctcactggactggtattgacgctgaggtgcgaaagcgtggggagcaaacaggattagataccctggtagtccacgccgtaaacgatgataactagctgtccgggcacttggtgcttgggtggcgcagctaacgcattaagttatccgcctggggagtacggtcgcaagattaaaactcaaaggaattgacgggggcctgcacaagcggtggagcatgtggtttaattcgaagcaacgcgcagaaccttaccagcgtttgacatgtccggacgatttccagagatggatttcttcccttcggggactggaacacaggtgctgcatggctgtcgtcagctcgtgtcgtgagatgttgggttaagtcccgcaacgagcgcaaccctcgcctttagttaccatcatttagttgggtactctaaaggaaccgccggtgataagccggaggaaggtggggatgacgtcaagtcctcatggcccttacgcgctgggctacacacgtgctacaatggcaactacagtgggcagcaatcccgcgagggtgagctaatctccaaaagttgtctcagttcggattgttctctgcaactcgagagcatgaaggcggaatcgctagtaatcgcggatcagcatgccgcggtgaatacgttcccaggccttgtacacaccgcccgtcacaccatgggagttgggttcacccgaaggcgttgcgctaactcgcaagagaggcaggcgaccacggtgggcttagcgactggggtg

SEQ ID NO: 3197 - DNA, 1411 bp, Sphingomonas laterariae
aacgaacgctggcggcatgcctaacacatgcaagtcgaacgaaggcttcggccttagtggcgcacgggtgcgtaacgcgtgggaatctgcccttgggtacggaataacagttagaaatgactgctaataccgtatgatgacgtaagtccaaagatttatcgcccagggatgagcccgcgtaggattaggtagttggtgaggtaaaggctcaccaagccgacgatccttagctggtctgagaggatgatcagccacactgggactgagacacggcccagactcctacgggaggcagcagtggggaatattggacaatgggcgaaagcctgatccagcaatgccgcgtgagtgatgaaggccctagggttgtaaagctcttttacccgggaagataatgactgtaccgggagaataagccccggctaactccgtgccagcagccgcggtaatacggagggggctagcgttgttcggaattactgggcgtaaagcgcacgtaggcggcttggtaagttagaggtgaaagcccggagctcaactccggaattgcctttaagactgcctcgcttgaacgtcggagaggtgagtggaattccgagtgtagaggtgaaattcgtagatattcggaagaacaccagtggcgaaggcggctcactggacgactgttgacgctgaggtgcgaaagcgtggggagcaaacaggattagataccctggtagtccacgccgtaaacgatgataactagctgtccgggtacttggtacttgggtggcgcagctaacgcattaagttatccgcctggggagtacggccgcaaggttaaaactcaaagaaattgacgggggcctgcacaagcggtggagcatgtggtttaattcgaagcaacgcgcagaaccttaccaacgtttgacatccctatcgcggttagtggagacactttccttcagttcggctggataggtgacaggtgctgcatggctgtcgtcagctcgtgtcgtgagatgttgggttaagtcccgcaacgagcgcaaccctcgcctttagttgccatcatttagttgggcactctaaaggaaccgccggtgataagccggaggaaggtggggatgacgtcaagtcctcatggcccttacgcgttgggctacacacgtgctacaatggcaactacagtgggcagcaaactcgcgagggtgagctaatctccaaaagttgtctcagttcggattgttctctgcaactcgagagcatgaaggcggaatcgctagtaatcgcggatcagcatgccgcggtgaatacgttcccaggccttgtacacaccgcccgtcacaccatgggagttggattcacccgaaggcgctgcgctaacccgcaagggaggcaggcgaccacggtgggtttagcgactggggtg

SEQ ID NO: 3198 - DNA, 1409 bp, Sphingomonas melonis
aacgaacgctggcggcatgcctaacacatgcaagtcgaacgagatcttcgggtctagtggcgcacgggtgcgtaacgcgtgggaatctgccctttggttcggaataacagttggaaacgactgctaataccggatgatgacgaaagtccaaagatttatcgccagaggatgagcccgcgtaggattagctagttggtgtggtaaaggcgcaccaaggcgacgatccttagctggtctgagaggatgatcagccacactgggactgagacacggcccagactcctacgggaggcagcagtggggaatattggacaatgggcgaaagcctgatccagcaatgccgcgtgagtgatgaaggccttagggttgtaaagctcttttacccgggatgataatgacagtaccgggagaataagctccggctaactccgtgccagcagccgcggtaatacggagggagctagcgttgttcggaattactgggcgtaaagcgcacgtaggcggctttgtaagttagaggtgaaagcctggagctcaactccagaactgcctttaagactgcatcgcttgaatccaggagaggtgagtggaattccgagtgtagaggtgaaattcgtagatattcggaagaacaccagtggcgaaggcggctcactggactggtattgacgctgaggtgcgaaagcgtggggagcaaacaggattagataccctggtagtccacgccgtaaacgatgataactagctgtccggggacttggtctttgggtggcgcagctaacgcattaagttatccgcctggggagtacggccgcaaggttaaaactcaaatgaattgacgggggcctgcacaagcggtggagcatgtggtttaattcgaagcaacgcgcagaaccttaccagcgtttgacatgtccggacgatttccagagatggatctcttcccttcggggactggaacacaggtgctgcatggctgtcgtcagctcgtgtcgtgagatgttgggttaagtcccgcaacgagcgcaaccctcgcctttagttaccatcattcagttggggactctaaaggaaccgccggtgataagccggaggaaggtggggatgacgtcaagtcctcatggcccttacgcgctgggctacacacgtgctacaatggcggtgacagtgggcagcaaactcgcgagagtgcgctaatctccaaaagccgtctcagttcggattgttctctgcaactcgagagcatgaaggcggaatcgctagtaatcgcggatcagcatgccgcggtgaatacgttcccaggccttgtacacaccgcccgtcacaccatgggagttgggttcacccgaaggcgttgcgctaactcgcaagagaggcaggcgaccacggtgggcttagcgactggggtg

SEQ ID NO: 3199 - DNA, 1409 bp, Sphingomonas mucosissima
aatgaacgctggcggcatgcctaacacatgcaagtcgaacgaaggcttcggccttagtggcgcacgggtgcgtaacgcgtgggaatctgccccttggttcggaataacagttagaaatgactgctaataccggatgacgacgtaagtccaaagatttatcgccgagggatgagcccgcgtaggattagctagttggtgtggtaagagcgcaccaaggcgacgatccttagctggtctgagaggatgatcagccacactgggactgagacacggcccagactcctacgggaggcagcagtggggaatattggacaatgggcgaaagcctgatccagcaatgccgcgtgagtgatgaaggccttagggttgtaaagctcttttacccgggatgataatgacagtaccgggagaataagctccggctaactccgtgccagcagccgcggtaatacggagggagctagcgttattcggaattactgggcgtaaagcgcacgtaggcggctttgtaagttagaggtgaaagcctggagctcaactccagaattgcctttaagactgcatcgctcgaatccaggagaggtgagtggaattccgagtgtagaggtgaaattcgtagatattcggaagaacaccagtggcgaaggcggctcactggactggtattgacgctgaggtgcgaaagcgtggggagcaaacaggattagataccctggtagtccacgccgtaaacgatgataactagctgtccggggacttggtccttgggtggcgcagctaacgcattaagttatccgcctggggagtacggccgcaaggttaaaactcaaatgaattgacgggggcctgcacaagcggtggagcatgtggtttaattcgaagcaacgcgcagaaccttaccagcgtttgacatggtaggacgactttcagagatggatttcttcccttcgcggacctacacacaggtgctgcatggctgtcgtcagctcgtgtcgtgagatgttgggttaagtcccgcaacgagcgcaaccctcgcctttagttaccatcatttagttgggtactctaaaggaaccgccggtgataagccggaggaaggtggggatgacgtcaagtcctcatggcccttacgcgctgggctacacacgtgctacaatggcaactacagtgggcagcaatcccgcgagggtgagctaatctccaaaagttgtctcagttcggattgttctctgcaactcgagagcatgaaggcggaatcgctagtaatcgcggatcagcacgccgcggtgaatacgttcccaggccttgtacacaccgcccgtcacaccatgggagttggattcacccgaaggcgtcgcgctaacccgcaagggaggcaggcgaccacggtgggtttagcgactggggtg

SEQ ID NO: 3200 - DNA, 1409 bp, Sphingomonas naasensis
aatgaacgctggcggcatgcctaacacatgcaagtcgaacgaagccttcgggtttagtggcgcacgggtgcgtaacgcgtgggaatctgccttcaggttcggaataactccccgaaaggggtgctaataccggatgatgtctacggaccaaagatttatcgcctgaagatgagcccgcgtaggattagctagttggtggggtaaaggcccaccaaggcgacgatccttagctggtctgagaggatgatcagccacactgggactgagacacggcccagactcctacgggaggcagcagtggggaatattggacaatgggcgaaagcctgatccagcaatgccgcgtgagtgatgaaggccttagggttgtaaagctcttttacccgggatgataatgacagtaccgggagaataagctccggctaactccgtgccagcagccgcggtaatacggagggagctagcgttattcggaattactgggcgtaaagcgcacgtaggcggctttgtaagtcagaggtgaaagcctggagctcaactccagaactgcctttgagactgcatcgcttgaatccaggagaggtgagtggaattccgagtgtagaggtgaaattcgtagatattcggaagaacaccagtggcgaaggcggctcactggactggtattgacgctgaggtgcgaaagcgtggggagcaaacaggattagataccctggtagtccacgccgtaaacgatgataactagctgtctgggtacttggtattcaggtggcgcagctaacgcattaagttatccgcctggggagtacggccgcaaggttaaaactcaaatgaattgacgggggcctgcacaagcggtggagcatgtggtttaattcgaagcaacgcgcagaaccttaccagcgtttgacatgcccggacggtttccagagatggattccttcccttcggggactgggacacaggtgctgcatggctgtcgtcagctcgtgtcgtgagatgttgggttaagtcccgcaacgagcgcaaccctcgcctttagttaccatcatttagttggggactctaaaggaaccgccggtgataagccggaggaaggtggggatgacgtcaagtcctcatggcccttacgcgctgggctacacacgtgctacaatggcaactacagtgggcagcaatcccgcgagggtgagctaatctccaaaagttgtctcagttcggattgttctctgcaactcgagagcatgaaggcggaatcgctagtaatcgcggatcagcatgccgcggtgaatacgttcccaggccttgtacacaccgcccgtcacaccatgggagttggattcacccgaaggcgttgcgctaactcgcaagagaggcaggcgaccacggtgggtttagcgactggggtg

SEQ ID NO: 3201 - DNA, 1407 bp, Sphingomonas olei
aatgaacgctggcggcatgcctaacacatgcaagtcgaacgaaggcttcggccttagtggcgcacgggtgcgtaacgcgtgggaatctgccccttggttcggaataacagttagaaatgactgctaataccggatgatgacgtaagtccaaagatttatcgccgagggatgagcccgcgtaggattagctagttggtgtggtaagagcgcaccaaggcgacgatccttagctggtctgagaggatgatcagccacactgggactgagacacggcccagactcctacgggaggcagcagtggggaatattggacaatgggcgaaagcctgatccagcaatgccgcgtgagtgatgaaggccttagggttgtaaagctcttttacccgggatgataatgacagtaccgggagaataagctccggctaactccgtgccagcagccgcggtaatacggagggagctagcgttattcggaattactgggcgtaaagcgcacgtaggcggctttgtaagtaagaggtgaaagcccagagctcaactctggaattgccttttagactgcatcgcttgaatcatggagaggtcagtggaattccgagtgtagaggtgaaattcgtagatattcggaagaacaccagtggcgaaggcggctgactggacatgtattgacgctgaggtgcgaaagcgtggggagcaaacaggattagataccctggtagtccacgccgtaaacgatgataactagctgtccggggacttggtccttgggtggcgcagctaacgcattaagttatccgcctggggagtacggccgcaaggttaaaactcaaatgaattgacgggggcctgcacaagcggtggagcatgtggtttaattcgaagcaacgcgcagaaccttaccagcgtttgacatggtaggacggcttccagagatggattccttcccttcggggacctacacacaggtgctgcatggctgtcgtcagctcgtgtcgtgagatgttgggttaagtcccgcaacgagcgcaaccctcgcctttagttaccatcatttagttgggtactctaaaggaaccgccggtgataagccggaggaaggtggggatgacgtcaagtcctcatggcccttacgcgctgggctacacacgtgctacaatggcaactacagtgggcagcaatcccgcgagggtgagctaatctccaaaagttgtctcagttcggattgttctctgcaactcgagagcatgaaggcggaatcgctagtaatcgcggatcagcatgccgcggtgaatacgttcccaggccttgtacacaccgcccgtcacaccatgggagttggattcacccgaaggcgtcgcgctaaccgcaaggaggcaggcgaccacggtgggtttagcgactggggtg

SEQ ID NO: 3202 - DNA, 1306 bp, Sphingomonas oligophenolica
aatgaacgctggcggcatgcctaacacatgcaagtcgaacgaagccttcgggcttagtggcgcacgggtgcgtaacgcgtgggaatctgcccttgggttcggaataacagcgagaaattgctgctaataccggatgatgacgtaagtccaaagatttatcgcccaaggatgagcccgcgtaggattagctagttggtgaggtaaaggctcaccaaggcgacgatccttagctggtctgagaggatgatcagccacactgggactgagacacggcccagactcctacgggaggcagcagtggggaatattggacaatgggcgaaagcctgatccagcaatgccgcgtgagtgatgaaggccttagggttgtaaagctcttttacccgggatgataatgacagtaccgggagaataagctccggctaactccgtgccagcagccgcggtaatacggagggagctagcgttattcggaattactgggcgtaaagcgcacgtaggcggctttgtaagttagaggtgaaagcctggagctcaactccagaattgcctttaagactgcatcgcttgaatccaggagaggtgagtggaattccgagtgtagaggtgaaattcgtagatattcggaagaacaccagtggcgaaggcggctcactggactggtattgacgctgaggtgcgaaagcgtggggagcaaacaggattagataccctggtagtccacgccgtaaacgatgataactagctgtcggggctcttagagcttcggtggcgcactaacgcattaagttatccgcctggggagtacggccgcaaggttaaaactcaaaggaattgacgggggcctgcacaagcggtggagcatgtggtttaattcgaagcaacgcgcagaaccttaccagcgtttgacatgtccggacgatttccagagatggatctcttcccttcggggactggaacacaggtgctgcatggctgtcgtcagctcgtgtcgtgagatgttgggttaagtcccgcaacgagcgcaaccctcgtctttagttgccatcatttagttgggcactctaaagaaaccgccggtgataagccggaggaaggtggggatgacgtcaagtcctcatggcccttacgcgctgggctacacacgtgctacaatggcggtgacagtgggcagcaatcccgcaagggtgagctaatctccaaaagccgtctcagttcggattgttctctgcaactcgagagcatgaaggcggaatcgctagtaatcgcggatcagcatgccgcggtgaatacgttcccaggcctt

SEQ ID NO: 3203 - DNA, 1413 bp, Sphingomonas panacis
aatgaacgctggcggcatgcctaacacatgcaagtcgaacgaacaccttcgggtgttagtggcgcacgggtgcgtaacgcgtgggaatctgccccttggttcggaataacagcgagaaattgctgctaataccggatgatgtcttcggaccaaagatttatcgccgagggatgagcccgcgtaggattagctagttggtgtggtaaaggcgcaccaaggcgacgatccttagctggtctgagaggatgatcagccacactgggactgagacacggcccagactcctacgggaggcagcagtggggaatattggacaatgggcgcaagcctgatccagcaatgccgcgtgagtgatgaaggccttagggttgtaaagctcttttacccgggatgataatgacagtaccgggagaataagctccggctaactccgtgccagcagccgcggtaatacggagggagctagcgttattcggaattactgggcgtaaagcgcacgtaggcggctttgtaagttagaggtgaaagcctggagctcaactccagaattgcctttaagactgcatcgcttgaatccaggagaggtgagtggaattccgagtgtagaggtgaaattcgtagatattcggaagaacaccagtggcgaaggcggctcactggactggtattgacgctgaggtgcgaaagcgtggggagcaaacaggattagataccctggtagtccacgccgtaaacgatgataactagctgtcagggctcatagagttttggtggcgcagctaacgcattaagttatccgcctggggagtacggccgcaaggttaaaactcaaatgaattgacgggggcctgcacaagcggtggagcatgtggtttaattcgaagcaacgcgcagaaccttaccagcgtttgacatgtccggacgatttcgggagaccgatctcttcccttcggggactggaacacaggtgctgcatggctgtcgtcagctcgtgtcgtgagatgttgggttaagtcccgcaacgagcgcaaccctcgcctttagttaccatcatttagttggggactctaaaggaaccgccggtgataagccggaggaaggtggggatgacgtcaagtcctcatggcccttacgcgctgggctacacacgtgctacaatggcaactacagtgggcagcaatcctgcaagggtgagctaatctccaaaagttgtctcagttcggattgttctctgcaactcgagagcatgaaggcggaatcgctagtaatcgcggatcagcatgccgcggtgaatacgttcccaggccttgtacacaccgcccgtcacaccatgggagttgggttcacccgaaggcgttgcgctaactcagcaatgagaggcaggcgaccacggtgggcttagcgactggggtg

SEQ ID NO: 3204 - DNA, 1413 bp, Sphingomonas parapaucimobilis
aacgaacgctggcggcatgcctaacacatgcaagtcgaacgaggcccttcggggtttagtggcgcacgggtgcgtaacgcgtgggaatctgccctttggttcggaataacagctggaaacggctgctaataccggatgatgacgagagtccaaagatttatcgccagaggatgagcccgcgttggattaggtagttggtggggtaaaggcctaccaagccgacgatccatagctggtctgagaggatgatcagccacactgggactgagacacggcccagactcctacgggaggcagcagtggggaatattggacaatgggcgcaagcctgatccagcaatgccgcgtgagtgatgaaggccctagggttgtaaagctcttttacccgggaagataatgactgtaccgggagaataagccccggctaactccgtgccagcagccgcggtaatacggagggggctagcgttgttcggaattactgggcgtaaagcgcacgtaggcggctttgtaagtcagaggtgaaagcctggagctcaactccagaactgcctttgagactgcatcgcttgaatccaggagaggtcagtggaattccgagtgtagaggtgaaattcgtagatattcggaagaacaccagtggcgaaggcggctgactggactggtattgacgctgaggtgcgaaagcgtggggagcaaacaggattagataccctggtagtccacgccgtaaacgatgataactagctgtccgggcacttggtgcttgggtggcgcagctaacgcattaagttatccgcctggggagtacggccgcaaggttaaaactcaaaggaattgacgggggcctgcacaagcggtggagcatgtggtttaattcgaagcaacgcgcagaaccttaccagcgtttgacatgtccggacgatttccagagatggatctctttccttcggggactggaacacaggtgctgcatggctgtcgtcagctcgtgtcgtgagatgttgggttaagtcccgcaacgagcgcaaccctcgcctttagttaccatcatttggttgggtactctaaaggaaccgccggtgataagccggaggaaggtggggatgacgtcaagtcctcatggcccttacgcgctgggctacacacgtgctacaatggcaactacagtgggcagcgaccctgcgagggcgagctaatccccaaaagttgtctcagttcggattgttctctgcaactcgagagcatgaaggcggaatcgctagtaatcgcggatcagcatgccgcggtgaatacgttcccaggccttgtacacaccgcccgtcacaccatgggagttggattcacccgaaggcgttgcgccaacctagcaataggaagcaggcgaccacggtgggttcagcgactggggtg

SEQ ID NO: 3205 - DNA, 1411 bp, Sphingomonas paucimobilis
aacgaacgctggcggcatgcctaacacatgcaagtcgaacgaaggcttcggccttagtggcgcacgggtgcgtaacgcgtgggaatctgcccttaggttcggaataacagctggaaacggctgctaataccggatgatatcgcgagatcaaagatttatcgcctgaggatgagcccgcgttggattaggtagttggtggggtaaaggcctaccaagccgacgatccatagctggtctgagaggatgatcagccacactgggactgagacacggcccagactcctacgggaggcagcagtggggaatattggacaatgggcgaaagcctgatccagcaatgccgcgtgagtgatgaaggccctagggttgtaaagctcttttacccgggaagataatgactgtaccgggagaataagccccggctaactccgtgccagcagccgcggtaatacggagggggctagcgttgttcggaattactgggcgtaaagcgcacgtaggcggctttgtaagtcagaggtgaaagcctggagctcaactccagaactgcctttgagactgcatcgcttgaatccaggagaggtcagtggaattccgagtgtagaggtgaaattcgtagatattcggaagaacaccagtggcgaaggcggctgactggactggtattgacgctgaggtgcgaaagcgtggggagcaaacaggattagataccctggtagtccacgccgtaaacgatgataactagctgtccgggcacttggtgcttgggtggcgcagctaacgcattaagttatccgcctggggagtacggccgcaaggttaaaactcaaaggaattgacgggggcctgcacaagcggtggagcatgtggtttaattcgaagcaacgcgcagaaccttaccagcgtttgacatggtaggacgacttccagagatggatttcttcccttcggggacctacacacaggtgctgcatggctgtcgtcagctcgtgtcgtgagatgttgggttaagtcccgcaacgagcgcaaccctcgcctttagttaccatcatttggttgggtactctaaaggaaccgccggtgataagccggaggaaggtggggatgacgtcaagtcctcatggcccttacgcgctgggctacacacgtgctacaatggcaactacagtgggcagcgaccctgcgagggcgagctaatccccaaaagttgtctcagttcggattgttctctgcaactcgagagcatgaaggcggaatcgctagtaatcgcggatcagcatgccgcggtgaatacgttcccaggccttgtacacaccgcccgtcacaccatgggagttggattcacccgaaggcgttgcgccaacctagcaataggaagcaggcgaccacggtgggttcagcgactggggtg

SEQ ID NO: 3206 - DNA, 1412 bp, Sphingomonas rubra
aacgaacgctggcggcatgcctaacacatgcaagtcgaacgagatcttcggatctagtggcgcacgggtgcgtaacgcgtgggaatctgccccctggttcgggataaccgttggaaacgacggctaataccggatgatgtcgataagaccaaagatttatcgcctggggatgagcccgcgtaggattagctagttggtggggtaaaggcctaccaaggcgacgatccttagctggtctgagaggatgatcagccacactgggactgagacacggcccagactcctacgggaggcagcagtggggaatattggacaatgggcgaaagcctgatccagcaatgccgcgtgagtgatgaaggccttagggttgtaaagctcttttacccgggatgataatgacagtaccgggagaataagccccggctaactccgtgccagcagccgcggtaatacggagggggctagcgttgttcggaattactgggcgtaaagcgcacgtaggcggctttgtaagttagaggtgaaagcccggggctcaaccccggaattgcctttgatactgcatggcttgaatccaggagaggtcagtggaattccgagtgtagaggtgaaattcgtagatattcggaagaacaccagtggcgaaggcggctgactggactggtattgacgctgaggtgcgaaagcgtggggagcaaacaggattagataccctggtagtccacgccgtaaacgatgataactagctgtccgggaacttagttcttgggtggcgcagctaacgcattaagttatccgcctggggagtacggccgcaaggttaaaactcaaatgaattgacgggggcctgcacaagcggtggagcatgtggtttaattcgaagcaacgcgcagaaccttaccagcgtttgacatgtccggacgatttccagagatggatttcttcccttcggggactggaacacaggtgctgcatggctgtcgtcagctcgtgtcgtgagatgttgggttaagtcccgcaacgagcgcaaccctcgcctttagttgccatcattcagttgggcactttaaaggaaccgccggtgataagccggaggaaggtggggatgacgtcaagtcctcatggcccttacgcgctgggctacacacgtgctacaatggcggtgacagtgggcagcaatcccgcaagggtgagctaatctccaaaagccgtctcagttcggattgttctctgcaactcgagagcatgaaggcggaatcgctagtaatcgcggatcagcatgccgcggtgaatacgttcccaggccttgtacacaccgcccgtcacaccatgggagttgggttcacccgaaggcgttgcgctaactcagcaatgagaggcaggcgaccacggtgggcttagcgactggggtg

SEQ ID NO: 3207 - DNA, 1409 bp, Sphingomonas sanguinis
aacgaacgctggcggcatgcctaacacatgcaagtcgaacgaaggcttcggccttagtggcgcacgggtgcgtaacgcgtgggaatctgcccttaggttcggaataacagctggaaacggctgctaataccggatgatgacgaaagtccaaagatttatcgcctgaggatgagcccgcgttggattaggtagttggtggggtaaaggcctaccaagccgacgatccatagctggtctgagaggatgatcagccacactgggactgagacacggcccagactcctacgggaggcagcagtggggaatattggacaatgggcgaaagcctgatccagcaatgccgcgtgagtgatgaaggccctagggttgtaaagctcttttacccgggaagataatgactgtaccgggagaataagccccggctaactccgtgccagcagccgcggtaatacggagggggctagcgttgttcggaattactgggcgtaaagcgcacgtaggcggctttgtaagtcagaggtgaaagcctggagctcaactccagaactgcctttgagactgcatcgcttgaatccaggagaggtcagtggaattccgagtgtagaggtgaaattcgtagatattcggaagaacaccagtggcgaaggcggctgactggactggtattgacgctgaggtgcgaaagcgtggggagcaaacaggattagataccctggtagtccacgccgtaaacgatgataactagctgtccgggcacttggtgcttgggtggcgcagctaacgcattaagttatccgcctggggagtacggccgcaaggttaaaactcaaaggaattgacgggggcctgcacaagcggtggagcatgtggtttaattcgaagcaacgcgcagaaccttaccagcgtttgacatgtccggacgatttccagagatggatctcttcccttcggggactggaacacaggtgctgcatggctgtcgtcagctcgtgtcgtgagatgttgggttaagtcccgcaacgagcgcaaccctcgcctttagttaccatcatttggttgggtactctaaaggaaccgccggtgataagccggaggaaggtggggatgacgtcaagtcctcatggcccttacgcgctgggctacacacgtgctacaatggcaactacagtgggcagcgaccctgcgagggcgagctaatccccaaaagttgtctcagttcggattgttctctgcaactcgagagcatgaaggcggaatcgctagtaatcgcggatcagcatgccgcggtgaatacgttcccaggccttgtacacaccgcccgtcacaccatgggagttggattcacccgaaggcgttgcgccaacccgcaagggaagcaggcgaccacggtgggttcagcgactggggtg

SEQ ID NO: 3208 - DNA, 1409 bp, Sphingomonas sanxanigenens
aacgaacgctggcggcatgcctaacacatgcaagtcgaacgagaccttcgggtctagtggcgcacgggtgcgtaacgcgtgggaatctgcccttgggttcggaataactcagagaaatttgagctaataccggatgatgtcgagagaccaaagatttatcgcccagggatgagcccgcgtaggattagctagttggtgaggtaaaggctcaccaaggcgacgatccttagctggtctgagaggatgatcagccacactgggactgagacacggcccagactcctacgggaggcagcagtggggaatattggacaatgggcgcaagcctgatccagcaatgccgcgtgagtgatgaaggccctagggttgtaaagctcttttacccgggatgataatgacagtaccgggagaataagccccggctaactccgtgccagcagccgcggtaatacggagggggctagcgttgttcggaattactgggcgtaaagcgcacgtaggcggctttgtaagttagaggtgaaagcctggagctcaacttcagaatagcctttaagactgcatcgcttgaatccaggagaggtgagtggaattccgagtgtagaggtgaaattcgtagatattcggaagaacaccagtggcgaaggcggctcactggactggtattgacgctgaggtgcgaaagcgtggggagcaaacaggattagataccctggtagtccacgccgtaaacgatgataactagctgtccgggcacttggtgcttgggtggcgcagctaacgcattaagttatccgcctggggagtacggtcgcaagattaaaactcaaaggaattgacgggggcctgcacaagcggtggagcatgtggtttaattcgaagcaacgcgcagaaccttaccagcgtttgacatggctagtatgggtctcagagatggggtccttcagttcggctggctagcacacaggtgctgcatggctgtcgtcagctcgtgtcgtgagatgttgggttaagtcccgcaacgagcgcaaccctcgcctttagttaccatcatttggttgggtactctaaaggaaccgccggtgataagccggaggaaggtggggatgacgtcaagtcctcatggcccttacgcgctgggctacacacgtgctacaatggcaactacagtgggctgcgaactcgcgagggtgagctaatctccaaaagttgtctcagttcggattgttctctgcaactcgagagcatgaaggcggaatcgctagtaatcgcggatcagcatgccgcggtgaatacgttcccaggccttgtacacaccgcccgtcacaccatgggagttggtttcacccgaaggcagtgcgctaaccgcaaggaggcagctgaccacggtgggatcagcgactggggtg

SEQ ID NO: 3209 - DNA, 1409 bp, Sphingomonas spermidinifaciens
aacgaacgctggcggcatgcctaacacatgcaagtcgaacgaaggcttcggccttagtggcgcacgggtgcgtaacgcgtgggaatctgcccttgggttcgggataacagtgagaaattactgctaataccggatgatgacttcggtccaaagatttatcgcccagggatgagcccgcgttggattagctagttggtggggtaaaggcctaccaaggcgacgatccatagctggtctgagaggatgatcagccacactgggactgagacacggcccagactcctacgggaggcagcagtggggaatattggacaatgggcgaaagcctgatccagcaatgccgcgtgagtgatgaaggccttagggttgtaaagctcttttacccgggaagataatgactgtaccgggagaataagctccggctaactccgtgccagcagccgcggtaatacggagggagctagcgttgttcggaattactgggcgtaaagcgcacgtaggcggctttgtaagttagaggtgaaagcctggagctcaactccagaactgcctttaagactgcatcgctcgaatccaggagaggtgagtggaattccgagtgtagaggtgaaattcgtagatattcggaagaacaccagtggcgaaggcggctcactggactggtattgacgctgaggtgcgaaagcgtggggagcaaacaggattagataccctggtagtccacgccgtaaacgatgataactagctgtccggtcacttggtgattgggtggcgcagctaacgcattaagttatccgcctggggagtacggccgcaaggttaaaactcaaaggaattgacgggggcctgcacaagcggtggagcatgtggtttaattcgaagcaacgcgcagaaccttaccagcgtttgacatggtaggacgactggcagagatgcctttcttcccttcggggacctacacacaggtgctgcatggctgtcgtcagctcgtgtcgtgagatgttgggttaagtcccgcaacgagcgcaaccctcgcctttagttaccatcatttagttgggtactctaaaggaaccgccggtgataagccggaggaaggtggggatgacgtcaagtcctcatggcccttacgcgctgggctacacacgtgctacaatggcaggtacagtgggcagcaatcccgcgagggtgagctaatctccaaaacctgtctcagttcggattgttctctgcaactcgagagcatgaaggcggaatcgctagtaatcgcggatcagcatgccgcggtgaatacgttcccaggccttgtacacaccgcccgtcacaccatgggagttgggttcacccgaaggcgttgcgctaactcgcaagagaggcaggcgaccacggtgggcttagcgactggggtg

SEQ ID NO: 3210 - DNA, 1411 bp, Sphingomonas trueperi
aacgaacgctggcggcatgcctaacacatgcaagtcgaacgagatcttcggatctagtggcgcacgggtgcgtaacgcgtgggaatctgccttggggttcggaataactccccgaaaggggtgctaataccggatgatgtcgagagaccaaagatttatcgccctgagatgagcccgcgtaggattagctagttggtgtggtaaaggcgcaccaaggcgacgatccttagctggtctgagaggatgatcagccacactgggactgagacacggcccagactcctacgggaggcagcagtggggaatattggacaatgggcgaaagcctgatccagcaatgccgcgtgagtgatgaaggccttagggttgtaaagctcttttacccgggaagataatgactgtaccgggagaataagccccggctaactccgtgccagcagccgcggtaatacggagggggctagcgttgttcggaattactgggcgtaaagcgcacgtaggcggctttgtaagtcagaggtgaaagcctggagctcaactccagaactgcctttgagactgcatcgcttgaatccaggagaggtgagtggaattccgagtgtagaggtgaaattcgtagatattcggaagaacaccagtggcgaaggcggctcactggactggtattgacgctgaggtgcgaaagcgtggggagcaaacaggattagataccctggtagtccacgccgtaaacgatgataactagctgtccgggcacttggtgcttgggtggcgcagctaacgcattaagttatccgcctggggagtacggccgcaaggttaaaactcaaaggaattgacgggggcctgcacaagcggtggagcatgtggtttaattcgaagcaacgcgcagaaccttaccagcgtttgacatggtaggacgactggcagagatgcctttcttcccttcggggacctacacacaggtgctgcatggctgtcgtcagctcgtgtcgtgagatgttgggttaagtcccgcaacgagcgcaaccctcgactttagttaccatcattaagttgggtactttaaagtaaccgccggtgataagccggaggaaggtggggatgacgtcaagtcctcatggcccttacgcgctgggctacacacgtgctacaatggcaagtacagtgggcagcaatcccgcgagggtgagctaatctccaaaacttgtctcagttcggattgttctctgcaactcgagagcatgaaggcggaatcgctagtaatcgcggatcagcatgccgcggtgaatacgttcccaggccttgtacacaccgcccgtcacaccatgggagttgggttcacccgaaggcgttgcgctaactcagcaatgagaggcaggcgaccacggtgggcttagcgactggggtg

SEQ ID NO: 3211 - DNA, 1409 bp, Sphingomonas wittichii
aacgaacgctggcggcatgcctaacacatgcaagtcgaacgaaggcttcggccttagtggcgcacgggtgcgtaacgcgtgggaatctgcccttgggtacggaataactcaccgaaaggtgtgctaataccgtatgatgacgtaagtccaaagatttatcgcctgaggatgagcccgcgttggattagctagttggtggggtaaaggcctaccaaggcgacgatccatagctggtctgagaggatgatcagccacactgggactgagacacggcccagactcctacgggaggcagcagtggggaatattggacaatgggcgaaagcctgatccagcaatgccgcgtgagtgatgaaggccttagggttgtaaagctcttttacccgggaagataatgactgtaccgggagaataagccccggctaactccgtgccagcagccgcggtaatacggagggggctagcgttgttcggaattactgggcgtaaagcgcacgtaggcggctttgtaagttagaggtgaaagcccggggctcaaccccggaatagcctttaagactgcatcgcttgaacgtcggagaggtgagtggaattccgagtgtagaggtgaaattcgtagatattcggaagaacaccagtggcgaaggcggctcactggacgactgttgacgctgaggtgcgaaagcgtggggagcaaacaggattagataccctggtagtccacgccgtaaacgatgataactagctgtccgggcacttggtgcttgggtggcgcagctaacgcattaagttatccgcctggggagtacggccgcaaggttaaaactcaaagaaattgacgggggcctgcacaagcggtggagcatgtggtttaattcgaagcaacgcgcagaaccttaccaacgtttgacatccctagtatggatcgtggagacactttccttcagttcggctggctaggtgacaggtgctgcatggctgtcgtcagctcgtgtcgtgagatgttgggttaagtcccgcaacgagcgcaaccctcgcctttagttgccatcatttagttgggtactctaaaggaaccgccggtgataagccggaggaaggtggggatgacgtcaagtcctcatggcccttacgcgttgggctacacacgtgctacaatggcaactacagtgggcagcaatcccgcgagggcgagctaatctccaaaagttgtctcagttcggattgttctctgcaactcgagagcatgaaggcggaatcgctagtaatcgcggatcagcatgccgcggtgaatacgttcccaggccttgtacacaccgcccgtcacaccatgggagttggattcacccgaaggcgctgcgctaaccgcaaggaggcaggcgaccacggtgggtttagcgactggggtg

SEQ ID NO: 3212 - DNA, 1410 bp, Sphingomonas yabuuchiae
aacgaacgctggcggcatgcctaacacatgcaagtcgaacgaggcccttcggggtttagtggcgcacgggtgcgtaacgcgtgggaatctgccctttggttcggaataacagctggaaacggctgctaataccggatgatgacgaaagtccaaagatttatcgccagaggatgagcccgcgttggattaggtagttggtggggtaaaggcctaccaagccgacgatccatagctggtctgagaggatgatcagccacactgggactgagacacggcccagactcctacgggaggcagcagtggggaatattggacaatgggcgaaagcctgatccagcaatgccgcgtgagtgatgaaggccctagggttgtaaagctcttttacccgggaagataatgactgtaccgggagaataagccccggctaactccgtgccagcagccgcggtaatacggagggggctagcgttgttcggaattactgggcgtaaagcgcacgtaggcggctttgtaagtcagaggtgaaagcctggagctcaactccagaactgcctttgagactgcatcgcttgaatccaggagaggtcagtggaattccgagtgtagaggtgaaattcgtagatattcggaagaacaccagtggcgaaggcggctgactggactggtattgacgctgaggtgcgaaagcgtggggagcaaacaggattagataccctggtagtccacgccgtaaacgatgataactagctgtccgggcacttggtgcttgggtggcgcagctaacgcattaagttatccgcctggggagtacggccgcaaggttaaaactcaaaggaattgacgggggcctgcacaagcggtggagcatgtggtttaattcgaagcaacgcgcagaaccttaccagcgtttgacatgtccggacgactggcagagatgcctttcttcccttcggggactggaacacaggtgctgcatggctgtcgtcagctcgtgtcgtgagatgttgggttaagtcccgcaacgagcgcaaccctcgcctttagttaccatcatttggttgggtactctaaaggaaccgccggtgataagccggaggaaggtggggatgacgtcaagtcctcatggcccttacgcgctgggctacacacgtgctacaatggcaactacagtgggcagcgaccctgcgagggcgagctaatccccaaaagttgtctcagttcggattgttctctgcaactcgagagcatgaaggcggaatcgctagtaatcgcggatcagcatgccgcggtgaatacgttcccaggccttgtacacaccgcccgtcacaccatgggagttggattcacccgaaggcgttgcgccaacccgtaagggaagcaggcgaccacggtgggttcagcgactggggt

SEQ ID NO: 3213 - DNA, 1411 bp, Sphingopyxis alaskensis
aacgaacgctggcggcatgcctaacacatgcaagtcgaacgagaccttcgggtctagtggcgcacgggtgcgtaacgcgtgggaatctgcccttgggtacggaataactcagagaaatttgagctaataccgtataatgacttcggtccaaagatttatcgcccaaggatgagcccgcgtaagattagctagttggtggggtaaaggcctaccaaggcgacgatctttagctggtctgagaggatgatcagccacactgggactgagacacggcccagactcctacgggaggcagcagtggggaatattggacaatgggcgaaagcctgatccagcaatgccgcgtgagtgatgaaggccttagggttgtaaagctcttttacccgggatgataatgacagtaccgggagaataagctccggctaactccgtgccagcagccgcggtaatacggagggagctagcgttgttcggaattactgggcgtaaagcgcgcgtaggcggttttttaagtcagaggtgaaagcccagtgctcaacactggaactgcctttgaaactggaaaacttgaatcttggagaggtcagtggaattccgagtgtagaggtgaaattcgtagatattcggaagaacaccagtggcgaaggcgactgactggacaagtattgacgctgaggtgcgaaagcgtggggagcaaacaggattagataccctggtagtccacgccgtaaacgatgataactagctgtccgggttcatggaacttgggtggcgcagctaacgcattaagttatccgcctggggagtacggtcgcaagattaaaactcaaaggaattgacgggggcctgcacaagcggtggagcatgtggtttaattcgaagcaacgcgcagaaccttaccagcgtttgacatcctgatcgcggattagagagatcttttccttcagttcggctggatcagtgacaggtgctgcatggctgtcgtcagctcgtgtcgtgagatgttgggttaagtcccgcaacgagcgcaaccctcatccctagttgccatcattcagttgggcactctaaggaaactgccggtgataagccggaggaaggtggggatgacgtcaagtcctcatggcccttacgcgctgggctacacacgtgctacaatggcaactacagtgggcagcaacctcgcgaggggtagctaatctccaaaagttgtctcagttcggattgttctctgcaactcgagagcatgaaggcggaatcgctagtaatcgcggatcagcatgccgcggtgaatacgttcccaggccttgtacacaccgcccgtcacaccatgggagttggtttcacccgaaggcagtgctctaacccgcaagggaggaagctgaccacggtgggatcagcgactggggtg

SEQ ID NO: 3214 - DNA, 1411 bp, Sphingopyxis bauzanensis
aacgaacgctggcggcatgcctaacacatgcaagtcgaacgaactcttcggagttagtggcgcacgggtgcgtaacgcgtgggaatctgcccttgggtacggaataactcagagaaatttgtgctaataccgtataatgtcttcggaccaaagatttatcgcccaaggatgagcccgcgtaagattagctagttggtggggtaaaggcctaccaaggctacgatctttagctggtctgagaggatgatcagccacactgggactgagacacggcccagactcctacgggaggcagcagtggggaatattggacaatgggcgaaagcctgatccagcaatgccgcgtgagtgatgaaggccttagggttgtaaagctcttttacccgggatgataatgacagtaccgggagaataagctccggctaactccgtgccagcagccgcggtaatacggagggagctagcgttgttcggaattactgggcgtaaagcgcgcgtaggcggttttttaagtcagaggtgaaagcccagtgctcaacactggaactgcctttgaaactggaaaacttgaatcttggagaggtcagtggaattccgagtgtagaggtgaaattcgtagatattcggaagaacaccagtggcgaaggcgactgactggacaagtattgacgctgaggtgcgaaagcgtggggagcaaacaggattagataccctggtagtccacgccgtaaacgatgataactatctgttcgggctcatagagcttgagtggagcagctaacgcattaagttatccgcctggggagtacggtcgcaagattaaaactcaaaggaattgacgggggcctgcacaagcggtggagcatgtggtttaattcgaagcaacgcgcagaaccttaccagcgtttgacatccttgtcgcggtttccagagatggattccttcagttcggctggacaagtgacaggtgctgcatggctgtcgtcagctcgtgtcgtgagatgttgggttaagtcccgcaacgagcgcaaccctcatccctagttgccatcattcagttgggcactctaaggaaactgccggtgataagccggaggaaggtggggatgacgtcaagtcctcatggcccttacgcgctgggctacacacgtgctacaatggcaactacagtgggcagcaaccgggcgaccggtagctaatctccaaaagttgtctcagttcggattgttctctgcaactcgagagcatgaaggcggaatcgctagtaatcgcggatcagcatgccgcggtgaatacgttcccaggccttgtacacaccgcccgtcacaccatgggagttggtttcacccgaaggcagtgctctaacccgcaagggaggaagctgaccacggtgggatcagcgactggggtg

SEQ ID NO: 3215 - DNA, 1411 bp, Sphingopyxis flava
aacgaacgctggcggcatgcctaacacatgcaagtcgaacgagaccttcgggtctagtggcgcacgggtgcgtaacgcgtgggaatctgcccttgggtgcggaataacttcccgaaagggatgctaataccgcataatgtcgtaagaccaaagatttatcgcccaaggatgagcccgcgtaagattagctagttggtggggtaaaagcctaccaaggcgacgatctttagctggtctgagaggatgatcagccacactgggactgagacacggcccagactcctacgggaggcagcagtggggaatattggacaatgggcgaaagcctgatccagcaatgccgcgtgagtgatgaaggccctagggttgtaaagctcttttacccgggatgataatgacagtaccgggagaataagctccggctaactccgtgccagcagccgcggtaatacggagggagctagcgttgttcggaattactgggcgtaaagcgcgcgtaggcggtttttcaagtcaggggtgaaagcccggggctcaaccccggaattgcctttgaaactggaaaacttgaatcttggagaggtcagtggaattccgagtgtagaggtgaaattcgtagatattcggaagaacaccagtggcgaaggcgactgactggacaagtattgacgctgaggtgcgaaagcgtggggagcaaacaggattagataccctggtagtccacgccgtaaacgatgataactagctgtccggactcatagagtttgggtggcgcagctaacgcattaagttatccgcctggggagtacggtcgcaagattaaaactcaaaggaattgacgggggcctgcacaagcggtggagcatgtggtttaattcgaagcaacgcgcagaaccttaccagcgtttgacatcctgatcgcggattagagagatcttttccttcagttcggctggatcagtgacaggtgctgcatggctgtcgtcagctcgtgtcgtgagatgttgggttaagtcccgcaacgagcgcaaccctcatccctagttgccatcattcagttgggcactctaaggaaactgccggtgataagccggaggaaggtggggatgacgtcaagtcctcatggcccttacgcgctgggctacacacgtgctacaatggcggtgacagtgggcagcaaccctgcgaggggtagctaatctccaaaagccgtctcagttcggattgttctctgcaactcgagagcatgaaggcggaatcgctagtaatcgcggatcagcatgccgcggtgaatacgttcccaggccttgtacacaccgcccgtcacaccatgggagttggtttcacccgaaggcagtgctctaacccgcaagggaggaagctgaccacggtgggatcagcgactggggtg

SEQ ID NO: 3216 - DNA, 1411 bp, Sphingopyxis fribergensis
aacgaacgctggcggcatgcctaacacatgcaagtcgaacgaactcttcggagttagtggcgcacgggtgcgtaacgcgtgggaatctgcccttgggtacggaataactcagagaaatttgtgctaataccgtataatgtcttcggaccaaagatttatcgcccaaggatgagcccgcgtaagattagctagttggtgaggtaaaagctcaccaaggcgacgatctttagctggtctgagaggatgatcagccacactgggactgagacacggcccagactcctacgggaggcagcagtggggaatattggacaatgggcgaaagcctgatccagcaatgccgcgtgagtgatgaaggccttagggttgtaaagctcttttacccgggatgataatgacagtaccgggagaataagctccggctaactccgtgccagcagccgcggtaatacggagggagctagcgttgttcggaattactgggcgtaaagcgcgcgtaggcggttttttaagtcagaggtgaaagcccagtgctcaacactggaactgcctttgaaactggaaaacttgaatcttggagaggtcagtggaattccgagtgtagaggtgaaattcgtagatattcggaagaacaccagtggcgaaggcgactgactggacaagtattgacgctgaggtgcgaaagcgtggggagcaaacaggattagataccctggtagtccacgccgtaaacgatgataactagctgtccgggttcatagaacttgggtggcgcagctaacgcattaagttatccgcctggggagtacggtcgcaagattaaaactcaaaggaattgacgggggcctgcacaagcggtggagcatgtggtttaattcgaagcaacgcgcagaaccttaccagcgtttgacatcctaatcgcggatcgtagagatactttccttcagttcggctggattagtgacaggtgctgcatggctgtcgtcagctcgtgtcgtgagatgttgggttaagtcccgcaacgagcgcaaccctcatccctagttgccatcattcagttgggcactctaaggaaactgccggtgataagccggaggaaggtggggatgacgtcaagtcctcatggcccttacgcgctgggctacacacgtgctacaatggcaactacagtgggcagcaaccgggcgaccggtagctaatctccaaaagttgtctcagttcggattgttctctgcaactcgagagcatgaaggcggaatcgctagtaatcgcggatcagcatgccgcggtgaatacgttcccaggccttgtacacaccgcccgtcacaccatgggagttggtttcacccgaaggcagtgctctaacccgcaagggaggaagctgaccacggtgggatcagcgactggggtg

SEQ ID NO: 3217 - DNA, 1411 bp, Sphingopyxis granuli
aacgaacgctggcggcatgcctaacacatgcaagtcgaacgaagtcttcggacttagtggcgcacgggtgcgtaacgcgtgggaatctacccttgggtacggaataactcagagaaatttgtgctaataccgtataatgacttcggtccaaagatttatcgcccaaggatgagcccgcgtaagattagctagttggtggggtaaaagcctaccaaggcgacgatctttagctggtctgagaggatgatcagccacactgggactgagacacggcccagactcctacgggaggcagcagtggggaatattggacaatgggcgaaagcctgatccagcaatgccgcgtgagtgatgaaggccctagggttgtaaagctcttttacccgggatgataatgacagtaccgggagaataagctccggctaactccgtgccagcagccgcggtaatacggagggagctagcgttgttcggaattactgggcgtaaagcgcgcgtaggcggttttccaagtcaggggtgaaagcccggggctcaaccccggaatagcccttgaaactggaagactagaatcttggagaggtcagtggaattccgagtgtagaggtgaaattcgtagatattcggaagaacaccagtggcgaaggcgactgactggacaagtattgacgctgaggtgcgaaagcgtggggagcaaacaggattagataccctggtagtccacgccgtaaacgatgataactagctgtccgggttcatagaacttgggtggcgcagctaacgcattaagttatccgcctggggagtacggtcgcaagattaaaactcaaaggaattgacgggggcctgcacaagcggtggagcatgtggtttaattcgaagcaacgcgcagaaccttaccagcgtttgacatcctgatcgcggttaccagagatggtttccttcagttcggctggatcagtgacaggtgctgcatggctgtcgtcagctcgtgtcgtgagatgttgggttaagtcccgcaacgagcgcaaccctcatccctagttgccatcattcagttgggcactctaaggaaactgccggtgataagccggaggaaggtggggatgacgtcaagtcctcatggcccttacgcgctgggctacacacgtgctacaatggcggtgacagtgggcagcaactccgcgaggagtagctaatctccaaaaaccgtctcagttcggattgttctctgcaactcgagagcatgaaggcggaatcgctagtaatcgcggatcagcatgccgcggtgaatacgttcccaggccttgtacacaccgcccgtcacaccatgggagttggtttcacccgaaggcagtgctctaacccgcaagggaggaagctgaccacggtgggatcagcgactggggtg

SEQ ID NO: 3218 - DNA, 1411 bp, Sphingopyxis indica
aacgaacgctggcggcatgcctaacacatgcaagtcgaacgagatcttcggatctagtggcgcacgggtgcgtaacgcgtgggaatctgcccttgggtgcggaataacttcccgaaagggatgctaataccgcataatgtcgtaagaccaaagatttatcgcccaaggatgagcccgcgtaagattagctagttggtggggtaaaagcctaccaaggcgacgatctttagctggtctgagaggatgatcagccacactgggactgagacacggcccagactcctacgggaggcagcagtggggaatattggacaatgggcgaaagcctgatccagcaatgccgcgtgagtgatgaaggccctagggttgtaaagctcttttacccgggatgataatgacagtaccgggagaataagctccggctaactccgtgccagcagccgcggtaatacggagggagctagcgttgttcggaattactgggcgtaaagcgcgcgtaggcggttttttaagtcagaggtgaaagcccggggctcaaccccggaatagcctttgaaactggaaaactagaatcttggagaggtcagtggaattccgagtgtagaggtgaaattcgtagatattcggaagaacaccagtggcgaaggcgactgactggacaagtattgacgctgaggtgcgaaagcgtggggagcaaacaggattagataccctggtagtccacgccgtaaacgatgataactagctgtccgggttcatagaacttgggtggcgcagctaacgcattaagttatccgcctggggagtacggtcgcaagattaaaactcaaaggaattgacgggggcctgcacaagcggtggagcatgtggtttaattcgaagcaacgcgcagaaccttaccagcgtttgacatcctgatcgcggttaccagagatggtttccttcagttcggctggatcagtgacaggtgctgcatggctgtcgtcagctcgtgtcgtgagatgttgggttaagtcccgcaacgagcgcaaccctcatccctagttgccatcattcagttgggcactctaaggaaactgccggtgataagccggaggaaggtggggatgacgtcaagtcctcatggcccttacgcgctgggctacacacgtgctacaatggcggtgacagtgggcagcaaccgggcgaccggtagctaatctccaaaaaccgtctcagttcggattgttctctgcaactcgagagcatgaaggcggaatcgctagtaatcgcggatcagcatgccgcggtgaatacgttcccaggccttgtacacaccgcccgtcacaccatgggagttggtttcacccgaaggcagtgctctaacccgcaaggggggaagctgaccacggtgggatcagcgactggggtg

SEQ ID NO: 3219 - DNA, 1397 bp, Sphingopyxis macrogoltabida
  misc_feature (119)..(120): n is a, c, g, or t
  misc_feature (133)..(133): n is a, c, g, or t
  misc_feature (142)..(143): n is a, c, g, or t
aacgaacgctggcggcatgcctaacacatgcaagtcgaacgaagtcttcggacttagtggcccacgggtgcgtaacgcgtgggaatctgcccttgggttcggaataacttagagaaatnngtgctaataccgnataatgacnncggtccaaagatttatcgcccaaggatgagcccgcgtaagattagctagttggtggggtaaaagcttaccaaggcgacgatctttagctggtctgagaggatgatcagccacactgggactgagacacggcccagactcctacgggaggcagcagtggggaatattggacaatgggcgaaagcctgatccagcaatgccgcgtgagtgatgaaggccctagggttgtaaagctcttttacccgggatgataatgacagtaccgggagaataagctccggctaactccgtgccagcagccgcggtaatacggagggagctagcgttgttcggaattactgggcgtaaagcgcgcgtaggcggttttttaagtcagaggtgaaagcccggggctcaaccccggaattgcctttgaaactggaaaacttgaatcttggagaggtcagtggaattccgagtgtagaggtgaaattcgtagatattcggaagaacaccagtgccgaaggcgactgactggacaagtattgacgctgaggtgcgaaagcgtggggagcaaacaggattagataccctggtagtccacgccgtaaacgatgataactagctgtccgggttcatagaacttgggtggcgcacgtaacgcattaagttatccgcctggggagtacggtcgcaaggttaaaactcaaaggaattgacgggggcctgcacaagcggtggagcatgtggtttaattcgaagcaacgcgcagaaccttaccagcgtttgacatcctgatcgcggattagagagatcttttccttcagttcggctggatcagtgacaggtgctgcatggctgtcgtcagctcgtgtcgtgagatgttgggttaagtcccgcaacgagcgcaaccctcatccctagttgccatcattcagttgggcactctaaggaaactgccggtgataagccggaggaaggtggggatgacgtcaagtcctcatggcccttacgcgctgggctacacacgtgctacaatggcggtgacagtgggcagcaaccgggcgagggcgagctaatctccaaaagccgtctcagttcggattgttctctgcaactcgagagcatgaaggcggaatcgctagtaatcgcggatcagcatgccgcggtgaatacgttcccaggccttgtacacaccgcccgtcacaccatgggagttggattcacccgaaggcaatgctctaacccgcaagggaggaagctgaccaccgtgggtc

SEQ ID NO: 3220 - DNA, 1411 bp, Sphingopyxis terrae
aacgaacgctggcggcatgcctaacacatgcaagtcgaacgagatcttcggatctagtggcgcacgggtgcgtaacgcgtgggaatctgcccttgggtacggaataactcagagaaatttgtgctaataccgtataatgtcttcggaccaaagatttatcgcccaaggatgagcccgcgtaggattagctagttggtgaggtaaaagctcaccaaggcgacgatccttagctggtctgagaggatgatcagccacactgggactgagacacggcccagactcctacgggaggcagcagtggggaatattggacaatgggcgaaagcctgatccagcaatgccgcgtgagtgatgaaggccctagggttgtaaagctcttttacccgggatgataatgacagtaccgggagaataagctccggctaacttcgtgccagcagccgcggtaatacgaggggagctagcgttgttcggaattactgggcgtaaagcgcgcgtaggcggttttttaagtcagaggtgaaagcccggggctcaaccccggaattgcctttgaaactggaaaactagaatcttggagaggtcagtggaattccgagtgtagaggtgaaattcgtagatattcggaagaacaccagtggcgaaggcgactgactggacaagtattgacgctgaggtgcgaaagcgtggggagcaaacaggattagataccctggtagtccacgccgtaaacgatgataactagctgtccgggttcatagagcttgggtggcgcagctaacgcattaagttatccgcctggggagtacggtcgcaagattaaaactcaaaggaattgacgggggcctgcacaagcggtggagcatgtggtttaattcgaagcaacgcgcagaaccttaccagcgtttgacatcctgatcgcggttaccagagatggtttccttcagttcggctggatcagtgacaggtgctgcatggctgtcgtcagctcgtgtcgtgagatgttgggttaagtcccgcaacgagcgcaaccctcatccctagttgccatcattaagttgggcactctaaggaaactgccggtgataagccggaggaaggtggggatgacgtcaagtcctcatggcccttacgcgctgggctacacacgtgctacaatggcggtgacagtgggcagcaacctcgcgagaggtagctaatctccaaaagccgtctcagttcggattgttctctgcaactcgagagcatgaaggcggaatcgctagtaatcgcggatcagcatgccgcggtgaatacgttcccaggccttgtacacaccgcccgtcacaccatgggagttggtttcacccgaaggcagtgctctaacccgcaagggaggaagctgaccacggtgggatcagcgactggggtg

SEQ ID NO: 3221 - DNA, 1411 bp, Sphingopyxis witflariensis
aacgaacgctggcggcatgcctaacacatgcaagtcgaacgaactcttcggagttagtggcgcacgggtgcgtaacgcgtgggaatctgcccttgggtacggaataactcagagaaatttgtgctaataccgtataatgtcttcggaccaaagatttatcgcccaaggatgagcccgcgtaagattagctagttggtgaggtaaaagctcaccaaggcgacgatctttagctggtctgagaggatgatcagccacactgggactgagacacggcccagactcctacgggaggcagcagtggggaatattggacaatgggcgaaagcctgatccagcaatgccgcgtgagtgatgaaggccttagggttgtaaagctcttttacccgggatgataatgacagtaccgggagaataagctccggctaactccgtgccagcagccgcggtaatacggagggagctagcgttgttcggaattactgggcgtaaagcgcgcgtaggcggtttttcaagtcagaggtgaaagcccggggctcaaccccggaatagcctttgaaactggaagacttgaatcttggagaggtcagtggaattccgagtgtagaggtgaaattcgtagatattcggaagaacaccagtggcgaaggcgactgactggacaagtattgacgctgaggtgcgaaagcgtggggagcaaacaggattagataccctggtagtccacgccgtaaacgatgataactatctgtccgggctcatagagcttgggtggagcagctaacgcattaagttatccgcctggggagtacggtcgcaagattaaaactcaaaggaattgacgggggcctgcacaagcggtggagcatgtggtttaattcgaagcaacgcgcagaaccttaccagcgtttgacatccttgtcgcggattccagagatggtttccttcagttcggctggacaagtgacaggtgctgcatggctgtcgtcagctcgtgtcgtgagatgttgggttaagtcccgcaacgagcgcaaccctcatccctagttgccatcatttagttgggcactctaaggaaactgccggtgataagccggaggaaggtggggatgacgtcaagtcctcatggcccttacacgctgggctacacacgtgctacaatggcggtgacagtgggcagcaaccgggcgaccggtagctaatctccaaaagccgtctcagttcggattgttctctgcaactcgagagcatgaaggcggaatcgctagtaatcgcggatcagcatgccgcggtgaatacgttcccaggccttgtacacaccgcccgtcacaccatgggagttggtttcacccgaaggcagtgctctaacccgcaagggaggaagctgaccacggtgggatcagcgactggggtg

SEQ ID NO: 3222 - DNA, 1385 bp, Sphingorhabdus contaminans
catgcagtcgacgagaccttcgggtctagtggcgcacgggtgcgtaacgcgtgggaatctaccctttgctacggaataactcagagaaatttgtgctaataccgtatgatgtcgaaagaccaaagatttatcggcaaaggacgagcccgcgtaggattagctagttggtgtggtaaaggcgcaccaaggcgacgatccttagctggtctgagaggatgatcagccacactgggactgagacacggcccagactcctacgggaggcagcagtggggaatattggacaatgggcgaaagcctgatccagcaatgccgcgtgagtgatgaaggccttagggttgtaaagctcttttaccagggatgataatgacagtacctggagaataagctccggctaactccgtgccagcagccgcggtaatacggagggagctagcgttgttcggaattactgggcgtaaagcgtacgtaggcggttattcaagtcaggggtgaaagcctggagctcaactccagaactgcccttgaaactagataactagaatcttggagaggtgagtggaattccgagtgtagaggtgaaattcgtagatattcggaagaacaccagtggcgaaggcgactcactggacaagtattgacgctgaggtacgaaagcgtggggagcaaacaggattagataccctggtagtccacgccgtaaacgatgataactagctgttcgggctctacgagcttgagtggcgcagctaacgcattaagttatccgcctggggagtacggtcgcaagattaaaactcaaaggaattgacgggggcctgcacaagcggtggagcatgtggtttaattcgaagcaacgcgcagaaccttaccagcgtttgacatcctgatcgcggatagtggagacactttccttcagttcggctggatcagtgacaggtgctgcatggctgtcgtcagctcgtgtcgtgagatgttgggttaagtcccgcaacgagcgcaaccctcgtccttagttgccatcattcagttgggcactctaaggaaactgccggtgataagccggaggaaggtggggatgacgtcaagtcctcatggcccttacacgctgggctacacacgtgctacaatggcggtgacagtgggcagcaacctcgcgagaggtagctaatctccaaaagccgtctcagttcggattgttctctgcaactcgagagcatgaaggcggaatcgctagtaatcgcggatcagcatgccgcggtgaatacgttcccaggccttgtacacaccgcccgtcacaccatgggagttggattcacccgaaggcgttgcgctaacctagcaataggaggcaggcgaccactgtgggtttagagactggggtg

SEQ ID NO: 3223 - DNA, 1409 bp, Sphingorhabdus marina
aacgaacgctggcggcatgcttaacacatgcaagtcgaacgagatcttcggatctagtggcgcacgggtgcgtaacgcgtggggatctaccatagggtacggaataactcagagaaatttgtgctaataccgtataatgtcgcaagaccaaagatttatcgccctttgatgaacccgcgtaagattagcttgttggtgaggtaaaggctcaccaaggcgacgatctttagctggtctgagaggatgatcagccacactgggactgagacacggcccagactcctacgggaggcagcagtggggaatattggacaatgggcgaaagcctgatccagcaatgccgcgtgagtgatgaaggccctagggtcgtaaagctcttttaccagggatgataatgacagtacctggagaataagctccggctaactccgtgccagcagccgcggtaatacggagggagctagcgttgttcggaattactgggcgtaaagcgcgcgtaggcggctattcaagtcagaggtgaaatcccggagctcaactccggaactgcctttgaaactagatagctagaatcttggagaggcgagtggaattccgagtgtagaggtgaaattcgtagatattcggaagaacaccagtggcgaaggcgactcgctggacaagtattgacgctgaggtgcgaaagcgtggggagcaaacaggattagataccctggtagtccacgccgtaaacgatgataactagctgctagggcccacagggctttggtggcgcagctaacgcattaagttatccgcctggggagtacggtcgcaagattaaaactcaaaggaattgacgggggcctgcacaagcggtggagcatgtggtttaattcgacgcaacgcgcagaaccttaccagcgtttgacatcctaatcgcggatttcagagatgatttccttcagttcggctggattagtgacaggtgctgcatggctgtcgtcagctcgtgtcgtgagatgttgggttaagtcccgcaacgagcgcaacccctatcattagttgctaccatttagttgggcactctaatgagaccgccggtgataagccggaggaaggtggggatgacgtcaagtcctcatggcccttacacgctgggctacacacgtgctacaatggcggtgacagtgggcagctacttcgcgagaagatgctaatctctaaaaaccgtctcagttcggattgttctctgcaactcgagagcatgaaggcggaatcgctagtaatcgcagatcagcatgctgcggtgaatacgttcccaggccttgtacacaccgcccgtcacaccatgggagttggatcaacccgaagctggtgcgctaaccttttggaggcagccaaccacggtgggttcagcgactggggtg

SEQ ID NO: 3224 - DNA, 1409 bp, Sphingorhabdus wooponensis
aacgaacgctggcggcatgcttaacacatgcaagtcgaacgagaccttcgggtctagtggcgcacgggtgcgtaacgcgtgggaatctgcccttaggtacggaataactcagagaaatttgtgctaataccgtatgatgtcgaaagaccaaagatttatcgcctaaggatgagcccgcgtaagattagcttgttggtgaggtaaaagctcaccaaggcgacgatctttagctggtctgagaggatgatcagccacactgggactgagacacggcccagactcctacgggaggcagcagtggggaatattggacaatgggcgaaagcctgatccagcaatgccgcgtgagtgatgaaggccttagggttgtaaagctcttttaccagggatgataatgacagtacctggagaataagctccggctaactccgtgccagcagccgcggtaatacggagggagctagcgttgttcggaattactgggcgtaaagagtacgtaggcggttattcaagtcagaggtgaaagcctggagctcaactccagaactgcctttgaaactagatagctagaatcttggagaggtgagtggaattccgagtgtagaggtgaaattcgtagatattcggaagaacaccagtggcgaaggcgactcactggacaagtattgacgctgaggtacgaaagcgtggggagcaaacaggattagataccctggtagtccacgccgtaaacgatgataactagctgttcgggctctacgagcttgagtggcgcagctaacgcattaagttatccgcctggggagtacggtcgcaagattaaaactcaaaggaattgacgggggcctgcacaagcggtggagcatgtggtttaattcgaagcaacgcgcagaaccttaccagcgtttgacatcctaatcgcggttttcagagatgattaccttcagttcggctggattagtgacaggtgctgcatggctgtcgtcagctcgtgtcgtgagatgttgggttaagtcccgcaacgagcgcaaccctcgtccttagttgccatcattcagttgggcactctaaggaaactgccggtgataagccggaggaaggtggggatgacgtcaagtcctcatggcccttacacgctgggctacacacgtgctacaatggcggtgacagtgggcagcaaccgggcgaccggtagctaatctccaaaaaccgtctcagttcggattgttctctgcaactcgagagcatgaaggcggaatcgctagtaatcgcggatcagcatgccgcggtgaatacgttcccaggccttgtacacaccgcccgtcacaccatgggatttggattcacccgaaggcagtgcgctaaccgcaaggaggcagctgaccacggtgggtttagagactggggtg

SEQ ID NO: 3225 - DNA, 1409 bp, Sphingosinicella ginsenosidimutans
aacgaacgctggcggcatgcctaacacatgcaagtcgaacgagaccttcgggtctagtggcgcacgggtgcgtaacgcgtgggaatctgcccttgggttcggaataacagttagaaatgactgctaataccggatgatgtcttcggaccaaagatttatcgcccaaggatgagcccgcgtaggattagcttgttggtgaggtaaaggctcaccaaggcgacgatccttagctggtctgagaggatgatcagccacactgggactgagacacggcccagactcctacgggaggcagcagtggggaatattggacaatgggcgaaagcctgatccagcaatgccgcgtgagtgatgaaggccttagggttgtaaagctcttttaccagggatgataatgacagtacctggagaataagctccggctaactccgtgccagcagccgcggtaatacggagggagctagcgttgttcggaattactgggcgtaaagcgcacgtaggcggctttgtaagttagaggtgaaagcccggggctcaaccccggaactgcctttaagactgcatcgcttgaatccgggagaggtgagtggaattccgagtgtagaggtgaaattcgtagatattcggaagaacaccagtggcgaaggcggctcactggaccggtattgacgctgaggtgcgaaagcgtggggagcaaacaggattagataccctggtagtccacgccgtaaacgatgagaactagctgtcgggggtcatggactttcggtggcgcagctaacgcattaagttctccgcctggggagtacggccgcaaggttaaaactcaaagaaattgacgggggcctgcacaagcggtggagcatgtggtttaattcgaagcaacgcgcagaaccttaccagcgtttgacatcctgatcgcggttaccagagatggtttccttcagttcggctggatcagtgacaggtgctgcatggctgtcgtcagctcgtgtcgtgagatgttgggttaagtcccgcaacgagcgcaaccctcgtctttagttgccatcattaagttgggcactctaaagaaaccgccggtgataagccggaggaaggtggggatgacgtcaagtcctcatggcccttacgcgctgggctacacacgtgctacaatggcggtgacagcgggctgctacctcgcgaggggaagctaatcccgaaaagccgtctcagttcggattgttctctgcaactcgagagcatgaaggcggaatcgctagtaatcgcggatcagcatgccgcggtgaatacgttcccaggccttgtacacaccgcccgtcacaccatgggagttggtttcacccgaaggcagtgcgctaaccgcaaggaggcagctgaccacggtgggatcagcgactggggtg

SEQ ID NO: 3226 - DNA, 1409 bp, Sphingosinicella microcystinivorans
aacgaacgctggcggcatgcctaacacatgcaagtcgaacgaagccttcgggcttagtggcgcacgggtgcgtaacacgtgggaatctgcccttaggtacggaataacagttagaaatgactgctaataccgtatgatgactccggtccaaagatttatcgcctaaggatgagcccgcgtcggattagctagttggtgaggtaaaggctcaccaaggcgacgatccgtagctggtctgagaggatgatcagccacactgggactgagacacggcccagactcctacgggaggcagcagtggggaatattggacaatgggcgaaagcctgatccagcaatgccgcgtgagtgaagaaggccttagggttgtaaagctcttttacccgggatgataatgacagtaccgggagaataagctccggctaactccgtgccagcagccgcggtaatacggagggagctagcgttgttcggaatcactggccgtaaagcgcacgtaggcggctttgtaagttagaggtgaaagcccggggctcaactccggaactgcctttaagactgcatcgcttgaatctgggagaggtaagtggaattccgagtgtagaggtgaaattcgtagatattcggaagaacaccagtggcgaaggcggcttactggaccagaattgacgctgaggtgcgaaagcgtggggagcaaacaggattagataccctggtagtccacgccgtaaacgatgagaactagctgtcagggccttttaggctttggtggcgcagctaacgcattaagttctccgcctggggagtacggtcgcaagattaaaactcaaaggaattgacgggggcctgcacaagcggtggagcatgtggtttaattcgaagcaacgcgcagaaccttaccagcgtttgacatcctgatcgcggttaccagagatggtttccttcagttcggctggatcagtgacaggtgctgcatggctgtcgtcagctcgtgtcgtgagatgttgggttaagtcccgcaacgagcgcaaccctcgtccttagttgccatcattcagttgggcactctaaggaaaccgccggtgataagccggaggaaggtggggatgacgtcaagtcctcatggcccttacgcgctgggctacacacgtgctacaatggcggtgacagtgggcagcaaacccgcgagggtgagctaatctccaaaagccgtctcagttcggattgttctctgcaactcgagagcatgaaggcggaatcgctagtaatcgcggatcagcatgccgcggtgaatacgttcccaggccttgtacacaccgcccgttacaccatgggagttggtttcacccgaaggctgtgcgctaaccgcaaggaggcagcagaccacggtgggatcagcgactggggtg

SEQ ID NO: 3227 - DNA, 1461 bp, Spiribacter salinus
attgaacgctggcggcatgcctaacacatgcaagtcgagcggcagcaggtccttcgggatgctggcgagcggcggacgggtgagtaacacgtgggaatctacctttcggtgggggatagcccggggaaactcggattaataccgcatacgccctacggggcaaagcaggcctctgatttaagcttgcgccgatagatgagcccgcggccgattagctagttggtggggtaaaggcctaccaaggcaacgatcggtagctggtctgagaggacgatcagtcacaccggaactgagacacggtccggactcctacgggaggcagcagtggggaatattggacaatgggcgaaagcctgatccagcaatgccgcgtgggtgaagaaggcttgagggttgtaaagccctttcagcagggaggaaaagcgtacggttaatatccgtgcgtcttgacgttacctgcagaagaagcaccggctaactccgtgccagcagccgcggtaatacggagggtgcaagcgttaatcggaattactgggcgtaaagcgcgcgtaggtggtctgataagtcaaatgtgaaagccccgggctcaacctgggaattgcattcgatactgtcggactagagtctggtagagggtgggggaattcccggtgtagcggtgaaatgcgtagatatcgggaggaacaccagtggcgaaggcgcccacctggaccaagactgacactgaggtgcgaaagcgtggggagcaaacaggattagataccctggtagtccacgccgtaaacgatgagaactagccgtcgggtccatttatggacttggtggcgcagctaacgcgttaagttctccgcctggggagtacggccgcaaggttaaaactcaaaggaattgacgggggcccgcacaagcggtggagcatgtggtttaattcgatgcaacgcgaagaaccttacctgcccttgacatcctcggaacttgtcagagatgacgtggtgccttcgggaaccgagtgacaggtgctgcatggctgtcgtcagctcgtgtcgtgagatgttgggttaagtcccgcaacgagcgcaacccttgtccctagttgccagcgattcggtcgggaactctagggagactgccggtgacaaaccggaggaaggtggggatgacgtcaagtcatcatggcccttatgggcagggctacacacgtgctacaatggccggcacaatgggttgccaacccgcgagggggagctaatcccataaaaccggtcgtagtccggatcgcagtctgcaactcgactgcgtgaagtcggaatcgctagtaatcgcagatcagcaatgctgcggtgaatacgttcccgggccttgtacacaccgcccgtcacaccatgggagtcggctgcaccagaagccggtagcctaaccttcgggagggcgccgtccacggtgtggtcgatgactggggtg

SEQ ID NO: 3228 - DNA, 1431 bp, Spirosoma spitsbergense
gatgaacgctagcggcaggcctaatacatgcaagtcgaacggagcagcaatgcttagtggcaaacgggtgcgtaacgcgtaagcaacctgccttctactgggggatagcccggcgaaagctggggtaaacccgcacggtccagaggaatcacctgattattctggtaaacatttatgggtagaagaggggcttgcgtctgattagctagttgggggggtaacggcccaccaaggcgatgatcagtaggggttctgagaggattggcccccacatgggtactgagatacggacccaactcctacgggaggcagcagtagggaatattgggcaatggaggcaactctgacccagccatgccgcgtgcaggatgaaggcgctcagcgttgtaaactgcttttatcagggaagaactgtaggattgcgatcttatttgacggtacctgaggaataagcaccggctaactccgtgccagcagccgcggtaatacggagggtgcaagcgttgtccggatttattgggtttaaagggtgcgtaggtggtacaataagtctggtttgaaagcaagtggctcaaccatttgatgtggctggaaactgttgtacttgaatggattggcggtagccggaacgggtcatgtagcggtgaaatgcatagatatgacccagaacaccgattgcgaaggcaggctactacgatttgattgacactgaggcacgagagcatgggtagcgaacaggattagataccctggtagtccatgccgtaaacgatgattactggctgtgtgtgttcaagcatgcgtggctgagcgaaagcgttaagtaatccacctggggagtacgctggcaacagtgaaactcaaaggaattgacgggggtccgcacaagcggtggagcatgtggtttaattcgatgatacgcgaggaaccttacctgggctagaatgtgcgtgaagggttcagaaatgggtccgtgtagcaatacacacaaaacaaggtgctgcatggctgtcgtcagctcgtgccgtgaggtgttgggttaagtcccgcaacgagcgcaacccctatgtttagttgccagcgcgttatggcgggaactctaaacagactgcctgcgcaagcagagaggaagggggggacgacgtcaagtcatcatggcccttacgtccagggcgacacacgtgctacaatggtcggtacagcgggtagcgatctcgcaagggggagccaatcttgtaaagccggtcacagttcggattggggtctgcaacccgaccccatgaagctggaatcgctagtaatcgcgcatcagccatggcgcggtgaatacgttcccggaccttgtacacaccgcccgtcaagccatgggaattggggggacctgaagtgggaggtaacattcctatcagggtaaactcggtgactagggct

SEQ ID NO: 3229 - DNA, 1410 bp, Spirulina subsalsa
gatgaacgttggcggtatgcttaacacatgcaagtcgaacggactcttcggagttagtggcggacgggtgagtaacgcgtgagaatctgcctctaggtcggggacaacagttggaaacgactgctaatcccggatgagcctgagggtaaaagagaaattgcctagagaggagctcgcgtctgattagctagatggtggggtaagagcctaccatggcgacgatcagtagctgttctgagaggaagatcagccacactgggactgagacacggcccagactcctacgggaggcagcagtggggaattttccgcaatgggcgaaagctgacggagcaataccgcgtgagggaagaaggcctttgggtcgtaaacctcttttctgaaggaagaagacctgacggtacttcaggaataagcctcggctaactccgtgccagcagccgcggtaatacggaggaggcaagcgttatccggaattattgggcgtaaagcgtccgtaggtggctaatcaagtctgtggtcaaagactagagcttaactctgggagggccatggaaactgaggagctagagtgcggtaggggtagagggaattcccagtgtagcggtgaaatgcgtagagattgggaagaacaccggtggcgaaagcgctctactgggccgagactgacactgagggacgaaagctaggggagcaaaagggattagatacccctgtagtcctagccgtaaacgatggaaactaggcgtggcttgtatcgacccgagccgtgccgaagctaacgcgttaagtttcccgcctggggagtacgcacgcaagtgtgaaactcaaaggaattgacgggggcccgcacaagcggtggagtatgtggtttaattcgatgcaacgcgaagaaccttaccagggcttgacatctggcgaatcttgccgaaaggtgagagtgccttagggaacgccaagacaggtggtgcatggctgtcgtcagctcgtgtcgtgagatgttgggttaagtcccgcaacgagcgcaaccctcgtccttagttgccagcattaagttgggcactctagggagactgccggtgacaaaccggaggaaggtggggatgacgtcaagtcagcatgccccttacgtcctgggctacacacgtactacaatggttgagacaaagggcagcgagcaagcgattgtaggcgaatcccagcaaactcagcctcagttcagattgcaggctgcaactcgcctgcatgaaggaggaatcgctagtaatcgccggtcagcatacggcggtgaatccgttcccgggccttgtacacaccgcccgtcacaccatggaagctggcaacatccgaagtcgttactccaaccttacgaggaggagggcgccgaaggtggggctagtgactggggtg

SEQ ID NO: 3230 - DNA, 1370 bp, Sporolituus thermophilus
ggataacaccgcgaaagtggtgctaataccgaatgtgtcacctgggcgcatgcccgggttgagaaaggtggcctctggaaacaagctaccgctagaagatgggtctgcgtctgattagctagttggtagggtaacggcctaccaaggcgacgatcagtagccggtctgagaggatgaacgccacactgggactgagacacggcccagactcctacgggaggcagcagtggggaatcttccgcaatgggcgaaagcctgacggagcaacgccgcgtgggtgaagaaggccttcgggtcgtaaagccctgtcatccgggacgaagtttacttatgcgaacagtgtaagtaagtgacggtaccggaggaggaagccacggctaactacgtgccagcagccgcggtaatacgtaggtggcaagcgttgtccggaattattgggcgtaaagcgcgcgtaggcggggcgtcaagtccatcttaaaaggctggggctcaaacctggtatgggatggaaactgacgttcttgagtgcaggagaggaaagtggaattcccggtgtagcggtgaaatgcgtagatatcgggaggaacaccagtggcgaaggcggctttctggactgtgtctgacgctgaggcgcgaaagccaggggagcgaacgggattagataccccggtagtcctggccgtaaacgatgggtactaggtgtgggaggtaaccaatcctttcgtgccggagttaacgcaataagtaccccgcctggggagtacggccgcaaggctgaaactcaaaggaattgacgggggcccgcacaagcggtggagtatgtggtttaattcgacgcaacgcgaagaaccttaccagggcttgacatcgagggaagtgactagagatagtcacgtcttgccttagggtaagacccgaagacaggtggtgcatggctgtcgtcagctcgtgtcgtgagatgttgggttaagtcccgcaacgagcgcaacccttatcccttgttgccagcacgtaaaggtggggactcaagggagactgccgcagagaatgcggaggaaggcggggatgacgtcaagtcatcatgccccttatgtcctgggctacacacgtactacaatgggcttaatagagggcgtgcgaagccgcgaggcagagcgaaccccaaaaacaagctctcagttcggatcgcaggctgcaactcgcctgcgtgaagtcggaatcgctagtaatcgcagatcagcatgctgcggtgaatacgttcccgggccttgtacacaccgcccgtcacaccacgagagttggcaacacccgaagccggtgaggtaaccgcaaggagccagccgtcgaaggtggggccgatgattggggtg

SEQ ID NO: 3231 - DNA, 1474 bp, Sporomusa acidovorans
gacgaacgctggcggcgtgcctaacacatgcaagtcgaacggggagttagtaataactcctagtggcgaacgggtgagtaacgcgtagacaacctgcctctaagctggggacaacaccgcgaaagtggtgctaataccgaatgtgatatcttggtcgcatgactgagataagaaagatggcctctttacaatgctatcgattagagatgggtctgcgtctgattagcttgttggcggggtaacggcccaccaaggcgacgatcagtagccggtctgagaggatgaacggccacactgggactgagacacggcccagactcctacgggaggcagcagtggggaatcttccgcaatggacgaaagtctgacggagcaacgccgcgtgagtgaagaaggttttcggatcgtaaaactctgtcgtttgggacgaacgtatccagtgtaaataatgcggggtaatgacggtaccaaaggaggaagccacggctaactacgtgccagcagccgcggtaatacgtaggtggcaagcgttgtccggaattattgggcgtaaagggcgtgtaggtggatgattaagtcttgtgtctaagtgcggagctcaactccgtatgggcgcgggaaactggttgtcttgagtgcaggagaggaaagtggaattcccagtgtagcggtgaaatgcgtagatattgggaggaacaccagtggcgaaggcgactttctggactgtgtctgacactgaggcgcgaaagccaggggagcgaacgggattagataccccggtagtcctggccgtaaacgatgggtactaggtgtagagggtatcgacccctctgtgccgcagcaaacgcaataagtaccccgcctggggagtacggccgcaaggttgaaactcaaaggaattgacgggggcccgcacaagcggtggagtatgtggtttaattcgacgcaacgcgaagaaccttaccagggcttgacattgagtgaaagttctagagatagaatgttcccttcggggacacaaaaacaggtggtgcatggctgtcgtcagctcgtgtcgtgagatgttgggttaagtcccgcaacgagcgcaacccttatcctttgttgccagcgcgtaatggtgggaactcaaaggagactgccgcagagaatgcggaggaaggcggggatgacgtcaagtcatcatgccccttatgtcctgggctacacacgtactacaatgggcttaaacaaagtgaagcaagaccgcgaggtcaagccaaccacataaacaagctctcagttcggatcggaggctgcaactcgcctccgtgaagtcggaatcgctagtaatcgcaggtcagcatactgcggtgaatacgttcccgggccttgtacacaccgcccgtcacaccacgaaagttgacaacacccgaagccggtggcttaaccgccaaggagagagccgtctaaggtggggtcgatgattggggtg

SEQ ID NO: 3232 - DNA, 1479 bp, Sporomusa malonica
gacgaacgctggcggcgtgcctaacacatgcaagtcgaacggagtaagtagcaatacttacttagtggcgaacgggtgagtaacgcgtagacaacctgcctctaaaatggggacaacaccgcgaaagtggtgctaataccgaatgtggtatctcggttgcatgaccgagataagaaagatggcctctacatgtaagctatcgtttagagatgggtctgcgtctgattagctagttggtgaggtaatagctcaccaaggcgacgatcagtagccggtctgagaggatgaacggccacactgggactgagacacggcccagactcctacgggaggcagcagtggggaatcttccgcaatggacgaaagtctgacggagcaacgccgcgtgagtgaagaaggccttcgggtcgtaaagctctgtcgtttgggacgaacgtgttccatgcaaatagtgtggaataatgacggtaccaaaggaggaagccacggctaactacgtgccagcagccgcggtaatacgtaggtggcaagcgttgtccggaattattgggcgtaaagggcgtgtaggtggatttttaagtcgtgtgtctaagtgcggagctcaactccgtataggcgcaggaaactgggaatcttgagtgcaggagaggaaagtggaattcccagtgtagcggtgaaatgcgtagatattgggaggaacaccagtggcgaaggcgactttctggactgtgtctgacactgaggcgcgaaagctaggggagcgaacgggattagataccccggtagtcctagccgtaaacgatgggtactaggtgtagagggtatcgaccccttctgtgccggagttaacgcaataagtaccccgcctggggagtacggccgcaaggttgaaactcaaaggaattgacgggggcccgcacaagcggtggagtatgtggtttaattcgacgcaacgcgaagaaccttaccagggcttgacattgagtgaaagattaagagattagttcctctcttcggagacacaaaaacaggtggtgcatggctgtcgtcagctcgtgtcgtgagatgttgggttaagtcccgcaacgagcgcaacccttatcctttgttgccagcacgtaaaggtgggaactcaagggagactgccgcagacaatgcggaggaaggcggggatgacgtcaagtcatcatgccccttatgtcctgggctacacacgtactacaatgggcttaaacaaagcgcagcaagaccgcgaggttgagcgaaacgcataaacaagctctcagttcggatcggaggctgcaactcgcctccgtgaagtcggaatcgctagtaatcgcaggtcagcatactgcggtgaatacgttcccgggccttgtacacaccgcccgtcacaccacgaaagttggcaacacccgaagccggtggggtaaccagaaatggaactagccgtctaaggtggggtcaatgattggggtg

SEQ ID NO: 3233 - DNA, 1471 bp, Sporomusa silvacetica
  misc_feature (37)..(38): n is a, c, g, or t
  misc_feature (43)..(43): n is a, c, g, or t
ctggcggcgtgcctaacacatgcaagtcgaacggggnntccancaatggatacttagtggcgaacgggtgagtaacgcgtagacaacctgcctctaaattggggacaacaccgcgaaagtggtgctaataccgaatgtggtatcttggtcgcatgactgagataagaaaggtggcctctgaatatgctaccgattagagatgggtctgcgtctgattagctagttggtgaggtaatggctcaccaaggcgacgatcagtagccggtctgagaggatgaacggccacactgggactgagacacggcccagactcctacgggaggcagcagtggggaatcttccgcaatggacgaaagtctgacggagcaacgccgcgtgagtgaagaaggtcttcggattgtaaagctctgtcgtttgggacgaacgtgggatgtgtgaataatgcattctaatgacggtaccaaaggaggaagccacggctaactacgtgccagcagccgcggtaatacgtaggtggcaagcgttgtccggaattattgggcgtaaagggcgtgtaggtggatctttaagtcgtgtgtctaagtgcgaggctcaacctcgtataggcgcaggaaactggttatcttgagtgcaggagaggaaagtggaattcccagtgtagcggtgaaatgcgtagatattgggaggaacaccagtggcgaaggcgactttctggactgtgtctgacactgaggcgcgaaagccaggggagcgaacgggattagataccccggtagtcctggccgtaaacgatgggtactaggtgtagagggtatcgaccccttctgtgccgcagctaacgcaataagtaccccgcctggggagtacggccgcaaggttgaaactcaaaggaattgacgggggcccgcacaagcggtggagtatgtggtttaattcgacgcaacgcgaagaaccttaccaggacttgacattgagtgaaaaactaagagattagttcctatccttcgggatacacgaaaacaggtggtgcatggctgtcgtcagctcgtgtcgtgagatgttgggttaagtcccgcaacgagcgcaacccttatcctttgttgccagcacgtaatggtgggaactcaagggagactgccgcagacaatgcggaggaaggcggggatgacgtcaagtcatcatgccccttatgtcctgggctacacacgtactacaatgggcttaaacaaagcgaagcaagaccgcgagggtaagcaaaacgcataaacaagctctcagttcggatcggaggctgcaactcgcctccgtgaagtcggaatcgctagtaatcgcaggtcagcatactgcggtgaatacgttcccgggccttgtacacaccgcccgtcacaccacgaaagttgacaacacccgaagccggtggggtaaccagcaatggaactagccgtctaaggtggggccgatgattggggtg

SEQ ID NO: 3234 - DNA, 1477 bp, Sporomusa sphaeroides
gacgaacgctggcggcgtgcctaacacatgcaagtcgaacggagagttagcaataactcttagtggcgaacgggtgagtaacgcgtagacaacctgcctctaaactggggacaacaccgcgaaagtggtgctaataccgaatgtggtaacttggctgcatggctgagttaagaaagatggcctctacctgtaagctatcgtttagagatgggtctgcgtctgattagctagttggtgaggtaaaggctcaccaaggcgacgatcagtagccggtctgagaggatgaacggccacactgggactgagacacggcccagactcctacgggaggcagcagtggggaatcttccgcaatggacgaaagtctgacggagcaacgccgcgtgagtgaagaaggtcttcggattgtaaagctctgtcgtttgggacgaacgtggattgtgtgaataatgcagtctaatgacggtaccaaaggaggaagccacggctaactacgtgccagcagccgcggtaatacgtaggtggcaagcgttgtccggaattattgggcgtaaagggcgtgtaggtggattcttaagtcgtgtgtctaagtgcggtgctcaacaccgtatgggcgcaggaaactgggaatcttgagtgcaggagaggaaagtggaattcccagtgtagcggtgaaatgcgtagatattgggaggaacaccagtggcgaaggcgactttctggactgtgtctgacactgaggcgcgaaagccaggggagcgaacgggattagataccccggtagtcctggccgtaaacgatgggtactaggtgtagagggtatcgaccccttctgtgccggagttaacgcaataagtaccccgcctggggagtacggccgcaaggttgaaactcaaaggaattgacgggggcccgcacaagcggtggagtatgtggtttaattcgacgcaacgcgaagaaccttaccagggcttgacattgagtgaaagatctagagatagatccctcccttcggggacacaaaaacaggtggtgcatggctgtcgtcagctcgtgtcgtgagatgttgggttaagtcccgcaacgagcgcaacccttatcctttgttgccagcacgtaaaggtgggaactcaagggagactgccacagacaatgcggaggaaggcggggatgacgtcaagtcatcatgccccttatgtcctgggctacacacgtactacaatgggcttaaacaaagtgaagcaagaccgcgaggttgagccaaacacataaacaagctctcagttcggatcggaggctgcaactcgcctccgtgaagtcggaatcgctagtaatcgcaggtcagcatactgcggtgaatacgttcccgggccttgtacacaccgcccgtcacgccacgaaagttggcaacacccgaagccggtggggtaaccagaaatggaactagccgtctaaggtggggtcgatgattggggtg

SEQ ID NO: 3235 - DNA, 1339 bp, Sporomusa termitida
  misc_feature (8)..(8): n is a, c, g, or t
  misc_feature (46)..(46): n is a, c, g, or t
  misc_feature (58)..(58): n is a, c, g, or t
  misc_feature (314)..(315): n is a, c, g, or t
  misc_feature (435)..(435): n is a, c, g, or t
  misc_feature (437)..(437): n is a, c, g, or t
  misc_feature (451)..(451): n is a, c, g, or t
  misc_feature (910)..(910): n is a, c, g, or t
  misc_feature (916)..(916): n is a, c, g, or t
  misc_feature (918)..(918): n is a, c, g, or t
  misc_feature (934)..(934): n is a, c, g, or t
  misc_feature (946)..(946): n is a, c, g, or t
  misc_feature (1132)..(1132): n is a, c, g, or t
  misc_feature (1214)..(1214): n is a, c, g, or t
  misc_feature (1229)..(1229): n is a, c, g, or t
  misc_feature (1281)..(1281): n is a, c, g, or t
  misc_feature (1289)..(1289): n is a, c, g, or t
gacgaacnctggcggcgtgcctaacacatgcaagtcgaacggagtntagcaataactncttagtggcgaacgggtgagtaacgcgtagacaacctgcctcttagctggggacaacaccgcgaaagtggtgctaataccgaatgtggtaactcggttgcataacggagttaagaaagatggccactctaaagaactatcgctaagagatgggtctgcgtctgattagctggttggtgaggtaacggatcaccaaggcgacgatcagtagccggtctgagaggatgaacggccacactgggactgagacacggccnngactcctacgggaggcagcagtggggaatcttccgcaatggacgaaagtctgacggagcaacgccgcgtgagtgaagaaggccttcgggtcgtaaagctctgtcgtttgggacgaacgtngnctatgtgaataatntagactaatgacggtaccaaaggaggaagccacggctaactacgtgccagcagccgcggtaatacgtaggtggcaagcgttgtccggaattattgggcgtaaagggcgtgtcggtggcctggtaagtcgtgtgtctaagtgcgaagctcaacttcgtatgggcgcaggaaactgtccagcttgagtgcaggagaggaaagtggaattcccagtgtagcggtgaaatgcgtagatattgggaggaacaccagtggcgaaggcgactttctggactgtgtctgacactgaggcgcgaaagccaggggagcgaacgggattagataccccggtagtcctggccgtaaacgatgggtactaggtgtagagggtatcgaccccttctgtgccggagttaacgcaataagtaccccgcctggggagtacggccgcaaggttgaaactcaaaggaattgacggggncccgcncnagcggtggcgtctgtngtttaattagangcaacgcgaagaaccttaccagggcttgacattgagcgaaaggttcagagatgaatccctatcttcggatacgcgaaaacaggtggtgcatggctgtcgtcagatagtgtcgtgagatgttgggttaagtcccgcaacgagcgcaacccttatcctttgttgccagcgcgtaaaggcgggaactcnagggagctgcggcagagaatgcggtggaaggcggggatgacgtcaagtcatcatgcccctaatgtcctgggctacacacgtnctacaatgggcttanacaaagcgaagcaagcctgcgaaggtaagcaaaacgcagaaataagctctcngttcgganggcaggctgcaactcgcctccgtgaagtcggaatcgctagtaatcgcagg

SEQ ID NO: 3236 - DNA, 1474 bp, Sporosarcina globispora
gacgaacgctggcggcatgcctaatacatgcaagtcgagcggaatgatgagagcttgctctctgattttagcggcggacgggtgagtaacacgtgggcaacctgccctacagatggggataactccgggaaaccggggctaataccgaataatcagtttgtccgcatggacaaactctgaaagacggtttcggctgtcactgtaggatgggcccgcggcgcattagctagttggtggggtaatggcctaccaaggcgacgatgcgtagccgacctgagagggtgatcggccacactgggactgagacacggcccagactcctacgggaggcagcagtagggaatcttccacaatggacgaaagtctgatggagcaatgccgcgtgagcgaagaaggttttcggatcgtaaagctctgttgtaagggaagaacacgtacgggagtaactgcccgtgccatgacggtaccttattagaaagccacggctaactacgtgccagcagccgcggtaatacgtaggtggcaagcgttgtccggaattattgggcgtaaagcgcgcgcaggcggttctttaagtctgatgtgaaagcccacggctcaaccgtggagggtcattggaaactggagaacttgagtacagaagaggaaagcggaattccacgtgtagcggtgaaatgcgtagagatgtggaggaacaccagtggcgaaggcggctttctggtctgtaactgacgctgaggcgcgaaagcgtggggagcaaacaggattagataccctggtagtccacgccgtaaacgatgagtgctaagtgttagggggtttccgccccttagtgctgcagctaacgcattaagcactccgcctggggagtacggccgcaaggctgaaactcaaaggaattgacggggacccgcacaagcggtggagcatgtggtttaattcgaagcaacgcgaagaaccttaccaggtcttgacatcccactgaccggtgtagagatacatctttcccttcggggacagtggtgacaggtggtgcatggttgtcgtcagctcgtgtcgtgagatgttgggttaagtcccgcaacgagcgcaacccttgatcttagttgccagcatttagttgggcactctaaggtgactgccggtgataaaccggaggaaggtggggatgacgtcaaatcatcatgccccttatgacctgggctacacacgtgctacaatggatgatacagagggttgccaacccgcgagggggagccaatcccataaaatcattcccagttcggattggaggctgcaagtcgcctccatgaagccggaatcgctagtaatcgtggatcagcatgccacggtgaatacgttcccgggtcttgtacacaccgcccgtcacaccacgagagtttgtaacacccgaagtcggtggggtaacccttacgggagccagccgccgaaggtgggacagatgattggggtg

SEQ ID NO: 3237 - DNA, 1410 bp, Sporosarcina pasteurii
  misc_feature (39)..(39): n is a, c, g, or t
  misc_feature (43)..(43): n is a, c, g, or t
  misc_feature (57)..(58): n is a, c, g, or t
  misc_feature (60)..(60): n is a, c, g, or t
  misc_feature (64)..(64): n is a, c, g, or t
  misc_feature (66)..(68): n is a, c, g, or t
  misc_feature (200)..(200): n is a, c, g, or t
  misc_feature (245)..(245): n is a, c, g, or t
  misc_feature (250)..(250): n is a, c, g, or t
  misc_feature (286)..(286): n is a, c, g, or t
  misc_feature (377)..(377): n is a, c, g, or t
  misc_feature (411)..(411): n is a, c, g, or t
  misc_feature (435)..(435): n is a, c, g, or t
  misc_feature (447)..(447): n is a, c, g, or t
  misc_feature (455)..(455): n is a, c, g, or t
  misc_feature (457)..(457): n is a, c, g, or t
  misc_feature (564)..(564): n is a, c, g, or t
  misc_feature (582)..(582): n is a, c, g, or t
  misc_feature (601)..(601): n is a, c, g, or t
  misc_feature (840)..(840): n is a, c, g, or t
  misc_feature (858)..(858): n is a, c, g, or t
  misc_feature (876)..(876): n is a, c, g, or t
  misc_feature (888)..(888): n is a, c, g, or t
  misc_feature (918)..(918): n is a, c, g, or t
  misc_feature (930)..(930): n is a, c, g, or t
  misc_feature (934)..(934): n is a, c, g, or t
  misc_feature (947)..(947): n is a, c, g, or t
  misc_feature (976)..(976): n is a, c, g, or t
  misc_feature (1026)..(1026): n is a, c, g, or t
  misc_feature (1032)..(1032): n is a, c, g, or t
  misc_feature (1035)..(1035): n is a, c, g, or t
  misc_feature (1071)..(1071): n is a, c, g, or t
  misc_feature (1090)..(1090): n is a, c, g, or t
  misc_feature (1135)..(1135): n is a, c, g, or t
  misc_feature (1174)..(1174): n is a, c, g, or t
  misc_feature (1199)..(1199): n is a, c, g, or t
  misc_feature (1229)..(1229): n is a, c, g, or t
  misc_feature (1315)..(1315): n is a, c, g, or t
gacgaacgctggcggcgtgcctaatacatgcaagtcgancgancaaggaagaaactnntntctncnnntgttagcggcggatgggtgagtaacacgtgggcaacctgccctgcagttggggataactccgggaaaccggggctaataccgaataatcagttccttcgcatgaaggaactctgaaagacggctatgctgtnactgcaggatgggcccgcggcgcattagctagttggtgaggtaanggctnaccaaggcgacgatgcgtagccgacctgagagggtnatcggccacactgggactgagacacggcccagactcctacgggaggcagcagtagggaatcttccacaatggacgaaagtctgatggagcnacgccgcgtgagcgaagaaggttttcggatcgtnaagctctgttgtgagggaagaacnagtacaggagtnactgcctntnccttgacggtacctcattagaaagccacggctaactacgtgccagcagccgcggtaatacgtaggtggcaagcgttgtccggaattattgggcgtaaagcgcgcgcnggcggccttttaagtctnatgtgaaagcccacggctnaaccgtggaaggtcattggaaactggaaggcttgagtacagaagaggaaagcggaattccacgtgtagcggtgaaatgcgtagagatgtggaggaacaccagtggcgaaggcggctttctggtctgtaactgacgctgaggcgcgaaagcatggggagcaaacaggattagataccctggtagtccatgccgtaaacgatgagtgctaagtgttagggggtttccgccccttagtgctngagcaaacgcattaagcnctccgcctggggagtacngccgcaaggctnaaactcaaaggaattgacggggaccgcacnagcggtggagcntgtngtttaattcgaantacgcgaagaaccttaccaggtcttgacntcccgctgaccggtatagagatatacctttcttcggggacagcggtgacnggtggngcntggttgtcgtcagctcgtgtcgtgagatgttgggtnaagtcccgtaacgagcgcnacccttgaccttagttgccagcattcagttgggcactctaaggtnactgccggtgacaaaccggaggaaggtggggatgacgtnaaatcatcatgccccttatgacctnggctacacacgtgctacaatggacggtacngagggttgccaacccgcgagggggagctaatcccataaaaccgttcccagttcggattgcaggctgcaactcgcctgcatgaagcnggaatcgctagtaatcgtggatcagcatgccacggtgaatacgttcccgggtcttgtacacaccgcccgtcacaccacgagagtttgtaacaccc

SEQ ID NO: 3238 - DNA, 1473 bp, Sporosarcina psychrophila
gacgaacgctggcggcatgcctaatacatgcaagtcgagcggaatgacgagagcttgctctctgattttagcggcggacgggtgagtaacacgtgggcaacctgccctacagatggggataactccgggaaaccggggctaataccgaataatcagtttgtccgcatggacaaactctgaaagacggtttcggctgtcactgtaggatgggcccgcggcgcattagctagttggtggggtaatggcctaccaaggcaacgatgcgtagccgacctgagagggtgatcggccacactgggactgagacacggcccagactcctacgggaggcagcagtagggaatcttccacaatggacgaaagtctgatggagcaatgccgcgtgagcgaagaaggttttcggatcgtaaagctctgttgtaagggaagaacacgtacgggagtaactgcccgtgccatgacggtaccttattagaaagccacggctaactacgtgccagcagccgcggtaatacgtaggtggcaagcgttgtccggaattattgggcgtaaagcgcgcgcaggcggttctttaagtctgatgtgaaagcccacggctcaaccgtggagggtcattggaaactggagaacttgagtacagaagaggaaagcggaattccacgtgtagcggtgaaatgcgtagagatgtggaggaacaccagtggcgaaggcggctttctggtctgtaactgacgctgaggcgcgaaagcgtggggagcaaacaggattagataccctggtagtccacgccgtaaacgatgagtgctaagtgttagggggtttccgccccttagtgctgcagctaacgcattaagcactccgcctggggagtacggccgcaaggctgaaactcaaaggaattgacggggacccgcacaagcggtggagcatgtggtttaattcgaagcaacgcgaagaaccttaccaggtcttgacatcccactgaccggtgtagagatacgcctttcccttcggggacagtggtgacaggtggtgcatggttgtcgtcagctcgtgtcgtgagatgttgggttaagtcccgcaacgagcgcaacccttgatcttagttgccagcattcagttgggcactctaaggtgactgccggtgataaaccggaggaaggtggggatgacgtcaaatcatcatgccccttatgacctgggctacacacgtgctacaatggatgatacagagggttgccaacccgcgagggggagccaatcccataaaatcgttcccagttcggattggaggctgcaactcgcctccatgaagttggaatcgctagtaatcgtggatcagcatgccacggtgaatacgttcccgggtcttgtacacaccgcccgtcacaccacgagagtttgtaacacccgaagtcggtggggtacatctacgggagccagccgccgaaggtgggacagatgattggggtg

SEQ ID NO: 3239 - DNA, 1410 bp, Stakelama pacifica
aacgaacgctggcggcatgcttaacacatgcaagtcgaacgaagtcttcggacttagtggcgcacgggtgcgtaacgcgtgggaatcagcccttaggtacggaataacagtgagaaattactgctaataccgtatgatgtcttcggaccaaagatttatcgcctaaggatgagcccgcgttggattagctagttggtggggtaaaggcctaccaaggcgacgatccatagctggtctgagaggatgatcagccacactgggactgagacacggcccagactcctacgggaggcagcagtggggaatattggacaatgggggaaaccctgatccagcaatgccgcgtgagtgatgaaggccttagggttgtaaagctcttttacccgggatgataatgacagtaccgggagaataagctccggctaactccgtgccagcagccgcggtaatacggagggagctagcgttgttcggaattactgggcgtaaagcgcgcgtaggcggttttgcaagttagaggtgaaagcccggggctcaaccccggaactgcctttaaaactgcatcacttgaatccaggagaggtgagtggaattccgagtgtagaggtgaaattcgtagatattcggaagaacaccagtggcgaaggcggctcactggactggtattgacgctgaggtgcgaaagtgtggggagcaaacaggattagataccctggtagtccacaccgtaaacgatgataactagctgtccgggtgcatggcacttgggtggcgcagctaacgcattaagttatccgcctggggagtacggtcgcaagattaaaactcaaaggaattgacggggcctgcacaagcggtggagcatgtggtttaattcgaagcaacgcgcagaaccttaccagcgtttgacatgccggtcgcggatagtggagacactttccttcagttcggctggaccgtgcacaggtgctgcatggctgtcgtcagctcgtgtcgtgagatgttgggttaagtcccgcaacgagcgcaaccctcgactttagttaccatcatttagttgggtactctaaagtaaccaccggtgataagccggaggaaggtggggatgacgtcaagtcctcatggcccttacgcgctgggctacacacgtgctacaatggcggtgacagtgggcagcaatcccgcgagggtgagctaatctccaaaaaccgtctcagttcggattgttctctgcaactcgagagcatgaaggcggaatcgctagtaatcgcggatcagcatgccgcggtgaatacgttcccaggccttgtacacaccgcccgtcacaccatgggagttggattcacccgaaggtggtgcgctaacccttaagggaggcagccaaccacggtgggtttagcgactggggtg

SEQ ID NO: 3240 - DNA, 1415 bp, Stanieria cyanosphaera
gatgaacgctggcggtatgcctaacacatgcaagtcgaacgggaatccttcgggattctagtggcggacgggtgagtaacgcgtgagaatctgccttcaggacggggataacagttggaaacgactgctaatacccgatgtgccgaaaggtaaaagtaattcgcctgaagaggagctcgcgtccgattagctagttggtgtggtaagagcgcaccaaggcgacgatcggtagctggtctgagaggatgagcagccacactgggactgagacacggcccagactcctacgggaggcagcagtggggaattttccgcaatgggcgaaagcctgacggagcaataccgcgtgagggaggaaggcctttgggttgtaaacctcttttctcaaggaagaagttctgacggtacttgaggaatcagcatcggctaactccgtgccagcagccgcggtaatacggaggatgcaagcgttatccggaattattgggcgtaaagcgtccgcaggcggtttcacaagtctgctgtcaaagactggagcttaactccgggcaggcggtggaaactgtgaaactagagtacggtaggggtagagggaattcccagtgtagcggtgaaatgcgtagagattgggaagaacaccagtggcgaaggcgctctactgggccgtaactgacgctcagggacgaaagctaggggagcgaaagggattagatacccctgtagtcctagctgtaaacgatggatactaggcgttgcttgtatcgacccgagcagtgccgcagctaacgcgttaagtatcccgcctggggagtacgcacgcaagtgtgaaactcaaaggaattgacgggggcccgcacaagcggtggagtatgtggtttaattcgatgcaacgcgaagaaccttaccaggacttgacatgtcgcgaatcactaggaaactagagagtgccttcgggagcgcgaacacaggtggtgcatggctgtcgtcagctcgtgtcgtgagatgttgggttaagtcccgcaacgagcgcaaccctcgttcttagttgccagcagttaggctgggcactctaggaagactgccggtgacaaaccggaggaaggtggggatgacgtcaagtcagcatgccccttacgtcctgggctacacacgtactacaatggtagggacaaagggcagcaagctcgcaagagtaagcgaatctcagcaaaccctgcctcagttcagattgcaggctgcaactcgcctgcatgaaggaggaatcgctagtaatcgcaggtcagcatactgcggtgaatccgttcccgggccttgtacacaccgcccgtcacaccatggaagctggccacgcccgaagtcgttaccctaacccgtaagggagggggatgccgaaggcagggctagtgactggggtg

SEQ ID NO: 3241 - DNA, 1409 bp, Staphylococcus agnetis
  misc_feature (1221)..(1221): n is a, c, g, or t
catgcaagtcgagcgaactgacgaggagcttgctcctttgacgttagcggcggacgggtgagtaacacgtgggtaacctacctataagactggaataactccgggaaaccggggctaatgccggataacatgttgaaccgcatggttcaacagtgaaagacggtcttgctgtcacttatagatggacccgcgccgtattagctagttggtaaggtaacggcttaccaaggcgacgatacgtagccgacctgagagggtgatcggccacactggaactgagacacggtccagactcctacgggaggcagcagtagggaatcttccgcaatgggcgaaagcctgacggagcaacgccgcgtgagtgatgaaggtcttcggatcgtaaagctctgttgttagggaagaacatatgtgtaagtaactgtgcacatcttgacggtacctaaccagaaagccacggctaactacgtgccagcagccgcggtaatacgtaggtggcaagcgttatccggaattattgggcgtaaagcgcgcgtaggcggttttttaagtctgatgtgaaagcccacggctcaaccgtggagggtcattggaaactggaaaacttgagtgcagaagaggaaagtggaattccatgtgtagcggtgaaatgcgcagagatatggaggaacaccagtggcgaaggcggctttctggtctgtaactgacgctgaggtgcgaaagcgtggggatcaaacaggattagataccctggtagtccacgccgtaaacgatgagtgctaagtgttagggggtttccgccccttagtgctgcagctaacgcattaagcactccgcctggggagtacggtcgcaagactgaaactcaaaggaattgacggggacccgcacaagcggtggagcatgtggtttaattcgaagcaacgcgaagaaccttaccaaatcttgacatcttttgaccgctctagagatagagttttcctcttcggaggacaaaatgacaggtggtgcatggttgtcgtcagctcgtgtcgtgagatgttgggttaagtcccgcaacgagcgcaacccttaagcttagttgccatcattaagttgggcactctaagttgactgccggtgacaaaccggaggaaggtggggatgacgtcaaatcatcatgccccttatgatttgggctacacacgtgctacaatggacaatacaaagggcagcgaaacngcgaggtcaagcaaatcccataaagttgttctcagttcggattgtagtctgcaactcgactacatgaagctggaatcgctagtaatcgtagatcagcatgctacggtgaatacgttcccgggtcttgtacacaccgcccgtcacaccacgagagtttgtaacacccgaagccggtggagtaaccattt

SEQ ID NO: 3242 - DNA, 985 bp, Staphylococcus argensis
cagacggggagcttgctcccccgacgttagcggcggacgggtgagtaacacgtgggtaacctacctataagactggaataactccgggaaaccggagctaatgccggataacatgttggaccgcatggtcctacagtgaaagacggtcttgctgtcacttatagatggacccgcgccgtattagctagttggtaaggtaacggcttaccaaggcaacgatacgtagccgacctgagagggtgatcggccacactggaactgagacacggtccagactcctacgggaggcagcagtagggaatcttccgcaatgggcgaaagcctgacggagcaacgccgcgtgagtgatgaaggccttcgggtcgtaaaactctgttattagggaagaacaaatgtgtaagtaactatgcacgtcttgacggtacctaatcagaaagccacggctaactacgtgccagcagccgcggtaatacgtaggtggcaagcgttatccggaattattgggcgtaaagcgcgcgtaggcggtttcttaagtctgatgtgaaagcccacggctcaaccgtggagggtcattggaaactgggaaacttgagtgcaggagaggaaagtggaattccatgtgtagcggtgaaatgcgcagagatatggaggaacaccagtggcgaaggcgactttctggtctgcaactgacgctgatgtgcgaaagcgtggggatcaaacaggattagataccctggtagtccacgccgtaaacgatgagtgctaagtgttagggggtttccgccccttagtgctgcagctaacgcattaagcactccgcctggggagtacgaccgcaaggttgaaactcaaaggaattgacggggacccgcacaagcggtgaagcatgtggtttaattcgaagcaaccccgaagaaccttaccaaatctttgacatccttttgccccctctagagataaaagtttcccccttccgggggacaaa

SEQ ID NO: 3243 - DNA, 1474 bp, Staphylococcus argenteus
gatgaacgctggcggcgtgcctaatacatgcaagtcgagcgaacggacgagaagcttgcttctctgatgttagcggcggacgggtgagtaacacgtggataacctacctataagactgggataacttcgggaaaccggagctaataccggataatattttgaaccgcatggttcaaaagtgaaagacggtcttgctgtcacttatagatggatccgcgctgcattagctagttggtaaggtaacggcttaccaaggcaacgatgcatagccgacctgagagggtgatcggccacactggaactgagacacggtccagactcctacgggaggcagcagtagggaatcttccgcaatgggcgaaagcctgacggagcaacgccgcgtgagtgatgaaggtcttcggatcgtaaaactctgttattagggaagaacatatgtgtaagtaactgtgcacatcttgacggtacctaatcagaaagccacggctaactacgtgccagcagccgcggtaatacgtaggtggcaagcgttatccggaattattgggcgtaaagcgcgcgtaggcggttttttaagtctgatgtgaaagcccacggctcaaccgtggagggtcattggaaactggaaaacttgagtgcagaagaggaaagtggaattccatgtgtagcggtgaaatgcgcagagatatggaggaacaccagtggcgaaggcgactttctggtctgtaactgacgctgatgtgcgaaagcgtggggatcaaacaggattagataccctggtagtccacgccgtaaacgatgagtgctaagtgttagggggtttccgccccttagtgctgcagctaacgcattaagcactccgcctggggagtacgaccgcaaggttgaaactcaaaggaattgacggggacccgcacaagcggtggagcatgtggtttaattcgaagcaacgcgaagaaccttaccaaatcttgacatcctttgacaactctagagatagagccttccccttcgggggacaaagtgacaggtggtgcatggttgtcgtcagctcgtgtcgtgagatgttgggttaagtcccgcaacgagcgcaacccttaagcttagttgccatcattaagttgggcactctaagttgactgccggtgacaaaccggaggaaggtggggatgacgtcaaatcatcatgccccttatgatttgggctacacacgtgctacaatggacaatacaaagggcagcgaaaccgcgaggtcaagcaaatcccataaagttgttctcagttcggattgtagtctgcaactcgactacatgaagctggaatcgctagtaatcgtagatcagcatgctacggtgaatacgttcccgggtcttgtacacaccgcccgtcacaccacgagagtttgtaacacccgaagccggtggagtaaccttttaggagctagccgtcgaaggtgggacaaatgattggggtg

SEQ ID NO: 3244 - DNA, 1473 bp, Staphylococcus chromogenes
gatgaacgctggcggcgtgcctaatacatgcaagtcgagcgaactgacgaggagcttgctcctttgacgttagcggcggacgggtgagtaacacgtgggtaacctacctataagactggaataactccgggaaaccggggctaatgccggataacatatcgaaccgcatggttcgatagtgaaagacggtcttgctgtcacttatagatggacccgcgccgtattagctagttggtgaggtaacggctcaccaaggcaacgatacgtagccgacctgagagggtgatcggccacactggaactgagacacggtccagactcctacgggaggcagcagtagggaatcttccgcaatgggcgaaagcctgacggagcaacgccgcgtgagtgatgaaggtcttcggatcgtaaagctctgttgttagggaagaacaaatgtgtaagtaactgtgcacatcttgacggtacctaaccagaaagccacggctaactacgtgccagcagccgcggtaatacgtaggtggcaagcgttatccggaattattgggcgtaaagcgcgcgtaggcggttttttaagtctgatgtgaaagcccacggctcaaccgtggagggtcattggaaactggaaaacttgagtgcagaagaggaaagtggaattccatgtgtagcggtgaaatgcgcagagatatggaggaacaccagtggcgaaggcggctttctggtctgtaactgacgctgatgtgcgaaagcgtggggatcaaacaggattagataccctggtagtccacgccgtaaacgatgagtgctaagtgttagggggtttccgccccttagtgctgcagctaacgcattaagcactccgcctggggagtacggtcgcaagactgaaactcaaaggaattgacggggacccgcacaagcggtggagcatgtggtttaattcgaagcaacgcgaagaaccttaccaaatcttgacatcttttgaccactctagagatagagttttcctcttcggaggacaaaatgacaggtggtgcatggttgtcgtcagctcgtgtcgtgagatgttgggttaagtcccgcaacgagcgcaacccttgagcttagttgccatcattaagttgggcactctaagttgactgccggtgacaaaccggaggaaggtggggatgacgtcaaatcatcatgccccttatgatttgggctacacacgtgctacaatggacaatacaaagggcagcgaaaccgcgaggtcaagcaaatcccataaagttgttctcagttcggattgtagtctgcaactcgactacatgaagctggaatcgctagtaatcgtagatcagcatgctacggtgaatacgttcccgggtcttgtacacaccgcccgtcacaccacgagagtttgtaacacccgaagccggtggagtaaccatttggagctagccgtcgaaggtgggacaaatgattggggtg

SEQ ID NO: 3245 - DNA, 1473 bp, Staphylococcus delphini
tatgaacgctggcggcgtgcctaatacatgcaagtcgagcgaacagataaggagcttgctcctttgacgttagcggcggacgggtgagtaacacgtgggtaacctacctataagactggaataactccgggaaaccggggctaatgccggataacatgttgaaccgcatggttctacagtgaaagacggtcttgctgtcacttatagatggacccgcgccgtattagctagttggtggggtaacggcctaccaaggcgacgatacgtagccgacctgagagggtgatcggccacactggaactgagacacggtccagactcctacgggaggcagcagtagggaatcttccgcaatgggcgaaagcctgacggagcaacgccgcgtgagtgatgaaggtcttcggatcgtaaagctctgttgttagggaagaacaaatgtgtaagtaactgtgcacatcttgacggtacctaaccagaaagccacggctaactacgtgccagcagccgcggtaatacgtaggtggcaagcgttatccggaattattgggcgtaaagcgcgcgtaggcggttttttaagtctgatgtgaaagcccacggctcaaccgtggagggtcattggaaactggaaaacttgagtgcagaagaggaaagtggaattccatgtgtagcggtgaaatgcgcagagatatggaggaacaccagtggcgaaggcggctttctggtctgcaactgacgctgatgtgcgaaagcgtggggatcaaacaggattagataccctggtagtccacgccgtaaacgatgagtgctaagtgttagggggtttccgccccttagtgctgcagctaacgcattaagcactccgcctggggagtacggtcgcaagactgaaactcaaaggaattgacggggacccgcacaagcggtggagcatgtggtttaattcgaagcaacgcgaagaaccttaccaaatcttgacatcctttgacaactctagagatagagctttcctcttcggaggacaaagtgacaggtggtgcatggttgtcgtcagctcgtgtcgtgagatgttgggttaagtcccgcaacgagcgcaacccttgaacttagttgccatcattaagttgggcactctaagttgactgccggtgacaaaccggaggaaggtggggatgacgtcaaatcatcatgccccttatgatttgggctacacacgtgctacaatggacaatacaaagggcagcgaaaccgcgaggtcaagcaaatcccataaagttgttctcagttcggattgtagtctgcaactcgactacatgaagctggaatcgctagtaatcgtagatcagcatgctacggtgaatacgttcccgggtcttgtacacaccgcccgtcacaccacgagagtttgtaacacccgaagccggtggagtaaccattttggagctagccgtcgaaggtgggacaaatgattggggt

SEQ ID NO: 3246 - DNA, 1541 bp, Staphylococcus edaphicus
agagtttgatcctggctcaggatgaacgctggcggcgtgcctaatacatgcaagtcgagcgaacagataaggagcttgctcctttgacgttagcggcggacgggtgagtaacacgtgggtaacctacctataagactgggataacttcgggaaaccggagctaataccggataacatttggaaccgcatggttctaaagtgaaagatggttttgctatcacttatagatggacccgcgccgtattagctagttggtaaggtaacggcttaccaaggcgacgatacgtagccgacctgagagggtgatcggccacactggaactgagacacggtccagactcctacgggaggcagcagtagggaatcttccgcaatgggcgaaagcctgacggagcaacgccgcgtgagtgatgaagggtttcggctcgtaaaactctgttattagggaagaacaaacgtgtaagtaactgtgcacgtcttgacggtacctaatcagaaagccacggctaactacgtgccagcagccgcggtaatacgtaggtggcaagcgttatccggaattattgggcgtaaagcgcgcgtaggcggtttcttaagtctgatgtgaaagcccacggctcaaccgtggagggtcattggaaactgggaaacttgagtgcagaagaggaaagtggaattccatgtgtagcggtgaaatgcgcagagatatggaggaacaccagtggcgaaggcgactttctggtctgtaactgacgctgatgtgcgaaagcgtggggatcaaacaggattagataccctggtagtccacgccgtaaacgatgagtgctaagtgttagggggtttccgccccttagtgctgcagctaacgcattaagcactccgcctggggagtacgaccgcaaggttgaaactcaaaggaattgacggggacccgcacaagcggtggagcatgtggtttaattcgaagcaacgcgaagaaccttaccaaatcttgacatcctttgaaaactctagagatagagccttccccttcgggggacaaagtgacaggtggtgcatggttgtcgtcagctcgtgtcgtgagatgttgggttaagtcccgcaacgagcgcaacccttaagcttagttgccatcattaagttgggcactctaggttgactgccggtgacaaaccggaggaaggtggggatgacgtcaaatcatcatgccccttatgatttgggctacacacgtgctacaatggacaatacaaagggcagctaaaccgcgaggtcatgcaaatcccataaagttgttctcagttcggattgtagtctgcaactcgactacatgaagctggaatcgctagtaatcgtagatcagcatgctacggtgaatacgttcccgggtcttgtacacaccgcccgtcacaccacgagagtttgtaacacccgaagccggtggagtaaccatttatggagctagccgtcgaaggtgggacaaatgattggggtgaagtcgtaacaaggtagccgtatcggaaggtgcggctggatcacct

SEQ ID NO: 3247 - DNA, 1473 bp, Staphylococcus felis
gatgaacgctggcggcgtgcctaatacatgcaagtcgagcgaactgaagaggagcttgctcctttgacgttagcggcggacgggtgagtaacacgtgggtaacctacctataagactggaataactccgggaaaccggggctaatgccggataatatgttgaaccgcatggttcaacagtgaaagacggttttgctgtcacttatagatggacccgcgccgcattagctagttggtgaggtaacggctcaccaaggcgacgatgcgtagccgacctgagagggtgatcggccacactggaactgagacacggtccagactcctacgggaggcagcagtagggaatcttccgcaatggacgaaagtctgacggagcaacgccgcgtgagtgatgaaggtcttcggatcgtaaagctctgttgttagggaagaacaaatgtgtaagtaactgtgcacatcttgacggtacctaaccagaaagccacggctaactacgtgccagcagccgcggtaatacgtaggtggcaagcgttatccggaattattgggcgtaaagcgcgcgtaggcggttttttaagtctgatgtgaaagcccacggctcaaccgtggagggtcattggaaactggaaaacttgagtgcagaagaggaaagtggaattccatgtgtagcggtgaaatgcgcagagatatggaggaacaccagtggcgaaggcggctttctggtctgcaactgacgctgatgtgcgaaagcgtggggatcaaacaggattagataccctggtagtccacgccgtaaacgatgagtgctaagtgttagggggtttccgccccttagtgctgcagctaacgcattaagcactccgcctggggagtacggtcgcaagactgaaactcaaaggaattgacggggacccgcacaagcggtggagcatgtggtttaattcgaagcaacgcgaagaaccttaccaaatcttgacatcctttgaccgctctagagatagagttttcctcttcggaggacaaagtgacaggtggtgcatggttgtcgtcagctcgtgtcgtgagatgttgggttaagtcccgcaacgagcgcaacccttaagcttagttgccatcattaagttgggcactctaggctgactgccggtgacaaaccggaggaaggtggggatgacgtcaaatcatcatgccccttatgatttgggctacacacgtgctacaatggacaatacaaagggcagcgaaaccgtgaggtcaagccaatcccataaagttgttctcagttcggattgtagtctgcaactcgactacatgaagctggaatcgctagtaatcgtagatcagcatgctacggtgaatacgttcccgggtcttgtacacaccgcccgtcacaccacgagagtttgtaacacccgaagccggtggagtaaccatttggagctagccgtcgaaggtgggacaaatgattggggtg

SEQ ID NO: 3248 - DNA, 1453 bp, Staphylococcus fleurettii
agctggcggcgtgcctaatacatgcaagtcgagcgaacagatgagaagcttgcttctctgatgttagcggcggacgggtgagtaacacgtgggtaacctacctataagactgggataactccgggaaaccggggctaatacctgataatattttgaaccgcatggttcgatagtgaaaggcggcttcggctgtcacttatagatggacccgcgccgtattagctagttggtaaggtaatggcttaccaaggcgacgatacgtagccgacctgagagggtgatcggccacactggaactgagacacggtccagactcctacgggaggcagcagtagggaatcttccgcaatgggcgaaagcctgacggagcaacgccgcgtgagtgatgaaggttttcggatcgtaaaactctgttgttagggaagaacaaatttgttagtaactgaacaagtcttgacggtacctaaccagaaagccacggctaactacgtgccagcagccgcggtaatacgtaggtggcaagcgttatccggaattattgggcgtaaagcgcgcgtaggcggtttcttaagtctgatgtgaaagcccacggctcaaccgtggagggtcattggaaactggggaacttgagtgcagaagaggagagtggaattccatgtgtagcggtgaaatgcgcagagatatggaggaacaccagtggcgaaggcggctctctggtctgtaactgacgctgatgtgcgaaagcgtggggatcaaacaggattagataccctggtagtccacgccgtaaacgatgagtgctaagtgttagggggtttccgccccttagtgctgcagctaacgcattaagcactccgcctggggagtacgaccgcaaggttgaaactcaaaggaattgacggggacccgcacaagcggtggagcatgtggtttaattcgaagcaacgcgaagaaccttaccaaatcttgacatcctttgatcgctctagagatagagtcttccccttcgggggacaaagtgacaggtggtgcatggttgtcgtcagctcgtgtcgtgagatgttgggttaagtcccgcaacgagcgcaacccttaagcttagttgccatcattaagttgggcactctaggttgactgccggtgacaaaccggaggaaggtggggatgacgtcaaatcatcatgccccttatgatttgggctacacacgtgctacaatggataatacaaagggcagcgaacccgcgaggtcaagcaaatcccataaaattattctcagttcggattgtagtctgcaactcgactacatgaagctggaatcgctagtaatcgtagatcagcatgctacggtgaatacgttcccgggtcttgtgaacaccgcccgtcacaccacgagagtctgtaacacccgaagccggtggagtaaccttttattaggagctagccgtcgaaggt

SEQ ID NO: 3249 - DNA, 1474 bp, Staphylococcus lutrae
gatgaacgctggcggcgtgcctaatacatgcaagtcgagcgaacagatgaggagcttgctcctttgacgttagcggcggacgggtgagtaacacgtgggtaacctacctataagactggaataactccgggaaaccggggctaatgccggataatatgttgaaccgcatggttcaacagtgaaagacggttttgctgtcacttatagatggacccgcgccgtattagctagttggtgaggtaacggctcaccaaggcgacgatacgtagccgacctgagagggtgatcggccacactggaactgagacacggtccagactcctacgggaggcagcagtagggaatcttccgcaatgggcgaaagcctgacggagcaacgccgcgtgagtgatgaaggtcttcggatcgtaaagctctgttgttagggaagaacacatgtgtaagtcactatgcacatcttgacggtacctaaccagaaagccacggctaactacgtgccagcagccgcggtaatacgtaggtggcaagcgttatccggaattattgggcgtaaagcgcgcgtaggcggttttttaagtctgatgtgaaagcccacggctcaaccgtggagggtcattggaaactggaaaacttgagtgcagaagaggaaagtggaattccatgtgtagcggtgaaatgcgcagagatatggaggaacaccagtggcgaaggcggctttctggtctgcaactgacgctgatgtgcgaaagcgtggggatcaaacaggattagataccctggtagtccacgctgtaaacgatgagtgctaagtgttagggggtttccgccccttagtgctgcagctaacgcattaagcactccgcctggggagtacggtcgcaagactgaaactcaaaggaattgacggggacccgcacaagcggtggagcatgtggtttaattcgaagcaacgcgaagaaccttaccaaatcttgacatcctttgaccgctctagagatagagttttcctcttcggaggacaaagtgacaggtggtgcatggttgtcgtcagctcgtgtcgtgagatgttgggttaagtcccgcaacgagcgcaacccttgaacttagttgccatcattcagttgggcactctaagttgactgccggtgacaaaccggaggaaggtggggatgacgtcaaatcatcatgccccttatgatttgggctacacacgtgctacaatggacaatacaaagggcagcgaaaccgcgaggtcaagcaaatcccataaagttgttctcagttcggattgtagtctgcaactcgactacatgaagctggaatcgctagtaatcgtagatcagcatgctacggtgaatacgttcccgggtcttgtacacaccgcccgtcacaccacgagagtttgtaacacccgaagccggtggagtaaccattttggagctagccgtcgaaggtgggacaaatgattggggtg

SEQ ID NO: 3250 - DNA, 1470 bp, Staphylococcus massiliensis
tgaacgctggcggcgtgcctaatacatgcaagtcgagcgaactgacgaggagcttgctcctttgacgttagcggcggacgggtgagtaacacgtgggtaacctacctataagactggaataactccgggaaaccggggctaatgccggataacatgttgaaccgcatggttcaacattgaaaggcggttttgctgtcacttatagatggacctgcgccgtattagctagttggtaaggtaatggcttaccaaggcgacgatacgtagccgacctgagagggtgatcggccacactggaactgagacacggtccagactcctacgggaggcagcagtagggaatcttccgcaatggacgaaagtctgacggagcaacgccgcgtgagtgatgaaggttttcggatcgtaaagctctgttattagggaagaacaagtgcgtaggtaactatgcgcaccttgacggtacctaatcagaaagccacggctaactacgtgccagcagccgcggtaatacgtaggtggcaagcgttatccggaattattgggcgtaaagcgcgcgtaggcggtttcttaagtctgatgtgaaagcccacggctcaaccgtggatggtcattggaaactggggaacttgagtgcagaagaggaaagtggaattccatgtgtagcggtgaaatgcgcagagatatggaggaacaccagtggcgaaggcgactttctggtctgtaactgacgctgatgtgcgaaagcgtggggatcaaacaggattagataccctggtagtccacgccgtaaacgatgagtgctaagtgttagggggtttccgccccttagtgctgcagctaacgcattaagcactccgcctggggagtacgatcgcaagattgaaactcaaaggaattgacggggacccgcacaagcggtggagcatgtggtttaattcgaagcaacgcgaagaaccttaccaaatcttgacatcctttgaccgctctagagatagagttttccccttcgggggacaaagtgacaggtggtgcatggttgtcgtcagctcgtgtcgtgagatgttgggttaagtcccgcaacgagcgcaacccttaagcttagttgccatcattaagttgggcactctaagttgactgccggtgacaaaccggaggaaggtggggatgacgtcaaatcatcatgccccttatgatttgggctacacacgtgctacaatggacggtacaaagggtcgctaaaccgcgaggtcaagcaaatcccataaagccgttctcagttcggattgtagtctgcaactcgactacatgaagctggaatcgctagtaatcgtagatcagcatgctacggtgaatacgttcccgggtcttgtacacaccgcccgtcacaccacgagagtttgtaacacccgaagccggtggagtaacctttggagctagccgtcgaaggtgggacaaatgattggggtg

SEQ ID NO: 3251 - DNA, 1473 bp, Staphylococcus microti
gatgaacgctggcggcgtgcctaatacatgcaagtcgagcgaacagacgaggtgcttgcacctctgacgttagcggcggacgggtgagtaacacgtgggtaacctacctataagactgggataactccgggaaaccggggctaataccggataacatattgaaccgcatggttcaatagtgaaagacggttttgctgtcacttatagatggacccgcgccgtattagctagttggtgaggtaacggctcaccaaggcgacgatacgtagccgacctgagagggtgatcggccacactggaactgagacacggtccagactcctacgggaggcagcagtagggaatcttccgcaatgggcgaaagcctgacggagcaacgccgcgtgagtgatgaaggtcttcggatcgtaaagctctgttattagggaagaacaaacgtgtaagtaactgtgcacgtcttgacggtacctaatcagaaagccacggctaactacgtgccagcagccgcggtaatacgtaggtggcaagcgttatccggaattattgggcgtaaagcgcgcgtaggcggttttttaagtctgatgtgaaagcccacggctcaaccgtggagggtcattggaaactggaaaacttgagtgcagaagaggaaagtggaattccatgtgtagcggtgaaatgcgcagagatatggaggaacaccagtggcgaaggcggctttctggtctgcaactgacgctgatgtgcgaaagcgtggggatcaaacaggattagataccctggtagtccacgccgtaaacgatgagtgctaagtgttagggggtttccgccccttagtgctgcagctaacgcattaagcactccgcctggggagtacggtcgcaagactgaaactcaaaggaattgacggggacccgcacaagcggtggagcatgtggtttaattcgaagcaacgcgaagaaccttaccaaatcttgacatcctttgaccgcactagagatagtgttttcctcttcggaggacaaagtgacaggtggtgcatggttgtcgtcagctcgtgtcgtgagatgttgggttaagtcccgcaacgagcgcaacccttgagcttagttgccatcattaagttgggcactctaagctgactgccggtgacaaaccggaggaaggtggggatgacgtcaaatcatcatgccccttatgatttgggctacacacgtgctacaatggacattacaaagggcagcaaaaccgcgaggtcaagcaaatcccataaagatgttctcagttcggattgtagtctgcaactcgactacatgaagctggaatcgctagtaatcgtagatcagcatgctacggtgaatacgttcccgggtcttgtacacaccgcccgtcacaccacgagagtttgtaacacccgaagccggtggagtaaccatttggagctagccgtcgaaggtgggacaaatgattggggtg

SEQ ID NO: 3252 - DNA, 1473 bp, Staphylococcus muscae
gatgaacgctggcggcgtgcctaatacatgcaagtcgagcgaacagacgaggtgcttgcacctctgacgttagcggcggacgggtgagtaacacgtgggtaacctacctataagactggaataacttcgggaaaccggagctaatgccggataatatattgaaccgcatggttcaatagtgaaagacggttttgctgtcacttatagatggacccgcgccgtattagctagttggtaaggtaacggcttaccaaggcgacgatacgtagccgacctgagagggtgatcggccacactggaactgagacacggtccagactcctacgggaggcagcagtagggaatcttccgcaatgggcgaaagcctgacggagcaacgccgcgtgagtgatgaaggtcttcggatcgtaaagctctgttattagggaagaacaaacgtgtaagtaactgtgcacgtcttgacggtacctaatcagaaagccacggctaactacgtgccagcagccgcggtaatacgtaggtggcaagcgttatccggaattattgggcgtaaagcgcgcgtaggcggttttttaagtctgatgtgaaagcccacggctcaaccgtggagggtcattggaaactggaaaacttgagtgcagaagaggaaagtggaattccatgtgtagcggtgaaatgcgcagagatatggaggaacaccagtggcgaaggcggctttctggtctgcaactgacgctgatgtgcgaaagcgtggggatcaaacaggattagataccctggtagtccacgccgtaaacgatgagtgctaagtgttagggggtttccgccccttagtgctgcagctaacgcattaagcactccgcctggggagtacggtcgcaagactgaaactcaaaggaattgacggggacccgcacaagcggtggagcatgtggtttaattcgaagcaacgcgaagaaccttaccaaatcttgacatcctttgaccgcactagagatagtgttttcctcttcggaggacaaagtgacaggtggtgcatggttgtcgtcagctcgtgtcgtgagatgttgggttaagtcccgcaacgagcgcaacccttgagcttagttgccatcattaagttgggcactctaagttgactgccggtgacaaaccggaggaaggtggggatgacgtcaaatcatcatgccccttatgatttgggctacacacgtgctacaatggacattacaaagggcagcgaaaccgcgaggtcaagcaaatcccataaagatgttctcagttcggattgtagtctgcaactcgactacatgaagctggaatcgctagtaatcgtagatcagcatgctacggtgaatacgttcccgggtcttgtacacaccgcccgtcacaccacgagagtttgtaacacccgaagccggtggagtaaccatttggagctagccgtcgaaggtgggacaaatgattggggtg

SEQ ID NO: 3253 - DNA, 1473 bp, Staphylococcus piscifermentans
gatgaacgctggcggcgtgcctaatacatgcaagtcgagcgaacagacgaggagcttgctcctctgacgttagcggcggacgggtgagtaacacgtgggtaacctacctataagactggaataactccgggaaaccggggctaatgccggataatatgcggaaccgcatggttccgcaatgaaagacggttttgctgtcacttatagatggacccgcgccgtattagctagttggtaaggtaacggcttaccaaggcaacgatacgtagccgacctgagagggtgatcggccacactggaactgagacacggtccagactcctacgggaggcagcagtagggaatcttccgcaatgggcgaaagcctgacggagcaacgccgcgtgagtgatgaaggtcttcggatcgtaaaactctgttattagggaagaacaagtgcgtaggtaactatgcgcaccttgacggtacctaatcagaaagccacggctaactacgtgccagcagccgcggtaatacgtaggtggcaagcgttatccggaattattgggcgtaaagcgcgcgtaggcggttttttaagtctgatgtgaaagcccacggctcaaccgtggagggtcattggaaactggaaaacttgagtgcagaagaggaaagtggaattccatgtgtagcggtgaaatgcgcagagatatggaggaacaccagtggcgaaggcgactttctggtctgcaactgacgctgatgtgcgaaagcgtggggatcaaacaggattagataccctggtagtccacgccgtaaacgatgagtgctaagtgttagggggtttccgccccttagtgctgcagctaacgcattaagcactccgcctggggagtacggccgcaaggctgaaactcaaaggaattgacggggacccgcacaagcggtggagcatgtggtttaattcgaagcaacgcgaagaaccttaccaaatcttgacatcctttgaccgctctagagatagagtcttccccttcgggggacaaagtgacaggtggtgcatggttgtcgtcagctcgtgtcgtgagatgttgggttaagtcccgcaacgagcgcaacccttaagcttagttgccagcattaagttgggcactctaagttgactgccggtgacaaaccggaggaaggtggggatgacgtcaaatcatcatgccccttatgatttgggctacacacgtgctacaatggacaatacaaagggcagcgaaaccgcgaggtcaagcaaatcccataaagttgttctcagttcggattgtagtctgcaactcgactacatgaagctggaatcgctagtaatcgtagatcagcatgctacggtgaatacgttcccgggtcttgtacacaccgcccgtcacaccacgagagtttgtaacacccgaagccggtggagtaaccttttaggagctagccgtcgaaggtgggacagatgattggggt

SEQ ID NO: 3254 - DNA, 1474 bp, Staphylococcus pseudintermedius
gatgaacgctggcggcgtgcctaatacatgcaagtcgagcgaacagataaggagcttgctcctttgacgttagcggcggacgggtgagtaacacgtgggtaacctacctataagactggaataactccgggaaaccggggctaatgccggataacatgttgaaccgcatggttctacagtgaaagacggtcttgctgtcacttatagatggacccgcgccgtattagctagttggtggggtaacggcctaccaaggcgacgatacgtagccgacctgagagggtgatcggccacactggaactgagacacggtccagactcctacgggaggcagcagtagggaatcttccgcaatgggcgaaagcctgacggagcaacgccgcgtgagtgatgaaggtcttcggatcgtaaagctctgttgttagggaagaacaaatgtgtaagtaactgtgcacatcttgacggtacctaaccagaaagccacggctaactacgtgccagcagccgcggtaatacgtaggtggcaagcgttatccggaattattgggcgtaaagcgcgcgtaggcggttttttaagtctgatgtgaaagcccacggctcaaccgtggagggtcattggaaactggaaaacttgagtgcagaagaggaaagtggaattccatgtgtagcggtgaaatgcgcagagatatggaggaacaccagtggcgaaggcggctttctggtctgcaactgacgctgatgtgcgaaagcgtggggatcaaacaggattagataccctggtagtccacgccgtaaacgatgagtgctaagtgttagggggtttccgccccttagtgctgcagctaacgcattaagcactccgcctggggagtacggtcgcaagactgaaactcaaaggaattgacggggacccgcacaagcggtggagcatgtggtttaattcgaagcaacgcgaagaaccttaccaaatcttgacatcctttgaccgctctagagatagagttttcctcttcggaggacaaagtgacaggtggtgcatggttgtcgtcagctcgtgtcgtgagatgttgggttaagtcccgcaacgagcgcaacccttgaacttagttgccatcattcagttgggcactctaagttgactgccggtgacaaaccggaggaaggtggggatgacgtcaaatcatcatgccccttatgatttgggctacacacgtgctacaatggacaatacaaagggcagcgaaaccgcgaggtcaagcaaatcccataaagttgttctcagttcggattgtagtctgcaactcgactacatgaagctggaatcgctagtaatcgtagatcagcatgctacggtgaatacgttcccgggtcttgtacacaccgcccgtcacaccacgagagtttgtaacacccgaagccggtggagtaaccattttggagctagccgtcgaaggtgggacaaatgattgggacg

SEQ ID NO: 3255 - DNA, 1393 bp, Staphylococcus rostri
gatgaacgctggcggcgtgcctaatacatgcaagtcgagcgaacagacgaggtgcttgcacctctgacgttagcggcggacgggtgagtaacacgtgggtaacctacctataagactggaataactccgggaaaccggggctaatgccggataacatattgaaccgcatggttcaatagtgaaagacggtcttgctgtcacttatagatggacccgcgccgtattagctagttggtaaggtaacggcttaccaaggcgacgatacgtagccgacctgagagggtgatcggccacactggaactgagacacggtccagactcctacgggaggcagcagtagggaatcttccgcaatgggcgaaagcctgacggagcaacgccgcgtgagtgatgaaggtcttcggatcgtaaagctctgttattagggaagaacaaacgtgtaagtaactgtgcacgtcttgacggtacctaatcagaaagccacggctaactacgtgccagcagccgcggtaatacgtaggtggcaagcgttatccggaattattgggcgtaaagcgcgcgtaggcggttttttaagtctgatgtgaaagcccacggctcaaccgtggagggtcattggaaactggaaaacttgagtgcagaagaggaaagtggaattccatgtgtagcggtgaaatgcgcagagatatggaggaacaccagtggcgaaggcggctttctggtctgcaactgacgctgatgtgcgaaagcgtggggatcaaacaggattagataccctggtagtccacgccgtaaacgatgagtgctaagtgttagggggtttccgccccttagtgctgcagctaacgcattaagcactccgcctggggagtacggtcgcaagactgaaactcaaaggaattgacggggacccgcacaagcggtggagcatgtggtttaattcgaagcaacgcgaagaaccttaccaaatcttgacatcctttgaccgcactagagatagtgttttcctcttcggaggacaaagtgacaggtggtgcatggttgtcgtcagctcgtgtcgtgagatgttgggttaagtcccgcaacgagcgcaacccttgagcttagttgccatcattaagttgggcactctaagctgactgccggtgacaaaccggaggaaggtggggatgacgtcaaatcatcatgccccttatgatttgggctacacacgtgctacaatggacattacaaagggcagcaaaaccgcgaggtcaagcaaatcccataaagatgttctcagttcggattgtagtctgcaactcgactacatgaagctggaatcgctagtaatcgtagatcagcatgctacggtgaatacgttcccgggtcttgtacacaccgcccgtcacac

SEQ ID NO: 3256 - DNA, 1474 bp, Staphylococcus schweitzeri
gatgaacgctggcggcgtgcctaatacatgcaagtcgagcgaacggacgagaagcttgcttctctgatgttagcggcggacgggtgagtaacacgtggataacctacctataagactgggataacttcgggaaaccggagctaataccggataatattttgaaccgcatggttcaaaagtgaaagacggtcttgctgtcacttatagatggatccgcgctgcattagctagttggtaaggtaacggcttaccaaggcaacgatgcatagccgacctgagagggtgatcggccacactggaactgagacacggtccagactcctacgggaggcagcagtagggaatcttccgcaatgggcgaaagcctgacggagcaacgccgcgtgagtgatgaaggtcttcggatcgtaaaactctgttattagggaagaacatatgtgtaagtaactgtgcacatcttgacggtacctaatcagaaagccacggctaactacgtgccagcagccgcggtaatacgtaggtggcaagcgttatccggaattattgggcgtaaagcgcgcgtaggcggttttttaagtctgatgtgaaagcccacggctcaaccgtggagggtcattggaaactggaaaacttgagtgcagaagaggaaagtggaattccatgtgtagcggtgaaatgcgcagagatatggaggaacaccagtggcgaaggcgactttctggtctgtaactgacgctgatgtgcgaaagcgtggggatcaaacaggattagataccctggtagtccacgccgtaaacgatgagtgctaagtgttagggggtttccgccccttagtgctgcagctaacgcattaagcactccgcctggggagtacgaccgcaaggttgaaactcaaaggaattgacggggacccgcacaagcggtggagcatgtggtttaattcgaagcaacgcgaagaaccttaccaaatcttgacatcctttgacaactctagagatagagccttccccttcgggggacaaagtgacaggtggtgcatggttgtcgtcagctcgtgtcgtgagatgttgggttaagtcccgcaacgagcgcaacccttaagcttagttgccatcattaagttgggcactctaagttgactgccggtgacaaaccggaggaaggtggggatgacgtcaaatcatcatgccccttatgatttgggctacacacgtgctacaatggacaatacaaagggcagcaaaaccgcgaggtcaagcaaatcccataaagttgttctcagttcggattgtagtctgcaactcgactacatgaagctggaatcgctagtaatcgtagatcagcatgctacggtgaatacgttcccgggtcttgtacacaccgcccgtcacaccacgagagtttgtaacacccgaagccggtggagtaaccttttaggagctagccgtcgaaggtgggacaaatgattggggtg

SEQ ID NO: 3257 - DNA, 1476 bp, Staphylococcus stepanovicii
gatgaacgctggcggcgtgcctaatacatgcaagtcgagcgaacagatgagaagcttgcttctctgatgttagcggcggacgggtgagtaacacgtgggtaacctacctataagactgggataactccgggaaaccggggctaataccggataatattttgaaccgcatggttcgatagtgaaagacggtttcggctgtcacttatagatggacccgcgccgtattagctagttggtaaggtaatggcttaccaaggcgacgatacgtagccgacctgagagggtgatcggccacactgggactgagacacggcccagactcctacgggaggcagcagtagggaatcttccgcaatgggcgaaagcctgacggagcaacgccgcgtgagtgatgaaggttttcggatcgtaaaactctgttgttagggaagaacaaatttgttagtaactgaacaagtcttgacggtacctaaccagaaagccacggctaactacgtgccagcagccgcggtaatacgtaggtggcaagcgttatccggaattattgggcgtaaagcgcgcgtaggcggtttcttaagtctgatgtgaaagcccacggctcaaccgtggagggtcattggaaactggggaacttgagtgcagaagaggagagtggaattccatgtgtagcggtgaaatgcgcagagatatggaggaacaccagtggcgaaggcggctctctggtctgtaactgacgctgaggtgcgaaagcgtggggatcaaacaggattagataccctggtagtccacgccgtaaacgatgagtgctaagtgttagggggtttccgccccttagtgctgcagctaacgcattaagcactccgcctggggagtacgaccgcaaggttgaaactcaaaggaattgacggggacccgcacaagcggtggagcatgtggtttaattcgaagcaacgcgaagaaccttaccaaatcttgacatcctttgatcgctctagagatagagttttccccttcgggggacaaagtgacaggtggtgcatggttgtcgtcagctcgtgtcgtgagatgttgggttaagtcccgcaacgagcgcaacccttaagcttagttgccatcattaagttgggcactctaggttgactgccggtgacaaaccggaggaaggtggggatgacgtcaaatcatcatgccccttatgatttgggctacacacgtgctacaatggataatacaaagggcagcgaacccgcgaggtcaagcaaatcccataaaattattctcagttcggattgtagtctgcaactcgactacatgaagctggaatcgctagtaatcgtagatcagcatgctacggtgaatacgttcccgggtcttgtacacaccgcccgtcacaccacgagagtttgtaacacccgaagccggtggagtaacctttataggagctagccgtcgaaggtgggacagatgattggggtg

SEQ ID NO: 3258 - DNA, 1407 bp, Starkeya novella
aacgaacgctggcggcaggcttaacacatgcaagtcgaacgcaccgcaaggtgagtggcagacgggtgagtaacacgtggggatctgcccaatggtacggaatagctccgggaaactggaattaataccgtatgtgcccgcaaggggaaagatttatcgccattggatgaacccgcgtcggattagctagttggtgtggtaaaggcgcaccaaggcgacgatccgtagctggtctgagaggatgatcagccacactgggactgagacacggcccagactcctacgggaggcagcagtggggaatattggacaatgggcgcaagcctgatccagccatgccgcgtgagtgatgaaggccttagggttgtaaagctctttcgccgacgaagataatgacggtagtcggagaagaagccccggctaacttcgtgccagcagccgcggtaatacgaagggggctagcgttgttcggaatcactgggcgtaaagcgcacgtaggcggattgttaagtcaggggtgaaagcctggagctcaactccagaactgcccttgatactggcaatctcgagtccggaagaggtaagtggaactgcgagtgtagaggtgaaattcgtagatattcgcaagaacaccagtggcgaaggcggcttactggtccggtactgacgctgaggtgcgaaagcgtggggagcaaacaggattagataccctggtagtccacgccgtaaacgatggaggctagccgttggtgagcatgctcatcagtggcgcagctaacgcattaagcctcccgcctggggagtacggtcgcaagattaaaactcaaaggaattgacgggggcccgcacaagcggtggagcatgtggtttaattcgaagcaacgcgcagaaccttaccagcctttgacatgtctcggaattggaccagagatggaccaagctcttcggagccgggaacacaggtgctgcatggctgtcgtcagctcgtgtcgtgagatgttgggttaagtcccgcaacgagcgcaaccctcgcccttagttgccatcattaagttgggcactctagggggactgccggtgataagccgagaggaaggtggggatgacgtcaagtcctcatggcccttacgggctgggctacacacgtgctacaatggcggtgacagtgggatgcgaacccgcgagggtgagcaaatctccaaaagccgtctcagttcggattgcactctgcaactcgagtgcatgaagttggaatcgctagtaatcgtggatcagcacgccacggtgaatacgttcccgggccttgtacacaccgcccgtcacaccatgggagttggctttacccgaaggcgctgcgctaacccgcaagggaggcaggcgaccacggtagggtcagcgactggggtg

SEQ ID NO: 3259 - DNA, 1414 bp, Stella humosa
aacgaacgctggcggcatgcctaacacatgcaagtcgaacgaatggcttcggccattagtggcgcacgggtgagtaacgcgtgggaatctgcccagcagtgggggataacctcgggaaactgaggctaataccgcatacgcccctcgggggaaaggcttgctgctgctggaggagcccgcgtcggattaggtagttggtggggtaacggcctaccaagcctgtgatccgtagctggtctgagaggatgatcagccacactgggactgagacacggcccagactcctacgggaggcagcagtggggaatattggacaatgggcgcaagcctgatccagcaatgccgcgtgagtgatgaaggccttcgggttgtaaagctctttcgcccacgacgatgatgacggtagtgggagaagaagccccggctaacttcgtgccagcagccgcggtaatacgaagggggctagcgttgttcggaatgactgggcgtaaagggcgcgtaggcggcgcatcaagtcgggcgtgaaagccccgggctcaacctgggaactgcgttcgagactggtgtgctagagttcgggagaggagagtggaattcccagtgtagaggtgaaattcgtagatattgggaagaacaccaatggcgaaggcagctctctggaccgatactgacgctgaggcgcgaaagcgtggggagcaaacaggattagataccctggtagtccacgccgtaaacgatgaatgctagacgttgggacccctagggtttcagtgtcgccgctaacgcatgaagcattccgcctggggagtacggccgcaaggttaaaactcaaaggaattgacgggggcccgcacaagcggtggagcatgtggtttaattcgacgcaacgcgcagaaccttaccagctcttgacatgggaagtttgggtctgagagatcgggtccttcagttcggctggcttccacacaggtgctgcatggctgtcgtcagctcgtgtcgtgagatgttgggttaagtcccgcaacgagcgcaaccctcatcctcagttgccatcaggtagggctgggcactctggggaaactgccggtgacaagccggaggaaggcggggatgacgtcaagtcctcatggcccttacgggctgggctacacacgtgctacaatggcggtgacagtaggacgcaatggggcgacccggagccaatccactaaaagccgtctcagttcggattgtactctgcaactcgagtgcatgaagctggaatcgctagtaatcgcggatcagcatgccgcggtgaatacgttcccgggccttgtacacaccgcccgtcacaccatgggagttggttttacctgaagccggtgggctaaccgcaaggaggcagccgaccacggtagggtcagcgactggggtg

SEQ ID NO: 3260 - DNA, 1469 bp, Stenotrophomonas chelatiphaga
agtgaacgctggcggtaggcctaacacatgcaagtcgaacggcagcacagtaagagcttgctcttatgggtggcgagtggcggacgggtgaggaatacatcggaatctactttttcgtgggggataacgtagggaaacttacgctaataccgcatacgaccttcgggtgaaagcaggggaccttcgggccttgcgcgattgaatgagccgatgtcggattagctagttggcggggtaaaggcccaccaaggcgacgatccgtagctggtctgagaggatgatcagccacactggaactgagacacggtccagactcctacgggaggcagcagtggggaatattggacaatgggcgcaagcctgatccagccataccgcgtgggtgaagaaggccttcgggttgtaaagcccttttgttgggaaagaaaagcagcgggctaataccttgctgttctgacggtacccaaagaataagcaccggctaacttcgtgccagcagccgcggtaatacgaagggtgcaagcgttactcggaattactgggcgtaaagcgtgcgtaggtggtcgtttaagtctgttgtgaaagccctgggctcaacctgggaactgcagtggaaactggacgactagagtgtggtagagggtagcggaattcccggtgtagcagtgaaatgcgtagagatcgggaggaacatccatggcgaaggcagctacctggaccaacactgacactgaggcacgaaagcgtggggagcaaacaggattagataccctggtagtccacgccctaaacgatgcgaactggatgttgggtgcactttggcacgcagtatcgaagctaacgcgttaagttcgccgcctggggagtacggtcgcaagactgaaactcaaaggaattgacgggggcccgcacaagcggtggagtatgtggtttaattcgatgcaacgcgaagaaccttacctggccttgacatgtcgagaactttccagagatggattggtgccttcgggaactcgaacacaggtgctgcatggctgtcgtcagctcgtgtcgtgagatgttgggttaagtcccgcaacgagcgcaacccttgtccttagttgccagcacgtaatggtgggaactctaaggagaccgccggtgacaaaccggaggaaggtggggatgacgtcaagtcatcatggcccttacggccagggctacacacgtactacaatggtagggacagagggctgcaagccggcgacggtaagccaatcccagaaaccctatctcagtccggattggagtctgcaactcgactccatgaagtcggaatcgctagtaatcgcagatcagcattgctgcggtgaatacgttcccgggccttgtacacaccgcccgtcacaccatgggagtttgttgcaccagaagcaggtagcttaaccttcgggagggcgcttgccacggtgtggccgatgactggggtg

SEQ ID NO: 3261 - DNA, 1467 bp, Stenotrophomonas daejeonensis
agtgaacgctggcggtaggcctaacacatgcaagtcgaacggcagcacaggagagcttgctctctgggtggcgagtggcggacgggtgaggaatacatcggaatctactttgtcgtgggggataacgcagggaaacttgcgctaataccgcatacgacctacgggtgaaagcaggggatcttcggaccttgcgcgattgaatgagccgatgtcggattagctagttggcggggtaaaggcccaccaaggcgacgatccgtagctggtctgagaggatgatcagccacactggaactgagacacggtccagactcctacgggaggcagcagtggggaatattggacaatgggcgcaagcctgatccagccataccgcgtgggtgaagaaggccttcgggttgtaaagcccttttgttgggaaagaaaagccatgggttaataccctgtggttctgacggtacccaaagaataagcaccggctaacttcgtgccagcagccgcggtaatacgaagggtgcaagcgttactcggaattactgggcgtaaagcgtgcgtaggtggttgattaagtctgtcgtgaaagccctgggctcaacctgggaattgcgatggaaactggttgactagagtgtggcagagggtagtggaattcctggtgtagcagtgaaatgcgtagagatcaggaggaacatccgtggcgaaggcgactgcctgggccaacactgacactgaggcacgaaagcgtggggagcaaacaggattagataccctggtagtccacgccctaaacgatgcgaactggatgttgggtgcactttggcacgcagtatcgaagctaacgcgttaagttcgccgcctggggagtacggtcgcaagactgaaactcaaaggaattgacgggggcccgcacaagcggtggagtatgtggtttaattcgatgcaacgcgaagaaccttacctggccttgacatgcacggaactttccagagatggatgggtgccttcgggaaccgtgacacaggtgctgcatggctgtcgtcagctcgtgtcgtgagatgttgggttaagtcccgcaacgagcgcaacccttgtccttagttgccagcacgtaatggtgggaactctaaggagaccgccggtgacaaaccggaggaaggtggggatgacgtcaagtcatcatggcccttacggccagggctacacacgtactacaatggtagggacagagggctgcaagccggcgacggtgagccaatcccagaaaccctatctcagtccggattggagtctgcaactcgactccatgaagtcggaatcgctagtaatcgcagatcagcattgctgcggtgaatacgttcccgggccttgtacacaccgcccgtcacaccatgggagtttgttgcaccagaagcaggtagcttaaccttcgggagggcgcttgccacggtgtggccgatgactggggtg

SEQ ID NO: 3262 - DNA, 1467 bp, Stenotrophomonas ginsengisoli
agtgaacgctggcggtaggcctaacacatgcaagtcgaacggtagcacagaggagcttgctccttgggtgacgagtggcggacgggtgaggaatacatcggaatctactttttcgtgggggataacgtagggaaacttacgctaataccgcatacgacctacgggtgaaagccggggaccttcgggcctggcgcggataaatgagccgatgtcggattagctagttggcggggtaatggcccaccaaggcgacgatccgtagctggtctgagaggatgatcagccacactggaactgagacacggtccagactcctacgggaggcagcagtggggaatattggacaatgggcgcaagcctgatccagccataccgcgtgggtgaagaaggccttcgggttgtaaagcccttttgttgggaaagaaaagcagccggttaatacccggttgttctgacggtacccaaagaataagcaccggctaacttcgtgccagcagccgcggtaatacgaagggtgcaagcgttactcggaattactgggcgtaaagcgtgcgtaggtggtttgttaagtctgtcgtgaaagccctgggctcaacctgggaactgcgatggaaactggctaactagaatgtggtagagggtagcggaattcctggtgtagcagtgaaatgcgtagatatcaggaggaacatccatggcgaaggcagctacctgggccaacattgacactgaggcacgaaagcgtggggagcaaacaggattagataccctggtagtccacgccctaaacgatgcgaactggatgttgggtgcactttggcacgcagtatcgaagctaacgcgttaagttcgccgcctggggagtacggtcgcaagactgaaactcaaaggaattgacgggggcccgcacaagcggtggagtatgtggtttaattcgatgcaacgcgaagaaccttacctggccttgacatgctgagaactttccagagatggattggtgccttcgggaactcagacacaggtgctgcatggctgtcgtcagctcgtgtcgtgagatgttgggttaagtcccgcaacgagcgcaacccttgtccttagttgccagcacgtaatggtgggaactctaaggagaccgccggtgacaaaccggaggaaggtggggatgacgtcaagtcatcatggcccttacggccagggctacacacgtactacaatggtggggacagagggctgcaagccggcgacggtaagccaatcccagaaaccccatctcagtccggattggagtctgcaactcgactccatgaagtcggaatcgctagtaatcgcagatcagcactgctgcggtgaatacgttcccgggccttgtacacaccgcccgtcacaccatgggagtttgttgcaccagaagcaggtagcttaaccttcgggagggcgcttgccacggtgtggccgatgactggggtg

SEQ ID NO: 3263 - DNA, 1467 bp, Stenotrophomonas humi
agtgaacgctggcggtaggcctaacacatgcaagtcgaacggcagcacaggagagcttgctctctgggtggcgagtggcggacgggtgaggaatacatcggaatctactttttcgtgggggataacgtagggaaacttacgctaataccgcatacgacctacgggtgaaagccggggaccttcgggcctggcgcggataaatgagccgatgtccgattagctagttggcggggtaagagcccaccaaggcgacgatcggtagctggtctgagaggatgatcagccacactggaactgagacacggtccagactcctacgggaggcagcagtggggaatattggacaatgggcgcaagcctgatccagccataccgcgtgggtgaagaaggccttcgggttgtaaagcccttttgttgggaaagaaaagcagtcggttaatacccgattgttctgacggtacccaaagaataagcaccggctaacttcgtgccagcagccgcggtaatacgaagggtgcaagcgttactcggaattactgggcgtaaagcgtgcgtaggtggttgtttaagtctgtcgtgaaagccctgggctcaacctgggaattgcgatggaaactgggcaactagagtgtggcagaggatagtggaattcctggtgtagcagtgaaatgcgtagagatcaggaggaacatccgtggcgaaggcgactgtctgggccaacactgacactgaggcacgaaagcgtggggagcaaacaggattagataccctggtagtccacgccctaaacgatgcgaactggatgttgggtgcaatttggcacgcagtatcgaagctaacgcgttaagttcgccgcctggggagtacggtcgcaagactgaaactcaaaggaattgacgggggcccgcacaagcggtggagtatgtggtttaattcgatgcaacgcgaagaaccttacctggccttgacatgtcgagaactttccagagatggattggtgccttcgggaactcgaacacaggtgctgcatggctgtcgtcagctcgtgtcgtgagatgttgggttaagtcccgcaacgagcgcaacccttgtccttagttgccagcacgtaatggtgggaactctaaggagaccgccggtgacaaaccggaggaaggtggggatgacgtcaagtcatcatggcccttacggccagggctacacacgtactacaatggtagggacagagggctgcaagccggcgacggtaagccaatcccagaaaccctatctcagtccggattggagtctgcaactcgactccatgaagtcggaatcgctagtaatcgcagatcagcattgctgcggtgaatacgttcccgggccttgtacacaccgcccgtcacaccatgggagtttgttgcaccagaagcaggtagcttaaccttcgggagggcgcttgccacggtgtggccgatgactggggtg

SEQ ID NO: 3264 - DNA, 1467 bp, Stenotrophomonas koreensis
agtgaacgctggcggtaggcctaacacatgcaagtcgaacggtagcacagaggagcttgctccttgggtgacgagtggcggacgggtgaggaatgcatcggaatctactctttcgtgggggataacgtagggaaacttacgctaataccgcatacgacctacgggtgaaagcaggggaccttcgggccttgcgcgattgaatgagccgatgtccgattagctagttggcggggtaatggcccaccaaggcgacgatcggtagctggtctgagaggatgatcagccacactggaactgagacacggtccagactcctacgggaggcagcagtggggaatattggacaatgggcgcaagcctgatccagccataccgcgtgggtgaagaaggccttcgggttgtaaagcccttttgttgggaaagaaaagcagccggctaatacccggttgttctgacggtacccaaagaataagcaccggctaacttcgtgccagcagccgcggtaatacgaagggtgcaagcgttactcggaattactgggcgtaaagcgtgcgtaggtggttgtttaagtctgtcgtgaaagccctgggctcaacctgggaactgcgatggaaactgggcgactagagtgtggtagagggtagcggaattcctggtgtagcagtgaaatgcgtagatatcaggaggaacatccatggcgaaggcagctacctgggccaacactgacactgaggcacgaaagcgtggggagcaaacaggattagataccctggtagtccacgccctaaacgatgcgaactggatgttgggtgcactttggcacgcagtatcgaagctaacgcgttaagttcgccgcctggggagtacggtcgcaagactgaaactcaaaggaattgacgggggcccgcacaagcggtggagtatgtggtttaattcgatgcaacgcgaagaaccttacctggccttgacatgctgagaactttccagagatggattggtgccttcgggaactcagacacaggtgctgcatggctgtcgtcagctcgtgtcgtgagatgttgggttaagtcccgcaacgagcgcaacccttgtccttagttgccagcacgtaatggtgggaactctaaggagaccgccggtgacaaaccggaggaaggtggggatgacgtcaagtcatcatggcccttacggccagggctacacacgtactacaatggtggggacagagggctgcaaactcgcgagagtaagccaatcccagaaaccccatctcagtccggattggagtctgcaactcgactccatgaagtcggaatcgctagtaatcgcagatcagcactgctgcggtgaatacgttcccgggccttgtacacaccgcccgtcacaccatgggagtttgttgcaccagaagcaggtagcttaaccttcgggagggcgcttgccacggtgtggccgatgactggggtg

SEQ ID NO: 3265 - DNA, 1469 bp, Stenotrophomonas panacihumi
agtgaacgctggcggcaggcctaacacatgcaagtcgaacggcagcacagtaagagcttgctcttatgggtggcgagtggcggacgggtgaggaatacatcggaatctaccttttcgtgggggataacgtagggaaacttacgctaataccgcatacgaccttcgggtgaaagcaggggaccttcgggccttgcgcgattagatgagccgatgtcggattagctagttggtgaggtaaaggctcaccaaggcgacgatccgtagctggtctgagaggatgatcagccacactggaactgagacacggtccagactcctacgggaggcagcagtggggaatattggacaatgggcgcaagcctgatccagccatgccgcgtgggtgaagaaggccttcgggttgtaaagcccttttgttgggaaagaaaagcagtcgattaatactcgattgttctgacggtacccaaagaataagcaccggctaacttcgtgccagcagccgcggtaatacgaagggtgcaagcgttactcggaattactgggcgtaaagcgtgcgtaggtggtggtttaagtccgttgtgaaagccctgggctcaacctgggaattgcagtggatactgggtcactagagtgtggtagagggtagcggaattcccggtgtagcagtgaaatgcgtagagatcgggaggaacatctgtggcgaaggcggctacctggaccaacactgacactgaggcacgaaagcgtggggagcaaacaggattagataccctggtagtccacgccctaaacgatgcgaactggatgttgggtgcaatttggcacgcagtatcgaagctaacgcgttaagttcgccgcctggggagtacggtcgcaagactgaaactcaaaggaattgacgggggcccgcacaagcggtggagtatgtggtttaattcgatgcaacgcgaagaaccttacctggtcttgacatgtcgagaactttccagagatggattggtgccttcgggaactcgaacacaggtgctgcatggctgtcgtcagctcgtgtcgtgagatgttgggttaagtcccgcaacgagcgcaacccttgtccttagttgccagcacgtaatggtgggaactctaaggagaccgccggtgacaaaccggaggaaggtggggatgacgtcaagtcatcatggcccttacgaccagggctacacacgtactacaatggtagggacagagggctgcaatcccgcgagggtgagccaatcccagaaaccctatctcagtccggattggagtctgcaactcgactccatgaagtcggaatcgctagtaatcgcagatcagcattgctgcggtgaatacgttcccgggccttgtacacaccgcccgtcacaccatgggagtttgttgcaccagaagcaggtagcttaaccttcgggagggcgcttgccacggtgtggccgatgactggggtg

SEQ ID NO: 3266 - DNA, 1467 bp, Stenotrophomonas pavanii
agtgaacgctggcggtaggcctaacacatgcaagtcgaacggcagcacaggagagcttgctctctgggtggcgagtggcggacgggtgaggaatacatcggaatctactctgtcgtgggggataacgtagggaaacttacgctaataccgcatacgacctacgggtgaaagcaggggaccttcgggccttgcgcgattgaatgagccgatgtcggattagctagttggcggggtaaaggcccaccaaggcgacgatccgtagctggtctgagaggatgatcagccacactggaactgagacacggtccagactcctacgggaggcagcagtggggaatattggacaatgggcgcaagcctgatccagccataccgcgtgggtgaagaaggccttcgggttgtaaagcccttttgttgggaaagaaatccagctggctaatacccggttgggatgacggtacccaaagaataagcaccggctaacttcgtgccagcagccgcggtaatacgaagggtgcaagcgttactcggaattactgggcgtaaagcgtgcgtaggtggtcgtttaagtccgttgtgaaagccctgggctcaacctgggaactgcagtggatactggacgactagagtgtggtagagggtagcggaattcctggtgtagcagtgaaatgcgtagagatcaggaggaacatccatggcgaaggcagctacctggaccaacactgacactgaggcacgaaagcgtggggagcaaacaggattagataccctggtagtccacgccctaaacgatgcgaactggatgttgggtgcaatttggcacgcagtatcgaagctaacgcgttaagttcgccgcctggggagtacggtcgcaagactgaaactcaaaggaattgacgggggcccgcacaagcggtggagtatgtggtttaattcgatgcaacgcgaagaaccttacctggccttgacatgtcgagaactttccagagatggatcggtgccttcgggaactcgaacacaggtgctgcatggctgtcgtcagctcgtgtcgtgagatgttgggttaagtcccgcaacgagcgcaacccttgtccttagttgccagcacgtaatggtgggaactctaaggagaccgccggtgacaaaccggaggaaggtggggatgacgtcaagtcatcatggcccttacggccagggctacacacgtactacaatggtagggacagagggctgcaagccggcgacggtaagccaatcccagaaaccctatctcagtccggattggagtctgcaactcgactccatgaagtcggaatcgctagtaatcgcagatcagcattgctgcggtgaatacgttcccgggccttgtacacaccgcccgtcacaccatgggagtttgttgcaccagaagcaggtagcttaaccttcgggagggcgcttgccacggtgtggccgatgactggggtg

SEQ ID NO: 3267 - DNA, 1466 bp, Stenotrophomonas pictorum
agtgaacgctggcggtaggcctaacacatgcaagtcgaacggcagcacagtaagagcttgctcttacgggtggcgagtggcggacgggtgaggaatacatcggaatctactttttcgtgggggataacgtagggaaacttacgctaataccgcatacgccctacgggggaaagccggggaccttcgggcctggcgcggataaatgagccgatgtccgattagctagttggcggggtaagagcccaccaaggcgacgatcggtagctggtctgagaggatgatcagcacactggaactgagacacggtccagactcctacgggaggcagcagtggggaatattggacaatgggcgcaagcctgatccagccataccgcgtgggtgaagaaggccttcgggttgtaaagcccttttgttgggaaagaaaagcagccggttaatacccggttgttctgacggtacccaaagaataagcaccggctaacttcgtgccagcagccgcggtaatacgaagggtgcaagcgttactcggaattactgggcgtaaagcgtgcgtaggtggttgtttaagtctgtcgtgaaagcctgggctcaacctgggaattgcgatggaaactgggcgactagagtgtggcagagggtagtggaattcctggtgtagcagtgaaatgcgtagagatcaggaggaacatccgtggcgaaggcgactgcctgggccaacactgacactgaggcacgaaagcgtggggagcaaacaggattagataccctggtagtccacgccctaaacgatgcgaactggatgttgggtgcaatttggcacgcagtatcgaagctaacgcgttaagttcgccgcctggggagtacggtcgcaagactgaaactcaaaggaattgacgggggcccgcacaagcggtggagtatgtggtttaattcgatgcaacgcgaagaaccttacctggccttgacatgtcgcgaactttccagagatggattggtgccttcgggaacgcgaacacaggtgctgcatggctgtcgtcagctcgtgtcgtgagatgttgggttaagtcccgcaacgagcgcaacccttgtccttagttgccagcacgtaatggtgggaactctaaggagaccgccggtgacaaaccggaggaaggtggggatgacgtcaagtcatcatggcccttacggccagggctacacacgtactacaatggtagggacagaggctgcaagccggcgacggtaagccaatcccagaaaccctatctcagtccggattggagtctgcaactcgactccatgaagtcggaatcgctagtaatcgcagatcagcattgctgcggtgaatacgttcccgggccttgtacacaccgcccgtcacaccatgggagtttgttgcaccagaagcaggtagcttaaccttcgggagggcgcttgccacggtgtggccgatgactggggtg

SEQ ID NO: 3268 - DNA, 1469 bp, Stenotrophomonas terrae
agtgaacgctggcggtaggcctaacacatgcaagtcgaacggcagcacagtaagagcttgctcttatgggtggcgagtggcggacgggtgaggaatgcatcggaatctactctttcgtgggggataacgtagggaaacttacgctaataccgcatacgacctacgggtgaaagccggggaccttcgggcctggcgcgaatgaatgagccgatgcccgattagctagttggcggggtaagagcccaccaaggcgacgatcggtagctggtctgagaggatgatcagccacactggaactgagacacggtccagactcctacgggaggcagcagtggggaatattggacaatgggcgcaagcctgatccagccataccgcgtgggtgaagaaggccttcgggttgtaaagcccttttgttgggaaagaaaagcagccgattaatacccggttgttctgacggtacccaaagaataagcaccggctaacttcgtgccagcagccgcggtaatacgaagggtgcaagcgttactcggaattactgggcgtaaagcgtgcgtaggtggttgtttaagtctgtcgtgaaagccctgggctcaacctgggaattgcgatggaaactgggcgactagagtgtggcagaggatagtggaattcctggtgtagcagtgaaatgcgtagagatcaggaggaacatccgtggcgaaggcgactgtctgggccaacactgacactgaggcacgaaagcgtggggagcaaacaggattagataccctggtagtccacgccctaaacgatgcgaactggatgttgggtgcaatttggcacgcagtatcgaagctaacgcgttaagttcgccgcctggggagtacggtcgcaagactgaaactcaaaggaattgacgggggcccgcacaagcggtggagtatgtggtttaattcgatgcaacgcgaagaaccttacctggccttgacatgtcgcgaactttccagagatggattggtgccttcgggaacgcgaacacaggtgctgcatggctgtcgtcagctcgtgtcgtgagatgttgggttaagtcccgcaacgagcgcaacccttgtccttagttgccagcacgtaatggtgggaactctaaggagaccgccggtgacaaaccggaggaaggtggggatgacgtcaagtcatcatggcccttacggccagggctacacacgtactacaatggtggggacagagggctgcaagccggcgacggtaagccaatcccagaaaccctatctcagtccggattggagtctgcaactcgactccatgaagtcggaatcgctagtaatcgcagatcagcattgctgcggtgaatacgttcccgggccttgtacacaccgcccgtcacaccatgggagtttgttgcaccagaagcaggtagcttaaccttcgggagggcgcttgccacggtgtggccgatgactggggtg

SEQ ID NO: 3269 - DNA, 1460 bp, Steroidobacter denitrificans
attgaacgctggcggcgtgcctaacacatgcaagtcgagcggtaacaggtgtagcaatacatgctgacgagcggcggacgggtgagtaacgcttgggaatctgcctattagtgggggataactcggggaaactcgagctaataccgcatacgcactacggtggaaagctggggaccgcaaggcctggcgctaatagatgagcccaagtcggattagctagttggtagggtaatggcctaccaaggcgacgatccgtaactggtctgagaggacgaccagtcacaccggaactgagacacggtccggactcctacgggaggcagcagtggggaatattggacaatgggcgaaagcctgatccagcgacgccgcgtgggtgaagaaggcctgcgggttgtaaagccctttcagtggggaagaaaagcctcgagtgaatacctcggggtcttgacgtaacccatagaagaagcaccggctaactctgtgccagcagccgcggtaatacagagggtgcgagcgttaatcggaattactgggcgtaaagcgcgcgtaggcggctttgcaagtcggatgtgaaatccccgggctcaacctgggaactgcattcgagactgcattgctagagtatgggagagggaagtggaatttcaggtgtagcggtgaaatgcgtagatatctgaaggaacatcagtggcgaaagcgacttcctggaccaatactgacgctcatgtgcgaaagcgtggggagcaaacaggattagataccctggtagtccacgccataaacgatgagaactggatgtcgggagggtctgcctctcggtgtcgtagctaacgcgttaagttctccgcctggggagtacggccgcaaggttgaaactcaaaggaattgacggggacccgcacaagcggtggagcatgtggtttaattcgatgcaacgcgaagaaccttacctggtcttgacatcccaggaatcctgcagagatgcgggagtgccttcgggaacctggagacaggtgctgcatggctgtcgtcagctcgtgtcgtgagatgttgggttaagtcccgcaacgagcgcaacccttgcccttagttgccagcattcagttgggaactctaaggggaccgccggtgacaaaccggaggaaggtggggatgacgtcaagtcatcatggcccttatgaccagggctacacacgtgctacaatggccagtacaaagggttgccaacccgcgagggggagctaatcccataaagctggtcgtagtccggatcgcagtctgcaactcggctgcgtgaagtcggaatcgctagtaatcgtgaatcagcattgtcacggtgaatacgttcccgggtcttgtacacaccgcccgtcacaccatgggagttgattgcaccagaagtaggtagcctaaccgcaaggggggcgcttaccacggtgtggtcaatgactggggtg

SEQ ID NO: 3270 - DNA, 1469 bp, Stigmatella aurantiaca
aacgaacgctggcggcgtgcctaacacatgcaagtcgagcgcgaatggagcaatcctagtagagcggcgcacgggtgcgtaacacgtgggtaatctgcctagaagcttgggataaccagtcgaaagattggctaataccaaataagcccacagggacttcggtcctcgagggaaaaggtggcctctgtatacaagctatcacttctagatgagcccgcggcccatcagctagttggcggggtaacggcccaccaaggcaacgacgggtagctggtctgagaggacgatcagccacactggaactgagacacggtccagactcctacgggaggcagcagtggggaattttgcgcaatgggcgaaagcctgacgcagcaacgccgcgtgtgtgatgaaggtcttcggattgtaaagcactttcgaccgggacgaaaacccccaacctaacacgctggggcttgacggtaccgggagaagaagcaccggctaactctgtgccagcagccgcggtaatacagagggtgcaagcgttgttcggaattattgggcgtaaagcgcgtgtaggcggctttgcaagtcgggtgtgaaagccctcagctcaactgaggaagtgcgcccgaaactgcagagcttgagtgccggagagggtagcggaattccccaagtagaggtgaaattcgtagatatggggaggaacaccggtggcgaaggcggctacctggacggtgactgacgctgagacgcgaaagcgtgggtagcaaacaggattagataccctggtagtccacgccgtaaacgatgagaactaggtgtcgtgggagttgacccccgcggtgccgtagctaacgcattaagttctccgcctgggaagtacggtcgcaagactaaaactcaaaggaattgacgggggcccgcacaagcggtggagcatgtggtttaattcgacgcaacgcgcagaaccttacctggtcttgacatcctcggaatccttcagagatgagggagtgcccgcaagggaaccgagagacaggtgctgcatggctgtcgtcagctcgtgtcgtgagatgttgggttaagtcccgcaacgagcgcaaccctcgcctttagttgctccgcaaggagatctctagagggactgccggtgttaaaccggaggaaggtggggatgacgtcaagtcctcatggcctttatgaccagggctacacacgtgctacaatggccggtacagagcgttgccaacccgcgagggggagctaatcgcataaaaccggtctcagttcagattggagtctgcaactcgactccatgaaggcggagtcgctagtaatcgcagatcagcacgctgcggtgaatacgttcccgggccttgtacacaccgcccgtcacaccatgggagtcaattgctccagaagtcgctgtgccaaccgcaaggaggcaggcgcccaaggagtggttggtaactggggtg

SEQ ID NO: 3271 - DNA, 1469 bp, Stigmatella erecta
aacgaacgctggcggcgtgcctaacacatgcaagtcgagcgcgaatggagcaatcctagtagagcggcgcacgggtgcgtaacacgtgggtaatctgcctagaagcttgggataaccagtcgaaagattggctaataccaaataagcccacagggacttcggtcctcgagggaaaaggtggcctctgtatacaagctatcacttctagatgagcccgcggcccatcagctagttggcggggtaacggcccaccaaggcaacgacgggtagctggtctgagaggacgatcagccacactggaactgagacacggtccagactcctacgggaggcagcagtggggaattttgcgcaatgggcgaaagcctgacgcagcaacgccgcgtgtgtgatgaaggtcttcggattgtaaagcactttcgaccgggacgaaaacccccaacctaacacgctggggcttgacggtaccgggagaagaagcaccggctaactctgtgccagcagccgcggtaatacagagggtgcaagcgttgttcggaattattgggcgtaaagcgcgtgtaggcggctttgcaagtcgggtgtgaaagccctcagctcaactgaggaagtgcgcccgaaactgcagagcttgagtgccggagagggtagcggaattccccaagtagaggtgaaattcgtagatatggggaggaacaccggtggcgaaggcggctacctggacggtgactgacgctgagacgcgaaagcgtgggtagcaaacaggattagataccctggtagtccacgccgtaaacgatgagaactaggtgtcgtgggagttgacccccgcggtgccgtagctaacgcattaagttctccgcctgggaagtacggtcgcaagactaaaactcaaaggaattgacgggggcccgcacaagcggtggagcatgtggtttaattcgacgcaacgcgcagaaccttacctggtcttgacatcctcggaatccttcagagatgagggagtgcccgcaagggaaccgagagacaggtgctgcatggctgtcgtcagctcgtgtcgtgagatgttgggttaagtcccgcaacgagcgcaaccctcgcctttagttgctccgcaaggagatctctagagggactgccggtgttaaaccggaggaaggtggggatgacgtcaagtcctcatggcctttatgaccagggctacacacgtgctacaatggccggtacagagcgttgccaacccgcgagggggagctaatcgcataaaaccggtctcagttcagattggagtctgcaactcgactccatgaaggcggaatcgctagtaatcgcagatcagcacgctgcggtgaatacgttcccgggccttgtacacaccgcccgtcacaccatgggagtcaattgctccagaagtcgctgtgccaaccgcaaggaggcaggcgcccaaggagtggttggtaactggggtg

SEQ ID NO: 3272 - DNA, 1479 bp, Streptococcus criceti
gacgaacgctggcggcgtgcctaatacatgcaagtggaacgcttcttttttaccgagtgcttgcactcacaaggaagaagagtcgcgaacgggtgagtaacgcgtaggtaacctgcctggtagcgggggataactattggaaacgatagctaataccgcataatagtgattaactcatgttaatgacttgaaaggtgcaatggcaccactatcagatggacctgcgttgtattagctagtaggtagggtaaaggcctacctaggctgcgatacatagccgacctgagagggtgaacggccacactgggactgagacacggcccagactcctacgggaggcagcagtagggaatcttcggcaatggggggaaccctgaccgagcaacgccgcgtgagtgaagaaggttttcggatcgtaaagctctgttgtaagagaagaacgttgagtagagtggaaagttactcaagtgacggtatcttaccagaaagggacggctaactacgtgccagcagccgcggtaatacgtaggtcccgagcgttgtccggatttattgggcgtaaagcgagcgcaggcggtttagtaagtctgaagttaaaggcattggctcaaccaatgtttgctttggaaactgttaaacttgagtgcagaaggggagagtggaattccatgtgtagcggtgaaatgcgtagatatatggaggaacaccggtggcgaaagcggctctctggtctgtaactgacgctgaggctcgaaagcgtgggtagcgaacaggattagataccctggtagtccacgccgtaaacgctgagtgctaggtgttgggtcctttccgggactcagtgccggagctaacgcattaagcactccgcctggggagtacgaccgcaaggttgaaactcaaaggaattgacgggggcccgcacaagcggtggagcatgtggtttaattcgaagcaacgcgaagaaccttaccaggtcttgacatcccgatgccatccctagagatagggagttacttcggtacatcggtgacaggtggtgcatggttgtcgtcagctcgtgtcgtgagatgttgggttaagtcccgcaacgagcgcaacccttattgttagttgccatcattgagttgggcactctagcgagactgccggtaataaaccggaggaaggtggggatgacgtcaaatcatcatgccccttatgacctgggctacacacgtgctacaatggttggtacaacgagtcgcaagccggtgacggcaagctaatctctgaaagccaatctcagttcggattggaggctgcaactcgcctccatgaagtcggaatcgctagtaatcgcggatcagcacgccgcggtgaatacgttcccgggccttgtacacaccgcccgtcacaccacgagagtttgtaacacccaaagtcggtgaggtaaccttcgggagccagccgcctaaggtgggacggatgattggggtg

SEQ ID NO: 3273 - DNA, 1480 bp, Streptococcus downei
gacgaacgctggcggcgtgcctaatacatgcaagtggaacgcattgatatcaccggagcttgctccactgatattaatgagtcgcgaacgggtgagtaacgcgtaggtaacctgcctgatagcgggggataactattggaaacgatagctaataccgcatgagagtgtttaacacatgttagagacttaaaagataccattgtatcactatcagatggacctgcgttgtattagctagttggtagggtagcggcctaccaaggcaccgatacatagccgacctgagagggtgatcggccacactgggactgagacacggcccagactcctacgggaggcagcagtagggaatcttcggcaatggacgaaagtctgaccgagcaacgccgcgtgagtgaagaaggttttcggatcgtaaagctctgttgtagcggaagaacgcgtgtaagagtggaaagtttacacagtgacggtacgctaccagaaagggacggctaactacgtgccagcagccgcggtaatacgtaggtcccgagcgttgtccggatttattgggcgtaaagggagcgcaggcggtttagtaagtctgaagttaaaggcattggctcaaccaatgtatgctttggaaactgttagacttgagtgcagaaggggagagtggaattccatgtgtagcggtgaaatgcgtagatatatggaggaacaccggtggcgaaagcggctctctggtctgtcactgacgctgaggctcgaaagcgtgggtagcgaacaggattagataccctggtagtccacgccgtaaacgatgagtgctaggtgttaggtcctttccgggacttagtgccgcagctaacgcaataagcactccgcctggggagtacgaccgcaaggttgaaactcaaaggaattgacgggggcccgcacaagcggtggagcatgtggtttaattcgaagcaacgcgaagaaccttaccaggtcttgacatcccgatgcccgctctagagatagagttttacttcttgaacatcggagacaggtggtgcatggttgtcgtcagctcgtgtcgtgagatgttgggttaagtcccgcaacgagcgcaacccttattgttagttgccatcattgagttgggcactctagcgagactgccggtaataaaccggaggaaggtggggatgacgtcaaatcatcatgccccttatgacctgggctacacacgtgctacaatggttggtacaacgagtcgcaagccggtgacggcaagctaatctctgaaagccaatctcagttcggattgtaggctgcaactcgcctacatgaagtcggaatcgctagtaatcgcggatcagcacgccgcggtgaatacgttcccgggccttgtacacaccgcccgtcacaccacgagagtttgtaacacccaaagtcggtgaggtaaccttataggagccagccgcctaaggtgggacagatgattggggtg

SEQ ID NO: 3274 - DNA, 1479 bp, Streptococcus henryi
gacgaacgctggcggcgtgcctaatacatgcaagtggaacgcatgattgataccgtagcttgctacaccattaatcatgagtcgcgaacgggtgagtaacgcgtaggtaacctgcctactagcgggggataactattggaaacgatagctaataccgcataagagtttttaacacatgttagaaatttaaaaggagcaaatgcttcactagtagatggacctgcgttgtattagctagttggtaaggtaacggcttaccaaggcgacgatacatagccgacctgagagggtgatcggccacactgggactgagacacggcccagactcctacgggaggcagcagtagggaatcttcggcaatggggggaaccctgaccgagcaacgccgcgtgagtgaagaaggttttcggatcgtaaagctctgttgtaagagaagaacgttgagtagagtggaaagttactcaagtgacggtatcttaccagaaagggacggctaactacgtgccagcagccgcggtaatacgtaggtcccgagcgttgtccggatttattgggcgtaaagcgagcgcaggcggctctgtaagtctgaagttaaaggcattggctcaaccaatgttcgctttggaaactgcagggcttgagtgcagaaggggagagtggaattccatgtgtagcggtgaaatgcgtagatatatggaggaacaccggtggcgaaagcggctctctggtctgtaactgacgctgaggctcgaaagcgtggggagcaaacaggattagataccctggtagtccacgccgtaaacgatgagtgctaggtgttaggccctttccggggcttagtgccgcagctaacgcattaagcactccgcctggggagtacgaccgcaaggttgaaactcaaaggaattgacgggggcccgcacaagcggtggagcatgtggtttaattcgaagcaacgcgaagaaccttaccaggtcttgacatcccagtgaccgtcctagagataggatttcccttcggggcactggtgacaggtggtgcatggttgtcgtcagctcgtgtcgtgagatgttgggttaagtcccgcaacgagcgcaacccctattgttagttgccatcattcagttgggcactctagcgagactgccggtaataaaccggaggaaggtggggatgacgtcaaatcatcatgccccttatgacctgggctacacacgtgctacaatggttggtacaacgagtcgcaagccggtgacggcaagctaatctcttaaagccaatctcagttcggattgtaggctgcaactcgcctacatgaagtcggaatcgctagtaatcgcggatcagcacgccgcggtgaatacgttcccgggccttgtacacaccgcccgtcacaccacgagagtttgtaacacccgaagtcggtgaggtaacctattaggagccagccgcctaaggtgggatagatgattggggtg

SEQ ID NO: 3275 - DNA, 1542 bp, Streptococcus macedonicus
  misc_feature (11)..(12): n is a, c, g, or t
  misc_feature (1494)..(1494): n is a, c, g, or t
  misc_feature (1508)..(1508): n is a, c, g, or t
agagtttgatnntggctcaggacgaacgctggcggcgtgcctaatacatgcaagtagaacgctgaagactttagcttgctagagttggaagagttgcgaacgggtgagtaacgcgtaggtaacctgcctattagtgggggataactattggaaacgatagctaataccgcataatagtgtttaacacatgttagagacttaaaagatgcaattgcatcactagtagatggacctgcgttgtattagctagttggtggggtaacggcctaccaaggcgacgatacatagccgacctgagagggtgatcggccacactgggactgagacacggcccagactcctacgggaggcagcagtagggaatcttcggcaatgggggcaaccctgaccgagcaacgccgcgtgagtgaagaaggttttcggatcgtaaagctctgttgtaagagaagaacgtgtgtgagagtggaaagttcacacagtgacggtaacttaccagaaagggacggctaactacgtgccagcagccgcggtaatacgtaggtcccgagcgttgtccggatttattgggcgtaaagcgagcgcaggcggtttaataagtctgaagttaaaggcagtggcttaaccattgttcgctttggaaactgttaaacttgagtgcagaaggggagagtggaattccatgtgtagcggtgaaatgcgtagatatatggaggaacaccggtggcgaaagcggctctctggtctgtaactgacgctgaggctcgaaagcgtggggagcaaacaggattagataccctggtagtccacgccgtaaacgatgagtgctaggtgttaggccctttccggggcttagtgccgcagctaacgcattaagcactccgcctggggagtacgaccgcaaggttgaaactcaaaggaattgacgggggcccgcacaagcggtggagcatgtggtttaattcgaagcaacgcgaagaaccttaccaggtcttgacatcccgatgctatttctagagatagaaagtttcttcggaacatcggtgacaggtggtgcatggttgtcgtcagctcgtgtcgtgagatgttgggttaagtcccgcaacgagcgcaacccctattgttagttgccatcattcagttgggcactctagcgagactgccggtgataaaccggaggaaggtggggatgacgtcaaatcatcatgccccttatgacctgggctacacacgtgctacaatggttggtacaacgagtcgcaagccggtgacggcaagcaaatctcttaaagccaatctcagttcggattgtaggctgcaactcgcctacatgaagtcggaatcgctagtaatcgcggatcagcacgccgcggtgaatacgttcccgggccttgtacacaccgcccgtcacaccacgagagtttgtaacacccgaagtcggtgaggtaaccttttaggagccagccgcctaaggtgggacagatgattggggtgaantcgtaacaaggtanccgtatcggaaggtgcggctggatcacctccttt

SEQ ID NO: 3276 - DNA, 1470 bp, Streptococcus pasteurianus
ctggcggcgtgcctaatacatgcaagtagaacgctgactactttagcttgctagagtagaaggagttgcgaacgggtgagtaacgcgtaggtaacctgcctactagcgggggataactattggaaacgatagctaataccgcataacagtgtttaacacatgttagatgcttgaaagatgcaattgcatcactagtagatggacctgcgttgtattagctagttggtggggtaacggcccaccaaggcgacgatacatagccgacctgagagggtgatcggccacactgggactgagacacggcccagactcctacgggaggcagcagtagggaatcttcggcaatgggggcaaccctgaccgagcaacgccgcgtgagtgaagaaggttttcggatcgtaaagctctgttgtaagagaagaacgtgtgtgagagtggaaagttcacacagtgacggtaacttaccagaaagggacggctaactacgtgccagcagccgcggtaatacgtaggtcccgagcgttgtccggatttattgggcgtaaagcgagcgcaggcggtttaataagtctgaagttaaaggcagtggcttaaccattgttcgctttggaaactgttaaacttgagtgcagaaggggagagtggaattccatgtgtagcggtgaaatgcgtagatatatggaggaacaccggtggcgaaagcggctctctggtctgtaactgacgctgaggctcgaaagcgtggggagcaaacaggattagataccctggtagtccacgccgtaaacgatgagtgctaggtgttaggccctttccggggcttagtgccgcagctaacgcattaagcactccgcctggggagtacgaccgcaaggttgaaactcaaaggaattgacgggggcccgcacaagcggtggagcatgtggtttaattcgaagcaacgcgaagaaccttaccaggtcttgacatcccgatgctatttctagagatagaaagtttcttcggaacatcggtgacaggtggtgcatggttgtcgtcagctcgtgtcgtgagatgttgggttaagtcccgcaacgagcgcaacccctattgttagttgccatcatttagttgggcactctagcgagactgccggtaataaaccggaggaaggtggggatgacgtcaaatcatcatgccccttatgacctgggctacacacgtgctacaatggttggtacaacgagtcgcaagtcggtgacggcaagcaaatctcttaaagccaatctcagttcggattgtaggctgcaactcgcctacatgaagtcggaatcgctagtaatcgcggatcagcacgccgcggtgaatacgttcccgggccttgtacacaccgcccgtcacaccacgagagtttgtaacacccgaagtcggtgaggtaaccatttaggagccagccgcctaaggtgggatagatgattggggtgaagtcgt

SEQ ID NO: 3277 - DNA, 1479 bp, Streptococcus ratti
gacgaacgctggcggcgtgcctaatacatgcaagtggaacgcaagggaacacaccgtgcttgcacatcgtgttttcttgagtcgcgaacgggtgagtaacgcgtaggtaacctgcctattagcgggggataactattggaaacgatagctaataccgcataagagagtttaacacatgttagacgcttgaaagatgcaagagcatcactagtagatggacctgcgttgtattagctagtaggtagggtaaaggcctacctaggcgacgatacatagccgacctgagagggtgaccggccacactgggactgagacacggcccagactcctacgggaggcagcagtagggaatcttcggcaatggggggaaccctgaccgagcaacgccgcgtgagtgaagaaggttttcggatcgtaaagctctgttgtcagagacgaacgtgtgtgagagtggaaagttcacacagtgacggtaactgaccagaaagggacggctaactacgtgccagcagccgcggtaatacgtaggtcccgagcgttgtccggatttattgggcgtaaagcgagcgcaggcggttttgtaagtctgaagtcaaaggcagtggcttaaccattgtgtgctttggaaactgcaggacttgagtgcagaaggggagagtggaattccatgtgtagcggtgaaatgcgtagatatatggaggaacaccggtggcgaaagcggctctctggtctgtaactgacgctgaggctcgaaagcgtgggtagcgaacaggattagataccctggtagtccacgccgtaaacgctgagtgctaggtgttaggccctttccggggcttagtgccggagctaacgcattaagcactccgcctggggagtacgaccgcaaggttgaaactcaaaggaattgacgggggcccgcacaagcggtggagcatgtggtttaattcgaagcaacgcgaagaaccttaccaggtcttgacatcccgatgcccgctctagagatagagttttacttttgtacatcggtgacaggtggtgcatggttgtcgtcagctcgtgtcgtgagatgttgggttaagtcccgcaacgagcgcaacccttattgttagttgccatcattgagttgggcactctagcgagactgccggtaataaaccggaggaaggtggggatgacgtcaaatcatcatgccccttatgacctgggctacacacgtgctacaatggtcggtacaacgagtcgcgagccggtgacggcaagctaatctctgaaagccgatctcagttcggattggaggctgcaactcgcctccatgaagtcggaatcgctagtaatcgcggatcagcacgccgcggtgaatacgttcccgggccttgtacacaccgcccgtcacaccacgagagtttgtaacacccgaagtcggtgaggtaaccgttaaggagccagccgcctaaggtgggatggatgattggggtg

SEQ ID NO: 3278 - DNA, 1478 bp, Streptococcus troglodytae
gacgaacgctggcggcgtgcctaatacatgcaagtgggacgcactgatttcacgggagcttgctccacgaggtcagtgagtcgcgaacgggtgagtaacgcgtaggtaacctgcctactagcgggggataactattggaaacgatagctaataccgcatgctagcttttagcgcatgctaggagcttaaaagatgcaactgcatcactagtagatggacctgcgttgtattagctagttggtaaggtaagagcttaccaaggcgacgatacatagccgacctgagagggtgaacggccacactgggactgagacacggcccagactcctacgggaggcagcagtagggaatcttcggcaatggacgaaagtctgaccgagcaacgccgcgtgagtgaagaaggttttcggatcgtaaagctctgttgtaagcgaagaacgggtgtaagagtggaaagcttagactgtgacggtagcttaccagaaagggacggctaactacgtgccagcagccgcggtaatacgtaggtcccgagcgttgtccggatttattgggcgtaaagggagcgcaggcggttaggaaagtctggagtaaaaggctatggctcaaccatagtgtgctctggaaactgtctgacttgagtgcagaaggggagagtggaattccatgtgtagcggtgaaatgcgtagatatatggaggaacaccagtggcgaaagcggctctctggtctgtcactgacgctgaggctcgaaagcgtgggtagcgaacaggattagataccctggtagtccacgccgtaaacgctgagtgctaggtgttaggccctttccggggcttagtgccggagctaacgcaataagcactccgcctggggagtacgaccgcaaggttgaaactcaaaggaattgacgggggcccgcacaagcggtggagcatgtggtttaattcgaagcaacgcgaagaaccttaccaggtcttgacatcccgatgttattcttagagataagaagttacttcggtacatcggagacaggtggtgcatggttgtcgtcagctcgtgtcgtgagatgttgggttaagtcccgcaacgagcgcaacccttattgttagttgccatcattaagttgggcactctagcgagactgccggtaataaaccggaggaaggtggggatgacgtcaaatcatcatgccccttatgacctgggctacacacgtgctacaatggtcggtacaacgagttgcgagccggtgacggcaagctaatctctgaaagccgatctcagttcggattggaggctgcaactcgcctccatgaagtcggaatcgctagtaatcgcggatcagcacgccgcggtgaatacgttcccgggccttgtacacaccgcccgtcacaccacgagagtttgtaacacccgaagtcggtgaggtaaccgttaaggggccagccgcctaaggtgggatggatgattggggtg

SEQ ID NO: 3279 - DNA, 1440 bp, Succinatimonas hippei
attgaacgctggcggcaggcttaatacatgcaagtcgaacggtaacatagcgaaagcttgcttttgctgatgacgagtggcggacgggtgagtagtatctgggaaactgccctgaagagggggacaacagctggaaacggctgctaataccgcataaaccctgcgggggaaaggaaggcaacttccgcttcaggatgtgcccagaagggattagctagtaggtgaggtaaaggctcacctaggcgacgatctctagccggtctgagaggatgaccggccacatcgggactgagacacggcccggactcctacgggaggcagcagtagggaatattgcacaatggggggaaccctgatgcagccatgccgcgtgtgtgaagaaggccttcgggttgtaaagcactttcagcggggaggaaattaagttagacgttacccgcagaagaagcaccggctaactccgtgccagcagccgcggtaatacggagggtgcgagcgttaatcggaataactgggcgtaaagggcacgcaggcgggctgataagtaaggtgtgaaataccggggctcaacctcggggctgcattttaaactgtcagtctagagtattgcagagggagacggaattccgggtgtagcggtgaaatgcgtagatatccggaagaacaccggaggcgaaggcggtcttctgggcaaatactgacgctcaggtgcgaaagcgtggggagcaaacaggattagataccctggtagtccacgccgtaaacgatgtcgattaggagattgagcagaagcttggttttcggagcaaacgcgctaaatcgaccgcctggggagtacggccgcaaggttaaaactcaaatgaattgacgggggcccgcacaagcggtggagcatgtggtttaattcgatgcaacgcgaagaaccttacctgaccttgacatctgaggaatgcctgagagatttaggcagtgccttcgggagcctcaagacaggtgctgcatggctgtcgtcagctcgtgtcgtgagatgttgggttaagtcccgcaacgagcgcaacccttgtcctttgttgccagcgcgtgatggcgggaactcaaaggagactgccggtgacaaaccggaggaaggcagggatgacgtcaagtcatcatggcccttacggtcagggctacacacgtgctacaatggggcgtacagagggaagcgaggccgtgaggcggagcggagcccacaaagcgtcccacagttcggattggagtctgcaactcgactccatgaaggcggaatcgctagtaatcgcaaatcagaatgttgcggtgaatacgttcccgggccttgtacacaccgcccgtcacaccatgggagtggattgcaccagaagtggcttgcctaacccgtaagggagggcggttaccacggtgtggtttatgactggggtg

SEQ ID NO: 3280 - DNA, 1461 bp, Succinimonas amylolytica
attgaacgctggcggcaggcttaatacatgcaagtcgaacggtagcagcaggaaagcttgcttttctggctgacgagtggcggacgggtgagtaatacctgggaaactgcctataagagggggataacacctggaaacgggtgctaataccgcataaaccctgaggggaaaaggatgggaaaccatgcgcttatagatgtgcccaggagggattagctagttggggaggtaaaggctcaccaaggcgacgatctctagctggtctgagaggatgatcagccacattgggactgagacacggcccaaactcctacgggaggcagcagtagggaatattgcacaatgggggaaaccctgatgcagccatgccgcgtgtgtgaagaaggccttcgggttgtaaagcactttcagcggggaggaagctgaagttcgaacagggcagaaagcagacgttacccgcagaagaagcgccggctaactccgtgccagcagccgcggtaatacggagggcgcaagcgttaatcggaataactgggcgtaaagcgcacgcaggcggttatgcaagtcagatgtgaaatcccagcgcttaacgttgggcggtcatttgaaactgcaagactagagtactataaggggagctggaattccaggtgtagcggtgaaatgcgtagatatctggaagaacaccggtggcgaaggcgagcttctggatagtaactgacgctcaggtgcgaaagcgtggggagcaaacaggattagataccctggtagtccacgctgtaaacgatgtcaattaggagtctagtccgaagaggctgggttccgcagctaacgctttaaattgaccgcctggggagtacggccgcaaggttaaaactcaaatgaattgacgggggcccgcacaagcggtggagcatgtggtttaattcgatgcaacgcgaagaaccttacctgaacttgacatatacgatgatctgtctgagaggatggagtacccgcaagggaatcgtaaacaggtgctgcatggctgtcgtcagctcgtgtcgtgagatgttgggttaagtcccgcaacgagcgcaacccttgttctttgttgccagcgcgtaaaggcgggaactcaaagaagactgccggtgataaaccggaggaaggcagggatgacgtcaagtcatcatggcccttacgttcagggctacacacgtgctacaatggtttgtacagagggaagcgaagtcgcgagacggggcagatctcagaaagcaaatcgtagtccggattggagtctgcaattcgactccatgaagtcggaatcgctagtaatcgcgaatcagaatgtcgcggtgaatacgttcccgggccttgtacacaccgcccgtcacaccatgggagtgaattgcaccagaagtagttagcgtaaccgcaaggggcgcgattaccacggtgtggtttatgactggggtg

SEQ ID NO: 3281 - DNA, 1387 bp, Sulfitobacter brevis
aacgaacgctggcggcaggcctaacacatgcaagtcgagcgcacccttcggggcgagcggcggacgggttagtaacgcgtgggaacatacccctttctacggaatagcctcgggaaactgagagtaataccgtataagcccttcgggggaaagatttatcgggaagggattggcccgcgttagattagatagttggtggggtaatggcctaccaagtctacgatctatagctggttttagaggatgatcagcaacactgggactgagacacggcccagactcctacgggaggcagcagtggggaatcttagacaatgggcgcaagcctgatctagccatgccgcgtgtgtgatgaaggtcttaggatcgtaaagcactttcgccagggatgataatgacagtacctggtaaagaaaccccggctaactccgtgccagcagccgcggtaatacggagggggttagcgttgttcggaattactgggcgtaaagcgtacgtaggcggatcagaaagtatagggtgaaatcccagggctcaaccctggaactgccttgtaaactcctggtcttgagttcgagagaggtgagtggaattccaagtgtagaggtgaaattcgtagatatttggaggaacaccagtggcgaaggcggctcactggctcgatactgacgctgaggtacgaaagtgtggggagcaaacaggattagataccctggtagtccacaccgtaaacgatgaatgccagtcgtcgggcagtatactgttcggtgacacacctaacggattaagcattccgcctggggagtacggtcgcaagattaaaactcaaaggaattgacgggggcccgcacaagcggtggagcatgtggtttaattcgaagcaacgcgcagaaccttaccaacccttgacatcctgtgcaaacccgagagatcgggtgttcacttcggtgacgcagtgacaggtgctgcatggctgtcgtcagctcgtgtcgtgagatgttcggttaagtccggcaacgagcgcaacccacatccttagttgccagcaggttaagctgggcactctagggaaactgcccgtgataagcgggaggaaggtgtggatgacgtcaagtcctcatggcccttacgggttgggctacacacgtgctacaatggcagtgacaatgggttaatccccaaaagctgtctcagttcggattggggtctgcaactcgaccccatgaagtcggaatcgctagtaatcgtgtaacagcatgacacggtgaatacgttcccgggccttgtacacaccgcccgtcacaccatgggagttggttctacccgacgacgctgcgctaacccttcggggaggcaggcggccacggtaggatcagcgactggggtg

SEQ ID NO: 3282 - DNA, 1385 bp, Sulfitobacter donghicola
aacgaacgctggcggcaggcctaacacatgcaagtcgagcgcacccttcggggcgagcggcggacgggttagtaacgcgtgggaatgtaccctttactacggaatagcctctggaaacggagagtaataccgtatgtgcccttcgggggaaagatttatcggtaaaggatcagcccgcgttagattagatagttggtggggtaatggcctaccaagtctacgatctatagctggttttagaggatgatcagcaacactgggactgagacacggcccagactcctacgggaggcagcagtggggaatcttagacaatgggcgcaagcctgatctagccatgccgcgtgtgtgatgaaggccttagggtcgtaaagcactttcgccagagatgataatgacagtatctggtaaagaaaccccggctaactccgtgccagcagccgcggtaatacggagggggttagcgttgttcggaattactgggcgtaaagcgtacgtaggcggatcagaaagtagggggtgaaatcccagggctcaaccctggaactgcctcctaaactcctggtcttgagttcgagagaggtgagtggaattccaagtgtagaggtgaaattcgtagatatttggaggaacaccagtggcgaaggcggctcactggctcgatactgacgctgaggtacgaaagtgtggggagcaaacaggattagataccctggtagtccacaccgtaaacgatgaatgccagtcgtcgggcagtatactgttcggtgacacacctaacggattaagcattccgcctggggagtacggtcgcaagattaaaactcaaaggaattgacgggggcccgcacaagcggtggagcatgtggtttaattcgaagcaacgcgcagaaccttaccaacccttgacatcctgtgctaacccgagagatcgggcgttcacttcggtgacgcagtgacaggtgctgcatggctgtcgtcagctcgtgtcgtgagatgttcggttaagtccggcaacgagcgcaacccacatctttagttgccatcatttagttgggcactctaaagaaactgcccgtgataagcgggaggaaggtgtggatgacgtcaagtcctcatggcccttacgggttgggctacacacgtgctacaatggcatttacaatgggttaatccccaaaagatgtctcagttcggattggggtctgcaactcgaccccatgaagtcggaatcgctagtaatcgcgtaacagcatgacgcggtgaatacgttcccgggccttgtacacaccgcccgtcacaccatgggagttggttctacccgacggccgtgcgccaacctttcgaggaggcagcggaccacggtaggatcagcgactggggtg

SEQ ID NO: 3283 - DNA, 1385 bp, Sulfitobacter guttiformis
aacgaacgctggcggcaggcctaacacatgcaagtcgagcgcacccttcggggcgagcggcggacgggttagtaacgcgtgggaacataccctttactacggaatagcctcgggaaactgagagtaataccgtatgtgcccttcgggggaaagatttatcggtaaaggattggcccgcgtaagattagatagttggtggggtaatggcctaccaagtctacgatctttagctggttttagaggatgatcagcaacactgggactgagacacggcccagactcctacgggaggcagcagtggggaatcttagacaatgggcgcaagcctgatctagccatgccgcgtgtgtgatgaaggccttagggtcgtaaagcactttcgctagggatgataatgacagtacctagtaaagaaaccccggctaactccgtgccagcagccgcggtaatacggagggggttagcgttgttcggaattactgggcgtaaagcgtacgtaggcggatcagaaagtaaggggtgaaatcccagggctcaaccctggaactgcctcttaaactcctggtcttgagttcgagagaggtgagtggaattccgagtgtagaggtgaaattcgtagatattcggaggaacaccagtggcgaaggcggctcactggctcgatactgacgctgaggtacgaaagtgtggggagcaaacaggattagataccctggtagtccacaccgtaaacgatgaatgccagtcgtcgggcagtatactgttcggtgacacacctaacggattaagcattccgcctggggagtacggtcgcaagattaaaactcaaaggaattgacgggggcccgcacaagcggtggagcatgtggtttaattcgaagcaacgcgcagaaccttaccaacccttgacatcctgtgctaacccgagagatcgggcgttcacttcggtgacgcagtgacaggtgctgcatggctgtcgtcagctcgtgtcgtgagatgttcggttaagtccggcaacgagcgcaacccacatctttagttgccatcatttagttgggcactctaaagaaactgcccgtgataagcgggaggaaggtgtggatgacgtcaagtcctcatggcccttacgggttgggctacacacgtgctacaatggcatttacaatgggttaatccccaaaagatgtctcagttcggattggggtctgcaactcgaccccatgaagtcggaatcgctagtaatcgcgtaacagcatgacgcggtgaatacgttcccgggccttgtacacaccgcccgtcacaccatgggagttggttctacccgacggccgtgcgccaacccgtaagggaggcagcggaccacggtaggatcagcgactggggtg

SEQ ID NO: 3284 - DNA, 1386 bp, Sulfitobacter indolifex
aacgaacgctggcggcaggcctaacacatgcaagtcgagcgagaccttcgggtctagcggcggacgggttagtaacgcgtgggaacgtacccttctctgcggaatagccactggaaacggtgagtaataccgcatacgcccttcgggggaaagatttatcggagaaggatcggcccgcgttagattagatagttggtggggtaatggcctaccaagtctacgatctatagctggttttagaggatgatcagcaacactgggactgagacacggcccagactcctacgggaggcagcagtggggaatcttagacaatgggcgcaagcctgatctagccatgccgcgtgtgtgatgaaggtcttaggatcgtaaagcactttcgccagggatgataatgacagtacctggtaaagaaaccccggctaactccgtgccagcagccgcggtaatacggagggggttagcgttgttcggaattactgggcgtaaagcgtacgtaggcggatcagaaagtaaggggtgaaatcccagggctcaaccctggaactgcctcttaaactcctggtcttgagttcgagagaggtgagtggaattccaagtgtagaggtgaaattcgtagatatttggaggaacaccagtggcgaaggcggctcactggctcgatactgacgctgaggtacgaaagtgtggggagcaaacaggattagataccctggtagtccacaccgtaaacgatgaatgccagtcgtcgggcagtatactgttcggtgacacacctaacggattaagcattccgcctggggagtacggtcgcaagattaaaactcaaaggaattgacgggggcccgcacaagcggtggagcatgtggtttaattcgaagcaacgcgcagaaccttaccaacccttgacatcctgtgctaacccgagagatcgggcgttcacttcggtgacgcagtgacaggtgctgcatggctgtcgtcagctcgtgtcgtgagatgttcggttaagtccggcaacgagcgcaacccacatccttagttgccagcagttcggctgggcactctaaggaaactgcccgtgataagcgggaggaaggtgtggatgacgtcaagtcctcatggcccttacgggttgggctacacacgtgctacaatggcagtgacaatgggttaatccccaaaagctgtctcagttcggattggggtctgcaactcgaccccatgaagtcggaatcgctagtaatcgtggaacagcatgccacggtgaatacgttcccgggccttgtacacaccgcccgtcacaccatgggagttggttctacccgacggccgtgcgccaacctttcgaggaggcagcggaccacggtaggatcagcgactggggtg

SEQ ID NO: 3285 - DNA, 1388 bp, Sulfitobacter litoralis
aacgaacgctggcggcaggcctaacacatgcaagtcgagcgcagtccttcgggaccgagcggcggacgggttagtaacgcgtgggaacatacccttttctacggaatagcctcgggaaactgagagtaataccgtataagcccttcgggggaaagatttatcgggaaaggattggcccgcgttagattagatagttggtggggtaatggcctaccaagtctacgatctatagctggttttagaggatgatcagcaacactgggactgagacacggcccagactcctacgggaggcagcagtggggaatcttagacaatgggcgcaagcctgatctagccatgccgcgtgtgtgatgaaggtcttaggatcgtaaagcactttcgccagggatgataatgacagtacctggtaaagaaaccccggctaactccgtgccagcagccgcggtaatacggagggggttagcgttgttcggaattactgggcgtaaagcgtacgtaggcggatcagaaagttaggggtgaaatcccgaggctcaacctcggaactgcctctaaaactcctggtcttgagttcgagagaggtgagtggaattccaagtgtagaggtgaaattcgtagatatttggaggaacaccagtggcgaaggcggctcactggctcgatactgacgctgaggtacgaaagtgtggggagcaaacaggattagataccctggtagtccacaccgtaaacgatgaatgccagtcgtcgggcagtatactgttcggtgacacacctaacggattaagcattccgcctggggagtacggtcgcaagattaaaactcaaaggaattgacgggggcccgcacaagcggtggagcatgtggtttaattcgaagcaacgcgcagaaccttaccaacccttgacatcctgtgctaactcgagagatcgagcgttcacttcggtgacgcagtgacaggtgctgcatggctgtcgtcagctcgtgtcgtgagatgttcggttaagtccggcaacgagcgcaacccacatccttagttgccagcagttcggctgggcactctaaggaaactgcccgtgataagcgggaggaaggtgtggatgacgtcaagtcctcatggcccttacgggttgggctacacacgtgctacaatggcagtgacaatgggttaatcccaaaaagctgtctcagttcggattggggtctgcaactcgaccccatgaagtcggaatcgctagtaatcgcgtaacagcatgacgcggtgaatacgttcccgggccttgtacacaccgcccgtcacaccatgggagttggttctacccgacgacgctgcgctaacccttcggggaggcaggcggccacggtaggatcagcgactggggtg

SEQ ID NO: 3286 - DNA, 1382 bp, Sulfitobacter pontiacus
aacgaacgctggcggcaggcctaacacatgcaagtcgagcgcaccttcgggtgagcggcggacgggttagtaacgcgtgggaacatacccttttctacggaatagcctcgggaaactgagagtaataccgtataagcccttcgggggaaagatttatcgggaaaggattggcccgcgttagattagatagttggtggggtaatggcctaccaagtctacgatctatagctggttttagaggatgatcagcaacactgggactgagacacggcccagactcctacgggaggcagcagtggggaatcttagacaatgggcgcaagcctgatctagccatgccgcgtgtgtgatgaaggtcttaggatcgtaaagcactttcgccagggatgataatgacagtacctggtaaagaaaccccggctaactccgtgccagcagccgcggtaatacggagggggttagcgttgttcggaattactgggcgtaaagcgtacgtaggcggattggaaagttgggggtgaaatcccagggctcaaccctggaactgcctccaaaactatcagtctagagttcgagagaggtgagtggaattccaagtgtagaggtgaaattcgtagatatttggaggaacaccagtggcgaaggcggctcactggctcgatactgacgctgaggtacgaaagtgtggggagcaaacaggattagataccctggtagtccacaccgtaaacgatgaatgccagtcgtcgggcagtatactgttcggtgacacacctaacggattaagcattccgcctggggagtacggtcgcaagattaaaactcaaaggaattgacgggggcccgcacaagcggtggagcatgtggtttaattcgaagcaacgcgcagaaccttaccaacccttgacatcctgtgctaacccgagagatcgggcgttcacttcggtgacgcagtgacaggtgctgcatggctgtcgtcagctcgtgtcgtgagatgttcggttaagtccggcaacgagcgcaacccacatccttagttgccagcagttcggctgggcactctaaggaaactgcccgtgataagcgggaggaaggtgtggatgacgtcaagtcctcatggcccttacgggttgggctacacacgtgctacaatggcagtgacaatgggttaatcccaaaaagctgtctcagttcggattggggtctgcaactcgaccccatgaagtcggaatcgctagtaatcgcgtaacagcatgacgcggtgaatacgttcccgggccttgtacacaccgcccgtcacaccatgggagttggttctacccgacgacgctgcgctaaccttcggggggcaggcggccacggtaggatcagcgactggggtg

SEQ ID NO: 3287 - DNA, 1384 bp, Sulfitobacter pseudonitzschiae
aacgaacgctggcggcaggcctaacacatgcaagtcgagcgcacccttcggggcgagcggcggacgggttagtaacgcgtgggaatgtacccttctctatggaatagcctcgggaaactgagagtaataccatatacgcccttcgggggaaagatttatcggagaaggatcagcccgcgtaagattagatagttggtggggtaatggcctaccaagtctacgatctttagctggttttagaggatgatcagcaacactgggactgagacacggcccagactcctacgggaggcagcagtggggaatcttagacaatgggcgcaagcctgatctagccatgccgcgtgtgtgatgaaggccttagggtcgtaaagcactttcgccagggatgataatgacagtacctggtaaagaaaccccggctaactccgtgccagcagccgcggtaatacggagggggttagcgttgttcggaattactgggcgtaaagcgcacgtaggcggatcagaaagttgggggtgaaatcccggggctcaaccccggaactgcctccaaaactcctggtcttgagttcgagagaggtgagtggaattccgagtgtagaggtgaaattcgtagatattcggaggaacaccagtggcgaaggcggctcactggctcgatactgacgctgaggtgcgaaagtgtggggagcaaacaggattagataccctggtagtccacaccgtaaacgatgaatgccagtcgtcgggcagtatactgttcggtgacacacctaacggattaagcattccgcctggggagtacggtcgcaagattaaaactcaaaggaattgacgggggcccgcacaagcggtggagcatgtggtttaattcgaagcaacgcgcagaaccttaccaacccttgacatcctaggacaactccagagatggagccttccttcgggacctagtgacaggtgctgcatggctgtcgtcagctcgtgtcgtgagatgttcggttaagtccggcaacgagcgcaacccacatctttagttgccagcagttcggctgggcactctaaagaaactgcccgtgataagcgggaggaaggtgtggatgacgtcaagtcctcatggcccttacgggttgggctacacacgtgctacaatggcatctacagtgggttaatccccaaaagatgtctcagttcggattggggtctgcaactcgaccccatgaagtcggaatcgctagtaatcgcgtaacagcatgacgcggtgaatacgttcccgggccttgtacacaccgcccgtcacaccatgggagttggttctacccgacggccgtgcgccaacctttcgaggaggcagcggaccacggtaggatcagcgactggggtg

SEQ ID NO: 3288 - DNA, 1453 bp, Sulfuricaulis limicola
attgaacgctggcggcatgcctaacacatgcaagtcgcacgcgaaagggggcaaccctgagtagagtggcggacgggtgagtaacgcgtaggaatctacctggtagtgggggacaacccggtgaaaaccgggctaataccgcatacgatccacggatgaaagcaggggaccgcaaggccttgcgctatcagatgagcctgcgtcggattagctagttggtgaggtaaaggctcaccaaggcaacgatccgtagctggtttgagagaacgaccagccacactgggactgagacacggcccagactcctacgggaggcagcagtggggaatattggacaatgggggcaaccctgatccagcaatgccgcgtgtgtgaagaaggccttcgggttgtaaagcactttcggtggggacaaacaaggcggagctaacatctccgtccctgatggtacccaaagaagaagcaccggctaactctgtgccagcagccgcggtaatacagagggtgcaagcgttaatcggaattactgggcgtaaagcgtgcgtaggtggtttgttaagtcaggtgtgaaatcctcgggctcaacccgggaactgcgcttgatactgacagactcgagtgtggtagaggatagtggaattcccggtgtagcggtgaaatgcgtagatatcgggaggaacatcagtggcgaaggcggctatctggaccaacactgacactgaggtacgaaagcgtgggtagcaaacaggattagataccctggtagtccacgccctaaacgatgggtactagacgtcgggaagcttgtcttcttggtgtcgcagctaacgcaataagtaccccgcctggggagtacggtcgcaagattaaaactcaaaggaattgacgggggcccgcacaagcggtggagcatgtggttcaattcgatgcaacgcgaaaaaccttacctgcccttgacatctggggaatcctgcagagatgcgggagtgccgcaaggaaccccaagacaggtgctgcatggctgtcgtcagctcgtgtcgtgagatgttgggttaagtcccgtaacgagcgcaaccctcgtctctagttgccatcattcagttgggcactctagagagactgccggtgacaaaccggaggaaggtggggatgacgtcaagtcctcatggcctttatgggcagggctacacacgtgctacaatggacggtacagagggtcgccaacccgcgagggggagctaatctcagaaagccgttcgtagtccggattggagtctgcaactcgactccatgaagtcggaatcgctagtaatcgcggatcagcatgccgcggtgaatacgttcccgggccttgtacacaccgcccgtcacaccatgggagttggctgtaccagaagcaggtagcctaaccgcaaggagggcgcctaccacggtatggtcaatgactggggtg

SEQ ID NO: 3289 - DNA, 1464 bp, Sulfuricella denitrificans
attgaacgctggcggaatgctttacacatgcaagtcgaacggcagcacgggagcttgctcctggtggcgagtggcgaacgggtgagtaatacctaggaacatgtccagtaatgggggataacgcagcgaaagctgtgctaataccgcatacgccctacgggggaaagcgggggattcgcaagaacctcgcgttattggagtggcctaggcctgattagctagttggtgaggtaaaggctcaccaaggcgacgatcagtagctggtctgagaggatgatcagccacactggaactgagacacggtccagactcctacgggaggcagcagtggggaattttggacaatgggggaaaccctgatccagccattccgcgtgagtgaagaaggccttcgggttgtaaagctctttcaggagggaagaaacggttttggataatactcaagactaatgacggtaccttcagaagaagcaccggctaactacgtgccagcagccgcggtaatacgtagggtgcgagcgttaatcggaattactgggcgtaaagcgtgcgcaggcggttttgtaagtcagatgtgaaagccccgggctcaacctgggaactgcgtttgaaactacaaggctagagtgtagcagaggggggtagaattccacgtgtagcagtgaaatgcgtagagatgtggaggaataccgatggcgaaggcagccccctgggttaacactgacgctcatgtacgaaagcgtggggagcaaacaggattagataccctggtagtccacgccctaaacgatgtcaactagttgtcgggagaggagactttcttggtaacgcagctaacgcgtgaagttgaccgcctggggagtacggccgcaaggttaaaactcaaaggaattgacgggggcccgcacaagcggtggattatgtggattaattcgatgcaacgcgaaaaaccttacctacccttgacatgccaggaacttgccagagatggcttggtgcccgaaagggaacctggacacaggtgctgcatggctgtcgtcagctcgtgtcgtgagatgttgggttaagtcccgcaacgagcgcaacccttgtcattaattgccatcatttagttgggcactttaatgagactgccggtgacaaaccggaggaaggtggggatgacgtcaagtcctcatggcccttatgggtagggcttcacacgtaatacaatggtcggtacagagggtcgccaacccgcgagggggagccaatcccagaaagccgatcgtagtccggattggagtctgcaactcgactccatgaagtcggaatcgctagtaatcgcggatcagcatgtcgcggtgaatacgttcccgggccttgtacacaccgcccgtcacaccatgggagtgggttccaccagaagtagttagcctaaccgcaaggagggcgattaccacggtgggattcatgactggggtg

SEQ ID NO: 3290 - DNA, 1434 bp, Sulfuricurvum kujiense
agtgaacgctggcggcgtgcctaacacatgcaagtcgaacgatgattggagagcttgctcttcatgattagtggcgcacgggtgagtataccatagataatgtaccccttagtttgggatagccactggaaacggtgattaataccagatactccttcttgtcctaaggcaagtcgggaaagttttttcgctaagggatcagtctatgtcctatcagctagttggtgaggtaatggctcaccaaggctatgacgggtatctggtttgagaggatgatcagacacactggaactgagacacggtccagactcctacgggaggcagcagtgaggaatattgcacaatggaggaaactctgatgcagcaacgccgcgtggaggatgacgcatttcggtgtgtaaactccttttaagagggaagataatgacggtacctcttgaataagcaccggctaactccgtgccagcagccgcggtaatacggagggtgcaagcgttactcggaatcactgggcgtaaagggtgcgtaggctgacttttaagtcaggcgtgaaatccaatggcttaaccattgaactgcgcttgaaactgggagtctagagttcagaaggggcagatggaattagtggtgtaggggtaaaatccgtagatatcactaggaatatcaaaagcgaaggcgatctgctgggatgatactgacgctgaggcacgaaagcgtggggagcaaacaggattagataccctggtagtccacgccctaaacgatgaatgctagtcgtcggggagctcgtctcttcggtgatgcacttaacagattaagcattccgcctggggagtacggtcgcaagattaaaactcaaaggaatagacggggacccgcacaagtggtggagcatgtggtttaattcgaagatacacgaagaaccttacctggccttgacatggtaggaacccttaagagattagggggtgctagcttgctagaacctacacacaggtgctgcacggctgtcgtcagctcgtgtcgtgagatgttgggttaagtcccgcaacgagcgcaaccctcgtccttagttgctaacagttcggctgagcactctaaggagactgccttcgcaaggaggaggaaggtgaggacgacgtcaagtcatcatggcccttacggccagggctacacacgtgctacaatggggcgtacaaagagctgcaataccgcgaggtggagccaatctcttaaagcgtctctcagttcggattgttctctgcaactcgagaacatgaagctggaatcactagtaatcgtagatcagctatgctacggtgaatacgttcccgggtcttgtactcaccgcccgtcacaccatgggagttgatttcacccgaaatcgggatgccaaactggctaccgcttacggtggaattagcgactggggtg

SEQ ID NO: 3291 - DNA, 1462 bp, Sulfuriferula multivorans
attgaacgctggcggaatgctttacacatgcaagtcgaacggcagcacgggagcttgctcctggtggcgagtggcgaacgggtgagtaatacgtcggaacgtatccatgtaatgggggataacgcagcgaaagctgtgctaataccgcatacgccctacgggggaaagcaggggatcttcggaccttgcgttattggagcggccgacgtctgattagctagttggtggggtaaaggcctaccaaggcgacgatcagtagctggtctgagaggatgatcagccacactggaactgagacacggtccagactcctacgggaggcagcagtggggaattttggacaatgggcgcaagcctgatccagccattccgcgtgagtgaagaaggccttcgggttgtaaagctctttcagcagggaagaaacgatcttggctaatacctgagattaatgacggtacctgaagaagaagcaccggctaactacgtgccagcagccgcggtaatacgtagggtgcgagcgttaatcggaattactgggcgtaaagcgtgcgcaggcggtttttcaagtctgatgtgaaatccccgggcttaacctgggaactgcgttggaaactgaaagactagagtgcggcagaggggggtagaattccacgtgtagcagtgaaatgcgtagatatgtggaggaataccgatggcgaaggcagccccctgggtcgacactgacgctcatgcacgaaagcgtgggtagcaaacaggattagataccctggtagtccacgccctaaacgatgtcaactagttgttggggagggagacctccttagtaacgcagctaacgcgtgaagttgaccgcctggggagtacggtcgcaagattaaaactcaaaggaattgacgggggcccgcacaagcggtggattatgtggattaattcgatgcaacgcgaaaaaccttacctacccttgacatgtacggaacttgccagagatggcttggtgcttgaaagagaaccgtaacacaggtgctgcatggctgtcgtcagctcgtgtcgtgagatgttgggttaagtcccgcaacgagcgcaacccttgccattagttgctacattcagttgggcactctaatgggactgccggtgacaaaccggaggaaggtggggatgacgtcaagtcctcatggcccttatgggtagggcttcacacgtaatacaatggtcggtacagagggttgccaacccgcgagggggagccaatcccagaaagccgatcgtagtccggatcggagtctgcaactcgactccgtgaagtcggaatcgctagtaatcgcggatcagcatgtcgcggtgaatacgttcccgggccttgtacacaccgcccgtcacaccatgggagtgggtattaccagaagcaggtagcttaaccttcgggagggcgcttgccacggtaggattcatgactggggtg

SEQ ID NO: 3292 - DNA, 1450 bp, Sulfuriferula plumbiphila
attgaacgctggcggaatgctttacacatgcaagtcgaacggcagcacgggtgcttgcacctggtggcgagtggcgaacgggtgagtaacacgtcggaacgtatccattaatgggggataacgcagcgaaagctgtgctaataccgcatacgccctgagggggaaagcaggggatcttcggaccttgcgttattggagcggccgacgtctgattagctggttggtggggtaaaggcctaccaaggcgacgatcagtagctggtctgagaggatgatcagccacactggaactgagacacggtccagactcctacgggaggcagcagtggggaattttggacaatgggcgcaagcctgatccagccattccgcgtgagtgaagaaggccttcgggttgtaaagctctttcggcagggaagaaacagttgaggctaatatccttgaccaatgacggtacctgaagaagaagcaccggctaacaacgtgccagcagccgcggtaatacgtagggtgcgagcgttaatcggaattactgggcgtaaagcgtgcgcaggcggtttttcaagtctgatgtgaaagccccgggcttaacctgggaactgcgttggaaactgaaagactagagtgcggcagaggggggtagaattccacgtgtagcagtgaaatgcgtagatatgtggaggaataccgatggcgaaggcagccccctgggtcgacactgacgctcatgcacgaaagcgtgggtagcaaacaggattagataccctggtagtccacgccctaaacgatgtcaactagttgttggggagggagacctccttagtaacgcagctaacgcgtgaagttgaccgcctggggagtacggtcgcaagattaaaactcaaaggaattgacgggggcccgcacaagcggtggattatgtggattaattcgatgcaacgcgaaaaaccttacctacccttgacatgccaggaactggccagagatggccgggtgcccgaaagggaacctgggcacaggtgctgcatggctgtcgtcagctcgtgtcgtgagatgttgggttaagtcccgcaacgagcgcaacccttgccattagttgccacattcagttgggcactctaatgggactgccggtgacaaaccggaggaaggtggggatgacgtcaagtcctcatggcccttatgggtagggcttcacacgtaatacaatggtcggtacagagggttgccaacccgcgagggggagccaatcccagaaagccgatcgtagtccggattggagtctgcaactcgactccatgaagtcggaatcgctagtaatcgcggataagcatgtcgcggtgaatacgttcccgggccttgtacacaccgcccgtcacaccatgggagtgggtattaccagaagcaggtagcttaaccgcaaggagggcgcttgccacggtaggattca

SEQ ID NO: 3293 - DNA, 1454 bp, Sulfurifustis variabilis
attgaacgctggcggcatgcctaacacatgcaagtcgcacgcgaaagggggcaaccccgagtagagtggcggacgggtgagtaacgcatcggaatctacccagtagtgggggacaacccggcgaaagccgggctaataccgcatacgacccatgggtgaaagcgggggaccgcaaggcctcgcgctattggatgagccgatgtccgattagctagttggtagggtaatggcctaccaaggcgacgatcggtaactggtctgagaggacgaccagtcacactgggactgagacacggcccagactcctacgggaggcagcagtggggaatattggacaatgggggcaaccctgatccagcaatgccgcgtgtgtgaagaaggccttcgggttgtaaagcactttcggtggggaagaaaaaggccgggctaatatcccggttcttgacggtacccaaagaagaagcaccggctaactctgtgccagcagccgcggtaatacagagggtgcaagcgttaatcggaattactgggcgtaaagcgtgcgtaggtggttcgttaagtcagatgtgaaagcccggggctcaacctcggaactgcatttgatactgacgagctagagtgtggtagagggtagtggaattcccggtgtagcggtgaaatgcgtagatatcgggaggaacaccagtggcgaaagcggctacctggaccaacactgacactgaggtacgaaagcgtggggagcaaacaggattagataccctggtagtccacgccgtaaacgatgagaactagccgtcgggaagtttaatcttcttggtggcgcagctaacgcaataagttctccgcctggggagtacggccgcaaggttaaaactcaaaggaattgacgggggcccgcacaagcggtggagcatgtggttcaattcgatgcaacgcgaaaaaccttacctgcccttgacatgccaggaacctcccagagatgggagggtgccttcgggaacctggacacaggtgctgcatggctgtcgtcagctcgtgtcgtgagatgttgggttaagtcccgtaacgagcgcaacccttgtccctagttgccaccattcagttgggcactctagggagactgccggtgacaaaccggaggaaggtggggatgacgtcaagtcctcatggcccttatgggcagggctacacacgtgctacaatggccggtacaaagggtagccaacccgcgagggggagctaatctcagaaagccggtcgtagtccggattggagtctgcaactcgactccatgaagtcggaatcgctagtaatcgcggatcagcacgccgcggtgaatacgttcccgggccttgtacacaccgcccgtcacaccatgggagttggctgtaccagaagcaggtagcctaaccgcaaggagggcgcctaccacggtatggtcaatgactggggtg

SEQ ID NO: 3294 - DNA, 1445 bp, Sulfurihydrogenibium azorense
cgcgaacgttggcggcgtgcctaacacatgcaagtcgtggggcagcaggctattaccttcgggtaatagtgctgcgaccggcaaacgggtgagtaacgcgtagctaacctacccataggttggggataaccatccgaaagggtggctaatacccaataatgaggagactccaaagcccttttgggcgcctatggatggggctgcgtcccatcagctagttggtgaggtaatggctcaccaaggctacgacgggtaaccggtctgagaggatgatcggtcacagcgggactgagacacggcccgcacccctacggggggcagcagtggggaatattgggcaatggccgaaaggctgacccagcaacgccgcgtggtggatgaagcccttcggggtgtaaacaccttttctgggggaagataatgacggtaccccaggaataagggacggctaactacgtgccagcagccgcggtaatacgtaggtcccgaacgttgcgcgaaattactgggcgtaaagggtccgtaggcggtctggtaagtggaaggtgaaatcctacggctcaaccgtagaattgccttccaaactgctggacttgaggcagggagaggtcggcggaattcccggtgtagcggtgaaatgcgtagatatcgggaggaacaccagtggcgaaggcggccgactggaactgtcctgacgctgagggacgaaagctaggggagcaaaccggattagatacccgggtagtcctagccgtaaacgatggatgctagatgtggcctacgaaagtaggctgtgcccaagctaacgcgttaagcatcccgcctggggagtacggccgcaaggttgaaactcaaaggaattgacggggacccgcacaaccggtggagcgtctggtttaattcgatgctaaccgaaaaaccttaccagggtttgacatgcggtgtgtcgggtatgaaagtaccctaggctatgattattcatagccgcgccgcacaggtggtgcatggtcgtcgtcagctcgtgtcgtgagatgttgggttaagtcccgcaacgagcgcaacccttgccctgtgttaccagcgggtaaagccgggtactcacaggggactgccggcgataagtcggaggaaggaggggatgacgtcagatcagtatgccctttatgccctgggctacacaggcgctacagtggcagggacaatgggacgcaacgcagcaatgcggagcaaatcccctaaaccctgtcgtggtgcggattgggggttgcaactcacccccatgaaggcggaatcggtagtaatggcgaatcagcaatgtcgccgtgaatacgttcccgggtcttgtacacaccgcccgtcacgccatgggagtcgggttcatcggaagtccccgagctaacccgcaagggaggcaggggccgatgatgggcctgatgactggggcg

SEQ ID NO: 3295 - DNA, 1447 bp, Sulfurihydrogenibium yellowstonense
cgcgaacgttggcggcgtgcctaacacatgcaagtcgtggggcagcaggctactaccttcgggtagtagtgctggcgaccggcaaacgggtgagtaacacgtagcttacctacccataggttggggataacatcccgaaaggggtgctaatacccaataatgaggaggctccaaagcccttatgggtgcctatggatggggctgcgtcccatcagctagttggtgaggtaatggctcaccaaggctacgacgggtaaccggtctgagaggatgaccggtcacagtgggactgagacacggcccgcacccctacggggggcagcagtggggaatattgggcaatggccgaaaggctgacccagcaacgccgcgtggtggatgaagcccttcggggtgtaaacaccttttctgggggaagataatgacggtaccccaggaataagggacggctaactacgtgccagcagccgcggtaatacgtaggtcccgaacgttgcgcgaatttactgggcgtaaagggtccgtaggcggtttagcaagtggttggtgaaatttcacggctcaaccgtgaaactgccttccaaactgctaaacttgaggcagggagaggtcggcggaattcccggtgtagcggtgaaatgcgtagatatcgggaggaacaccagtggcgaaggcggccgactggaactgtcctgacgctgagggacgaaagctaggggagcaaaccggattagatacccgggtagtcctagccgtaaacgatggatgctagatgtgggctacgaaagtagtccgtgccgtaagctaacgcgttaagcatcccgcctggggagtacggccgcaaggttgaaactcaaaggaattgacggggacccgcacaaccggtggagcgtctggtttaattcgatgctaaccgaaaaacctcaccagggtttgacatgcggtgtgtcgggtatgaaagtaccctaggctatgattattcatagccgcgccgcacaggtggtgcatggtcgtcgtcagctcgtgtcgtgagatgttgggttaagtcccgcaacgagcgcaacccttgtcctgtgttaccagcgggtaatgccgggtactcacaggagactgccggcgataagccggaggaaggaggggatgacgtcagatcagtatgccctttatgccctgggctacacaggcgctacagtggcagggacaatgggctgcaacgccgtaaggcggagctaatcccctaaaccctgtcgtggtgcagattgagggttgcaactcaccctcatgaaggcggaatcggtagtaatggcgaatcagcaatgtcgccgtgaatacgttcccgggtcttgtacacaccgcccgtcacgccatgggagtcgggttcatcggaagtccccgagctaacctgcaaaggaggcaggggccgatgatgggcctgatgactggggcg

SEQ ID NO: 3296 - DNA, 1441 bp, Sulfurimonas autotrophica
aatgaacgctggcggcgtgcttaacacatgcaagtcgaacggtaacagagagaagcttgcttctttgctgacgagtggcgcacgggtgagtaatatatagataatgtgcctcttagtctgggatagccattggaaacgatgattaatactggatactccttcttaccaaaaggtaagtcgggaaagtttttcgctaagagatcggtctatatcccatcagcttgttggtagtgtaagagactaccaaggcaatgacgggtagcgggtttgagaggatgatccgccacactggtactgagacacggaccagactcctacgggaggcagcagtgaggaatattgcacaatgggggaaaccctgatgcagcaacgccgcgtggaggatgacgcatttcggtgtgtaaactccttttatatgtcaagaaaatgacggtagcatatgaataagcaccggctaactccgtgccagcagccgcggtaatacggagggtgcaagcgttattcggaatcactgggcgtaaaggacgcgtaggcgggttggaaagtcagatgtgaaatcctacagcttaactgtagaactgcatttgaaacttccaatctagagtatgggagggggagatggaattagtggtgtaggggtaaaatccgtagatatcactaggaataccgaaagcgaaggcgatctcctggaacataactgacgctaaggcgtgaaagcgtggggagcaaacaggattagataccctggtagtccacgccctaaacgatgaacactagtcgtcgggatgctagtcatctcggtgatgcacttaacagattaagtgttccgcctggggagtacggtcgcaagattaaaactcaaaggaatagacggggacccgcacaagtggtggagcatgtggtttaattcgaagatacgcgaagaaccttacctagccttgacattgattgaacactttagagatagagtggtgcccttcggggaacatgaaaacaggtgctgcacggctgtcgtcagctcgtgtcgtgagatgttgggttaagtcccgcaacgagcgcaaccctcgtccttagttgctagcagttcggctgagcactctaaggagactgccttcgtaaggaggaggaaggtgaggacgacgtcaagtcatcatggcccttatggctagggctacacacgtgctacaatggggcgtacagagtgttgcgataccgcgaggtggagctaatcacttaaagcgtctctcagttcggattggagtctgcaactcgactccatgaagctggaatcactagtaatcgtagatcagcaatgctacggtgaatacgttcccgggtcttgtactcaccgcccgtcacaccatgggagttgatttcacccgaaatcgggaagcgaaccttcggggcgctaccgcttacggtggaattagcgactggggtg

SEQ ID NO: 3297 - DNA, 1444 bp, Sulfurimonas denitrificans
agtgaacgctggcggcgtgcttaacacatgcaagtcgaacggtaacaggaagtagcttgctactttgctgacgagtggcgcacgggtgagtaatatatagttaatgtacctcaaagactgggatagccactggaaacggtgattaatactagatatacctttataacaaaagttgtaaagggaaatgttttttcgctttgagatcagactatatcccatcagttagttggtagtgtaagagactaccaaggcaatgacgggtagcgggtttgagaggatgatccgccacactggtactgagacacggaccagactcctacgggaggcagcagtgaggaatattgcacaatggaggaaactctgatgcagcaacgccgcgtggaggatgacgcatttcggtgtgtaaactccttttatgagtcaagaaaatgacggtagctcatgaataagcaccggctaactccgtgccagcagccgcggtaatacggagggtgcaagcgttactcggaatcactgggcgtaaaggacgcgtaggcgggttgtcaagtcaggtgtgaaatcctacagcttaactgtagaactgcacttgaaactggcaacctagagtatgggaggggaagatggaattagtggtgtaggggtaaaatccgtagatatcactaggaatacctaaagcgaaggcgatcttctggaacataactgacgctaaggcgtgaaagcgtggggagcaaacaggattagataccctggtagtccacgccctaaacgatgaacactagtcgtcgtgatgcttgtcattgcggtgatgcacttaacagattaagtgttccgcctggggagtacggtcgcaagattaaaactcaaaggaatagacggggacccgcacaagtggtggagcatgtggtttaattcgaagatacgcgaaaaaccttacctggccttgacattgatagaatctgctagagatagcggagtgcccttcggggagcttgaaaacaggtgctgcacggctgtcgtcagctcgtgtcgtgagatgttgggttaagtcccgcaacgagcgcaaccctcgtccttagttgccagcaggttaagctgggcactctaaggagactgccttcgcaaggaggaggaaggtgaggacgacgtcaagtcatcatggcccttacggccagggctacacacgtgctacaatggggcgtacagagtgttgcaataccgcgaggtggagccaatcacttaaagcgtctctcagttcggattgttctctgcaactcgagagcatgaagctggaatcactagtaatcgtagatcagcattgctacggtgaatacgttcccgggtcttgtactcaccgcccgtcacaccatgggagttgatttcacccgaaattgggaagctaaccttcggggggctaccacttacggtggaattagcgactggggtg

SEQ ID NO: 3298 - DNA, 1438 bp, Sulfurimonas gotlandica
agtgaacgctggcggcgtgcttaacacatgcaagtcgaacgatgattaagagcttgctcttatgattagtggcgcacgggtgagtaatatatagttaatgtacctcgaagaccgggatagccattggaaacgatgattaatactggatactccttctaaactcaagtttagtcgggaaacgttttttcgcttcgagatcagtctatatcccatcagtttgttggtgaggtaatggctcaccaaggcaatgacgggtagcgggtttgagaggatgatccgccacactggtactgagacacggaccagactcctacgggaggcagcagtgaggaatattgcacaatgggggaaaccctgatgcagcaacgccgcgtggaggatgacgcatttcggtgtgtaaactccttttatgagtcaagaaaatgacggtagctcatgaataagcaccggctaactccgtgccagcagccgcggtaatacggagggtgcaagcgttactcggaatcactgggcgtaaaggacgcgtaggcgggcttgtaagtcagatgtgaaatccaatggctcaaccattgaactgcatttgaaactacgagtctagagtatgggagggggagatggaattagtggtgtaggggtaaaatccgtagatatcactaggaataccgaaagcgaaggcgatctcctggaacattactgacgctaaggcgtgaaagcgtggggagcaaacgggattagataccccggtagtccacgccctaaacgatgaacactagtcgtcgggatgcttgtcatctcggtgatgcacttaacagattaagtgttccgcctggggagtacggtcgcaagattaaaactcaaaggaatagacggggacccgcacaagtggtggagcatgtggtttaattcgaagatacgcgaagaaccttacctagccttgacattgatagaatctttcagagatgagagagtgcccttcggggagcttgaaaacaggtgctgcacggctgtcgtcagctcgtgtcgtgagatgttgggttaagtcccgcaacgagcgcaaccctcgtccttagttgccagcaggttaagctgggcactctagggagactgccttcgcaaggaggaggaaggtgaggacgacgtcaagtcatcatggcccttatggctagggctacacacgtgctacaatggggcgtacagagtgttgcgataccgcgaggtggagccaatcacttaaagcgtctctcagttcggattggagtctgcaactcgactccatgaagctggaatcactagtaatcgtagatcagcaatgctacggtgaatacgttcccgggtcttgtactcaccgcccgtcacaccatgggagttgatttcacccgaaattgggaagctaaccttcgggaggctaccacttacggtggaattagcgactggggtg

SEQ ID NO: 3299 - DNA, 1444 bp, Sulfurimonas hongkongensis
agtgaacgctggcggcgtgcttaacacatgcaagtcgaacggtaacagaaactagcttgctagtttgctgacaagtggcgcacgggtgagtaatatatagttaatgtacctcgaagaccgggatagccattggaaacgatgattaatactggatataccttttatacataagtgtaaaagggaaatgttttttcgctttgagatcagactatatcccatcagttagttggtagtgtaagagactaccaaggcaatgacgggtagcgggtttgagaggatgatccgccacactggtactgagacacggaccagactcctacgggaggcagcagtgaggaatattgcacaatggaggaaactctgatgcagcaacgccgcgtggaggatgacgcatttcggtgtgtaaactccttttatgagccaagaaaatgacggtaactcatgaataagcaccggctaactccgtgccagcagccgcggtaatacggagggtgcaagcgttactcggaatcactgggcgtaaaggacgcgtaggcgggttggaaagtcaggtgtgaaatcctacagcttaactgtagaactgcacttgaaacttctaacctagagtatgggagggggagatggaattagtggtgtaggggtaaaatccgtagatatcactaggaatacccaaagcgaaggcgatctcctggaacataactgacgctaaggcgtgaaagcgtggggagcaaacgggattagataccccggtagtccacgccctaaacgatgaacactagtcgtcgtgatgcttgtcattgcggtgatgcacttaacagattaagtgttccgcctggggagtacggtcgcaagattaaaactcaaaggaatagacggggacccgcacaagtggtggagcatgtggtttaattcgaagatacgcgaagaaccttacctagccttgacattgatagaacacagtagagatacagtggtgcccttcggggagcttgaaaacaggtgctgcacggctgtcgtcagctcgtgtcgtgagatgttgggttaagtcccgcaacgagcgcaaccctcgtccttagttgccagcaggttaagctgggcactctaaggagactgccttcgcaaggaggaggaaggtgaggacgacgtcaagtcatcatggcccttacggctagggctacacacgtgctacaatggggcgtacagagtgttgcgataccgcgaggtggagccaatcacttaaagcgtctctcagttcggattggagtctgcaactcgactccatgaagctggaatcactagtaatcgtagatcagcaatgctacggtgaatacgttcccgggtcttgtactcaccgcccgtcacaccatgggagttgatttcacccgaaattgggaagctaaccttcggggggctaccacttacggtggaattagcgactggggtg

SEQ ID NO: 3300 - DNA, 1424 bp, Sulfurirhabdus autotrophica
attgaacgctggcggaatgctttacacatgcaagtcgaacggcagcacgggtgcttgcacctggtggcgagtggcgaacgggtgagtaatacgtaggaacatgtcctgtaatgggggataacgcaccgaaaggtgtgctaataccgcatacgccctgagggggaaagcgggggattcgaaagaacctcgcgttataggagtggcctacggctgattagctagttggtgaggtaaaggctcaccaaggcgacgatcagtagctggtctgagaggatgatcagccacactggaactgagacacggtccagactcctacgggaggcagcagtggggaattttggacaatgggggcaaccctgatccagccattccgcgtgagtgaagaaggccttcgggttgtaaagctctttcaggagggaagaaacggttttggctaatacctgagactaatgacggtaccttcagaagaagcaccggctaactacgtgccagcagccgcggtaatacgtagggtgcgagcgttaatcggaattactgggcgtaaagggtgcgcaggcggttttgtaagtcagatgtgaaagccccgggcttaacctgggaattgcgtttgaaactacaagactagagtgtgtcagaggggggtagaattccacgtgtagcagtgaaatgcgtagagatgtggaggaataccgatggcgaaggcagccccctgggataacactgacgctcatgcacgaaagcgtggggagcaaacaggattagataccctggtagtccacgccctaaacgatgtcaactagttgtcgggagctttatgcttttggtaacgcagctaacgcgtgaagttgaccgcctggggagtacggtcgcaagattaaaactcaaaggaattgacgggggcccgcacaagcggtggattatgtggattaattcgatgcaacgcgaaaaaccttacctacccttgacatgccaggaactttccagagatggattggtgcccgaaagggagcctggacacaggtgctgcatggctgtcgtcagctcgtgtcgtgagatgttgggttaagtcccgcaacgagcgcaacccttgtcattaattgccatcattcagttgggcactttaatgagactgccggtgacaaaccggaggaaggtggggatgacgtcaagtcctcatggcccttatgggtagggcttcacacgtaatacaatggcgcgtacagagggttgccaacccgcgagggggagctaatctcacaaagcgcgtcgtagtccggattgtagtctgcaactcgactacatgaagtcggaatcgctagtaatcgcggatcagcatgtcgcggtgaatacgttcccgggccttgtacacaccgcccgtcacacctatgggagtgggtttcaccagaagtagttagcctaaccgc

SEQ ID NO: 3301 - DNA, 1460 bp, Sulfurisoma sediminicola
attgaacgctggcggaatgctttacacatgcaagtcgagcggcagcgcgggggcaaccctggcggcgagcggcgaacgggtgagtaatgcatcggaacgtacccatttgtgggggataactatccgaaaggatagctaataccgcataagtcctgagggagaaagcaggggatcgcaagaccttgcgcgaatggagcggccgatgccggattagctagttggtagggtaaaggcctaccaaggcgacgatccgtagctggtctgagaggatgatcagccacactggaactgagacacggtccagactcctacgggaggcagcagtggggaattttggacaatgggggcaaccctgatccagccattccgcgtgagtgaagaaggccttcgggttgtaaagctctttcggcaggaacgaaacggtttgggttaataccctgagctaatgacggtacctgaagaagaagcaccggctaactacgtgccagcagccgcggtaatacgtagggtgcgagcgttaatcggaattactgggcgtaaagcgtgcgcaggcggttctataagacagatgtgaaatccccgggcttaacctgggaactgcgtttgtgactgtaggactcgagtgtggcagaggggggtggaattccacgtgtagcagtgaaatgcgtagagatgtggaggaacaccgatggcgaaggcagccccctgggtcaacactgacgctcatgcacgaaagcgtgggtagcaaacaggattagataccctggtagtccacgccctaaacgatgcgaactaggtgttggggaaggagactttcttagtaccgcagctaacgcgtgaagttcgccgcctggggagtacggtcgcaagattaaaactcaaaggaattgacggggacccgcacaagcggtggatgatgtggattaattcgatgcaacgcgaaaaaccttacctacccttgacatgccaggaacttggtagagataccttggtgcccgaaagggagcctggacacaggtgctgcatggctgtcgtcagctcgtgtcgtgagatgttgggttaagtcccgcaacgagcgcaacccttgtcattagttgccatcatttagttgggcactctaatgagactgccggtgacaaaccggaggaaggtggggatgacgtcaagtcctcatggcccttatgggtagggcttcacacgtcatacaatggtcggtacagagggttgccaagccgcgaggtggagccaatcccagaaagccgatcgtagtccggatcggagtctgcaactcgactccgtgaagtcggaatcgctagtaatcgtggatcagcatgccacggtgaatacgttcccgggtcttgtacacaccgcccgtcacaccatgggagtgggtttcaccagaagtaggtagcctaaccgcaaggggggcgcttaccacggtgggattcatgactggggtg

SEQ ID NO: 3302 - DNA, 1460 bp, Sulfuritalea hydrogenivorans
attgaacgctggcggaatgctttacacatgcaagtcgagcggcagcgcgggggcaaccctggcggcgagcggcgaacgggtgagtaacatatcggaacgtaccccgtcgtgggggataacacagcgaaagttgtgctaataccgcatacgacctgagggtgaaagcgggggaccgtaaggcctcgcgcgatgggagcggccgatatcggattagctagttggtggggtaaaggctcaccaaggcgacgatccgtagctggtctgagaggacgaccagccacactggaactgagacacggtccagactcctacgggaggcagcagtggggaattttggacaatgggggcaaccctgatccagccattccgcgtgagtgaagaaggccttcgggttgtaaagctctttcggcaggaacgaaacggtggtccttaatacgggctactaatgacggtacctgaagaagaagcaccggctaactacgtgccagcagccgcggtaatacgtagggtgcgagcgttaatcggaattactgggcgtaaagcgtgcgcaggcggttccataagacagatgtgaaatccccgggcttaacctgggaactgcgtttgtgactgtgggactcgagtgtggcagaggggggtggaattccacgtgtagcagtgaaatgcgtagagatgtggaggaacaccgatggcgaaggcagccccctgggtcaacactgacgctcatgcacgaaagcgtggggagcaaacaggattagataccctggtagtccacgccctaaacgatgcgaactaggtgttggggaaggagactttcttagtaccgcagctaacgcgtgaagttcgccgcctggggagtacggtcgcaagattaaaactcaaaggaattgacggggacccgcacaagcggtggatgatgtggattaattcgatgcaacgcgaaaaaccttacctacccttgacatgtcaggaagtctgctgagaggcggatgtgcccgaaagggaacctgaacacaggtgctgcatggctgtcgtcagctcgtgtcgtgagatgttgggttaagtcccgcaacgagcgcaacccttgtcattaattgccatcattcagttgggcactttaatgagactgccggtgacaaaccggaggaaggtggggatgacgtcaagtcctcatggcccttatgggtagggcttcacacgtcatacaatggtcggtacagagggttgccaacccgcgagggggagccaatcccacaaagccgatcgtagtccggatcgcagtctgcaactcgactgcgtgaagtcggaatcgctagtaatcgtggatcagcatgtcacggtgaatacgttcccgggtcttgtacacaccgcccgtcacaccatgggagtgggttccaccagaagtaggtagtctaaccgcaaggagggcgcttaccacggtgggattcatgactggggtg

SEQ ID NO: 3303 - DNA, 1454 bp, Sulfuritortus calidifontis
attgaacgctggcggcatgccttacacatgcaagtcgaacggcagcacgggagcttgctcctggtggcgagtggcgaacgggtgagtaaagcatcggaacgtaccgcgtagtgggggataacgtagcgaaagttacgctaataccgcatacgtcctgagggagaaagcgggggtcgcaagacctcgcgctatgcgagcggccgatgtcggattagctagttggtggggtaagagcctaccaaggcgacgatccgtagcgggtctgagaggatgatccgccacactgggactgagacacggcccagactcctacgggaggcagcagtggggaattttggacaatgggggaaaccctgatccagccatgccgcgtgggtgaagaaggccttcgggttgtaaagccctttcggacggaaagaaatcatcgcctctaacataggcggtggatgacggtaccgtaagaagaagcaccggctaactacgtgccagcagccgcggtaatacgtagggtgcgagcgttaatcggaattactgggcgtaaagcgtgcgcaggcggttttttaagccagatgtgaaatccccgggcttaacctgggaatggcatttggaactggaagactagagtgcggcagaggggggtggaattcctggtgtagcagtgaaatgcgtagagatcaggaggaacaccgatggcgaaggcagccccctgggccgacactgacgctcatgcacgaaagcgtggggagcaaacaggattagataccctggtagtccacgccctaaacgatgtcaactggctgttgggggagcaatctcttagtagcgaagctaacgcgtgaagttgaccgcctggggagtacggccgcaaggttgaaactcaaaggaattgacgggggcccgcacaagcggtggatgatgtggattaattcgatgcaacgcgaagaaccttacctacccttgacatggcaggaacttgccagagatggcttggtgcccgaaagggaacctgcacacaggtgctgcatggctgtcgtcagctcgtgtcgtgagatgttgggttaagtcccgcaacgagcgcaacccttgccattagttgctacgaaagggcactctaatgggactgccggtgacaaaccggaggaaggtggggatgacgtcaagtcctcatggcccttatgggtagggcttcacacgtcatacaatggtcggtacagagggttgccaacccgcgagggggagccaatcccagaaaaccgatcgtagtccggattgttctctgcaactcgagagcatgaagtcggaatcgctagtaatcgcggatcagcatgccgcggtgaatacgttcccgggccttgtacacaccgcccgtcacaccatgggagtgggttgctccagaagtaggtagcctaaccgcgaggggggcgcttaccacggagtgattcatgactggggtg

SEQ ID NO: 3304 - DNA, 1469 bp, Sulfurivirga caldicuralii
aatgaacgctggcggcaggcctaagacatgcaagtcgagcggtaacagaggggagcttgctcccctgctgacgagcggcgaacgggtgagtaacacgtgggaacctgccctctggttggggataacctggggaaacccaggctaataccgaataagctctacggaggaaagtgggcctctgcttgcaagctcacgccagaggatgggcccgcggcggattagctagttggtgaggtaacggctcaccaaggcgacgatccgtagctggtctgagaggatgatcagccacactgggactgagacacggcccagactcctacgggaggcagcagtcgggaatattggacaatgggcgaaagcctgatccagccatgccgcgtgtgtgaagaaggcctgagggttgtaaagcactttcagcagggaggaaaagcgtagggttaatacccctgcgtcttgacgttacctgcagaagaagcaccggctaactctgtgccagcagccgcggtaatacagagggtgcgagcgttattcggaattactgggcgtaaagcgcgcgtaggcggatttgcaagtcgggtgtgaaagccccgggctcaacctgggaactgcatccgagactgcaagtctagagtacggtagagggtagcggaattcctagtgtagcggtgaaatgcgtagatattaggaggaacaccagtggcgaaggcggctacctggaccgatactgacgctgaggtgcgaaagcgtggggagcaaacaggattagataccctggtagtccacgccctaaacgatgtcgactagctgttgggctcatttaagggctcagtagcgtagctaacgcgttaagtcgaccgcctggggagtacggccgcaaggttaaaactcaaaggaattgacgggggcccgcacaagcggtggagcatgtggtttaattcgatgcaacacgaagaaccttaccctcccttgacatccccggaaggcgccagagatggcgctgtgccttcgggaaccgggtgacaggtgctgcatggctgtcgtcagctcgtgtcgtgagatgttgggttaagtcccgcaacgagcgcaacccttgccgttagttgccatcgggtcatgccgggcactctaacgggactgccggtgataaaccggaggaaggcggggacgacgtcaagtcatcatggcccttatgggaggggctacacacgtgctacaatgggcaggacaaagggtagccaacccgcgagggggagccaatcccaaaaacctgctcgtagtccggattgcagtctgcaactcgactgcatgaagtcggaatcgctagtaatcgcgaatcagctatgtcgcggtgaatacgttcccgggccttgtacacaccgcccgtcacaccatgggagtgggctgcaccagaagtggctagtctaaccttcgggaggacggtcaccacggtgtggtccatgactggggtg

SEQ ID NO: 3305 - DNA, 1431 bp, Sulfurospirillum barnesii
agtgaacgctggcggcgtgcttaacacatgcaagtcgaacggataaaataagcttgcttattttgttagtggcgcacgggtgagtaatgtatagctaacctgccctttagtgggggacaacagttggaaacgactgctaataccccatactccttcttactataaggtaagttgggaaagatttatcgctaaaggatggggctttattgtatcagctagttggtggggtaatggcctaccaaggctatgacgcatacctggtctgagaggatgatcaggcacactggaactgagacacggtccagactcctacgggaggcagcagtggggaatattgcacaatggaggaaactctgatgcagcaacgccgcgtggaggatgacgcatttcggtgtgtaaactccttttataagggaagataatgacggtaccttatgaataagcaccggctaactccgtgccagcagccgcggtaatacggagggtgcaagcgttactcggaatcactgggcgtaaaggatgcgtaggctgtaatataagtcaggagtgaaatccaacggctcaaccgttgaactgctcttgaaactgttttactagaatatgggagaggtagatggaattagtggtgtaggggtaaaatccgtagatatcactaggaataccgattgcgaaggcgatctactggaacattattgacgctgaggcatgaaagcgtggggagcaaacaggattagataccctggtagtccacgccctaaacgatgcacactagttgttgcgatgctagtcattgcagtaatgcacttaacagattaagtgtgccgcctggggagtacggtcgcaagattaaaactcaaaggaatagacggggacccgcacaagcggtggagcatgtggtttaattcgaagatacacgaagaaccttacctggccttgatatcctaagaatcctgtagagatatgggagtgctagtttactagaacttagagacaggtgctgcacggctgtcgtcagctcgtgtcgtgagatgttgggttaagtcccgcaacgagcgcaaccctcgtgtttagttgctaacagtttggctgagcactctaaacagactgccttcgtaaggaggaggaaggtgaggacgacgtcaagtcatcatggcccttatggccagggctacacacgtgctacaatggctaggacaaagagacgcgatactgcgaagtggagcaaatcttaaaacctagtctcagttcggattgaagtctgcaactcgacttcatgaagctggaatcgctagtaatcgtagatcagatatgctacggtgaatacgttcccgggtcttgtactcaccgcccgtcacaccatgggagttgaattcacccgaagccggaatactaaactagttaccgaccacggtgggttcagcgactggggtg

SEQ ID NO: 3306 - DNA, 1431 bp, Sulfurospirillum deleyianum
agtgaacgctggcggcgtgcttaacacatgcaagtcgaacggataaaataagcttgcttattttgttagtggcgcacgggtgagtaatatatagctaacctgccctttagtgggggacaacagttggaaacgactgctaataccccatactccttcttatcataaggtaagttgggaaagatttattgctaaaggatggggctttattgtatcagctagttggtggggtaatggcctaccaaggctatgacgcatacctggtctgagaggatgatcaggcacactggaactgagacacggtccagactcctacgggaggcagcagtggggaatattgcacaatggaggaaactctgatgcagcaacgccgcgtggaggatgacgcatttcggtgtgtaaactccttttataagggaagataatgacggtaccttatgaataagcaccggctaactccgtgccagcagccgcggtaatacggagggtgcaagcgttactcggaatcactgggcgtaaaggatgcgtaggctgtaatataagtcaggagtgaaatccaacggctcaaccgttgaactgctcttgaaactgttttactagaatatgggagaggtagatggaattggtggtgtaggggtaaaatccgtagatatcaccaggaataccgattgcgaaggcgatctactggaacattattgacgctgaggcatgaaagcgtggggagcaaacaggattagataccctggtagtccacgccctaaacgatgcacactagttgttgcgatgctagtcattgcagtaatgcacttaacagattaagtgtgccgcctggggagtacggtcgcaagattaaaactcaaaggaatagacggggacccgcacaagcggtggagcatgtggtttaattcgaagatacacgaagaaccttacctggccttgatatcctaagaatcctgcagagatgcgggagtgctagtttactagaacttagagacaggtgctgcacggctgtcgtcagctcgtgtcgtgagatgttgggttaagtcccgcaacgagcgcaaccctcgtgattagttgctaacagtttggctgagcactctaatcagactgccttcgcaaggaggaggaaggtgaggacgacgtcaagtcatcatggcccttatggccagggctacacacgtgctacaatggttaggacaaagagacgcgatactgcgaagtggagcaaatcttaaaacctagtctcagttcggattggagtctgcaactcgactccatgaagctggaatcgctagtaatcgtagatcagatatgctacggtgaatacgttcccgggtcttgtactcaccgcccgtcacaccatgggagttgaattcacccgaagccggaatactaaactagttaccgaccacggtgggttcagcgactggggtg

SEQ ID NO: 3307 - DNA, 1431 bp, Sulfurospirillum halorespirans
agtgaacgctggcggcgtgcttaacacatgcaagtcgaacggacttaatgagcttgcttattaagttagtggcgcacgggtgagtaatatatagctaacctgccctttagtgggggacaacagttggaaacgactgctaataccccatactccttctgatcttaagatcagttgggaaagatttatcgctaaaggatggggctttattgtatcagctagttggtggggtaatggcctaccaaggctatgacgcatacctggtctgagaggatgatcaggcacactggaactgagacacggtccagactcctacgggaggcagcagtggggaatattgcacaatggaggaaactctgatgcagcaacgccgcgtggaggatgacgcatttcggtgtgtaaactccttttataggggaagataatgacggtaccctatgaataagcaccggctaactccgtgccagcagccgcggtaatacggagggtgcaagcgttactcggaatcactgggcgtaaaggatgcgtaggctggaaatcaagtcgagagtgaaatccaacggctcaaccgttgaactgctctcgaaactggttacctagaatatgggagaggtagatggaattagtggtgtaggggtaaaatccgtagatatcactaggaataccgattgcgaaggcgatctactggaacattattgacgctgaggcatgaaagcgtggggagcaaacaggattagataccctggtagtccacgccctaaacgatgcacactagttgttgcgatgctagtcattgcagtaatgcacttaacagattaagtgtgccgcctggggagtacggtcgcaagattaaaactcaaaggaatagacggggacccgcacaagcggtggagcatgtggtttaattcgaagatacacgaagaaccttacctggccttgatatcctaagaatcctttagagatagaggagtgctagtttactagaacttagagacaggtgctgcacggctgtcgtcagctcgtgtcgtgagatgttgggttaagtcccgcaacgagcgcaaccctcgtgattagttgctaacagttcggctgagcactctaatcagactgccttcgtaaggaggaggaaggtgaggacgacgtcaagtcatcatggcccttatggccagggctacacacgtgctacaatggctaggacaaagagacgcgatactgcgaagtggagcaaatcttaaaacctagtctcagttcggattgaagtctgcaactcgacttcatgaagctggaatcgctagtaatcgtagatcagatatgctacggtgaatacgttcccgggtcttgtactcaccgcccgtcacaccatgggagttgaattcacccgaagccggaatactaaactagttaccgaccacggtgggttcagcgactggggtg

SEQ ID NO: 3308 - DNA, 1431 bp, Sulfurospirillum multivorans
agtgaacgctggcggcgtgcttaacacatgcaagtcgaacggataaaataagcttgcttattttgttagtggcgcacgggtgagtaatatatagctaacctgccctttagtgggggacaacagttggaaacgactgctaataccccatactccttcttgtcttaagataagttgggaaagatttatcgctaaaggatggggctttattgtatcagctagttggtggggtaatggcctaccaaggcaatgacgcatacctggtctgagaggatgatcaggcacactggaactgagacacggtccagactcctacgggaggcagcagtggggaatattgcacaatggaggaaactctgatgcagcaacgccgcgtggaggatgacgcatttcggtgtgtaaactccttttataggggaagataatgacggtaccctatgaataagcaccggctaactccgtgccagcagccgcggtaatacggagggtgcaagcgttactcggaatcactgggcgtaaaggatgcgtaggctggaaatcaagtcgagagtgaaatccaacggctcaaccgttgaactgctctcgaaactggttacctagaatatgggagaggtagatggaattagtggtgtaggggtaaaatccgtagatatcactaggaataccgattgcgaaggcgatctactggaacattattgacgctgaggcatgaaagcgtggggagcaaacaggattagataccctggtagtccacgccctaaacgatgcacactagttgttgcgatgctagtcattgcagtaatgcacttaacagattaagtgtgccgcctggggagtacggtcgcaagattaaaactcaaaggaatagacggggacccgcacaagcggtggagcatgtggtttaattcgaagatacacgaagaaccttacctggccttgatatcctaagaatcctgtagagatacgggagtgctagtttactagaacttagagacaggtgctgcacggctgtcgtcagctcgtgtcgtgagatgttgggttaagtcccgcaacgagcgcaaccctcgtgattagttgctaacagttcggctgagcactctaatcagactgccttcgtaaggaggaggaaggtgaggacgacgtcaagtcatcatggcccttatggccagggctacacacgtgctacaatggctaggacaaagagacgcgatactgcgaagtggagcaaatcttaaaacctagtctcagttcggattgaagtctgcaactcgacttcatgaagctggaatcgctagtaatcgtagatcagatatgctacggtgaatacgttcccgggtcttgtactcaccgcccgtcacaccatgggagttgaattcacccgaagccggaatactaaactagttaccgaccacggtgggttcagcgactggggtg

SEQ ID NO: 3309 - DNA, 1435 bp, Sulfurovum riftiae
agtgaacgctggcggcgtgcttaacacatgcaagtcgaacgagaacggctctagcttgctagagtgtcagctaagtggcggacgggtgagtaatgtatagttaatttgccccttggagagggataacagttggaaacgactgctaatacctcatactccttctatgttaatcatagttgggaaacgttttttcgccaagggataagactatatggtatcaggtagttggtggggtaagagcctaccaagccaatgacgcctagctggtctgagaggatgatcagccacactggaactgagacacggtccagactcctacgggaggcagcagtggggaatattgcacaatggaggaaactctgatgcagcaacgccgcgtggaggatgacgcatttcggtgtgtaaactccttttatatgggaagataatgacggtaccatatgaataagcaccggctaactccgtgccagcagccgcggtaatacggagggtgcaagcgttactcggaatcactgggcgtaaagcgcgcgcaggcggtcttttaagttggatgtgaaagcctatggctcaaccatagaactgcatccaaaactattagactagagtctgggaggggaagatggaattagttgtgtaggggtaaaatccgtagagataactaggaataccaaaagcgaaggcgatcttctggaacagtactgacgctgaggcgcgaaagcgtggggagcaaacaggattagataccctggtagtccacgccctaaacgatgaatgttagtcgtcggaggcctagtgtcttcggtgatgcagctaacgcattaaacattccgcctggggagtacggtcgcaagattaaaactcaaaggaatagacggggacccgcacaagtggtggagcatgtggtttaattcgaagatacgcgaagaaccttacctggccttgacattgaaagaatccggtagagatactggagtgcccttttgggagcttgaaaacaggtgctgcacggctgtcgtcagctcgtgtcgtgagatgttgggttaagtcccgcaacgagcgcaaccctcgtcactagttactaacggttcggccgaggactctagtgagactgccttcgcaaggaggaggaaggtgaggacgacgtcaagtcatcatggcccttacggccagggcaacacacgtgctacaatggttaggacaatgagacgcgataccgcgaggtggagcaaatctataaacctaatctcagttcggattgtagtctgcaactcgactacatgaagctggaatcactagtaatcgtagatcagctatgctacggtgaatacgttcccgggtcttgtactcaccgcccgtcacaccatgggagttgatttcacccgaagcggggaagctaaactggctaccctccacggtgggatcagcgactggggtg

SEQ ID NO: 3310 - DNA, 1444 bp, Sunxiuqinia elliptica
gatgaacgctagcgggaggcctaacacatgcaagtcgaggggtaacattgtagcttgctacagatgacgaccggcgcacgggtgagtaacgcgtatgcaacctgcctttgacagggggatagcccggagaaatccggattaatatcccatggtatttacagatcgcatggtttgtaaattaaagattttatcggtcaaagatgggcatgcgtgacattagctagttggtaaggtaacggcttaccaaggctgcgatgtctaggggttctgagaggatgatcccccacactggtactgagacacggaccagactcctacgggaggcagcagtgaggaatattggtcaatgggcgcaagcctgaaccagccatcccgcgtgaaggaagactgccctatgggttgtaaacttcttttctgcaccaagaatggttactacgtgtagtgatttgacggtagtgcaggaataagcatcggctaactccgtgccagcagccgcggtaatacggaggatgcaagcgttatccggattcattgggtttaaagggtacgtaggtggccaattaagtcagtggtgaaatcctgccgcttaacggtagaactgccattgaaactggttggcttgagtacagttgaggtaagcggaatgtgtagtgtagcggtgaaatgcttagatattacacagaaccccgattgcgaaggcagcttactaaactgtaactgacactgaggtacgaaagcgtggggagcgaacaggattagataccctggtagtccacgctgtaaacgatgctcactcgctgtatgcgatacattgtatgcggccaagcgaaagtgataagtgagccacctggggagtacgttggcaacagtgaaactcaaaggaattgacgggggcccgcacaagcggaggaacatgtggtttaattcgatgatacgcgaggaaccttacctgggcttaaatgcagattgacagacgtcgaaagatgtttttcttcggacagtttgcaaggtgctgcatggttgtcgtcagctcgtgccgtgaggtgtcgggttaagtcccataacgagcgcaacccttaccgttagttaccatcagttaggctggggactctagcgggactgccaccgtaaggtgagaggaaggtggggatgacgtcaaatcagcacggcccttatgtccagggctacacacgtgttacaatggccagtacaaagggcagctacctggtgacaggatgctaatctctaaagctggtctcagttcggatcgaagtctgcaacccgacttcgtgaagctggattcgctagtaatcgcgcatcagccatggcgcggtgaatacgttcccgggccttgtacacaccgcccgtcaaaccatggaagctgggggtacctgaagtctgtgaccgcaaggagcggcctagggtaaaactagtgactggggtt

SEQ ID NO: 3311 - DNA, 1459 bp, Sutterella parvirubra
  misc_feature (435)..(435): n is a, c, g, or t
  misc_feature (995)..(995): n is a, c, g, or t
attgaacgctggcggcatgctttacacatgcaagtcgaacggcagcacagggagcttgctcccgggtggcgagtggcgcacgggtgagtaagacatcggaacgtgtcctcttgtgggggataactacccgaaagggtggctaataccgcataagtcctgagggagaaagcgggggatcttcggacctcgcgcgagaggagcggccgatggccgattagctagttggtgaggtaaaggctcaccaaggcgacgatcggtagctggtctgagaggacgaccagccacactgggactgagacacggcccagactcctacgggaggcagcagtggggaattttggacaatgggcgaaagcctgatccagccatgccgcgtgtgggatgaaggccttcgggttgtaaaccacttttgtcagggacgaaaaggttcaggcnaataccttgaactgctgacggtacctgaagaataagcaccggctaactacgtgccagcagccgcggtaatacgtagggtgcaagcgttaatcggaattactgggcgtaaagcgtgcgcaggcggttctgtaagatagatgtgaaatccccgggcttaaccttggaattgcatttatgactgcaggactcgagtttgtcagaggggggtggaattccaagtgtagcagtgaaatgcgtagatatttggaagaacaccgatggcgaaggcagccccctgggacatgactgacgctcatgcacgaaagcgtggggagcaaacaggattagataccctggtagtccacgccctaaacgatgtctactggttgttggggacgatttggtccttggtaacgaagctaacgcgtgaagtagaccgcctggggagtacggtcgcaagattaaaactcaaaggaattgacggggacccgcacaagcggtggatgatgtggattaattcgatgcaacgcgaaaaaccttacctagccttgacatgtcggaaagctctgagagatcggagngtgcccgcaagggaatccgaacacaggtgctgcatggctgtcgtcagctcgtgtcgtgagatgttgggttaagtcccgcaacgagcgcaacccttgtcactagttgctacgaaagggcactctagtgagactgccggtgacaaaccggaggaaggtggggatgacgtcaagtcctcatggcccttatggctagggcctcacacgtcatacaatggtcggaacagagggcagcgaagccgcgaggtggagcaaatcccagaaaaccgatcgtagtccggattgcagtctgcaactcgactgcatgaagtcggaatcgctagtaatcgcggatcagcatgccgcggtgaatacgttcccgggtcttgtacacaccgcccgtcacaccatgggagtggggttcaccagaagacgtttgtctaaccgcaaggaggacggcgtccacggtgggtttcatgactggggtg

SEQ ID NO: 3312 - DNA, 1412 bp, Swaminathania salitolerans
agcgaacgctggcggcatgcttaacacatgcaagtcgcacggacctttcggggtgagtggcggacgggtgagtaacgcgtagggatctatccacgggtgggggataacaccgggaaactggtgctaataccgcatgatacctgagggtcaaaggcgcaagtcgcctgtggaggagcctgcgttcgattagcttgttggtggggtaaaggcctaccaaggcgatgatcgatagctggtctgagaggatgatcagccacactgggactgagacacggcccagactcctacgggaggcagcagtggggaatattggacaatgggcgcaagcctgatccagcaatgccgcgtgtgtgaagaaggtcttcggattgtaaagcactttcgacggggacgatgatgacggtacccgtagaagaagccccggctaacttcgtgccagcagccgcggtaatacgaagggggctagcgttgctcggaatgactgggcgtaagggcgtgtaggcggtttgcacagtcagatgtgaaattccagggcttaaccttggggctgcatttgatacgtgtagactagagtgtgagagagggttgtggaattcccagtgtagaggtgaaattcgtagatattgggaagaacaccggtggcgaaggcggcaacctggctcatgactgacgctgaggcgcgaaagcgtggggagcaaacaggattagataccctggtagtccacgctgtaaacgatgtgtgctggatgttgggtaacttggttactcagtgtcgaagctaacgcgctaagcacaccgcctggggagtacggccgcaaggttgaaactcaaaggaattgacgggggcccgcacaagcggtggagcatgtggtttaattcgaagcaacgcgaagaaccttaccagggcttgacattgggaggcttgtattcagagatgggtatttcccgcaaggggaccttctgcacaggtgctgcatggctgtcgtcagctcgtgtcgtgagatgttgggttaagtcccgcaacgagcgcaaccctcgcctttagttgccagcacgtttgggtgggcactctagaggaactgccggtgacaagccggaggaaggtggggatgacgtcaagtcctcatggcccttatgtcctgggctacacacgtgctacaatggcggtgacagtgggaagctagatggtgacatcgtgccgatctctaaaagccgtctcagttcggattgtactctgcaactcgagtacatgaaggtggaatcgctagtaatcgcggatcagcatgccgcggtgaatacgttccctgggcctgtacacaccgcccgtcacaccatgggagttggtttgacccgaagccggtgagcgaaccgcaaggacgcagccgaccacggtcgggtcagcgactggggtg

SEQ ID NO: 3313 - DNA, 1365 bp, Swingsia samuiensis
agcgaacgctggcggcatgcttaacacatgcaagtcgcacggacctttcggggttagtggcggacgggtgagtaacgcgtagggatttatccataggtgggggacaacactgggaaactggtgctaataccgcatgatacctgagggtcaaaggcgcaagtcgcctatggaggaacctgcgttcgattagctagttggtggggtaaaggcctaccaaggcgatgatcgatagctggtttgagaggatgatcagccacactgggactgagacacggcccagactcctacgggaggcagcagtggggaatattggacaatgggggcaaccctgatccagcaatgccgcgtgtgtgaagaaggtcttcggattgtaaagcactttcggcggggacgatgatgacggtacccgcagaagaagccccggctaacttcgtgccagcagccgcggtaatacgaagggggctagcgttgctcggaatgactgggcgtaaagggcgtgtaggcggtttggacagtcagatgtgaaatccccgggcttaacctgggaactgcatttgatacgtccagactagagttcgagagagggttgtggaattcccagtgtagaggtgaaattcgtagatattgggaagaacaccggtggcgaaggcggcaacctggctcgatactgacgctgaggcgcgaaagcgtggggagcaaacaggattagataccctggtagtccacgctgtaaacgatgtgtgctggatgttgggtaacttagttactcagtgtcgaagctaacgcgctaagcacaccgcctggggagtacggccgcaaggttgaaactcaaaggaattgacgggggcccgcacaagcggtggagcatgtggtttaattcgaagcaacgcgcagaaccttaccagggcttgcatggggaggctgtagacagagatgtctatttcttcggacctcccgcacaggtgctgcatggctgtcgtcagctcgtgtcgtgagatgttgggttaagtcccgcaacgagcgcaacccttgtctttagttgccagcatgtttgggtgggcactctagagagactgccggtgacaagccggaggaaggtggggatgacgtcaagtcctcatggcccttatgtcctgggctacacacgtgctacaatggcggtgacagtgggaagctatgtggtgacacaatgctgatctctaaaagccgtctcagttcggattgtactctgcaactcgagtacatgaaggtggaatcgctagtaatcgcggatcagcatgccgcggtgaatacgttcccgggccttgtacacaccgcccgtcacaccatgggagttggtttgaccttaagtcggtgagcgaaccc

SEQ ID NO: 3314 - DNA, 1411 bp, Synechococcus elongatus
gatgaacgctggcggcgtgcttaacacatgcaagtcgaacgggctcttcggagctagtggcggacgggtgagtaacgcgtgagaatctgcctacaggacggggacaacagttggaaacgactgctaatacccgatgtgccgagaggtgaaacatttatggcctgtagatgagctcgcgtctgattagctagttggtggggtaagggcctaccaaggcgacgatcagtagctggtctgagaggatgatcagccacactgggactgagacacggcccagactcctacgggaggcagcagtggggaattttccgcaatgggcgcaagcctgacggagcaacgccgcgtgggggaggaaggtttttggactgtaaaccccttttctcagggaagaagaaagtgacggtacctgaggaataagcctcggctaattccgtgccagcagccgcggtaatacgggagaggcaagcgttatccggaattattgggcgtaaagcgtccgcaggcggttaatcaagtctgttgtcaaagcgtggggctcaacctcatacaggcaatggaaactgattgactagagtatggtaggggtagcgggaattccaggtgtagcggtgaaatgcgtagatatctggaagaacaccagcggcgaaagcgcgctactgggccataactgacgctcatggacgaaagctaggggagcgaaagggattagatacccctgtagtcctagccgtaaacgatgaacactaggtgttgcgtgaatcgacccgcgcagtgccgtagccaacgcgttaagtgttccgcctggggagtacgcacgcaagtgtgaaactcaaaggaattgacgggggcccgcacaagcggtggagtatgtggtttaattcgatgcaacgcgaagaaccttaccagggtttgacatcccccgaatctcttggaaacgagagagtgccttcgggagcggggagacaggtggtgcatggctgtcgtcagctcgtgtcgtgagatgttgggttaagtcccgcaacgagcgcaacccacgtttttagttgccatcattcagttgggcactctagagaaactgccggtgacaaaccggaggaaggtgtggacgacgtcaagtcatcatgccccttacatcctgggctacacacgtactacaatgctccggacagcgagacgcgaagccgcgaggtgaagcaaatctcccaaaccggggctcagttcagattgcaggctgcaactcgcctgcatgaaggcggaatcgctagtaatcgcaggtcagcatactgcggtgaatacgttcccgggccttgtacacaccgcccgtcacaccatggaagttggccatgcccgaagtcgttaccctaaccgttcgcggaggggggcgccgaaggtagggctgatgactggggtg

SEQ ID NO: 3315 - DNA, 1411 bp, Synechococcus lividus
gatgaacgctggcggtctgcttaacacatgcaagtcgaacgagctcttcggagctagtggcggacgggtgagtaacacgtgagaatctacccttaggagggggataacagctggaaacggctgctaataccccatatgccgcaaggtgaaatcttttttgcctgaggatgagctcgcggtggattagctagttggtggggtaatggcctaccaaggcaacgatccatagctggtctgagaggatgatcagccacactgggactgagacacggcccagactcctacgggaggcagcagtggggaattttccgcaatgggcgaaagcctgacggagcaagaccgcgtgagggatgaaggcctttgggttgtaaacctcttttctcagggaagaacacaatgacggtacctgaggaataagcctcggctaactccgtgccagcagccgcggtaagacggaggaggcaagcgttatccggaattattgggcgtaaagcgtccgcaggtggctttccaagtctgctgtcaaagcccgaggcttaacctcggatcggcggtggaaactggatcgctagagtacgtcaggggtagggggaattcccggtgtagcggtgaaatgcgtagatatcgggaagaacaccagcgacgaaagtgccctactgggacgttactgacactcatggacgaaagctaggggagcgaaagggattagatacccctgtagtcctagccgtaaacgatggacactaggtgttgctggtatccactccagcagtgccgtagccaacgcgttaagtgtcccgcctggggagtacgcacgcaagtgtgaaactcaaaggaattgacgggggcccgcacaagcggtggagtatgtggtttaattcgatgcaacgcgaagaaccttaccagggcttgacatgtcgcgaatccccctgaaaggggggagtgccttcgggaacgcgaacacaggtggtgcatggctgtcgtcagctcgtgtcgtgagatgttgggttaagtcccgcaacgagcgcaaccctcgtccttagttgccagcattcagttgggcactctagggagactgccggtgacaaaccggaggaaggtggggatgacgtcaagtcatcatgccccttacgccctgggctacacacgtactacaatgctgtggacagagagttgccaacccgcgagggcgagctaatctcttaaaccacggctcagttcagattgcaggctgcaactcgcctgcatgaaggcggaatcgctagtaatcgcaggtcagcatactgcggtgaatacgttcccgggccttgtacacaccgcccgtcacaccatgggagttggccacgcccgaagtcgttactctaacccgtaagggagggggacgcctaaggcagggctgatgactggggtg

SEQ ID NO: 3316 - DNA, 1484 bp, Syntrophobacter fumaroxidans
aataaacgctggcggcgtgcctaacacatgcaagtcgaacgagaaagccttaatcttcggatgggcgagtaaagtggcgcacgggtgagtaacgcgtaggtaacctacctccgggaccgggataacagtgcgaaagtgctgctaataccggatacgattgtggagcgggagctctacgatgaaagtcggcctctcagagaagccgatgttcggggatgggcctgcgtcctatcagctggttggtagggtaacggcctaccaaggcgacgacgggtagctggtctgagaggatgatcagccacactggcactggaacacgggccagactcctacgggaggcagcagtgaggaattttgcgcaatggccgcaaggctgacgcagcaacgccgcgtgggtgaagaaggccttcgggtcgtaaagccctgtcaggtgggaagaacaccatggggacgaataagcttcatggctgacggtaccaccagaggaagcaccggctaactccgtgccagcagccgcggtaatacggagggtgcgagcgttattcggaattactgggcgtaaagcgcgtgcaggcggtttggcaagtctgatgtgaaagccccgggcttaacctgggaagtgcattggaaactgccggacttgagtactggagaggaagggggaattcccggtgtagaggtgaaattcgtagagatcgggaggaataccagtggcgaaggcgcccttctggacggttactgacgctgagacgcgaaagcgtggggagcaaacaggattagataccctggtagtccacgctgtaaacgatgagcactaggtgtagcgggtactcattcctgctgtgccgcagctaacgcgttaagtgctccgcctggggattacggtcgcaagactaaaactcaaaggaattgacgggggcccgcacaagcggtggagtatgtggtttaattcgacgcaacgcgaagaaccttacctgggcttgacatccccggacggccctggaaacagggatttccccttcgggggaccgggagacaggtgctgcatggctgtcgtcagctcgtgtcgtgagatgttgggttaagtcccgcaacgagcgcaacccttgcctttagttgccatcattgagttgggcactctaaagggactgccggtgtgaaaccggaggaaggtggggatgacgtcaagtcctcatggcctttatgcccagggctacacacgtactacaatgggcggtacaaagggaagcgagcccgcgagggggagccaaccccaaaaagccgttcacagttcggatcggagtctgcaactcgactccgtgaagttggaatcgctagtaatcgcggatcagcatgccgcggtgaatacgttcccgggccttgtacacaccgcccgtcacaccacgaaagtcggctgtaccagaagtgcgtgggctaacttttcggagaggcagcgtaccaaggtgtggtcggtaattggggtg

SEQ ID NO: 3317 - DNA, 1488 bp, Syntrophobotulus glycolicus
gacgaacgctggcggcgtgcctaacacatgcaagtcgaacggagaatattgaggaagcttgcgaattgatattcttagtggcgaacgggtgagtaacgcgtgggtaacctgtcctcatgaccggaataacagttggaaacgactgctaatgccggataagcttttggtaaggcatcttaccggaaggaaagctggcctctgaatatgctagtgcaagagggtggacccgcgtctgattagctggttggtagagtaaaagcctaccaaggcgacgatcagtagccggcctgagagggtaaacggccacactgggactgagacacggcccagactcctacgggaggcagcagtggggaatcttccgcaatggacgaaagtctgacggagcaacgccgcgtgtatgaagaaggctttcgggttgtaaagtactgttgtcagggacgaaccgtatatgtgtaaataatgcatatacctgacggtacctgacgaggaagccccggctaactacgtgccagcagccgcggtaatacgtagggggcgagcgttgtccggaattattgggcgtaaagggcgcgtaggcggctgtataagtctgatgtgaaagtgcggagcttaactccgtaaagcattggaaactgtacggcttgaggacaggagaggaaagtggaattccacgtgtagcggtgaaatgcgtagatatgtggaggaacaccagtggcgaaggcgactttctggactgtaactgacgctgaggcgcgaaagcgtggggagcgaacaggattagataccctggtagtccacgccgtaaacgatgagtgctaggtgtagagggtatcgaccccttctgtgccgcagttaacacaataagcactccgcctggggagtacggccgcaaggttgaaactcaaaggaattgacgggggcccgcacaagcggtggagcatgtggtttaattcgacgcaacgcgaagaaccttaccaaggcttgacatctacagaatcccgaagagattcgggagtgcctttcggggaactgtaagacaggtggtgcatggttgtcgtcagctcgtgtcgtgagatgttgggttaagtcccgcaacgagcgcaacccctatatttagttactaacaggtaaagctgaggactctagatagactgccggtgacaaaccggaggaaggtggggatgacgtcaaatcatcatgccccttatgtcttgggctacacacgtgctacaatgggcggtacagacggaagcgaagccgagaggtggagcaaatccgagaaagccgttcgtagttcggattgatctctgcaactcgagatcatgaagtcggaatcgctagtaatcgcaggtcagcacactgcggtgaatacgttcccgggccttgtacacaccgcccgtcacaccacgaaagtttgcaacacccgaagccggtgaggtaacctaagggagccagccgtcgaaggtggggcagatgattggggtg

SEQ ID NO: 3318 - DNA, 1528 bp, Syntrophomonas zehnderi
gacgaacgctggcggcgtgcctaacacatgcaagtcgaacggactaatgtttgacactgagtgttttaagaaggatcaagaagagtcaagacccgaagcgggggagaacattcagagttgaacattagttagtggcggacgggtgagtaacgcgtgggtaatctgcctaagagtggggaataacagttggaaacgactgctaataccgcataaactgctaacgcagcaaagatggcctcttaacaatgctgtcgcttttagatgagcccgcgtctgattagctagttggtggggtaaaggcctaccaaggcaacgatcagtagccggcctgagagggtgaacggccacactgggactgagacacggcccagactcctacgggaggcagcagtggggaatattgcgcaatgggggaaaccctgacgcagcgacgccgcgtgagcgaagaaggccttagggttgtaaagctctgttttaagggacgaatgttcgcgtcagtaatatgggcgtgaaatgacggtaccttaagaggaagccccggctaactacgtgccagcagccgcggtaagacgtagggggcgagcgttgtccggaattactgggcgtaaagagcacgtaggcgggactttaagtcaggtgtgaaagaccggggctcaacctcggggttgcacttgaaactggagttcttgagggcaggagaggaaagcagaattcctggtgtagcggtgaaatgcgtagaaatcaggaggaataccagtggcgaaggcggctttctggactgaccctgacgctgaggtgcgaaagcgtgggtagcaaacaggattagataccctggtagtccacgccgtaaacgatggatactaggtgtaggaggtatcgaccccttctgtgccgcagctaacgcaataagtatcccgcctggggagtacggtcgcaaggctgaaactcaaaggaattgacgggggcccgcacaagcggtggagcatgtggtttaattcgatgcaacgcgaagaaccttaccaggtcttgacatctggcgaatcctgtagaaatacgggagtgccttttaggagcgccaagacaggtggtgcatggttgtcgtcagctcgtgtcgtgagatgttgggttaagtcccgcaacgagcgcaacccctgctattagttgctaacattaagctgagcactctaatgggactgcctgtgacaagcaggaggaaggtggggacgacgtcaaatcatcatgccctttatgatctgggctacacacgtgctacaatgggtggtacagagagcagcgagaccgtgaggtggagcgaatctcaaaaagccattctcagttcggattgaagtctgcaactcgacttcatgaagtcggaatcgctagtaatcgcgaatcagcatgtcgcggtgaatgcgttcccgggccttgtacacaccgcccgtcacaccacgaaagtcggcaacacccgaagccagtgagctaactgaacggaagtcagaggtcagaagtaagaagtcagagattagtg

SEQ ID NO: 3319 - DNA, 1482 bp, Syntrophorhabdus aromaticivorans
aacgaacgctggcggcgtgcctaacacatgcaagtcgagcgagaaagtcccttcgggggcgagtagagcggcggacgggtgagtaatacgtgggtaatctaccctcgagcctggaataactccgcgaaagcggggctaataccggataagaccacacgacacatgtcgcggggtagaaggtggcttgtattcgtacatgctatcacttgaggatgagcccatggcctatcagcttgttggtgaggtaagagcttaccaaggctatgacgggtagctggtctgagaggacgactagccacactgggactgagacacggcccagactcctacgggaggcagcagtggggaatattgggcaatgggcgaaagcctgacccagcgacgccgcgtgggcgatgaaggccttcgggttgtaaagccctttcgtgcggaaagaatagtcccgtggtgaatatccgcgggatttgacggtaccgcaggaagaagcaccggctaactccgtgccagcagccgcggtaatacggagggtgcaagcgttgttcggaattattgggcgtaaagggcgcgtaggcggttgtgatagtcagatgtgaaatcctccggcttaactggagaactgcatctgaaacttcatagctagagtacaggagagggaaacggaattcccggtgtagaggtgaaattcgtagatatcgggaggaacaccagtggcgaaggcggtttcctggcctgatactgacgctgaggcgcgaaagcgtggggagcaaacaggattagataccctggtagtccacgcggtaaacggtgaacactaggtgtgggaggtgtaataccttctgtgccgaagctaacgcgttaagtgttccgcctgggaagtacggccgcaaggttgaaactcaaaggaattgacgggggcccgcacaagcggtggagcatgtggtttaattcgacgcaacgcgaaaaaccttacctgggcttgacatgccgagaacccggtggaaacatcggggtgccccgtaaggggaacttggacacaggtgctgcatggctgtcgtcagctcgtgccgtgaggtgttgggttaagtcccgcaacgagcgcaaccctcatccttagttgccatcattaagttgggcaccctaaggaaactgccgcagttaatgcggaggaaggtggggatgacgtcaagtcctcatggcccttatacccagggctacacacgtgctacaatggacggtacaaagggtcgcgaacctgcgagggggagctaatcccacaaaaccgttctcagttcggattggagtctgcaacccgactccatgaagctggaatcgctagtaatcgcggatcagcatgccgcggtgaatacgttcccgggccttgtacacaccgcccgtcacaccacgaaagcttgttgtaccagaagtcgttgggctaactcgcaagagaggcagacgccgaaggtatggcaggtaattggggtg

SEQ ID NO: 3320 - DNA, 1691 bp, Syntrophothermus lipocalidus
agagtttgatcctggctcaggacgaacgctggcggcgtgcctaacacatgcaagtcgagcggtccggcactcagcacagtgctcattcgggggatgtaggaagtagagggagaggcgattggagcaggtaattaggggatgagtgagcagtgagctgagtgccggatagcggcggacgggtgagtaacgcgtgggtaatctacccataagagggggataacactgggaaaccggtgctaataccgcataagctattcggtatgcatgtactggatagtaaaggtggcctctggagcaagctaccgcttatggatgagcccgcgtctgattagctagttggtggggtaacggcctaccaaggcgacgatcagtagccggcctgagagggtggacggccacactgggactgagacacggcccagactcctacgggaggcagcagtggggaatattgcgcaatggggggaaccctgacgcagcgacgccgcgtgagcgacgaaggccttcgggttgtaaagctcttttattagggacgaaatcccgcatgcgaatagtgtgtggggatgacggtacctaatgaataagccccggctaactacgtgccagcagccgcggtaagacgtagggggcgagcgttgtccggaattactgggcgtaaagagcgtgtaggcgggctgttaagtcaggtgtgaaataccgcagctcaactgcggggtggcatctgatactggcagtcttgagggcaggagagggaagtggaattcctggtgtagcggtgaaatgcgtagatatcaggaggaacaccagtggcgaaggcggcttcctggactggccctgacgctgagacgcgaaagcgtggggagcaaacaggattagataccctggtagtccacgctgtaaacgatgggcactaggtgtaggaggtatcgaccccttctgtgccgcagctaacgcaataagtgccccgcctggggagtacggtcgcaaggctgaaactcaaaggaattgacgggggcccgcacaagcggtggagcatgtggtttaattcgatgcaacgcgaagaaccttaccagggcttgacatcctgcggacctggtggaaacactggggtgccttagggaaacttaaggaacgcagagacaggtggtgcatggttgtcgtcagctcgtgtcgtgagatgttgggttaagtcccgcaacgagcgcaacccttgctgttagttgctaacgggtgaagccgagcactctaacgggactgccggtgacaagccggaggaaggtggggatgacgtcaaatcatcatgccctttatgccctgggctacacacgtgctacaatggccggtacagagagaagcgaagccgcgaggtggagcaaatctcaaaagccggtctcagttcggattgcaggctgcaactcgcctgcatgaagtcggaatcgctagtaatcgcgaatcagaacgtcgcggtgaatgcgttcccgggccttgtacacaccgcccgtcacaccacgaaagctggcaacacccgaagccggtgagccaacccggcactcaagtggtgggaaaagactttaggagatggttgctgaaggacagaggaagcatcttcggagcgagttctcgccagttgagtgccgggaggcagccgtcgaaggtggggctggtgattggggtgaagtcgtaacaaggta

SEQ ID NO: 3321 - DNA, 1486 bp, Syntrophus aciditrophicus
aacgaacgctggcggcgtgcctaacacatgcaagtcgtacgagaaaatccgtttcggcggatgagtaaagtggcgcacgggtgagtaacgcgtggataatctgcctttaagctgggaataactcatcgaaaggtgggctaatacccgataatgctatgcagctaaggttgtatagtcaaagagagcctctgcttgcaagccctcacttagagatgagtccgcgtaccattagctagttggtagggtaatggcctaccaaggcgatgatggttagctggtctgagaggatgatcagccacactggaactgagacacggtccagactcctacgggaggcagcagtgaggaatattgcgcaatgggggaaaccctgacgcagcaacgccgcgtgagtgaggaaggttttcggatcgtaaagctctgtcgggtgggaagaaatgtatggaggttaatagcctttgtacttgacggtaccgccaaaggaagcaccggctaactccgtgccagcagccgcggtaatacggggggtgcaagcgttgttcggaatcattgggcgtaaagagcgtgtaggcggctgagcaagtcagatgtgaaatccctgggcttaacccaggaagtgcatttgaaactgttcagcttgagtaaggaagagggaagtggaattcctggtgtagaggtgaaattcgtagatatcaggaggaacaccggtggcgaaggcgacttcctggtcctatactgacgctgagacgcgagagcgtggggagcaaacaggattagataccctggtagtccacgccgtaaacgatgttcactaggtgttgagggtattgaccccttcagtgccgaagctaacgcattaagtgaaccgcctggggagtacggtcgcaagattaaaactcaaaggaattgacgggggcccgcacaagcggtggagcatgtggtttaattcgatgcaacgcgaagaaccttacctgggcttgacatcccgggaatcttctggaaacaggagagtgcccttcggggaacccggagacaggtgctgcatggctgtcgtcagctcgtgtcgtgagatgttgggttaagtcccgcaacgagcgcaacccttgtctttaattgccatcattcagttgggcactttaaagagactgccggcgttaaaccggaggaaggtggggatgacgtcaagtcctcatggcctttatgcccagggctacacacgtgctacaatgggtggtacaaagagcagccaactcgcgagagtgagcaaatctcaaaaagccatcctcagttcggattggagtctgcaactcgactccatgaagtcggaatcgctagtaatcgcggatcagcatgccgcggtgaatacgttcccgggccttgtacacaccgcccgtcacacccggaaaattgattgcaccagaagtcgttgagctaacccctattttagaggaggcaggcgcctacggtgtggttggtaatcggggtg

SEQ ID NO: 3322 - DNA, 1487 bp, Syntrophus gentianae
aacgaacgctggcggcgtgcctaacacatgcaagtcgtacgagaaaatccgcttcggcgggtgagtagagtggcgcacgggtgcgtaacgcgtggataatctgcctttaagttgggaataactcaccgaaaggtgggctaatacccgataatgctatattacttcggttgtatagccaaagagagcctctgcttgcaagccctcacttagagatgagtccgcgtaccattagctagttggtagggtaatggcctaccaaggcgacgatggttagctggtctgagaggatgatcagccacactggaactgagacacggtccagactcctacgggaggcagcagtgaggaatattgcgcaatgggggcaaccctgacgcagcaacgccgcgtgagtgaggaaggttttcggatcgtaaagctctgtcgggtgggaagaaatgtattgaggttaatagcctttgtacttgacggtaccgccaaaggaagcaccggctaactccgtgccagcagccgcggtaatacggggggtgcaagcgttgttcggaatcattgggcgtaaagagcgtgtaggcggctaggcaagtcagatgtgaaatccctgggcttaacccaggacgtgcatttgaaactgcttggcttgagtaaggaagagggaagtggaattcctggtgtagaggtgaaattcgtagatatcaggaggaacaccggtggcgaaggcgacttcctggtcctatactgacgctgagacgcgagagcgtggggagcaaacaggattagataccctggtagtccacgccgtaaacgatgttcactaggtgttgagggtattgaccccttcagtgccgaagctaacgcattaagtgaaccgcctggggagtacggtcgcaagattaaaactcaaaggaattgacgggggcccgcacaagcggtggagcatgtggtttaattcgatgcaacgcgaagaaccttacctgggcttgacatcccgagaatctcctggaaacaggggagtgcctttcggggaactcggagacaggtgctgcatggctgtcgtcagctcgtgtcgtgagatgttgggttaagtcccgcaacgagcgcaacccttgtctttaattgccatcattcagttgggcactttaaagagactgccggcgttaaaccggaggaaggtggggatgacgtcaagtcctcatggcctttatgtccagggctacacacgtgctacaatgggtggtacaaagagcagccaactcgcgagagtgagcaaatctcaaaaagccatcctcagttcggattggagtctgcaactcgactccatgaagtcggaatcgctagtaatcgcggatcagcatgccgcggtgaatacgttcccgggccttgtacacaccgcccgtcacacccggaaaattgattgcaccagaagtcgttgagctaacccctatttatagaggaggcaggcgcctacggtgtggttggtaatcggggtg

SEQ ID NO: 3323 - DNA, 1459 bp, Tahibacter aquaticus
  misc_feature (415)..(415): n is a, c, g, or t
gtgaacggctggcggcaggcctaacacatgcaagtcgagcggccagcgcggggcaacctggcggcgagcggcggacgggtgaggaatgcatcggaatctaccctgtcgtgggggataacgtagggaaacttacgctaataccgcatacgaccgagaggtgaaagtgggggaccgcaaggcctcacgcgattggatgagccgatgccggattagctagttggaggggtaaaggcccaccaaggcgacgatccgtagctggtctgagaggatgatcagccacattgggactgagacacggcccaaactcctacgggaggcagcagtggggaatattggacaatgggcgcaagcctgatccagccatgccgcgtgtgtgaagaaggccttcgggttgtaaagcacttttgttcgggangaaatcgtgcggattaatactctgtacggatgacggtaccgaaagaataagcaccggctaacttcgtgccagcagccgcggtaatacgaagggtgcaagcgttactcggaatcactgggcgtaaagcgtgcgtaggcggttcgttaagtctgctgtgaaagccctgggctcaacctgggaactgcagtggatactggcggactagagtgtgatagaggatggtggaattcccggtgtagcggtgaaatgcgtagagatcgggaggaacaccagtggcgaaggcggccatctggatcaacactgacgctgaggcacgaaagcgtggggagcaaacaggattagataccctggtagtccacgccctaaacgatgcgaactggacgttggttgcaacttggcaatcagtgtcgaagctaacgcgttaagttcgccgcctggggagtacggtcgcaagactgaaactccaaggattgacgggggcccgcacaagcggtggagtatgtggtttaattcgatgcaacgcgaagaaccttacctggccttgacatccagtgaactttccagagatggattggtgccttcgggaacactgagacaggtgctgcatggctgtcgtcagctcgtgtcgtgagatgttgggttaagtcccgcaacgagcgcaacccttgtccttagttgccagcacgtaaaggtgggaactctaaggagactgccggtgacaaaccggaggaaggtggggatgacgtcaagtcatcatggcccttacggccagggctacacacgtactacaatggtcggtacagagggttgcaataccgcgaggtggagccaatcccagaaaaccgatcccagtccggatcggagtctgcaactcgactccgtgaagtcggaatcgctagtaatcgcggatcagctatgccgcggtgaatacgttcccgggccttgtacacaccgcccgtcacaccatgggagttggttgctccagaagtaggtagtctaaccgcaggggggacgcttaccacggaatggtcaatgactggggtg

SEQ ID NO: 3324 - DNA, 1462 bp, Tamilnaduibacter salinus
attgaacgctggcggcaggcctaacacatgcaagtcgagcggaaacgatgggagcttgctcccaggcgtcgagcggcggacgggtgagtaatgcataggaatctgcccggtagtgggggatagcccggggaaacccggattaataccgcatacgccctttgggggaaagcaggggatcttcggaccttgcgctatcggatgagcctatgtcggattagttagttggtggggtaatggcctaccaaggcgacgatccgtagctggtctgagaggatgatcagccacatcgggactgagacacggcccgaactcctacgggaggcagcagtggggaatattggacaatgggggcaaccctgatccagccatgccgcgtgtgtgaagaaggctttcgggttgtaaagcactttcagcagggaggaaagcttgtcggttaatacccggcaagggcgacgttacctgcagaagaagcaccggctaactccgtgccagcagccgcggtaatacggagggtgcaagcgttaatcggaattactgggcgtaaagcgcgcgtaggcggttggataagcgagatgtgaaagccctgggcttaacctgggaatggcatttcgaactgtctggctagagtgtggtagagggtagtggaatttccagtgtagcggtgaaatgcgtagatattggaaagaacaccagtggcgaaggcggctacctggaccaacactgacgctgaggcgcgaaagcgtggggagcaaacaggattagataccctggtagtccacgccgtaaacgctgtcgaccagccgttggggatgttagatccttagtggcgcagttaacgcactaagtcgaccgcctggggagtacggccgcaaggttaaaactcaaatgaattgacgggggcccgcacaagcggtggagcatgtggtttaattcgacgcaacgcgaagaaccttacctggccttgacatcctgcgaacttggtagagataccttggtgccttcgggagcgcagtgacaggtgctgcatggccgtcgtcagctcgtgtcgtgagatgttgggttaagtcccgtaacgagcgcaacccttatccttagttgccagcggtccggccgggaactctagggagactgccggtgacaaaccggaggaaggtggggatgacgtcaggtcatcatggcccttacggccagggctacacacgtgctacaatggtgcgtacaacaggctgctaacccgcgagggggcgccaatcctgcaaagcgcatcgtagtccggatcggagtctgcaactcgactccgtgaagtcggaatcgctagtaatcgcagatcagaatgctgcggtgaatacgttcccgggccttgtacacaccgcccgtcacaccatgggagtggattgcaccagaagtggttagtctaaccttcggggggacgatcactacggtgtggttcatgactggggtg

SEQ ID NO: 3325 - DNA, 1411 bp, Tanticharoenia sakaeratensis
agcgaacgctggcggcatgcttaacacatgcaagtcgcacggacctttcggggttagtggcggacgggtgagtaacgcgtaggtatctatccatgggtgggggacaactctgggaaactggagctaataccgcatgacacctgagggtcaaaggcgcaagtcgcctgtggaggagcctgcgttcgattagcttgttggtggggtaatggcctaccaaggcgatgatcgatagctggtctgagaggatgatcagccacactgggactgagacacggcccagactcctacgggaggcagcagtggggaatattggacaatgggcgcaagcctgatccagcaatgccgcgtgtgtgaagaaggtcttcggattgtaaagcactttcgacggggacgatgatgacggtacccgtagaagaagccccggctaacttcgtgccagcagccgcggtaatacgaagggggctagcgttgctcggaatgactgggcgtaaagggcgcgtaggcggttgttacagtcagatgtgaaatcccagggcttaaccttggagctgcatttgatacgtgacgactagagttcgagagagggttgtggaattcccagtgtagaggtgaaattcgtagatattgggaagaacaccggtggcgaaggcggcaacctggctcgatactgacgctgaggcgcgaaagcgtggggagcaaacaggattagataccctggtagtccacgctgtaaacgatgtgtgctggatgttggggtgcttagcacttcagtgtcgtagttaacgcgataagcacaccgcctggggagtacggccgcaaggttgaaactcaaaggaattgacgggggcccgcacaagcggtggagcatgtggtttaattcgaagcaacgcgcagaaccttaccagggcttgacatggggaggtcgtgtccagagatgggcatttcccgcaagggacctcctgcacaggtgctgcatggctgtcgtcagctcgtgtcgtgagatgttgggttaagtcccgcaacgagcgcaaccctcgcctttagttgccagcatgtttgggtgggcactctagaggaactgccggtgacaagccggaggaaggtggggatgacgtcaagtcctcatggcccttatgtcctgggctacacacgtgctacaatggcggtgacagtgggaagctatgtggtgacacaatgctgatctctaaaagccgtctcagttcggattgcactctgcaactcgagtgcatgaaggtggaatcgctagtaatcgcggatcagcatgccgcggtgaatacgttcccgggccttgtacacaccgcccgtcacaccatgggagttggttcgaccttaagccggtgagcgaaccgcaaggacgcagccgaccacggtcgggtcagcgactggggtg

SEQ ID NO: 3326 - DNA, 1409 bp, Tardiphaga robiniae
agcgaacgctggcggcaggcttaacacatgcaagtcgaacgggcgtagcaatacgtcagtggcagacgggtgagtaacgcgtgggaacatacctcttggttcggaacaacacagggaaacttgtgctaataccggataagcccttacggggaaagatttatcgccgagagattggcccgcgtctgattagctagttggtggggtaaaggcctaccaaggcgacgatcagtagctggtctgagaggatgatcagccacattgggactgagacacggcccaaactcctacgggaggcagcagtggggaatattggacaatgggcgcaagcctgatccagccatgccgcgtgagtgatgaaggccctagggttgtaaagctcttttgtacgggaagataatgacggtaccgtaagaataagccccggctaacttcgtgccagcagccgcggtaatacgaagggggctagcgttgctcggaatcactgggcgtaaagggtgcgtaggcgggtttttaagtcagaggtgaaatcctggagctcaactccagaactgcctttgatactgaaagtcttgagtatgggagaggtgagtggaactgcgagtgtagaggtgaaattcgtagatattcgcaagaacaccagtggcgaaggcggctcactggcccataactgacgctgaggcacgaaagcgtggggagcaaacaggattagataccctggtagtccacgccgtaaacgatgaatgccagccgttagtgggtttactcactagtggcgcagctaacgctttaagcattccgcctggggagtacggtcgcaagattaaaactcaaaggaattgacgggggcccgcacaagcggtggagcatgtggtttaattcgacgcaacgcgcagaaccttaccagcccttgacatgtctatgaccggtaccagagatggaactttcccttcggggcatagagcacaggtgctgcatggctgtcgtcagctcgtgtcgtgagatgttgggttaagtcccgcaacgagcgcaacccccgtccttagttgctaccatttagttgagcactctaaggagactgccggtgataagccgcgaggaaggtggggatgacgtcaagtcctcatggcccttacgggctgggctacacacgtgctacaatggcggtgacaatgggatgcaaaagggcgacctctcgcaaatctcaaaaagccgtctcagttcggattgggctctgcaactcgagcccatgaagttggaatcgctagtaatcgtggatcagcatgccacggtgaatacgttcccgggccttgtacacaccgcccgtcacaccatgggagttggttctacctgaaggcagtgcgctaaccgcaagggggcagctgaccacggtagggtcagcgactggggtg

SEQ ID NO: 3327 - DNA, 1474 bp, Tatlockia micdadei
  misc_feature (5)..(5): n is a, c, g, or t
  misc_feature (12)..(14): n is a, c, g, or t
  misc_feature (29)..(30): n is a, c, g, or t
  misc_feature (37)..(37): n is a, c, g, or t
  misc_feature (48)..(48): n is a, c, g, or t
  misc_feature (80)..(80): n is a, c, g, or t
  misc_feature (82)..(88): n is a, c, g, or t
  misc_feature (117)..(117): n is a, c, g, or t
  misc_feature (130)..(130): n is a, c, g, or t
  misc_feature (136)..(137): n is a, c, g, or t
  misc_feature (163)..(163): n is a, c, g, or t
  misc_feature (169)..(169): n is a, c, g, or t
  misc_feature (176)..(176): n is a, c, g, or t
  misc_feature (179)..(179): n is a, c, g, or t
  misc_feature (222)..(224): n is a, c, g, or t
  misc_feature (229)..(229): n is a, c, g, or t
  misc_feature (249)..(249): n is a, c, g, or t
  misc_feature (304)..(304): n is a, c, g, or t
  misc_feature (335)..(335): n is a, c, g, or t
  misc_feature (387)..(387): n is a, c, g, or t
  misc_feature (420)..(420): n is a, c, g, or t
  misc_feature (426)..(426): n is a, c, g, or t
  misc_feature (452)..(452): n is a, c, g, or t
  misc_feature (454)..(454): n is a, c, g, or t
  misc_feature (479)..(479): n is a, c, g, or t
  misc_feature (508)..(508): n is a, c, g, or t
  misc_feature (552)..(552): n is a, c, g, or t
  misc_feature (571)..(571): n is a, c, g, or t
  misc_feature (589)..(591): n is a, c, g, or t
  misc_feature (598)..(598): n is a, c, g, or t
  misc_feature (625)..(625): n is a, c, g, or t
  misc_feature (652)..(653): n is a, c, g, or t
  misc_feature (828)..(828): n is a, c, g, or t
  misc_feature (886)..(886): n is a, c, g, or t
  misc_feature (906)..(906): n is a, c, g, or t
  misc_feature (945)..(945): n is a, c, g, or t
  misc_feature (957)..(959): n is a, c, g, or t
  misc_feature (983)..(983): n is a, c, g, or t
  misc_feature (993)..(993): n is a, c, g, or t
  misc_feature (1042)..(1042): n is a, c, g, or t
  misc_feature (1092)..(1092): n is a, c, g, or t
  misc_feature (1117)..(1117): n is a, c, g, or t
  misc_feature (1120)..(1120): n is a, c, g, or t
  misc_feature (1144)..(1144): n is a, c, g, or t
  misc_feature (1213)..(1213): n is a, c, g, or t
  misc_feature (1276)..(1276): n is a, c, g, or t
  misc_feature (1287)..(1287): n is a, c, g, or t
  misc_feature (1296)..(1296): n is a, c, g, or t
  misc_feature (1302)..(1302): n is a, c, g, or t
  misc_feature (1330)..(1330): n is a, c, g, or t
aactnaagagtnnnatcctggctcagatnnaacgctngcggcatgctnaacacatgcaagtcgaacggcagcacggtctngnnnnnnnatgggtgacgagtggcgaacgggtgagtnacgcgtaggaatntgcctnnaagtgtgggataacttggggaaactnaagctnataccgnatnagctctaaggaggaaagctggggaccgcgaggcctgcgcgctnnnagatnagcctgcgtccgattagctngttggtgggggaagggcctaccaaggcgacgatcggtagctggtctgagaggatnatcagccacactgggactgagacacggcccngtctcctacgggaggcagcagtggggaatattggacaatggggggaaccctnatccagcaatgccgcgtgtgtgaagaaggcctnagggtngtaaagcactttcagtggggaggagngntgataggttaagagctaattatctngacgttacccacagaagaagcaccggctnactccgtgccagcagccgcggtaatacggagggtgcgagcgttnatcggaattactgggcgtnaagggtgcgtaggtggtnnnataagtnatctgtgaaattcctgggctcaacctngggtggtcagataagactgtgagactnngagtataggagagggtagtggaatttccggtgtagcggtgaaatgcgtagagatcggaaggaacaccagtggcgaaggcggctacctggcctaatactgacactgaggcacgaaagcgtggggagcaaacaggattagataccctggtagtccacgctgtaaacgatgtcaactngttgttggccttatgaatgaggttagtgacgaagcaaacgcgataagttgaccgcctngggagtacggtcgcaagatnaaaactcaaaggaattgacgggggcccgcacaagcggtngagcatgtggtnnnattcgatgcaacgcgaagaacctnacctaccctngacatacagtgaattctgcagagatgtggaagtgccgcgaggagcactnatacaggtgctgcatggctgtcgtcagctcgtgtcgtgagatgttgggtnaagtcccgtaacgagcgcaaccctngtncttagttgccagcgcgtagatggnggggactctaaggagactgccggtgacaaaccggaggaaggcggggatgacgtcaagtcatcatggccnttacgggtagggctacacacgtgctacaatggccggtacagagggcggcgaaggggagacctngagcaaatctntgaaagctngtcgtngtccggattgaagtctgcaactcgactncatgaagtcggaatcgctagtaatcgcgaatcagcatgtcgcggtgaatacgttcccgggccttgtacacaccgcccgtcacaccatgggagtgggttgcaccagaagtagatagtctaaccaatgggggacgtataccacggt

SEQ ID NO: 3328 - DNA, 1464 bp, Tatumella citrea
attgaacgctggcggcaggcctaacacatgcaagtcgaacggtagcacagaggagcttgctccttgggtgacgagtggcggacgggtgagtaatgtctgggaaactgcctgatggagggggataactactggaaacggtagctaataccgcataacgtcgcaagaccaaagtgggggaccttcgggcctcacaccatcggatgtgcccagatgggattagctagtaggtggggtaacggctcacctaggcgacgatccctagctggtctgagaggatgaccagccacactggaactgagacacggtccagactcctacgggaggcagcagtggggaatattgcacaatgggcgcaagcctgatgcagccatgccgcgtgtatgaagaaggccttcgggttgtaaagtactttcagtcaggaggaagggtgtagtcttaatacggctatgcattgacgttactgacagaagaagcaccggctaactccgtgccagcagccgcggtaatacggagggtgcaagcgttaatcggaattactgggcgtaaagcgcacgcaggcggtctgtcaagtcggatgtgaaatccccgggctcaacccgggaactgcattcgaaactggcaggctagagtcttgtagaggggggtagaattccaggtgtagcggtgaaatgcgtagagatctggaggaataccggtggcgaaggcggccccctggacaaagactgacgctcaggtgcgaaagcgtggggagcaaacaggattagataccctggtagtccacgccgtaaacgatgtcgacttggaggttgtgcccttgaggcgtggcttccggagctaacgcgttaagtcgaccgcctggggagtacggccgcaaggttaaaactcaaatgaattgacgggggcccgcacaagcggtggagcatgtggtttaattcgatgcaacgcgaagaaccttacctactcttgacatccagagaacttagcagagatgctttggtgccttcgggaactctgagacaggtgctgcatggctgtcgtcagctcgtgttgtgaaatgttgggttaagtcccgcaacgagcgcaacccctatcctttgttgccagcgattcggtcgggaactcaaaggagactgccggtgataaaccggaggaaggtggggatgacgtcaagtcatcatggcccttacgagtagggctacacacgtgctacaatggcgcatacaaagagaagcgacctcgcgagagcaagcggacctcataaagtgcgtcgtagtccggattggagtctgcaactcgactccatgaagtcggaatcgctagtaatcgtagatcagaatgctacggtgaatacgttcccgggccttgtacacaccgcccgtcacaccatgggagtgggttgcaaaagaagtagatagcttaaccttcgggagggcgtttaccactttgtgattcatgactggggtg

SEQ ID NO: 3329 - DNA, 1462 bp, Tatumella morbirosei
attgaacgctggcggcaggcctaacacatgcaagtcgaacggcagcacagagagcttgctctcgggtggcgagtggcggacgggtgagtaatgtctgggaaactgcctgatggagggggataactactggaaacggtagctaataccgcataatgtcgcaagaccaaagtgggggaccttcgggcctcacaccatcggatgtgcccagatgggattagctagcaggtagggtaacggcctacctgggcgacgatccctagctggtctgagaggatgaccagccacactggaactgagacacggtccagactcctacgggaggcagcagtggggaatattgcacaatgggcgcaagcctgatgcagccatgccgcgtgtatgaagaaggccttcgggttgtaaagtactttcagcgaggaggaaggcattgcggttaataaccgcagtgattgacgttactcgcagaagaagcaccggctaactccgtgccagcagccgcggtaatacggagggtgcaagcgttaatcggaattactgggcgtaaagcgcacgcaggcggtctgtcaagtcggatgtgaaatccccgggctcaacccgggaactgcattcgaaactggcagactagagtcttgtagaggggggtagaattccaggtgtagcggtgaaatgcgtagagatctggaggaataccggtggcgaaggcggccccctggacaaagactgacgctcaggtgcgaaagcgtggggagcaaacaggattagataccctggtagtccacgccgtaaacgatgtcgacttggaggttgtgcccttgaggcgtggcttccggagctaacgcgttaagtcgaccgcctggggagtacggccgcaaggttaaaactcaaatgaattgacgggggcccgcacaagcggtggagcatgtggtttaattcgatgcaacgcgaagaaccttacctactcttgacatccagagaacttggcagagatgccctggtgccttcgggaactctgagacaggtgctgcatggctgtcgtcagctcgtgttgtgaaatgttgggttaagtcccgcaacgagcgcaacccctatcctttgttgccagcgattcggtcgggaactcaaaggagactgccggtgataaaccggaggaaggtggggatgacgtcaagtcatcatggcccttacgagtagggctacacacgtgctacaatggcgcatacaaagagaagcgacctcgcgagagcaagcggacctcataaagtgcgtcgtagtccggatcggagtctgcaactcgactccgtgaagtcggaatcgctagtaatcgtagatcagaatgctacggtgaatacgttcccgggccttgtacacaccgcccgtcacaccatgggagtgggttgcaaaagaagtagatagcttaaccttcgggagggcgtttaccactttgtgattcatgactggggtg

SEQ ID NO: 3330 - DNA, 1463 bp, Tatumella ptyseos
attgaacgctggcggcaggcctaacacatgcaagtcgaacggtagcacagaggagcttgctccttgggtgacgagtggcggacgggtgagtaatgtctgggaaactgcctgatggagggggataactactggaaacggtagctaataccgcataatgtcgcaagaccaaagcgggggaccttcgggcctcgcaccatcggatgtgcccagatgggattagcttgtaggtgaggtaatggctcacctaggcgacgatccctagctggtctgagaggatgaccagccacactggaactgagacacggtccagactcctacgggaggcagcagtggggaatattgcacaatgggcgcaagcctgatgcagccatgccgcgtgtatgaagaaggccttcgggttgtaaagtactttcagcggggaggaaggcagtcgtgttaatagcacgattgattgacgttacccgcagaagaagcaccggctaactccgtgccagcagccgcggtaatacggagggtgcaagcgttaatcggaattactgggcgtaaagcgcacgcaggcggtctgtcaagtcggatgtgaaatccccgggctcaacccgggaactgcattcgaaactggcagactagagtcttgtagaggggggtagaattccaggtgtagcggtgaaatgcgtagagatctggaggaataccggtggcgaaggcggccccctggacaaagactgacgctcaggtgcgaaagcgtggggagcaaacaggattagataccctggtagtccacgccgtaaacgatgtcgacttggaggctgttcccttgaggagtggcttccggagctaacgcgttaagtcgaccgcctggggagtacggccgcaaggttaaaactcaaatgaattgacgggggcccgcacaagcggtggagcatgtggtttaattcgatgcaacgcgaagaaccttacctactcttgacatccagagaacttccagagatggattggtgccttcgggaactctgagacaggtgctgcatggctgtcgtcagctcgtgttgtgaaatgttgggttaagtcccgcaacgagcgcaacccctatcctttgttgccagcgattcggtcgggaactcaaaggagactgccggtgataaaccggaggaaggtggggatgacgtcaagtcatcatggcccttacgagtagggctacacacgtgctacaatggcgcatacaaagagaagcgacctcgcgagagcaagcggacctcataaagtgcgtcgtagtccggattggagtctgcaactcgactccatgaagtcggaatcgctagtaatcgtagatcagaatgctacggtgaatacgttcccgggccttgtacacaccgcccgtcacaccatgggagtgggttgcaaaagaagtagatagcttaaccttcgggagggcgtttaccactttgtgattcatgactggggtg

SEQ ID NO: 3331 - DNA, 1465 bp, Taylorella asinigenitalis
attgaacgctagcggaatgccttacacatgcaagtcgaacggcagcatagggaagcttgctttcctgatggcgagtggcgaacgggtgagtaaagtatcggaacgtgcccagtagcgggggataactacgcgaaagcgtagctaataccgcatacgccctgagggggaaagagggggatcagcgatgaccttttactattggagcggccgatatcggattagttagttggtggggtaaaggcctaccaaggcatcgatccgtagctggtttgagaggacgaccagccacactgggactgagacacggcccagactcctacgggaggcagcagtggggaattttggacaatgggggcaaccctgatccagccattccgcgtgtgcgatgaaggccttcgggttgtaaagcacttttgtcagggaagaaaagttttaggataataccctaggatgctgacggtacctgaagaataagcaccggcaaactacgtgccagcagccgcggtaatacgtagggtgcgagcgttaatcggaattactgggcgtaaagcgtgcgcaggcggttcggaaagagagatgtgaaatcccagggctcaaccttggaactgcatttttaactgccgagctagagtatgttagaggggggtagaattccacgtgtagcagtgaaatgcgtagagatgtggaggaataccgatggcgaaggcagccccctgggataatactgacgctcatgcacgaaagcgtggggagcaaacaggattagataccctggtagtccacgccctaaacgatgtcaactagctgttgggaccttaaatggttttggtagcgaagccaacgcgtgaagttgaccgcctggggagtacggtcgcaagattaaaactcaaaggaattgacggggacccgcacaagcggtggatgatgtggattaattcgatgcaacgcgaaaaaccttacctacccttgacatgtttggaatcctgaagagatttaggagtgctcgcaagagaaccgaaacacaggtgctgcatggctgtcgtcagctcgtgtcgtgagatgttgggttaagtcccgcaacgagcgcaacccttgtcattagttgctacgtaaaagggcactctaatgagactgccggtgataaaccggaggaaggtggggatgacgtcaagtcctcatggcccttatgggtagggcttcacacgtcatacaatggtcaggacagagggatgcgaagccgcgaggtggagctaatctcacaaacctggtcgtagtccggattgcaggctgcaactcgcctgcatgaagtcggaatcgctagtaatcgcggatcagcatgtcgcggtgaatacgttcccgggtcttgtacacaccgcccgtcacaccatgggagtgggttttaccagaagtagttagtctaaccgcaaggggggcgattaccacggtaggattcatgactggggtg

SEQ ID NO: 3332 - DNA, 1468 bp, Taylorella equigenitalis
attgaacgctagcggaatgccttacacatgcaagtcgaacggcagcataaggagagcttgcttttcttgatggcgagtggcgaacgggtgagtaaagtatcggaacgtgcccagtagcgggggataactacgcgaaagcgtagctaataccgcatacgccctgagggggaaagagggggatcagagatgaccttttactattggagcggccgatatcggattagctagttggtggggtaaaggcctaccaaggcgacgatccgtagctggtttgagaggacgaccagccacactgggactgagacacggcccagactcctacgggaggcagcagtggggaattttggacaatgggggcaaccctgatccagccattccgcgtgtgcgatgaaggccttcgggttgtaaagcacttttgtcagggaagaaaaggtttgtgttaataccatggactgctgacggtacctgaagaataagcaccggcaaactacgtgccagcagccgcggtaatacgtagggtgcgagcgttaatcggaattactgggcgtaaagcgtgcgcaggcggttcggaaagagagatgtgaaatcccagggctcaaccttggaactgcatttctaactgtcgagctagagtatgttagaggggggtagaattccacgtgtagcagtgaaatgcgtagagatgtggaggaataccgatggcgaaggcagccccctgggataatactgacgctgatgcacgaaagcgtggggagcaaacaggattagataccctggtagtccacgccctaaacgatgtcaactagctgttgggacttacgggtcttggtagcgaagccaacgcgtgaagttgaccgcctggggagtacggtcgcaagattaaaactcaaaggaattgacggggacccgcacaagcggtggatgatgtggattaattcgatgcaacgcgaaaaaccttacctacccttgacatgtttggaatcctgaagagatttaggagtgctcgcaagagaaccgaaacacaggtgctgcatggctgtcgtcagctcgtgtcgtgagatgttgggttaagtcccgcaacgagcgcaacccttgtcattagttgctacaagtaagatgggcactctaatgagactgccggtgataaaccggaggaaggtggggatgacgtcaagtcctcatggcccttatgggtagggcttcacacgtcatacaatggtcaggacagagggaagccaaaccgcgaggtggagctaatctcacaaacctgatcgtagtccggattgcaggctgcaactcgcctgcatgaagtcggaatcgctagtaatcgcggatcagcatgtcgcggtgaatacgttcccgggtcttgtacacaccgcccgtcacaccatgggagtgggttttaccagaagtagttagtctaaccgcaaggagggcgattaccacggtaggattcatgactggggtg

SEQ ID NO: 3333 - DNA, 1324 bp, Telmatospirillum siberiense
aacgaacgctggcggcatgcctaacacatgcaagtcgaacgaaggcttcggccttagtggcgcacgggtgagtaacgcgtgggaatctgcctagcagtggggaataacgatgggaaactgtcgctaataccgcatacgcccttcgggggaaagatttattgctgttagatgagcccgcgtccgattaggtagttggtggggtaaaggcctaccaagccttcgatcggtagctggtctgagaggatgatcagccacactgggactgagacacggcccagactcctacgggaggcagcagtggggaatattggacaatgggggaaaccctgatccagcaatgccgcgtgagtgatgaaggccttagggttgtaaagctctttcgggtgggacgatgatgacggtaccaccagaagaagccccggctaacttcgtgccagcagccgcggtaatacgaagggggctagcgttgttcggaattactgggcgtaaagcgcacgcaggcggctcgttaaattagaagtgaaagccctgggctcaacccgggaattgcttttaagactggcgagcttgaattcggaagagggcagtggaattccaagtgtagaggtgaaattcgtagatatttggaagaacaccagtggcgaaggcgactgcctggtccgatattgacgctcatgtgcgaaagcgtggggagcaaacaggattagataccctggtagtccacgctgtaaacgatgagtgctagttgttggggtgcatgcacctcagtgacgcagctaacgcattaagcactccgcctggggagtacggccgcaaggttaaaactcaaaggaattgacgggggcccgcacaagcggtggagcatgtggtttaattcgaagcaacgcgcagaaccttaccaacctttgacatgggacgtttgatttccagagatggatttcttcagttcggctggcgtccacacaggtgctgcatggctgtcgtcagctcgtgtcgtgagatgttgggttaagtcccgcaacgagcgcaaccctcatctccagttgccatcagttcggctgggcactctgaagaaactgccggtgacaagccggaggaaggtggggatgacgtcaagtcctcatggcccttacaggttgggctacacacgtgctacaatggcggtgacaatgggttgctaacccgcgagggcaagctaatctccaaaagccgtctcagttcggattgcactctgcaactcgagtgcatgaagtcggaatcgctagtaatcgtggatcagcatgccacggtgaatacgttcccgggccttgtacacaccgcccgt

SEQ ID NO: 3334 - DNA, 1377 bp, Tepidibacter formicigenes
  misc_feature (858)..(858): n is a, c, g, or t
gagcttgctctttgattctagcggcggacgggtgagtaacgcgtgggtaacctgccctatacacatggataacataccgaaaggtatgctaatacaagataatactaagataaggcatcttattttagtcaaagcgttagcggtataggatggacccgcgtcccattagctagttggtgaggtaacggctcaccaaggccacgatgggtagccgacctgagagggtgatcggccacactggaactgagacacggtccagactcctacgggaggcagcagtggggaatattgcacaatgggggaaaccctgatgcagcaacgccgcgtgagcgatgaaggccttcgggtcgtaaagctctgtcctaagggaagaatactgacggtaccttaggaggaagccccggctaactacgtgccagcagccgcggtaatacgtagggggctagcgttatccggaattactgggcgtaaagggtgcgtaggcggcccttcaagtcagaggtgaaaggctacggctcaaccgtagtaagcctttgaaactgtagggcttgagtgcaggagaggagagtggaattcccagtgtagcggtgaaatgcgtagatattgggaggaacaccagttgcgaaggcggctctctggactgtaactgacgctgaggcacgaaagcgtggggagcgaacaggattagataccctggtagtccacgcggtaaacgatgagtgctaggtgtcgggggttacccccctcggtgcggcagctaacgcattaagcactctgcctgggaagtacgctcgcaagagtgaaactcaaaggaattgacggggacccgcacaagcagcggagcatgtggtttaattngaagcaacgcgaagaaccttacctaggcttgacatcccttggaccgcttcttaaccgaagctttcccttttgggactgaggtgacaggtggtgcatggttgtcgtcagctcgtgtcgtgagatgttgggttaagtcccgcaacgagcgcaacccttacctttagttgccagcatttaggatgggcactctagagggactgccgaggataactcggaggaaggtggggatgacgtcaaatcatcatgccccttatgcttagggctacacacgtgctacaatggctagtacagagggttgcgaagtcgcgaggccaagctaatcccttaaagctagtctcagttcggattgcaggctgaaactcgcctgcatgaagctggagttgctagtaatcgcgaatcagaatgtcgcggtgaatgcgttcccgggtcttgtacacaccgcccgtcacaccatgggagtcgggggcgccctaagtcgggtatccaaccattaggaggaacccgccgaaggtgaaatcg

SEQ ID NO: 3335 - DNA, 1402 bp, Tepidibacter thalassicus
cgtgcctaacacatgcaagtcgagcgaggagaaaagagcttgctcttggatcctagcggcggacgggtgagtaacgcgtgggtaacctgccctatacacacggataacataccgaaaggtatgctaatacgggataagctaagataaggcatcttatcatagtcaaagcgaaagcggtataggatgggcccgcgtcccattagctagttggtgaggtaaaagctcaccaaggcgacgatgggtagccgacctgagagggtgatcggccacactggaactgagacacggtccagactcctacgggaggcagcagtggggaatattgcacaatgggggaaaccctgatgcagcaacgccgcgtgagcgaagaaggccttcgggtcgtaaagctctgtcctaagggaagaggattgacggtaccttaggaggaagccccggctaactacgtgccagcagccgcggtaatacgtagggggcaagcgttatccggaattactgggcgtaaagggtgcgtaggcggctgtacaagtcagaggtgaaaggctacggctcaaccgtagtaagcctttgaaactgtacggcttgagtgcaggagaggagagtagaattcccagtgtagcggtgaaatgcgtagatattgggaggaataccagttgcgaaggcggctctctggactgtaactgacgctgaggcacgaaagcgtggggagcgaacaggattagataccctggtagtccacgccgtaaacgatgagtgctaggtgtcgggggttaccccctcggtgccgcagctaacgcattaagcactccgcctggggagtacgctcgcaagagtgaaactcaaaggaattgacggggacccgcacaagcagcggagcatgtggtttaattcgaagcaacgcgaagaaccttacctaggcttgacatccctcggaccgcttcttaatagaagctttcccttatgggactgaggagacaggtggtgcatggttgtcgtcagctcgtgtcgtgagatgttgggttaagtcccgcaacgagcgcaacccttacctttagttgccagcacttagggtgggcactctagagggactgccgaggacaactcggaggaaggtggggatgacgtcaaatcatcatgccccttatgcctagggctacacacgtgctacaatggctagtacagagggaagcgaaactgcgaagtggagcaaatcccttaaagctagtctcagttcggattgcaggctgcaactcgcctgcatgaagctggagttgctagtaatcgcgaatcagcatgtcgcggtgaatgcgttcccgggtcttgtacacaccgcccgtcacaccatgggagtcggaggcacccgaagtcgggaaaccaaccgcaaggagggacccgccgaagg

SEQ ID NO: 3336 - DNA, 1386 bp, Tepidicaulis marinus
tgcggaggcttacactgcaagtcgaacgcgaacgcaccttcgggtgttagtagagtggcagacgggtgagtaacgcgtgggaacctacctaggggtacggaataacgcagggaaacttgtgctaataccgtatacgtccttcgggagaaagatttatcgcccctagatgggcccgcgttggattagcttgttggtgaggtaatggctcaccaaggctacgatccatagctggtctgagaggatgatcagccacactgggactgagacacggcccagactcctacgggaggcagcagtggggaatcttgcacaatgggcgaaagcctgatgcagccatgccgcgtgagtgaagaaggccctagggttgtaaaactctttcagtggggaagataatgacggtacccacagaagaagctccggctaactccgtgccagcagccgcggtaatacggagggagctagcgttgttcggaattactgggcgtaaagcgcacgtaggcggactgatcagttgggggtgaaagcccagggctcaaccctggaactgccttcaatactgtcagtcttgagtccgagagaggtgagtggaatttccagtgtagaggtgaaattcgtagatattggaaagaacaccagtggcgaaggcggctcactggctcggtactgacgctgaggtgcgaaagtgtggggagcaaacaggattagataccctggtagtccacaccgtaaacgatggatgctagttgtcgggcagcatgctgttcggtgacgcagctaacgcattaagcatcccgcctggggagtacggtcgcaagattaaaactcaaaggaattgacgggggcccgcacaagcggtggagcatgtggtttaattcgaagcaacgcgcagaaccttaccaacccttgacatcccgatcgcggttaccagagatggtttccttcagctcggctggatcggtgacaggtgttgcatggctgtcgtcagctcgtgtcgtgagatgttgggttaagtcccgcaacgagcgcaaccctcgcctttagttgccagcattaagttgggcactctagagggactgccggtgataagccggaggaaggtggggatgacgtcaagtcctcatggcccttacgggttgggctacacacgtgctacaatggcggcgacagagggcagcgataccgcgaggtggagcaaatccctaaaagccgtctcagttcggattgttctctgcaactcgagagcatgaaggtggaatcgctagtaatcgcagaacagcatgctgcggtgaatacgttcccgggccttgtacacaccgcccgtcacatcatgggagttggctttgcccgaaggcggtgcgctaaccagcaatggaagcagccgaccac

SEQ ID NO: 3337 - DNA, 1402 bp, Tepidiphilus thermophilus
agtcgaacggcagcgggcccttcggggtgccggcgagtggcgaacgggtgagtaatgcatcggaacgtacccgggagagggggataaccggccgaaaggctggctaataccgcatgaactcggaagagcaaagcgggggaccttcgggcctcgcgctctcggagcggccgatgtccgattagctagttggtggggtaaaggcccaccaaggcgacgatcggtagcgggtctgagaggacgatccgccacactgggactgagacacggcccagactcctacgggaggcagcagtggggaatcttggacaatgggcgcaagcctgatccagcaatgccgcgtgggtgaagaaggccttcgggttgtaaagccctttcggtggggaagaaatcggtcaggcgaatagtctggctggatgacggtacccgcagaagaagcaccggctaactacgtgccagcagccgcggtaatacgtagggtgcgagcgttaatcggaattactgggcgtaaagggtgcgcaggcggccctgtaagaccggtgtgaaatccccgggctcaacctgggaattgcgctggtgactgcagggctagagtacggtagaggggggtggaattcctggtgtagcagtgaaatgcgtagagatcagaggaacaccgatggcgaagcagccccctgggcctgtactgacgctcatgcacgaaagcgtggggagcaaacaggattagataccctggtagtgcacgccctaaacgatgagaactagccgtctggagtcttcgtgctctgggtggcgcagctaacgcgtgaagttctccgcctggggagtacggccgcaaggttaaaactcaaaggaattgacggggacccgcacaagcggtggatgatgtggattaattcgatgcaacgcgaagaaccttaccctacccttgacatgccgggaatcctgcccagaggcgggagtgccttcgggaacccggacacaggtgctgcatggctgtcgtcagctcgtgtcgtgagatgttgggttaagtcccgcaacgagcgcaacccctgtcgatagttgccatcatttggttgggcactctatcgagactgccggtgacaaaccggaggaaggtggggatgacgtcaagtcctcatggcccttatgggtagggcttcacacgtcatacaatggtcggtacagagggttgccaagccgcgaggtggagccaatcccagaaagccgatcgtagtccggattgcagtctgcaactcgactgcatgaagtcggaatcgctagtaatcgcggatcagcatgccgcggtgaatacgttcccgggtcttgtacacaccgcccgtcacaccatgggagtggggtgcaccagaagtcggtcgcctaaccgcaaggagggcgccgccca

SEQ ID NO: 3338 - DNA, 1456 bp, Terasakiispira papahanaumokuakeensis
attgaacgctggcggcaggcctaacacatgcaagtcgagcggaaacgatggaagcttgcttccaggcgtcgagcggcggacgggtgagtaatgcataggaatctgcccggtagtgggggataactcggggaaactcgagctaataccgcatacgtcctacgggagaaagtgggcttttgctcacgctatcggatgagcctatgtcagattagctagttggtggggtaaaggctcaccaaggcgacgatctgtagctggtctgagaggatgatcagccacactgggactgagacacggcccagactcctacgggaggcagcagtggggaatattggacaatgggggcaaccctgatccagccatgccgcgtgtgtgaagaaggctttcgggttgtaaagcactttcagcgaggaggaaagcggtgttgttaataccagcatcgtgtgacgttactcgcagaagaagcaccggcaaactccgtgccagcagccgcggtaatacggagggtgcgagcgttaatcggaattactgggcgtaaagcgtgcgtaggtggttaagtaagccagatgtgaaagccccgggcttaacctgggaacggcatctggaactgcttaactagagtgcagtagaggaaggtagaattccacgtgtagcggtgaaatgcgtagatatgtggaggaataccagtggcgaaggcggccttctggactgacactgacactgaggtacgaaagcgtggggatcaaacaggattagataccctggtagtccacgccgtaaacgatgtctactagccgttgggctccttgagagcttagtggcgcagctaacgcaataagtagaccgcctggggagtacggccgcaaggttaaaactcaaatgaattgacgggggcccgcacaagcggtggagcatgtggtttaattcgatgcaacgcgaagaaccttacctacccttgacatccagagaagtcgctagagatagcttcgtgccttcgggaactctgtgacaggtgctgcatggctgtcgtcagctcgtgttgtgaaatgttgggttaagtcccgtaacgagcgcaacccctatccctatttgctagcagttcggctgagaactctagggagactgccggtgacaaaccggaggaaggtggggacgacgtcaagtcatcatggcccttacgggtagggctacacacgtgctacaatggccggtacaacaggttgctaacccgcgagggggcgctaatccgtaaaaaccggtcgtagtccggattggagtctgcaactcgactccatgaagtcggaatcgctagtaatcgcggatcagaatgccgcggtgaatacgttcccgggccttgtacacaccgcccgtcacaccatgggagttgattgcaccagaagtagctagcttaaccttcgggagggcggttaccacggtgtgattaatgactggggtg

SEQ ID NO: 3339 - DNA, 1453 bp, Teredinibacter turnerae
attgaacgctggcggcaggcctaacacatgcaagtcgagcgtgaaagccttcgggtgagtaaagcggcggacgggtgagtaacgcgtgggaatctgcctgatagtgggggacaacagtcggaaacgactgctaataccgcatacgtcctaagggagaaagtgggggatcttcggacctcacgctatcagatgagcccgcgtcggattagctagtaggtgaggtaatggctcacctaggcgacgatccgtagctggtctgagaggatgatcagccacattgggactgagacacggcccaaactcctacgggaggcagcagtggggaatattgcacaatgggggaaaccctgatgcagccatgccgcgtgtgtgaagaaggccctcgggttgtaaagcactttcagcagtgaggaaaggttgtacgttaatagcgtgcaactgtgacgttaactgcagaagaagcaccggctaactccgtgccagcagccgcggtaatacggagggtgcgagcgttaatcggaattactgggcgtaaagcgcgcgtaggcggttatttaagctagatgtgaaagccctgggctcaacctgggaactgcatttagaactgggtaacttgagtacagcagaggatagtggaatttcaggtgtagcggtgaaatgcgtagagatctgaaggaacatcagtggcgaaggcgactgtctgggctgatactgacgctgaggtgcgaaagcgtggggagcaaacaggattagataccctggtagtccacgccgtaaacgatgtctactagccgttggtctccttgagggattagtggcgcagctaacgcagtaagtagaccgcctggggagtacggtcgcaagattaaaactcaaatgaattgacgggggcccgcacaagcggtggagcatgtggtttaattcgaagcaacgcgaagaaccttaccaggtcttgacatcctagaaacttagcagagatgctttggtgccttcgggaatctagagacaggtgctgcatggctgtcgtcagctcgtgtcgtgagatgttgggttaagtcccgtaacgagcgcaacccttgtccttagttgccatcagttcggctgggaactctaaggagactgccggtgacaaaccggaggaaggtggggacgacgtcaagtcatcatggcccttacgacctgggctacacacgtgctacaatgggctgtacaaagggttgccaagccgcgaggtggagctaatcccataaaacagttcgtagtccggattggagtctgcaactcgactccatgaagtcggaatcgctagtaatcgtaaatcagaatgttacggtgaatacgttcccgggccttgtacacaccgcccgtcacaccatgggagtgggttgcaccagaagtagctagtctaaccttcgggaggacggttaccacggtgtgattcatgactggggtg

SEQ ID NO: 3340 - DNA, 1433 bp, Terribacillus goriensis
  misc_feature (632)..(632): n is a, c, g, or t
atgcaagtcgagcgcaggaaaccagatgaccccttcggggtgattctggtggaatgagcggcggacgggtgagtaacacgtgggcaacctgcctgtaagactgggataacttcgggaaaccggagctaataccggatagtatttcctttctcctgattggaaatggaaagacggtttcggctgtcacttacagatgggcccgcggtgcattagctagttggtggggtaatggcccaccaaggcgacgatgcatagccgacctgagagggtgatcggccacactgggactgagacacggcccagactcctacgggaggcagcagtagggaatcttccgcaatggacgaaagtctgacggagcaacgccgcgtgagcgatgaaggccttcgggtcgtaaagctctgttgttagggaagaacaagtacgagagtaactgctcgtaccttgacggtacctaaccagaaagccccggctaactacgtgccagcagccgcggtaatacgtagggggcaagcgttgtccggaattattgggcgtaaagggctcgtaggcggtttcttaagtctgatgtgaaagcccacagctcaactgtggagggtcattggaaactggggaacttgagtgcagaagangagagtggaattccacgtgtagcggtgaaatgcgtagatatgtggaggaacaccagtggcgaaggcgactctctggtctgtaactgacgctgaggagcgaaagcgtggggagcaaacaggattagataccctggtagtccacgccgtaaacgatgagtgctaggtgttagggggtttccgccccttagtgctgaagttaacgcattaagcactccgcctggggagtacggccgcaaggctgaaactcaaaagaattgacgggggcccgcacaagcggtggagcatgtggtttaattcgaagcaacgcgaagaaccttaccaggtcttgacatccgctgacaatcttggagacaagacgttcccttcggggacagcgtgacaggtggtgcatggttgtcgtcagctcgtgtcgtgagatgttgggttaagtcccgcaacgagcgcaacccttgattctagttgccagcattaagttgggcactctagagtgactgccggtgacaaaccggaggaaggtggggatgacgtcaaatcatcatgccccttatgacctgggctacacacgtgctacaatggatggtacaaagggcagcaaagtcgcgaggctaagcaaatcccataaaaccattctcagttcggattgcaggctgcaactcgcctgcatgaagccggaatcgctagtaatcgcggatcagcatgccgcggtgaatacgttcccgggccttgtacacaccgcccgtcacaccacgagagttggtaacacccgaagtcggtgaggtaaccttttaggagccagccgcc

SEQ ID NO: 3341 - DNA, 1485 bp, Terribacillus saccharophilus
  misc_feature (77)..(77): n is a, c, g, or t
gacgaacgctggcggcgtgcctaatacatgcaagtcgagcgcaggaaaccagatgaccccttcggggtgattctggnggaatgagcggcggacgggtgagtaacacgtgggcaacctgcctgtaagactgggataacttcgggaaaccggagctaataccggatagtatttcctttctcctgattggaaatggaaagacggtttcggctgtcacttacagatgggcccgcggtgcattagctagttggtggggtaatggcccaccaaggcgacgatgcatagccgacctgagagggtgatcggccacactgggactgagacacggcccagactcctacgggaggcagcagtagggaatcttccgcaatggacgaaagtctgacggagcaacgccgcgtgagcgatgaaggccttcgggtcgtaaagctctgttgttagggaagaacaagtacgagagtaactgctcgtaccttgacggtacctaaccagaaagccccggctaactacgtgccagcagccgcggtaatacgtagggggcaagcgttgtccggaattattgggcgtaaagggctcgtaggcggtttcttaagtctgatgtgaaagcccacagctcaactgtggagggtcattggaaactggggaacttgagtgcagaagaggagagtggaattccacgtgtagcggtgaaatgcgtagatatgtggaggaacaccagtggcgaaggcgactctctggtctgtaactgacgctgaggagcgaaagcgtggggagcaaacaggattagataccctggtagtccacgccgtaaacgatgagtgctaggtgttagggggtttccgccccttagtgctgaagttaacgcattaagcactccgcctggggagtacggccgcaaggctgaaactcaaaagaattgacgggggcccgcacaagcggtggagcatgtggtttaattcgaagcaacgcgaagaaccttaccaggtcttgacatccgctgacaatcttggagacaagacgttcccttcggggacagcgtgacaggtggtgcatggttgtcgtcagctcgtgtcgtgagatgttgggttaagtcccgcaacgagcgcaacccttgattctagttgccagcattaagttgggcactctagagtgactgccggtgacaaaccggaggaaggtggggatgacgtcaaatcatcatgccccttatgacctgggctacacacgtgctacaatggatggtacaaagggcagcaaagtcgcgaggctaagcaaatcccataaaaccattctcagttcggattgcaggctgcaactcgcctgcatgaagccggaatcgctagtaatcgcggatcagcatgccgcggtgaatacgttcccgggccttgtacacaccgcccgtcacaccacgagagttggtaacacccgaagtcggtgaggtaaccttttaggagccagccgccgaaggtgggatcaatgattggggtg

SEQ ID NO: 3342 - DNA, 1422 bp, Terriglobus albidus
aatcaacgctggcggcgtgcctaacacatgcaagtcgcacgagaaagggtagcaatacctgagtaaagtggcgcacgggtgagtaacacgtgactaacctacctccgagtggggaataacttcgggaaaccgaggctaataccgcataacacttacgagtcaaagcagcaatgcgcttggagagggggtcgcggcagattagctagttggcggggtaatggcccaccaaggcgatgatctgtatccggcctgagagggcgcacggacacactggaactgaaacacggtccagactcctacgggaggcagcagtggggaattttgcgcaatgggggaaaccctgacgcagcaacgccgcgtggaggatgaagtctcttgggacgtaaactcctttcgatcgggacgattatgacggtaccggaagaagaagccccggctaacttcgtgccagcagccgcggtaatacgaggggggcaagcgttgttcggaattattgggcgtaaagggcgcgtaggcggtttggcaagtctagtgtgaaatcttcgggctcaactcgaagtctgcactggaaactgccgggcttgagtatgggagaggtgagtggaatttccggtgtagcggtgaaatgcgtagatatcggaaggaacacctgtggcgaaagcggctcactggaccataactgacgctgaggcgcgaaagctaggggagcaaacaggattagataccctggtagtcctagccctaaacgatgattgcttggtgtgtcgggtacccaatcccgtcgtgccgaagctaacgcgataagcaatccgcctggggagtacggtcgcaaggctgaaactcaaaggaattgacgggggcccgcacaagcggtggagcatgtggtttaattcgacgcaacgcgaagaaccttacctgggctcgaaatgtagaggaattcggtagaaatatcggcgcctagcaataggcctctatataggtgctgcatggctgtcgtcagctcgtgtcgtgagatgttgggttaagtcccgcaacgagcgcaacccttatctccagttgctaccatttagttgagcactctggcgaaaccgcctcggataacggggaggaaggtggggatgacgtcaagtcctcatggcctttatgtccagggctacacacgtgctacaatggccggtacaaaccgtcgcgaacccgtgagggggagccaatcggaaaaagccggcctcagttcggattgaagtctgcaactcgacttcatgaagctggaatcgctagtaatcgcagatcagaacgctgcggtgaatacgttcccgggccttgtacacaccgcccgtcacatcacgaaagtgggttgcactagaagtcggtgagctaaccgcaagggagcagccgcccaaggtgtaattcatgattggggtg

SEQ ID NO: 3343 - DNA, 1424 bp, Terriglobus roseus
aatcaacgctggcggcgtgcctaacacatgcaagtcgcacgagaaagggacttcggtcctgagtaaagtggcgcacgggtgagtaacacgtgactaatctacctccgagtggggaataactgagggaaaccttagctaataccgcataacacttacgagtcaaagcagcaatgcgcttggagaggaggtcgcggcagattagctagttggcggggtaatggcccaccaaggcaatgatctgtatccggcctgagagggcgcacggacacactggaactgaaacacggtccagactcctacgggaggcagcagtggggaattttgcgcaatgggggaaaccctgacgcagcaacgccgcgtggaggatgaagtctcttgggacgtaaactcctttcgatagggaagataatgacggtacctatagaagaagccccggctaacttcgtgccagcagccgcggtaatacgaggggggcaagcgttgttcggaattattgggcgtaaagggcgcgtaggcggtttggcaagtttcgtgtgaaatcttcgggctcaactcgaagtctgcacggaaaactgccgggcttgagtatgggagaggtgagtggaatttccggtgtagcggtgaaatgcgtagatatcggaaggaacacctgtggcgaaagcggctcactggaccattactgacgctgaggcgcgaaagctaggggagcaaacaggattagataccctggtagtcctagccctaaacgatgattgtttgatgtggcaggtacccaatcctgccgtgtcgaagctaacgcgataaacaatccgcctggggagtacggtcgcaaggctgaaactcaaaggaattgacgggggcccgcacaagcggtggagcatgtggtttaattcgacgcaacgcgaagaaccttacctgggctcgaaatgtaccggaatccggcagaaacgtcggcgtctagcaatagaccggtatataggtgctgcatggctgtcgtcagctcgtgtcgtgagatgttgggttaagtcccgcaacgagcgcaacccttatctctagttgctaccatttagttgagcactctagcgaaaccgcctcggataacggggaggaaggtggggatgacgtcaagtcctcatggcctttatgtccagggctacacacgtgctacaatggccggtacaaaccgctgcgaacccgcgagggggagccaatcggaaaaagccggcctcagttcggattggagtctgcaactcgactccatgaagctggaatcgctagtaatcgcagatcagaacgctgcggtgaatacgttcccgggccttgtacacaccgcccgtcacatcacgaaagtgggtcgtactagaagtcggtgcgctaactcgcaagaggagcagccgcccaaggtataattcatgattggggtg

SEQ ID NO: 3344 - DNA, 1422 bp, Terriglobus saanensis
aatcaacgctggcggcgtgcctaacacatgcaagtcgcacgagaaagggacttcggtcctgagtaaagtggcgtacgggtgagtaacacgtgactaacctacctccgagtggggaataacctagggaaacctgggctaataccgcataacacttacgagtcaaagcagcaatgcgcttggagagggggtcgcggcagattagctagttggcggggtaatggcccaccaaggcaatgatctgtatccggcctgagagggcgcacggacacactggaactgaaacacggtccagactcctacgggaggcagcagtggggaattttgcgcaatgggggaaaccctgacgcagcaacgccgcgtggaggatgaagtatcttggtacgtaaactcctttcgatggggaagataatgacggtacccatagaagaagccccggctaacttcgtgccagcagccgcggtaatacgaggggggcaagcgttgttcggatttattgggcgtaaagggtgcgtaggcggtttggcaagtttggtgtgaaatcttcgggctcaactcgaagtctgcatcaaaaactgccgggcttgagtatgggagaggtgagtggaatttccggtgtagcggtgaaatgcgtagatatcggaaggaacacctgtggcgaaagcggctcactggaccataactgacgctgaggcacgaaagctaggggagcaaacaggattagataccctggtagtcctagccctaaacgatgattgcttggtgtggcaggtacccaatcctgccgtgccgaagctaacgcgataagcaatccgcctggggagtacggtcgcaaggctgaaactcaaaggaattgacgggggcccgcacaagcggtggagcatgtggtttaattcgacgcaacgcgaagaaccttacctgggctcgaaatgtagtggaatccggcagaaacgtcggcgtctagcaatagactgctatataggtgctgcatggctgtcgtcagctcgtgtcgtgagatgttgggttaagtcccgcaacgagcgcaacccttatctccagttgctaccattcagttgagcactctggcgagaccgcttcggataacggagaggaaggcggggatgacgtcaagtcctcatggcctttatgtccagggctacacacgtgctacaatggccggtacaaaccgctgcgaacccgcgagggggagccaatcggaaaaagccggcctcagttcggattggagtctgcaactcgactccatgaagctggaatcgctagtaatcgcagatcagaacgctgcggtgaatacgttcccgggccttgtacacaccgcccgtcacatcacgaaagtgggttgcactagaagtcggtgcgctaaccgcaagggagcagccgcccaaggtgtaattcatgattggggtg

SEQ ID NO: 3345 - DNA, 1344 bp, Testudinibacter aquarius
attgaacgctggcggcaggcttaacacatgcaagtcgagcggtaacgggggagagcttgctctcttgccgacgagcggcggacgggtgagtaatgcttggggatctggcttgtggagggggataaccacgggaaactgtggctaataccgcgtagtatcgagagatgaaagggtgggactttcgggccacctgccatgagatgaacccaagtgagattaggtagttggtgaggtaaaggctcaccaagccgtcgatctctaactggtctgagaggatgaccagtcacactgggactgagacacggcccagactcctacgggaggcagcagtggggaatattgcgcaatggggggaaccctgacgcagccatgccgcgtgaatgaagaaggccttcgggttgtaaagttctttcggtgatgaggaaggtggatgttttaatagggcattcaattgacgttattcacagaagaagcaccggctaactccgtgccagcagccgcggtaatacggagggtgcgagcgttaatcggaataactgggcgtaaagggcacgcaggcggttacttgagtgagatgtgaaatccccgagcttaacttgggaattgcatttcatactgggtagctagagttttgtagagaggggtagaattccacgtgtagcggtgaaatgcgtagagatgtggaggaataccggaggcgaaggcggccccttggacaaagactgacgctcatgtgcgaaagcgtggggagcaaacaggattagataccctggtagtccacgctgtaaacgatgtcgatttgggggttgggtgtaaacctggctctcgcagctaacgcgttaaatcgaccgcctggggagtacggccgcaaggttaaaactcaaatgaattgacgggggcccgcacaagcggtggagcatgtggtttaattcgatgcaacgcgaagaaccttacctactcttaaaaagacatccagagaatctgctagagatagcggagtgccttcgggagctctgagacaggtgctgcatggctgtcgtcagctcgtgttgtgaaatgttgggttaagtcccgcaacgagcgcaacccctatcctttgtatattgccatcattaagttgggaactcaaaggagactgccggtgacaaaccggaggaaggtggggatgacgtcaagtcatcatggcccttacgagtagggctacacacgtgctacaatggcgtatacagagggaggcgagccagcgatggtgagcgaatctcttaaagtgcgtcgtagtccggattggagtctgcaactcgactccatgaagtcggaatcgctagtaatcgcaaatcagaatgt

SEQ ID NO: 3346 - DNA, 1489 bp, Thalassobacillus cyri
gacgaacgctggcggcgtgcctaatacatgcaagtcgagcgcgggaagcaagcggatccccttcgggggtgacgcttgtggaacgagcggcggacgggtgagtaacacgtgggcaacctgcctgtaagactgggataaccccgggaaaccggggctaataccggataacaccggactccacatggagtcgggttgaaagatggcttcttgctatcacttacagatgggcccgcggcgcattagctagttggtgaggtaacggctcaccaaggcgacgatgcgtagccgacctgagagggtgatcggccacactgggactgagacacggcccagactcctacgggaggcagcagtagggaatcttccgcaatggacgaaagtctgacggagcaacgccgcgtgaacgatgaaggtcttcggatcgtaaagttctgttgtcagggaagaacaagtgccgtgcgaatagagcggcaccttgacggtacctgacgaggaagccccggctaactacgtgccagcagccgcggtaatacgtagggggcaagcgttgtccggaattattgggcgtaaagcgcgcgcaggcggtttcttaagtctgatgtgaaagcccacggctcaaccgtggagggtcattggaaactggggaacttgagtacagaagaggagagtggaattccacgtgtagcggtgaaatgcgtagatatgtggaggaacaccagtggcgaaggcgactctctggtctgtaactgacgctgaggcgcgaaagcgtggggagcaaacaggattagataccctggtagtccacgccgtaaacgatgagtgctaggtgttagggggcttccaccccttagtgctgaagttaacgcattaagcactccgcctggggagtacggccgcaaggctgaaactcaaaggaattgacgggggcccgcacaagcggtggagcatgtggtttaattcgaagcaacgcgaagaaccttaccaggtcttgacatcttcggacaaccctggagacagggcgttcccttcggggaccgaatgacaggtggtgcatggttgtcgtcagctcgtgtcgtgagatgttgggttaagtcccgcaacgagcgcaacccctgaccttagttgccagcattcagttgggcactctaaggtgactgccggtgacaaaccggaggaaggcggggatgacgtcaaatcatcatgccccttatgacctgggctacacacgtgctacaatggatggtacaaagggcagcgaagccgcgaggtgtagcaaatcccataaaaccattctcagttcggattgcaggctgcaactcgcctgcatgaagccggaatcgctagtaatcgcggatcagcatgccgcggtgaatacgttcccgggccttgtacacaccgcccgtcacaccacgagagttggcaacacccgaagtcggtgaggtaacctttatggagccagccgccgaaggtggggccaatgattggggtg

SEQ ID NO: 3347 - DNA, 1383 bp, Thalassococcus halodurans
aacgaacgctggcggcaggcctaacacatgcaagtcgagcgcaccttcgggtgagcggcggacgggttagtaacgcgtgggaacgtacccttttctaaggaatagccactggaaacggtgagtaataccttatacgcccttcgggggaaagatttatcggagaaggatcggcccgcgttagattagatagttggtggggtaacggcctaccaagtctacgatctatagctggttttagaggatgatcagcaacactgggactgagacacggcccagactcctacgggaggcagcagtggggaatcttggacaatgggcgcaagcctgatccagccatgccgcgtgagtgatgaaggccttagggtcgtaaagctctttcgctggggatgataatgacagtacccagtaaagaaaccccggctaactccgtgccagcagccgcggtaatacggagggggttagcgttgttcggaattactgggcgtaaagcgcgcgtaggcggattggaaagttgggggtgaaatcccggggctcaacctcggaactgcctccaaaactatcagtctagagttcgagagaggtgagtggaattccgagtgtagaggtgaaattcgtagatattcggaggaacaccagtggcgaaggcggctcactggctcgatactgacgctgaggtgcgaaagtgtggggagcaaacaggattagataccctggtagtccacaccgtaaacgatgaatgccagtcgtcagcaagcatgcttgttggtgacacacctaacggattaagcattccgcctggggagtacggtcgcaagattaaaactcaaaggaattgacgggggcccgcacaagcggtggagcatgtggtttaattcgaagcaacgcgcagaaccttaccaacccttgacatcctgtgctacatccagagatggatggttcccttcggggacgcagtgacaggtgctgcatggctgtcgtcagctcgtgtcgtgagatgttcggttaagtccggcaacgagcgcaacccacatcttcagttgccagcagttcggctgggcactctggagaaactgcccgtgataagcgggaggaaggtgtggatgacgtcaagtcctcatggcccttacgggttgggctacacacgtgctacaatggcagtgacaatgggttaatccccaaaaactgtctcagttcggattgttctctgcaactcgagagcatgaagtcggaatcgctagtaatcgcgtaacagcatgacgcggtgaatacgttcccgggccttgtacacaccgcccgtcacaccatgggagttgggtttacccgaagacggtgcgccaaccttttaggaggcagctggccacggtaagctcagcgactggggtg

SEQ ID NO: 3348 - DNA, 1461 bp, Thalassolituus oleivorans
attgaacgctggcggcaggcttaacacatgcaagtcgagcggtagcacagagagcttgctctcgggtgacaagcggcggacgggtgagtaacgcgtaggaatctacctagtagtgggggacaacagttggaaacgactgctaataccgcatacgccctaagggggaaagcgggggatcttcggacctcgtgctattagatgagcctgcgtgagattagctagttggtgaggtaaaggctcaccaaggcgacgatctctagctggtctgagaggatgatcagccacactgggactgagacacggcccagactcctacgggaggcagcagtggggaatattggacaatgggcgcaagcctgatccagccatgccgcgtgtgtgaagaaggccttcgggttgtaaagcactttcagaagggaggaaaggttgtgtgttaatagcacatagctgtgacgttaccttcagaagaagcaccggctaactccgtgccagcagccgcggtaatacggagggtgcaagcgttaatcggaattactgggcgtaaagcgcgcgtaggttgtttgttaagcgagatgtgaaagccccgggcttaacctgggaactgcatttcgaactggcaagctagagtacagtagagggtagtggaatttcctgtgtagcggtgaaatgcgtagagatgggaaggaacatcagtggcgaaggcgactgcctggactgatactgacactgaggtgcgaaagcgtggggagcaaacaggattagataccctggtagtccacgccgtaaacgatgtctactagttgtcgggagacttgatctcttggtaacgaagctaacgcgataagtagaccgcctggggagtacggccgcaaggttaaaactcaaatgaattgacgggggcccgcacaagcggtggagcatgtggtttaattcgaagcaacgcgaagaaccttacctactcttgacatccagtgaacttagcagagatgctttggtgccttcgggaacactgagacaggtgctgcatggctgtcgtcagctcgtgttgtgaaatgttgggttaagtcccgtaacgagcgcaacccttgtccttagttaccatcattaagttggggactctaaggagactgccggtgacaaaccggaggaaggcggggacgacgtcaagtcatcatggcccttacgagtagggctacacacgtgctacaatggccagtacagagggttgcaatgccgcgaggtggagctaatcccacaaagctggtcgtagtccggattggagtctgcaactcgactccatgaagtcggaatcgctagtaatcgtgaatcagaatgtcacggtgaatacgttcccgggccttgtacacaccgcccgtcacaccatgggagtgggttgctccagaagtagatagcctaaccttcgggagggcgtttaccacggagtgattcatgactggggtg

SEQ ID NO: 3349 - DNA, 1462 bp, Thalassomonas actiniarum
attgaacgctggcggcaggcttaacacatgcaagtcgagcggaaacgagaagtacttgtacttcggcgtcgagcggcggacgggtgagtaatgcttgggaatatgccttatggtgggggacaacagttggaaacgactgctaataccgcataatgtctacggaccaaagcgggggaccttcgggcctcgtgccatttgattagcccaagtgagattagctagttggtaaggtaatggcttaccaaggcgacgatctctagctggtttgagaggatgatcagccacactgggactgagacacggcccagactcctacgggaggcagcagtggggaatattgcacaatgggcgaaagcctgatgcagccatgccgcgtgtgtgaagaaggccttcgggttgtaaagcactttcagttgtgaggaaaggggtgtagttaataactgcatcctgtgacgttagcaacagaagaagcaccggctaactccgtgccagcagccgcggtaatacggagggtgcgagcgttaatcggaattactgggcgtaaagcgtgcgtaggcggtttgttaagcaagatgtgaaagccccgggctcaacctgggaactgcattttgaactggcaggctagagttttgtagagggtggtggaatttccagtgtagcggtgaaatgcgtagagattggaaggaacatcagtggcgaaggcggccacctggacaaaaactgacgctgaggcacgaaagcgtggggagcaaacaggattagataccctggtagtccacgccgtaaacgatgtcaactagccgtctgtatccttgagatgtgggtggcgcagctaacgcgataagttgaccgcctggggagtacggccgcaaggttaaaactcaaatgaattgacgggggcccgcacaagcggtggagcatgtggtttaattcgatgcaacgcgaagaaccttaccatcccttgacatccagagaatttaccagagatggtttagtgccttcgggaactctgtgacaggtgctgcatggctgtcgtcagctcgtgttgtgaaatgttgggttaagtcccgcaacgagcgcaacccctatccttatttgccagtgcttcgggcgggaactttaaggagactgccggtgataaaccggaggaaggtggggacgacgtcaagtcatcatggcccttacgggatgggctacacacgtgctacaatggcaagtacagagggcagcaataccgcgaggtggagcgaatcccacaaagcttgtcgtagtccggattggagtctgcaactcgactccatgaagtcggaatcgctagtaatcgtggatcagaatgccacggtgaatacgttcccgggccttgtacacaccgcccgtcacaccatgggagtaggttgcaaaagaagtggctagtttaaccttcgggaggacggtcaccactttgtgatttatgactggggtg

SEQ ID NO: 3350 - DNA, 1462 bp, Thalassomonas viridans
attgaacgctggcggcaggcttaacacatgcaagtcgagcggaaacgagaagtacttgtacttcggcgtcgagcggcggacgggtgagtaatgcttgggaatatgccttatggtgggggacaacagttggaaacgactgctaataccgcataatgtctacggaccaaagcgggggaccttcgggcctcgtgccatttgattagcccaagtgagattagctagttggtggggtaatggcctaccaaggcgacgatctctagctggtttgagaggatgatcagccacactgggactgagacacggcccagactcctacgggaggcagcagtggggaatattgcacaatgggcgaaagcctgatgcagccatgccgcgtgtgtgaagaaggccttcgggttgtaaagcactttcagttgtgaggaaagggtgttggttaatacctaacatctgtgacgttagcaacagaagaagcaccggctaactccgtgccagcagccgcggtaatacggagggtgcgagcgttaatcggaattactgggcgtaaagcgtgcgtaggcggtttgttaagcaagatgtgaaagccccgggctcaacctgggaactgcattttgaactggcaggctagagttttgtagagggtggtggaatttccagtgtagcggtgaaatgcgtagagattggaaggaacatcagtggcgaaggcggccacctggacaaaaactgacgctgaggcacgaaagcgtggggagcaaacaggattagataccctggtagtccacgccgtaaacgatgtcaactagccgtctgtatccttgagatgtgggtggcgcagctaacgcgctaagttgaccgcctggggagtacggccgcaaggttaaaactcaaatgaattgacgggggcccgcacaagcggtggagcatgtggtttaattcgatgcaacgcgaagaaccttaccatcccttgacatccagagaattcgctagagatagcttagtgccttcgggaactctgtgacaggtgctgcatggctgtcgtcagctcgtgttgtgaaatgttgggttaagtcccgcaacgagcgcaacccctatccttatttgccagcgcttttggcgggaactctaaggagactgccggtgataaaccggaggaaggtggggacgacgtcaagtcatcatggcccttacgggatgggctacacacgtgctacaatggcaagtacagagggcagcaataccgcgaggtggagcgaatcccacaaagcttgtcgtagtccggattggagtctgcaactcgactccatgaagtcggaatcgctagtaatcgtggatcagaatgccacggtgaatacgttcccgggccttgtacacaccgcccgtcacaccatgggagtgggttgcaaaagaagtggctagtttaaccttcgggaggacggtcaccactttgtgattcatgactggggtg

SEQ ID NO: 3351 - DNA, 1422 bp, Thalassospira alkalitolerans
aacgaacgctggcggcaggcctaacacatgcaagtcgtacgagaaggttccttcgggaactggagagtggcgcacgggtgagtaacgcgtggggacctaccttttagtgggggataacggttggaaacgaccgctaataccgcatacgcccttcgggggaaagatttatcgctaagagatggacccgcgttggattagatagttggtgaggtaacggctcaccaagtcttcgatccatagctggtttgagaggatgatcagccacactgggactgagacacggcccagactcctacgggaggcagcagtggggaatattggacaatgggcgcaagcctgatccagccatgccgcgtgagtgaagaaggccttcgggttgtaaagctctttcagatgtgaagatgatgacggtagcatcagaagaagccccggctaatttcgtgccagcagccgcggtaatacgaaaggggcaagcgttgttcggatttactgggcgtaaagggcacgcaggcggtcttgccagtcaggggtgaaagcccggggctcaaccccggaactgcctctgatactgcaggactagagactaggagagggtggtggaattcccagtgtagaggtgaaattcgtagatattgggaggaacaccagaggcgaaggcggccacctggactagatctgacgctcaggtgcgaaagcgtggggagcaaacaggattagataccctggtagtgcacgccgtaaacgatgagtgctagttgtcgggacttcggtttcggtgacgcagctaacgcattaagcactccgcctggggagtacggtcgcaagattaaaactcaaaggaattgacgggggcccgcacaagcggtggagcatgtggtttaattcgaagcaacgcgcagaaccttaccaacccttgacatccctatcgcgattaccagagatggttttcatcagttcggctggataggtgacaggtgctgcatggctgtcgtcagctcgtgtcgtgagatgttgggttaagtcccgcaacgagcgcaacccctatccttagttgccagcatttagttgggcactctagggagactgccggtgacaagccggaggaaggcggggatgacgtcaagtcctcatggcccttacgggttgggctacacacgtgctacaatggtaactacagagggctgcttcttggcaacaagtggcgaatcccaaaaagttatctcagttcggattgcactctgcaactcgagtgcatgaagttggaatcgctagtaatcgtggatcagcatgccacggtgaatacgttcccgggccttgtacacaccgcccgtcacaccatgggagttggttttacccgaagacggtgggctaaccagatttatctggaggcagccggccacggtaaggtcagcgactggggtg

SEQ ID NO: 3352 - DNA, 1422 bp, Thalassospira lohafexi
aacgaacgctggcggcaggcctaacacatgcaagtcgtacgagaaggttctttcgggaactggagagtggcgcacgggtgagtaacgcgtggggacctacctcttagtgggggataacggttggaaacgaccgctaataccgcatacgcccttcgggggaaagatttatcgctaagagatggacccgcgttggattagatagttggtgaggtaatggctcaccaagtcggcgatccatagctggtttgagaggatgatcagccacactgggactgagacacggcccagactcctacgggaggcagcagtggggaatattggacaatgggggcaaccctgatccagccatgccgcgtgagtgaagaaggccttcgggttgtaaagctctttcagatgcgaagatgatgacggtaacatcagaagaagccccggctaatttcgtgccagcagccgcggtaatacgaaaggggcaagcgttgttcggatttactgggcgtaaagggcacgcaggcggtcttgccagtcaggggtgaaagcccggggctcaaccccggaactgcctctgatactgcaagactagagactaggagagggtggtggaattcccagtgtagaggtgaaattcgtagatattgggaggaacaccagaggcgaaggcggccacctggactagatctgacgctcaggtgcgaaagcgtggggagcaaacaggattagataccctggtagtccacgccgtaaacgatgagtgctagttgtcgggacttcggtttcggtgacgcagctaacgcattaagcactccgcctggggagtacggtcgcaagattaaaactcaaaggaattgacgggggcccgcacaagcggtggagcatgtggtttaattcgaagcaacgcgcagaaccttaccaacccttgacatccctatcgcgatttccagagatggatttcatcagttcggctggataggtgacaggtgctgcatggctgtcgtcagctcgtgtcgtgagatgttgggttaagtcccgcaacgagcgcaacccctatccttagttgccagcatttagttgggcactctagggagactgccggtgacaagccggaggaaggcggggatgacgtcaagtcctcatggcccttacgggttgggctacacacgtgctacaatggtaactacagagggctgcttcttggcaacaagtggcgaatcccaaaaagttatctcagttcggattgcactctgcaactcgagtgcatgaagttggaatcgctagtaatcgtggatcagcatgccacggtgaatacgttcccgggccttgtacacaccgcccgtcacaccatgggagttggttttacccgaagacggtgggctaaccagatttatctggaggcagccggccacggtaaggtcagcgactggggtg

SEQ ID NO: 3353 - DNA, 1422 bp, Thalassospira lucentensis
aacgaacgctggcggcaggcctaacacatgcaagtcgtacgagaaggttctttcgggaactggagagtggcgcacgggtgagtaacgcgtggggacctacctcttagtgggggataacggttggaaacgaccgctaataccgcatacgcccttcgggggaaagatttatcgctaagagatggacccgcgttggattagatagttggtgaggtaatggctcaccaagtcggcgatccatagctggtttgagaggatgatcagccacactgggactgagacacggcccagactcctacgggaggcagcagtggggaatattggacaatgggggcaaccctgatccagccatgccgcgtgagtgaagaaggccttcgggttgtaaagctctttcagatgcgaagatgatgacggtaacatcagaagaagccccggctaatttcgtgccagcagccgcggtaatacgaaaggggcaagcgttgttcggatttactgggcgtaaagggcacgcaggcggtcttgccagtcaggggtgaaagcccggggctcaaccccggaactgcctctgatactgcaagactagagactaggagagggtggtggaattcccagtgtagaggtgaaattcgtagatattgggaggaacaccagaggcgaaggcggccacctggactagatctgacgctcaggtgcgaaagcgtggggagcaaacaggattagataccctggtagtccacgccgtaaacgatgagtgctagttgtcgggatttcggtttcggtgacgcagctaacgcattaagcactccgcctggggagtacggtcgcaagattaaaactcaaaggaattgacgggggcccgcacaagcggtggagcatgtggtttaattcgaagcaacgcgcagaaccttaccaacccttgacatccctatcgcgatttccagagatggatttcatcagttcggctggataggtgacaggtgctgcatggctgtcgtcagctcgtgtcgtgagatgttgggttaagtcccgcaacgagcgcaacccctatccttagttgccagcatttagttgggcactctagggagactgccggtgacaagccggaggaaggcggggatgacgtcaagtcctcatggcccttacgggttgggctacacacgtgctacaatggtaactacagagggctgcttcttggcaacaagtggcgaatcccaaaaagttatctcagttcggattgcactctgcaactcgagtgcatgaagttggaatcgctagtaatcgtggatcagcatgccacggtgaatacgttcccgggccttgtacacaccgcccgtcacaccatgggagttggttttacccgaagacggtgggctaaccagatttatctggaggcagccggccacggtaaggtcagcgactggggtg

SEQ ID NO: 3354 - DNA, 1495 bp, Thalassospira marina
gaacatgagagtttgatcctggctcagaacgaacgctggcggcaggcctaacacatgcaagtcgtacgagaaggttccttcgggaactggagagtggcgcacgggtgagtaacgcgtggggacctaccttttagtgggggataacggttggaaacgaccgctaataccgcatacgcccttcgggggaaagatttatcgctaaaagatggacccgcgttggattagatagttggtgaggtaacggctcaccaagtcagcgatccatagctggtttgagaggatgatcagccacactgggactgagacacggcccagactcctacgggaggcagcagtggggaatattggacaatgggcgcaagcctgatccagccatgccgcgtgagtgaagaaggccttcgggttgtaaagctctttcagatgcgaagatgatgacggtaacatcagaagaagccccggctaatttcgtgccagcagccgcggtaatacgaaaggggcaagcgttgttcggatttactgggcgtaaagggcacgcaggcggtctcgccagtcaggggtgaaagcccggggctcaaccccggaactgcctctgatactgtgagactagagactaggagagggtggtggaattcccagtgtagaggtgaaattcgtagatattgggaggaacaccagaggcgaaggcggccacctggactagatctgacgctcaggtgcgaaagcgtggggagcaaacaggattagataccctggtagtccacgccgtaaacgatgagtgctagttgtcgggacttcggtttcggtgacgcagctaacgcattaagcactccgcctggggagtacggtcgcaagattaaaactcaaaggaattgacgggggcccgcacaagcggtggagcatgtggtttaattcgaagcaacgcgcagaaccttaccaacccttgacatcctgatcgcgattaccagagatggttttcttcagttcggctggatcagtgacaggtgctgcatggctgtcgtcagctcgtgtcgtgagatgttgggttaagtcccgcaacgagcgcaacccctattcccagttgccagcattcagttgggcactctggggagactgccggtgacaagccggaggaaggcggggatgacgtcaagtcctcatggcccttacgggttgggctacacacgtgctacaatggtaactacagagggtagcggcctggtgacaggtagccaatcccaaaaagttatctcagttcggattgcactctgcaactcgagtgcatgaagttggaatcgctagtaatcgtggatcagcatgccacggtgaatacgttcccgggccttgtacacaccgcccgtcacaccatgggagttggttttacccgaagacggtgggctaaccttttaggaggcagccggccacggtaaggtcagcgactggggtgaagtcgtaacaaggtagccgtaggggaacctgcggctggatcacctccttt

SEQ ID NO: 3355 - DNA, 1422 bp, Thalassospira mesophila
  misc_feature (520)..(520): n is a, c, g, or t
  misc_feature (608)..(608): n is a, c, g, or t
aacgaacgctggcggcaggcctaacacatgcaagtcgtacgagaaggttccttcgggaactggagagtggcgcacgggtgagtaacgcgtggggacctaccttttagtgggggataacggttggaaacgaccgctaataccgcatacgcccttttggggaaagatttatcgctaaaagatggacccgcgttggattagatagttggtgaggtaacggctcaccaagtcttcgatccatagctggtttgagaggatgatcagccacactgggactgagacacggcccagactcctacgggaggcagcagtggggaatattggacaatgggcgcaagcctgatccagccatgccgcgtgagtgaagaaggccttcgggttgtaaagctctttcagatgcgaagatgatgacggtaacatcagaagaagccccggctaatttcgtgccagcagccgcggtaatacgaaaggggcaagcgttgttcggatttactgggcgtaaagggcacgcaggcggtcttgncagtcaggggtgaaagcccggggctcaaccccggaactgcctctgatactgcaggactagagactaggagagggtggtggaattcccngtgtagaggtgaaattcgtagatattgggaggaacaccagaggcgaaggcggccacctggactagatctgacgctcaggtgcgaaagcgtggggagcaaacaggattagataccctggtagtccacgccgtaaacgatgagtgctagttgtcgggacttcggtttcggtgacgcagctaacgcattaagcactccgcctggggagtacggtcgcaagattaaaactcaaaggaattgacgggggcccgcacaagcggtggagcatgtggtttaattcgaagcaacgcgaagaaccttaccaacccttgacatccctatcgcgatttccagagatggatttcatcagttcggctggataggtgacaggtgctgcatggctgtcgtcagctcgtgtcgtgagatgttgggttaagtcccgcaacgagcgcaacccctattctcagttgccagcattaagttgggcactctggggagactgccggtgacaagccggaggaaggcggggatgacgtcaagtcctcatggcccttatgggttgggctacacacgtgctacaatggtaactacagagggctgcttcttggcgacaagtggcgaatcccgaaaagttatctcagttcggattgcactctgcaactcgagtgcatgaagttggaatcgctagtaatcgtggatcagcatgccacggtgaatacgttcccgggccttgtacacaccgcccgtcacaccatgggagttggttttacccgaagacggtgggctaaccagatttatctggaggcagccggccacggtaaggtcagcgactggggtg

SEQ ID NO: 3356 - DNA, 1398 bp, Thalassospira permensis
  misc_feature (38)..(38): n is a, c, g, or t
ggcaggcctaacacatgcaagtcgtacgagaaggttcnttcgggaactggagagtggcgcacgggtgagtaacgcgtggggacctacctcttagtgggggataacggttggaaacgaccgctaataccgcatacgcccttcgggggaaagatttatcgctaagagatggacccgcgttggattagatagttggtgaggtaacggctcaccaagtcagcgatccatagctggtttgagaggatgatcagccacactgggactgagacacggcccagactcctacgggaggcagcagtggggaatattggacaatgggcgcaagcctgatccagccatgccgcgtgagtgaagaaggccttcgggttgtaaagctctttcagatgcgaagatgatgacggtaacatcagaagaagccccggctaatttcgtgccagcagccgcggtaatacgaaaggggcaagcgttgttcggatttactgggcgtaaagggcacgcaggcggtcttgccagtcaggggtgaaagcccggggctcaaccccggaactgcctctgatactgcaggactagagactaggagagggtggtggaattcccagtgtagaggtgaaattcgtagatattgggaggaacaccagaggcgaaggcggccacctggactagatctgacgctcaggtgcgaaagcgtggggagcaaacaggattagataccctggtagtccacgccgtaaacgatgagtgctagttgtcgggatttcgatttcggtgacgcagctaacgcattaagcactccgcctggggagtacggtcgcaagattaaaactcaaaggaattgacgggggcccgcacaagcggtggagcatgtggtttaattcgaagcaacgcgcagaaccttaccaacccttgacatccctatcgcgatttccagagatggatatcatcagttcggctggataggtgacaggtgctgcatggctgtcgtcagctcgtgtcgtgagatgttgggttaagtcccgcaacgagcgcaacccctgttcctagttgccagcattcagttgggcactctagggagactgccggtgacaagccggaggaaggcggggatgacgtcaagtcctcatggcccttacgggttgggctacacacgtgctacaatggtaactacagagggcagcgacttagcgataagtagccaatcccaaaaagttatctcagttcggattgcactctgcaactcgagtgcatgaagttggaatcgctagtaatcgtggatcagcatgccacggtgaatacgttcccgggccttgtacacaccgcccgtcacaccatgggagttggttttacccgaagacggtgggctaaccttttaggaggcagccggccacggtaaggtcagcgact

SEQ ID NO: 3357 - DNA, 1417 bp, Thalassospira povalilytica
aacgaacgctggcggcaggcctaacacatgcaagtcggacgagaaggttccttcgggaactggagagtggcgcacgggtgagtaacgcgtggggacctacctcttagtgggggataacggttggaaacgaccgctaataccgcatacgcccttcgggggaaagatttatcgctaagagatggacccgcgttggattagatagttggtgaggtaacggctcaccaagtcagcgatccatagctggtttgagaggatgatcagccacactgggactgagacacggcccagactcctacgggaggcagcagtggggaatattggacaatgggggcaaccctgatccagccatgccgcgtgagtgaagaaggccttcgggttgtaaagctctttcagatgcgaagatgatgacggtaacatcagaagaagccccggctaatttcgtgccagcagccgcggtaatacgaaaggggctagcgttgttcggatttactgggcgtaaagggcacgcaggcggtcttgccagtcaggggtgaaagcccggggctcaaccccggaactgcctctgatactgcaagactagagactaggagagggtggtggaattcccagtgtagaggtgaaattcgtagatattgggaggaacaccagaggcgaaggcggccacctggactagatctgacgctcaggtgcgaaagcgtggggagcaaacaggattagataccctggtagtccacgccgtaaacgatgagtgctagttgtcgggacttcggtttcggtgacgcagctaacgcattaagcactccgcctggggagtacggtcgcaagattaaaactcaaaggaattgacgggggcccgcacaagcggtggagcatgtggtttaattcgaagcaacgcgcagaaccttaccaacccttgacatccctatcgcgattaccagagatggttttcatcagttcggctggataggtgacaggtgctgcatggctgtcgtcagctcgtgtcgtgagatgttgggttaagtcccgcaacgagcgcaacccctgttcccagttgccagcatttagttgggcactctggggagactgccggtgacaagccggaggaaggcggggatgacgtcaagtcctcatggcccttacgggttgggctacacacgtgctacaatggtaactacagagggcagcgacttagcgataaggagccaatcccaaaaagttatctcagttcggattgcactctgcaactcgagtgcatgaagttggaatcgctagtaatcgtggatcagcatgccacggtgaatacgttcccgggccttgtacacaccgcccgtcacaccatgggagttggttttacccgaagacggtgggctaaccttttaggaggcagccggccacggtaaggtcagcgactggggtg

SEQ ID NO: 3358 - DNA, 1417 bp, Thalassospira profundimaris
aacgaacgctggcggcaggcctaacacatgcaagtcggacgagaaggttccttcgggaactggagagtggcgcacgggtgagtaacgcgtggggacctacctcttagtgggggataacggttggaaacgaccgctaataccgcatacgcccttcgggggaaagatttatcgctaagagatggacccgcgttggattagatagttggtgaggtaacggctcaccaagtcagcgatccatagctggtttgagaggatgatcagccacactgggactgagacacggcccagactcctacgggaggcagcagtggggaatattggacaatgggggcaaccctgatccagccatgccgcgtgagtgaagaaggccttcgggttgtaaagctctttcagatgcgaagatgatgacggtaacatcagaagaagccccggctaatttcgtgccagcagccgcggtaatacgaaaggggctagcgttgttcggatttactgggcgtaaagggcacgcaggcggtcttgccagtcaggggtgaaagcccgaggctcaacctcggaactgcctctgatactgtaagacttgagactaggagagggtggtggaattcccagtgtagaggtgaaattcgtagatattgggaggaacaccagaggcgaaggcggccacctggactagatctgacgctcaggtgcgaaagcgtggggagcaaacaggattagataccctggtagtccacgccgtaaacgatgagtgctagttgtcgggacttcggtttcggtgacgcagctaacgcattaagcactccgcctggggagtacggtcgcaagattaaaactcaaaggaattgacgggggcccgcacaagcggtggagcatgtggtttaattcgaagcaacgcgcagaaccttaccaacccttgacatccctatcgcgattaccagagatggttttcatcagttcggctggataggtgacaggtgctgcatggctgtcgtcagctcgtgtcgtgagatgttgggttaagtcccgcaacgagcgcaacccctgttcctagttgccagcatttagttgggcactctagggagactgccggtgacaagccggaggaaggcggggatgacgtcaagtcctcatggcccttacgggttgggctacacacgtgctacaatggtaactacagagggcagcgacttagcgataagtagccaatcccaaaaagttatctcagttcggattgcactctgcaactcgagtgcatgaagttggaatcgctagtaatcgtggatcagcatgccacggtgaatacgttcccgggccttgtacacaccgcccgtcacaccatgggagttggttttacccgaagacggtgggctaaccttttaggaggcagccggccacggtaaggtcagcgactggggtg

SEQ ID NO: 3359 - DNA, 1417 bp, Thalassospira xiamenensis
aacgaacgctggcggcaggcctaacacatgcaagtcgtacgagaaggttccttcgggaactggagagtggcgcacgggtgagtaacgcgtggggacctacctcttagtgggggataacggttggaaacgaccgctaataccgcatacgcccttcgggggaaagatttatcgctaagagatggacccgcgttggattagatagttggtgaggtaacggctcaccaagtcagcgatccatagctggtttgagaggatgatcagccacactgggactgagacacggcccagactcctacgggaggcagcagtggggaatattggacaatgggcggaagcctgatccagccatgccgcgtgagtgaagaaggccttcgggttgtaaagctctttcagatgcgaagatgatgacggtaacatcagaagaagccccggctaatttcgtgccagcagccgcggtaatacgaaaggggcaagcgttgttcggatttactgggcgtaaagggcacgcaggcggtcttgccagtcaggggtgaaagcccggggctcaaccccggaactgcctctgatactgcaggactagagactaggagagggtggtggaattcccagtgtagaggtgaaattcgtagatattgggaggaacaccagaggcgaaggcggccacctggactagatctgacgctcaggtgcgaaagcgtggggagcaaacaggattagataccctggtagtccacgccgtaaacgatgagtgctagttgtcgggatttcgatttcggtgacgcagctaacgcattaagcactccgcctggggagtacggtcgcaagattaaaactcaaaggaattgacgggggcccgcacaagcggtggagcatgtggtttaattcgaagcaacgcgcagaaccttaccaacccttgacatccctatcgcgatttccagagatggatatcatcagttcggctggataggtgacaggtgctgcatggctgtcgtcagctcgtgtcgtgagatgttgggttaagtcccgcaacgagcgcaacccctgttcctagttgccagcattcagttgggcactctagggagactgccggtgacaagccggaggaaggcggggatgacgtcaagtcctcatggcccttacgggttgggctacacacgtgctacaatggtaactacagagggcagcgacttagcgataagtagccaatcccaaaaagttatctcagttcggattgcactctgcaactcgagtgcatgaagttggaatcgctagtaatcgtggatcagcatgccacggtgaatacgttcccgggccttgtacacaccgcccgtcacaccatgggagttggttttacccgaagacggtgggctaaccttttaggaggcagccggccacggtaaggtcagcgactggggtg

SEQ ID NO: 3360 - DNA, 1417 bp, Thalassospira xianhensis
aacgaacgctggcggcaggcctaacacatgcaagtcgtacgagaaggttctttcgggaactggagagtggcgcacgggtgagtaacgcgtggggacctacctcttagtgggggataacggttggaaacgaccgctaataccgcatacgcccttcgggggaaagatttatcgctaagagatggacccgcgttggattagatagttggtgaggtaacggctcaccaagtcagcgatccatagctggtttgagaggatgatcagccacactgggactgagacacggcccagactcctacgggaggcagcagtggggaatattggacaatgggcgcaagcctgatccagccatgccgcgtgagtgaagaaggccttcgggttgtaaagctctttcagatgcgaagatgatgacggtaacatcagaagaagccccggctaatttcgtgccagcagccgcggtaatacgaaaggggcaagcgttgttcggatttactgggcgtaaagggcacgcaggcggtcttgccagtcaggggtgaaagcccggggctcaaccccggaactgcctctgatactgcaggactagagactaggagagggtggtggaattcccagtgtagaggtgaaattcgtagatattgggaggaacaccagaggcgaaggcggccacctggactagatctgacgctcaggtgcgaaagcgtggggagcaaacaggattagataccctggtagtccacgccgtaaacgatgagtgctagttgtcgggatttcgatttcggtgacgcagctaacgcattaagcactccgcctggggagtacggtcgcaagattaaaactcaaaggaattgacgggggcccgcacaagcggtggagcatgtggtttaattcgaagcaacgcgcagaaccttaccaacccttgacatccctatcgcgaattccagagatggatttcatcagttcggctggataggtgacaggtgctgcatggctgtcgtcagctcgtgtcgtgagatgttgggttaagtcccgcaacgagcgcaacccctgttcctagttgccagcattcagttgggcactctagggagactgccggtgacaagccggaggaaggcggggatgacgtcaagtcctcatggcccttacgggttgggctacacacgtgctacaatggtaactacagagggcagcgacttagcgataagtagccaatcccaaaaagttatctcagttcggattgcactctgcaactcgagtgcatgaagttggaatcgctagtaatcgtggatcagcatgccacggtgaatacgttcccgggccttgtacacaccgcccgtcacaccatgggagttggttttacccgaagacggtgggctaaccttttaggaggcagccggccacggtaaggtcagcgactggggtg

SEQ ID NO: 3361 - DNA, 1464 bp, Thalassotalea agarivorans
ttgaacgctggcggcaggcttaacacatgcaagtcgagcggaaacgaagaggtgcttgcacctctggcgtcgagcggcggacgggtgagtaatgcttgggaatatgccataaggtgggggacaacagttggaaacgactgctaataccgcataatgtctacggaccaaaggaggggctcttcggacctttcgccttttgattagcccaagtgagattagctagttggtggggtaatggcctaccaaggcgacgatctctagctggtttgagaggatgatcagccacactgggactgagacacggcccagactcctacgggaggcagcagtggggaatattgcacaatgggggaaaccctgatgcagccatgccgcgtgtgtgaagaaggccttcgggttgtaaagcactttcagttgtgaggaaaggttagtagttaatacctgctagctgtgacgttagcaacagaagaagcaccggctaactccgtgccagcagccgcggtaatacggagggtgcgagcgttaatcggaattactgggcgtaaagcgtgcgtaggcggttacataagtcagatgtgaaagcccggggctcaacctcggaactgcatttgaaactgtgtgactagagtattgtagagggtggtggaatttccagtgtagcggtgaaatgcgtagagattggaaggaacatcagtggcgaatgcggccacctggacaaatactgacgctgaggcacgaaagcgtggggagcaaacaggattagataccctggtagtccacgccgtaaacgatgtcaactagttgtctgtgcacttgatgcgtgggtgacgtagctaacgcgctaagttgaccgcctggggagtacggccgcaaggttaaaactcaaatgaattgacgggggcccgcacaagcggtggagcatgtggtttaattcgatgcaacgcgaagaaccttaccatcccttgacatccagagaattttctagagatagattagtgccttcgggaactctgagacaggtgctgcatggctgtcgtcagctcgtgttgtgaaatgttgggttaagtcccgcaacgagcgcaacccttatccttatttgccagcgagtaatgtcgggaactttaaggagactgccggtgataaaccggaggaaggtggggacgacgtcaagtcatcatggcccttacgggatgggctacacacgtgctacaatggcgtatacagagggcagcgagaccgcgaggtggagcgaatcccagaaagtacgtcgtagtccggattggagtctgcaactcgactccatgaagtcggaatcgctagtaatcgcgaatcaaaatgtcgcggtgaatacgttcccgggccttgtacacaccgcccgtcacaccatgggagtgggttgcaaaagaagtggctagtttaaccttcgggaggacggtcaccactttgtgattcatgactggggtg

SEQ ID NO: 3362 - DNA, 1463 bp, Thalassotalea euphylliae
attgaacgctggcggcaggcttaacacatgcaagtcgagcggaaacgagaatagcttgctattcggcgtcgagcggcggacgggtgagtaatgcttgggaatatgccttttggtgggggacaacagttggaaacgactgctaataccgcataatgtttacggaccaaagcgggggaccttcgggcctcgtgccaaaagattagcccaagtgagattagctagttggtggggtaaaggcctaccaaggcgacgatctctagctggtttgagaggatgatcagccacactgggactgagacacggcccagactcctacgggaggcagcagtggggaatattgcacaatgggggaaaccctgatgcagccatgccgcgtgtgtgaagaaggccttcgggttgtaaagcactttcagtcgtgaggaaaggttagtaattaatacttgctagctgtgacgttagcgacagaagaagcaccggctaactccgtgccagcagccgcggtaatacggagggtgcgagcgttaatcggaattactgggcgtaaagcgtgcgtaggcggtttgataagccagatgtgaaatcccggggcttaacctcggaactgcatttggaactgtttgactagagtactgtagagggtggtggaatttccagtgtagcggtgaaatgcgtagagattggaaggaacatcagtggcgaaggcggccacctggacagatactgacgctgaggcacgaaagcgtggggagcgaacaggattagataccctggtagtccacgccgtaaacgatgtcaactagccgtttgtggttttaaaccgtgagtggcgtagctaacgcgctaagttgaccgcctggggagtacggtcgcaagattaaaactcaaatgaattgacgggggcccgcacaagcggtggagcatgtggtttaattcgatgcaacgcgaagaaccttaccatcccttgacatccagagaattttctagagatagattagtgccttcgggaactctgagacaggtgctgcatggctgtcgtcagctcgtgttgtgaaatgttgggttaagtcccgcaacgagcgcaacccctatccttatttgccagcgagtaatgtcgggaactctaaggagactgccggtgataaaccggaggaaggtggggacgacgtcaagtcatcatggcccttacgggatgggctacacacgtgctacaatggtacatacagagggcagcaagaccgcgaggtggagcgaatcccagaaagtgtatcgtagtccggattggagtctgcaactcgactccatgaagtcggaatcgctagtaatcgcgaatcagaatgtcgcggtgaatacgttcccgggccttgtacacaccgcccgtcacaccatgggagtgggttgcaaaagaagtggctagtttaaccttcgggaggacggtcaccactttgtgattcatgactggggtg

SEQ ID NO: 3363 - DNA, 1461 bp, Thauera aminoaromatica
attgaacgctggcggcatgctttacacatgcaagtcgaacggcagcgggggcttcggcctgccggcgagtggcgaacgggtgagtaatgcatcggaacgtgcccatgtcgtgggggataacgtagcgaaagctacgctaataccgcatacgccctgagggggaaagcgggggattcttcggaacctcgcgcgattggagcggccgatgtcggattagctagtaggtgaggtaaaggctcacctaggcgacgatccgtagcgggtctgagaggatgatccgccacactgggactgagacacggcccagactcctacgggaggcagcagtggggaattttggacaatgggcgcaagcctgatccagccatgccgcgtgagtgaagaaggccttcgggttgtaaagctctttcggccgggaagaaatcgtggtctctaacataggccatggatgacggtaccggactaagaagcaccggctaactacgtgccagcagccgcggtaatacgtagggtgcgagcgttaatcggaattactgggcgtaaagcgtgcgcaggcggttttgtaagacagatgtgaaatccccgggcttaacctgggaactgcgtttgtgactgcaaggctagagtacggcagaggggggtggaattcctggtgtagcagtgaaatgcgtagagatcaggaggaacaccgatggcgaaggcagccccctgggcctgtactgacgctcatgcacgaaagcgtggggagcaaacaggattagataccctggtagtccacgccctaaacgatgtcgactagtcgttcggagcagcaatgcactgagtgacgcagctaacgcgtgaagtcgaccgcctggggagtacggccgcaaggttaaaactcaaaggaattgacggggacccgcacaagcggtggatgatgtggattaattcgatgcaacgcgaaaaaccttacctacccttgacatgtctggaaccttgctgagaggcgagggtgccttcgggagccagaacacaggtgctgcatggctgtcgtcagctcgtgtcgtgagatgttgggttaagtcccgcaacgagcgcaacccttgtcactagttgccatcatttggttgggcactctagtgagactgccggtgacaaaccggaggaaggtggggatgacgtcaagtcctcatggcccttatgggtagggcttcacacgtcatacaatggtcggtacagagggttgccaagccgcgaggtggagccaatcccttaaagccgatcgtagtccggatcgtagtctgcaactcgactacgtgaagtcggaatcgctagtaatcgcagatcagcatgctgcggtgaatacgttcccgggtcttgtacacaccgcccgtcacaccatgggagtgggtttcaccagaagtaggtagcttaaccttcgggagggcgcttaccacggtgagattcatgactggggtg

SEQ ID NO: 3364 - DNA, 1457 bp, Thauera aromatica
attgaacgctggcggcatgctttacacatgcaagtcgaacggcagcgggggcttcggcctgccggcgagtggcgaacgggtgagtaatgcatcggaacgtgcccagtcgtgggggataacgtatcgaaaggtacgctaataccgcatacgtcctgagggagaaagcgggggatcttcggacctcgcgcgattggagcggccgatgtcggattagctagtaggtgaggtaaaggctcacctaggcgacgatccgtagcgggtctgagaggatgatccgccacactgggactgagacacggcccagactcctacgggaggcagcagtggggaattttggacaatgggggcaaccctgatccagccatgccgcgtgagtgaagaaggccttcgggttgtaaagctctttcggccgggaagaaatcgtggtctctaacataggccatggatgacggtaccggactaagaagcaccggctaactacgtgccagcagccgcggtaatacgtagggtgcgagcgttaatcggaattactgggcgtaaagcgtgctcaggcggttttgtaagacagatgtgaaatccccgggctcaacctgggaactgcgtttgtgactgcaaggctagagtacggcagaggggggtggaattcctggtgtagcagtgaaatgcgtagagatcaggaggaacaccgatggcgaaggcagccccctgggcctgtactgacgctcatgcacgaaagcgtggggagcaaacaggattagataccctggtagtccacgccctaaacgatgtcgactagtcgttcggagcagcaatgcactgagtgacgcagctaacgcgtgaagtcgaccgcctggggagtacggccgcaaggttaaaactcaaaggaattgacggggacccgcacaagcggtggatgatgtggattaattcgatgcaacgcgaaaaaccttacctacccttgacatgccaggaaccttgctgagaggcgagggtgccttcgggagcctggacacaggtgctgcatggctgtcgtcagctcgtgtcgtgagatgttgggttaagtcccgcaacgagcgcaacccttgtcactagttgccatcatttggttgggcactctagtgagactgccggtgacaaaccggaggaaggtggggatgacgtcatgtcctatggcccttatgggtagggcttcacacgtcatacaatggtcggtacagagggttgccaagccgcgaggtggagccaatcccaaaaagccgatcgtagtccggatcgtagtctgcaactcgactacgtgaagtcggaatcgctagtaatcgcagatcagcatgctgcggtgaatacgttcccgggtcttgtacacaccgcccgtcacaccatgggagtgggtttcaccagaagtaggtagcttaaccttcgggagggcgcttaccacggtgagattcatgactggggtg

SEQ ID NO: 3365 - DNA, 1461 bp, Thauera chlorobenzoica
attgaacgctggcggcatgctttacacatgcaagtcgaacggcagcgggggcttcggcctgccggcgagtggcgaacgggtgagtaatgcatcggaacgtgcccatgtcgtgggggataacgtatcgaaaggtacgctaataccgcatacgtcctgagggagaaagcgggggattcttcggaacctcgcgcgattggagcggccgatgtcggattagctagtaggtgaggtaaaggctcacctaggcgacgatccgtagcgggtctgagaggatgatccgccacactgggactgagacacggcccagactcctacgggaggcagcagtggggaattttggacaatgggggcaaccctgatccagccatgccgcgtgagtgaagaaggccttcgggttgtaaagctctttcggccgggaagaaatcgcgcactctaacatagtgtgtggatgacggtaccggactaagaagcaccggctaactacgtgccagcagccgcggtaatacgtagggtgcgagcgttaatcggaattactgggcgtaaagcgtgcgcaggcggttttgtaagacagatgtgaaatccccgggctcaacctgggaactgcgtttgtgactgcaaggctagagtacggcagaggggggtggaattcctggtgtagcagtgaaatgcgtagatatcaggaggaacaccgatggcgaaggcagccccctgggcctgtactgacgctcatgcacgaaagcgtggggagcaaacaggattagataccctggtagtccacgccctaaacgatgtcgactagtcgttcggagcagcaatgcactgagtgacgcagctaacgcgtgaagtcgaccgcctggggagtacggccgcaaggttaaaactcaaaggaattgacggggacccgcacaagcggtggatgatgtggattaattcgatgcaacgcgaaaaaccttacctacccttgacatgtctggaaccttgctgagaggcgagggtgccttcgggagccagaacacaggtgctgcatggctgtcgtcagctcgtgtcgtgagatgttgggttaagtcccgcaacgagcgcaacccttgtcactagttgccatcatttggttgggcactctagtgagactgccggtgacaaaccggaggaaggtggggatgacgtcaagtcctcatggcccttatgggtagggcttcacacgtcatacaatggtcggtacagagggttgccaagccgcgaggtggagccaatcccaaaaagccgatcgtagtccggatcgtagtctgcaactcgactacgtgaagtcggaatcgctagtaatcgcagatcagcatgctgcggtgaatacgttcccgggtcttgtacacaccgcccgtcacaccatgggagtgggtttcaccagaagtaggtagcttaaccttcgggagggcgcttaccacggtgagattcatgactggggtg

SEQ ID NO: 3366 - DNA, 1460 bp, Thauera humireducens
attgaacgctggcggcatgctttacacatgcaagtcgaacggcagcacgggcttcggcctggtggcgagtggcgaacgggtgagtaatgcatcggaacgtgcccatttgtgggggataacgcggcgaaagtcgcgctaataccgcatacgccctgagggggaaagcgggggattcttcggaacctcgcgcaattggagcggccgatgtcagattagctagttggtagggtaaaggcctaccaaggcgacgatctgtagcgggtctgagaggatgatccgccacactgggactgagacacggcccagactcctacgggaggcagcagtggggaattttggacaatgggggcaaccctgatccagccatgccgcgtgagtgaagaaggccttcgggttgtaaagctctttcggccgggaagaaatcggcgactctaacatagtcgctggatgacggtaccggactaagaagcaccggctaactacgtgccagcagccgcggtaatacgtagggtgcgagcgttaatcggaattactgggcgtaaagcgtgcgcaggcggttttgtaagacagatgtgaaatccccgggcttaacctgggaactgcgtttgtgactgcaaggctagagtacggcagaggggggtggaattcctggtgtagcagtgaaatgcgtagatatcaggaggaacaccgatggcgaaggcagccccctgggcctgtactgacgctcatgcacgaaagcgtggggagcaaacaggattagataccctggtagtccacgccctaaacgatgtcgactagtcgttcggagcagcaatgcactgagtgacgcagctaacgcgtgaagtcgaccgcctggggagtacggccgcaaggttaaaactcaaaggaattgacggggacccgcacaagcggtggatgatgtggattaattcgatgcaacgcgaaaaaccttacctacccttgacatgtctggaaccttgctgagaggcgagggtgccttcgggagccagaacacaggtgctgcatggctgtcgtcagctcgtgtcgtgagatgttgggttaagtcccgcaacgagcgcaacccttgtcactagttgccaccattcagttgggcactctagtgagactgccggtgacaaaccggaggaaggtggggatgacgtcaagtcctcatggcccttatgggtagggcttcacacgtcatacaatggtcggtacagagggttgccaaaccgcgaggtggagccaatcccttaaagccgatcgtagtccggatcgtagtctgcaactcgactacgtgaagtcggaatcgctagtaatcgcagatcagcatgctgcggtgaatacgttcccgggtcttgtacacaccgcccgtcacaccatgggagtgggtttcaccagaagtaggtagcttaaccttcgggagggcgcttaccacggtgagattcatgactggggtg

SEQ ID NO: 3367 - DNA, 1460 bp, Thauera linaloolentis
attgaacgctggcggcatgctttacacatgcaagtcgaacggcagcgcgggcttcggcctggcggcgagtggcgaacgggtgagtaatgcatcggaacgtgcccagtcgtgggggataacacatcgaaagatgtgctaataccgcatacgtcctgagggagaaagcgggggaatcttcggatcctcgcgcgattggagcggccgatgtcagattagctagtaggtgaggtaaaggctcacctaggcgacgatctgtagcgggtctgagaggatgatccgccacactgggactgagacacggcccagactcctacgggaggcagcagtggggaattttggacaatgggggcaaccctgatccagccatgccgcgtgagtgaagaaggccttcgggttgtaaagctctttcggccgggaagaaatcgcattctctaacataggatgtggatgacggtaccggactaagaagcaccggctaactacgtgccagcagccgcggtaatacgtagggtgcgagcgttaatcggaattactgggcgtaaagcgtgcgcaggcggtttgccaagacaggcgtgaaatccccgggcttaacctgggaactgcgcttgtgactggcaggctagagtacggcagaggggggtggaattccacgtgtagcagtgaaatgcgtagagatgtggaggaacaccgatggcgaaggcagccccctgggcctgtactgacgctcatgcacgaaagcgtggggagcaaacaggattagataccctggtagtccacgccctaaacgatgtcgactagtcgttcggagcagcaatgcactgagtgacgcagctaacgcgtgaagtcgaccgcctggggagtacggccgcaaggttaaaactcaaaggaattgacggggacccgcacaagcggtggatgatgtggattaattcgatgcaacgcgaaaaaccttacctacccttgacatgccaggaatcttgctgagaggcgagagtgccttcgggagcctggacacaggtgctgcatggctgtcgtcagctcgtgtcgtgagatgttgggttaagtcccgcaacgagcgcaacccttgtcactagttgccatcatttggttgggcactctagtgagactgccggtgacaaaccggaggaaggtggggatgacgtcaagtcctcatggcccttatgggtagggcttcacacgtcatacaatggtcggtacagagggttgccaagccgcgaggtggagccaatcccttaaagccgatcgtagtccggatcgtagtctgcaactcgactacgtgaagtcggaatcgctagtaatcgcagatcagcatgctgcggtgaatacgttcccgggtcttgtacacaccgcccgtcacaccatgggagtgggtttcaccagaagtaggtagcttaaccttcgggggggcgcttaccacggtgagattcatgactggggtg

SEQ ID NO: 3368 - DNA, 1461 bp, Thauera phenylacetica
attgaacgctggcggcatgctttacacatgcaagtcgaacggcagcgggggcttcggcctgccggcgagtggcgaacgggtgagtaatgcatcggaacgtgcccatgtcgtgggggataacgtagcgaaagctacgctaataccgcatacgccctgagggggaaagcgggggattcttcggaacctcgcgcgattggagcggccgatgtcggattagctagtaggtgaggtaaaggctcacctaggcgacgatccgtagcgggtctgagaggatgatccgccacactgggactgagacacggcccagactcctacgggaggcagcagtggggaattttggacaatgggcgcaagcctgatccagccatgccgcgtgagtgaagaaggccttcgggttgtaaagctctttcggccgggaagaaatcgtgttctctaacataggacatggatgacggtaccggactaagaagcaccggctaactacgtgccagcagccgcggtaatacgtagggtgcgagcgttaatcggaattactgggcgtaaagcgtgcgcaggcggttttgtaagacagatgtgaaatccccgggcttaacctgggaactgcgtttgtgactgcaaggctagagtacggcagaggggggtggaattcctggtgtagcagtgaaatgcgtagagatcaggaggaacaccgatggcgaaggcagccccctgggcctgtactgacgctcatgcacgaaagcgtggggagcaaacaggattagataccctggtagtccacgccctaaacgatgtcgactagtcgttcggagcagcaatgcactgagtgacgcagctaacgcgtgaagtcgaccgcctggggagtacggccgcaaggttaaaactcaaaggaattgacggggacccgcacaagcggtggatgatgtggattaattcgatgcaacgcgaaaaaccttacctacccttgacatgtctggaaccttgctgagaggcgagggtgccttcgggagccagaacacaggtgctgcatggctgtcgtcagctcgtgtcgtgagatgttgggttaagtcccgcaacgagcgcaacccttgtcactagttgccatcatttagttgggcactctagtgagactgccggtgacaaaccggaggaaggtggggatgacgtcaagtcctcatggcccttatgggtagggcttcacacgtcatacaatggtcggtacagagggttgccaagccgcgaggtggagccaatcccttaaagccgatcgtagtccggatcgtagtctgcaactcgactacgtgaagtcggaatcgctagtaatcgcagatcagcatgctgcggtgaatacgttcccgggtcttgtacacaccgcccgtcacaccatgggagtgggtttcaccagaagtaggtagcttaaccttcgggagggcgcttaccacggtgagattcatgactggggtg

SEQ ID NO: 3369 - DNA, 1461 bp, Thauera propionica
attgaacgctggcggcatgctttacacatgcaagtcgaacggcagcacgggcttcggcctggtggcgagtggcgaacgggtgagtaatgcatcggaacgtgcccatgtcgtgggggataacgtagcgaaagctacgctaataccgcatacgccctgagggggaaagcgggggattcttcggaacctcgcgcgattggagcggccgatgtcggattagctagtaggtgaggtaaaggctcacctaggcgacgatccgtagcgggtctgagaggatgatccgccacactgggactgagacacggcccagactcctacgggaggcagcagtggggaattttggacaatgggggcaaccctgatccagccatgccgcgtgagtgaagaaggccttcgggttgtaaagctctttcggccgggaagaaatcggcgactctaacatagtcgctggatgacggtaccggactaagaagcaccggctaactacgtgccagcagccgcggtaatacgtagggtgcgagcgttaatcggaattactgggcgtaaagcgtgcgcaggcggttttgtaagacagatgtgaaatccccgggcttaacctgggaactgcgtttgtgactgcaaggctagagtacggcagaggggggtggaattccacgtgtagcagtgaaatgcgtagagatgtggaggaacaccgatggcgaaggcagccccctgggcctgtactgacgctcatgcacgaaagcgtggggagcaaacaggattagataccctggtagtccacgccctaaacgatgtcgactagtcgttcggagcagcaatgcactgagtgacgcagctaacgcgtgaagtcgaccgcctggggagtacggccgcaaggttaaaactcaaaggaattgacggggacccgcacaagcggtggatgatgtggattaattcgatgcaacgcgaaaaaccttacctacccttgacatgtctggaaccttggtgagagccgagggtgccttcgggagccagaacacaggtgctgcatggctgtcgtcagctcgtgtcgtgagatgttgggttaagtcccgcaacgagcgcaacccttgtcactagttgccatcatttagttgggcactctagtgagactgccggtgacaaaccggaggaaggtggggatgacgtcaagtcctcatggcccttatgggtagggcttcacacgtcatacaatggtcggtacagagggttgccaagccgcgaggtggagccaatcccttaaagccgatcgtagtccggatcgtagtctgcaactcgactacgtgaagtcggaatcgctagtaatcgcagatcagcatgctgcggtgaatacgttcccgggtcttgtacacaccgcccgtcacaccatgggagtgggtttcaccagaagtaggtagcttaaccttcgggagggcgcttaccacggtgagattcatgactggggtg

SEQ ID NO: 3370 - DNA, 1460 bp, Thauera terpenica
attgaacgctggcggcatgctttacacatgcaagtcgaacggcagcacgggcttcggcctggtggcgagtggcgaacgggtgagtaatgcatcggaacgtgcccatttgtgggggataactacgcgaaagcgtggctaataccgcatacgccctgagggggaaagcgggggattcttcggaacctcgcgcaattggagcggccgatgtcagattagcttgttggtgaggtaaaggctcaccaaggcgacgatctgtagcgggtctgagaggatgatccgccacactgggactgagacacggcccagactcctacgggaggcagcagtggggaattttggacaatgggggcaaccctgatccagccatgccgcgtgagtgaagaaggccttcgggttgtaaagctctttcagccgggaagaaaacgcactctctaacatagggtgtggatgacggtaccggaagaagaagcaccggctaactacgtgccagcagccgcggtaatacgtagggtgcgagcgttaatcggaattactgggcgtaaagggtgcgcaggcggttttgtaagacagatgtgaaatccccgggcttaacctgggaactgcgtttgtgactgcaaggctagagtacggcagaggggggtggaattccgcgtgtagcagtgaaatgcgtagatatgcggaggaacaccgatggcgaaggcaaccccctgggcctgtactgacgctcatgcacgaaagcgtggggagcaaacaggattagataccctggtagtccacgccctaaacgatgtcaactagtcgttcggagcagcaatgcactgagtgacgcagctaacgcgtgaagttgaccgcctggggagtacggccgcaaggttaaaactcaaaggaattgacggggacccgcacaagcggtggatgatgtggattaattcgatgcaacgcgaaaaaccttacctacccttgacatgtctggaaccttggtgagagccgagggtgccttcgggagccagaacacaggtgctgcatggctgtcgtcagctcgtgtcgtgagatgttgggttaagtcccgcaacgagcgcaacccttgtcattagttgccatcatttagttgggcactctaatgagactgccggtgacaaaccggaggaaggtggggatgacgtcaagtcctcatggcccttatgggtagggcttcacacgtcatacaatggtcggtacagagggttgccaagccgcgaggtggagccaatcccacaaagccgatcgtagtccggatcgtagtctgcaactcgactacgtgaagtcggaatcgctagtaatcgcagatcagcatgctgcggtgaatacgttcccgggtcttgtacacaccgcccgtcacaccatgggagtgggtttcaccagaagtaggtagcttaaccttcgggagggcgcttaccacggtgagattcatgactggggtg

SEQ ID NO: 3371 - DNA, 1483 bp, Thermanaeromonas toyohensis
gacgaacgctggcggcgtgcctaacacatgcaagtcgagcgggccgtagcattaagctggagaggtttagtgttacggtttagcggcggacgggtgagtaacgcgtaggtaacctacccatgagaccgggataaccctgggaaactggggctaatactggatacgctccttttagggcatcctagggggaggaaaggctcttaaggggccgctcatggatgggcctgcgtcccattagctagttggtggggtaatggcctaccaaggctacgatgggtagccggcctgagagggtggtcggccacactgggactgagacacggcccagactcctacgggaggcagcagtgggggatcttgcgcaatgggcgaaagcctgacgcagcgacgccgcgtgggggatgaaggcctttgggttgtaaacccctgtctggagggaagaatggatgacggtacctccggaggaagccccggctaactacgtgccagcagccgcggtaagacgtagggggcgagcgttgtccggaattactgggcgtaaagggcgtgtaggcggtttagcaagtcaggtgtaaaaggctgcggctcaaccgcggttaagcgcctgatactgctggacttgagggcaggagaggggggcggaattcccggtgtagcggtgaaatgcgtagatatcgggaggaacaccagtggcgaaggcggctccctggactggccctgacgctgaggcgcgaaagcgtggggagcaaacaggattagataccctggtagtccacgctgtaaacgatgggtactaggtgttgggggtatcgacccctccagtgccgcagttaacacagtaagtaccccgcctggggagtacggccgcaaggctgaaactcaaaggaattgacgggggcccgcacaagcggtggagcatgtggtttaattcgatgcaacgcgaagaaccttaccagggcttgacatgctggtggtactgacccgaaaggggagggacccttaaggggtagactttaagggagccagcacaggtgctgcatggttgtcgtcagctcgtgtcgtgagatgttgggttaagtcccgcaacgagcgcaacccctacctctagttgccagcgggttaagccgggcactctagagggactgccggcgacaagccggaggaaggtggggatgacgtcaaatcatcatggcccttatgccctgggctacacacgtgctacaatggccggtacagagggtagcgaacctgcgagggggagccaatcccaaaaagccggtctcagttcggattgcaggctgcaactcgcctgcatgaaggcggaatcgctagtaatcgcggatcagccatgccgcggtgaatacgttcccgggccttgtacacaccgcccgtcacaccacgaaagccggcaacacccgaagccggtggagctaaccctggagaagggaggcagccgtcgaaggtggggccggtgattggggtg

SEQ ID NO: 3372 - DNA, 1471 bp, Thermoactinomyces vulgaris
gatgaacgctggcggcgtgcctaatacatgcaagtcgagcgggagaatcatccttcgggatgaggatccagcggcgaacgggtgagtaacacgtgggcaacctgcccgcaagaccgggataactccgggaaaccggggctaataccggatagtccttttccccgcatggggaaaaggggaaaggcggcttcggctgtcacttgcggatgggcccgcggcgcattagctggttggtgaggtaacggctcaccaaggcgacgatgcgtagccgacctgagagggtgatcggccacactgggactgagacacggcccagactcctacgggaggcagcagtagggaattttccgcaatgggcgaaagcctgacggagcaacgccgcgtgagtgaggacggccttcgggttgtaaaactctgttcttgaggaagaattccttccaggcgaacagcctggaaggttgacggtactcaaggagaaagccccggctaactacgtgccagcagccgcggtaatacgtagggggcgagcgttatccggaattattgggcgtaaagcgcgcgcaggcggctgattaagtcaggtgtgaaaggctgcggctcaaccgcagagcggcacctgaaactggtcagcttgagtgcaggagaggggagcggaattcccggtgtagcggtggaatgcgtagagatcgggaggaacaccagtggcgaaggcggctctctggcctgtaactgacgctgaggcgcgaaagcgtggggagcaaacaggattagataccctggtagtccacgccgtaaacgatgagtgctaggtgttggggggctacgcccctcagtgccgaaggtaacccattaagcactccgcctggggagtacggccgcaaggctgaaactcaaaggaattgacgggggcccgcacaagcggtggagcatgtggtttaattcgaagcaacgcgaagaaccttaccagggcttgacatcccgctgacccctccagagatggaggtttccttcgggacagcggtgacaggtggtgcatggttgtcgtcagctcgtgtcgtgagatgttgggttcagtcccgcaacgagcgcaacccttgtcgttagttgccagcatttcggatgggcactctaacgagacagccggtgaaagccggaggaaggtggggatgacgtcaaatcatcatgccccttatgtcctgggctacacacgtgctacaatggctggtacaaagggcagcgaacccgcgagggggagccaatcccaaaaagccagtctcagttcggatcgcaggctgcaactcgcctgcgtgaagccggaatcgctagtaatcgcggatcagcatgccgcggtgaatacgttcccgggccttgtacacaccgcccgtcacaccacgagagtttgcaacacccgaagtcggtgaggcaaccttttaggagccagccgccgaaggtggggcagatgattggggtg

SEQ ID NO: 3373 - DNA, 1480 bp, Thermoanaerobaculum aquaticum
aatgaacgctggcggcgcgcctaacacatgcaagtcgagcgaggccacggcttcggccgtgagtcgagcggcgaacgggtgagtaacgcgtgggtaacgtacccgggagtgggggatagctccgggaaactggaggtaataccgcatacgctcacttcaccgcatggtggagtgaggaaaggttgggacccttcggggccagccgctcccggatcggcctgcgtccgattagctagttggtagggtaacggcctaccaaggctacgatcggtagccggcctgagagggtgaccggccacattgggactgagacacggcccagactcctacgggaggcagcagtggggaatcttgggcaatgggcgaaagcctgacccagcgacgccgcgtgggggatgaaggccttcgggttgtaaacccctgtcaggggggacgaaagcctctcggtgaatagccggggggtctgacggtacccccaaaggaagccccggctaactccgtgccagcagccgcggtaatacggagggggcgagcgttattcggaattactgggcgtaaagcgcgcgcaggtggcgtggcaagtggcaggtgaaagccctcggctcaaccgaggaattgcctgccaaactaccgcgcttgaggccgggagggggaagcggaattcctggtgtagcggtgaaatgcgtagataccaggaggaacaccggtggcgaaggcggcttcctggaccggttctgacactcatgcgcgaaagcgtggggagcaaacaggattagataccctggtagtccacgccctaaacgatgggcactaggcgtcgcgggtgtcgacccctgcggtgccgtagctaacgcgttaagtgccccgcctggggagtacggtcgcaaggctgaaactcaaaggaattgacgggggcccgcacaagcggtggagtatgtggtttaattcgatgcaacgcgaagaaccttacctgggtttgaactgctggggacagctccagagatggggccttcccttcggggactccagcagaggtgctgcatggctgtcgtcagctcgtgccgtgaggtgttgggttaagtcccgcaacgagcgcaacccctgcccctagttgccagcggttcggccggggactctagggggactgccggtgacaaaccggaggaaggtggggatgacgtcaagtcatcatggcctttatgtccagggctacacacgtactacaatggccgctacaaagggctgcgaacccgcgagggggagccaatcccaaaaaagcggcctcagttcggattgcagtctgcaactcgactgcatgaaggtggaatcgctagtaatcgcgcatcagcatggcgcggtgaatacgttcccgggccttgtacacaccgcccgtcacatcacgaaagtcggctgtaccagaagccggtgggctaacccgcaagggaggcagccgtccaaggtatggtcggcgattggggtg

SEQ ID NO: 3374 - DNA, 1443 bp, Thermobrachium celere
gacgaacgctggcggcgtgcctaacacatgcaagtcgagcggaggggataggagcttgctccttgaaccttagcggcggacgggtgagtaacacgtgggtaacctgcccttgagagggggataacaggtcgaaaggcctgctaataccgcataacgctaagatgccgcatggcgtcttagccaaaggttaattccgctcaaggatgggcccgcggcccattagctagttggtgaggtaatggctcaccaaggcgacgatgggtagccggcctgagagggtggtcggccacactgggactgagacacggcccagactcctacgggaggcagcagtggggaatattgcgcaatgggggaaaccctgacgcagcgacgccgcgtgagcgatgaaggccttcgggttgtaaagctctgtcttccctgacgataatgacggtaagggaggaggaagccacggctaactacgtgccagcagccgcggtaatacgtaggtggcaagcgttgtccggaattactgggcgtaaagggtgcgtaggcggctctttaagtggggtgtgaaatccctgggctcaacccaggaactgcactccaaactggagagctagagtgcaggagaggaaagcggaattcccagtgtagcggtgaaatgcgtagagattgggaggaacaccagtggcgaaggcggctttctggactgtaactgacgctgaggcacgaaagcgtggggagcaaacaggattagataccctggtagtccacgctgtaaacgatgggtactaggtgtagggggcgaagccctctgtgccgcagctaacgcattaagtaccccgcctggggagtacggtcgcaagattaaaactcaaaggaattgacgggggcccgcacaagcagcggagcatgtggtttaattcgaagcaacgcgaagaaccttaccagggcttgacatccaccgaaccctgtggaaacacgggggtgcccttcggggaacggtgagacaggtggtgcatggttgtcgtcagctcgtgtcgtgagatgttgggttaagtcccgcaacgagcgcaacccttgcctttagttgccagcacttcgggtgggcactctaaagggactgcctgggttaaccaggaggaaggtggggatgacgtcaaatcatcatgccccttatgctctgggctacacacgtgctacaatggccggtacaatgagttgcaaacccgtgagggggagctaatctcaaaaaccggtcccagttcggattgtaggctgcaactcgcctacatgaagccggagttgctagtaatcgcggatcagcatgccgcggtgaatacgttcccgggccttgtacacaccgcccgtcacaccatgagagccggcaacacccgaagccagtgggctaacccgcaagggaggcagctgtcgaaggtggggctggtgattggggtg

SEQ ID NO: 3375 - DNA, 1503 bp, Thermocrinis albus
cgcgaacgctggcggcgtgcctaacacatgcaagtcgtgcgcaggctcatctgtcctctggacagatgggtgctgagcggcaaacgggtgagtaacacgtgcctaacctacccccaggaaggggataaccctccgaaaggggggctaataccctataaagccgggggccactaaggctacccggccaaagggggcctctggtctctgaccatgctcccgcctggggatgggggcgcggcccatcaggtagttggtggggtaacggcctaccaagcctatgacgggtagccggcctgagagggtggccggccacagtgggactgagacacggcccacacccctacggggggcagcagtggggaatcgtgggcaatgggcgaaagcctgaccccgcgacgccgcgtgggggatgaagcccttcggggtgtaaacccctgtcgggggggacgatgcggcctggggcgaacagtctcgggtcgtgacggtacccccagaggaagggacggctaactacgtgccagcagccgcggtaatacgtaggtcccgagcgttgcgcgaattcactgggcgtaaagcgtccgcagccggacgggtaagcggttcgtcaaagcccacggctcaaccgtggaacggcgtaccgaactgcccgtcttgaggcacgctcaggcaggcggaattcccggtgtagcggtgaaatgcgtagatatcgggaggaacaccgaaggcgaaggcagcctgctggggctgtcctgacggtcagggacgaaagctgggggagcgaaccggattagatacccgggtagtcccagccgtaaaccatgggcgcttggcgtcgtccgtaagggcggtgccgcagctaacgcggtaagcgccccgcctggggagtacgggcgcaagcctgaaactcaaaggaattggcgggggcccgcacaaccggtggagcgtctggttcaattcgatgctaaccgaaaaaccttacccgggcttgacatggtgggaaacccctgcgaaagcggggggtgccgtcctctggacggaatcccaccacaggtggtgcatggccgtcgtcagctcgtgtcgtgagatgttgggttaagtcccgcaacgagcgcaacccctgcccttagttgctaccccgtaaggggagcactctaaggggaccgccggcgataagccggaggaaggtggggatgacgtcaggtcagtatgccctttatgcccggggctacacaggcgctacagtggccgggacaatgggatgcgacccagtaatggggagctaatcccccaaacccggtcatggtgcagattgagggctgaaactcgccctcatgaagccggaatcggtagtaatggcggatcagctaagccgccgtgaatacgttctcgggccttgcacacaccgcccgtcacgccacggaagtcagtcttcccggaagcccccgggctaaccggtcttcggaccggaggcaggggacgatgggaaggctggcaactggggcg

SEQ ID NO: 3376 - DNA, 1491 bp, Thermocrinis minervae
cgcgaacgctggcggcgtgcctaacacatgcaagtcgtgcgcaggctcgcccttcggggcgggtgctgagcggcaaacgggtgagtaacacgtgagtaacctgccctcgggaaggggataaccctccgaaaggggggctaataccctataatgccctgggtcactaaggctcagggtgaaaggtggcctctgctctgcatgctaccgcccgaggaggggctcgcggcccatcaggtagttggtggggtaacggcctaccaagcctatgacgggtagccggcctgagagggtggccggccacagtgggactgagacacggcccacacccctacggggggcagcagtggggaatcgtgggcaatgggcgaaagcctgaccccgcgacgccgcgtgggggaagaagcccttcggggtgtaaacccctgtcgggggggacgatgcggccatggacgaatagtccttggtcgtgacggtacccccagaggaagggacggctaactacgtgccagcagccgcggtaatacgtaggtcccgagcgttgcgcgaattcactgggcgtaaagcgtccgcagccggatgggtaagcggtttgtcaaagcccaccgctcaacggtggaaaggcaaaccgaactgcccatcttgaggcaagctcaggtaggcggaattcccggtgtagcggtgaaatgcgtagatatcgggaggaacaccggtggcgaaggcggcctactggagctgtcctgacggtcagggacgaaagctgggggagcaaaccggattagatacccgggtagtcccagccgtaaaccatgggtgctaggcgttgtccctttggggcagtgccggagctaacgcgttaagcgccccgcctggggagtacgggcgcaagcctgaaactcaaaggaattggcgggggcccgcacaaccggtggagcgtctggttcaattcgatgctaaccgaaaaaccttacccgggcttgacatggtgggaaacccttgcgaaagcgaggggtgccgtcctctggacggaatcccaccacaggtggtgcatggccgtcgtcagctcgtgtcgtgagatgttgggttaagtcccgcaacgagcgcaacccctgcccttagttgctacgccggaaggcgggcactctaaggggactgccggcgataagccggaggaaggtggggatgacgtcaggtcagtatgccctttatgcccggggctacacaggcgctacagtggccaggacaatgggaagcgacccagtaatggggagcaaatccctaaacctggtcatggtgcagattgagggctgaaactcgccctcatgaagccggaatcggtagtaatggcggatcagctaagccgccgtgaatacgttctcgggccttgcacacaccgcccgtcacgccacggaagtcagtcttcccggaagccctcgggctaaccacctgcaagggtgggggcagaggacgatgggaaggctggcaactggggcg

SEQ ID NO: 3377 - DNA, 1483 bp, Thermocrinis ruber
cgcgaacgctggcggcgtgcctaacacatgcaagtcgtgcggaggggtgatgagcccctcagcggcaaacgggtgagtaacacgtgagtaacctgcccctgggaaggggataaccctccgaaaggggggctaataccctatatagccggggaccactaaggtctcccggtgaaaggtggcctctgcccttcacgggcatgctaccgcccagggaggggctcgcggcccatcaggtagttggtggggtaacggcctaccaagcctatgacgggtagccggcctgagagggtggccggccacagtgggactgagacacggcccacacccctacggggggcagcagtggggaatcgtgggcaatgggcgaaagcctgaccccgcgacgccgcgtgggggatgaagcccttcggggtgtaaacccctgtcgggggggacgatgtgtcctggggtgaataatcccagggcatgacggtacccccagaggaagggacggctaactacgtgccagcagccgcggtaatacgtaggtcccgagcgttgcgcgaattcactgggcgtaaagcgtccgcagccggacgggtaagcggtgcgtcaaagcccaccgctcaacggtggaacggcgtaccgaactgcctgtcttgaggcacgctcaggcaggcggaattcccggtgtagcggtgaaatgcgtagatatcgggaggaacaccgaaggcgaaggcagcctgctggagctgtcctgacggtcagggacgaaagctgggggagcaaaccggattagatacccgggtagtcccagccgtaaaccatgggcgcttggcgtcgtcctcgtggcggtgccgcagctaacgcggtaagcgccccgcctggggagtacgggcgcaagcctgaaactcaaaggaattggcgggggcccgcacaaccggtggagcgtctggttcaattcgatgctaaccgaaaaaccttacccgggcttgacatggtgggaaacccttgcgaaagcgaggggtgccgtcctctggacggaatcccaccacaggtggtgcatggccgtcgtcagctcgtgtcgtgagatgttgggttaagtcccgcaacgagcgcaacccctgcccttagttgctaccccgaatggggagcactctaaggggactgccggcgataagccggaggaaggtggggatgacgtcaggtcagtatgccctttatgcccggggcaacacaggcgctacagtggccaggacaatgggatgcgacccagtaatggggagcaaatcccccaaacctggtcatggtgcagattgagggctgaaactcgccctcatgaagccggaatcggtagtaatggcggatcagctaagccgccgtgaatacgttctcgggccttgcacacaccgcccgtcacgccacggaagtcagtcttcccggaaggccccgagctaacccgcaagggaggcaggggacgatgggaaggctggcaactggggcg

SEQ ID NO: 3378 - DNA, 1496 bp, Thermodesulfatator autotrophicus
ggcgaacgctggcggcgcgcctaacacatgcaagtcgagggggaaagggcggcttcggctgcccgagtacaccggcagacgggtgagtaacgcgtgggtaacctgccttggggtctgggataaccacccgaaagggtggctaataccggatacgttcctgaggtgcgagccgagggaagaaagggtgccgctgcatagcaagcacctgccctaagaggggcccgcgtcccatcagctagttggtgaggtaacggctcaccaaggcgacgacgggtagccggcctgagagggtggtcggccacactggcactgagacacgggccagactcctacgggaggcagcagtggggaatcttgggcaatggccgaaaggctgacccagcgacgccgcgtgggggaagaaggccttcgggtcgtaaacccctgtcaaggaggaagaagccctttctggttaagagctaggaggggttgacggtactcctggaggaagccacggctaactccgtgccagcagccgcggtaatacggaggtggcgagcgttgcccggaatcactgggcgtaaagggggcgtaggcggccggacgagtcggacgtgaaagcccggggctcaaccccggaattgcgttcgatactgtctggcttgaggtccggagaggccggcggaattcccggtgtaggggtgaaatccgtagatatcgggaggaacaccggtggcgaaggcggccggctggacggcacctgacgctgaggcccgaaagcgtggggagcaaaccggattagatacccgggtagtccacgccgtaaacgatgggtgctaggtgtggggggttagaccttccgtgccgaagctaacgcaataagcaccccgcctggggagtacggccgcaaggctgaaactcaaaggaattgacgggggcccgcacaagcggtggagcacgtggtttaattcgatgcaaagcgaagaaccttacctgggtttgacatgctaggggaccttccagagatgggagggtgcccgggttttacccgggagccctagcacaggtgctgcatggctgtcgtcagctcgtgtcgtgagatgttgggttaagtcccgcaacgagcgcaaccctcgcccttagttgccagcgggtagagccgggcactctagggggactgccggggacaacccggaggaagggggggatgacgtcaagtcatcatggcccttatgcccagggctacacacgtgctacaatgggcggtacagagggaagcgaacccgcaagggggagcagaacccagaaagccgtcctcagtacggatcggggtctgcaactcgaccccgtgaagccggaatcgctagtaacggcggatcagcatgccgccgtgaatacgttcccgggccttgtacacaccgcccgtcacaccacggaagctggctctgcccgaagtcgctatcccaacccccggtagggggagggaggcgccgacggcagggctggtgactggggtg

SEQ ID NO: 3379 - DNA, 1496 bp, Thermodesulfatator indicus
ggcgaacgctggcggcgcgcctaacacatgcaagtcgagggggaaagggtagcttcggctacccgagtacaccggcagacgggtgagtaacgcgtgggtaacctaccttggggtctgggataaccacccgaaagggtggctaataccggatacgttcctgaggcgcgagccgagggaagaaagggtgccactgcatagcaagcacctgccctaagaggggcccgcgtcccatcagctagttggtgaggtaacggctcaccaaggcaacgacgggtagccggcctgagagggtggtcggccacactggcactgagacacgggccagactcctacgggaggcagcagtggggaatcttgggcaatggccgaaaggctgacccagcgacgccgcgtgggggaagaaggccttcgggtcgtaaacccctgtcaaggaggaagaagcccttactggttaagagctggtaggggttgacggtactcctggaggaagccacggctaactccgtgccagcagccgcggtaatacggaggtggcgagcgttgcccggaatcactgggcgtaaagggggcgtaggcggccggacgagtcggacgtgaaagcccggggctcaaccccggaattgcgttcgatactgtctggcttgaggtccggagaggccggcggaattcccggtgtaggggtgaaatccgtagatatcgggaggaacaccggtggcgaaggcggccggctggacggcacctgacgctgaggcccgaaagcgtggggagcaaaccggattagatacccgggtagtccacgccgtaaacgatgggtgctaggtgtggggggttaaaccttccgtgccgaagctaacgcaataagcaccccgcctggggagtacggccgcaaggctgaaactcaaaggaattgacgggggcccgcacaagcggtggagcacgtggtttaattcgatgcaaagcgaagaaccttacctgggtttgacatgctaggggacccctcagagatgagggggtgcccgggctttgcctgggagccctagcacaggtgctgcatggctgtcgtcagctcgtgtcgtgagatgttgggttaagtcccgcaacgagcgcaacccttgcccttagttgccagcgggtagagccgggcactctagggggactgccggggacaacccggaggaagggggggatgacgtcaagtcatcatggcccttatgcccagggctacacacgtgctacaatgggcggtacagagggaagcgaacccgtaagggggagcaaatcccagaaagccgctctcagtacggatcggggtctgcaactcgaccccgtgaagccggaatcgctagtaacggcggatcagcatgccgccgtgaatacgttcccgggccttgtacacaccgcccgtcacaccacgggagctggctctgcccgaagtcgctatcccaacccccggaagggggagggaggcgccgacggcagggctggtgactggggtg

SEQ ID NO: 3380 - DNA, 1394 bp, Thermodesulfitimonas autotrophica
cggcggacgggtgagtaacgcgtggataacctgcccgggagaccgggataactctgggaaactggagctaataccggatacgcttctgctggggcatcctggtggaaggaaagggattaccgctctcggatgggtccgcgtcccattagcttgttggcggggtaacggcccaccaaggcgacgatgggtagccggcctgagagggtggtcggccacactgggactgagacacggcccagactcctacgggaggcagcagtggggaatattccgcaatgggcgcaagcctgacggagcgacgccgcgtgggggacgaaggccttcgggttgtaaacccctgtcgtaggggaagatgcccctttggggtgacggtaccctacaagaaagccccggctaactacgtgccagcagccgcggtaagacgtagggggcgagcgttgtccggaatcactgggcgtaaagggcgtgtaggcggcttcagaagtcgcgggtgaaatctccaggctcaacctggaggctgcctgcgaaaccatggagcttgagggcaggagaggggagtggaattcccggtgtagcggtgaaatgcgtagatatcgggaggaacaccagtggcgaaggcggctctctggcctggccctgacgctgaggcgcgaaagctgggggagcaaacaggattagataccctggtagtcccagccgtaaacgatgggcactaggtgtgggggaggatctaactcttccgtgccgaaggtaacctattaagtgccccgcctggggagtacggccgcaaggttgaaactcaaaggaattgacgggggcccgcacaagcggtggagcatgtggtttaattcgacgcaacgcgaagaaccttaccagggcttgacatgccggtggtagtgaaccgaaaggggaacgacccatggggtaacttatgggagccggcacaggtggtgcatggctgtcgtcagctcgtgtcgtgagatgttgggttaagtcccgcaacgagcgcaacccttacccttagttgccagcgggtgaagccgggcactctaagggactgccgtcgacaagacggaggaaggtggggatgacgtcaagtcatcatgccctttatgccctgggctacacacgtgctacaatggccggtacagcgggaagcgatgccgcgaggcggagcaaatcccttaaaaccggtctcagttcggattgcaggctgcaactcgcctgcatgaaggcggaatcgctagtaatcgccggtcagcacacggcggtgaatacgttcccgggccttgtacacaccgcccgtcacaccacgaaagccggcaacacccgaagtcgctgttcctaacccgcaagggagggagccgccgaaggtggggtcggtgattggggtg

SEQ ID NO: 3381 - DNA, 1444 bp, Thermodesulfobium acidiphilum
gacgaacgctggcggcgtgcctaacacatgcaagtcgaacggagatagaagcttgcttctatcttagtggcaaacgggtgagtaacgcgtgggtaacctacccttaagtgggggataacaggtcgaaaggcctgctaataccgcatacctttcaagcacacaagtgtttgaaagaaaggagcaatccgcttgaggaggggcctgcgtcctatcaggtagttggtgaggtaatggctcaccaagcctatgacgggtagctggtctgagaggatggtcagccacactggaactgagacacggtccagactcctacgggaggcagcagtggggaatattccgcaatgggcgaaagcctgacggagcgacgccgcgtggacgatgaagaccctatgggttgtaaagtccttttgtgagggaagaagatctgacggtacctcacgaataagccacggctaactacgtgccagcagccgcggtaaaacgtaggtggcaagcgttgtccggaattactgggcgtaaagagtgcgtaggctgttttgtaagtctcaggtgaaatctatcagctcaactgataaactgcttgagatactgcagaacttgagggcaggagaggagagtggaattcccggtgtagcggtgaaatgcgtagatatcgggaggaacaccagtggcgaaggcggctctctggactgtccctgacgctgtggcacgaaagctaggggagcaaacaggattagataccctggtagtcctagccgtaaacgatggatgcttggtgtaggaggttataccttctgtgccgaagctaacgcgttaagcatcccgcctgggaactacggccgcaaggttaaaactcaaaggaattgacgggggcccgcacaagcggtggagcatgtggtttaattcgacgcaacgcgaagaaccttaccagggcttgacatgtaagtggtacggatccgaaaggtgaaggaaccgagcttgctcggtagcttacacaggtggtgcatggctgtcgtcagctcgtgccgtgaggtgttgggttaagtcccgcaacgagcgcaacccctatcgttagttactactctgaaaaagagaggactctaatgagactgccggcgataagccggaggaaggaggggacgacgtcaagtcatcatgccctttatgccctgggcgacacacgtgctacaatggctggtacaacgggttgcaacaaagcgatttggagccaatcccttaaagccagcctcagttcggatcgtaggctgaaactcgcctacgtgaagtcggaatcgctagtaatcgccaatcagccacgtggcggtgaatacgttcccgggccttgtacacaccgcccgtcacaccacggaagctggcaatgcccgaagccgctgacccaaccattaggagggaggcgtcgaaggcagggtcggtgactggggtg

SEQ ID NO: 3382 - DNA, 1442 bp, Thermodesulfobium narugense
gacgaacgctggcggcgtgcctaacacatgcaagtcgaacggagatagaagcttgcttctatcttagtggcaaacgggtgagtaacgcgtgggtaacctacccttaagtgggggataacaggtcgaaaggcctgctaataccgcatacctttcaagcacacaagtgtttgaaagaaaggagtaatccgcttgaggaggggcctgcgtcctatcaggtagttggtgaggtaacggctcaccaagcctatgacgggtagctggtctgagaggatggtcagccacactggaactgagacacggtccagactcctacgggaggcagcagtggggaatattccgcaatgggcgaaagcctgacggagcgacgccgcgtggacgatgaagaccctatgggtcgtaaagtccttttgtgagggaagaagctctgacggtacctcacgaataagccacggctaactacgtgccagcagccgcggtaaaacgtaggtggcaagcgttgtccggaattactgggcgtaaagagtgcgtaggctgttttgtaagtctcaggtgaaatctatcagctcaactgataaactgcttgagatactgcagaacttgagggcaggagaggagagtggaattcccggtgtagcggtgaaatgcgtagatatcgggaggaacaccagtggcgaaggcgactctctggactgtccctgacgctgtggcacgaaagctaggggagcaaacaggattagataccctggtagtcctagccgtaaacgatggatgcttggtgtaggaggttataccttctgtgccgaagctaacgcgttaagcatcccgcctgggaactacggccgcaaggttaaaactcaaaggaattgacgggggcccgcacaagcggtggagcatgtggtttaattcgacgcaacgcgaagaaccttaccagggtttgacatgtaagtggtacggatccgaaaggtgaaggaaccgagcttgctcggtagcttacacaggtggtgcatggctgtcgtcagctcgtgccgtgaggtgttgggttaagtcccgcaacgagcgcaacccctatcgttagttactactcgaaaagagaggactctaatgagactgccggcgataagccggaggaaggaggggacgacgtcaagtcatcatgccctttatgccctgggcgacacacgtgctacaatggctggtacaacgggttgcaacaaagcgatttggagccaatcccttaaagccagcctcagttcggatcgtaggctgaaactcgcctacgtgaagtcggaatcgctagtaatcgccaatcagccacgtggcggtgaatacgttcccgggccttgtacacaccgcccgtcacaccacggaagctggcaatgcccgaagccgctgacccaaccattaggagggaggcgtcgaaggcagggtcggtgactggggtg

SEQ ID NO: 3383 - DNA, 1490 bp, Thermodesulforhabdus norvegica
aacgctggcggcgtacctaacacattcaactcgcacgagaaaggctgggtgaaagctggccgagtaaagtggcgcacgggtgagtaacgcgtgagtgacctaccctggtgtctgggataaccctgcgaaagtggggctaataccggatgagcctacctggaggtgatctgggtagggaaagggggcctctcggagaagctcctgcactgggatgggctcgcgtcctatcagctagttggtggggtaatggcctaccaaggctacgacgggtagccggcctgagagggtggtcggccacactggcactggaacacgggccagactcctacgggaggcagcagtgagggatattgcgcaatggccgcaaggctgacgcagcgacgccgcgtgggtgaggaaggccttcgggttgtaaagccctgtcggcggggaagaaccttcatggggttaatagccctgtggactgacggtacccgcggaggaagcaccggctaactccgtgccagcagccgcggtaatacggagggtgcgagcgttactcggaattactgggcgtaaagggcgcgtaggcggccgtgcaagtctggtgtgaaagcccggggcttaaccctggaagtgcactggatactgtgcggcttgagtgccggagaggaggggggaattcccggtgtagcggcgaaatgcgtagatatcgggaggaataccggtggcgaaggcgcccctctggacggttactgacgctgaggcgcgaaagcgtggggagcaaacaggattagataccctggtagtccacgctgtaaacgatgggacctaggtggtgcgggttataactctgccgtgccgtagctaacgcgttaagtgggccgcctggggagtacggccgcaaggttaaaactcaaaggaattgacgggggcccgcacaagcggtggagcatgtggtttaattcgatgcaacgcgaagaaccttacctgggtttgacatccccggaacctggtggaaacactggggtgccccttattggggagccgggagacaggtgctgcatggctgtcgtcagctcgtgtcgtgagatgttgggttaagtcccgcaacgagcgcaacccctgcctctagttgccagcgggtaaggccgggcactctagagggactgccggtgataaaccggaggaaggtggggacgacgtcaagtcatcatggcctttatgcccagggctacacacgtgctacaatggccggtacaaagggatgcgaacctgcgagggggagcaaatcccaaaaagccggtcccagttcggatcggagtctgcaactcgactccgtgaaggcggaatcgctagtaatcgcggatcagcatgccgcggtgaatacgttcccgggccttgtacacaccgcccgtcacaccacgaaagtcggctgtaccagaagtgcgtgggccaaccgcgattgtgtcgtggggcagcgtaccaaggtatggtcgatgattggggtg

SEQ ID NO: 3384 - DNA, 1457 bp, Thermodesulfovibrio aggregans
agcgaacgctggcggcgtgcctaacacatgcaagtcgagcggactacatgaaggggtaactcttcatgtagttagcggcgaacgggtgagtaacacgtgggtaacctaccctcaggtgggggataactcggggaaacctgagctaataccccataagactacgggctgaaaggcttgtagtaaaagaagcaattcgcctgaggatgggcccgcggcctatcaggtagttggtagggtaatggcctaccaagcctatgacgggtagccgagctgagaggctggccggccacactgggactgagacacggcccagactcctacgggaggcagcagtggggaatcttgggcaatgggcgaaagcctgacccagcgacgccgcgtgggggaagaaggccttcgggttgtaaaccccttttgcaggggacgacacaggacggtaccctgcgaataagccacggctaactctgtgccagcagccgcggtaagacagaggtggcgagcgttgctcggatttactgggcttaaagggcgcgtaggtggccttgtaagtcaaaggtggaattccacagctcaactgtggaactgcctttgatactgcaaggcttgagtcaggtagaggagggcggaattcccggtgtagcggtgaaatgcgtagatatcgggaggaaggccggtggcgaaggcggccctctgggcctgtactgacactgaggcgcgaaagcgtggggagcaaacaggattagataccctggtagtccacgccctaaacggtgggcactaggtgtgggatccgtatggattccgtgccgaagggaaaccattaagtgccccgcctggggagtacggccgcaaggttgaaactcaaaggaattgacgggggcccgcacaagcggtggagcatgtggtttaattcgatgcaacgcgaagaaccttacctgggcttgacatgctggtggtaggaacccgaaagggggacgaccttaggggaaaccctaaggagccagcacaggtgctgcatggctgtcgtcagctcgtgccgtgaggtgttgggttaagtcccgcaacgagcgcaacccctatcccctgttgccagcggataatgccgggcactctggggaaactgccggcgacaagccggaggaaggtggggatgacgtcaagtccgcatggcccttatgcccagggctacacacgtgctacaatgggcgctacaaagggttgcgaacccgcgagggggagccaatccctaaaaagcgctctcagttgggatcggagtctgcaactcgactccgtgaacccggaatcgctagtaatcgcgcatcagctacggcgcggtgaatacgttcccgggccttgtacacaccgcccgtcacaccacgagagctggcttcatccgaagttggtgggctaacccgcaagggaggcagccaacgaagatggggctggtgattggggtg

SEQ ID NO: 3385 - DNA, 1457 bp, Thermodesulfovibrio yellowstonii
agcgaacgctggcggcgtgcctaacacatgcaagtcgagcggaccagaaatggaggtaactttatttctggttagcggcgaacgggtgagtaacacgtgggtaacctgccctcaggaggaggataactcggggaaacctgagctaatactccataagaccacgagctgaaatgcttgtggtaaaagaagcaattcacctgaggatgggcccgcggcctatcaggtagttggtagggtaatggcctaccaagcctatgacgggtagccgagctgagaggctggccggccacactgggactgagacacggcccagactcctacgggaggcagcagtggggaatattgggcaatgggcgaaagcctgacccagcgacgccgcgtgggggaagaaggccttcgggttgtaaaccccttttgcaggggacgacacaggacggtaccctgcgaataagccacggctaactctgtgccagcagccgcggtaagacagaggtggcaagcgttgctcggattcactgggcttaaagggcgcgtaggtggttttgtaagtctaaggtggaattccacagcttaactgtgggactgcctttgatactgcaaggcttgagtcaggcagaggagggcggaattcccggtgtagcggtgaaatgcgtagatatcgggaggaaggcctgtggcgaaggcggccctctgggcctgcactgacactgaggcgcgaaagcgtggggagcaaacaggattagataccctggtagtccacgccctaaacggtgggcactaggtgtggggtccatatggactctgtgccgaagggaaaccattaagtgccccgcctggggagtacggccgcaaggttgaaactcaaaggaattgacgggggcccgcacaagcggtggagcatgtggtttaattcgatgcaacgcgaagaaccttacctgggcttgacatgctggtggtaggaacccgaaagggggacgaccttaggggtaactctaaggagccagcacaggtgctgcatggctgtcgtcagctcgtgccgtgaggtgttgggttaagtcccgcaacgagcgcaacccctatcccctgttgccatcaggtaaagctgggcactctggggaaactgccggcgacaagccggaggaaggtggggatgacgtcaagtccgcatggcccttatgtccagggctacacacgtgctacaatgggcgctatagagggtagcaagcccgcgagggtgagccaatccctaaaaagcgctctcagttgggatcggagtctgcaattcgactccgtgaacccggaatcgctagtaatcgcgcatcagctacggcgcggtgaatacgttcccgggccttgtacacaccgcccgtcacaccacgagagctggcttcatccgaagttggtgagctaacccgtaagggaggcagccaacgaagatggggctggtgattggggtg

SEQ ID NO: 3386 - DNA, 1443 bp, Thermoflavimicrobium dichotomicum
gatgaacgctggcggcgtgcctaatacatgcaagtcgagcggggttatttccttcgggaaataacctagcggcgaacgggtgagtaacacgtgggcaacctgcccctaagactgggataactccgggaaaccggggctaataccagataacctcttccctcgcatgagggaagagtaaaaggcttttgccacttagggatgggcccgcggcgcattagctagttggtgaggtaacggctcaccaaggcgacgatgcgtagccgacctgagagggtgaccggccacactgggactgagacacggcccagactcctacgggaggcagcagtagggaattttccgcaatgggcgaaagcctgacggagcaacgccgcgtgagcgaagacggccttcgggttgtaaagctctgttcttggggaagaaggaagtgacggtacccaaggagaaagccccggctaactacgtgccagcagccgcggtaatacgtagggggcgagcgttatccggaattattgggcgtaaagcgcgcgcaggcggccaggtaagtcggatgtgaaaggctacggctcaaccgtagagcggcatccgaaactgtctggcttgagtgcaggagaggggagcggaattcccggtgtagcggtggaatgcgtagagatcgggaggaacaccagtggcgaaggcggctctctggcctgtaactgacgctgaggcgcgaaagcgtggggagcaaacaggattagataccctggtagtccacgccgtaaacgatgagtgctaggtgttggagggactctcccttcagtgccgcaggtaacccaataagcactccgcctggggagtacggtcgcaagactgaaactcaaaggaattgacgggggcccgcacaagcggtggagcatgtggtttaattcgaagcaacgcgaagaaccttaccagggcttgacatcccgctgaccggtgtagagatacgcctttccccttcgggggacagcggtgacaggtggtgcatggttgtcgtcagctcgtgtcgtgagatgttgggttcagtcccgcaacgagcgcaacccttatctccagttgccagcacttcgggtgggcactctggagagacagccggtgaaagccggaggaaggtggggatgacgtcaaatcatcatgccccttatgtcctgggctacacacgtgctacaatggctggtacaaagggcagcgaacccgcgagggggagccaatcccaaaaagccagtctcagttcggattgcaggctgcaactcgcctgcatgaagccggaatcgctagtaatcgcggatcagcatgccgcggtgaatacgttcccgggccttgtacacaccgcccgtcacaccacgagagtctgcaacacccgaagtcggtgaggcaaccgcaaggagccagccgccgaaggtggggcagatgattggggtg

SEQ ID NO: 3387 - DNA, 1491 bp, Thermoflexus hugenholtzii
ggtgaacgctggcggcgtgcctaacacatgcaagtcgagcggggagggggtaggcgtaagccgagccctcctagcggcaaacgggtgagtaacacgtgggtgacctgccccggcgtgggggataaccctccgaaaggggggctaataccgcatacgctcggcggggacggcccgtcgaggaaaggcccggggaggagacgaaccgggtcgcgccgggaggggcccgcggcccatcaggtagttggtggggtaatggcccaccaagccgatgacgggtagccggcctgagagggtgaccggccacacgggcactgagacacgggcccgactcctacgggaggcagcagtggggaatcttgggcaatgggcgaaagcctgacccagcgacgccgcgtgcgggaagaagcccttcggggtgtaaaccgcttttgccggggacgagaaaggacggtacccggcgaataaggcccggccaactacgtgccagcagccgcggtaatacgtaggggccgagcgttacccggatttactgggcgtaaagtgcgcgtaggcggggctctaagtcgggcgtgaaagccccgggctcaactcggggaggccgctcgatactggagcccttgagggcgggagagggtggtggaattcccggtgtagcggtgaaatgcgtagatatcgggaggaacaccagtggggaagccggccacctggcccgtccctgacgctgaggcgcgaaagcgtggggagcgaaccggattagatacccgggtagtccacgccctaaacgatgcgcactaggtatggggggctgaccacgctctccgtgccgaagctaacgcgttaagtgcgccgcctgggtagtacggccgcaaggctgaaactcaaaggaattggcgggggcccgcacaagcagcggagcgtgtggtttaattcgatgcaaaacgaagaaccttacccgggcttgacatgccggtggtaccgacccgaaagggaagggaccccgcaaggggagccggcacaggtgctgcatggctgtcgtcagctcgtgccgtgaggtgtcgggttaagtcccgcaacgagcgcaacccctgcccctagttacacgtgtctagggggactgccggcgacaagccggaggaaggtggggatgacgtcaagtcagcatggccttgatgcccggggctacacacacgctacaatgcccggtacaatgggttgccaacccgcgagggggagccaatcccatcaaagccgggctcagttgggattgcaggctgcaacccgcctgcatgaacgcggagttgctagtaaccgccggtcagccatacggcggtgaatacgttcccgggccttgcacacaccgcccgtcacgtcatgggagtcggcaacgcctgaagccggtggcccaaccctcccccacccaggacctctccccggaggggtcttgcgtgggggagggagggagccgtcgaaggcggggccggcgactgggac

SEQ ID NO: 3388 - DNA, 1464 bp, Thermogutta terrifontis
agtgaacgttggcggcgtggattaggcatgcaagtcgtgcgacgaggcccgcaagggtgctcgagcggcgaaagggagagtaatgcatgggtaacctgccctcgggactgggatagccgcgggaaactgcgggtaataccagataacgtcgcaagccttcgggtttgcgaccaaaggtgcgagtccgcccgaggaggggcccatgtcctatcagctagttggtggggtaacggctcaccaaggctacgacgggtacggggtgtgagagcatgtccccgctcactgggactgagacactgcccagacacctacgggtggctgcagtcgagaatcttcggcaatgggcgcaagcctgaccgagcgacgccgcgtgcgggacgaaggccgtttggttgtaaaccgctgtcaggggggaggaaatgtcggtcctcagggccggcttgacctatccccagaggaaggacgggctaagtccgtgccagcagccgcggtaagacggaccgtccgaacgttactcggaattactgggcttaaagggtgcgtaggcggccttgcaagtcgggtgtgaaatccctcggctcaaccgaggaattgcgctcgatactgcggggctcgagggagatagaggtgagcggaacttgcggtggagcggtgaaatgcgttgatatcgcaaggaacaccggaggcgaaagcggctcactgggtctctcctgacgctgaggcacgaaagctaggggagcgaacgggattagataccccggtagtcctagccctaaacgatgagcactagaccgaggaactctccatggtttcttggtcgtagggaaaccgttaagtgctccgcctggggagtatggtcgcaaggctgaaactcaaaggaattgacgggggctcacacaagcggtggaggatgtggcttaattcgaggctacgcgaaaaaccttatcccggtcttgacatgcacggattaaccccgtgaaagcggggccacgcctctctgaggtggaacgtgcacaggtgctgcatggctgtcgtcagctcgtgtcgtgagatgtcgggttaagtcccttaacgagcgaaacccctgtcgctagttgccagcgggtcatgccgggcactctagcgagactgccggtgttaaaccggaggaaggtggggatgacgtcaagtcctcatggcccttatgaccggggctgcacacgtcctacaatggcgcgtacaaagggaagcaaacccgcgagggggagcaaatcccaaaaagcgcgccccagttcagattgcaggctgcaacccgcctgcatgaagccggaatcgctagtaatcgcggatcagcatgccgcggtgaatgtgttcctgagccttgtacacaccgcccgtcaagccacgaaagtgggggacatccgaagtcgccgggctaacccgaaagggaggcaggcgccgaagatggactccgcgattgggact

SEQ ID NO: 3389 - DNA, 1514 bp, Thermohydrogenium kirishiense
gacgaacgctggcggcgtgcctaacacatgcaagtcgagcgatccggcactcaactaagcgcttacaggaagaaaagacgggaaagagaaaaaaggcaggaagagaaaaaaatatgagtaaacgcggagttgagtgtcggatagcggcggacgggtgagtaacgcgtggacaatctaccctgtagactgggataacacctcgaaaggggtgctaataccggataatgtcgagaagcggcatcgcttttcgaagaaaggagggaatccgctataggaggagtccgcgtcccattagctagttggtggggtaacggcccaccaaggcgacgatgggtagccggcctgagagggtgaacggccacactggaactgagacacggtccagactcctacgggaggcagcagtggggaatattgtgcaatgggggaaaccctgacacagcgacgccgcgtgagtggagaaggccttcgggtcgtaaagctcaatagtatgggaagaaagaaatgacggtaccatacgaaagccccggctaactacgtgccagcagccgcggtaatacgtagggggcgagcgttgtccggaattactgagcgtaaagagcacgtaggcggctataaaagtcagatgtgaaaaacctgggctcaaccgagggtatgcatctgaaactatatagcttgagtcaaggagaggagagcggaattcctggtgtagcggtgaaatgcgtagagatcaggaagaataccagtggcgaaagcggctctctggacttgaactgacgctgaggtgcgaaagcgtggggagcaaacaggattagataccctggtagtccacgccgtaaacgatggatactaggtgtgggttagtataatccgtgccggagttaacgcaataagtatcccgcctggggagtacggccgcaaggttgaaactcaaaggaattgacgggggcccgcacaagcagcggagcatgtggtttaattcgaagcaacgcgaagaaccttaccagggcttgacatccacagaatcgagtagaaatacttgagtgcctcgtaagaggagctgtgagacaggtggtgcacggttgtcgtcagctcgtgtcgtgagatgttgggttaagtcccgcaacgagcgcaacccctgttggtagttaccagcgtaaagacggggactctaccgagactgccgtggaaaacacggaggaaggcggggatgacgtcaaatcatcatgccctttatgccctgggctacacacgtgctacaatggcctgaacagagggcagcgaaggagcgatccggagcgaatcccagaaaacaggtcccagttcagattgcaggctgcaacccgcctgcatgaagacggagttgctagtaatcgcggatcagcatgccgcggtgaatacgttcccgggccttgtacacaccgcccgtcacaccacgagagtttacaacacccgaagtcagtgacctaaccgaaagggaggagctgccgaaggtggggtaaatgattggggtg

SEQ ID NO: 3390 - DNA, 1427 bp, Thermolongibacillus altinsuensis
agtcgagcggaccgaatggaagcttgctttcattcggttagcggcggacgggtgagtaacacgtgggtaacctgcccgtaagaccgggataacttcgggaaaccggagctaataccggataacaccgaggatcgcatgatccttggttgaaaggtggcttcggctaccacttacggatgggcccgcggcgcattagctagttggtgaggtaacggctcaccaaggcgacgatgcgtagccggcctgagagggtgaccggccacactgggactgagacacggcccagactcctacgggaggcagcagtagggaatcttccgcaatggacgaaagtctgacggagcgacgccgcgtgagcgaagaaggccttcgggtcgtaaagctctgttgttagggaagaacaagtaccgttcgaatagggcggtaccttgacggtacctaacgagaaagccccggctaactacgtgccagcagccgcggtaatacgtagggggcgagcgttgtccggaattattgggcgtaaagcgcgcgcaggcggtcccttaagtctgatgtgaaagcccacggctcaaccgtggagagccattggaaactggggggacttgagtgcagaagaggagagcggaattccatgtgtagcggtgaaatgcgtagagatttggaggaaccccagtggcgaaggcggctctctggtctgtaactgacgctgaggccggaaaggctggggagccaaccagattagattccctggtagttcacgccgtaaacgatgagtgctaagtgttagagggtttaaccctttagtgctgtagctaacgcattaagcactccgcctggggagtacggccgcaaggctgaaactcaaaggaattgacgggggcccgcacaagcggtggagcatgtggtttaattcgaagcaacgcgaagaaccttaccaggtcttgacatcccctgacaaccctagagatagggcgttccctcccttcggggagggacagggtgacaggtggtgcatggttgtcgtcagctcgtgtcgtgagatgttgggtttaagtcccgcaacgagcgcaacccttgaccttagttgccagcgagtaaagtcgggcactctaaggtgactgccggctaaaagtcggaggaaggtggggatgacgtcaaatcatcatgccccttatgacctgggctacacacgtgctacaatgggcggtacaaagggtcgcgaagccgcgaggtggagctaatcccaaaaagccgctctcagttcggattgcaggctgcaactcgcctgcatgaagccggaatcgctagtaatcgcggatcagcatgccgcggtgaatacgttcccgggccttgtacacaccgcccgtcacaccacgagagcttgcaacacccgaagtcggtgaggtaacccttacgggagccagccg

SEQ ID NO: 3391 - DNA, 1467 bp, Thermomonas haemolytica
  misc_feature (1414)..(1414): n is a, c, g, or t
  misc_feature (1446)..(1446): n is a, c, g, or t
  misc_feature (1458)..(1458): n is a, c, g, or t
  misc_feature (1467)..(1467): n is a, c, g, or t
agtgaacgctggcggcaggcctaatacatgcaagtcgaacggcagcacagtggagcttgctccatgggtggcgagtggcggacgggtgaggaatacgtgggaatctgcccagtcgtgggggataacgtagggaaacttacgctaataccgcatgcgcccttcgggggaaagccggggaccttcgggcctggcgcgattggatgagcccacgtcggattagctagttggcggggtaacggcccaccaaggcgacgatccgtagctggtctgagaggatgatcagccacactggaactgagacacggtccagactcctacgggaggcagcagtagggaatattggacaatgggcgcaagcctgatccagccatgccgcgtgagtgaagaaggccctcgggttgtaaagctcttttgtccggaaagaaaagcatcgggttaataccccggtgttctgacggtaccggaagaataagcaccggctaacttcgtgccagcagccgcggtaatacgaagggtgcaagcgttactcggaattactgggcgtaaagcgtgcgtaggtggttcgttaagtctgatgtgaaagccctgggctcaacctgggaatggcattggaaactggcggactggagtgcggtagagggtagcggaattcccggtgtagcagtgaaatgcgtagagatcgggaggaacatccgtggcgaaggcggctacctggaccagcactgacactgaggcacgaaagcgtggggagcaaacaggattagataccctggtagtccacgccctaaacgatgcgaactggatgttgggtgcaacttggcactcagtatcgaagctaacgcgttaagttcgccgcctggggagtacggtcgcaagactgaaactcaaaggaattgacgggggcccgcacaagcggtggagtatgtggtttaattcgatgcaacgcgcagaaccttacctggccttgacatgcacggaagcttccagagatgggagtgtgccttcgggaaccgtgacacaggtgctgcatggctgtcgtcagctcgtgtcgtgagatgttgggttaagtcccgcaacgagcgcaacccttgtccttagttgccagcacgtaatggtgggaactctaaggagaccgccggcgacaagccggaggaaggtggggatgacgtcaagtcatcatggcccttacggccagggctacacacgtactacaatggtggggacagagggctgcgatgccgcgaggcggagccaatcccagaaaccccatcccagtccggattggagtctgcaactcgactccatgaagtcggaatcgctagtaatcgcagatcagcattgctgcggtgaatacgttcccgggccttgtacacaccgcccgtcacaccatgggagtctgttgcaccagaagcangtagcttaaccgcaaggagggcgcttgccacngtgtggccgatnactggggtn

SEQ ID NO: 3392 - DNA, 1467 bp, Thermomonas hydrothermalis
agtgaacgctggcggcaggcctaatacatgcaagtcggacggcagcacagtggagcttgctccatgggtggcgagtggcggacgggtgaggaatacatgggaatctgcccagtcgtgggggataacgtagggaaacttacgctaataccgcatgcgcccttcgggggaaagccggggaccttcgggcctggcgcgattggatgagcccatgtcggattagctagttggcggggtaaaggcccaccaaggcgacgatccgtagctggtctgagaggatgatcagccacactgggactgagacacggcccagactcctacgggaggcagcagtagggaatattggacaatgggggcaaccctgatccagccatgccgcgtgagtgaagaaggccttcgggttgtaaagctcttttgtccgggaagaaaagcatctggctaatacctggatgtgttgacggtaccggaagaataagcaccggctaacttcgtgccagcagccgcggtaatacgaagggtgcaagcgttactcggaattactgggcgtaaagcgtgcgtaggtggtctgctaagtctgatgtgaaagccctgggctcaacctgggaatggcattggaaactggcgggctagagtgcggtagagggtagtggaattcccggtgtagcagtgaaatgcgtagagatcgggaggaacattcgtggcgaaggcggctacctggaccagcactgacactgaggcacgaaagcgtggggagcaaacaggattagataccctggtagtccacgccctaaacgatgcgaactggaggttgggtgcactttggcgctcagtctcgaagctaacgcgttaagttcgccgcctggggagtacggtcgcaagactgaaactcaaaggaattgacgggggcccgcacaagcggtggagtatgtggtttaattcgatgcaacgcgcagaaccttacctggccttgacatgcacggaatcctgcagagatgtgggagtgccttcgggaaccgtgacacaggtgctgcatggctgtcgtcagctcgtgtcgtgagatgttgggttaagtcccgcaacgagcgcaacccttgtccttagttgccagcacgtaaaggtgggaactctaaggagaccgccggcgacaagccggaggaaggtggggatgacgtcaagtcatcatggcccttacggccagggctacacacgtactacaatggtggggacagagggctgcgatgccgcgaggcggagccaatcccagaaaccccatctcagtccggattggagtctgcaactcgactccatgaagtcggaatcgctagtaatcgcagatcagcattgctgcggtgaatacgttcccgggccttgtacacaccgcccgtcacaccatgggagtctgttgcaccagaagcaggtagcttaaccgcaaggagggcgcttgccacggtgtggccgatgactggggtg

SEQ ID NO: 3393 - DNA, 1449 bp, Thermophagus xiamenensis
gatgaacgctagcgacaggcctaacacatgcaagtcgaggggtaacaggggcagcttgctgcctgctgacgaccggcgcacgggtgagtaacgcgtatgcaacctgtctttaacaggaggatagcccccggaaacggggattaatactccatgatacttgtgtttcgcatgagatacaagttaaagctgaggcggttaaaggtgggcatgcgtgacattagctagttggtgaggtaacggctcaccaaggcgacgatgtctaggggttctgagaggaaggtcccccacactggtactgagacacggaccagactcctacgggaggcagcagtgaggaatcttggtcaatggacggaagtctgaaccagccatgtcgcgtgcaggaagacggccctacgggttgtaaactgcttttgtacgggaataaaagccattacgagtagtggattgaatgtaccgtacgaataagcatcggctaactccgtgccagcagccgcggtaatacggaggatgcgagcgttatccggacttattgggtttaaagggtgcgtaggcggaatggtaagtcagcggtgaaatactacagctcaactgtagggatgccgatgatactgtcattcttgagtatacttgaggcatgcggaatgagtagtgtagcggtgaaatgcatagatattactcagaacaccgatagcgaaggcagcatgctaaggtaatactgacgctgaggcacgaaagcgtgggtatcaaacaggattagataccctggtagtccacgccgtaaacgatgattactggttgtttgtccgttaaaggataagcgactgagcgaaagcattaagtaatccacctggggagtacgtcggcaacgatgaaactcaaaggaattgacgggggcccgcacaagcggtggaacatgtggtttaattcgatgatacgcgaggaaccttacctgggcttaaatgcagagtggtgtactgggaaaccggtatttcttcggacactttgcaaggtgctgcatggttgtcgtcagctcgtgccgtgaggtgtcgggttaagtcccataacgagcgcaacccctgttgtcagttaccagcacgtaatggtggggactctgacaagactgccggtgtaaaccgcgaggaaggtggggatgacgtcaaatcagcacggcccttacgtccagggctacacacgtgttacaatggccggtacagagggcagcgagacagcgatgttgagcgaatcctaaaaagccggtctcagttcggattggagtctgcaacccgactccatgaagctggaatcgctagtaatcgcgcatcagccatggcgcggtgaatacgttcccgggccttgtacacaccgcccgtcaagccatggaagccggtggtacctgaagtctgtaaccgcaaggagcggcctagggtaaagccggtgactggggct

SEQ ID NO: 3394 - DNA, 1483 bp, Thermosinus carboxydivorans
gacgaacgctggcggcgtgcctaacacatgcaagtcgaacggggagcatagcaatatgctcctagtggcgaacgggtgagtaacgcgtagacaacctaccttctagatggggataacaccgcgaaagtggtgctaataccgaatgtgtcagcttgggcgcatgcccaggttgagaaaggtggcctctggaaacaagctaccgctagaagatgggtctgcgtctgattagctagttggtagggtaacggcctaccaaggcgacgatcagtagccggtctgagaggatggacggccacactgggactgagacacggcccagactcctacgggaggcagcagtggggaatcttccgcaatgggcgaaagcctgacggagcaacgccgcgtgggtgaagaaggccttcgggtcgtaaagccctgtcaatcgggacgaagtttacttatgcgaacagtgtaagtaagtgacggtaccggaggaggaagccacggctaactacgtgccagcagccgcggtaatacgtaggtggcaagcgttgtccggaattattgggcgtaaagcgcgcgtaggcgggacgtcaagtccatcttaaaaggcctgggctcaaccctggtatgggatggaaactgacgttcttgagtgcaggagaggaaagtggaattcccggtgtagcggtgaaatgcgtagatatcgggaggaacaccagtggcgaaggcggctttctggactgtgtctgacgctgaggcgcgaaagccaggggagcgaacgggattagataccccggtagtcctggccgtaaacgatgggtactaggtgtgggaggtaaccaatccttctgtgccggagttaacgcaataagtaccccgcctggggagtacggccgcaaggctgaaactcaaaggaattgacgggggcccgcacaagcggtggagtatgtggtttaattcgacgcaacgcgaagaaccttaccagggcttgacatcgagggaagcggctagagatagtcgcgtcttgccttagggcaagacccgaagacaggtggtgcatggctgtcgtcagctcgtgtcgtgagatgttgggttaagtcccgcaacgagcgcaacccttatcccttgttgccagcacgttatggtggggactcaagggagactgccgcagacaatgcggaggaaggtggggatgacgtcaagtcatcatgccccttatgtcctgggctacacacgtactacaatgggcttaaatagagggcatgcgaagccgcgaggcagagcgaaccccaaaaacaagctctcagttcggatcgcaggctgcaactcgcctgcgtgaagtcggaatcgctagtaatcgcagatcagcatgctgcggtgaatacgttcccgggccttgtacacaccgcccgtcacaccacgagagtcgagagcacccgaagccggtggggtaaccgcaaggggccagccgtcgaaggtgagatcgatgattggggtg

SEQ ID NO: 3395 - DNA, 1406 bp, Thermosporothrix hazakensis
  misc_feature (165)..(165): n is a, c, g, or t
  misc_feature (217)..(217): n is a, c, g, or t
gacgaacgctggcggcgtgcctaacacatgcaagtcgaacgcccttccctcgtggaagggagtggcggacgggtgagtaacacgtgggtacctaccccgaagtgaggaataccggcgagaaatcgccgacaataccgcatacgctcctgcgggagcaaagctcgnaagggcgctttgggatgggcctgcggccgattagctagctggtgaggtaacngcttaccagggcgacgatcggtagctggtctgagaggacgatcagccacactgggattgagaacggcccagactcctacggggggcagcagtgaggaattttcggcaatgggggcaaccctgaccgagcaacgccgcgtgcaggaagacggccttcgggttgtaaactgcttttctgtgggacgagcaaggacggtaccacaggaagaagccccggctaactacgtgccagcagccgcggtaatacgtagggggcgagcgttgtccggagttactgggcgtaaagcgcatgcaggcggtcgggtaagtttgcactgacagtcatcggcttaactgatggaggcgtgcgaaaactgtccgacttgagggctctagaggggtgcggaattccgagtggagcggtgaaatgcgtagagattcggaggaacaccgaaggcgaaggcagcgccctggagagtacctgacgctcagatgcgaaagctaggggagcgaacgggattagataccccggtagtcctagccgtaaacgatgaccactagatgtccggagtatcgacccttcgggtatcggagctaacgcgttaagtggtccgcctggggagtacggtcgcaagattaaaactcaaaggaattgacggggacccgcacaagcagcggagcgtgtggtttaattcgatgcaacgcgaagaaccttaccaggtcttgacatcacactgacagctctagagatagggtcttccttcgggacagtgtgacaggtgctgcatggctgtcgtcagctcgtgtcgtgagatgttgggttaagtcccgcaacgagcgcaaccctcgtcgctagttgaatgttctagcgagaccgccgttacaaagcggaggaaggtggggatgacgtcaagtcagcacggcccttacgacctgggcgacacacacgctacaatggccgggacaaagggcagccaacccgcgagggggagccaatcccatcaaacccggtctcagttcagattgcaggctgcaacccgcctgcatgaagtcggagttgctagtaaccgtaggtcagcacactacggtgaatacgttcccgggtcttgtacacaccgcccgtcacaccacgaaagtcggcaacacctgaagccgctgggctaacctcgttgaggaggcaggcgtcgagggtggggtcggtgattggggtg

SEQ ID NO: 3396 - DNA, 1507 bp, Thermosulfidibacter takaii
cgcgaacgctagcggcgcgcctaacacatgcaagtcgtggggcagcaggccgaatccttcgggattcggtgctggcgaccggcggacgggtgagtaacgcgtgagtaacctacccctaggaccgggataaccctccgaaaggggggctaataccggataagctcacggtgcgcatgtactgtgagaaaagggggcctctgcttagcatgctcccgcctagggatgggctcgcgtcccatcagctagttggtggggtaacggcccaccaaggctatgacgggtagccggcctgagagggtggtcggccacacgggcactgagacacgggcccgactcctacgggaggcagcagtggggaatattgggcaatgggcgcaagcctgacccagcgacgccgcgtgggggatgaaggcctttgggtcgtaaacccctgtcaggagggaagaacggctcggtggtgaataatcaccgggtctgacggtacctccagaggaagggacggctaactacgtgccagcagccgcggtaatacgtaggtcccgagcgttgcgcggaatcactgggcgtaaagagtgcgtaggcggcctggtaagtcggaggttaaagcccacggctcaaccgtggaactgcctccgatactgctgggcttgaggccgggagaggccggcggaattcccggtgtagcggtgaaatgcgtagatatcgggaggaacaccggaggcgaaggcggccggctggcccgcgcctgacgctgaggcacgaaagcgtggggagcaaaccggattagatacccgggtagtccacgccgtaaaccatgggtgctaggtgtggggagggacaacctctccgtgccgaagctaacgcgttaagcaccccgcctggggagtacggccgcaaggctgaaactcaaaggaattgacggggacccgcacaagcggcggagcatgtggtttaatccgacgctacgcgtagaaccttaccagggcttgacatgctggcataagcccgcccgaaagggttgggtgggtatggccttgtgccataccggccagcacaggtgttgcatggctgtcgtcagctcgtgccgtgaggtgttcggttaagtccggcaacgagcgcaacccctgcccctagttgccagcggttcggccgggcactctagggggactgccggcgataagccggaggaaggtggggatgacgtcaagtcatcatggcccttatgccctgggctacacacgtgctacaatggccgggacagagggttgcgaagccgcgaggcggagccaatcccaaaaacccggtcccagttcggattgcaggctgcaactcgcctgcatgaagccggagtcgctagtaatcgcggatcagctacgccgcggtgaatacgttcccgggtcttgtacacaccgcccgtcacaccacgaaagtcgggtgtaccggaagccggtaaccccaacccggcaacgggagggggccgaccaaggtatgcccggcgattggggtg

SEQ ID NO: 3397 - DNA, 1497 bp, Thermosulfurimonas dismutans
ggcgaacgctggcggcgtgcctaacacatgcaagtcgtgggggaaagggaggcttcggcctcccgagtacaccggcagacgggtgagtaacacgtgggtaacctgcccccgggtccgggataacctctcgaaaggggggctaataccggataaagtgcgtgggcgcaagctcacgcaccaaagggggcctctgcatagcaagctcctgcctggggaggggcccgcggcccatcagctagttggtggggtaacggcccaccaaggctacgacgggtagccggcctgagagggtggtcggccacacgggcactgagacacgggcccgactcctacgggaggcagcagtggggaatcttgggcaatgggcgcaagcctgacccagcgacgccgcgtgggggaagaaggccttcgggtcgtaaacccctgtcaggggggaagaaccctgctccggtgaataaccggatgcaggctgacggtacccccagaggaagccacggctaactccgtgccagcagccgcggtaatacggaggtggcaagcgttgcccggaatcactgggcgtaaagggggcgtaggcggccaggcaagtcggaggttaaagcccggggctcaaccccggaaaggcctccgatactgcttggcttgaggaccggagaggctggcggaattcccggtgtaggggtgaaatccgtagatatcgggaggaacaccagtggggaagccggccagctggacggttcctgacgctgaggcccgaaagcgtggggagcaaaccggattagatacccgggtagtccacgccgtaaacgatgggcgctgggtgtggggggttaatccctccgtgccgtagctaacgcgttaagcgccccgcctggggagtacggccgcaaggctgaaactcaaaggaattgacgggggcccgcacaagcggtggagcacgtggtttaattcgatgcaaagcgaagaaccttacccgggcttgacatgctagggtcgtacccggcagagatgtcggggaggtcagactttgtctgaccgctctagcacaggtgctgcatggctgtcgtcagctcgtgtcgtgagatgttgggttaagtcccgcaacgagcgcaaccctcgcccctagttgccagcggttcggccgggcactctagggggactgccggggacaacccggaggaaggaggggatgacgtcaagtcctcatggcccttatgcccggggctacacacgtgctacaatgggcggtacagagggttgcgaacccgcaagggggagctaatcccagaaagccgccctcagttcggatcggggtctgcaactcgaccccgtgaagccggaatcgctagtaacggcggatcagcatgccgccgtgaatacgttcccgggccttgtacacaccgcccgtcacaccacggaagccggctctgcccgaagtcgctgtcccaaccccgtaaggggagggaggcgcctacggcagggctggtgactggggtg

SEQ ID NO: 3398 - DNA, 1412 bp, Thermosynechococcus elongatus
gatgaacgctggcggtctgcttaacacatgcaagtcgaacgagcacttcggtgctagtggcggacgggtgagtaacacgtgagaatctaccctcaggagggggataacggctggaaacggccgctaataccccatatgccgcaaggtgaaatcttttttggcctggggatgagctcgcggtggattagctagttggtggggtaatggcctaccaaggcgacgatccatagctggtctgagaggatgatcagccacactgggactgagacacggcccagactcctacgggaggcagcagtggggaattttccgcaatgggcgaaagcctgacggagcaagaccgcgtgagggatgaaggcctttgggttgtaaacctcttttctcagggaagaacacaatgacggtacctgaggaataagcctcggctaactccgtgccagcagccgcggtaagacggaggaggcaagcgttatccggaattattgggcgtaaagcgtccgcaggtggctttccaagtctgccgtcaaagcccgaggcttaacctcggatcggcggtggaaactggatcgctagagtgcgtcaggggtagggggaattcccggtgtagcggtgaaatgcgtagatatcgggaagaacaccagtgacgaaagtgccctactgggacgttactgacactcatggacgaaagctaggggagcgaaagggattagatacccctgtagtcctagccgtaaacgatggacactaggtgttgctggtatccactccagcagtgccgtagccaacgcgttaagtgtcccgcctggggagtacgcacgcaagtgtgaaactcaaaggaattgacgggggcccgcacaagcggtggagtatgtggtttaattcgatgcaacgcgaagaaccttaccagggcttgacatgtcgcgaatcccgcggaaacgtgggagtgccttcgggaacgcgaacacaggtggtgcatggctgtcgtcagctcgtgtcgtgagatgttgggttaagtcccgcaacgagcgcaaccctcgtccttagttgccagcattcagttgggcactctagggagactgccggtgacaaaccggaggaaggtggggatgacgtcaagtcatcatgccccttacgtcctgggctacacacgtactacaatgctgtggacaaagagttgccaacccgcgagggcgagctaatctcttaaaccacggctcagttcagattgcaggctgcaactcgcctgcatgaaggcggaatcgctagtaatcgcaggtcagcatactgcggtgaatacgttcccgggccttgtacacaccgcccgtcacaccatgggagttggccatgcccgaagtcgttactctaacccgcaagggagggggacgcctaaggcagggctgatgactggggtg

SEQ ID NO: 3399 - DNA, 1423 bp, Thermosyntropha lipolytica
  misc_feature (225)..(225): n is a, c, g, or t
  misc_feature (761)..(761): n is a, c, g, or t
cctagtggcggacgggtgagtaacgcgtgaccaacctacccataagttggggatgacactgggaaactggtgctaataccgcataagcttgttatctcgcatgggggacacagtaaagatggcctataggggctatcgcttatggatgggctcgcgtctgattagctagttggtggggtaacggcctaccaaggcgacgatcagtaaccgacctgagagggtggncggccacactgggactgagacacggcccagactcctacgggaggcagcagtggggaatattgctcaatgggggaaaccctgactcagcgaccccgcgtgagcgaagaaggcctttgggtcgtaaagctctgttgtaagggacgaaggacacgctgcgaatagtggcgtgaggtgacggtaccttacgaggaagccccggctaactacgtgccagcagccgcggtaagacgtagggggcgagcgttgtccggaattactgggcgtaaagagcacgtaggcgggtgaataagtcaggtgtgaaagaccggagctcaacttcggggttgcatctgatactgttcatcttgagggcaggagagggcagtagaattcctggtgtagcggtgaaatgcgtagaaatcaggaggaataccggtggcgaaggcggctgcctggactgtccctgacgctgaggtgcgaaagcgtggggagcaaacaggattagataccctggtagtccacgctgtaaacgatggatactaggtgtaggaggtatngaccccttccgtgccggagcaaacgcaataagtatcccgcctggggagtacggtcgcaaggctgaaactcaaaggaattgacgggggcccgcacaagcggtggagcatgtggtttaattcgatgcaacgcgaagaaccttaccaggccttgacatccagcgaacctggtggaaacactggggtgcctgtcgaaaggcaggagcgctgagacaggtggtgcatggttgtcgtcagctcgtgtcgtgagatgttgggttaagtcccgcaacgagcgcaacccttgccattagttgctaacaggtgaagctgagcactctaatgggactgcccgtgacaagcgggaggaaggtggggatgacgtcaaatcatcatgccctttatggtctgggctacacacgtgctacaatgggtggtacagagagaggcgaagccgcgaggtggagcgaatctcaaaaagccactctcagttcggattgcagtctgcaactcgactgcatgaagtcggaatcgctagtaatcgcgaatcagcatgtcgcggtgaatgcgttcccgggccttgtacacaccgcccgtcacaccacgaaagtcggcaacacccgaagtcggtgagctaaccgcggaagcggaggcaaccgccgaaggtggggtcggtgattggggtg

SEQ ID NO: 3400 - DNA, 1511 bp, Thermovibrio ammonificans
cgcgaacgctgtcggcgtgcctaacacatgcaagtcgtggggcagcgggccggttccttcgggaaccggtgccggcgaccggcgaacgggtgagtaacgcgtgagcaacctaccccgaggagggggataacccggggaaacccgggctaataccccataagcgcacaggccgcatggcccgtgtgaaaagggtggcctctgcttcgcatgctgccgcctcgggatgggctcgcgtcccatcaggtagttggtggggtaacggcctaccaagcctacgacgggtagctggtctgagaggatggccagccacaccgggactgagacacggcccggactcctacgggaggcagcagtggggaatcttgggcaatgggcgcaagcctgacccagcgacgccgagtggaggatgaagcccttcggggtgtaaactcctgtcgccggggacgatgcgggcgggggtgaatagcccccgcccgtgacggtacccggagaggaagggacggctaactacgtgccagcagccgcggtaatacgtaggtcccgagcgttgcgcgaaattactgggcgtaaagtgcgcgtaggcgggccagtaagtcagaggtgaaagcccccggctcaaccggggaattgcctctgatactgctggcctagggtccggaagacgctggcggaattcccggtgtagcggtgaaatgcgtagatatcgggaggaacaccggtggcgaaggcggccagcgaggacggtaccgacgctgaggcgcgaaagcgtggggagcaaaccggattagatacccgggtagtccacgctgtaaacgatgggtgctgggcgttgcaccctaaagggtgcagtgccgaagctaacgcgttaagcaccccgcctggggagtacggccgcaaggctgaaactcaaaggaatagacgggggcccgcacaagcggtggagcatgtggtttaattcaatgctacgcgaagaaccttaccagggcttgacatgccgggggtagccctgccgaaaggcagggtcgtggcccccttcggggggcccacccggcacaggtggtacatggccgtcgtcagctcgtgccgtgaggtgttgggttaagtcccgcaacgagcgcaacccctgtccctagttgccagcgggtaatgccgggcacactagggagactgccggcgacaagccggaggaagggggggatgacgtcaggtcagtatgccccttacgccctgggctacacacgtgctacaatggccgggacagagggattgcgaagccgcgaggtggagcaaatctcagaaacccggtcccagttcggattgcaggctgcaactcgcctgcatgaagctggaatcgctagtaacggccggtcagctacacggccgtgaatacgttcccgggccttgtactcaccgcccgtcacaccccggaagctggctctaccagaagtccccgagccaacccccctctcggggggaggcaggggccgaaggtagggccggtgactggggtg

SEQ ID NO: 3401 - DNA, 1508 bp, Thermovibrio guaymasensis
cgcgaacgctgtcggcgtgcctaacacatgcaagtcgtggggcagcgggcgggctccttcgggagcccgtgccggcgaccggcgaacgggtgagtaacgcgtgagcaacctaccccgaggagggggataacccggggaaacccgggctaataccccataagcgcacggcccgcatgggctgtgtgaaaagggtggcctctgctttgcaagctgccgcctcgggatgggctcgcgtcccatcaggtagttggtgaggtaacggctcaccaagcctacgacgggtagccggcctgagagggtggccggccacaccgggactgagacacggcccggactcctacgggaggcagcagtggggaatcttgggcaatgggcgcaagcctgacccagcgacgccgagtggaggaagaagcccttcggggtgtaaactcctgtcgccggggacgatgcgggtaggggttaatagcctctacccgtgacggtacccggagaggaagggacggctaactacgtgccagcagccgcggtaatacgtaggtcccgagcgttgcgcgaaattactgggcgtaaagtgcgcgtaggcgggccagtaagtcagaggtgaaagcccccggctcaaccggggaattgcctctgatactgctggcctagggtccggaagacgctggcggaattcccggtgtagcggtgaaatgcgtagatatcgggaggaacaccggtggcgaaggcggccagcgaggacggtaccgacgctgaggcgcgaaagcgtggggagcgaaccggattagatacccgggtagtccacgctgtaaacgatgggtgctgggcgttgtgcccgatagggtgcagtgccgaaggtaacccgttaagcaccccgcctggggagtacggccgcaaggctgaaactcaaaggaatagacgggggcccgcacaagcggtggagcatgtggtttaattcaatgctacgcgaagaaccttaccagggcttgacatgccgggggtagccctgccgaaaggcagggtcgcggcccccttcggggggcccacccggcacaggtggtacatggccgtcgtcagctcgtgccgtgaggtgtgggttaagtcccgcaacgagcgcaacccctgtccctagttgccagcgggtaaagccgggcacactagggagactgccggcgataagccggaggaagggggggatgacgtcaggtcagtatgccccttacgccctgggctacacacgtgctacaatggccgggacagagggattgcgaagccgcgaggcggagcaaatctcagaaacccggtcccagttcggattgcaggctgcaactcgcctgcatgaagctggaatcgctagtaacggccggtcagctacacggccgtgaatacgttcccgggccttgtactcaccgcccgtcacaccccggaagctggctctaccagaagtccccgagctaacccccgcaagggggaggcaggggccgaaggtagggctggtgactggggtg

SEQ ID NO: 3402 - DNA, 1409 bp, Thioalbus denitrificans
catgcaagtcgaacggtaacaggcccttcggggtgctgacgagtggcggacgggtgagtaacgcgtaggaatctgccctgtagtgggggacaacctggggaaacccaggctaataccgcatacgcccttcgggggaaagtgggggatcttcggacctcacgctattggatgagcctgcgtcggattagctagttggtggggtaaaggcccaccaaggcgacgatccgtagctggtctgagaggacgatcagccacactgggactgagacacggcccagactcctacgggaggcagcagtggggaatattggacaatgggggcaaccctgatccagcaatgccgcgtgtgtgaagaaggcctgcgggttgtaaagcactttcagtggggaggaaaagcctgaggccaatacccttgggtcttgacgttacccacagaagaagcaccggctaactccgtgccagcagccgcggtaatacggagggtgcaagcgttaatcggaattactgggcgtaaagcgcgcgtaggcggctgactaagtcgggtgtgaaagccccgggctcaacctgggaattgcattcgatactggttggctggagtctggtagaggggtgtggaattccaggtgtagcggtgaaatgcgtagatatctggaggaacatcagtggcgaaggcggcaccctggaccaagactgacgctgaggtgcgaaagcgtgggtagcaaacaggattagataccctggtagtccacgccgtaaacgatgagaactagccgttgggaggattagcctcttagtggcgaagctaacgcgataagttctccgcctggggagtacggccgcaaggttaaaactcaaaggaattgacgggggcccgcacaagcggtggagcatgtggtttaattcgatgcaacgcgaagaaccttacctgcccttgacatcctcggaacttgtcagagatgacttggtgccttcgggaaccgagagacaggtgctgcatggctgtcgtcagctcgtgtcgtgagatgttgggttaagtcccgtaacgagcgcaacccttgtccctagttgccagcgcgtcatggcgggaactctagggagactgccggtgacaaaccggaggaaggtggggatgacgtcaagtcatcatggcccttatgggcagggctacacacgtgctacaatggccagtacagagggttgccaacccgcgagggggagctaatcccagaaagctggtcgtagtccggatcgcagtctgcaactcgactgcgtgaagtcggaatcgctagtaatcgcgaatcagaatgtcgcggtgaatacgttcccgggccttgtacacaccgcccgtcacaccatgggagttggctgtaccagaagccgctagtctaaccttcggggggacggcgtcc

SEQ ID NO: 3403 - DNA, 1462 bp, Thioalkalivibrio denitrificans
attgaacgctggcggcatgcttaacacatgcaagtcgaacggtaacgcgggagcttgctcctggcgacgagtggcggacgggtgagtaacgcgtaggaatctgcctggtggtgggggacaactcggggaaactcgagctaataccgcatacgccctacgggggaaagcgggggatcttcggacctcgcgccatcagatgagcctgcgtccgattagcttgttggtagggtaacggcctaccaaggcgacgatcggtagctggtctgagaggacgatcagccacactgggactgagacacggcccagactcctacgggaggcagcagtggggaatattggacaatgggcgaaagcctgatccagcaatgccgcgtgtgtgaagaaggcctgcgggttgtaaagcactttcagtagggaagaaaagcctggcgccaataccgccgggtcttgacgttacctacagaagaagcaccggctaactccgtgccagcagccgcggtaatacggagggtgcaagcgttaatcggaattactgggcgtaaagcgcacgtaggcggccttgtaagtcggatgtgaaagccccgggcttaacctgggaattgcatccgatactgcagggctagagtttggtagaggagagtggaattcccggtgtagcggtgaaatgcgtagatatcgggaggaacaccagtggcgaaggcgactctctggaccaaaactgacgctgaggtgcgaaagcgtggggagcaaacaggattagataccctggtagtccacgccgtaaacgatgagaactagccgttgggaggattatgcctcttagtggcgcagctaacgcattaagttctccgcctggggagtacggccgcaaggttgaaactcaaaggaattgacgggggcccgcacaagcggtggagcatgtggtttaattcgatgcaacgcgaagaaccttacctgcccttgacatcctcggaacttgtcagagatgacttggtgccttcgggaaccgagtgacaggtgctgcatggctgtcgtcagctcgtgtcgtgagatgttgggttaagtcccgcaacgagcgcaacccttgtccctagttgccagcacttcgggtgggaactctagggagactgccggtgacaaaccggaggaaggtggggatgacgtcaagtcatcatggcccttatgggcagggctacacacgtgctacaatggccagtacagagggtcgccaacccgcgagggggagccaatcccagaaagctggtcgtagtccggatcggagtctgcaactcgactccgtgaagtcggaatcgctagtaatcgcggatcagcattgccgcggtgaatacgttcccgggccttgtacacaccgcccgtcacaccatgggagttggctgcaccagaagtggatagtctaaccttcgggaggacgttcaccacggtgtggtcaatgactggggtg

SEQ ID NO: 3404 - DNA, 1464 bp, Thioalkalivibrio halophilus
attgaacgctggcggcatgcctaacacatgcaagtcgaacggtaacgctgggagcttgctccctggcgacgagtggcggacgggtgagtaacgcgtaggaatctgcctggtagcgggggataactcggggaaactcgagctaataccgcatacgccctacgggggaaagcgggggatcttcggacctcgcactatcagatgagcctgcgtccaattagcttgttggtgaggtaacggctcaccaaggcgacaattggtagctggtctgagaggatgatcagccacactgggactgagacacggcccagactcctacgggaggcagcagtggggaatattggacaatgggcgaaagcctgatccagcaatgccgcgtgtgtgaagaaggcctgcgggttgtaaagcactttcagcagggaggaaaagctgtcggttaataactggcggtcttgacgttacctgcagaagaagcaccggccaactccgtgccagcagccgcggtaatacggagggtgcaagcgttaatcggaattactgggcgtaaagcgcgcgtaggcggctgtgtaagttagatgtgaaagccccgggctcaacctgggaattgcatctaatactatacagctagagtttgatagaggagagcggaattcccggtgtagcggtgaaatgcgtagatatcgggaggaacaccagtggcgaaggcggctctctggatcaaaactgacgctgaggtgcgaaagcgtgggtagcaaacaggattagataccctggtagtccacgccctaaacgatgagaactagttgttggtcggattttgccgatcagtgacgcagctaacgcattaagttctccgcctggggagtacggccgcaaggttgaaactcaaaggaattgacgggggcccgcacaagcggtggagcatgtggtttaattcgatgcaacgcgaagaaccttacctgcccttgacatcctcggaacttggcagagatgccttggtgccttcgggaaccgagtgacaggtgctgcatggctgtcgtcagctcgtgtcgtgagatgttgggttaagtcccgcaacgagcgcaacccttatccctagttgccatcggttcggccgggaactctagggagactgccggtgacaaaccggaggaaggtggggatgacgtcaagtcatcatggcccttatgggcagggctacacacgtgctacaatggccggtacagagggcagccaacccgcgagggggagctaatctcacaaagccggtcctagtccagattggagtctgcaactcgactccatgaagcaggaatcgctagtaatcgcagatcagcactgctgcggtgaatacgttcccgggccttgtacacaccgcccgtcacaccatgggagttgactgcaccagaagtggatagtctaaccttcgggaggacgttcaccacggtgtggttaatgactggggtg

SEQ ID NO: 3405 - DNA, 1443 bp, Thioalkalivibrio nitratireducens
cctaacacatgcaagtcgaacggcagcgcgggagcttgctcctggcggcgagtggcggacgggtgagtaacgcgcaggaatctgcctggtagcgggggataactcggggaaactcgagctaataccgcatacgccctacgggggaaagcgggggaccttcgggcctcgcactatcagatgagcctgcgtccgattagcttgttggtgaggtaatggctcaccaaggctacgatcggtagctggtctgagaggatgatcagccacactgggactgagacacggcccagactcctacgggaggcagcagtggggaatattggacaatgggcgaaagcctgatccagcaatgccgcgtgtgtgaagaaggcctgcgggttgtaaagcactttcagtggggaagaaaagccgccggttaatacccggcagtcttgacattacccacagaagaagcaccggctaactccgtgccagcagccgcggtaatacggagggtgcgagcgttaatcggaattactgggcgtaaagcgcgcgtaggcggctgcgtaagttggatgtgaaagccccgggcttaacctgggaattgcatccaatactgcgtggctagagtttgatagaggagagcggaattcccggtgtagcggtgaaatgcgtagatatcgggaggaacaccagtggcgaaggcggctctctggatcaaaactgacgctgaggtgcgaaagcgtggggagcaaacaggattagataccctggtagtccacgccctaaacgatgagaactagctgttgggtggattttgccgctcagtggcgcagctaacgcattaagttctccgcctggggagtacggccgcaaggttgaaactcaaaggaattgacgggggcccgcacaagcggtggagcatgtggtttaattcgatgcaacgcgaagaaccttacctacccttgacatcctcggaacttgtcagagatgacttggtgccttcgggaaccgagtgacaggtgctgcatggctgtcgtcagctcgtgtcgtgagatgttgggttaagtcccgcaacgagcgcaacccttgcatctagttgccagcggttaggccgggaactctagatggactgacggtgacaaaccgtaggaaggtggggatgacgtcaagtcatcatggcccttatgggtagggctacacacgtgctacaatggtcggtacagagggtcgccaacccgcgagggggagccaatctcacaaagccgatcgtagtccagattggagtctgcaactcgactccatgaagccggaatcgctagtaatcgcagatcagcactgctgcggtgaatacgttcccgggccttgtacacaccgcccgtcacaccatgggagttggctgcaccagaagtagatagtctaaccttcgggaagacgtttaccacggtgtggtcaatgactggggtg

SEQ ID NO: 3406 - DNA, 1454 bp, Thioalkalivibrio paradoxus
  misc_feature (24)..(24): n is a, c, g, or t
  misc_feature (384)..(384): n is a, c, g, or t
  misc_feature (636)..(636): n is a, c, g, or t
attgaacgctggcggcatgcctancacatggaagtcgagcgggagcgcgggcgttcctgtggcggcgagtggcggacgggtgagtaacgcgtaggaatctgcctggtagcgggggataactggggaaactcgagctaatactgcatacgctacgggggaaagcgggggacttcgggcctcgtactatcagatgagcctgcgtccgattagcttgttggtgaggtaatggctcaccaaggctacgatcggtagctggtctgagaggatgatcagccacactgggactgagacacggcccagactcctacgggaggcagcagtggggaatattggacaatgggcgaaagcctgatccagcaatgccgcgtgtgtgaagaaggcctncgggttgtaaagcactttcagtggggaagaaaagccgccggttaatacccggcggtcttgacattacccacagaagaagcaccggctaactccgtgccagcagccgcggtaatacggagggtgcgagcgttaatcggaattactgggcgtaaagcgcgcgtaggcggctgcgtgagttggatgtgaaagccccgggcttaacctgggaattgcatccaatactgcgtagctagagtttggtagaggaaagcngaattcccggtgtagcggtgaaatgcgtagatatcgggaggaacaccagtggcgaaggcggctttctggatcaaaactgacgctgaggtgcgaaagcgtggggagcaaacaggattagataccctggtagtccacgccctaaacgatgagaactagctgttgggtggattttaccgctcagtggcgcagctaacgcattaagttctccgcctggggagtacggccgcaaggttgaaactcaaaggaattgacgggggcccgcacaagcggtggagcatgtggtttaattcgatgcaacgcgaagaaccttacctacccttgacatcctcggaacttgtcagagatgacttggtgccttcgggaaccgagtgacaggtgctgcatggctgtcgtcagctcgtgtcgtgagatgttgggttaagtcccgcaacgagcgcaacccttacatctagttgccagcggttcggccgggaactctagatggactaccggtgacaaaccggaggaaggtggggatgacgtcaagtcatcatggcccttatgggtagggctacacacgtgctacaatggtcggtacagagggtcgccaacccgcgagggggagccaatctcacaaagccgatcgtagtccagattggagtctgcaactcgactccatgaagccggaatcgctagtaatcgcagatcagcactgctgcggtgaatacgttcccgggccttgtacacaccgcccgtcacaccatgggagttggctgcaccagaagtagatagtctaaccttgggaggacgtttaccacggtgtggtcaatgatctgggt

SEQ ID NO: 3407 - DNA, 1460 bp, Thioalkalivibrio sulfidiphilus
attgaacgctggcggcatgcctaacacatgcaagtcgaacggtaacaggggcttcggcccgctgacgagtggcggacgggtgagtaacgcgtaggaatctgcctggtggtgggggacaactcggggaaactcgagctaataccgcatacgccctacgggggaaagcgggggatcttcggacctcgcgccatcagatgagcctgcgtccgattagctagttggtggggtaatggcctaccaaggcgacgatcggtagctggtctgagaggacgatcagccacactgggactgagacacggcccagactcctacgggaggcagcagtggggaatattggacaatgggcgaaagcctgatccagcaatgccgcgtgtgtgaagaaggcctgcgggttgtaaagcactttcagtagagaagaaaagcctggcgttaataccgtcgggtcttgacgtaacctacagaagaagcaccggctaactccgtgccagcagccgcggtaatacggagggtgcaagcgttaatcggaattactgggcgtaaagcgcacgtaggcggccttgtaagtcggatgtgaaagccccgggcttaacctgggaattgcatccgatactgcagggctagagtttggtagaggagagtggaattcccggtgtagcggtgaaatgcgtagatatcgggaggaacaccagtggcgaaggcgactctctggaccaaaactgacgctgaggtgcgaaagcgtggggagcaaacaggattagataccctggtagtccacgccgtaaacgatgagaactagccgttgggaggattatgcctcttagtggcgcagctaacgcattaagttctccgcctggggagtacggccgcaaggttgaaactcaaaggaattgacgggggcccgcacaagcggtggagcatgtggtttaattcgatgcaacgcgaagaaccttacctgcccttgacatcctcggaacttgtcagagatgacttggtgccttcgggaaccgagtgacaggtgctgcatggctgtcgtcagctcgtgtcgtgagatgttgggttaagtcccgcaacgagcgcaacccttgtccctagttgccagcacttcgggtgggaactctagggagactgccggtgacaaaccggaggaaggtggggatgacgtcaagtcatcatggcccttatgggcagggctacacacgtgctacaatggccagtacagagggttgccaacccgcgagggggagccaatcccagaaagctggtcgtagtccggattggagtctgcaactcgactccatgaagtcggaatcgctagtaatcgcggatcagcattgccgcggtgaatacgttcccgggccttgtacacaccgcccgtcacaccatgggagttggctgcaccagaagtagatagtctaaccttcgggaggacgtttaccacggtgtggtcaatgactggggtg

SEQ ID NO: 3408 - DNA, 1462 bp, Thioalkalivibrio thiocyanodenitrificans
attgaacgctggcggcatgcctaacacatgcaagtcgaacggcagcgcgggagcttgctcctggcggcgagtggcggacgggtgagtaacgcgtaggaatctgcctggtggtgggggacaactcggggaaactcgagctaataccgcatacgccctacgggggaaagcgggggatcttcggacctcgcgccatcagatgagcctgcgtccgattagcttgttggtggggtaacggcctaccaaggcgacgatcggtagctggtctgagaggacgatcagccacactgggactgagacacggcccagactcctacgggaggcagcagtggggaatattggacaatgggcgaaagcctgatccagcaatgccgcgtgtgtgaagaaggcctgcgggttgtaaagcactttcagtagggaagaaaagcctggcgctaataccgtcgggtcttgacgtcacctacagaagaagcaccggctaactccgtgccagcagccgcggtaatacggagggtgcgagcgttaatcggaattactgggcgtaaagcgcacgtaggcggtcctgtaagtcggatgtgaaagccccgggcttaacctgggaattgcatccgatactgcagggctagagtttggtagaggagagtggaattcccggtgtagcggtgaaatgcgtagatatcgggaggaacaccagtggcgaaggcgactctctggaccaaaactgacgctgaggtgcgaaagcgtggggagcaaacaggattagataccctggtagtccacgctgtaaacgatgagaactagccgttggggggattatgccccttagtggcgcagctaacgcattaagttctccgcctggggagtacggccgcaaggttgaaactcaaaggaattgacgggggcccgcacaagcggtggagcatgtggtttaattcgatgcaacgcgaagaaccttacctgcccttgacatcctcggaacttgtcagagatgacttggtgccttcgggaaccgagtgacaggtgctgcatggctgtcgtcagctcgtgtcgtgagatgttgggttaagtcccgcaacgagcgcaacccttgtccctagttgccagcacttcgggtgggaactctagggagactgccggtgacaaaccggaggaaggtggggatgacgtcaagtcatcatggcccttatgggcagggctacacacgtgctacaatggccagtacagagggtcgccaacccgcaagggggagccaatcccagaaagctggtcgtagtccggatcggagtctgcaactcgactccgtgaagtcggaatcgctagtaatcgcggatcagcattgccgcggtgaatacgttcccgggccttgtacacaccgcccgtcacaccatgggagttggctgcaccagaagtagatagtctaaccttcgggaggacgtttaccacggtgtggtcaatgactggggtg

SEQ ID NO: 3409 - DNA, 1462 bp, Thioalkalivibrio thiocyanoxidans
attgaacgctggcggcatgcctaacacatgcaagtcgaacggtaacgcaggagcttgctcctggcgacgagtggcggacgggtgagtaacgcgtaggaatctgcctggtagcggaggataacccggggaaactcgggctaatactgcatacgccctacgggggaaagcgggggatcttcggacctcgcactatcagatgagcctgcgtccaattagcttgttggtgaggtaacggctcaccaaggcgacgattggtagctggtctgagaggatgatcagccacactgggactgagacacggcccagactcctacgggaggcagcagtggggaatattggacaatgggggaaaccctgatccagcaatgccgcgtgtgtgaagaaggcctgcgggttgtaaagcactttcagtagggaagaaaagctgccggttaatacccgacagtcttgacatcacctacagaagaagcaccggctaactccgtgccagcagccgcggtaatacggagggtgcaagcgttaatcggaattactgggcgtaaagcgcacgtaggcggtcgtgtaagttagatgtgaaagccctgggcttaacctgggaattgcatctaatactatacgactagagtttgatagaggagagcggaattcccggtgtagcggtgaaatgcgtagatatcgggaggaacaccagtggcgaaggcggctctctggctcaaaactgacgctgaggtgcgaaagcgtgggtagcaaacaggattagataccctggtagtccacgccctaaacgatgagaactagttgttggtcggatcttgccgatcagtgacgcagctaacgcattaagttctccgcctggggagtacggccgcaaggttgaaactcaaaggaattgacgggggcccgcacaagcggtggagcatgtggtttaattcgatgcaacgcgaagaaccttacctacccttgacatcctcggaacttgtcagagatgacttggtgccttcgggaaccgagtgacaggtgctgcatggctgtcgtcagctcgtgtcgtgagatgttgggttaagtcccgcaacgagcgcaacccttatccctagttgccagcggttcggccgggaactctagggagactgccggtgacaaaccggaggaaggtggggatgacgtcaagtcatcatggcccttatgggtagggctacacacgtgctacaatggccggtacagagggctgccaacccgcgagggggagccaatcccagaaaaccggtcctagtccagattggagtctgcaactcgactccatgaagcaggaatcgctagtaatcgcagatcagcactgctgcggtgaatacgttcccgggccttgtacacaccgcccgtcacaccatgggagttgactgcaccagaagtggatagtctaaccttcgggaggacgttcaccacggtgtggttaatgactggggtg

SEQ ID NO: 3410 - DNA, 1462 bp, Thioalkalivibrio versutus
attgaacgctggcggcatgcctaacacatgcaagtcgaacggtaacgcgggagcttgctcctggcgacgagtggcggacgggtgagtaacgcgtaggaatctgcctggtagcggaggacaactcggggaaactcgagctaatactgcatacgccctacgggggaaagcgggggatcttcggacctcgcactatcagatgagcctgcgtccaattagcttgttggtgaggtaacggctcaccaaggcgacgattggtagctggtctgagaggatgatcagccacactgggactgagacacggcccagactcctacgggaggcagcagtggggaatattggacaatgggggaaaccctgatccagcaatgccgcgtgtgtgaagaaggcctgcgggttgtaaagcactttcagtagggaagaaaagccgacggccaatacccttcggtcttgacatcacctacagaagaagcaccggctaactccgtgccagcagccgcggtaatacggagggtgcaagcgttaatcggaattactgggcgtaaagggcacgcaggcggtcgtgtaagttagatgtgaaagccccgggcttaacctgggaattgcacctaatactatacgactagagtttgatagaggagagcggaattcccggtgtagcggtgaaatgcgtagatatcgggaggaacaccagtggcgaaggcggctctctggatcaaaactgacgctgaggtgcgaaagcgtgggtagcaaacaggattagataccctggtagtccacgccctaaacgatgagaactagttgttggtcggatcttgccgatcagtgacgcagctaacgcattaagttctccgcctggggagtacggccgcaaggttgaaactcaaaggaattgacgggggcccgcacaagcggtggagcatgtggtttaattcgatgcaacgcgaagaaccttacctacccttgacatcctcggaacttgtcagagatgacttggtgccttcgggaaccgagtgacaggtgctgcatggctgtcgtcagctcgtgtcgtgagatgttgggttaagtcccgcaacgagcgcaacccttatccctagttgccagcggttcggccgggaactctagggagactgccggtgacaaaccggaggaaggtggggatgacgtcaagtcatcatggcccttatgggtagggctacacacgtgctacaatggccggtacagagggctgccaacccgcgagggggagccaatcccacaaaaccggtcctagtccagattggagtctgcaactcgactccatgaagtcggaatcgctagtaatcgtggatcagcactgccacggtgaatacgttcccgggccttgtacacaccgcccgtcacaccatgggagttgactgcaccagaagtggatagtctaaccttcgggaggacgttcaccacggtgtggttaatgactggggtg

SEQ ID NO: 3411 - DNA, 1370 bp, Thiobaca trueperi
tgacgctggcggcatgcctaacacatgcaagtcgaacgcggaagggcttcggcctgagtagcgtggcggacgggtgagtaatgcgtgggaatctgcctgatcgtgggggataacccggggaaactcgggctaataccgcatacgccctacgggggaaagggggcttcggctctcgcgaacagatgagcccacgtccgattagctagttggtgaggtaatggcccaccaaggcgacgatcggtagctggtctgagaggatgatcagccacactgggactgagacacggcccagactcctacgggaggcagcagtggggaatattggacaatgggcgcaagcctgatccagcaatgccgcgtgtgtgaagaaggcctgcgggttgtaaagcactttcggtgggaaagaaagattcaaggttaatacccttggatgttgacgttacccacagaagaagcaccggctaactccgtgccagcagccgcggtaatacggagggtgcaagcgttaatcggaatcactgggcgtaaagcgcacgtaggcggcttggtcagtcagatgtgaaagccctgggctcaacctgggaacggcatttgatactgccaggctcgagtctaagagaggggggtggaattccaggtgtagcggtgaaatgcgtagagatctggaggaacaccagtggcgaaggcggccccctggcttaagactgacgctgaggtgcgaaagcgtggggagcaaacaggattagataccctggtagtccacgctgtaaacgatgtcaactagccgtcgggtccatttaagggtttggtggcgcagctaacgcgataagttgaccgcctggggagtacggccgcaaggttaaaactcaaaggaattgacgggggcccgcacaagcggtggagcatgtggtttaattcgatgcaacgcgaaaaaccttaccagcccttgacatcctcggaaccctgtagagatatgggggtgccttcgggagccgagagacaggtgctgcatggctgtcgtcagctcgtgtcgtgagatgttgggttaagtcccgtaacgagcgcaacccttgtccttagttgccagcacttcgggtgggaactctaaggagactgccggtgataaaccggaggaaggtggggatgacgtcaagtcatcatggcccttatgggctgggctacacacgtgctacaatggccggtacagagggtcgcaaccccgcgagggtgagccaatctcagaaaaccggtcgtagtccggatcgcagtctgcaactcgactgcgtgaagtcggaatcgctagtaatcgcgaatcagcatgtcgcggtgaatacgttcccgggccttgtacacaccgcccgtcacaccat

SEQ ID NO: 3412 - DNA, 1457 bp, Thiobacillus denitrificans
attgaacgctggcggaatgctttacacatgcaagtcgaacggcagcacgggtgcttgcacctggtggcgagtggcgaacgggtgagtaatgcgtcggaacgtaccgagtaatgggggataacgcggcgaaagtcgcgctaataccgcatacgccctgagggggaaagtgggggatcgcaagacctcacgttattcgagcggccgacgtctgattagctagttggtggggtaatggctcaccaaggcgacgatcagtagcgggtctgagaggatgatccgtcacactgggactgagacacggcccagactcctacgggaggcagcagtggggaattttggacaatgggcgaaagcctgatccagccattccgcgtgagtgaagaaggccttcgggttgtaaagctctttcagctggaacgaaacggtacgcgctaacatcgtgtgctaatgacggtaccagcagaagaagcaccggctaactacgtgccagcagccgcggtaatacgtagggtgcgagcgttaatcggaattactgggcgtaaagcgtgcgcaggcggattattaagcaagacgtgaaatccccgggcttaacctgggaatggcgttttgaactggtagtctagagtgcgtcagaggggggtggaattccacgtgtagcagtgaaatgcgtagagatgtggaggaacaccaatggcgaaggcagccccctgggatgacactgacgctcatgtacgaaagcgtgggtagcaaacaggattagataccctggtagtccacgccctaaacgatgtcaactggttgttgggggagtgaaatcccttagtaacgaagctaacgcgtgaagttgaccgcctggggagtacggtcgcaagattaaaactcaaaggaattgacggggacccgcacaagcggtggatgatgtggattaattcgatgcaacgcgaaaaaccttacctacccttgacatgtccagaaccctgcagagatgcgggggtgcccgaaagggaattggaacacaggtgctgcatggctgtcgtcagctcgtgtcgtgagatgttgggttaagtcccgcaacgagcgcaacccttatcattagttgctacgcaagggcactctaatgagactgccggtgacaaaccggaggaaggtggggatgacgtcaagtcctcatggcccttatgggtagggcttcacacgtcatacaatggtcggtacagagggttgccaagccgcgaggtggagccaatcccagaaagccgatcgtagtccggattgttctctgcaactcgagagcatgaagtcggaatcgctagtaatcgcggatcagcatgtcgcggtgaatacgttcccgggtcttgtacacaccgcccgtcacaccatgggagtggaatctggcagaagtaggtagcctaaccgcaaggggggcgcttaccacgctgggtttcatgactggggtg

SEQ ID NO: 3413 - DNA, 1457 bp, Thiobacillus thioparus
attgaacgctggcggaatgctttacacatgcaagtcgaacggcagcacgggagcttgctcctggtggcgagtggcgaacgggtgagtaatgcgtcggaacgtaccgagtaatgggggataacgcagcgaaagctgtgctaataccgcatacgccctgagggggaaagtgggggatcgcaagacctcacgttattcgagcggccgacgtctgattagctagttggtggggtaatggcctaccaaggcgacgatcagtagcgggtctgagaggatgatccgccacactggaactgagacacggtccagactcctacgggaggcagcagtggggaattttggacaatgggggcaaccctgatccagccattccgcgtgagtgaagaaggccttcgggttgtaaagctctttcagctggaacgaaacggtacgctctaacatagcgtgctaatgacggtaccggcagaagaagcaccggctaactacgtgccagcagccgcggtaatacgtagggtgcgagcgttaatcggaattactgggcgtaaagcgtgcgcaggcggattgttaagcaagatgtgaaatccccgggcttaacctgggaatggcattttgaactggcagtctagagtgcgtcagaggggggtggaattccacgtgtagcagtgaaatgcgtagagatgtggaggaacaccaatggcgaaggcagccccctgggatgacactgacgctcatgtacgaaagcgtgggtagcaaacaggattagataccctggtagtccacgccctaaacgatgtcaactggttgttgggggagtgaaatcccttagtaacgaagctaacgcgtgaagttgaccgcctggggagtacggtcgcaagattaaaactcaaaggaattgacggggacccgcacaagcggtggatgatgtggattaattcgatgcaacgcgaaaaaccttacctacccttgacatgtccggaatcctgcagagatgcgggagtgctcgaaagagaaccggaacacaggtgctgcatggctgtcgtcagctcgtgtcgtgagatgttgggttaagtcccgcaacgagcgcaacccttatcattagttgctacgcaagggcactctaatgagactgccggtgacaaaccggaggaaggtggggatgacgtcaagtcctcatggcccttatgggtagggcttcacacgtcatacaatggtcggtacagagggttgccaagccgcgaggtggagccaatcccagaaagccgatcgtagtccggattgttctctgcaactcgagagcatgaagtcggaatcgctagtaatcgcggatcagcatgtcgcggtgaatacgttcccgggtcttgtacacaccgcccgtcacaccatgggagtggaatctggcagaagtaggtagcctaaccgcaaggggggcgcttaccacgctgggtttcatgactggggtg

SEQ ID NO: 3414 - DNA, 1451 bp, Thiocapsa marina
attgaacgctggcggcatgcctaacacatgcaagtcgaacgcgaaagtccttcggggcgagtagagtggcggacgggtgagtaacgcatgggaatctacctcgacgtgggggataacccggggaaactcgggctaataccgcatacgacctacgggtgaaagggggcttcggctctcgcggcgagatgagctcatgtccgattagctagttggcggggtaaaggcccaccaaggcgacgatcggtagctggtctgagaggatgatcagccacactgggactgagacacggcccagactcctacgggaggcagcagtggggaatattggacaatgggcgcaagcctgatccagcaatgccgcgtgtgtgaagaaggcctgcgggttgtaaagcactttcagtggggaagaaagcctcggggcgaataccctcgggggttgacgttacccacagaagaagcaccggctaactccgtgccagcagccgcggtaatacggagggtgcaagcgttaatcggaatcactgggcgtaaagcgcacgtaggcggcaacgtaagtcagatgtgaaagccccgggctcaacccgggaacggcatttgagactgcgtcgctcgagtctgagagaggggggtggaattccgggtgtagcggtgaaatgcgtagagatccggaggaacaccagtggcgaaggcggccccctggctcaagactgacgctgaggtgcgaaagcgtggggagcaaacaggattagataccctggtagtccacgccgtaaacgatgtcgactagccgtggggtccatttaagggcttcgtggcgcagctaacgcgataagtcgaccgcctggggagtacggccgcaaggttaaaactcaaaggaattgacgggggcccgcacaagcggtggagcatgtggtttaattcgatgcaacgcgaagaaccttaccagcccttgacatcctcggaatcctgcagagatgcgggagtgccttcgggagccgagagacaggtgctgcatggctgtcgtcagctcgtgtcgtgagatgttgggttaagtcccgtaacgagcgcaacccttgcccttagttgccagcgagtgatgtcgggaactctaaggggactgccggtgataaaccggaggaaggtggggatgacgtcaagtcatcatggcccttatgggctgggctacacacgtgctacaatggccggtacagagggttgccaacccgcgagggggagccaatctcagaaaaccggtcgtagtccggatcgcagtctgcaactcgactgcgtgaagtcggaatcgctagtaatcgcgaatcagcatgtcgcggtgaatacgttcccgggccttgtacacaccgcccgtcacaccatgggagttggttgcaccagaagcaggtagcttaaccttcgggagggcgcttgccacggtgtggtcaatgactggggtg

SEQ ID NO: 3415 - DNA, 1451 bp, Thiocapsa rosea
attgaacgctggcggcatgcctaacacatgcaagtcgaacgcgaaagggctttggcccgagtagagtggcggacgggtgagtaatgcatgggaatccacctcgacgtgggggataacccggggaaactcgggctaataccgcatacgacctacgggtgaaagggggcttcggctctcgcgtcgagacgagctcatgtccgattagctagttggcggggtaaaggcccaccaaggcgacgatcggtagctggtctgagaggatgatcagccacactgggactgagacacggcccagactcctacgggaggcagcagtggggaatattggacaatgggcgcaagcctgatccagcaatgccgcgtgtgtgaagaaggcctgcgggttgtaaagcactttcagtggggaagaaacgcctgaggcgaatactctcgggctatgacgttacccacagaagaagcaccggctaactccgtgccagcagccgcggtaatacggagggtgcaagcgttaatcggaatcactgggcgtaaagcgcacgtaggcggcaacgtaagtcagatgtgaaagccccgggctcaacccgggaacggcatttgagactgcgtcgctcgagtctgagagaggggggtggaattccaggtgtagcggtgaaatgcgtagagatctggaggaacaccagtggcgaaggcggccccctggctcaagactgacgctgaggtgcgaaagcgtggggagcaaacaggattagataccctggtagtccacgccgtaaacgatgtcgactagccgtggggtccatttaagggcttcgtggcgcagctaacgcgataagtcgaccgcctggggagtacggccgcaaggttaaaactcaaaggaattgacgggggcccgcacaagcggtggagcatgtggtttaattcgatgcaacgcgaagaaccttaccagcccttgacatcctcggaatcctgcagagatgcgggagtgccttcgggagccgagagacaggtgctgcatggctgtcgtcagctcgtgtcgtgagatgttgggttaagtcccgtaacgagcgcaacccttgcccttagttgccagcgcgtgatggcgggaactctaaggggactgccggtgataaaccggaggaaggtggggatgacgtcaagtcatcatggcccttatgggctgggctacacacgtgctacaatggccggtacagagggttgccaacccgcgagggggagccaatctcagaaaaccggtcgtagtccggatcgcagtctgcaactcgactgcgtgaagtcggaatcgctagtaatcgcgaatcagcatgtcgcggtgaatacgttcccgggccttgtacacaccgcccgtcacaccatgggagttggttgcaccagaagcaggtagcttaaccttcgggagggcgcttgccacggtgtggtcaatgactggggtg

SEQ ID NO: 3416 - DNA, 1451 bp, Thiocapsa roseopersicina
attgaacgctggcggcatgcctaacacatgcaagtcgaacgcgaaagggctttggcctgagtagagtggcggacgggtgagtaatgcatgggaatctacctcgacgtgggggataacccggggaaactcgggctaataccgcatacgacctacgggtgaaagggggcttcggctctcgcggcgagatgagctcatgtccgattagctagttggcggggtaaaggcccaccaaggcgacgatcggtagctggtctgagaggatgatcagccacactgggactgagacacggcccagactcctacgggaggcagcagtggggaatattggacaatgggcgcaagcctgatccagcaatgccgcgtgtgtgaagaaggcctgcgggttgtaaagcactttcagtggggaagaaacgctcggggcgcataccctcgggctatgacgttacccacagaagaagcaccggctaactccgtgccagcagccgcggtaatacggagggtgcaagcgttaatcggaatcactgggcgtaaagcgcacgtaggcggcaacgtaagtcagatgtgaaagccccgggctcaacccgggaacggcatttgagactgcgtcgctcgagtctgagagaggggggtggaattccaggtgtagcggtgaaatgcgtagagatctggaggaacaccagtggcgaaggcggccccctggctcaagactgacgctgaggtgcgaaagcgtggggagcaaacaggattagataccctggtagtccacgccgtaaacgatgtcgactagccgtggggtccatttaagggcttcgtggcgcagctaacgcgataagtcgaccgcctggggagtacggccgcaaggttaaaactcaaaggaattgacgggggcccgcacaagcggtggagcatgtggtttaattcgatgcaacgcgaagaaccttaccagcccttgacatcctcggaaccctgtagagatacgggggtgccttcgggagccgagagacaggtgctgcatggctgtcgtcagctcgtgtcgtgagatgttgggttaagtcccgtaacgagcgcaacccttgcccttagttgccagcgcgtcatggcgggaactctaaggggactgccggtgataaaccggaggaaggtggggatgacgtcaagtcatcatggcccttatgggctgggctacacacgtgctacaatggccggtacagagggttgccaacccgcgagggggagccaatctcagaaaaccggtcgtagtccggatcgcagtctgcaactcgactgcgtgaagtcggaatcgctagtaatcgcgaatcagcatgtcgcggtgaatacgttcccgggccttgtacacaccgcccgtcacaccatgggagttggttgcaccagaagcaggtagcttaaccttcgggagggcgcttgccacggtgtggtcaatgactggggtg

SEQ ID NO: 3417 - DNA, 1391 bp, Thioclava atlantica
aacgaacgctggcggcaggcctaacacatgcaagtcgagcgagatcttcggatctagcggcggacgggtgagtaacgcgtgggaacgtaccctttgctacggaatagccccgggaaactgggagtaataccgtataagcccttcgggggaaagatttttcggcaaaggatcggcccgcgttggattaggtagttggtggggtaacggcctaccaagccgacgatccatagctggtttgagaggatgatcagccacactgggactgagacacggcccagactcctacgggaggcagcagtggggaatcttagacaatgggggaaaccctgatctagccatgccgcgtgagcgatgaaggccttagggttgtaaagctctttcagctgggaagataatgacggtaccagcagaagaagccccggctaactccgtgccagcagccgcggtaatacggagggggctagcgttgttcggaattactgggcgtaaagcgcacgtaggcggactattaagtcaggggtgaaatcccggggctcaaccccggaactgcctctgatactggtagtcttgagttcgagagaggtgagtggaattccgagtgtagaggtgaaattcgtagatattcggaggaacaccagtggcgaaggcggctcactggctcgatactgacgctgaggtgcgaaagcgtggggagcaaacaggattagataccctggtagtccacgccgtaaacgatgaatgccagtcgtcgggtagcatgctattcggtgacacacctaacggattaagcattccgcctggggagtacggtcgcaagattaaaactcaaaggaattgacgggggcccgcacaagcggtggagcatgtggtttaattcgaagcaacgcgcagaaccttaccaacccttgacatcctgatcgcggttaccagagatggtttccttcagttcggctggatcagtgacaggtgctgcatggctgtcgtcagctcgtgtcgtgagatgttcggttaagtccggcaacgagcgcaacccacgtccttagttgccatcattcagttgggcactctagggaaactgccgatgataagtcggaggaaggtgtggatgacgtcaagtcctcatggcccttacgggttgggctacacacgtgctacaatggcagtgacaatgggataatcccaaaaagctgtctcagttcggattggggtctgcaactcgaccccatgaagtcggaatcgctagtaatcgcgtaacagcatgacgcggtgaatacgttcccgggccttgtacacaccgcccgtcacaccatgggagttggttctacccgaagatggtgcgccaacctgttcgcagggggcagctagccacggtaggatcagcgactggggtg

SEQ ID NO: 3418 - DNA, 1393 bp, Thioclava dalianensis
aacgaacgctggcggcaggcctaacacatgcaagtcgagcgagatcttcggatctagcggcggacgggttagtaacgcgtggggatgtaccctttgctacggaatagtcccgggaaactgggtttaataccgtatgtgcccttcgggggaaagatttatcggcaaaggatcaacccgcgttggattagatagttggtggggtaatggcctaccaagtcgacgatccatagctggtttgagaggatgatcagcaacactgggactgagacacggcccagactcctacgggaggcagcagtggggaatcttagacaatgggcgcaagcctgatctagccatgccgcgtggatgatgaaggccttagggttgtaaagtcctttcagctgggaagataatgacggtaccagcagaagaagccccggctaactccgtgccagcagccgcggtaatacggagggggctagcgttgttcggaattactgggcgtaaagcgcacgtaggcggactattaagtgaggggtgaaatcccagggctcaaccctggaactgcctctcatactggtagtcttgagttcgagagaggtgagtggaattccgagtgtagaggtgaaattcgtagatattcggaggaacaccagtggcgaaggcggctcactggctcgatactgacgctgaggtgcgaaagcgtggggagcaaacaggattagataccctggtagtccacgccgtaaacgatgaatgccagtcgtcgggtagcatgctattcggtgacacacctaacggattaagcattccgcctggggagtacggtcgcaagattaaaactcaaaggaattgacgggggcccgcacaagcggtggagcatgtggtttaattcgaagcaacgcgcagaaccttaccaacccttgacatcctgatcgcggttaccagagatggtttccttcagttcggctggatcagtgacaggtgctgcatggctgtcgtcagctcgtgtcgtgagatgttcggttaagtccggcaacgagcgcaacccacgtccttagttgccagcaggttaagctgggcactctagggaaactgccgatgataagtcggaggaaggtgtggatgacgtcaagtcctcatggcccttacgggttgggctacacacgtgctacaatggcagtgacaatgggttaatcccaaaaagctgtctcagttcggattggggtctgcaactcgaccccatgaagtcggaatcgctagtaatcgcgtaacagcatgacgcggtgaatacgttcccgggccttgtacacaccgcccgtcacaccatgggagttggttctacccgaagatggtgcgccaacctgttcgcagggggcagctagccacggtaggatcagcgactggggtg

SEQ ID NO: 3419 - DNA, 1451 bp, Thiocystis violascens
attgaacgctggcggcatgcctaacacatgcaagtcgaacgcgaaaaggctttggcctgagtagcgtggcggacgggtgagtaatgcgtgggaatctgcctggcagtgggggataacccggggaaactcgggctaataccgcatacgccctacgggggaaagggggcttcggctctcgttgccagatgagcccacgtccgattagcttgttggcggggtaacggcccaccaaggccgcgatcggtcgctggtctgagaggatgaccagccacactgggactgagacacggcccagactcctacgggaggcagcagtggggaatattggacaatgggcgcaagcctgatccagcaatgccgcgtgtgtgaagaaggcctgcgggttgtaaagcactttcagtgggaaagaaaagcggctggttaatacccagtcgtcttgacgttactcacaaaagaagcaccggctaactccgtgccagcagccgcggtaatacggagggtgcaagcgttaatcggaattactgggcgtaaagcgcgcgtaggcggcccggtcagtccgctgtgaaagccctgggcttaacctgggaactgcagtggatactgccgcgctagagtgtgaaagaggggggtggaattccaggtgtagcggtgaaatgcgtagagatctggaggaacaccagtggcgaaggcggccccctggttcaacactgacgctgaggtgcgaaagcgtggggagcaaacaggattagataccctggtagtccacgcggtaaacgatgtcgactagccgtggggtccatttaagggcttcgtggcgcagctaacgcgataagtcgaccgcctggggagtacggccgcaaggttaaaactcaaaggaattgacgggggcccgcacaagcggtggagcatgtggtttaattcgatgcaacgcgaagaaccttaccagcccttgacatcctcggaatcctgcggagacgcgggagtgccttcgggagccgagagacaggtgctgcatggctgtcgtcagctcgtgtcgtgagatgttgggttaagtcccgtaacgagcgcaacccttgtccttagttgccagcgcgtcatggcgggaactctaaggagactgccggtgataaaccggaggaaggtggggatgacgtcaagtcatcatggcccttatgggctgggctacacacgtgctacaatggccggtacagagggttgcgagcccgcgagggggagccaatcccagaaaaccggtcgtagtccggatcgcagtctgcaactcgactgcgtgaagtcggaatcgctagtaatcgcgaatcagcatgtcgcggtgaatacgttcccgggccttgtacacaccgcccgtcacaccatgggagttggttgcaccagaagtcgatagcctaaccttcgggagggcgttgaccacggtgtggtcaatgactggggtg

SEQ ID NO: 3420 - DNA, 1458 bp, Thioflavicoccus mobilis
attgaacgctggcggcatgcttaacacatgcaagtcgaacgcgaaagggcttcggcctgagtagagtggcggacgggtgagtaacgcgtgggaatctgccctgtagtgggggacaacccggggaaactcgggctaataccgcatacgtcctacgggagaaagggggcctctgcttgcaagctcctgctagaggatgagcccacgtccgattagctagttggtggggtaaaggcccaccaaggcgacgatcggtagctggtctgagaggatgatcagccacactgggactgagacacggcccagactcctacgggaggcagcagtggggaatattggacaatgggcgcaagcctgatccagcaatgccgcgtgtgtgaagaaggcctgcgggttgtaaagcactttcagtggggaagaaaggcctggggtgaatagccctgggtgttgacgttacccacagaagaagcaccggctaactccgtgccagcagccgcggtaatacggagggtgcaagcgttaatcggaatcactgggcgtaaagggcgcgtaggcggcgaggtaagtcagatgtgaaatccccgggctcaacctgggaatggcatttgatactgctttgctagagtctggtagaggggggtggaattccaggtgtagcggtgaaatgcgtagagatctggaggaacaccagtggcgaaggcgaccccctgggccaagactgacgctgaggtgcgaaagcgtggggagcaaacaggattagataccctggtagtccacgctgtaaacgctgtcgactagccgttggatccaattaagggttgagtggcgcagctaacgcgataagtcgaccgcctggggagtacggccgcaaggttaaaactcaaaggaattgacgggggcccgcacaagcggtggagcatgtggtttaattcgatgcaacgcgaagaaccttaccagcccttgacatcctcggaatcctgcagagatgtgggagtgccttcgggagccgagagacaggtgctgcatggctgtcgtcagctcgtgtcgtgagatgttgggttaagtcccgtaacgagcgcaacccttgtccttagttgccagcggttcggccgggaactctaaggagactgccggtgataaaccggaggaaggtggggatgacgtcaagtcatcatggcccttatgggctgggctacacacgtgctacaatggtcggtacagagggttgcgaagcggcgacgtggagccaatcccagaaaaccggtcgtagtccggattgcagtctgcaactcgactgcatgaagtcggaatcgctagtaatcgcgaatcagcatgtcgcggtgaatacgttcccgggccttgtacacaccgcccgtcacaccatgggagttggttgcaccagaagtcgatagcttaaccttcgggagggcgttgaccacggtgtgatcaatgactggggtg

SEQ ID NO: 3421 - DNA, 1465 bp, Thiogranum longum
attgaacgctggcggcatgcctaacacatgcaagtcgaacggaaacgatgaagagcttgctcttcaggcgtcgagtggcggacgggtgagtaatgcttaggaatctacccatgtagtgggggacaacctggtgaaaaccaggctaataccgcatgagcccttcgggggaaagcaggggatcttcggaccttgcgctattggatgagcctaagtcggattagcttgttggtggggtaacggcctaccaaggcgacgatccgtagctggtctgagaggatgatcagccacactgggactgagacacggcccagactcctacgggaggcagcagtggggaatattggacaatgggcgcaagcctgatccagcaatgccgcgtgtgtgaagaaggcctgcgggttgtaaagcactttcagtaaggaggaaatgctcaaggttaataaccttgagtcttgacgttacttacagaagaagcaccggctaactctgtgccagcagccgcggtaatacagagggtgcgagcgttaatcggaattactgggcgtaaagcgcgcgtaggcggtttgttaagttggatgtgaaagccctgggcttaacctgggaactgcattcaaaactggcaggctagagtatggtagaggtaagtggaattccgggtgtagcggtgaaatgcgtagatatccggaggaacatcagtggcgaaggcggcttactggaccaatactgacgctgaggtgcgaaagcgtggggagcaaacaggattagataccctggtagtccacgccgtaaacgatgagaactagacgttgggtccatttaaggatttagtgtcgcagctaacgcgtgaagttctccgcctggggagtacggccgcaaggttaaaactcaaaggaattgacgggggcccgcacaagcggtggagcatgtggtttaattcgatgcaacgcgaagaaccttaccagcccttgacatcctgggaattttctagagatagattagtgccttcgggaacccagtgacaggtgctgcatggctgtcgtcagctcgtgtcgtgagatgttgggttaagtcccgcaacgagcgcaacccttgtccttagttgccagcattcagttgggcactctagggagactgccggtgacaaaccggaggaaggtggggatgacgtcaagtcatcatggcccttatgggctgggctacacacgtgctacaatggtgcatacagagggttgccaacccgcgagggggagctaatcccagaaagtgcatcgtagtccggattggagtctgcaactcgactccatgaagtcggaatcgctagtaatcgtagatcagaatgctacggtgaatacgttcccgggccttgtacacaccgcccgtcacaccatgggagtgggctgcaaaagaagtgggtagcataaccttcgggagtgcgctcaccactttgtggttcatgactggggtg

SEQ ID NO: 3422 - DNA, 1451 bp, Thiohalobacter thiocyanaticus
attgaacgctggcggcatgcttaacacatgcaagtcgaacgcgaaagtccttcggggcgagtagagtggcggacgggtgagtaatgcgtgggaatctgcctggcagtgggggataacccgaggaaactcgggctaataccgcatacgccctacgggggaaagggggcttcggctctcgttgctagatgagcccacgtccgattagctagttggtggggtaaaggcccaccaaggcgacgatcggtagctggtctgagaggatgatcagccacactgggactgagacacggcccagactcctacgggaggcagcagtggggaatattggacaatgggcgcaagcctgatccagcaatgccgcgtgtgtgaagaaggcctgcgggttgtaaagcactttcagtgaggaagaaaagcctggggttaatacccctgggtcttgacgttactcacagaagaagcaccggctaactccgtgccagcagccgcggtaatacggagggtgcaagcgttaatcggaatcactgggcgtaaagcgcacgtaggcggcttggtcagtcagctgtgaaagccctgggcttaacctgggaactgcagttgatactgcctagctagagtctgaaagaggggggtggaattccaggtgtagcggtgaaatgcgtagatatctggaggaacaccagtggcgaaggcggccccctggttcaagactgacgctgaggtgcgaaagcgtggggagcaaacaggattagataccctggtagtccacgctgtaaacgctgtcgactagccgtggggctcatttaagggtttcgtggcgcagctaacgcgataagtcgaccgcctggggagtacggccgcaaggttaaaactcaaaggaattgacgggggcccgcacaagcggtggagcatgtggtttaattcgatgcaacgcgaagaaccttaccagcccttgacatcctcgggacttggcagagatgccttggtgccttcgggagccgagagacaggtgctgcatggctgtcgtcagctcgtgtcgtgagatgttgggttaagtcccgtaacgagcgcaacccttgtccttagttgccagcgagtcaagtcgggaactctaaggagactgccggtgataaaccggaggaaggtggggatgacgtcaagtcatcatggcccttatgggctgggctacacacgtgctacaatggccggtacagagggtcgcaagcccgcgagggggagccaatctcagaaaaccggtcgtagtccggatcgcagtctgcaactcgactgcgtgaagtcggaatcgctagtaatcgcgaatcagaatgtcgcggtgaatacgttcccgggccttgtacacaccgcccgtcacaccatgggagttggttgcaccagaagtagatagcttaaccttcgggagggcgtttaccacggtgtggtcaatgactggggtg

SEQ ID NO: 3423 - DNA, 1462 bp, Thiohalomonas denitrificans
attgaacgctggcggcatgcttaacacatgcaagtcgagcggtaacaggcccttcggggtgctgacgagcggcggacgggtgagtaatgcgtaggaatctgcctggtagtgggggatagcccggggaaacccggattaataccgcatacgctctacggaggaaagtgggggacctttcggggcctcacgctatcagatgagcctacgtcggattagctagttggtagggtaaaggcctaccaaggcgacgatccgtagctgttctgagaggatgatcagccacactgggactgagacacggcccagactcctacgggaggcagcagtggggaatattggacaatgggggcaaccctgatccagcaatgccgcgtgtgtgaagaaggcctgcgggttgtaaagcactttcagtagggaggaaaagttcaaggttaatagccttgagccttgacgttacctacagaagaagcaccggctaactccgtgccagcagccgcggtaatacggagggtgcaagcgttaatcggaattactgggcgtaaagcgcgcgtaggcggcttgttaagtcggatgtgaaagccccgggcttaacctgggaatggcattcgatactggcaggctagagtttggtagagggaagtggaattccgggtgtagcggtgaaatgcgtagatatccggaggaacaccagtggcgaaggcgacttcctggaccaaaactgacgctgaggtgcgaaagcgtgggtagcaaacaggattagataccctggtagtccacgccgtaaacgatgagaactagccgttgggggaatttattccctttgtggcgaagctaacgcgataagttctccgcctggggagtacggccgcaaggttaaaactcaaaggaattgacgggggcccgcacaagcggtggagcatgtggtttaattcgatgcaacgcgaagaaccttacctgcccttgacatcctcggaacttggcagagatgccttggtgccttcgggaaccgagtgacaggtgctgcatggctgtcgtcagctcgtgtcgtgagatgttgggttaagtcccgtaacgagcgcaacccttgtccctagttgccagcacgtaatggtgggaactctagggagactgccggtgacaaaccggaggaaggtggggatgacgtcaagtcatcatggcccttatgggcagggctacacacgtgctacaatggccggtacagagggctgccaagccgcaaggtggagcaaatctcagaaaaccggtcgtagtccggatcggagtctgcaactcgactccgtgaagtcggaatcgctagtaatcgcggatcagaatgccgcggtgaatacgttcccgggccttgtacacaccgcccgtcacaccatgggagtgggctgcaccagaagtcgcttgtctaaccttcgggaggacggcgcccacggtgtggttcatgactggggtg

SEQ ID NO: 3424 - DNA, 1297 bp, Thiohalophilus thiocyanatoxydans
cagcagcagagagcttgctctctggctggcgagtggcggacgggtgagtaatgcataggaatctgcccagtagtgggggacaacctggggaaactcaggctaataccgcatacgacctacgggtgaaagtgggggatcttcggacctcacgctactggatgagcctatgtcagattagcttgttggtgaggtaaaggctcaccaaggcaacgatctgtagctggtctgagaggacgatcagccacactgggactgagacacggcccagactcctacgggaggcagcagtggggaatattggacaatgggggcaaccctgatccagcaatgccgcgtgtgtgaagaaggcctgcgggttgtaaagcactttcaacagtgaagaaaagctgacggttaatacccgtcagtcttgacattaactgtagaagaagcaccggctaactccgtgccagcagccgcggtaatacggagggtgcaagcgttaatcggaattactgggcgtaaagcgcgcgtaggcggtttgataagtcggatgtgaaagccccgggctcaacctgggaattgcattcgatactgtcaggctagagtatggtagagggaagtggaattccaggtgtagcggtgaaatgcgtagagatctggaggaacatcagtggcgaaggcgacttcctggaccaatactgacgctgaggtgcgaaagcgtggggagcaaacaggattagataccctggtagtccacgccgtaaacgatgtcaactagccgttggggatattaaatctttagtggcgtagctaacgcgataagttgaccgcctggggagtacggcgcaaggttaaaactcaaaggaattgacgggggcccgcacaagcggtggagcatgtggtttaattcgatgcaacgcgaagaaccttacctacccttgacatcctcagaacttgtcagagatgacttggtgccttcgggaactgagtgacaggtgctgcatggctgtcgtcagctcgtgtcgtgagatgttgggttaagtcccgtaacgagcgcaacccttgtccctagttgctaacatttattgagaactctagggagactgccggtgacaaaccggaggaaggtggggatgacgtcaagtcatcatggcccttacgggtagggctacacacgtgctacaatggacggtacagagggccgcaaacccgcgagggggagcaaatctcataaaaccgttcgtagtccggatcggagtctgcaactcgactccgtgaagtcggaatcgctagtaatcgcgaatcagaatgtcgc

SEQ ID NO: 3425 - DNA, 1332 bp, Thiohalorhabdus denitrificans
gtacgtgaaagcaccttcgggtgtgactagcgtggcggacgggtgagtaacgcgtggatgacctgccctttggcgggggataacccggggaaacccgggctaataccgcatacgtcctgttcctttggggacaggggaaagctggcctctgatgcaagctagcgccgaaggaggggtccgcgtcggattagctagttggtggggtaacggcccaccaaggcgacgatccgtagctggtcttagcggatgatcagccacactgggactgagacacggcccagactcctacgggaggcagcagtggggaatcttggacaatgggggcaaccctgatccagccatgccgcgtgggtgaagaaggccttcgggttgtaaagccctttcagcagggaagacgccttgtggttcaaatagggccgcaaggtgacgttacctgcagaagaagcgccggccaactccgtgccagcagccgcggtaatacggagggcgcaagcgttaatcggaatcactgggcgtaaagggcgcgcaggcggctcgtcaagtgggatgtgaaagccctgggctcaacctaggaattgcattccaaactggcgggctagagtccggaagagggaggtggaattccccgtgtagcggtgaaatgcgtagatatggggaggaacaccggtggcgaaggcgacctcctggtccggtactgacgctgaggcgcgaaagcgtgggtagcgaacgggattagataccccggtagtccacgccgtaaacgttgagaactaggtgtggggaagcatgccttctccgtgccgaagctaacgcgttaagttctccgcctggggagtacggccgcaaggctaaaactcaaaggaattgacgggggcccgcacaagcggtggagcatgtggtttaattcgatgcaacgcgaagaaccttacctgggcttgacatcatccggaatcccctagagataggggagtgccttcgggagccggatgacaggtgctgcatggctgtcgtcagctcgtgtcgtgagatgttgggttaagtcccgcaacgagcgcaacccctatccttagttgccagcggttcggccgggcactctagggagactgccggtgacaaaccggaggaaggcggggacgacgtcaagtcatcatggcctttatgtccagggctacacacgtgctacaatggccggtacagagggcagcgagtccgcgaggcggagcgaatcccaaaaagccggtcgtagttcggattgcagtctgcaactcgactgcatgaagccggaatcgctagtaatcgcagatcagaatgctgcggtgaatacgttcccgg

SEQ ID NO: 3426 - DNA, 1465 bp, Thiohalospira halophila
attgaacgctggcggcatgcctaacacatgcaagtcgaacggcagcgcgggagagcttgctcttctggcggcgagtggcgaacgggtgagtaacgcgtaggaatctgcccggtagtgggggataacttggggaaactcaagctaataccgcatacgccctacgggggaaaatgggggatcttcggacctcatgctatcggaggagcctgcgtcggattagctagttggtggggtaagagcctaccaaggcgacgatccgtagctggtctgagaggatgatcagccacactgggactgagacacggcccagactcctacgggaggcagcagtggggaatattggacaatgggcgaaagcctgatccagcaatgccgcgtgtgtgaagaaggcctgcgggttgtaaagcactttcagcagccaagaaaagctcagggctaatacccctgagtcttgacattaactgcagaagaagcaccggctaactccgtgccagcagccgcggtaatacggagggtgcaagcgttaatcggaattactgggcgtaaagggcacgcaggcggcctggacagttggatgtgaaagccccgggcttaacctgggaattgcattcaatacttccaggctagagttcggtagagggtagtggaattcccggtgtagcggtgaaatgcgtagatatcgggaggaacaccagtggcgaaggcgactgcctggaccgaaactgacgctgaggtgcgaaagcgtgggtagcaaacaggattagataccctggtagtccacgccgtaaacgctgagaactagccgttggggaccttgatgtccttagtggcgaagctaacgcgttaagttctccgcctggggagtacggccgcaaggttaaaactcaaaggaattgacgggggcccgcacaagcggtggagcatgtggtttaattcgatgcaacgcgaagaaccttacctgcccttgacatcctcggaacttggtagagataccttggtgccttcgggaaccgagtgacaggtgctgcatggctgtcgtcagctcgtgtcgtgagatgttgggttaagtcccgtaacgagcgcaacccttatccctagttgccagcggtccggccgggaactctagggagactgccggtgacaaaccggaggaaggtggggatgacgtcaagtcatcatggcccttatgggcagggctacacacgtgctacaatggccggcacagagggcagcaaacccgcgagggggagcaaatcccgtaaagccggtcccagtccggattggagtctgcaactcgactccatgaagtcggaatcgctagtaatcgcagatcagaatgctgcggtgaatacgttcccgggccttgtacacaccgcccgtcacaccatgggagtcgactgtaccagaagcgggtagtctaaccttcgggaggacgctcgccacggtatggtcggcgactggggtg

SEQ ID NO: 3427 - DNA, 1463 bp, Thiolapillus brandeum
attgaacgctggcggtatgcttaacacatgcaagtcgaacgcgaaaggcaccttcgggagctgagtagagtggcggacgggtgagtaacgcgtaggaatctgcctagtagtgggggatagcccggagaaatccggattaataccgcatacgccctacgggggaaagatggcctcttcttgaaagctatcactattagatgagcctgcgtcggattagctggttggtgaggtaatggctcaccaaggcgacgatccgtagctggtctgagaggacgatcagccacactgggactgagacacggcccagactcctacgggaggcagcagtggggaatattggacaatgagcgaaagcttgatccagcaataccgcgtgtgtgaagaaggcctgcgggttgtaaagcactttcagtggggaagaaaagcttaaggttaatacccttgagtcttgacgttacccacagaagaagcaccggctaactccgtgccagcagccgcggtaatacggagggtgcaagcgttaatcggaattactgggcgtaaagcgcgcgtaggcggtttggtcagtcagatgtgaaagccctgggctcaacctgggaactgcatttgatactgccaagctagagtatggtagagggaagtggaattccgggtgtagcggtgaaatgcgtagatatccggaggaacaccagtggcgaaggcgacttcctggaccaatactgacgctgaggtgcgaaagcgtgggtagcaaacaggattagataccctggtagtccacgccgtaaacgatgtcaactagccgttggggccatttaaggctttagtggcgcagctaacgcgataagttgaccgcctggggagtacggtcgcaagattaaaactcaaaggaattgacgggggcccgcacaagcggtggagcatgtggtttaattcgatgcaacgcgaagaaccttaccagcccttgacatcctcggaagttagcagagatgctttcgtgccttcgggaaccgagtgacaggtgctgcatggctgtcgtcagctcgtgtcgtgagatgttgggttaagtcccgtaacgagcgcaacccctgtccttagttgccagcgagtaatgtcgggaactctaaggagactgccggtgacaaaccggaggaaggtggggatgacgtcaagtcatcatggcccttatgggctgggctacacacgtgctacaatggccggtacagagggttgccaacccgcgagggggagctaatcccagaaaaccggtcgtagtccggattggagtctgcaactcgactccatgaagtcggaatcgctagtaatcgcgaatcagaatgtcgcggtgaatacgttcccgggccttgtacacaccgcccgtcacaccatgggagtgggttgcaccagaagtagctagactaaccttcggggggtcggttaccacggtgtgattcatgactggggtg

SEQ ID NO: 3428 - DNA, 1462 bp, Thiomicrospira aerophila
aatgaacgctggcggcaggcctaacacatgcaagtcggacggtaacaggggagcttgctctcgctgacgagtggcggacgggtgagtaatgcatgggaatctgccctttggttggggataccgtatggaaacgtacgttaataccgaatgagatctacggatgaaaggtggcctctacttgtaagctatcgccaagggatgagcccatgttagattagctagttggtgaggtaatggctcaccaaggcgacgatctatagctggtttgagaggatgatcagccacactgggactgagacacggcccagactcctacgggaggcagcagtggggaatattggacaatgggggcaaccctgatccagccatgccgcgtgtgtgaagaaggcccgagggttgtaaagcacttttagtgaggaggaaaggttagtagttaatacctgctagctgtgacgttactcacagaaaaagcaccggctaactctgtgccagcagccgcggtaatacagagggtgcaagcgttattcggaattactgggcgtaaagcgcgcgtaggcggattgttaagtcagttgtgaaagccctgggctcaacctaggaatggcgattgaaactggcagtctagagtttagtagagggaaggggaatttctggagtagcagtgaaatgcgtagatatcagaaggaacatcagtggcgaaggcgccttcctggactaaaactgacgctgaggtgcgaaagcgtggggagcaaacgggattagataccccggtagtccacgccctaaacgatgtcaactagctgttggtcttattaaaaagattagtagcgcagctaacgcgataagttgaccgcctggggagtacggtcgcaagattaaaactcaaaggaattgacgggggcccgcacaagcggtggagcatgtggtttaattcgatgcaacgcgaagaaccttaccatcccttgacatccacagaactttctagagatagattggtgccttcgggaactgtgagacaggtgctgcatggctgtcgtcagctcgtgtcgtgagatgttgggttaagtcccgcaacgagcgcaacccttatcattagttgctaccatttagttgagaactctaatgagactgccggtgataaaccggaggaaggcggggacgacgtcaagtcatcatggcccttatgggatgggctacacacgtgctacaatggtcggtacaaacagttgcgaagccgcgaggtggtgctaatctgaaaaaaccgatcgtagtccggattggagtctgcaactcgactccatgaagtcggaatcgctagtaatcgcaaatcagaatgttgcggtgaatacgttcccgggccttgtacacaccgcccgtcacaccatgggagtgggttgcaccagaagtagctagtctaaccttcgggaggacggttaccacggtgtgattcatgactggggtg

SEQ ID NO: 3429 - DNA, 1462 bp, Thiomicrospira cyclica
aatgaacgctggcggcaggcctaacacatgcaagtcggacggtaacaggggagcttgctcctgctgacgagtggcggacgggtgagtaaggcatgggaatctgccctttggttggggataccgtatggaaacgtacgttaataccgaatgagatctacggatgaaaggtggcctctacttgtaagctatcgccaaaggatgagcccatgttagattagctagttggtgaggtaatggctcaccaaggcgacgatctatagctggtttgagaggatgatcagccacactgggactgagacacggcccagactcctacgggaggcagcagtggggaatattggacaatgggggcaaccctgatccagccatgccgcgtgtgtgaagaaggcccgagggttgtaaagcacttttagtgaggaggaaaggcagttagttaatacctgattgctgtgacgttactcacagaaaaagcaccggctaactctgtgccagcagccgcggtaatacagagggtgcaagcgttattcggaattactgggcgtaaagcgcgcgtaggcggattgttaagtcagttgtgaaagccctgggctcaacctaggaacggcgattgaaactggcagtctagagtttagtagagggaaggggaatttctggagtagcagtgaaatgcgtagatatcagaaggaacatcagtggcgaaggcgccttcctggactaaaactgacgctgaggtgcgaaagcgtggggagcaaacgggattagataccccggtagtccacgccctaaacgatgtcaactagctgttggtcttattaaaaagattagtagcgcagctaacgcgataagttgaccgcctggggagtacggtcgcaagattaaaactcaaaggaattgacgggggcccgcacaagcggtggagcatgtggtttaattcgatgcaacgcgaagaaccttaccatcccttgacatccacagaactttctagagatagattggtgccttcgggaactgtgagacaggtgctgcatggctgtcgtcagctcgtgtcgtgagatgttgggttaagtcccgcaacgagcgcaacccttatcattagttgctaccatttagttgagaactctaatgagactgccggtgataaaccggaggaaggcggggacgacgtcaagtcatcatggcccttatgggatgggctacacacgtgctacaatggtcggtacaaacagttgcgaagccgcgaggtggtgcgaatctgaaaaaaccgatcgtagtccggattggagtctgcaactcgactccatgaagtcggaatcgctagtaatcgcaaatcagaatgttgcggtgaatacgttcccgggccttgtacacaccgcccgtcacaccatgggagtgggttgcaccagaagtagctagtctaaccttcgggaggacggttaccacggtgtgattcatgactggggtg

SEQ ID NO: 3430 - DNA, 1453 bp, Thiomonas delicata
attgaacgctagcggcatgccttacacatgcaagtcgaacggcagcacgggggcaaccctggtggcgagtggcgaacgggtgagtaatgcatcggaacgtgcccatcgatgggggataactgcgcgaaagcgttgctaataccgcatacgacctacgggtgaaagcaggggaccgcaaggccttgcgtcgatggagcggccgatgccggattagctagttggtgaggtaaaggctcaccaaggcaacgatccgtagctggtctgagaggacgaccagccacactgggactgagacacggcccagactcctacgggaggcagcagtggggaatcttggacaatgggcgaaagcctgatccagcaatgccgcgtgtgggaagagggccttcgggttgtaaaccacttttggcgggaaagaaatggtctgtgctaataccacggattgatgacggtacccgcagaataagcaccggctaactacgtgccagcagccgcggtaatacgtagggtgcgagcgttaatcggaattactgggcgtaaagcgtgcgcaggcggttgggaaagatagatgtgaaagccctgggctcaacctaggaattgcatttatgactgcccgactggagtacggtagaggggagtggaattccgcgtgtagcagtgaaatgcgtagatatgcggaggaacaccgatggcgaaggcagctccctggacctgtactgacgctcatgcacgaaagcgtggggagcaaacaggattagataccctggtagtccacgccctaaacgatgtcgactggttgttggacgggaaactgttcagtaacgaagctaacgcgtgaagtcgaccgcctggggagtacggccgcaaggttaaaactcaaaggaattgacggggacccgcacaagcggtggatgatgtggtttaattcgatgcaacgcgaaaaaccttacctacccttgacatgtctggaatcccgaagagatttgggagtgctcgaaagagagccagaacacaggtgctgcatggctgtcgtcagctcgtgtcgtgagatgttgggttaagtcccgcaacgagcgcaacccttgtcattagttgctacgaaagggcactctaatgagactgccggtgacaaaccggaggaaggtggggatgacgtcaagtcatcatggcccttatgggtagggctacacacgtcatacaatggacggtacagagggttgccaacccgcgagggggagccaatcccataaaaccgttcgtagtccggattgcagtctgcaactcgactgcatgaagtcggaatcgctagtaatcgcggatcagcttgccgcggtgaatacgttcccgggtcttgtacacaccgcccgtcacaccatgggagtggggtttaccagaagtagttagcctaaccgcaaggagggcgattaccacggtaggcttcatgactggggtg

SEQ ID NO: 3431 - DNA, 1467 bp, Thioploca ingrica
  misc_feature (343)..(346): n is a, c, g, or t
  misc_feature (394)..(394): n is a, c, g, or t
  misc_feature (413)..(413): n is a, c, g, or t
  misc_feature (833)..(836): n is a, c, g, or t
attgaacgctggcggcatgcctaatacatgcaagtcgaacggtaacatgcttcggggtgatgacgagtggcggacgggtgagtaatacataggaatctgccttgtagtggggaacaacttggggaaactcaagctaataccgcataagtcttttttaaagaaagggaaagagggcctcttcatgaatctctcgctactagatgagcctatgtcagattagctagttggtaaggtaatggcttaccaaggcgacgatctgtagctggtctgagaggacgatcagccacactgggactgagacacggcccagactcctacgggaggcagcagtagggaatattgnnnnatgggcgaaagcctgatccagcaatgccgcgtgtgtgaagaaggcctncgggttgtaaagcactttnaattgggaagaaaagttcttggctaataatcaagtaccttgacgttaccaatataagaagcaccggctaactctgtgccagcagccgcggtaatacagagggtgcaagcgttaatcggaattactgggcgtaaagcgtgcgtaggcggctatgtaagtcagatgtgaaagcccaaggcttaaccttggaattgcatttgatactgcttagctagagtacagtaaagggaagcggaattcctagtgtagcggtgaaatgcgtagatattaggaggaacaccagtggcgaaggcggcttcctagactgatactgacactgaggtacgaaagcgtggggagcaaacaggattagataccctggtagtccacgccctaaacgatgagaactagacgttggaagggtataccttttagtgtcgcnnnnaacgcgataagttctccgcctggggagtacggccgcaaggttaaaactcaaatgaattgacgggggcccgcacaagcggtggagcatgtggtttaattcgatgcaacgcgaagaaccttacctagctttgacatccttggaaccttgcagaaatgtgaggctgccttcgggagccaagagacaggtgctgcatggctgtcgtcagctcgtgtcgtgagatgttgggttaagtcccgcaacgagcgcaacccttgtccctagttgccagcgattcggtcgggaactctagagagactgccggtgacaaaccggaggaaggtggggatgacgtcaagtcatcatggcctttatggctagggctacacacgtgctacaatggtgagtacagagggtcgccaaactgtaaagtggagctaatctcataaaactcatcgtagtccggattggagtctgcaactcgactccatgaagtcggaatcgctagtaatcgcggatcagcatgtcgcggtgaatacgttcccgggccttgtacacaccgcccgtcacaccatgggagtgggttgtaccagaagtaggtagtctaacctgataaggggggacgcttaccacggtatggttcataactggggtg

SEQ ID NO: 3432 - DNA, 1466 bp, Thiopseudomonas denitrificans
attgaacgctggcggcaggcttaacacatgcaagtcgagcggtaacagggagaagcttgcttctttgctgacgagcggcggacgggtgagtaatgcctgggaatctgcctggtagtgggggataacttgccgaaaggtaagctaataccgcgtacgccccatgggggaaagcaggggatcttcggaccttgcgctatcagatgagcccaggccggattagctagttggtggggtaaaggcctgccaaggcgacgatccgtagctggtctgagaggatgatcagccacaccgggactgagacacggcccggactcctacgggaggcagcagtggggaatattggacaatggggggaaccctgatccagccatgccgcgtgtgtgaagaaggtcttcggattgtaaagcactttaagttgggaggaagggtttctggttaatacccgggaattttgacgttaccaacagaataagcaccggctaacttcgtgccagcagccgcggtaatacgaagggtgcgagcgttaatcggaattactgggcgtaaagcgcgcgtaggtggtttgttaagttggaagtgaaagccccgggctcaacctgggaatggctttcaaaactggcgagctagagtacggtagagggcagtggaatttcctgtgtagcggtgaaatgcgtagatataggaaggaacatcagtggcgaaggcgactgtctggactgatactgacactgaggtgcgaaagcgtggggagcaaacaggattagataccctggtagtccacgccgtaaacgatgtcaactagttgttggaggccttgtgcctttagtaacgcagctaacgcattaagttgaccgcctggggagtacggccgcaaggttaaaactcaaatgaattgacgggggcccgcacaagcggtggagcatgtggtttaattcgaagcaacgcgaagaaccttacctggccttgacatgtagcgaactttccagagatggattggtgccttcgggaacgctaacacaggtgctgcatggctgtcgtcagctcgtgtcgtgagatgttgggttaagtcccgtaacgagcgcaacccttgtccttagttaccagcacgttatggtgggcactttaaggggactgccggtgacaaaccggaggaaggtggggatgacgtcaagtcatcatggcccttacggccagggctacacacgtgctacaatggtcggtacaacgggatgccaagccgcgaggtggagccaaccccatcaaagccgatcgtagtccggattgcactctgcaactcgagtgcatgaagtcggaatcgctagtaatcgcggatcagaatgccgcggtgaatacgttcccgggccttgtacacaccgcccgtcacaccatgggagtgggttgcaccagaagtagctagtctaaccttcggggggacggttaccacggtgtgattcatgactggggtg

SEQ ID NO: 3433 - DNA, 1464 bp, Thiorhodococcus drewsii
attgaacgctggcggcatgcttaacacatgcaagtcgaacgcgaaagtccttcggggcgagtagagtggcggacgggtgagtaatgcgtgggaatctgcctggcagtgggggataacccgaggaaactcgggctaataccgcatacgccctacgggggaaagggggcttcggctctcgttgctagatgagcccacgtccgattagctagttggtggggtaaaggcccaccaaggcgacgatcggtagctggtctgagaggatgatcagccacactgggactgagacacggcccagactcctacgggaggcagcagtggggaatattggacaatgggcgcaagcctgatccagcaatgccgcgtgtgtgaagaaggcctgcgggttgtaaagcactttcagtgaggaagaaaagcctggggttaatacccctgggtcttgacgttactcacagaagaagcaccggctaactccgtgccagcagccgcggtaatacggagggtgcaagcgttaatcggaatcactgggcgtaaagcgcacgtaggcggcttggtcagtcagctgtgaaagccctgggcttaacctgggaactgcagttgatactgcctagctagagtctgaaagaggggggtggaattccaggtgtagcggtgaaatgcgtagatatctggaggaacaccagtggcgaaggcggccccctggttcaagactgacgctgaggtgcgaaagcgtggggagcaaacaggattagataccctggtagtccacgctgtaaacgctgtcgactagccgtggggctcatttaagggtttcgtggcgcagctaacgcgataagtcgaccgcctggggagtacggccgcaaggttaaaactcaaaggaattgacgggggcccgcacaagcggtggagcatgtggtttaattcgatgcaacgcgaagaaccttaccagcccttgacatcctcgggacttggcagagatgccttggtgccttcgggagccgagagacaggtgctgcatggctgtcgtcagctcgtgtcgtgagatgttgggttaagtcccgtaacgagcgcaacccttgtccttagttgccagcgagtcaagtcgggaactctaaggagactgccggtgataaaccggaggaaggtggggatgacgtcaagtcatcatggcccttatgggctgggctacacacgtgctacaatggccggtacagagggtcgcaagcccgcgagggggagccaatctcagaaaaccggtcgtagtccggatcgcagtctgcaactcgactgcgtgaagtcggaatcgctagtaatcgcgaatcagaatgtcgcggtgaatacgttcccgggccttgtacacaccgcccgtcacaccatgggagttggttgcaccagaagtagatagcttaaccttcgggagggcgtttaccacggtgtggtcaatgactggggtgaagtcgtaacaag

SEQ ID NO: 3434 - DNA, 1458 bp, Thiorhodospira sibirica
attgaacgctggcggcatgcctaacacatgcaagtcgaacggtaacaggccttcgggcgctgacgagtggcggacgggtgagtaacgcgtaggaatctgcctggtagtgggggataacccggggaaactcgggctaataccgcatacgccctacgggggaaagcgggggatcttcggacctcgcgttatcagatgagcctgcgtccgattagctagttggtgaggtaatggctcaccaaggcgacgatcggtagctggtctgagaggacgatcagccacactgggactgagacacggcccagactcctacgggaggcagcagtggggaatattggacaatgggcgcaagcctgatccagcaatgccgcgtgtgtgaagaaggcctgcgggttgtaaagcactttcagtggggaggaaaagctcaatgttaataccattgggtcttgacgtaacccacagaagaagcaccggctaactccgtgccagcagccgcggtaatacggagggtgcaagcgttaatcggaattactgggcgtaaagcgcacgtaggtggttgtgtcagtcagatgtgaaagccccgggcttaacctgggaactgcatctgatactgcacggctagagtttggtagaggagggcggaattcccggtgtagcggtgaaatgcgtagatatcgggaggaacaccagtggcgaaggcggctctctggactaaaactgacactgaggtgcgaaagcgtggggagcaaacaggattagataccctggtagtccacgccgtaaacgatgagaactagccgttgggaggatttagcctcttagtggcgcagcaaacgcattaagttctccgcctggggagtacggccgcaaggttgaaactcaaaggaattgacgggggcccgcacaagcggtggagcatgtggtttaattcgatgcaacgcgaagaaccttacctacccttgacatcctcggaacttgtcagagatgacttggtgccttcgggaaccgagagacaggtgctgcatggctgtcgtcagctcgtgtcgtgagatgttgggttaagtcccgcaacgagcgcaacccttatccttagttgccagcgattcggtcgggaactctagggagactgccggtgacaaaccggaggaaggtggggatgacgtcaagtcatcatggcccttatgggtagggctacacacgtgctacaatggccagtacaaagggttgccaacccgcgagggggagctaatctcaaaaagctggtcgtagtccggattggagtctgcaactcgactccatgaagtcggaatcgctagtaatcgcagatcagcattgctgcggtgaatacgttcccgggccttgtacacaccgcccgtcacaccatgggagttggttgcaccagaagtaggtagtctaaccttcgggagggcgcttaccacggtgtggtcaatgactggggtg

SEQ ID NO: 3435 - DNA, 1411 bp, Thiothrix caldifontis
attgaacgctggcggtatgcttaagacatgcaagtcgaacggaatcttcggattcagtggcggacgggtgagtaacacgtgggaatctactgagtagtgggggacagcccggcgaaagccggattaataccgcatacgccctacgggggaaaggcgcaagccgctatttaatgagcccgcgtaagattagctagttggtaaggtaaaggcttaccaaggcgacgatctttagctggtctgagaggatggccagccacatcgggactgagacacggcccggactcctacgggaggcagcagtcgggaatattggacaatgggcgcaagcctgatccagcaataccgcgtgtgtgaagaaggcctgcgggttgtaaagcactttcagttgggaagataatgacgttaccaacagaagaagcaccggctaactccgtgccagcagccgcggtaatacggagggtgcaagcgttaatcggaattactgggcgtaaagcgtgcgtaggcggttacttaagtcagatgtgaaatccccgggctcaacctgggaactgcatctgatactgggtgactagagtgtgggagaggagagtggaatttccggtgtagcggtgaaatgcatagagatcggaaggaacatcagtggcgaaggcgactctctggaccaacactgacgctgaggcacgaaagcgtgggtagcaaacaggattagataccctggtagtccacgccgtaaacgatgtcaactagccgtcaggcccgctttagggtttggtggtggagctaacgtattaagttgaccgcctggggagtacgctcgcaagagtaaaactcaaaggaattgacgggggcccgcacaagcggtggagcatgtggtttaattcgatgcaacgcgaagaaccttacctggtcttgacatgcagtgaactttgcagaaatgtattggtgccttcgggaacactgacacaggtgctgcacggctgtcgtcagctcgtgtcgtgagatgttgggttaagtcccgcaacgagcgcaacccctatccctagttgccagcacgtaatggtgggaactctaaggagactgccggtgacaaaccggaggaaggtggggatgacgtcaagtcatcatggcccttatgaccagggctacacacgtgctacaatgggtggtacagagggaagcgataccgcgaggtggagcaaatcccagaaagccatccgtagtccggatcggagtctgcaactcgactccgtgaagtcggaatcgctagtaatcgcgaatcagcatgtcgcggtgaatacgttcccgggccttgtacacaccgcccgtcacaccatgggagtttgttgcaccagaagcaggtagtctaaccgaaaggagggcgcttgccacggtgtggccgatgactggggtg

SEQ ID NO: 3436 - DNA, 1411 bp, Thiothrix lacustris
attgaacgctggcggtatgcttaagacatgcaagtcgaacggaatcttcggattcagtggcggacgggtgagtaacacgtgggaatctactgagtagtgggggacagcccggcgaaagccggattaataccgcatacgccctacgggggaaaggcgcaagccgctatttaatgagcccgcgtaagattagctagttggtgaggtaaaggcccaccaaggcaacgatctttagctggtctgagaggatggccagccacatcgggactgagacacggcccggactcctacgggaggcagcagtcgggaatattggacaatgggcgcaagcctgatccagcaataccgcgtgtgtgaagaaggcctgcgggttgtaaagcactttcagttgggaagataatgacgttaccaacagaagaagcaccggctaactccgtgccagcagccgcggtaatacggagggtgcaagcgttaatcggaattactgggcgtaaagcgtgcgtaggcggttttttaagtcagatgtgaaatccccgggctcaacctgggaactgcatctgatactgggagactagagtgtgggagaggagagtggaatttccggtgtagcggtgaaatgcatagagatcggaaggaacatcagtggcgaaggcgactctctggaccaacactgacgctgaggcacgaaagcgtgggtagcaaacaggattagataccctggtagtccacgccgtaaacgatgtcaactagccgtcaggcccgctttagggtttggtggtggagctaacgtattaagttgaccgcctggggagtacgctcgcaagagtaaaactcaaaggaattgacgggggcccgcacaagcggtggagcatgtggtttaattcgatgcaacgcgaagaaccttacctggtcttgacatgtagtgaacttagcagaaatgttttggtgccttcgggaacactaacacaggtgctgcacggctgtcgtcagctcgtgtcgtgagatgttgggttaagtcccgcaacgagcgcaacccctatccctagttgccagcacgtaatggtgggaactctaaggagactgccggtgacaaaccggaggaaggtggggatgacgtcaagtcatcatggcccttatgaccagggctacacacgtgctacaatgggtggtacagagggaagcaagaccgcgaggtggagcaaatcccagaaagccatccgtagtccggattggagtctgcaactcgactccatgaagtcggaatcgctagtaatcgcggatcagcatgccgcggtgaatacgttcccgggccttgtacacaccgcccgtcacaccatgggagtttgttgcaccagaagcaggtagtctaaccgaaaggagggcgcttgccacggtgtggccgatgactggggtg

SEQ ID NO: 3437 - DNA, 1413 bp, Thiothrix nivea
attgaacgctggcggtatgcttaagacatgcaagtcggacggggtacttcggtactcagtggcggacgggtgagtaacacgtgggaatctgcctgttagtgggggacagcccagcgaaagctggattaataccgcatacgccctacgggggaaagcagcaatgcgctaacagatgagcccgcgttagattagctggttggtggggtaaaggcccaccaaggcgacgatctatagctggtctgagaggatggccagccacattgggactgagacacggcccagactcctacgggaggcagcagtcgggaatattggacaatgggcgcaagcctgatccagcaataccgcgtgtgtgaagaaggcctgcgggttgtaaagcactttcagtggggaagataatgacgttacccacagaagaagcaccggctaactccgtgccagcagccgcggtaatacggagggtgcaagcgttaatcggaattactgggcgtaaagcgcacgtaggcggccctttaagtcagatgtgaaatccccgggctcaacctgggaactgcacctgatactggggggctagaatgtgggagaggagagtagaatttccggtgtagcggtgaaatgcatagagatcggaaggaataccagtggcgaaggcggctctctggaccaacattgacgctgaggtgcgaaagcgtgggtagcaaacaggattagataccctggtagtccacgccgtaaacgatgtcaactagccgtcaggcccgctttagggtttggtggtgcagctaacgtattaagttgaccgcctggggagtacgctcgcaagagtaaaactcaaaggaattgacgggggcccgcacaagcggtggagcatgtggtttaattcgatgcaacgcgaagaaccttacctggtcttgacatgcagtgaactttgcagaaatgtattggtgccttcgggaacactgacacaggtgctgcacggctgtcgtcagctcgtgtcgtgagatgttgggttaagtcccgcaacgagcgcaacccctgtccctagttgccagcacattatggtgggaactctagggagactgccggtgacaaaccggaggaaggtggggatgacgtcaagtcatcatggcccttatgaccagggctacacacgtgctacaatgggcagtacagagggaagcgaagctgtgaggtggagcaaatcccagaaagctgttcgtagtccggattggagtctgcaactcgactccatgaagtcggaatcgctagtaatcgcgaatcagcatgtcgcggtgaatacgttcccgggccttgtacacaccgcccgtcacaccatgggagtttgttgcaccagaagcaggtagtctaaccttcgggagggcgcttgccacggtgtggccgatgactggggtg

SEQ ID NO: 3438 - DNA, 1410 bp, Tistlia consotensis
aacgaacgctggcggcaggcctaacacatgcaagtcgaacgctctcttcggagagagtggcgcacgggtgagtaacgcgtgggaacctaccccgaggtccgggacaaccgctggaaacggcggctaataccggatgtgtcctgagggagaaagattcatcgccttgggaggggcccgcgtccgattaggtagttggtgtggtaacggcgcaccaagccttcgatcggtagctggtctgagaggatgatcagccacactgggactgagacacggcccagactcctacgggaggcagcagtggggaatattggacaatgggcgcaagcctgatccagccatgccgcgtgagtgaagaaggccttagggttgtaaagctctttcacgggcgacgatgatgacggtagcccgagaagaagccccggctaactccgtgccagcagccgcggtaatacggagggggcgagcgttgttcggaattactgggcgtaaagggcgcgtaggcggtttggtcagttggaggtgaaagccctgggctcaacctgggaggtgccttcaatacggccagacttgagagcgggagaggatgacggaattcccagtgtagaggtgaaattcgtagatattgggaagaacaccggtggcgaaggcggtcatctggcccgtttctgacgctgaggcgcgaaagcgtggggagcaaacaggattagataccctggtagtccacgccgtaaacgatgtgcgctagccgtcgggggacatagtttctcggtggcgcagctaacgcgataagcgcaccgcctggggagtacggccgcaaggttaaaactcaaaggaattgacgggggcccgcacaagcggtggagcatgtggtttaattcgaagcaacgcgcagaaccttaccagcccttgacatgggggtcgcagtctccggagacggagacatcagttcggctggaccccgcacaggtgctgcatggctgtcgtcagctcgtgtcgtgagatgttgggttaagtcccgcaacgagcgcaacccttgcccttagttgccatcaggttgggctgggcactctaagggaaccgccggtgacaagccggaggaaggcggggatgacgtcaagtcctcatggcccttatgggctgggctacacacgtgctacaatggcggtgacagtgggcagcgaaggcgcgagccggagccaatccccaaaagccgtctcagttcggattgcactctgcaactcgggtgcatgaaggtggaatcgctagtaatcgtggatcagcatgccacggtgaatacgttcccgggccttgtacacaccgcccgtcacaccatgggagttggtttgacccgaagacggtgcgccaaccgcaaggaggcagccggccacggtcaggtcagcgactggggtg

SEQ ID NO: 3439 - DNA, 1423 bp, Tistrella mobilis
aacgaacgctggcggcatgcctaacacatgcaagtcgaacggggtcggaacttcggttccggcttacgtggcgcacgggtgagtaacacgtgggaatctgcccatctatggggaataactgcgggaaactgcagctaataccgcatacgcccttcgggggaaaggcttcggccgtagatggatgagcccgcgtccgattagctagttggtggggtaacggcctaccaaggcgacgatcggtagctggtctgagaggatgatcagccacactgggactgagacacggcccagactcctacgggaggcagcagtggggaatattggacaatgggcgaaagcctgatccagcaatgccgcgtgagtgatgaaggtcttcggattgtaaagctctttcgacggggaagataatgacggtacccgtagaagaagccccggctaacttcgtgccagcagccgcggtaatacgaagggggctagcgttgttcggatttactgggcgtaaagcgtgcgtaggcggcttatcaagtcagaagtgaaagcccggggctcaactccggaactgcttttgagactggtaggctggagttcgggagagggtagtggaattcccagtgtagaggtgaaattcgtagatattgggaagaacaccggtggcgaaggcggctgcctggcccgaaactgacgctgaggcacgaaagcgtggggagcaaacaggattagataccctggtagtccacgccgtaaacgatgagtgctggacgttgggatacttagtatcgcagtgtcgtagctaacgcgttaagcactccgcctggggagtacggccgcaaggttaaaactcaaaggaattgacgggggcccgcacaagcggtggagcatgtggtttaattcgaagcaacgcgcagaaccttaccagcccttgacatggacgtcgcgaccctggagacggggttttcggttcggccggacgtcacacaggtgctgcatggctgtcgtcagctcgtgtcgtgagatgttgggttaagtcccgcaacgagcgcaaccctcatccttagttgccatcagttcggctgggcactctagggaaactgccggtgataagccggaggaaggtggggatgacgtcaagtcctcatggcccttatgggctgggctacacacgtgctacaatggcgactacagtgggcagcgacatcgcgaggtgaagctaatctcaaaaagtcgtctcagttcggattgtactctgcaactcgagtgcatgaagtcggaatcgctagtaatcgcggaacagcatgccgcggtgaatacgttcccgggccttgtacacaccgcccgtcacaccatgggagttggttttacccgaagccggtgagctgacccgtaagggaggcagccgtccacggtaaggtcagcgactggggtg

SEQ ID NO: 3440 - DNA, 1468 bp, Tolumonas auensis
attgaacgctggcggcaggcctaacacatgcaagtcgaacggtagcacaggagagcttgctctctgggtgacgagtggcggacgggtgagtaatgcatggggagctgcccaatcgagggggataccagctggaaacggctgctaataccgcatacgccctgagggggaaaggtggggaccttcgggcctaccgcgattggatgcacccatgtgggattagctagttggtgaggtaacggctcaccaaggcgacgatctctagctggtctgagaggatgaccagccacactggaactgagacacggtccagactcctacgggaggcagcagtggggaatattgcacaatgggggaaaccctgatgcagccatgccgcgtgtgtgaagaaggccttcgggttgtaaagcactttcagtagggaggaagggttgatgtctaatacgcatcagcattgacgttacctacagaagaagcaccggctaactccgtgccagcagccgcggtaatacggagggtgcaagcgttaatcggaataactgggcgtaaagcgcacgcaggcggttagataagtcagatgtgaaatccccgggctcaacctgggaactgcatttgaaactgtctgactagagtcttgtagaggggggtagaattccaggtgtagcggtgaaatgcgtagagatctggaggaataccggtggcgaaggcggccccctggacaaagactgacgctcaggtgcgaaagcgtggggagcaaacaggattagataccctggtagtccacgctgtaaacgatgtcgatttggagtttgtgccattatgagcgtgggttccgaagctaacgcgataaatcgaccgcctggggagtacggccgcaaggttaaaactcaaatgaattgacgggggcccgcacaagcggtggagcatgtggtttaattcgatgcaacgcgaagaaccttacctggccttgacatgctgagaagtttgtagagatacgaatgtgccttcgggaactcagacacaggtgctgcatggctgtcgtcagctcgtgtcgtgagatgttgggttaagtcccgcaacgagcgcaacccctatcctttgttgccagcgagtaatgtcgggaactcaagggagactgccggtgataaaccggaggaaggtggggatgacgtcaagtcatcatggcccttacggccagggctacacacgtgctacaatggcgtatacagagggaagcgacctcgcgagagcaagcggaacccacaaagtacgtcgtagtccggatcggagtctgcaactcgactccgtgaagtcggaatcgctagtaatcgtggatcagaatgccacggtgaatacgttcccgggccttgtacacaccgcccgtcacaccatgggagtgggttgtaccagaagtagttagtctaacccttcggggaggacgattaccacggtgtgattcatgactggggtg

SEQ ID NO: 3441 - DNA, 1464 bp, Trabulsiella guamensis
attgaacgctggcggcaggcctaacacatgcaagtcgagcggcagcgggggaaagcttgctttcccgccggcgagcggcggacgggtgagtaatgtctgggaaactgcctgatggagggggataactactggaaacggtagctaataccgcataacgtcttcggaccaaagtgggggaccttcgggcctcatgccatcagatgtgcccagatgggattagctagtaggtggggtaacggctcacctaggcgacgatccctagctggtctgagaggatgaccagccacactggaactgagacacggtccagactcctacgggaggcagcagtggggaatattgcacaatgggcgcaagcctgatgcagccatgccgcgtgtatgaagaaggccttcgggttgtaaagtactttcagcggggaggaaggtgttgtggttaataaccagagcaattgacgttacccgcagaagaagcaccggctaactccgtgccagcagccgcggtaatacggagggtgcaagcgttaatcggaattactgggcgtaaagcgcacgcaggcggtctgtcaagtcggatgtgaaatccccgggctcaacctgggaactgcatccgaaactggcaggcttgagtcttgtagaggggggtagaattccaggtgtagcggtgaaatgcgtagagatctggaggaataccggtggcgaaggcggccccctggacaaagactgacgctcaggtgcgaaagcgtggggagcaaacaggattagataccctggtagtccacgccgtaaacgatgtcgacttggaggttgtgcccttgaggcgtggcttccggagctaacgcgttaagtcgaccgcctggggagtacggccgcaaggttaaaactcaaatgaattgacgggggcccgcacaagcggtggagcatgtggtttaattcgatgcaacgcgaagaaccttacctggtcttgacatccacagaaccctgtagagatacgggggtgccttcgggaactgtgagacaggtgctgcatggctgtcgtcagctcgtgttgtgaaatgttgggttaagtcccgcaacgagcgcaacccttatcctttgttgccagcggtccggccgggaactcaaaggagactgccagtgataaactggaggaaggtggggatgacgtcaagtcatcatggcccttacgaccagggctacacacgtgctacaatggcatatacaaagagaagcgacctcgcgagagcaagcggacctcataaagtatgtcgtagtccggattggagtctgcaactcgactccatgaagtcggaatcgctagtaatcgtggatcagaatgccacggtgaatacgttcccgggccttgtacacaccgcccgtcacaccatgggagtgggttgcaaaagaagtaggtagcttaaccttcgggagggcgcttaccactttgtgattcatgactggggtg

SEQ ID NO: 3442 - DNA, 1395 bp, Trabulsiella odontotermitis
ggcgagcggcggacgggtgagtaatgtctgggaaactgcctgatggagggggataactactggaaacggtagctaataccgcataacgtcttcggaccaaagtgggggaccttcgggcctcatgccatcagatgtgcccagatgggattagcttgttggtggggtaacggctcaccaaggcgacgatccctagctggtctgagaggatgaccagccacactggaactgagacacggtccagactcctacgggaggcagcagtggggaatattgcacaatgggcgcaagcctgatgcagccatgccgcgtgtatgaagaaggccttcgggttgtaaagtactttcagcggggaggaaggtgttgtggttaataaccacagcaattgacgttacccgcagaagaagcaccggctaactccgtgccagcagccgcggtaatacggagggtgcaagcgttaatcggaattactgggcgtaaagcgcacgcaggcggtctgtcaagtcggatgtgaaatccccgggctcaacccgggaactgcatccgaaactggcaggcttgagtcttgtagaggggggtagaattccaggtgtagcggtgaaatgcgtagagatctggaggaataccggtggcgaaggcggccccctggacaaagactgacgctcaggtgcgaaagcgtggggagcaaacaggattagataccctggtagtccacgccgtaaacgatgtcgacttggaggttgtgcccttgaggcgtggcttccggagctaacgcgttaagtcgaccgcctggggagtacggccgcaaggttaaaactcaaatgaattgacgggggcccgcacaagcggtggagcatgtggtttaattcgatgcaacgcgaagaaccttacctggtcttgacatccacggaagttttcagagatgagaatgtgccttcgggaaccgtgagacaggtgctgcatggctgtcgtcagctcgtgttgtgaaatgttgggttaagtcccgcaacgagcgcaacccttatcctttgttgccagcggtccggccgggaactcaaaggagactgccagtgataaactggaggaaggtggggatgacgtcaagtcatcatggcccttacgaccagggctacacacgtgctacaatggcatatacaaagagaagcgacctcgcgagagcaagcggacctcataaagtatgtcgtagtccggattggagtctgcaactcgactccacgaagtcggaatcgctagtaatcgtggatcagaatgccacggtgaatacgttcccgggccttgtacacaccgcccgtcacaccatgggagtgggttgcaaaagaagtaggtagcttaaccttcgggagggcgcttaccactttgtgattcatgactggggtg

SEQ ID NO: 3443 - DNA, 1481 bp, Trichococcus collinsii
gacgaacgctggcggcgtgcctaatacatgcaagtcgaacggtcttttctatggaagcttgcttccactgagaagatagtggcggacgggtgagtaacacgtgggtaacctgcccataagagggggataacatccggaaacgggtgctaataccgcatagttttcttgatcgcatgatcgagaaaggaaagacggcctttgtgctgtcgcttatggatggacccgcggcgtattagttagttggtgaggtaatggctcaccaagacgatgatacgtagccgacctgagagggtgatcggccacattgggactgagacacggcccaaactcctacgggaggcagcagtagggaatcttccgcaatggacgaaagtctgacggagcaacgccgcgtgagtgaagaaggttttcggatcgtaaaactctgttgtcagagaagaacaagtcggagagtaactgctccggccttgacggtatctgaccagaaagccacggctaactacgtgccagcagccgcggtaatacgtaggtggcaagcgttgtccggatttattgggcgtaaagcgagcgcaggcggttccttaagtctgatgtgaaagcccacggctcaaccgtggaaggtcattggaaactggggaacttgagtgcagaagaggagagtggaattccatgtgtagcggtgaaatgcgtagatatatggaggaacaccagtggcgaaggcgactctctggtctgtaactgacgctgaggctcgaaagcgtggggagcaaacaggattagataccctggtagtccacgccgtaaacgatgagtgctaagtgttggagggtttccacccttcagtgctgcagctaacgcattaagcactccgcctggggagtacggccgcaaggctgaaactcaaaggaattgacggggacccgcacaagcggtggagcatgtggtttaattcgaagcaacgcgaagaaccttaccaggtcttgacatcctttgacaatcctagagataggactttcccttcggggacaaagtgacaggtggtgcatggttgtcgtcagctcgtgtcgtgagatgttgggttaagtcccgcaacgagcgcaacccctattgttagttgccagcattcagttgggcactctaatgagactgccggtgacaaaccggaggaaggtggggatgacgtcaaatcatcatgccccttatgacctgggctacacacgtgctacaatggatggtacaacgagcagcaagaccgcgaggtcaagcgaatctcttaaagccattctcagttcggattgcaggctgcaactcgcctgcatgaagccggaatcgctagtaatcgcggatcagcacgccgcggtgaatacgttcccgggtcttgtacacaccgcccgtcacaccacgagagtttgtaacacccgaagtcggtgaggtaacctttttggagccagccgcctaaggtgggacagatgattggggtg

SEQ ID NO: 3444 - DNA, 1475 bp, Trichococcus ilyis
  misc_feature (247)..(247): n is a, c, g, or t
cgctggcggcgtgcctaatacatgcaagtcgaacggtcttttctatggaagcttgcttccactgagaagatagtggcgaacgggtgagtaacacgtgggtaacctgcccataagagggggataacatccggaaacgggtgctaataccgcataggtttcttggtcgcatgatcgagaaaggaaagacggcctttgtgctgtcgcttatggatggacccgcggcgtattagttagttggtgaggtaanggctcaccaagacgatgatacgtagccgacctgagagggtgatcggccacattgggactgagacacggcccaaactcctacgggaggcagcagtagggaatcttccgcaatggacgaaagtctgacggagcaacgccgcgtgagtgaagaaggttttcggatcgtaaaactctgttgtcagagaagaacaagtcggaaagtaactgttccggccttgacggtatctgaccagaaagccacggctaactacgtgccagcagccgcggtaatacgtaggtggcaagcgttgtccggatttattgggcgtaaagcgagcgcaggcggttccttaagtctgatgtgaaagcccacggcttaaccgtggaaggtcattggaaactggggaacttgagtgcagaagaggagagtggaattccatgtgtagcggtgaaatgcgtagatatatggaggaacaccagtggcgaaggcgactctctggtctgtaactgacgctgaggctcgaaagcgtggggagcaaacaggattagataccctggtagtccacgccgtaaacgatgagtgctaagtgttggagggtttccacccttcagtgctgcagctaacgcattaagcactccgcctggggagtacggccgcaaggctgaaactcaaaggaattgacggggacccgcacaagcggtggagcatgtggtttaattcgaagcaacgcgaagaaccttaccaggtcttgacatcctttgacaatcctagagataggactttcccttcggggacaaagtgacaggtggtgcatggttgtcgtcagctcgtgtcgtgagatgttgggttaagtcccgcaacgagcgcaacccctattgttagttgccagcattcagttgggcactctaatgagactgccggtgacaaaccggaggaaggtggggatgacgtcaaatcatcatgccccttatgacctgggctacacacgtgctacaatggatggtacaacgagcagcaagaccgcgaggtcaagcgaatctcttaaagccattctcagttcggattgcaggctgcaactcgcctgcatgaagccggaatcgctagtaatcgcggatcagcacgccgcggtgaatacgttcccgggtcttgtacacaccgcccgtcacaccacgagagtttgtaacacccgaagtcggtgaggtaacctttttggagccagccgcctaaggtgggacagatgattggggtg

SEQ ID NO: 3445 - DNA, 1483 bp, Trichococcus palustris
gacgaacgctggcggcgtgcctaatacatgcaagtcgaacggttctttcttttggaagcttgcttccgatcgagagaatagtggcgaacgggtgagtaacacgtgggtaacctgcccataagagggggataacatccggaaacgggtgctaataccgcatagtttttttgatcgcatgatcgagaaaggaaagacggcctttgtgctgtcgcttatggatggacccgcggcgtattagttagttggtgaggtaatggctcaccaagacgatgatacgtagccgacctgagagggtgatcggccacattgggactgagacacggcccaaactcctacgggaggcagcagtagggaatcttccgcaatggacgaaagtctgacggagcaacgccgcgtgagtgaagaaggttttcggatcgtaaaactctgttgtcagagaagaacaagtcggagagtaactgctccggccttgacggtatctgaccagaaagccacggctaactacgtgccagcagccgcggtaatacgtaggtggcaagcgttgtccggatttattgggcgtaaagcgagcgcaggcggttccttaagtctgatgtgaaagcccacggctcaaccgtggaaggtcattggaaactggggaacttgagtgcagaagaggagagtggaattccatgtgtagcggtgaaatgcgtagatatatggaggaacaccagtggcgaaggcgactctctggtctgtaactgacgctgaggctcgaaagcgtggggagcaaacaggattagataccctggtagtccacgccgtaaacgatgagtgctaagtgttggagggtttccacccttcagtgctgcagctaacgcattaagcactccgcctggggagtacggccgcaaggctgaaactcaaaggaattgacggggacccgcacaagcggtggagcatgtggtttaattcgaagcaacgcgaagaaccttaccaggtcttgacatcctttgacaatcctagagataggactttcccttcggggacaaagtgacaggtggtgcatggttgtcgtcagctcgtgtcgtgagatgttgggttaagtcccgcaacgagcgcaacccctattgttagttgccagcattcagttgggcactctaatgagactgccggtgacaaaccggaggaaggtggggatgacgtcaaatcatcatgccccttatgacctgggctacacacgtgctacaatggatggtacaacgagcagcaagaccgcgaggtcaagcgaatctcttaaagccattctcagttcggattgtaggctgcaactcgcctacatgaagccggaatcgctagtaatcgcggatcagcacgccgcggtgaatacgttcccgggtcttgtacacaccgcccgtcacaccacgagagtttgtaacacccgaagtcggtgaggtaacctttttggagccagccgcctaaggtgggacagatgattggggtg

SEQ ID NO: 3446 - DNA, 1481 bp, Trichococcus pasteurii
gacgaacgctggcggcgtgcctaatacatgcaagtcgaacggtcttttctatggaagcttgcttccactgagaagatagtggcggacgggtgagtaacacgtgggtaacctgcccataagagggggataacatccggaaacgggtgctaataccgcatagttttcttgatcgcatgatcgagaaaggaaagacggcctttgtgctgtcgcttatggatggacccgcggcgtattagttagttggtgaggtaatggctcaccaagacgatgatacgtagccgacctgagagggtgatcggccacattgggactgagacacggcccaaactcctacgggaggcagcagtagggaatcttccgcaatggacgaaagtctgacggagcaacgccgcgtgagtgaagaaggttttcggatcgtaaaactctgttgtcagagaagaacaagttggagagtaactgctccagccttgacggtatctgaccagaaagccacggctaactacgtgccagcagccgcggtaatacgtaggtggcaagcgttgtccggatttattgggcgtaaagcgagcgcaggcggttccttaagtctgatgtgaaagcccacggctcaaccgtggaaggtcattggaaactggggaacttgagtgcagaagaggagagtggaattccatgtgtagcggtgaaatgcgtagatatatggaggaacaccagtggcgaaggcgactctctggtctgtaactgacgctgaggctcgaaagcgtggggagcaaacaggattagataccctggtagtccacgccgtaaacgatgagtgctaagtgttggagggtttccacccttcagtgctgcagctaacgcattaagcactccgcctggggagtacggccgcaaggctgaaactcaaaggaattgacggggacccgcacaagcggtggagcatgtggtttaattcgaagcaacgcgaagaaccttaccaggtcttgacatcctttgacaatcctagagataggactttcccttcggggacaaagtgacaggtggtgcatggttgtcgtcagctcgtgtcgtgagatgttgggttaagtcccgcaacgagcgcaacccctattgttagttgccagcattcagttgggcactctaatgagactgccggtgacaaaccggaggaaggtggggatgacgtcaaatcatcatgccccttatgacctgggctacacacgtgctacaatggatggtacaacgagcagcaagaccgcgaggtcaagcgaatctcttaaagccattctcagttcggattgcaggctgcaactcgcctgcatgaagccggaatcgctagtaatcgcggatcagcacgccgcggtgaatacgttcccgggtcttgtacacaccgcccgtcacaccacgagagtttgtaacacccgaagtcggtgaggtaacctttttggagccagccgcctaaggtgggacagatgattggggtg

SEQ ID NO: 3447 - DNA, 1481 bp, Trichococcus patagoniensis; identical to SEQ ID NO: 3443

SEQ ID NO: 3448 - DNA, 1410 bp, Trichodesmium erythraeum
gatgaacgctggcggtctgcttaacacatgcaagtcgaacggactcttcggagttagtggcggacgggtgagtaacgcgtgagaatctgccttcaggtctgggacaacagaaggaaacttctgctaatcccggatgagccttagggtaaaagataaattgcctggagatgagctcgcgtctgattagctagttggtgtggtaaaagcataccaaggcaacgatcagtagctggtctgagaggatgagcagccacactgggactgagacacggcccagactcctacgggaggcagcagtggggaattttccgcaatgggcgaaagcctgacggagcaagaccgcgtgggggaggaaggctctagggttgtaaaccccttttctttgggaagaagatctgacggtaccaaaggaatcagcctcggctaactccgtgccagcagccgcggtaatacggaggaggcaagcgttatccggaatgattgggcgtaaagcgtccgtagatggccatgtaagtctgctgtcaaaacccagggctcaactctggtcaggcagtggaaactacaaagctagagtttggtaggggcaaagggaattcccggtgtagcggtgaaatgcgtagatatcgggaagaacatcggtggcgaaagcgctttgctagaccaaaactgacattgagggacgaaagctaggggagcgaatgggattagataccccagtagtcctagccgtaaacgatggatactaggtgttgcctgtatcgacccaggcagtgccgtagctaacgcgttaagtatcccgcctggggagtacgcacgcaagtgtgaaactcaaaggaattgacgggggcccgcacaagcggtggagtatgtggtttaattcgatgcaacgcgaagaaccttaccaggacttgacatgtcgcgaatctaatggaaacatgagagtgccttcgggagcgcgaacacaggtggtgcatggctgtcgtcagctcgtgtcgtgagatgttgggttaagtcccgcaacgagcgcaaccctcgtctttagttgccatcattaagttgggcactctgaagagactgccggtgacaaaccggaggaaggtggggatgacgtcaagtcagcatgccccttacgtcctgggctacacacgtactacaatggttgggacagagggtagcgaacccgagaggggaagccaatccccaaaacccagtctcagttcagattgcaggctgcaactcgcctgcatgaaggaggaatcgctagtaatcgcaggtcagcatactgcggtgaatccgttcccgggccttgtacacaccgcccgtcacaccatggaagttggccacgcccgaagtcattactctaacccgaaagggagggggatgccgaaggtagggctgatgactggggtg

SEQ ID NO: 3449 - DNA, 1412 bp, Trichormus azollae
gatgaacgctggcggtatgcttaacacatgcaagtcgaacggaatctttagggatttagtggcggacgggtgagtaacgcgtgagaatctggcttcaggtcggggataactactggaaacggtggctaataccggatgtgccgagaggtgaaaggctagctgcctgaagatgagctcgcgtctgattagctagttggtgtggtaagagcgcaccaaggcgacgatcagtagctggtctgagaggatgatcagccacactgggactgagacacggcccagactcctacgggaggcagcagtggggaattttccgcaatgggcgaaagcctgacggagcaataccgcgtgagggaggaaggctcttgggttgtaaacctcttttctcaaggaataagttctgaaggtacttgaggaataagcatcggctaactccgtgccagcagccgcggtaatacggaggatgcaagcgttatccggaatgattgggcgtaaagcgtccgcaggtggcagtgtaagtctgctgttaaagagtctagcttaactagataaaagcagtggaaactacacagctagagtacgttcggggtagagggaattcctggtgtagcggtgaaatgcgtagagatcaggaagaacaccggtggcgaaggcgctctactaggccgtaactgacactgagggacgaaagctaggggagcgaatgggattagataccccagtagtcctagccgtaaacgatggatactaggcgttgcgagtatcgaccctcgcagtgccggagccaacgcgttaagtatcccgcctggggagtacgcacgcaagtgtgaaactcaaaggaattgacgggggcccgcacaagcggtggagtatgtggtttaattcgatgcaacgcgaagaaccttaccaagacttgacatgtcgcgaatttccttgaaaggggagagtgccttagggagcgcgaacacaggtggtgcatggctgtcgtcagctcgtgtcgtgagatgttgggttaagtcccgcaacgagcgcaaccctcgtttttagttgccagcattaagttgggcactctagagagactgccggtgacaaaccggaggaaggtggggatgacgtcaagtcagcatgccccttacgtcttgggctacacacgtactacaatgctccgaacagagggcagcgagctagtgatagcaagcaaatcccggaaatcggagctcagttcagatcgaaggctgcaactcgccttcgtgaaggaggaatcgctagtaattgcaggtcagcatactgcagtgaattcgttcccgggccttgtacacaccgcccgtcacaccatggaagctggcaacgcccgaagtcattaccccaacttttaggagagggggatgcctaaggcagtgctggtgactggggtg

SEQ ID NO: 3450 - DNA, 1411 bp, Trichormus variabilis
gatgaacgctggcggtatgcttaacacatgcaagtcgaacggaatctttagggatttagtggcggacgggtgagtaacgcgtgagaatctggcttcaggtctgggacaaccactggaaacggtggctaataccggatgtgccgagaggtgaaaggcttgctgcctgaagatgagcttgcgtctgattagctagttggtggggtaagagcctaccaaggcgacgatcagtagctggtctgagaggatgatcagccacactgggactgagacacggcccagactcctacgggaggcagcagtggggaattttccgcaatgggcgaaagcctgacggagcaataccgcgtgagggaggaaggctcttgggttgtaaacctcttttctcagggaagaaaaaaatgacggtacctgaggaataagcatcggctaactccgtgccagcagccgcggtaatacggaggatgcaagcgttatccggaatgattgggcgtaaagggtccgcaggtggctgtgtaagtctgctgttaaatagtcatgctcaacatgataaaggcagtggaaactacatagctagagtgcgttcggggcagagggaattcctggtgtagcggtgaaatgcgtagatatcaggaagaacaccggtggcgaaagcgctctgctaggccgcaactgacactgagggacgaaagctaggggagcgaatgggattagataccccagtagtcctagccgtaaacgatggatactaggcgtggcttgtatcgacccgagccgtgccgtagctaacgcgttaagtatcccgcctggggagtacgcacgcaagtgtgaaactcaaaggaattgacgggggcccgcacaagcggtggagtatgtggtttaattcgatgcaacgcgaagaaccttaccaagacttgacatgtcgcgaatcttcttgaaaggggagagtgccttcgggagcgcgaacacaggtggtgcatggctgtcgtcagctcgtgtcgtgagatgttgggttaagtcccgcaacgagcgcaaccctcgtttctagttgccagcattaagatgggaactctagagagactgccggtgacaaaccggaggaaggtggggatgacgtcaagtcagcatgccccttacgtcttgggctacacacgtactacaatgctacggacaaagggcagctacacagcgatgtgatgcaaatctcataaaccgtagctcagttcagatcgaaggctgcaactcgccttcgtgaaggaggaatcgctagtaattgcaggtcagcatactgcagtgaattcgttcccgggccttgtacacaccgcccgtcacaccatggaagtcggtcacgcccgaagtcattaccccaaccttttggagggggatgcctaaggtaggactggtgactggggtg

SEQ ID NO: 3451 - DNA, 1384 bp, Tropicibacter phthalicicus
aacgaacgctggcggcaggcctaacacatgcaagtcgagcgcgaccttcgggttgagcggcggacgggttagtaacgcgtgggaacgtacccagatctaaggaatagccactggaaacggtgagtaataccttatacgcccttcgggggaaagatttatcggatttggatcggcccgcgttagattaggtagttggtgcggtaacggcgcaccaagcctacgatctatagctggttttagaggatgatcagcaacactgggactgagacacggcccagactcctacgggaggcagcagtggggaatcttggacaatgggcgcaagcctgatccagccatgccgcgtgagtgatgaaggccttagggtcgtaaagctctttcgccagagatgataatgacagtatctggtaaagaaaccccggctaactccgtgccagcagccgcggtaatacggagggggttagcgttgttcggaattactgggcgtaaagcgcgcgtaggcggaccagaaagttaggggtgaaatcccggggctcaaccccggaactgcctctaaaactcctgatctagagttcgagagaggtgagtggaattccgagtgtagaggtgaaattcgtagatattcggaggaacaccagtggcgaaggcggctcactggctcgatactgacgctgaggtgcgaaagtgtggggagcaaacaggattagataccctggtagtccacaccgtaaacgatgaatgccagtcgtcgggtagtatactattcggtgacacacctaacggattaagcattccgcctggggagtacggtcgcaagattaaaactcaaaggaattgacgggggcccgcacaagcggtggagcatgtggtttaattcgaagcaacgcgcagaaccttaccaacccttgacatcctgtgctacatccagagatggatggttcccttcggggacgcagtgacaggtgctgcatggctgtcgtcagctcgtgtcgtgagatgttcggttaagtccggcaacgagcgcaacccacatccttagttgccagcagttcggctgggcactctagggaaactgcccgtgataagcgggaggaaggtgtggatgacgtcaagtcctcatggcccttacgggttgggctacacacgtgctacaatggcagtgacaatgggttaatccccaaaaactgtctcagttcggattggggtctgcaactcgaccccatgaagtcggaatcgctagtaatcgcgtaacagcatgacgcggtgaatacgttcccgggccttgtacacaccgcccgtcacaccatgggagttggttctacctgacgacgctgcgctaaccttcgggaggcaggcggccacggtaggatcagcgactggggtg

SEQ ID NO: 3452 - DNA, 1467 bp, Tumebacillus algifaecis
gacgaacgctggcggcgtgcctaatacatgcaagtcgagcggactggagggagcttgctcccaaaggttagcggcggacgggtgagtaacacgtgggcaatctgcccgacagactgggataacgcttggaaacgagtgctaataccggataagcgattccctcgcatgaggggatcgagaaagaagctttcgcttcactgtcggatgagcccgcggcgcattagctagttggtgaggtaacggctcaccaaggcgacgatgcgtagccgacctgagagggtgatcggccacactgggactgagacacggcccagactcctacgggaggcagcagtagggaatcttccacaatgggcgcaagcctgatggagcaacgccgcgtgaatgatgaaggccttcgggttgtaaaattctgtcttctgtgaagaacaagtgtgagaagagaatgctcacaccctgacggtaacagaggaggaagccccggctaactacgtgccagcagccgcggtaatacgtagggggcaagcgttgtccggaatcactgggcgtaaagcgcgcgcaggcggccatctgcgtccggggtgaaagcccaaggctcaaccttgggactgccttggatacgggatggcttgaggatcggagaggcaaggggaattccacgtgtagcggtgaaatgcgtagagatgtggaggaacacctgtggcgaaggcgccttgctggccgatttctgacgctgaggcgcgaaagcgtggggagcaaacaggattagataccctggtagtccacgccgtaaacgatgagtgctaggtgttggggggtaccaccctcagtgccgaagctaacgcattaagcactccgcctggggagtacggtcgcaagactgaaactcaaaggaattgacgggggcccgcacaagcagtggagcatgtggtttaattcgaagcaacgcgaagaaccttaccaagacttgacatcccgctgaccggtttagagatagaccttcccttcggggcagcggtgacaggtggtgcatggttgtcgtcagctcgtgtcgtgagatgttgggttaagtcccgcaacgagcgcaacccctaaattgtgttgccatcattcagttgggcactcacaattgactgccggtgacaaaccggaggaaggcggggatgacgtcaaatcatcatgccccttatgtcttgggctacacacgtgctacaatgggcggtacaaagggttgcgaggccgcgaggcggagccaatcccaaaaagccgctcacagttcggattgcaggctgcaactcgcctgcatgaagctggaattgctagtaatcgcggatcagcatgccgcggtgaattcgttcccgggccttgtacacaccgcccgtcacaccatgggagttggcaacacccgaagccggtgaggtaaccgcaaggagccagccgtctaaggtggggtcgatgactggggtg

SEQ ID NO: 3453 - DNA, 1455 bp, Tumebacillus flagellatus
gacgaacgctggcggcgtgcctaatacatgcaagtcgtgcgagaccttcgggtctagcggcggacgggtgagtaacacgtgggtaacctgcctgatcgaccgggataacgcttggaaacgagtgctaataccggataatctcttggatcgcatggtttgagagtaaaaggagcttttgcttcacgatcagatggacccgcggcgcattagctagttggtgaggtaacggctcaccaaggcgacgatgcgtagccgacctgagagggtgaccggccacactgggactgagacacggcccagactcctacgggaggcagcagtagggaatcttccgcaatgggcgcaagcctgacggagcaacgccgcgtgagtgatgaaggccttcgggttgtaaaactctgtcttctgtgaagaaccatcctgtgcagagaaagctcaggacctgacggtaacagaggaggaagccccggctaactacgtgccagcagccgcggtaatacgtagggggcaagcgttgtccggaatcactgggcgtaaagcgcgcgcaggcggtctttcacgtccggggtgaaagcccagagctcaactctgggactgccttggatacggagagacttgagggtcggagaggcaaggggaattccacgtgtagcggtgaaatgcgtagagatgtggaggaacacctgtggcgaaggcgccttgctggccgacttctgacgctgaggcgcgaaagcgtggggagcaaacaggattagataccctggtagtccacgccgtaaacgatgagtgctaggtgttagggggcccaccccttagtgccgaagctaacgcattaagcactccgcctggggagtacggtcgcaagactgaaactcaaaggaattgacgggggcccgcacaagcagtggagcatgtggtttaattcgaagcaacgcgaagaaccttaccaggacttgacatcccgctgaccggtttagagataaaccttcccttcggggcagcggtgacaggtggtgcatggttgtcgtcagctcgtgtcgtgagatgttgggttaagtcccgcaacgagcgcaacccctatgttgtgttgctaccattcagttgagcactcacaacagactgccggtgacaaaccggaggaaggcggggatgacgtcaaatcatcatgccccttatgtcctgggctacacacgtgctacaatgggcggtacaaagggatgccaagccgcgaggcggagccaatcccagaaagccgttcgtagttcggattgcaggctgcaactcgcctgcatgaagccggaattgctagtaatcgcggatcagcatgccgcggtgaattcgttcccgggccttgtacacaccgcccgtcacaccatgggagttggcaacacccgaagtcggtgaggtaactgcttgcagagccagccgcctaaggtggggtcgatgactggggtg

SEQ ID NO: 3454 - DNA, 1406 bp, Tumebacillus permanentifrigoris
  misc_feature (242)..(242): n is a, c, g, or t
  misc_feature (276)..(276): n is a, c, g, or t
  misc_feature (972)..(972): n is a, c, g, or t
tgcagtcgagcggactgatgtggagcttgctccatggatgtcagcggcggacgggtgagtaacacgtgggtaacctgcctggcagactgggataacgcttggaaacgagtgctaataccggatgatctcttggactgcatggttcgagagtaaaaggagcttttgcttcactgccagatggacccgcggcgcattagctagttggtgaggtaacggctcaccaaggcgacgatgcgtagccnacctgagagggtgaccggccacactgggactganacacggcccagactcctacgggaggcagcagtagggaatcttccgcaatgggcgcaagcctgacggagcaacgccgcgtgagtgatgaaggccttcgggttgtaaaactctgtcttctgtgaagaaccatcctgtgcagagaaagctcagacctgacggtaacagaggaggaagccccggctaactacgtgccagcagccgcggtaatacgtagggggcaagcgttgtccggattcactgggcgtaaagcgcgcgcaggcggtctctcacgtccggggtgaaagcccagagctcaactctgggattgccttggatacggggagacttgaggatcggagaggcaaggggaattccacgtgtagcggtgaaatgcgtagagatgtggaggaacacctgtggcgaaggcgccttgctggccgatttctgacgctgaggcgcgaaagcgtggggagcaaacaggattagataccctggtagtccacgccgtaaacgatgagtgctaggtgttagggggcccaccccttagtgccgaagctaacgcattaagcactccgcctggggagtacggtcgcaagactgaaactcaaaggaattgacgggggcccgcacaagcagtggagcatgtggtttaattcgaagcaacgcgaagaaccttaccaagacttgacatcccgctgaccgttctagagatagagnttcccttcggggcagcggtgacaggtggtgcatggttgtcgtcagctcgtgtcgtgagatgttgggttaagtcccgcaacgagcgcaacccctatgttgtgttgctaccatttagttgagcacttacaacagactgccggtgacaaaccggaggaaggcggggatgacgtcaaatcatcatgccccttatgtcttgggctacacacgtgctacaatggacggtacaaagggttgcgaagccgcgaggtgaagccaatcccagaaagccgttcgtagttcggattgcaggctgcaactcgcctgcatgaagccggaattgctagtaatcgcggatcagcatgccgcggtgaattcgttcccgggccttgtacacaccgcccgtcacaccatgggagttggtaacacccgaagtcggtgaggtaactgctgcagag

SEQ ID NO: 3455 - DNA, 1440 bp, Turneriella parva
aacgaacgctggcggcgcgtcttaaacatgcaagtcgaacgatctgtagcaatacagggagtggcggacgggtgaggaacacgtaggaatctacctcgaagagcgggacaactttgggaaaccggggctaataccgcatagtacagagatgttaaagggctagcaatagtcgcttcgagatgagcctgcggtctatcagcttgttggtgaggtaatggctcaccaaggctacgacggatagccggtctgagaggatgatcggccacactggcactgagacacgggccagactcctacgggaggcagcagttaagaatcttgcgcaatgggggcaaccctgacgcagcgacgccgcgtgaaggatgaaggctttcgggttgtaaacttcggtagactgggaagaagaactacgttcgttgagggcgtagagtgacggtaccagtctgaagccccggctaattacgtgccagcagccgcggtaatacgtatggggcaagcgttgttcggaattattgggcgtaaagggctcgcaggtggtttgttaagttggtggtttaatctctgggctcaacccagagtcagcctccaaaactggcgaacttgagtacgataggggatagcggaattctcggtgtagcggtggaatgcgtagatatcgagaggaacaccaatggcgaaggcagctatctggatcgtaactgacactcatgagcgaaagtgcggggagcaaacaggattagataccctggtagtccgcaccgtaaacgttgtatactagttgttggtggtttcaacgccatcagtgacgtcgctaacgcattaagtataccgcctggggagtatgctcgcaagggtgaaactcaaagaaattgacgggggcccgcacaagcggtggagcatgtggtttaattcgacgatacgcgagaaaccttacctgggtttgacatggatttgactggggtagagataccccttcccgcaagggcagattcacaggtgttgcatggtcgtcgtcagctcgtgttgtgagatgttgggttaagtcccgcaacgagcgcaacccctatcttctgttgccatcattaagttgggcactctgaagaaaccgccggtgacaaaccggaggaaggtggggatgacgtcagatcagcatggcccttatatccagggctacacacgtgctacaatggccggtacagagggacgcaatgccgcgaggtggagcaaatcccacaaagccggtctcagttcagattgcagtctgcaactcgactgcatgaagtcggaatcgctagtaatcgcaaatcagcatgttgcggtgaatacgttcccgggccttgtacacaccgcccgtcacaccacccgagttggaggtacccgaagaggctgttgccaaccgcaaggaggcaggtcgctaaggtaaattcggcgaggggggtg

SEQ ID NO: 3456 - DNA, 1361 bp, Tychonema bourrellyi
ggatttagtggcggacgggtgagtaacgcgtgagaatctaccttcaggacggagacaacagttggaaacgactgctaacccccgatgtaccgagagggaaaatatttatagcctgaagaagagctcgcgtccgattagctagttggagaggtaaaagctcaccaaggcgacgatcggtagctggtctgagaggacgatcagccacactgggactgagacacggcccagactcctacgggaggcagcagtggggaattttccgcaatgggcgaaagcctgacggagcaagaccgcgtgggggaagaaggctcttgggttgtaaactccttttctctgggaagaacaaaatgacggtaccagaggaatcagcatcggctaactccgtgccagcagccgcggtaagacggaggatgcaagcgttatccggaatgattgggcgtaaagcgtccgcaggtggcagttcaagtctgctgtcaaagaccggggctcaacctcggaaaggcagtggaaactgaacagctagagtatggtaggggcaaagggaattcctggtgtagcggtgaaatgcgtagagatcaggaagaacatcggtggcgaaggcgctttgctggaccataactgacactcagggacgaaagctaggggagcgaatgggattagataccccagtagtcctagccgtaaacgatggatactaggtgttgtctgtatcgacccggacagtgccgtagctaacgcgttaagtatcccgcctggggagtacgcacgcaagtgtgaaactcaaaggaattgacgggggcccgcacaagcggtggagtatgtggtttaattcgatgcaacgcgaagaaccttaccaggacttgacatgtcgcgaatctttttgaaagagaagagtgccttagggagcgcgaacacaggtggtgcatggctgtcgtcagctcgtgtcgtgagatgttgggttaagtcccgcaacgagcgcaaccctcgtgtttagttgccatcattaagttgggaactctaaacagactgccggtgacaaaccggaggaaggtggggatgacgtcaagtcagcatgccccttacgtcctgggctacacacgtactacaatggtagggacagagggcagccaactcgcgagagagagctaatcccgtaaaccctgcctcagttcagattgcaggctgcaactcgcctgcatgaaggcggaatcgctagtaatcgcaggtcagcatactgcggtgaatccgttcccgggccttgtacacaccgcccgtcacaccatggaagttggccacgcccgaagtcattactctaacctttcgggggggaggatgccgaaggcagggctgatgactggggt

SEQ ID NO: 3457 - DNA, 1456 bp, Umboniibacter marinipuniceus
attgaacgctggcggcaggcctaacacatgcaagtcgaacgcgaaatcacttcggtgagagtagagtggcggacgggtgagtaacgcgtgggaatctacctcgtagtgggggacaacttgtggaaacgcaagctaataccgcatacgtcctaagggagaaagcaggggatcttcggaccttgtgctatgagatgagcccgcgtcggattagctagttggtggggtaaaggcctaccaaggcgacgatccgtagctggtctgagaggatgatcagccacactggaactgagacacggtccagactcctacgggaggcagcagtggggaatattgcacaatgggcgaaagcctgatgcagccatgccgcgtgtgtgaagaaggctctagggttgtaaagcactttcagcaaggaggaaaggttgtcagttaatacctggcagctgtgacgttacttgcagaagaagcaccggctaactccgtgccagcagccgcggtaatacggagggtgcaagcgttaatcggaattactgggcgtaaagcgcgcgtaggcggtctgttaagctggatgtgaaagcccagggctcaaccttggaactgcattcagaactggcagactagagtattggagaggtgagtggaatttcccgtgtagcagtgaaatgcgtagatatgggaaggaacaccagtggcgaaggcgactcactggccaaatactgacgctgaggtgcgaaagcgtggggagcaaacgggattagataccccggtagtccacgccgtaaacgatgtctactagccgttgggatccttgagattttagtggcgcagctaacgcactaagtagaccgcctggggagtacggccgcaaggttaaaactcaaatgaattgacgggggcccgcacaagcggtggagcatgtggtttaattcgaagcaacgcgaagaaccttaccaggtcttgacatccagagaacttactagagatagtttggtgccttcgggaactctgagacaggtgctgcatggctgtcgtcagctcgtgtcgtgagatgttgggttaagtcccgcaacgagcgcaacccttgtcctatgttgccagcacataatggtgggaactcatgggagactgccggtgataaaccggaggaaggtggggacgacgtcaagtcatcatggcccttacgacctgggctacacacgtgctacaatggtgcatacaaacggttgccaagccgcgaggtggagctaatctgagaaagtgcatcgtagtccggattggagtctgcaactcgactccatgaagtcggaatcgctagtaatcgtgaatcagaatgtcacggtgaatacgttcccgggccttgtacacaccgcccgtcacaccatgggagtgggttgctccagaagtggctagtctaaccttcggggggacggtcaccacggagtgattcatgactggggtg

SEQ ID NO: 3458 - DNA, 1465 bp, Ureibacillus terrenus
  misc_feature (382)..(382): n is a, c, g, or t
tggcggcgtgcctaatacatgcaagtcgagcggacctcataggaagcttgctttttatgaggttagcggcggacgggtgagtaacacgtgggtaacctgccctatagaccgggataactcgcggaaacgcgtgctaataccggataacacagcggagcgcatgctccggtgttgaaaggtggttctgctaccgctataggatgggcccgcggcgcattagctagttggtggggtaacggcctaccaaggcgacgatgcgtagccgacctgagagggtgatcggccacactgggactgagacacggcccagactcctacgggaggcagcagtagggaatcttccacaatgggcgaaagcctgatggagcaacgccgcgtgagngaagaaggtcttcggatcgtaaagctctgttgtaagggaagaacaagtgcggtagtaactgaccgcaccctgacggtaccttacgagaaagccacggctaactacgtgccagcagccgcggtaatacgtaggtggcgagcgttgtccggaattattgggcgtaaagcgcgcgcaggcggtctcttaagtctgatgtgaaagcccccggctcaaccggggagggtcattggaaactgggagacttgagtgcaggagagggaagcggaattccatgtgtagcggtgaaatgcgtagagatatggaggaacaccagtggcgaaggcggcttcctggcctgtaactgacgctgaagcgcgaaagcgtggggaccaaacaggattagataccctggtagtccacgccgtaaacgatgagtgctaagtgttagggggcttgccccttagtgctgcagctaacgcattaagcactccgcctggggagtacggtcgcaagactgaaactcaaaggaattgacgggggcccgcacaagcggtggagcatgtggtttaattcgaagcaacgcgaagaaccttaccaggtcttgacatcccgctgaccgccatggagacatggccttcccttcggggacagcggtgacaggtggtgcatggttgtcgtcagctcgtgtcgtgagatgttgggttaagtcccgcaacgagcgcaacccttgtccttagttgccatcattcagttgggcactctaaggagactgccgtacaaatacggaggaaggtggggatgacgtcaaatcatcatgccccttatgacctgggctacacacgtgctacaatgggcggtacaaagggctgcgaacccgcgagggggagcgaatcccaaaaagccgctctcagttcggattgcaggctgcaactcgcctgcatgaagccggaatcgctagtaatcgcggatcagcatgccgcggtgaatacgttcccgggccttgtacacaccgcccgtcacaccacgagagtctgtaacacccgaagtcggtgaggtaacccttccgggagccagccgccgaaggtgggacagatgattggggtg

SEQ ID NO: 3459 - DNA, 1475 bp, Ureibacillus thermophilus
  misc_feature (119)..(119): n is a, c, g, or t
gacgaacgctggcggcgtgcctaatacatgcaagtcgagcggaccaattaagaagcttgctttttgattggttagcggcggacgggtgagtaacacgtgggtaacctgccctatagacngggataactcgcggaaacgcgagctaataccggataacacatcgaagcgcatgcttcgatgttgaaagatggttctgctatcactataggatgggcccgcggcgcattagctagttggtggggtaacggcctaccaaggcgacgatgcgtagccgacctgagagggtgatcggccacactgggactgagacacggcccagactcctacgggaggcagcagtagggaatcttccacaatgggcgaaagcctgatggagcaacgccgcgtgagcgaagaaggtcttcggatcgtaaagctctgttgtaagggaagaacaagcgcagcagtaactggctgcgccctgacggtaccttactagaaagccacggctaactacgtgccagcagccgcggtaatacgtaggtggcaagcgttgtccggaattattgggcgtaaagcgcgcgcaggcggtctcttaagtctgatgtgaaagcccccggctcaaccggggagggtcattggaaactgggagacttgagtgcaggagagggaagtggaattccatgtgtagcggtgaaatgcgtagagatatggaggaacaccagtggcgaaggcggcttcctggcctgtaactgacgctgaggcgcgaaagcgtggggagcaaacaggattagataccctggtagtccacgccgtaaacgatgagtgctaggtgttagggggtttccaccccttagtgctgcagctaacgcattaagcactccgcctggggagtacggtcgcaagactgaaactcaaaggaattgacgggggcccgcacaagcggtggagcatgtggtttaattcgaagcaacgcgaagaaccttaccaggtcttgacatcccgctgaccgctatggagacatagccttcccttcggggacagcggtgacaggtggtgcatggttgtcgtcagctcgtgtcgtgagatgttgggttaagtcccgcaacgagcgcaacccttgtccttagttgccatcattcagttgggcactctaaggagactgccgtacaaatacggaggaaggtggggatgacgtcaaatcatcatgccccttatgacctgggctacacacgtgctacaatgggcggtacaaagggctgcgaacccgcgagggggagcgaatcccaaaaagccgctctcagttcggattgcaggctgcaactcgcctgcatgaagccggaatcgctagtaatcgcagatcagcatgctgcggtgaatacgttcccgggccttgtacacaccgcccgtcacaccacgagagtctgtaacacccgaagtcggtgaggtaaccctccgggagccagccgccgaaggtgggacagatgattggggtg

SEQ ID NO: 3460 - DNA, 1475 bp, Ureibacillus thermosphaericus
gacgaacgctggcggcgtgcctaatacatgcaagtcgagcgaaccaattgaaagcctagctttcatgaggttagcggcggacgggtgagtaacacgtgggtaacctgccctatagactgggataactcgcggaaacgcgtgctaataccggataacacatcaaagtgcatgctttgatgttgaaagatggttctgctatcactataggatgggcccgcggcgcattagcttgttggtggggtaacggcctaccaaggcgacgatgcgtagccgacctgagagggtgatcggccacactgggactgagacacggcccagactcctacgggaggcagcagtagggaatcttccacaatgggcgaaagcctgatggagcaacgccgcgtgagcgaagaaggtcttcggatcgtaaagctctgttgtaagggaagaacaagtgcagtagtaactggctgcaccttgacggtaccttactagaaagccacggctaactacgtgccagcagccgcggtaatacgtaggtggcaagcgttgtccggaattattgggcgtaaagcgcgcgcaggcggtctcttaagtctgatgtgaaagcccccggcttaaccggggagggtcattggaaactgggagacttgagtgcaggagagggaagcggaattccatgtgtagcggtgaaatgcgtagagatatggaggaacaccagtggcgaaggcggcttcctggcctgtaactgacgctgaggcgcgaaagcgtggggagcaaacaggattagataccctggtagtccacgccgtaaacgatgagtgctaagtgttagggggtttccaccccttagtgctgcagctaacgcattaagcactccgcctggggagtacggtcgcaagactgaaactcaaaggaattgacgggggcccgcacaagcggtggagcatgtggtttaattcgaagcaacgcgaagaaccttaccaggtcttgacatcccgctgaccgctatggagacatagccttcccttcggggacagcggtgacaggtggtgcatggttgtcgtcagctcgtgtcgtgagatgttgggttaagtcccgcaacgagcgcaacccttgtccttagttgccatcattcagttgggcactctaaggagactgccgtacaaatacggaggaaggtggggatgacgtcaaatcatcatgccccttatgacctgggctacacacgtgctacaatggacggtacaaacggtcgcgaagtcgcgagacggagccaatccgaaaaaaccgttctcagttcggattgcaggctgcaactcgcctgcatgaagccggaatcgctagtaatcgcggatcagcatgccgcggtgaatacgttcccgggccttgtacacaccgcccgtcacaccacgagagtctgtaacacccgaagtcggtgaggtaaccctttcgggagccagccgccgaaggtgggacagatgattggggtg

SEQ ID NO: 3461 - DNA, 1454 bp, Uruburuella suis
tggcggcatgctttacacatgcaagtcggacggcagcatagaagagcttgctcttttgatggcgagtggcgaacgggtgagtaatgcatcggaacgtaccgagtagtgggggataactgtccgaaaggatggctaataccgcatattctctgaggaggaaagcaggggaccttagggccttgcgctatttgagcggccgatgtctgattagctagttggtggggtaagagcccaccaaggcgacgatcagtagcgggtctgagaggatgatccgccacactgggactgagacacggcccagactcctacgggaggcagcagtggggaattttggacaatgggcgcaagcctgatccagccatgccgcgtgtatgaagaaggccttcgggttgtaaagtacttttgtcagggaagaaaagcctggggataacaccctcaggtcatgacggtacctgaagaataagcaccggctaactacgtgccagcagccgcggtaatacgtagggtgcgagcgttaatcggaattactgggcgtaaagcgagcgcagacggttatttaagcaagatgtgaaagccccgggctcaacttgggaactgcgttttgaactgggtaactagagtgtgtcagaggggggtagaattccacgtgtagcagtgaaatgcgtagagatgtggaggaataccgatggcgaaggcagccccctgggataacactgacgttcatgctcgaaagcgtgggtagcaaacaggattagataccctggtagtccacgccctaaacgatgtcaattagctgttggggtacatgatgccttagtagcgtagctaacgcgtgaaattgaccgcctggggagtacggtcgcaagattaaaactcaaaggaattgacggggacccgcacaagcggtggatgatgtggattaattcgatgcaacgcgaagaaccttacctggtcttgacatgtacggaatctcttagagataggagagtgccttcgggagccgtaacacaggtgctgcatggctgtcgtcagctcgtgtcgtgagatgttgggttaagtcccgcaacgagcgcaacccttgccattagttgccatcattaagttgggcactctaatgggactgccggtgacaaaccggaggaaggtggggatgacgtcaagtcctcatggcccttatgaccagggcttcacacgtcatacaatggtcggtacagagggtagccaagccgcgaggtggagccaatcccagaaaaccgatcgtagtccggattgcactctgcaactcgagtgcatgaagtcggaatcgctagtaatcgcaggtcagcatactgcggtgaatacgttcccgggtcttgtacacaccgcccgtcacaccatgggagtgggggataccagaattgggtagggtaaccttcgggagcccgcttaacacggtatgcttcatgactggggtg

SEQ ID NO: 3462 - DNA, 1407 bp, Variibacter gotjawalensis
agcgaacgctggcggcaggcttaacacatgcaagtcgagcgccccgcaaggggagcggcagacgggtgagtaacacgtgggaacgtaccttttggttcggaacaacacagggaaacttgtgctaataccggataagcccttacggggaaagatttatcgccaaaagatcggcccgcgtctgattagctagttggtggggtaatggcccaccaaggcgacgatcagtagctggtctgagaggatgatcagccacactgggactgagacacggcccagactcctacgggaggcagcagtggggaatattggacaatgggggcaaccctgatccagccatgccgcgtgagtgatgaaggccttagggttgtaaagctctttcgttggggaagataatgacggtacccaaagaagaagccccggctaacttcgtgccagcagccgcggtaatacgaagggggctagcgttgctcggaatcactgggcgtaaagcgcacgtaggcggacttttaagtcaggggtgaaatcctggagctcaactccagaactgcctttgatactggaagtcttgagtccggaagaggtaagtggaactgcgagtgtagaggtgaaattcgtagatattcgcaagaacaccagtggcgaaggcggcttactggtccggtactgacgctgaggtgcgaaagcgtggggagcaaacaggattagataccctggtagtccacgccgtaaacgatgaatgctagccgttggcgggtttacccgtcagtggcgcagctaacgctttaagcattccgcctggggagtacggtcgcaagattaaaactcaaaggaattgacgggggcccgcacaagcggtggagcatgtggttcaattcgaagcaacgcgcagaaccttaccggcccttgacatgtcccgtatggatttcagagatgagatccttcagttcggctggcgggaacacaggtgctgcatggctgtcgtcagctcgtgtcgtgagatgttgggttaagtcccgcaacgagcgcaaccctcgcccctagttgccatcattcagttgggcactctagggggactgccggtgataagccgagaggaaggtggggatgacgtcaagtcctcatggcccttacgggccgggctacacacgtgctacaatggcggtgacaatgggaagcaacacagcaatgtgtagcgaatctcaaaaagccgtctcagttcggattggggtctgcaactcgaccccatgaagttggaatcgctagtaatcgtggatcagcacgccacggtgaatacgttcccgggccttgtacacaccgcccgtcacaccatgggagttgggtttacccgaaggcagtgcgctaaccgcaagggggcagctgaccacggtaggctcagcgactggggtg

SEQ ID NO: 3463 - DNA, 1455 bp, Variovorax boronicumulans
tgaacgctggcggcatgccttacacatgcaagtcgaacggcagcgcgggagcaatcctggcggcgagtggcgaacgggtgagtaatacatcggaacgtgcccaatcgtgggggataacgcagcgaaagctgtgctaataccgcatacgatctacggatgaaagcaggggatcgcaagaccttgcgcgaatggagcggccgatggcagattaggtagttggtgaggtaaaggctcaccaagccttcgatctgtagctggtctgagaggacgaccagccacactgggactgagacacggtccagactcctacgggaggcagcagtggggaattttggacaatgggcgaaagcctgatccagccatgccgcgtgcaggatgaaggccttcgggttgtaaactgcttttgtacggaacgaaacggtcttttctaatacagaaggctaatgacggtaccgtaagaataagcaccggctaactacgtgccagcagccgcggtaatacgtagggtgcaagcgttaatcggaattactgggcgtaaagcgtgcgcaggcggttatgtaagacagttgtgaaatccccgggctcaacctgggaactgcatctgtgactgcatagctagagtacggtagagggggatggaattccgcgtgtagcagtgaaatgcgtagatatgcggaggaacaccgatggcgaaggcaatcccctggacctgtactgacgctcatgcacgaaagcgtggggagcaaacaggattagataccctggtagtccacgccctaaacgatgtcaactggttgttgggtcttcactgactcagtaacgaagctaacgcgtgaagttgaccgcctggggagtacggccgcaaggttgaaactcaaaggaattgacggggacccgcacaagcggtggatgatgtggtttaattcgatgcaacgcgaaaaaccttacccacctttgacatgtacggaattcgccagagatggcttagtgctcgaaagagaaccgtaacacaggtgctgcatggctgtcgtcagctcgtgtcgtgagatgttgggttaagtcccgcaacgagcgcaacccttgtcattagttgctacattcagttgggcactctaatgagactgccggtgacaaaccggaggaaggtggggatgacgtcaagtcctcatggcccttataggtggggctacacacgtcatacaatggctggtacaaagggttgccaacccgcgagggggagctaatcccataaaaccagtcgtagtccggatcgcagtctgcaactcgactgcgtgaagtcggaatcgctagtaatcgtggatcagaatgtcacggtgaatacgttcccgggtcttgtacacaccgcccgtcacaccatgggagcgggttctgccagaagtagttagcttaaccgcaaggagggcgattaccacggcagggttcgtgactggggtg

SEQ ID NO: 3464 - DNA, 1395 bp, Variovorax guangxiensis
gcagtcgacggcagcgcgggagcaatcctggcggcgagtggcgaacgggtgagtaatacatcggaacgtgcccaatcgtgggggataacgcagcgaaagctgtgctaataccgcatacgatctacggatgaaagcaggggatcgcaagaccttgcgcgaatggagcggccgatggcagattaggtagttggtgaggtaaaggctcaccaagccttcgatctgtagctggtctgagaggacgaccagccacactgggactgagacacggcccagactcctacgggaggcagcagtggggaattttggacaatgggcgcaagcctgatccagccatgccgcgtgcaggatgaaggccttcgggttgtaaactgcttttgtacggaacgaaacggctctttctaataaagagggctaatgacggtaccgtaagaataagcaccggctaactacgtgccagcagccgcggtaatacgtagggtgcaagcgttaatcggaattactgggcgtaaagcgtgcgcaggcggtgatgtaagacagttgtgaaatccccgggctcaacctgggaactgcatctgtgactgcattgctggagtacggcagagggggatggaattccgcgtgtagcagtgaaatgcgtagatatgcggaggaacaccgatggcgaaggcaatcccctgggcctgtactgacgctcatgcacgaaagcgtggggagcaaacaggattagataccctggtagtccacgccctaaacgatgtcaactggttgttgggtcttcactgactcagtaacgaagctaacgcgtgaagttgaccgcctggggagtacggccgcaaggttgaaactcaaaggaattgacggggacccgcacaagcggtggatgatgtggtttaattcgatgcaacgcgaaaaaccttacccacctttgacatgtacggaatttgccagagatggcttagtgctcgaaagagagccgtaacacaggtgctgcatggctgtcgtcagctcgtgtcgtgagatgttgggttaagtcccgcaacgagcgcaacccttgtcattagttgctacattcagttgggcactctaatgagactgccggtgacaaaccggaggaaggtggggatgacgtcaagtcctcatggcccttataggtggggctacacacgtcatacaatggctggtacaaagggttgccaacccgcgagggggagctaatcccataaaaccagtcgtagtccggatcgcagtctgcaactcgactgcgtgaagtcggaatcgctagtaatcgtggatcagaatgtcacggtgaatacgttcccgggtcttgtacacaccgcccgtcacaccatgggagcgggttctgccagaagtagttagcttaaccgcaaggagggc

SEQ ID NO: 3465 - DNA, 1457 bp, Variovorax paradoxus
attgaacgctggcggcatgccttacacatgcaagtcgaacggcagcgcgggagcaatcctggcggcgagtggcgaacgggtgagtaatacatcggaacgtgcccaatcgtgggggataacgcagcgaaagctgtgctaataccgcatacgatctacggatgaaagcaggggatcgcaagaccttgcgcgaatggagcggccgatggcagattaggtagttggtgaggtaaaggctcaccaagccttcgatctgtagctggtctgagaggacgaccagccacactgggactgagacacggcccagactcctacgggaggcagcagtggggaattttggacaatgggcgaaagcctgatccagccatgccgcgtgcaggatgaaggccttcgggttgtaaactgcttttgtacggaacgaaacggccttttctaataaagagggctaatgacggtaccgtaagaataagcaccggctaactacgtgccagcagccgcggtaatacgtagggtgcaagcgttaatcggaattactgggcgtaaagcgtgcgcaggcggtaatgtaagacagttgtgaaatccccgggctcaacctgggaactgcatctgtgactgcattgctggagtacggcagagggggatggaattccgcgtgtagcagtgaaatgcgtagatatgcggaggaacaccgatggcgaaggcaatcccctgggcctgtactgacgctcatgcacgaaagcgtggggagcaaacaggattagataccctggtagtccacgccctaaacgatgtcaactggttgttgggtcttcactgactcagtaacgaagctaacgcgtgaagttgaccgcctggggagtacggccgcaaggttgaaactcaaaggaattgacggggacccgcacaagcggtggatgatgtggtttaattcgatgcaacgcgaaaaaccttacccacctttgacatgtacggaattcgccagagatggcttagtgctcgaaagagaaccgtaacacaggtgctgcatggctgtcgtcagctcgtgtcgtgagatgttgggttaagtcccgcaacgagcgcaacccttgtcattagttgctacatttagttgggcactctaatgagactgccggtgacaaaccggaggaaggtggggatgacgtcaagtcctcatggcccttataggtggggctacacacgtcatacaatggctggtacaaagggttgccaacccgcgagggggagctaatcccataaaaccagtcgtagtccggatcgcagtctgcaactcgactgcgtgaagtcggaatcgctagtaatcgtggatcagaatgtcacggtgaatacgttcccgggtcttgtacacaccgcccgtcacaccatgggagcgggttctgccagaagtagttagcttaaccgcaaggagggcgattaccacggcagggttcgtgactggggtg

SEQ ID NO: 3466 - DNA, 1360 bp, Varunaivibrio sulfuroxidans
tgcagtcgaacgataacctgccttcgggcaggggacagtggcgcacgggtgagtaacgcgtgggaacctgccctagagtgaggaataaccattggaaacgatggctaataccgcataatccctgagggggaaaggcttcggccgctcttggatggtcccgcgtctgattagctagttggtagggtaatggcctaccaaggcgacgatcagtagctggtctgagaggatgatcagccacactgggactgagacacggcccagactcctacgggaggcagcagtggggaatattggacaatgggcgcaagcctgatccagcaatgccgcgtgagtgaagaaggccttagggttgtaaaactctttcgcccgcgaagatgatgactgtagcgggtaaagaagctccggctaactccgtgccagcagccgcggtaatacggagggagctagcgttgttcggaattactgggcgtaaagagcacgtaggctgttgacctagtcagaggtgaaagcccagggcttaaccctggaattgcctttgatactggttggctagagatcgagagagggtggcggaattccaagtgtagaggtgaaattcgtagatatttggaagaacaccagtggcgaaggcggccacctggctcgatactgacgctgaggtgcgaaagcgtggggagcaaacaggattagataccctggtagtccacgccgtaaacgatgagagctagttgttggggtgtttacacttcagtgacgcagctaacgcgttaagctctccgcctggggagtacggtcgcaagattaaaactcaaaggaattgacgggggcccgcacaagcggtggagcatgtggtttaattcgaagcaacgcgaagaaccttaccagcccttgacataccgatcgcggttagtggagacactttccttcagttcggctggatcggatacaggtgctgcatggctgtcgtcagctcgtgtcgtgagatgttgggttaagtcccgcaacgagcgcaaccctcattttcagttgccatcattcagttgggcactctggagaaactgccggtgacaagccggaggaaggtggggatgacgtcaagtcctcatggcccttacgggctgggctacacacgtgctacaatggcggtgacagagggcggcgatcccgcgagggggagctaatctctaaaagccgtctcagttcggattgttctctgcaactcgagagcatgaagttggaatcgctagtaatcgcggatcagcatgccgcggtgaatacgttcccgggccttgtacacaccgcccgtcacaccatgggagttggttttacccgaaggcgatgcgccaaccgcaagggggca

SEQ ID NO: 3467 - DNA, 1474 bp, Veillonella criceti
  misc_feature (629)..(629): n is a, c, g, or t
gcggcgtgcttaacacatgcaagtcgaacggagagcgatggaagcttgcttctatcaatcttagtggcgaacgggtgagtaacgcgtaaccaacctgcccttcagagggggataacaacgggaaaccgttgctaataccgcgtacgaatggacttcggcatcggagttcattgaaaggtggcctctatttataagctatcgctgaaggagggggttgcgtctgattagctagttggaggggtaatggcccaccaaggcaatgatcagtagccggtctgagaggatgaacggccacattgggactgagacacggcccaaactcctacgggaggcagcagtggggaatcttccgcaatggacgaaagtctgacggagcaacgccgcgtgagtgatgacggccttcgggttgtaaagctctgttaatcgggacgaatggtctttgtgcgaatagtgcagagatttgacggtaccggaatagaaagccacggctaactacgtgccagcagccgcggtaatacgtaggtggcaagcgttgtccggaattattgggcgtaaagcgcgcgcaggcggtttcgtaagtctgtcttaaaagtgcgaggctcaacctcgtgaggggatggaaactatgnaactagagtatcggagaggaaagcggaattcctagtgtagcggtgaaatgcgtagatattaggaagaacaccagtggcgaaggcggctttctggacgacaactgacgctgaggcgcgaaagccaggggagcgaacgggattagataccccggtagtcctggccgtaaacgatgggtactaggtgtaggaggtatcgaccccttctgtgccggagttaacgcaataagtaccccgcctggggagtacggtcgcaaggctgaaactcaaaggaattgacgggggcccgcacaagcggtggagtatgtggtttaattcgacgcaacgcgaagaaccttaccaggtcttgacattgatggacgaaacaagagattgtttttctccttcgggagccagaaaacaggtggtgcacggctgtcgtcagctcgtgtcgtgagatgttgggttaagtcccgcaacgagcgcaacccctatcttatgttgccagcacttcgggtgggaactcatgagagactgccgcagacaatgcggaggaaggcggggatgacgtcaagtcatcatgccccttatgacctgggctacacacgtactacaatgggctttaatagagggacgcgaagccgcgaggtggagcaaaccccagaaacaagctctcagttcggatcgtaggctgcaactcgcctacgtgaagtcggaatcgctagtaatcgcaggtcagcatactgcggtgaatacgttcccgggccttgtacacaccgcccgtcacaccacgaaagtcggaagtacccaaagccggtggggtaaccttcgggagccagccgtctaaggtaaagtcgatgattggggtg

SEQ ID NO: 3468 - DNA, 1409 bp, Veillonella montpellierensis
gagcacgggagcttgctcctatgaatcttagtggcgaacgggtgagtaacgcgtaatcaacctgccctacaatgggggacaacagttggaaacgactgctaataccgcatacgacctacggttggcatcaatcgtaggtgaaaggtggcctctacatgtaagctatcgttgtaggaggggattgcgtctgattagctagttggaggggtaacggcccaccaaggcgatgatcagtagccggtctgagaggatgaacggccacattgggactgagacacggcccaaactcctacgggaggcagcagtggggaatcttccgcaatggacgaaagtctgacggagcaacgccgcgtgagtgatgacggtcttcggattgtaaagctctgttaatcgggacgaatggtttgtgtgcaaatagtgcatagacatgacggtaccggaatagaaagccacggctaactacgtgccagcagccgcggtaatacgtaggtggcaagcgttgtccggaattattgggcgtaaagcgcgcgcaggcggactagccagtcagtcttaaaagttcggggcttaaccccgtgatgggattgaaactactagtctagagtatcggagaggaaagtggaattcctagtgtagcggtgaaatgcgtagatattaggaagaacaccagtggcgaaggcgactttctggacgaacactgacgctgaggcgcgaaagccaggggagcgaacgggattagataccccggtagtcctggccgtaaacgatgggtactaagtgtgggaggtatcgaccccttccgtgctgcagttaacgcaataagtaccccgcctggggagtacggtcgcaagactgaaactcaaaggaattgacgggggcccgcacaagcggtggagtatgtggtttaattcgacgcaacgcgaagaaccttaccaggtcttgacattgatggacagaactagagatagtttttcttcttcggaagccagaaaacaggtggtgcacggttgtcgtcagctcgtgtcgtgagatgttgggttaagtcccgcaacgagcgcaacccctatcttatgttgccagcacgtaatggtgggaactcatgagagactgccgcagacaatgcggaggaaggcggggatgacgtcaaatcatcatgccccttatgacctgggctacacacgtactacaatgggagttaataaagagaagcgaaaccgcgaggtggagcgaacctcacaaacactctctcagttcggattgcaggctgcaactcgcctgcatgaagtcggaatcgctagtaatcgcaggtcagcatactgcggtgaatacgttcccgggccttgtacacaccgcccgtcacaccacgaaagtcggaagtacccaaagccggtggggtaaccttcgggagc

SEQ ID NO: 3469 - DNA, 1308 bp, Veillonella rodentium
cgcgtaatcaacctgcccttcagagggggaaacagttggaaacgactgctaataccgcatacgatctgacctcggcatcgaggatggatgaaaggtggcctctacatgtaagctatcactgaaggaggggattgcgtctgattagctagttggaggggtaacggcccaccaaggcgatgatcagtagccggtctgagaggatgaacggccacattgggactgagacacggcccagactcctacgggaggcagcagtggggaatcttccgcaatggacgaaagtctgacggagcaacgccgcgtgagtgatgacggccttcgggttgtaaagctctgttaatcgggacgaaaggccttcttgcgaatagttggaaggattgacggtaccggaatagaaagccacggctaactacgtgccagcagccgcggtaatacgtaggtggcaagcgttgtccggaattattgggcgtaaagcgcgcgcaggcggatcagtcagtctgtcttaaaagttcggggcttaaccccgtgaggggatggaaactgctgatctagagtatcggagaggaaagtggaattcctagtgtagcggtgaaatgcgtagatattaggaagaacaccagtggcgaaggcgactttctggacgaacactgacgctgaggcgcgaaagccaggggagcgaacgggattagataccccggtagtcctggccgtaaacgatgggtactaggtgtaggaggtatcgaccccttctgtgccggagttaacgcaataagtaccccgcctggggagtacgaccgcaaggttgaaactcaaaggaattgacgggggcccgcacaagcggtggagtatgtggtttaattcgacgcaacgcgaagaaccttaccaggtcttgacattgatggacagaaccagagatggttcctcttcttcggaagccagaaaacaggtggtgcacggttgtcgtcagctcgtgtcgtgagatgttgggttaagtcccgcaacgagcgcaacccttatcttatgttgccagcacgtaatggtgggaactcatgagagactgccgcagacaatgcggaggaaggcggggatgacgtcaaatcatcatgccccttatgacctgggctacacacgtactacaatgggagtcaatagacggaagcgaagccgcgaggtggagcgaacccgagaaacactctctcagttcggatcgtaggctgcaactcgcctacgtgaagtcggaatcgctagtaatcgcaggtcagcatactgcggtgaatacgttcccgggccttgtcacaccgcccgtca

SEQ ID NO: 3470 - DNA, 1343 bp, Veillonella seminalis
tcttagtggcgaacgggtgagtaacgcgtaaccaacctgcccttcagagggggataacaacgggaaaccgttgctaataccgcgtacgaatgaacttcggcatcggagctcattgaaaggtggcctctatttataagctatcgctgaaggagggggttgcgtctgattagctagttggaggggtaacggcccaccaaggcaatgatcagtagccggtctgagaggatgaacggccacattgggactgagacacggcccaaactcctacgggaggcagcagtggggaatcttccgcaatggacgaaagtctgacggagcaacgccgcgtgagtgatgacggccttcgggttgtaaagctctgttaatcgggacgaatggtctttgtgtgaataatgcaaagatttgacggtaccggaatagaaagccacggctaactacgtgccagcagccgcggtaatacgtaggtggcaagcgttgtccggaattattgggcgtaaagcgcgcgcaggcggtttcataagtctgtcttaaaagtgcggggcttaaccccgtgaggggatggaaactatggaactggagtatcggagaggaaagcggaattcctagtgtagcggtgaaatgcgtagatattaggaagaacaccagtggcgaaggcggctttctggacgacaactgacgctgaggcgcgaaagccaggggagcgaacgggattagataccccggtagtcctggccgtaaacgatgggtactaggtgtaggaggtatcgaccccttctgtgccggagttaacgcaataagtaccccgcctggggagtacggtcgcaaggctgaaactcaaaggaattgacgggggcccgcacaagcggtggagtatgtggtttaattcgacgcaacgcgaagaaccttaccaggtcttgacattgatggacgaaacaagagattgtttttctccttcgggagccagaaaacaggtggtgcacggctgtcgtcagctcgtgtcgtgagatgttgggttaagtcccgcaacgagcgcaacccctatcttatgttgccagcacttcgggtgggaactcatgagagactgccgcagacaatgcggaggaaggcggggatgacgtcaagtcatcatgccccttatgacctgggctacacacgtactacaatgggctttaatagagggaagcgaaaccgcgaggtggagcaaaccccagaaacaagctctcagttcggatcgtaggctgcaactcgcctacgtgaagtcggaatcgctagtaatcgcaggtcagcatactgcggtgaatacgttcccgggccttgtacacaccgcccgtcacaccacgaaa

SEQ ID NO: 3471 - DNA, 1484 bp, Veillonella tobetsuensis
acgaacgctggcggcgtgcttaacacatgcaagtcgaacgaagaggcttggaagcttgcttctaagaatcttagtggcgaacgggtgagtaacgcgtaatcaacctgcccttcagagggggacaacagttggaaacgactgctaataccgcatacgatccaatctcggcatcgaggatggatgaaaggtggcctctatttataagctatcactgaaggaggggattgcgtctgattagctagttggaggggtaacggcccaccaaggcgatgatcagtagccggtctgagaggatgaacggccacattgggactgagacacggcccagactcctacgggaggcagcagtggggaatcttccgcaatggacgaaagtctgacggagcaacgccgcgtgagtgatgacggccttcgggttgtaaagctctgttaatcgggacgaaaggccttcttgcgaatagttagaaggattgacggtaccggaatagaaagccacggctaactacgtgccagcagccgcggtaatacgtaggtggcaagcgttgtccggaattattgggcgtaaagcgcgcgcaggcggatcagtcagtctgtcttaaaagttcggggcttaaccccgtgatgggatggaaactgctgatctagagtatcggagaggaaagtggaattcctagtgtagcggtgaaatgcgtagatattaggaagaacaccagtggcgaaggcgactttctggacgaaaactgacgctgaggcgcgaaagccaggggagcgaacgggattagataccccggtagtcctggccgtaaacgatgggtactaggtgtaggaggtatcgaccccttctgtgccggagttaacgcaataagtaccccgcctggggagtacgaccgcaaggttgaaactcaaaggaattgacgggggcccgcacaagcggtggagtatgtggtttaattcgacgcaacgcgaagaaccttaccaggtcttgacattgatggacagaactagagatagttcctcttcttcggaagccagaaaacaggtggtgcacggttgtcgtcagctcgtgtcgtgagatgttgggttaagtcccgcaacgagcgcaacccctatcttatgttgccagcacttcgggtgggaactcatgagagactgccgcagacaatgcggaggaaggcggggatgacgtcaaatcatcatgccccttatgacctgggctacacacgtactacaatgggagttaatagacggaagcgagatcgcgagatggagcaaacccgagaaacactctctcagttcggatcgtaggctgcaactcgcctacgtgaagtcggaatcgctagtaatcgcaggtcagcatactgcggtgaatacgttcccgggccttgtacacaccgcccgtcacaccacgaaagtcggaagtgcccaaagccggtggggtaaccttcgggagccagccgtctaaggtaaagtcgatgattggggtg

SEQ ID NO: 3472 - DNA, 1456 bp, Verminephrobacter eiseniae
attgaacgctggcggcatgccttacacatgcaagtcgaacggtagcaggccttagggcgctgacagagtggcgaacgggtgagtaagacatcggaacgtgcccgatcgagggggataacggagcgaaagctctgctaataccgcataagatccgaggatgaaagcaggggaccgaaaggccttgcgcggacggagcggccgatggcagattaggtagttggtgggataaaagcctaccaagccgacgatctgtagctggtctgagaggacgaccagccacactgggactgagacacggcccagactcctacgggaggcagcagtggggaattttggacaatgggcgcaagcctgatccagccatgccgcgtgcaggatgaaggccctcgggttgtaaactgcttttgtacggaacgaaaaggccctggtgaacaaccggggttgctgacggtaccgtaagaataagcaccggctaactacgtgccagcagccgcggtaatacgtagggtgcgagcgttaatcggaattactgggcgtaaagcgtgcgcaggcggacatgcaagacagatgtgaaatccccgggctcaacctgggaactgcatatgtgactgcatgactggagtacggcagagggggatggaattccgcgtgtagcagtgaaatgcgtagatatgcggaggaacaccgatggcgaaggcaatcccctgggccagtactgacgctcatgcacgaaagcgtggggagcaaacaggattagataccctggtagtccacgccctaaacgatgtcaactggttgttgggtcttgactgactcagtaacgaagccaacgcgtgaagttgaccgcctggggagtacggccgcaaggttgaaactcaaaggaattgacggggacccgcacaagcggtggatgatgtggtttaattcgacgcaacgcgaaaaaccttacccacctttgacatgtacggaaagctgcagagatgcagaagtgctcgaaagagaaccgtaacacaggtgctgcatggctgtcgtcagctcgtgtcgtgagatgttgggttaagtcccgcaacgagcgcaacccttgtcatcagttgccgcattgagttgggcactctgatgagactgccggtgacaaaccggaggaaggtggggatgacgtcaagtcctcatggcccttataggtggggctacacacgtcatacaatggccggtacagagggcagccaacccgcgagggggagccaatcccaaaaagccggtcgtagtccggatcgcagtctgcaactcgactgcgtgaagtcggaatcgctagtaatcgcggatcagaacgccgcggtgaatacgttcccgggtcttgtacacaccgcccgtcacaccatgggagcgggttctgccagaagtagttagcctaaccgcaaggagggcgactaccacggcagggttcgtgactggggtg

SEQ ID NO: 3473 - DNA, 1461 bp, Verrucomicrobium spinosum
aacgaacgctggcggcgtggataagacatgcaagtcgaacgggataatcttgtagcaataccgggttgttcagtggcgaacgggtgcgtaacacgtggattacataccggaaagcgaggaatagcccagggaaacttggattaatacctcatgtggtcgcaagactaaaggcggggcaacctgtcgctttctgattggtccgcggcctatcagctagttggcggggtaacggcccaccaaggcgacgacgggtagctggtctgagaggatgaccagccacactggaactgagacacggtccagacacctacgggtggcagcagtcgagaatcattcacaatgggggcaaccctgatggtgcgacgccgcgtggaggataaggtcttcggattgtaaactcctgtcatgcgagagcaagatttgagcgggtaactccgctggatttgatagtatcgcaagaggaagagacggctaactctgtgccagcagccgcggtaatacagaggtctcaagcgttgttcggaatcactgggcgtaaagggtgcgtaggtggcgtggaaagtcagatgtgaaatccgggggctcaacctccgaatagcatccgatactcccatgctagagaactggagggggatctggaattctcggtgtagcagtgaaatgcgtagatatcgagaggaacactagtggcgaaggcgagatcctggacagtatctgacactgatgcacgaaggtcaggggagcaaacgggattagataccccggtagtcctgacagtaaacggtgcacgtttggtgtgggaggattcgaccccttctgtgccggagctaacgcgttaaacgtgccgcctgggaagtacggtcgcaagattaaaactcaaagaaattgacggggacccgcacaagcggtggagtatgtggcttaattcgatgcaacgcgaagaaccttacctgggcttgacatgcactgtgtcgtcggtgaaagccggctagcgtagcaatacgcgctttgcacaggtgctgcatggctgtcgtcagctcgtgtcgtgagatgttgggttaagtcccgcaacgagcgcaacccctgtgatttgttgccaccggagcaatccgagcactcgaatcagactgcccagatcaactgggaggaaggtggggatgacgtcaagtcagtatggcccttacgcccagggctgcacacgtactacaatgcccagcacaatgtgaaccgaaaccgcgaggtggaggaaatcctcaaaactgggctcagttcagattgcaggctgcaactcgcctgcatgaagttggaatcgctagtaatggtacatcagctacggtaccgtgaatacgttcccgggtcttgtacacaccgcccgtcacatcatggaagctggtttcgcccgaagtgcccgcgccgaccgcaaggaggcaaggccctaaggcaagactggtgactgggatg

SEQ ID NO: 3474 - DNA, 1453 bp, Verticiella sediminum
attgaacgctagcggaatgccttacacatgcaagtcgaacggcagcacggacttcggtctggtggcgagtggcgaacgggtgagtaatgcatcggaacgtgcccagtagcgggggataactacgcgaaagcgtagctaataccgcatacgccctacgggggaaagggggggatcgcaagacctctcactattggagcggccgatgtcggattagctagttggtagggtaaaggcctaccaaggcgacgatccgtagctggtttgagaggacgaccagccacactgggactgagacacggcccagactcctacgggaggcagcagtggggaattttggacaatgggggaaaccctgatccagccattccgcgtgtgcgatgaaggccttcgggttgtaaagcacttttggcaggaaagaaatcggtcggattaataccctgaccggatgacggtacctgcagaataagcaccggctaactacgtgccagcagccgcggtaatacgtagggtgcaagcgttaatcggaattactgggcgtaaagcgtgcgcaggcggttcggaaagaaagatgtgaaatcccagagctcaactttggaactgcatttttaactaccgggctagagtgtgtcagagggaggtggaattccgcgtgtagcagtgaaatgcgtagatatgcggaggaacaccgatggcgaaggcagcctcctgggataacactgacgctcaggcacgaaagcgtggggagcaaacaggattagataccctggtagtccacgccctaaacgatgtcaactagctgttgggttcttcgggacttagtagcgcagctaacgcgtgaagttgaccgcctggggagtacggtcgcaagattaaaactcaaaggaattgacggggacccgcacaagcggtggatgatgtggattaattcgatgcaacgcgaaaaaccttacctacgcttgacatgtctggaatcctagagagatctgggagtgctcgaaagagaaccggaacacaggtgctgcatggctgtcgtcagctcgtgtcgtgagatgttgggttaagtcccgcaacgagcgcaacccttgtcattagttgctacgaaagggcactctaatgagactgccggtgacaaaccggaggaaggtggggatgacgtcaagtcctcatggcccttatgcgtagggcttcacacgtcatacaatggtcgggacagggggtcgccaacccgcgagggggagccaatcccagaaacccgatcgtagtccggattgcagtctgcaactcgactgcatgaagtcggaatcgctagtaatcgcggatcagcatgtcgcggtgaatacgttcccgggtcttgtacacaccgcccgtcacaccatgggagtgggtttcaccagaagtaggtagcctaaccgcaaggagggcgcttaccacggtgagattcatgactggggtg

SEQ ID NO: 3475 - DNA, 1469 bp, Vesicomyosocius okutanii
attgaacgctggcggtatgcttaacacatgcaagtcgaacggaaacgatactagcttgctagtaggtgtcgagtggcggacgggtgagtaacgcgtaggaatctgcttgatagtgggggatagcccggagaaatccggattaataccgcataatcttgataaagtaaagaaggcctctggttatatatgctttcgctatcaaatgagcctgcgtaagattagctagttggtgaggtaaaagctcaccaaggtgacgatctttagctggtctgagaggatgatcagccacactggaactgagacacggtccagactcctacgggaggcagcagtggggaatattggacaatgggcgcaagcctgatccagcaataccgcgtgtgtgaagaaggcctgagggttgtaaagcactttcaattaggaagaaaaaataatggttaatatctattatttttgacgttacttttagaagaagcaccggctaactccgtgccagcagccgcggtaatacggagggtgcaagcgttaatcggaattactgggcgtaaagcgtgcgtaggtggtttattaagtcagatgtgaaagccctgggcttaacctaggaactgcatttgaaactggaaaactagagtataggagaggaaagtggaatttctggtgtagcggtgaaatgcgtagatatcagaaggaacatcaatggcgaaggcagctttctggactaatactgacactgaggtacgaaagcgtgggtagcaaacaggattagataccctggtagtccatgccgtaaacgatgataactagccgttggggggggtaccctttagtggcgaagctaacgcgttaagttatccgcctggggagtacggccgcaaggttaaaactcaaaggaattgacggggacccgcacaagcggtggagcatgtggtttaattcgatgcaacgcgaagaaccttacctggtcttgacatatcgcaaactttctagagatagattggtgccttcgggaatgcgaatacaggtgctgcatggctgtcgtcagctcgtgtcgtgagatgttgggttaagtcccgtaacgagcgcaacccttatccttatttgccagtacataatggtgggaactataaggagactgccggtgataaaccggaggaaggcggggacgacgtcaagtcatcatggcccttacgaccagggctacacacgtgctacaatgggaaggacaaagggtcgctaagccgtgaggtggtgctaatctcacaaatcttttcgtagtccggatcggagtctgcaactcgactccgtgaagtcggaatcgctagtaatcgtagatcagaatgctacggtgaatacgttcccgggtcttgtacacaccgcccgtcataccatgggagtgggttgcaccagaagtagctagtttaactattttatagaggacggttaccacggtgtgattcatgactggggta

SEQ ID NO: 3476 - DNA, 1462 bp, Vespertiliibacter pulmonis
attgaacgctggcggcaggcttaacacatgcaagtcgaacggtaacgggtaagtacttgtacttatgctgacgagtggcggacgggtgagtaatgcttgggaatctggcttatggagggggataactacgggaaactgtagctaataccgcgtataatcgagagatgaaagggtgggaccttcgggccacctgccatgagatgagcccaagtgggattaggtagtaggtgaggtaagggctcacctagccgacgatctctagctggtctgagaggatgaccagccacactggaactgagacacggtccagactcctacgggaggcagcagtggggaatattgcacaatggggggaaccctgatgcagccatgccgcgtgaatgaagaaggccttcgggttgtaaagttctttcggtgatgaggaaagcttgggtgttaatagcacttgggtatgacgttagttacagaagaagcaccggctaactccgtgccagcagccgcggtaatacggagggtgcgagcgttaatcggaatgactgggcgtaaagggcacgcaggcggtgacttaagtgagatgtgaaagccctgggcttaacctaggaatagcatttcatactgggtcgctagagtattttagggaggggtagaattccacgtgtagcggtgaaatgcgtagagatgtggaggaataccgaaggcgaaggcagccccttgggaatatactgacgctcatgtgcgaaagcgtggggagcaaacaggattagataccctggtagtccacgctgtaaacgatgtcgatttggggattgggctttgagtttggtccccgaagctaacgcgataaatcgaccgcctggggagtacggccgcaaggctaaaactcaaatgaattgacgggggcccgcacaagcggtggagcatgtggtttaattcgatgcaacgcgaagaaccttacctactcttgacatccagagaatcctgtagagatacgggagtgccttcgggagctctgagacaggtgctgcatggctgtcgtcagctcgtgttgtgaaatgttgggttaagtcccgcaacgagcgcaacccttatcctttgttgccagcgggttatgccgggaactcaaaggagactgccagtgataaactggaggaaggtggggatgacgtcaagtcatcatggcccttacgagtagggctacacacgtgctacaatggcgtatacagagggaagcaagatggcgacatggagcgaatctcacaaagtacgtctaagttcggattggagtctgcaactcgactccatgaagtcggaatcgctagtaatcgcaaatcagaatgttgcggtgaatacgttcccgggccttgtacacaccgcccgtcacaccatgggagtgggttgtaccagaagtagatagcttaaccttcgggagggcgtttaccacggtatgattcatgactggggt

SEQ ID NO: 3477 - DNA, 1350 bp, Vibrio aerogenes
aacacatgcaagtcgggcggaaacgaaagaaagcttgctttcttggcgtcgagcggcggacgggtgagtaatgcctgggaaattgccctgatgtgggggataaccattggaaacgatggctaataccgcataacgtctacggaccaaagagggggaccttcgggcctctcgcgtcgggatatgcccaggtgggattagcttgttggtgaggtaagggctcaccaaggcgacgatccctagctggtctgagaggatgatcagccacactggaactgagacacggtccagactcctacgggaggcagcagtggggaatattgcacaatgggcgcaagcctgatgcagccatgccgcgtgtatgaagaaggccttcgggttgtaaagtactttcagcagtgaggaaggtggtgtatttaatacgtgcatcatttgacgttagctgcagaagaagcaccggctaactccgtgccagcagccgcggtaatacggagggtgcgagcgttaatcggtggatgattaagtcagatgtgaaagcccggggcttaaccccggaacagcatttgaaactggtcatctagagtactgtagaggggggtagaatttcaggtgtagcggtgaaatgcgtagagatctgaaggaataccggtggcgaaggcggccccctggacagatactgacactcagatgcgaaagcgtggggagcaaacaggattagataccctggtagtccacgccgtaaacgatgtctacttggaggttgtggccttgagccgtggctttcggagctaacgcgttaagtagaccgcctggggagtacggtcgcaagattaaaactcaaatgaattgacgggggcccgcacaagcggtggagcatgtggtttaattcgatgcaacgcgaagaaccttacctactcttgacatccagagaattttccagagatggattagtgccttcgggagctctgagacaggtgctgcatggctgtcgtcagctcgtgttgtgaaatgttgggttaagtcccgcaacgagcgcaacccttatccttgattgccagcacttcgggtgggaacttcagggagactgccggtgataaaccggaggaaggtggggacgacgtaagtcatcatggcccttacgagtagggctacacacgtgctacaatggcggatacagagggcagctaacttgcgagagtgtgcgaatcccaaaaagtccgtcgtagtccggattggagtctgcaactcgactccatgaagtcggaatcgctagtaatcgtagatcagaatgctacggtgaatacgttcccgggccttgtacacaccgcccgtcacaccatgggagtgggctgc

SEQ ID NO: 3478 - DNA, 1475 bp, Vibrio agarivorans
attgaacgctggcggcaggcctaacacatgcaagtcgagcggaaacgacttaactgaaccttcggggaacgttaagggcgtcgagcggcggacgggtgagtaatgcctgggaatatgccttgatgtgggggataactattggaaacgatagctaataccgcataatgctttcgggccaaagagggggaccttcgggcctctcgcgtcaagattagcccaggtgggattagctagttggtgaggtaaaggctcaccaaggcgacgatccctagctggtctgagaggatgatcagccacactggaactgagacacggtccagactcctacgggaggcagcagtggggaatattgcacaatgggcgcaagcctgatgcagccatgccgcgtgtgtgaagaaggccttcgggttgtaaagcactttcagtcgtgaggaaggtagtgtagttaatagctgcattatttgacgttagcgacagaagaagcaccggctaactccgtgccagcagccgcggtaatacggagggtgcgagcgttaatcggaattactgggcgtaaagcgcatgcaggtgggtgattaagtcagatgtgaaagcccggggctcaacctcggaacagcatttgaaactggtcacctagagtactgtagaggggggtagaatttcaggtgtagcggtgaaatgcgtagagatctgaaggaataccagtggcgaaggcggccccctggacagatactgacactcagatgcgaaagcgtggggagcaaacaggattagataccctggtagtccacgccgtaaacgatgtctacttggaggttgtggccttgagccgtggctttcggagctaacgcgttaagtagaccgcctggggagtacggtcgcaagattaaaactcaaatgaattgacgggggcccgcacaagcggtggagcatgtggtttaattcgatgcaacgcgaagaaccttacctactcttgacatccagagaacttagcagagatgctttggtgccttcgggaactctgagacaggtgctgcatggctgtcgtcagctcgtgttgtgaaatgttgggttaagtcccgcaacgagcgcaacccttatccttgtttgccagcgagtaatgtcgggaactccagggagactgccggtgataaaccggaggaaggtggggacgacgtcaagtcatcatggcccttacgagtagggctacacacgtgctacaatggcgcatacagagggcagcaagctagcgatagtgagcgaatcccaaaaagtgcgtcgtagtccggattggagtctgcaactcgactccatgaagtcggaatcgctagtaatcgtagatcagaatgctacggtgaatacgttcccgggccttgtacacaccgcccgtcacaccatgggagtgggctgcaaaagaagtgggtagtttaaccttcgggaggacgctcaccactttgtggttcatgactggggtg

SEQ ID NO: 3479 - DNA, 1476 bp, Vibrio alfacsensis
attgaacgctggcggcaggcctaacacatgcaagtcgagcggcagcgacaacattgaatcttcggaggatttgttgggcggcgagcggcggacgggtgagtaatgcctaggaaattgccctgatgtgggggataaccattggaaacgatggctaataccgcatgatgcctacgggccaaagagggggaccttcgggcctctcgcgtcaggatatgcctaggtgggattagctagttggtgaggtaagggctcaccaaggcgacgatccctagctggtctgagaggatgatcagccacactggaactgagacacggtccagactcctacgggaggcagcagtggggaatattgcacaatgggcgcaagcctgatgcagccatgccgcgtgtgtgaagaaggccttcgggttgtaaagcactttcagtagggaggaaggttcatgcgttaatagcgtatggatttgacgttacctacagaagaagcaccggctaactccgtgccagcagccgcggtaatacggagggtgcgagcgttaatcggaattactgggcgtaaagcgcatgcaggtggtttgttaagtcagatgtgaaagcccggggctcaacctcggaattgcatttgaaactggcagactagagtactgtagaggggggtagaatttcaggtgtagcggtgaaatgcgtagagatctgaaggaataccggtggcgaaggcggccccctggacagatactgacactcagatgcgaaagcgtggggagcaaacaggattagataccctggtagtccacgccgtaaacgatgtctacttggaggttgtggccttgagccgtggctttcggagctaacgcgttaagtagaccgcctggggagtacggtcgcaagattaaaactcaaatgaattgacgggggcccgcacaagcggtggagcatgtggtttaattcgatgcaacgcgaagaaccttacctactcttgacatccagagaagccagtagagatacaggtgtgccttcgggaactctgagacaggtgctgcatggctgtcgtcagctcgtgttgtgaaatgttgggttaagtcccgcaacgagcgcaacccttatccttgtttgccagcgagtaatgtcgggaactccagggagactgccggtgataaaccggaggaaggtggggacgacgtcaagtcatcatggcccttacgagtagggctacacacgtgctacaatggcgcatacagagggcagccaacttgcgaaagtgagcgaatcccaaaaagtgcgtcgtagtccggattggagtctgcaactcgactccatgaagtcggaatcgctagtaatcgtggatcagaatgccacggtgaatacgttcccgggccttgtacacaccgcccgtcacaccatgggagtgggctgcaaaagaagtaggtagtttaaccttcggggaggacgcttaccactttgtggttcatgactggggtg

SEQ ID NO: 3480 - DNA, 1475 bp, Vibrio alginolyticus
attgaacgctggcggcaggcctaacacatgcaagtcgagcggaaacgagttatctgaaccttcggggaacgataacggcgtcgagcggcggacgggtgagtaatgcctaggaaattgccctgatgtgggggataaccattggaaacgatggctaataccgcatgatgcctacgggccaaagagggggaccttcgggcctctcgcgtcaggatatgcctaggtgggattagctagttggtgaggtaagggctcaccaaggcgacgatccctagctggtctgagaggatgatcagccacactggaactgagacacggtccagactcctacgggaggcagcagtggggaatattgcacaatgggcgcaagcctgatgcagccatgccgcgtgtatgaagaaggccttcgggttgtaaagtactttcagtcgtgaggaaggtagtgtagttaatagctgcattatttgacgttagcgacagaagaagcaccggctaactccgtgccagcagccgcggtaatacggagggtgcgagcgttaatcggaattactgggcgtaaagcgcatgcaggtggtttgttaagtcagatgtgaaagcccggggctcaacctcggaatagcatttgaaactggcagactagagtactgtagaggggggtagaatttcaggtgtagcggtgaaatgcgtagagatctgaaggaataccggtggcgaaggcggccccctggacagatactgacactcagatgcgaaagcgtggggagcaaacaggattagataccctggtagtccacgccgtaaacgatgtctacttggaggttgtggccttgagccgtggctttcggagctaacgcgttaagtagaccgcctggggagtacggtcgcaagattaaaactcaaatgaattgacgggggcccgcacaagcggtggagcatgtggtttaattcgatgcaacgcgaagaaccttacctactcttgacatccagagaactttccagagatggattggtgccttcgggaactctgagacaggtgctgcatggctgtcgtcagctcgtgttgtgaaatgttgggttaagtcccgcaacgagcgcaacccttatccttgtttgccagcgagtaatgtcgggaactccagggagactgccggtgataaaccggaggaaggtggggacgacgtcaagtcatcatggcccttacgagtagggctacacacgtgctacaatggcgcatacagagggcggccaacttgcgaaagtgagcgaatcccaaaaagtgcgtcgtagtccggattggagtctgcaactcgactccatgaagtcggaatcgctagtaatcgtggatcagaatgccacggtgaatacgttcccgggccttgtacacaccgcccgtcacaccatgggagtgggctgcaaaagaagtaggtagtttaaccttcggggggacgcttaccactttgtggttcatgactggggtg

SEQ ID NO: 3481 - DNA, 1462 bp, Vibrio algivorus
ttgaacgctggcggcaggcctaacacatgcaagtcgagcggaaacgagaatagcttgctattcggcgtcgagcggcggacgggtgagtaatgcataggaagttgcccagtagagggggataaccattggaaacgatggctaataccgcataacctcttcggagcaaagcgggggaccttcgggcctcgcgctactggatacgcctatgtgggattagctagttggtgaggtaaaggctcaccaaggcgacgatccctagctggtctgagaggatgatcagccacactgggactgagacacggcccagactcctacgggaggcagcagtggggaatattgcacaatgggcgaaagcctgatgcagccatgccgcgtgtatgaagaaggccttcgggttgtaaagtactttcagttgtgaggaaggtttcgtagttaataactgcgttgcttgacgttagcaacagaagaagcaccggctaactccgtgccagcagccgcggtaatacggagggtgcgagcgttaatcggaattactgggcgtaaagcgcatgcaggtggtttgttaagtcagatgtgaaagcccggggctcaacctcggaaggtcatttgaaactggcaaactagagtactgtagaggggggtagaatttcaggtgtagcggtgaaatgcgtagagatctgaaggaataccagtggcgaaggcggccccctggacagatactgacactcagatgcgaaagcgtggggagcaaacaggattagataccctggtagtccacgccgtaaacgatgtctacttggaggttgtggccttgagccgtggctttcggagctaacgcgttaagtagaccgcctggggagtacggtcgcaagattaaaactcaaatgaattgacgggggcccgcacaagcggtggagcatgtggtttaattcgatgcaacgcgaagaaccttacctactcttgacatccagagaactttccagagatggattggtgccttcgggaactctgagacaggtgctgcatggctgtcgtcagctcgtgttgtgaaatgttgggttaagtcccgcaacgagcgcaacccttatccttgtttgccagcgagtaatgtcgggaactccagggagactgccggtgataaaccggaggaaggtggggacgacgtcaagtcatcatggcccttacgagtagggctacacacgtgctacaatggcgcatacagagggcagcgaacttgcgaaagtaagcgaatcccaaaaagtgcgtcgtagtccggattggagtctgcaactcgactccatgaagtcggaatcgctagtaatcgtggatcagaatgccacggtgaatacgttcccgggccttgtacacaccgcccgtcacaccatgggagtgggctgcaaaagaagtaggtagtttaaccttcgggaggacgcttaccactttgtggttcatgactggggtg

SEQ ID NO: 3482 - DNA, 1467 bp, Vibrio anguillarum
attgaacgctggcggcaggcctaacacatgcaagtcgagcggcagcacagaggaacttgttccttgggtggcgagcggcggacgggtgagtaatgcctaggaaattgccctgatgtgggggataaccattggaaacgatggctaataccgcatgatgcctacgggccaaagagggggaccttcgggcctctcgcgtcaggatatgcctaggtgggattagctagttggtgaggtaatggctcaccaaggcgacgatccctagctggtctgagaggatgatcagccacactggaactgagacacggtccagactcctacgggaggcagcagtggggaatattgcacaatgggcgcaagcctgatgcagccatgccgcgtgtatgaagaaggccttcgggttgtaaagtactttcagtcgtgaggaaggtggtgttgttaatagcagcatcatttgacgttagcgacagaagaagcaccggctaactccgtgccagcagccgcggtaatacggagggtgcgagcgttaatcggaattactgggcgtaaagcgcatgcaggtggtggattaagtcagatgtgaaagcccggggctcaacctcggaaccgcatttgaaactggttcactagagtactgtagaggggggtagaatttcaggtgtagcggtgaaatgcgtagagatctgaaggaataccggtggcgaaggcggccccctggacagatactgacactcagatgcgaaagcgtggggagcaaacaggattagataccctggtagtccacgccgtaaacgatgtctacttggaggttgtggccttgagccgtggctttcggagctaacgcgttaagtagaccgcctggggagtacggtcgcaagattaaaactcaaatgaattgacgggggcccgcacaagcggtggagcatgtggtttaattcgatgcaacgcgaagaaccttacctactcttgacatctacagaatcctgcggagacgcgggagtgccttcgggaactgtaagacaggtgctgcatggctgtcgtcagctcgtgttgtgaaatgttgggttaagtcccgcaacgagcgcaacccttatccttgtttgccagcgagtaatgtcgggaactccagggagactgccggtgataaaccggaggaaggtggggacgacgtcaagtcatcatggcccttacgagtagggctacacacgtgctacaatggcgcatacagagggcagcaagctagcgatagtgagcgaatcccaaaaagtgcgtcgtagtccggattggagtctgcaactcgactccatgaagtcggaatcgctagtaatcgtagatcagaatgctacggtgaatacgttcccgggccttgtacacaccgcccgtcacaccatgggagtgggctgcaaaagaagtgggtagtttaacctttcgaggaggacgctcaccactttgtggttcatgactggggtg

SEQ ID NO: 3483 - DNA, 1477 bp, Vibrio atlanticus
  misc_feature (458)..(458): n is a, c, g, or t
attgaacgctggcggcaggcctaacacatgcaagtcgagcggaaacgacactaacaatccttcgggtgcgttaatgggcgtcgagcggcggacgggtgagtaatgcctaggaaattgccttgatgtgggggataaccattggaaacgatggctaataccgcataatgcctacgggccaaagagggggaccttcgggcctctcgcgtcaagatatgcctaggtgggattagctagttggtgaggtaatggctcaccaaggcgacgatccctagctggtctgagaggatgatcagccacactggaactgagacacggtccagactcctacgggaggcagcagtggggaatattgcacaatgggcgaaagcctgatgcagccatgccgcgtgtatgaagaaggccttcgggttgtaaagtactttcagttgtgaggaagggtgtgtagttaatagctgcanatcttgacgttagcaacagaagaagcaccggctaactccgtgccagcagccgcggtaatacggagggtgcgagcgttaatcggaattactgggcgtaaagcgcatgcaggtggttcattaagtcagatgtgaaagcccggggctcaacctcggaactgcatttgaaactggtgaactagagtgctgtagaggggggtagaatttcaggtgtagcggtgaaatgcgtagagatctgaaggaataccagtggcgaaggcggccccctggacagacactgacactcagatgcgaaagcgtggggagcaaacaggattagataccctggtagtccacgccgtaaacgatgtctacttggaggttgtggccttgagccgtggctttcggagctaacgcgttaagtagaccgcctggggagtacggtcgcaagattaaaactcaaatgaattgacgggggcccgcacaagcggtggagcatgtggtttaattcgatgcaacgcgaagaaccttacctactcttgacatccagagaagccagcggagacgcaggtgtgccttcgggagctctgagacaggtgctgcatggctgtcgtcagctcgtgttgtgaaatgttgggttaagtcccgcaacgagcgcaacccttatccttgtttgccagcgagtaatgtcgggaactccagggagactgccggtgataaaccggaggaaggtggggacgacgtcaagtcatcatggcccttacgagtagggctacacacgtgctacaatggcgcatacagagggcagcaagctagcgatagtgagcgaatcccaaaaagtgcgtcgtagtccggattggagtctgcaactcgactccatgaagtcggaatcgctagtaatcgtgaatcagaatgtcacggtgaatacgttcccgggccttgtacacaccgcccgtcacaccatgggagtgggctgcaaaagaagtgggtagtttaacctttcggggaggacgctcaccactttgtggttcatgactggggtg

SEQ ID NO: 3484 - DNA, 1475 bp, Vibrio azureus
attgaacgctggcggcaggcctaacacatgcaagtcgagcggaaacgagttatctgaaccttcggggaacgataacggcgtcgagcggcggacgggtgagtaatgcctaggaaattgccctgatgtgggggataaccattggaaacgatggctaataccgcatgatgcctacgggccaaagagggggaccttcgggcctctcgcgtcaggatatgcctaggtgggattagctagttggtgaggtaagggctcaccaaggcgacgatccctagctggtctgagaggatgatcagccacactggaactgagacacggtccagactcctacgggaggcagcagtggggaatattgcacaatgggcgcaagcctgatgcagccatgccgcgtgtgtgaagaaggccttcgggttgtaaagcactttcagtcgtgaggaaggtagtgtagttaatagctgcattatttgacgttagcgacagaagaagcaccggctaactccgtgccagcagccgcggtaatacggagggtgcgagcgttaatcggaattactgggcgtaaagcgcatgcaggtggtttgttaagtcagatgtgaaagcccggggctcaacctcggaatagcatttgaaactggcagactagagtactgtagaggggggtagaatttcaggtgtagcggtgaaatgcgtagagatctgaaggaataccggtggcgaaggcggccccctggacagatactgacactcagatgcgaaagcgtggggagcaaacaggattagataccctggtagtccacgccgtaaacgatgtctacttggaggttgtggccttgagccgtggctttcggagctaacgcgttaagtagaccgcctggggagtacggtcgcaagattaaaactcaaatgaattgacgggggcccgcacaagcggtggagcatgtggtttaattcgatgcaacgcgaagaaccttacctactcttgacatccagagaacttttcagagatgaattggtgccttcgggaactctgagacaggtgctgcatggctgtcgtcagctcgtgttgtgaaatgttgggttaagtcccgcaacgagcgcaacccttatccttgtttgccagcgagtaatgtcgggaactccagggagactgccggtgataaaccggaggaaggtggggacgacgtcaagtcatcatggcccttacgagtagggctacacacgtgctacaatggcgcatacagagggcagccaacttgcgaaagtgagcgaatcccaaaaagtgcgtcgtagtccggattggagtctgcaactcgactccatgaagtcggaatcgctagtaatcgtggatcagaatgccacggtgaatacgttcccgggccttgtacacaccgcccgtcacaccatgggagtgggctgcaaaagaagtaggtagtttaaccttcgggaggacgcttaccactttgtggttcatgactggggtg

SEQ ID NO: 3485 - DNA, 1475 bp, Vibrio barjaei
attgaacgctggcggcaggcctaacacatgcaagtcgagcggaaacgagttaactgacccttcgggtgacgttaacggcgtcgagcggcggacgggtgagtaatgcctgggaaattgccctgatgtgggggataaccattggaaacgatggctaataccgcataatgccttcgggccaaagagggggaccttcgggcctctcgcgtcaggatatgcccaggtgggattagctagttggtaaggtaatggcttaccaaggcgacgatccctagctggtctgagaggatgatcagccacactggaactgagacacggtccagactcctacgggaggcagcagtggggaatattgcacaatgggcgcaagcctgatgcagccatgccgcgtgtgtgaagaaggccttcgggttgtaaagcactttcagtcgtgaggaaggtagtgtagttaatagctgcattgcttgacgttagcgacagaagaagcaccggctaactccgtgccagcagccgcggtaatacggagggtgcgagcgttaatcggaattactgggcgtaaagcgcatgcaggtggttcgttaagtcagatgtgaaagcccggggctcaacctcggaactgcatttgaaactggcggactagagtactgtagaggggggtagaatttcaggtgtagcggtgaaatgcgtagagatctgaaggaataccggtggcgaaggcggccccctggacagatactgacactcagatgcgaaagcgtggggagcaaacaggattagataccctggtagtccacgccgtaaacgatgtctacttggaggttgtggccttgagccgtggctttcggagctaacgcgttaagtagaccgcctggggagtacggtcgcaagattaaaactcaaatgaattgacgggggcccgcacaagcggtggagcatgtggtttaattcgatgcaacgcgaagaaccttacctactcttgacatccagagaagccagcggagacgcaggtgtgccttcgggagctctgagacaggtgctgcatggctgtcgtcagctcgtgttgtgaaatgttgggttaagtcccgcaacgagcgcaacccttatccttgtttgccagcgagtaatgtcgggaactccagggagactgccggtgataaaccggaggaaggtggggacgacgtcaagtcatcatggcccttacgagtagggctacacacgtgctacaatggcgcatacagagggcagccaacttgcgaaagtgagcgaatcccaaaaagtgcgtcgtagtccggattggagtctgcaactcgactccatgaagtcggaatcgctagtaatcgtagatcagaatgctacggtgaatacgttcccgggccttgtacacaccgcccgtcacaccatgggagtgggctgcaaaagaagtgggtagtttaaccttcgggaggacgctcaccactttgtggttcatgactggggtg

SEQ ID NO: 3486 - DNA, 1475 bp, Vibrio bivalvicida
attgaacgctggcggcaggcctaacacatgcaagtcgagcggaaacgagttaactgaaccttcggggaacgttaacggcgtcgagcggcggacgggtgagtaatgcctgggaaattgccctgatgtgggggataaccattggaaacgatggctaataccgcataatgccttcgggccaaagagggggaccttcgggcctctcgcgtcaggatatgcccaggtgggattagctagttggtgaggtaatggctcaccaaggcgacgatccctagctggtctgagaggatgatcagccacactggaactgagacacggtccagactcctacgggaggcagcagtggggaatattgcacaatgggcgcaagcctgatgcagccatgccgcgtgtatgaagaaggccttcgggttgtaaagtactttcagtcgtgaggaaggtggtgttgttaatagcagcatcatttgacgttagcgacagaagaagcaccggctaactccgtgccagcagccgcggtaatacggagggtgcgagcgttaatcggaattactgggcgtaaagcgcatgcaggtggtctgttaagtcagatgtgaaagcccggggctcaacctcggaattgcatttgaaactggcagactagagtactgtagaggggggtagaatttcaggtgtagcggtgaaatgcgtagagatctgaaggaataccagtggcgaaggcggccccctggacagatactgacactcagatgcgaaagcgtggggagcaaacaggattagataccctggtagtccacgccgtaaacgatgtctacttggaggttgtggccttgagccgtggctttcggagctaacgcgttaagtagaccgcctggggagtacggtcgcaagattaaaactcaaatgaattgacgggggcccgcacaagcggtggagcatgtggtttaattcgatgcaacgcgaagaaccttacctactcttgacatccagagaagccagcagagatgcaggtgtgccttcgggaactctgagacaggtgctgcatggctgtcgtcagctcgtgttgtgaaatgttgggttaagtcccgcaacgagcgcaacccttatccttgtttgccagcgagtaatgtcgggaactccagggagactgccggtgataaaccggaggaaggtggggacgacgtcaagtcatcatggcccttacgagtagggctacacacgtgctacaatggcgcatacagagggcagcaagctagcgatagtgagcgaatcccaaaaagtgcgtcgtagtccggattggagtctgcaactcgactccatgaagtcggaatcgctagtaatcgtggatcagaatgccacggtgaatacgttcccgggccttgtacacaccgcccgtcacaccatgggagtgggctgcaaaagaagtaggtagtttaaccttcgggagaacgcttaccactttgtggttcatgactggggtg

SEQ ID NO: 3487 - DNA, 1474 bp, Vibrio brasiliensis
attgaacgctggcggcaggcctaacacatgcaagtcgagcggaaacgagttaactgaaccttcggggaacgttaacggcgtcgagcggcggacgggtgagtaatgcctgggaaattgccctgatgtgggggataaccattggaaacgatggctaataccgcataatagcttcggctcaaagagggggaccttcgggcctctcgcgtcaggatatgcccaggtgggattagctagttggtgaggtaatggctcaccaaggcgacgatccctagctggtctgagaggatgatcagccacactggaactgagacacggtccagactcctacgggaggcagcagtggggaatattgcacaatgggcgcaagcctgatgcagccatgccgcgtgtatgaagaaggccttcgggttgtaaagtactttcagcagtgaggaaggcaggtacgttaatagcgtgcttgtttgacgttagctgcagaagaagcaccggctaactccgtgccagcagccgcggtaatacggagggtgcgagcgttaatcggaattactgggcgtaaagcgcatgcaggtggtttgttaagtcagatgtgaaagcccggggctcaacctcggaattgcatttgaaactggcagactagagtactgtagaggggggtagaatttcaggtgtagcggtgaaatgcgtagagatctgaaggaataccggtggcgaaggcggccccctggacagatactgacactcagatgcgaaagcgtggggagcaaacaggattagataccctggtagtccacgccgtaaacgatgtctacttggaggttgtggccttgagccgtggctttcggagctaacgcgttaagtagaccgcctggggagtacggtcgcaagattaaaactcaaatgaattgacgggggcccgcacaagcggtggagcatgtggtttaattcgatgcaacgcgaagaaccttacctactcttgacatccagagaacttttcagagatggattggtgccttcgggaactctgagacaggtgctgcatggctgtcgtcagctcgtgttgtgaaatgttgggttaagtcccgcaacgagcgcaacccttatccttgtttgccagcacttcgggtgggaactccagggagactgccggtgataaaccggaggaaggtggggacgacgtcaagtcatcatggcccttacgagtagggctacacacgtgctacaatggcgcatacagagggcggccaacttgcgaaagtgagcgaatcccaaaaagtgcgtcgtagtccggatcggagtctgcaactcgactccgtgaagtcggaatcgctagtaatcgtggatcagaatgccacggtgaatacgttcccgggccttgtacacaccgcccgtcacaccatgggagtgggctgcaaaagaagtgggtagtttaaccttcgggaggacgctcaccactttgtggttcatgactggggtg

SEQ ID NO: 3488 - DNA, 1430 bp, Vibrio breoganii
attgaacgctggcggcaggcctaacacatgcaagtcgagcggaaacgacaacattgacccttcgggtgatttgttgggcgtcgagcggcggacgggtgagtaatgcctgggaaattgccctgatgtgggggataaccattggaaacgatggctaataccgcataacgtctacggaccaaagagggggaccttcgggcctctcgcttcaggatatgcccaggtgggattagctagttggtgaggtaatggctcaccaaggcgacgatccctagctggtctgagaggatgatcagccacactggaactgagacacggtccagactcctacgggaggcagcagtggggaatattgcacaatgggcgcaagcctgatgcagccatgccgcgtgtatgaagaaggccttcgggttgtaaagtactttcagtcgtgaggaaggcgttgaagttaatagcttcattgtttgacgttagcgacagaagaagcaccggctaactccgtgccagcagccgcggtaatacggagggtgcgagcgttaatcggaattactgggcgtaaagcgcatgcaggtggtttgttaagtcagatgtgaaagcccggggctcaacctcggaaccgcatttgaaactggcaggctagagtactgtagaggggggtagaatttcaggtgtagcggtgaaatgcgtagagatctgaaggaataccagtggcgaaggcggccccctggacagatactgacactcagatgcgaaagcgtggggagcaaacaggattagataccctggtagtccacgccgtaaacgatgtctacttggaggttgtggccttgagccgtggctttcggagctaacgcgttaagtagaccgcctggggagtacggtcgcaagattaaaactcaaatgaattgacgggggcccgcacaagcggtggagcatgtggtttaattcgatgcaacgcgaagaaccttacctactcttgacatccagagaacttagcagagatgctttggtgccttcgggaactctgagacaggtgctgcatggctgtcgtcagctcgtgttgtgaaatgttgggttaagtcccgcaacgagcgcaacccttatccttgtttgccagcacgtaatggtgggaactccagggagactgccggtgataaaccggaggaaggtggggacgacgtcaagtcatcatggcccttacgagtagggctacacacgtgctacaatggcgcatacagagggcagccaaccagcgatggtgagcgaatcccaaaaagtgcgtcgtagtccggattggagtctgcaactcgactccatgaagtcggaatcgctagtaatcgtgaatcagaatgtcacggtgaatacgttcccgggccttgtacacaccgcccgtcacaccatgggagtgggctgcaaaagaagtgggtagttta

SEQ ID NO: 3489 - DNA, 1426 bp, Vibrio campbellii
attgaacgctggcggcaggcctaacacatgcaagtcgagcggaaacgagttatctgaaccttcggggaacgataacggcgtcgagcggcggacgggtgagtaatgcctaggaaattgccctgatgtgggggataaccattggaaacgatggctaataccgcataatgcctacgggccaaagagggggaccttcgggcctctcgcgtcaggatatgcctaggtgggattagctagttggtgaggtaagggctcaccaaggcgacgatccctagctggtctgagaggatgatcagccacactggaactgagacacggtccagactcctacgggaggcagcagtggggaatattgcacaatgggcgcaagcctgatgcagccatgccgcgtgtgtgaagaaggccttcgggttgtaaagcactttcagtcgtgaggaaggtagtgtagttaatagctgcattatttgacgttagcgacagaagaagcaccggctaactccgtgccagcagccgcggtaatacggagggtgcgagcgttaatcggaattactgggcgtaaagcgcatgcaggtggtttgttaagtcagatgtgaaagcccggggctcaacctcggaattgcatttgaaactggcagactagagtactgtagaggggggtagaatttcaggtgtagcggtgaaatgcgtagagatctgaaggaataccggtggcgaaggcggccccctggacagatactgacactcagatgcgaaagcgtggggagcaaacaggattagataccctggtagtccacgccgtaaacgatgtctacttggaggttgtggccttgagccgtggctttcggagctaacgcgttaagtagaccgcctggggagtacggtcgcaagattaaaactcaaatgaattgacgggggcccgcacaagcggtggagcatgtggtttaattcgatgcaacgcgaagaaccttacctactcttgacatccagagaactttccagagatggattggtgccttcgggaactctgagacaggtgctgcatggctgtcgtcagctcgtgttgtgaaatgttgggttaagtcccgcaacgagcgcaacccttatccttgtttgccagcgagtaatgtcgggaactccagggagactgccggtgataaaccggaggaaggtggggacgacgtcaagtcatcatggcccttacgagtagggctacacacgtgctacaatggcgcatacagagggcagccaacttgcgagagtgagcgaatcccaaaaagtgcgtcgtagtccggatcggagtctgcaactcgactccgtgaagtcggaatcgctagtaatcgtggatcagaatgccacggtgaatacgttcccgggccttgtacacaccgcccgtcacaccatgggagtgggctgcaaaagaagtaggtag

SEQ ID NO: 3490 - DNA, 1474 bp, Vibrio caribbeanicus
attgaacgctggcggcaggcctaacacatgcaagtcgagcggaaacgagttatctgaaccttcggggaacgataacggcgtcgagcggcggacgggtgagtaatgcctgggaaattgccctgatgtgggggataaccattggaaacgatggctaataccgcataatagcttcggctcaaagagggggaccttcgggcctctcgcgtcaggatatgcccaggtgggattagctagttggtgaggtaagggctcaccaaggcgacgatccctagctggtctgagaggatgatcagccacactggaactgagacacggtccagactcctacgggaggcagcagtggggaatattgcacaatgggcgcaagcctgatgcagccatgccgcgtgtatgaagaaggccttcgggttgtaaagtactttcagcagtgaggaaggtggtgtacttaatacgtgcatcatttgacgttagctgcagaagaagcaccggctaactccgtgccagcagccgcggtaatacggagggtgcgagcgttaatcggaattactgggcgtaaagcgcatgcaggtggtttgttaagtcagatgtgaaagcccggggctcaacctcggaattgcatttgaaactgacagactagagtactgtagaggggggtagaatttcaggtgtagcggtgaaatgcgtagagatctgaaggaataccggtggcgaaggcggccccctggacagatactgacactcagatgcgaaagcgtggggagcaaacaggattagataccctggtagtccacgccgtaaacgatgtctacttggaggttgtggccttgagccgtggctttcggagctaacgcgttaagtagaccgcctggggagtacggtcgcaagattaaaactcaaatgaattgacgggggcccgcacaagcggtggagcatgtggtttaattcgatgcaacgcgaagaaccttacctactcttgacatccatagaactttccagagatggattggtgccttcgggaactatgagacaggtgctgcatggctgtcgtcagctcgtgttgtgaaatgttgggttaagtcccgcaacgagcgcaacccttatccttgtttgccagcacttcgggtgggaactccagggagactgccggtgataaaccggaggaaggtggggacgacgtcaagtcatcatggcccttacgagtagggctacacacgtgctacaatggcgcatacagagggcggccaacttgcgaaagtgagcgaatcccaaaaagtgcgtcgtagtccggattggagtctgcaactcgactccatgaagtcggaatcgctagtaatcgtggatcagaatgccacggtgaatacgttcccgggccttgtacacaccgcccgtcacaccatgggagtgggctgcaaaagaagtgggtagtttaaccttcggggggacgctcaccactttgtggttcatgactggggtg

SEQ ID NO: 3491 - DNA, 1479 bp, Vibrio casei
  misc_feature (53)..(54): n is a, c, g, or t
  misc_feature (61)..(62): n is a, c, g, or t
  misc_feature (181)..(181): n is a, c, g, or t
  misc_feature (373)..(373): n is a, c, g, or t
  misc_feature (448)..(448): n is a, c, g, or t
  misc_feature (456)..(456): n is a, c, g, or t
  misc_feature (458)..(458): n is a, c, g, or t
  misc_feature (986)..(986): n is a, c, g, or t
  misc_feature (993)..(993): n is a, c, g, or t
  misc_feature (1023)..(1023): n is a, c, g, or t
  misc_feature (1028)..(1028): n is a, c, g, or t
  misc_feature (1292)..(1292): n is a, c, g, or t
attgaacgctggcggcaggcctaacacatgcaagtcgagcggaaacgagaagnngcttgcnncttcggcgtcgagcggcggacgggtgagtaatgcataggaagttgccctaacgagggggataccagttggaaacgactgttaataccgcataatctcctttctgttaaaggaaagaagnaaagcgggggaccttcgggcctcgcgcgttaggatacgcctatgtgggattagctagttggtgaggtaatggctcaccaaggcgacgatccctagctggtctgagaggatgatcagccacactgggactgagacacggcccagactcctacgggaggcagcagtggggaatattgcacaatgggcgaaagcntgatgcagccatgccgcgtgtatgaagaaggccttcgggttgtaaagtactttcagttgtgaggaaggtttcgtngttaatancngcgttgcttgacgttagcaacagaagaagcaccggctaactccgtgccagcagccgcggtaatacggagggtgcgagcgttaatcggaattactgggcgtaaagcgcatgcaggtggtttgttaagtcagatgtgaaagcccggggctcaacctcggaaggtcatttgaaactggcaaactagagtactgtagaggggggtagaatttcaggtgtagcggtgaaatgcgtagagatctgaaggaataccagtggcgaaggcggccccctggacagatactgacactcagatgcgaaagcgtggggagcaaacaggattagataccctggtagtccacgccgtaaacgatgtctacttggaggttgtggccttgagccgtggctttcggagctaacgcgttaagtagaccgcctggggagtacggtcgcaagattaaaactcaaatgaattgacgggggcccgcacaagcggtggagcatgtggtttaattcgatgcaacgcgaagaaccttacctactcttgacatcnagagaanccagtagagatacaggtgtgccttcggganctctnagacaggtgctgcatggctgtcgtcagctcgtgttgtgaaatgttgggttaagtcccgcaacgagcgcaacccttatccttgtttgccagcgagtaatgtcgggaactccagggagactgccggtgataaaccggaggaaggtggggacgacgtcaagtcatcatggcccttacgagtagggctacacacgtgctacaatggcgcatacagagggcagcgaacttgcgaaagtaagcgaatcccaaaaagtgcgtcgtagtccngattggagtctgcaactcgactccatgaagtcggaatcgctagtaatcgtggatcagaatgccacggtgaatacgttcccgggccttgtacacaccgcccgtcacaccatgggagtgggctgcaaaagaagtaggtagtttaaccttcgggaggacgcttaccactttgtggttcatgactggggtg

SEQ ID NO: 3492 - DNA, 1473 bp, Vibrio celticus
  misc_feature (444)..(444): n is a, c, g, or t
attgaacgctggcggcaggcctaacacatgcaagtcgagcggaaacgacactaacaatccttcgggtgcgttaatgggcgtcgagcggcggacgggtgagtaatgcctaggaaattgccttgatgtgggggataaccattggaaacgatggctaataccgcataatgcctacgggccaaagagggggaccttcgggcctctcgcgtcaagatatgcctaggtgggattagctagttggtgaggtaatggctcaccaaggcgacgatccctagctggtctgagaggatgatcagccacactggaactgagacacggtccagactcctacgggaggcagcagtggggaatattgcacaatgggcgaaagcctgatgcagccatgccgcgtgtatgaagaaggccttcgggttgtaaagtactttcagttgtgaggaagggggtagngttaatagcgctatctcttgacgttagcaacagaagaagcaccggctaactccgtgccagcagccgcggtaatacggaggtgcgagcgtaatcggaattactgggcgtaaagcgcatgcagtggttcattaagtcagatgtgaaagcccggggctcaacctcggaactgcattgaaactggtgaactagagtactgtagaggggggtagaatttcaggtgtagcggtgaaatgcgtagagatctgaaggaataccagtggcgaaggcggccccctggacagatactgacactcagatgcgaaagcgtggggagcaaacaggattagataccctggtagtccacgccgtaaacgatgtctacttggaggttgtggccttgagccgtggctttcggagctaacgcgttaagtagaccgcctggggagtacggtcgcaagattaaaactcaaatgaattgacgggggcccgcacaagcggtggagcatgtggtttaattcgatgcaacgcgaagaaccttacctactcttgacatccagagaagccagcggagacgcaggtgtgccttcgggagctctgagacaggtgctgcatggctgtcgtcagctcgtgttgtgaaatgttgggttaagtcccgcaacgagcgcaacccttatccttgtttgccagcgagtaatgtcgggaactccagggagactgccggtgataaaccggaggaaggtggggacgacgtcaagtcatcatggcccttacgagtagggctacacacgtgctacaatggcgcatacagagggcagcaagctagcgatagtgagcgaatcccaaaaagtgcgtcgtagtccggattggagtctgcaactcgactccatgaagtcggaatcgctagtaatcgtgaatcagaatgtcacggtgaatacgttcccgggccttgtacacaccgcccgtcacaccatgggagtgggctgcaaaagaagtgggtagtttaacctttcggggaggacgctcaccactttgtggttcatgactggggtg

SEQ ID NO: 3493 - DNA, 1435 bp, Vibrio chagasii
  misc_feature (72)..(72): n is a, c, g, or t
  misc_feature (76)..(76): n is a, c, g, or t
  misc_feature (166)..(166): n is a, c, g, or t
  misc_feature (459)..(459): n is a, c, g, or t
attgaacgctggcggcaggcctaacacatgcaagtcgagcggaaacgagttatctgaaccttcggggaacgntaanggcgtcgagcggcggacgggtgagtaatgcctaggaaattgccttgatgtgggggataaccattggaaacgatggctaataccgcataangcctacgggccaaagagggggaccttcgggcctctcgcgtcaagatatgcctaggtgggattagctagttggtgaggtaatggctcaccaaggcgacgatccctagctggtctgagaggatgatcagccacactggaactgagacacggtccagactcctacgggaggcagcagtggggaatattgcacaatgggcgaaagcctgatgcagccatgccgcgtgtatgaagaaggccttcgggttgtaaagtactttcagttgtgaggaagggggtgtcgttaatagcggcatntcttgacgttagcaacagaagaagcaccggctaactccgtgccagcagccgcggtaatacggagggtgcgagcgttaatcggaattactgggcgtaaagcgcatgcaggtggttcattaagtcagatgtgaaagcccggggctcaacctcggaactgcatttgaaactggtgaactagagtactgtagaggggggtagaatttcaggtgtagcggtgaaatgcgtagagatctgaaggaataccagtggcgaaggcggccccctggacagatactgacactcagatgcgaaagcgtggggagcaaacaggattagataccctggtagtccacgccgtaaacgatgtctacttggaggttgtggccttgagccgtggctttcggagctaacgcgttaagtagaccgcctggggagtacggtcgcaagattaaaactcaaatgaattgacgggggcccgcacaagcggtggagcatgtggtttaattcgatgcaacgcgaagaaccttacctactcttgacatccagagaagccagcggagacgcaggtgtgccttcgggagctctgagacaggtgctgcatggctgtcgtcagctcgtgttgtgaaatgttgggttaagtcccgcaacgagcgcaacccttatccttgtttgccagcgagtaatgtcgggaactccagggagactgccggtgataaaccggaggaaggtggggacgacgtcaagtcatcatggcccttacgagtagggctacacacgtgctacaatggcgcatacagagggcagcgaacttgcgagagtgagcgaatcccaaaaagtgcgtcgtagtccggattggagtctgcaactcgactccatgaagtcggaatcgctagtaatcgtagatcagaatgctacggtgaatacgttcccgggccttgtacacaccgcccgtcacaccatgggagtgggctgcaaaagaagtgggtagtttaacctt

SEQ ID NO: 3494 - DNA, 1465 bp, Vibrio cholera; identical to SEQ ID NO: 399

SEQ ID NO: 3495 - DNA, 1481 bp, Vibrio cidicii
attgaacgctggcggcaggcctaacacatgcaagtcgagcggcagcacagagaaacttgtttctcgggtggcgagcggcggacgggtgagtaatgcctgggaaattgccctgatgtgggggataaccattggaaacgatggctaataccgcatgatgtcctttctgttaaaagaggggaccaaagagggggaccgcaaggcctctcgcgtcaggatatgcccaggtgggattagctagttggtgaggtaagggctcaccaaggcgacgatccctagctggtctgagaggatgatcagccacactggaactgagacacggtccagactcctacgggaggcagcagtggggaatattgcacaatgggcgcaagcctgatgcagccatgccgcgtgtgtgaagaaggccttcgggttgtaaagcactttcagttgtgaggaaggtggtgtcgttaatagcggcatcatttgacgttagcaacagaagaagcaccggctaactccgtgccagcagccgcggtaatacggagggtgcgagcgttaatcggaattactgggcgtaaagcgcatgcaggtggtttgttaagtcagatgtgaaagccccgggctcaacctgggaattgcatttgaaactggcaaactagagtactgtagaggggggtagaatttcaggtgtagcggtgaaatgcgtagagatctgaaggaataccggtggcgaaggcggccccctggacagatactgacactcagatgcgaaagcgtggggagcaaacaggattagataccctggtagtccacgccgtaaacgatgtctacttggaggttgtggccttgagccgtggctttcggagctaacgcgttaagtagaccgcctggggagtacggtcgcaagattaaaactcaaatgaattgacgggggcccgcacaagcggtggagcatgtggtttaattcgatgcaacgcgaagaaccttacctactcttgacatccagagaatctggcggagacgctggagtgccttcgggagctctgagacaggtgctgcatggctgtcgtcagctcgtgttgtgaaatgttgggttaagtcccgcaacgagcgcaacccttatccttgtttgccagcacgtaatggtgggaactccagggagactgccggtgataaaccggaggaaggtggggacgacgtcaagtcatcatggcccttacgagtagggctacacacgtgctacaatggcgcatacagagggcggccaacttgcgaaagtgagcgaatcccaaaaagtgcgtcgtagtccggattggagtctgcaactcgactccatgaagtcggaatcgctagtaatcgtggatcagaatgccacggtgaatacgttcccgggccttgtacacaccgcccgtcacaccatgggagtgggctgcaaaagaagtgggtagtttaacctttcggggaggacgctcaccactttgtggttcatgactggggtg

SEQ ID NO: 3496 - DNA, 1465 bp, Vibrio cincinnatiensis
attgaacgctggcggcaggcctaacacatgcaagtcgagcggtaacagagagaagcttgcttctctgctgacgagcggcggacgggtgagtaatgcctgggaaattgccctgatgtgggggataaccattggaaacgatggctaataccgcatgatagcttcggctcaaagagggggacctgcaaggcctctcgcgtcaggatatgcccaggtgggattagctagttggtggggtaaaggctcaccaaggcgacgatccctagctggtctgagaggatgatcagccacactgggactgagacacggcccagactcctacgggaggcagcagtggggaatattgcacaatgggcgcaagcctgatgcagccatgccgcgtgtatgaagaaggccttcgggttgtaaagtactttcagtggtgaggaagggggtgtggttaatagccatattctttgacgttagccacagaagaagcaccggctaactccgtgccagcagccgcggtaatacggagggtgcgagcgttaatcggaattactgggcgtaaagcgcatgcaggtggtttgttaagtcagatgtgaaagcccggggctcaacctcggagttgcatttgaaactggcaggctagagtactgtagaggggggtagaatttcaggtgtagcggtgaaatgcgtagagatctgaaggaataccggtggcgaaggcggccccctggacagatactgacactcagatgcgaaagcgtggggagcaaacaggattagataccctggtagtccacgccgtaaacgatgtctacttggaggttgcggtcttgaactgtggctttcggagctaacgcgttaagtagaccgcctggggagtacggtcgcaagattaaaactcaaatgaattgacgggggcccgcacaagcggtggagcatgtggtttaattcgatgcaacgcgaagaaccttacctactcttgacatccagagaatcctgcggagacgcgggagtgccttcgggagctctgagacaggtgctgcatggctgtcgtcagctcgtgttgtgaaatgttgggttaagtcccgcaacgagcgcaacccttatccttgtttgccagcacttcgggtgggaactccagggagactgccggtgataaaccggaggaaggtggggacgacgtcaagtcatcatggcccttacgagtagggctacacacgtgctacaatggcgcatacagagggcggcgagacagcgatgttaagcgaatcccaaaaagtgcgtcgtagtccggattggagtctgcaactcgactccatgaagtcggaatcgctagtaatcgtggatcagaatgccacggtgaatacgttcccgggccttgtacacaccgcccgtcacaccatgggagtgggctgcaaaagaagcaggtagtttaaccttcggggggacgcttgccactttgtggttcatgactggggtg

SEQ ID NO: 3497 - DNA, 1432 bp, Vibrio comitans
  misc_feature (737)..(737): n is a, c, g, or t
  misc_feature (969)..(969): n is a, c, g, or t
ctaacacatgcaagtcgagcggaaacgacaacattgacccttcgggtgatttgttgggcgtcgagcggcggacgggtgagtaatgcctgggaaattgccctgatgtgggggataaccattggaaacgatggctaataccgcataacgtctacggaccaaagagggggaccttcgggcctctcgcttcaggatatgcccaggtgggattagctagttggtgaggtaatggctcaccaaggcgacgatccctagctggtctgagaggatgatcagccacactggaactgagacacggtccagactcctacgggaggcagcagtggggaatattgcacaatgggcgcaagcctgatgcagccatgccgcgtgtatgaagaaggccttcgggttgtaaagtactttcagtcgtgaggaaggcgttgaagttaatagcttcatcgtttgacgttagcgacagaagaagcaccggctaactccgtgccagcagccgcggtaatacggagggtgcgagcgttaatcggaattactgggcgtaaagcgcatgcaggtggtttgttaagtcagatgtgaaagcccggggctcaacctcggaaccgcatttgaaactggcaggctagagtactgtagaggggggtagaatttcaggtgtagcggtgaaatgcgtagagatctgaaggaataccagtggcgaaggcggccccctggacagatactgacactcagatgcgaaagcgtgnggagcaaacaggattagataccctggtagtccacgccgtaaacgatgtctacttggaggttgtggccttgagccgtggctttcggagctaacgcgttaagtagaccgcctggggagtacggtcgcaagattaaaactcaaatgaattgacgggggcccgcacaagcggtggagcatgtggtttaattcgatgcaacgcgaagaaccttacctactcttgacatccagagaantcgctagagatagcttggtgccttcgggaactctgagacaggtgctgcatggctgtcgtcagctcgtgttgtgaaatgttgggttaagtcccgcaacgagcgcaacccttatccttgtttgccagcacgtaatggtgggaactccagggagactgccggtgataaaccggaggaaggtggggacgacgtcaagtcatcatggcccttacgagtagggctacacacgtgctacaatggcgcatacagagggcagccaaccagcgatggtgagcgaatcccaaaaagtgcgtcgtagtccggattggagtctgcaactcgactccatgaagtcggaatcgctagtaatcgtgaatcagaatgtcacggtgaatacgttcccgggccttgtacacaccgcccgtcacaccatgggagtgggctgcaaaagaagtgggtagtttaaccttcgggaggacgctcacca

SEQ ID NO: 3498 - DNA, 1475 bp, Vibrio coralliilyticus
attgaacgctggcggcaggcctaacacatgcaagtcgagcggaaacgagttgtctgaaccttcggggaaggataacggcgtcgagcggcggacgggtgagtaatgcctgggaaattgccctgatgtgggggataaccattggaaacgatggctaataccgcataatagcttcggctcaaagagggggaccttcgggcctctcgcgtcaggatatgcccaggtgggattagctagttggtgaggtaatggctcaccaaggcgacgatccctagctggtctgagaggatgatcagccacactggaacttagacacggtccagactcctacgggaggcagcagtggggaatattgcacaatgggcgcaagcctgatgcagccatgccgcgtgtatgaagaaggctctcgggttgtaaagtactttcagcagtgaggaaggcgggtgtgttaatagcgcattcgtttgacgttagctgcagaagaagcaccggctaactccgtgccagcagccgcggtaatacggagggtgcgagcgttaatcggaattactgggcgtaaagcgcatgcaggtggtttgttaagtcagatgtgaaagcccggggctcaacctcggaattgcatttgaaactggcagactagagtactgtagaggggggtagaatttcaggtgtagcggtgaaatgcgtagagatctgaaggaataccggtggcgaaggcggccccctggacagatactgacactcagatgcgaaagcgtggggagcaaacaggattagataccctggtagtccacgccgtaaacgatgtctacttggaggttgtggccttgagccgtggctttcggagctaacgcgttaagtagaccgcctggggagtacggtcgcaagattaaaactcaaatgaattgacgggggcccgcacaagcggtggagcatgtggtttaattcgatgcaacgcgaagaaccttacctactcttgacatcctcagaagagactggagacagtcttgtgccttcgggaactgagagacaggtgctgcatggctgtcgtcagctcgtgttgtgaaatgttgggttaagtcccgcaacgagcgcaacccttatccttgtttgccagcgagtaatgtcgggaactccagggagactgccggtgataaaccggaggaaggtggggacgacgtcaagtcatcatggcccttacgagtagggctacacacgtgctacaatggcgcatacagagggcggccaacttgcgaaagtgagcgaatcccaaaaagtgcgtcgtagtccggattggagtctgcaactcgactccatgaagtcggaatcgctagtaatcgtagatcagaatgctacggtgaatacgttcccgggccttgtacacaccgcccgtcacaccatgggagtgggctgcaaaagaagtgggtagtttaaccttcggggggacgctcaccactttgtggttcatgactggggtg

SEQ ID NO: 3499 - DNA, 1477 bp, Vibrio crassostreae
attgaacgctggcggcaggcctaacacatgcaagtcgagcggaaacgacactaacaatccttcgggtgcgttaatgggcgtcgagcggcggacgggtgagtaatgcctaggaaattgccttgatgtgggggataaccattggaaacgatggctaataccgcataatgcctacgggccaaagagggggaccttcgggcctctcgcgtcaagatatgcctaggtgggattagctagttggtgaggtaatggctcaccaaggcgacgatccctagctggtctgagaggatgatcagccacactggaactgagacacggtccagactcctacgggaggcagcagtggggaatattgcacaatgggcgaaagcctgatgcagccatgccgcgtgtatgaagaaggccttcgggttgtaaagtactttcagttgtgaggaagggggtagcgttaatagcgctatctcttgacgttagcaacagaagaagcaccggctaactccgtgccagcagccgcggtaatacggagggtgcgagcgttaatcggaattactgggcgtaaagcgcatgcaggtggttcattaagtcagatgtgaaagcccggggctcaacctcggaactgcatttgaaactggtgaactagagtactgtagaggggggtagaatttcaggtgtagcggtgaaatgcgtagagatctgaaggaataccagtggcgaaggcggccccctggacagatactgacactcagatgcgaaagcgtggggagcaaacaggattagataccctggtagtccacgccgtaaacgatgtctacttggaggttgtggccttgagccgtggctttcggagctaacgcgttaagtagaccgcctggggagtacggtcgcaagattaaaactcaaatgaattgacgggggcccgcacaagcggtggagcatgtggtttaattcgatgcaacgcgaagaaccttacctactcttgacatccagagaagccagcggagacgcaggtgtgccttcgggagctctgagacaggtgctgcatggctgtcgtcagctcgtgttgtgaaatgttgggttaagtcccgcaacgagcgcaacccttatccttgtttgccagcgagtaatgtcgggaactccagggagactgccggtgataaaccggaggaaggtggggacgacgtcaagtcatcatggcccttacgagtagggctacacacgtgctacaatggcgcatacagagggcagcaagctagcgatagtgagcgaatcccaaaaagtgcgtcgtagtccggattggagtctgcaactcgactccatgaagtcggaatcgctagtaatcgtagatcagaatgctacggtgaatacgttcccgggccttgtacacaccgcccgtcacaccatgggagtgggctgcaaaagaagtgggtagtttaacctttcggggaggacgctcaccactttgtggttcatgactggggtg

SEQ ID NO: 3500 - DNA, 1461 bp, Vibrio cyclitrophicus
  misc_feature (175)..(175): n is a, c, g, or t
  misc_feature (196)..(196): n is a, c, g, or t
  misc_feature (382)..(382): n is a, c, g, or t
  misc_feature (400)..(400): n is a, c, g, or t
attgaacgctggcggcaggcctaacacatgcaagtcgagcggaaacgacactaacaatccttcgggtgcgttaatgggcgtcgagcggcggacgggtgagtaatgcctaggaaattgccttgatgtgggggataaccattggaaacgatggctaataccgcatgatgcctacggnccaaagagggggaccttcggncctctcgcgtcaagatatacctaggtgggattagctagttggtgaggtaatggctcaccaaggcgacgatccctagctggtctgagaggatgatcatccacactggaactgagactcggtccagactcctacgggaggcagcagtggggaatattgcacaatggccgaaagcctgatgcagccatnccgcgtgtatgaagaagnccttcgggttgtaaagtactttcagttgtgaggaagggtgtgtagttaataactgcgcatcttgacgttagcaacagaagaagcaccggctaactccgtgccagcagccgcggtaatacggagggtgcgaccgttaatcggaattactgggcgtaaagcgcatgcaggtggttcattaagtcagatgtgaaagcccggggctcaacctcggaactgcatttgaaactggtgaactagagtactgtagaggggggtagaatttcaggtgtagcggtgaaatgcgtagagatctgaaggaataccagtggcgaaggcggccccctggacagatactgacactcagatgcgaaagcgtggggagcaaacaggattagataccctggtagaccacgccgtaaacgatgtctacttggaggttgtggccttgagccgtggctttcggagctaacgcgttaagtagaccgcctggggaggacggtcgcaagattaaaactcaaatgaattgacgggggcccgcacaagcggtggagcatgtggtttaattcgatgcaacgcgaagaaccttacctactcttgacatccagagaagccagcggagacgcaggtgtgccttcgggagctctgagacaggtgctgcatggctgtcgtcagctcgtgttgtgaaatgttgggttaagtcccgcaacgagcgcaacccttatccttgtttgccagcgagtcatgtcgggaactccagggagactgccggtgataaaccggaggaaggtggggacgacgtcaagtcatcatggcccttacgagtagggctacacacgtgctacaatggcgcatacagagggcagcaagctagcgatagtgagcgaatcccaaaaagtgcgtcgtagtccggattggagtctgcaactcgactccatgaagtcggaatcgctagtaatcgtgaatcagaatgtcacggtgaatacgttcccgggccttgtacacaccgcccgtcacaccatgggagtgggctgcaaaagaagtgggtagtttaacctttcggggaggacgctcaccactttgtg

SEQ ID NO: 3501 - DNA, 1426 bp, Vibrio diabolicus
  misc_feature (457)..(458): n is a, c, g, or t
  misc_feature (460)..(460): n is a, c, g, or t
  misc_feature (622)..(622): n is a, c, g, or t
  misc_feature (911)..(911): n is a, c, g, or t
  misc_feature (991)..(992): n is a, c, g, or t
  misc_feature (1365)..(1365): n is a, c, g, or t
ttgaacgctggcggcaggcctaacacatgcaagtcgagcggaaacgagttatctgaaccttcgggaacgataacggcgtcgagcggcggacgggtgagtaatgcctaggaaattgccctgatgtgggggataaccattggaaacgatggctaataccgcatgatgcctacgggccaaagagggggaccttcgggcctctcgcgtcaggatatgcctaggtgggattagctagttggtgaggtaagggctcaccaaggcgacgatccctagctggtctgagaggatgatcagccacactggaactgagacacggtccagactcctacgggaggcagcagtggggaatattgcacaatgggcgcaagcctgatgcagccatgccgcgtgtgtgaagaaggccttcgggttgtaaagcactttcagcagtgaggaaggcgggttcgttaatagcgtgctnntntgacgttagctgcagaagaagcaccggctaactccgtgccagcagccgcggtaatacggagggtgcgagcgttaatcggaattactgggcgtaaagcgcatgcaggtggtttgttaagtcagatgtgaaagcccggggctcaacctcggaatagcatttganactggcagactagagtactgtagaggggggtagaatttcaggtgtagcggtgaaatgcgtagagatctgaaggaataccggtggcgaaggcggccccctggacagatactgacactcagatgcgaaagcgtggggagcaaacaggattagataccctggtagtccacgccgtaaacgatgtctacttggaggttgtggccttgagccgtggctttcggagctaacgcgttaagtagaccgcctggggagtacggtcgcaagattaaaactcaaatgaattgacgggggnccgcacaagcggtggagcatgtggtttaattcgatgcaacgcgaagaaccttacctactcttgacatccagagaactttnnagagatggattggtgccttcgggaactctgagacaggtgctgcatggctgtcgtcagctcgtgttgtgaaatgttgggttaagtcccgcaacgagcgcaacccttatccttgtttgccagcgagtaatgtcgggaactccagggagactgccggtgataaaccggaggaaggtggggacgacgtcaagtcatcatggcccttacgagtagggctacacacgtgctacaatggcgcatacagagggcggccaacttgcgaaagtgagcgaatcccaaaaagtgcgtcgtagtccggattggagtctgcaactcgactccatgaagtcggaatcgctagtaatcgtggatcagaatgccacggtgaatacgttcncgggccttgtacacaccgcccgtcacaccatgggagtgggctgcaaaagaagtaggtagtt

SEQ ID NO: 3502 - DNA, 1465 bp, Vibrio diazotrophicus
attgaacgctggcggcaggcctaacacatgcaagtcgagcggcagcacagagaaacttgtttctcgggtggcgagcggcggacgggtgagtaatgcctgggaaattgccctgatgtgggggataaccattggaaacgatggctaataccgcataatagcttcggctcaaagagggggaccttcgggcctctcgcgtcaggatatgcccaggtgggattagctagttggtgaggtaatggctcaccaaggcgacgatccctagctggtctgagaggatgatcagccacactggaactgagacacggtccagactcctacgggaggcagcagtggggaatattgcacaatgggcgcaagcctgatgcagccatgccgcgtgtgtgaagaaggccttcgggttgtaaagcactttcagtcgtgaggaaggtggtgttgttaatagcagcatcatttgacgttagcgacagaagaagcaccggctaactccgtgccagcagccgcggtaatacggagggtgcgagcgttaatcggaattactgggcgtaaagcgcatgcaggtggtttgttaagtcagatgtgaaagcccggggctcaacctcggaatagcatttgaaactggcaagctagagtactgtagaggggggtagaatttcaggtgtagcggtgaaatgcgtagagatctgaaggaataccggtggcgaaggcggccccctggacagatactgacactcagatgcgaaagcgtggggagcaaacaggattagataccctggtagtccacgccgtaaacgatgtctacttggaggttgtggccttgagccgtggctttcggagctaacgcgttaagtagaccgcctggggagtacggtcgcaagattaaaactcaaatgaattgacgggggcccgcacaagcggtggagcatgtggtttaattcgatgcaacgcgaagaaccttacctactcttgacatctacagaatcctgcggagacgcgggagtgccttcgggaactgtaagacaggtgctgcatggctgtcgtcagctcgtgttgtgaaatgttgggttaagtcccgcaacgagcgcaacccttatccttgtttgccagcgagtcatgtcgggaactccagggagactgccggtgataaaccggaggaaggtggggacgacgtcaagtcatcatggcccttacgagtagggctacacacgtgctacaatggcgcatacagagggcagcgaactagcgatagtaagcgaatcccaaaaagtgcgtcgtagtccggattggagtctgcaactcgactccatgaagtcggaatcgctagtaatcgtgaatcagaatgtcacggtgaatacgttcccgggccttgtacacaccgcccgtcacaccatgggagtgggctgcaaaagaagcaggtagtttaaccttcgggaggacgcttgccactttgtggttcatgactggggtg

SEQ ID NO: 3503 - DNA, 1475 bp, Vibrio europaeus
attgaacgctggcggcaggcctaacacatgcaagtcgagcggaaacgagttaactgaaccttcggggaacgttaacggcgtcgagcggcggacgggtgagtaatgcctaggaaattgccctgatgtgggggataaccattggaaacgatggctaataccgcataatgccttcgggccaaagagggggaccttcgggcctctcgcgtcaggatatgcctaggtgggattagctagttggtgaggtaagggctcaccaaggcgacgatccctagctggtctgagaggatgatcagccacactggaactgagacacggtccagactcctacgggaggcagcagtggggaatattgcacaatgggcgcaagcctgatgcagccatgccgcgtgtatgaagaaggccttcgggttgtaaagtactttcagcagtgaggaaggtggtgtagttaataactgcatcatttgacgttagctgcagaagaagcaccggctaactccgtgccagcagccgcggtaatacggagggtgcgagcgttaatcggaattactgggcgtaaagcgcatgcaggtggtttgttaagtcagatgtgaaagcccggggctcaacctcggaattgcatttgaaactggcagactagagtactgtagaggggggtagaatttcaggtgtagcggtgaaatgcgtagagatctgaaggaataccggtggcgaaggcggccccctggacagatactgacactcagatgcgaaagcgtggggagcaaacaggattagataccctggtagtccacgccgtaaacgatgtctacttggaggttgtggccttgagccgtggctttcggagctaacgcgttaagtagaccgcctggggagtacggtcgcaagattaaaactcaaatgaattgacgggggcccgcacaagcggtggagcatgtggtttaattcgatgcaacgcgaagaaccttacctactcttgacatccagagaagccagtagagatacaggtgtgccttcgggaactctgagacaggtgctgcatggctgtcgtcagctcgtgttgtgaaatgttgggttaagtcccgcaacgagcgcaacccttatccttgtttgccagcgagtaatgtcgggaactccagggagactgccggtgataaaccggaggaaggtggggacgacgtcaagtcatcatggcccttacgagtagggctacacacgtgctacaatggcgcatacagagggcagcaagctagcgatagtgagcgaatcccaaaaagtgcgtcgtagtccggattggagtctgcaactcgactccatgaagtcggaatcgctagtaatcgtggatcagaatgccacggtgaatacgttcccgggccttgtacacaccgcccgtcacaccatgggagtgggctgcaaaagaagtaggtagtttaaccttcgggagaacgcttaccactttgtggttcatgactggggtg

SEQ ID NO: 3504 - DNA, 1475 bp, Vibrio ezurae
attgaacgctggcggcaggcctaacacatgcaagtcgagcggaaacgagttatctgaaccttcggggaacgataacggcgtcgagcggcggacgggtgagtaatgcctgggaaattgccctgatgtgggggataactattggaaacgatagctaataccgcataacgtctacggaccaaagagggggaccttcgggcctctcgcttcaggatatgcccaggtgggattagctagttggtgaggtaatggctcaccaaggcgacgatccctagctggtctgagaggatgatcagccacactggaactgagacacggtccagactcctacgggaggcagcagtggggaatattgcacaatgggcgcaagcctgatgcagccatgccgcgtgtatgaagaaggccttcgggttgtaaagtactttcagtcgtgaggaaggcagtatagttaatagctgtattgtttgacgttagcgacagaagaagcaccggctaactccgtgccagcagccgcggtaatacggagggtgcgagcgttaatcggaattactgggcgtaaagcgcatgcaggtggtttgttaagtcagatgtgaaagcccggggctcaacctcggaaccgcatttgaaactggcaggctagagtactgtagaggggggtagaatttcaggtgtagcggtgaaatgcgtagagatctgaaggaataccagtggcgaaggcggccccctggacagatactgacactcagatgcgaaagcgtggggagcaaacaggattagataccctggtagtccacgccgtaaacgatgtctacttggaggttgtggccttgagccgtggctttcggagctaacgcgttaagtagaccgcctggggagtacggtcgcaagattaaaactcaaatgaattgacgggggcccgcacaagcggtggagcatgtggtttaattcgatgcaacgcgaagaaccttacctactcttgacatccagagaacttttcagagatgaattggtgccttcgggaactctgagacaggtgctgcatggctgtcgtcagctcgtgttgtgaaatgttgggttaagtcccgcaacgagcgcaacccttatccttgtttgccagcgagtaatgtcgggaactccagggagactgccggtgataaaccggaggaaggtggggacgacgtcaagtcatcatggcccttacgagtagggctacacacgtgctacaatggcgcatacagagggcggccaaccagcgatggtgagcgaatcccaaaaagtgcgtcgtagtccggattggagtctgcaactcgactccatgaagtcggaatcgctagtaatcgtagatcagaatgctacggtgaatacgttcccgggccttgtacacaccgcccgtcacaccatgggagtgggctgcaaaagaagtgggtagtttaaccttcgggaggacgctcaccactttgtggttcatgactggggtg

SEQ ID NO: 3505 - DNA, 1475 bp, Vibrio fluvialis
attgaacgctggcggcaggcctaacacatgcaagtcgagcggcagcgacaacattgaaccttcgggggatttgttgggcggcgagcggcggacgggtgagtaatgcctgggaaattgccctgatgtgggggataaccattggaaacgatggctaataccgcatgatagcttcggctcaaagagggggaccttcgggcctctcgcgtcaggatatgcccaggtgggattagctagttggtgaggtaagggctcaccaaggcgacgatccctagctggtctgagaggatgatcagccacactggaactgagacacggtccagactcctacgggaggcagcagtggggaatattgcacaatgggcgcaagcctgatgcagccatgccgcgtgtatgaagaaggccttcgggttgtaaagtactttcagcagtgaggaaggaggtatcgttaatagcggtatcttttgacgttagctgcagaagaagcaccggctaactccgtgccagcagccgcggtaatacggagggtgcgagcgttaatcggaattactgggcgtaaagcgcatgcaggtggtttgttaagtcagatgtgaaagcccggggctcaacctcggaattgcatttgaaactggcaggctagagtactgtagaggggggtagaatttcaggtgtagcggtgaaatgcgtagagatctgaaggaataccggtggcgaaggcggccccctggacagatactgacactcagatgcgaaagcgtggggagcaaacaggattagataccctggtagtccacgccgtaaacgatgtctacttggaggttgtggccttgagccgtggctttcggagctaacgcgttaagtagaccgcctggggagtacggtcgcaagattaaaactcaaatgaattgacgggggcccgcacaagcggtggagcatgtggtttaattcgatgcaacgcgaagaaccttacctactcttgacatccagagaacttagcagagatgctttggtgccttcgggaactctgagacaggtgctgcatggctgtcgtcagctcgtgttgtgaaatgttgggttaagtcccgcaacgagcgcaacccttatccttgtttgccagcgagtaatgtcgggaactccagggagactgccggtgataaaccggaggaaggtggggacgacgtcaagtcatcatggcccttacgagtagggctacacacgtgctacaatggcgcatacagagggcggccaacttgcgaaagtgagcgaatcccaaaaagtgcgtcgtagtccggattggagtctgcaactcgactccatgaagtcggaatcgctagtaatcgtgaatcagaatgtcacggtgaatacgttcccgggccttgtacacaccgcccgtcacaccatgggagtgggctgcaaaagaagcaggtagtttaaccttcgggaggacgcttgccactttgtggttcatgactggggtg

SEQ ID NO: 3506 - DNA, 1475 bp, Vibrio fortis
  misc_feature (164)..(164): n is a, c, g, or t
  misc_feature (166)..(166): n is a, c, g, or t
  misc_feature (993)..(993): n is a, c, g, or t
  misc_feature (1002)..(1003): n is a, c, g, or t
attgaacgctggcggcaggcctaacacatgcaagtcgagcggaaacgagttatctgaaccttcggggaacgataacggcgtcgagcggcggacgggtgagtaatgcctaggaaattgccttgatgtgggggataaccattggaaacgatggctaataccgcatnangcctacgggccaaagagggggaccttcgggcctctcgcgtcaagatatgcctaggtgggattagctagttggtgaggtaatggctcaccaaggcgacgatccctagctggtctgagaggatgatcagccacactggaactgagacacggtccagactcctacgggaggcagcagtggggaatattgcacaatgggcgcaagcctgatgcagccatgccgcgtgtatgaagaaggccttcgggttgtaaagtactttcagcagtgaggaagggggtgtcgttaatagcggcatctcttgacgttagctgcagaagaagcaccggctaactccgtgccagcagccgcggtaatacggagggtgcgagcgttaatcggaattactgggcgtaaagcgcatgcaggtggtttgttaagtcagatgtgaaagcccggggctcaacctcggaactgcatttgaaactggcaaactagagtactgtagaggggggtagaatttcaggtgtagcggtgaaatgcgtagagatctgaaggaataccagtggcgaaggcggccccctggacagatactgacactcagatgcgaaagcgtggggagcaaacaggattagataccctggtagtccacgccgtaaacgatgtctacttggaggttgtggccttgagccgtggctttcggagctaacgcgttaagtagaccgcctggggagtacggtcgcaagattaaaactcaaatgaattgacgggggcccgcacaagcggtggagcatgtggtttaattcgatgcaacgcgaagaaccttacctactcttgacatccagagaacttancagagatgnnttggtgccttcgggaactctgagacaggtgctgcatggctgtcgtcagctcgtgttgtgaaatgttgggttaagtcccgcaacgagcgcaacccttatccttgtttgccagcgagtaatgtcgggaactccagggagactgccggtgataaaccggaggaaggtggggacgacgtcaagtcatcatggcccttacgagtagggctacacacgtgctacaatggcgcatacagagggcggccaactcgcgagagtgagcgaatcccaaaaagtgcgtcgtagtccggattggagtctgcaactcgactccatgaagtcggaatcgctagtaatcgtagatcagaatgctacggtgaatacgttcccgggccttgtacacaccgcccgtcacaccatgggagtgggctgcaaaagaagtgggtagtttaaccttcgggaggacgctcaccactttgtggttcatgactggggtg

SEQ ID NO: 3507 - DNA, 1475 bp, Vibrio furnissii
attgaacgctggcggcaggcctaacacatgcaagtcgagcggcagcgacaacattgaaccttcgggggatttgttgggcggcgagcggcggacgggtgagtaatgcctgggaaattgccctgatgtgggggataaccattggaaacgatggctaataccgcatgatagcttcggctcaaagagggggaccttcgggcctctcgcgtcaggatatgcccaggtgggattagctagttggtgaggtaagggctcaccaaggcgacgatccctagctggtctgagaggatgatcagccacactggaactgagacacggtccagactcctacgggaggcagcagtggggaatattgcacaatgggcgcaagcctgatgcagccatgccgcgtgtatgaagaaggccttcgggttgtaaagtactttcagcagtgaggaaggggatatcgttaatagcggtattctttgacgttagctgcagaagaagcaccggctaactccgtgccagcagccgcggtaatacggagggtgcgagcgttaatcggaattactgggcgtaaagcgcatgcaggtggtttgttaagtcagatgtgaaagcccggggctcaacctcggaattgcatttgaaactggcaggctagagtactgtagaggggggtagaatttcaggtgtagcggtgaaatgcgtagagatctgaaggaataccggtggcgaaggcggccccctggacagatactgacactcagatgcgaaagcgtggggagcaaacaggattagataccctggtagtccacgccgtaaacgatgtctacttggaggttgtggccttgagccgtggctttcggagctaacgcgttaagtagaccgcctggggagtacggtcgcaagattaaaactcaaatgaattgacgggggcccgcacaagcggtggagcatgtggtttaattcgatgcaacgcgaagaaccttacctactcttgacatccagagaacttagcagagatgctttggtgccttcgggaactctgagacaggtgctgcatggctgtcgtcagctcgtgttgtgaaatgttgggttaagtcccgcaacgagcgcaacccttatccttgtttgccagcgagtaatgtcgggaactccagggagactgccggtgataaaccggaggaaggtggggacgacgtcaagtcatcatggcccttacgagtagggctacacacgtgctacaatggcgcatacagagggcggccaacttgcgaaagtgagcgaatcccaaaaagtgcgtcgtagtccggattggagtctgcaactcgactccatgaagtcggaatcgctagtaatcgtggatcagaatgccacggtgaatacgttcccgggccttgtacacaccgcccgtcacaccatgggagtgggctgcaaaagaagcaggtagtttaaccttcgggaggacgcttgccactttgtggttcatgactggggtg

SEQ ID NO: 3508 - DNA, 1476 bp, Vibrio galatheae
attgaacgctggcggcaggcctaacacatgcaagtcgagcggaaacgagttaactgaaccttcggggaacgttaacggcgtcgagcggcggacgggtgagtaatgcctgggaaattgccctgatgtgggggataaccattggaaacgatggctaataccgcataatagcttcggctcaaagagggggaccttcgggcctctcgcgtcaggatatgcccaggtgggattagctagttggtgaggtaagggctcaccaaggcgacgatccctagctggtctgagaggatgatcagccacactggaactgagacacggtccagactcctacgggaggcagcagtggggaatattgcacaatgggcgcaagcctgatgcagccatgccgcgtgtatgaagaaggccttcgggttgtaaagtactttcagcagtgaggaaggttcatgcgttaatagcgtatggatttgacgttagctgcagaagaagcaccggctaactccgtgccagcagccgcggtaatacggagggtgcgagcgttaatcggaattactgggcgtaaagcgcatgcaggtggtttgttaagtcagatgtgaaagcccggggctcaacctcggaattgcatttgaaactggcagactagagtactgtagaggggggtagaatttcaggtgtagcggtgaaatgcgtagagatctgaaggaataccggtggcgaaggcggccccctggacagatactgacactcagatgcgaaagcgtggggagcaaacaggattagataccctggtagtccacgccgtaaacgatgtctacttggaggttgtggccttgagccgtggctttcggagctaacgcgttaagtagaccgcctggggagtacggtcgcaagattaaaactcaaatgaattgacgggggcccgcacaagcggtggagcatgtggtttaattcgatgcaacgcgaagaaccttacctactcttgacatctacagaacttagcagagatgctttggtgccttcgggaactgtaagacaggtgctgcatggctgtcgtcagctcgtgttgtgaaatgttgggttaagtcccgcaacgagcgcaacccttatccttgtttgccagcacttcgggtgggaactccagggagactgccggtgataaaccggaggaaggtggggacgacgtcaagtcatcatggcccttacgagtagggctacacacgtgctacaatggcgcatacagagggcggccaacttgcgagagtgagcgaatcccaaaaagtgcgtcgtagtccggatcggagtctgcaactcgactccgtgaagtcggaatcgctagtaatcgtggatcagaatgccacggtgaatacgttcccgggccttgtacacaccgcccgtcacaccatgggagtgggctgcaaaagaagtgggtagtttaacctttcggggaggacgctcaccactttgtggttcatgactggggtg

SEQ ID NO: 3509 - DNA, 1402 bp, Vibrio gazogenes
  misc_feature (237)..(237): n is a, c, g, or t
  misc_feature (903)..(903): n is a, c, g, or t
  misc_feature (1376)..(1376): n is a, c, g, or t
attgaacgctggcggcaggcctaacacatgcaagtcgagcggtaacagaaagaagcttgcttctttgctgacgagcggcggacgggtgagtaaagcctgggaaattgccctgatgtgggggataaccattggaaacgatggctaataccgcataacgtctacggaccaaagagggggaccttcgggcctctcgcgtcgggatatgcccaggtgggattagctagttggtgaggtaanggctcaccaaggcgacgatctctagctggtctgagaggatgatcagccacactggaactgagacacggtccagactcctacgggaggcagcagtggggaatattgcacaatgggcgcaagcctgatgcagccatgccgcgtgtatgaagaaggccttcgggttgtaaagtactttcagcagtgaggaaggatatagctttaatagagttatattttgacgttagctgcagaagaagcaccggctaactccgtgccagcagccgcggtaatacggagggtgcgagcgttaatcggaattactgggcgtaaagcgcatgcaggtggttttttaagtcagatgtgaaagcccggggcttaaccccggagttgcatttgaaactgggaggctagagtactgtagaggggggtagaatttcaggtgtagcggtgaaatgcgtagagatctgaaggaataccggtggcgaaggcggccccctggacagatactgacactcagatgcgaaagcgtggggagcaaacaggattagataccctggtagtccacgccgtaaacgatgtctacttggaggttgtggccttgagccgtggctttcggagctaacgcgttaagtagaccgcctggggagtacggtcgcaagattaaaactcaaatgaattgacgggggnccgcacaagcggtggagcatgtggtttaattcgatgcaacgcgaagaaccttacctactcttgacatcctcagaagagactggagacagtcttgtgccttcgggaactgagagacaggtgctgcatggctgtcgtcagctcgtgttgtgaaatgttgggttaagtcccgcaacgagcgcaacccttatccttgattgccagcacttcgggtgggaactccagggagactgccggtgataaaccggaggaaggtggggacgacgtcaagtcatcatggcccttacgagtagggctacacacgtgctacaatggcgtatacagagggcggccaacttgcgaaagtgagcgaatcccaaaaagtacgtcgtagtccggattggagtctgcaactcgactccatgaagtcggaatcgctagtaatcgtggatcagaatgccacggtgaatacgttcccgggccttgtacacaccgcncgtcacaccatgggagtgggctgcaa

SEQ ID NO: 3510 - DNA, 1475 bp, Vibrio halioticoli
attgaacgctggcggcaggcctaacacatgcaagtcgagcggaaacgagttatctgaaccttcggggaacgataacggcgtcgagcggcggacgggtgagtaatgcctgggaaattgccctgatgtgggggataactattggaaacgatagctaataccgcataatgtctacggaccaaagagggggaccttcgggcctctcgcttcaggatatgcccaggtgggattagctagttggtgaggtaatggctcaccaaggcgacgatccctagctggtctgagaggatgatcagccacactggaactgagacacggtccagactcctacgggaggcagcagtggggaatattgcacaatgggcgcaagcctgatgcagccatgccgcgtgtatgaagaaggccttcgggttgtaaagtactttcagtcgtgaggaaggcgttgaagttaatagcttcatcgtttgacgttagcgacagaagaagcaccggctaactccgtgccagcagccgcggtaatacggagggtgcgagcgttaatcggaattactgggcgtaaagcgcatgcaggtggtttgttaagtcagatgtgaaagcccggggctcaacctcggaaccgcatttgaaactggcaggctagagtactgtagaggggggtagaatttcaggtgtagcggtgaaatgcgtagagatctgaaggaataccagtggcgaaggcggccccctggacagatactgacactcagatgcgaaagcgtggggagcaaacaggattagataccctggtagtccacgccgtaaacgatgtctacttggaggttgtggccttgagccgtggctttcggagctaacgcgttaagtagaccgcctggggagtacggtcgcaagattaaaactcaaatgaattgacgggggcccgcacaagcggtggagcatgtggtttaattcgatgcaacgcgaagaaccttacctactcttgacatccagagaacttagcagagatgctttggtgccttcgggaactctgagacaggtgctgcatggctgtcgtcagctcgtgttgtgaaatgttgggttaagtcccgcaacgagcgcaacccttatccttgtttgccagcacgtaatggtgggaactccagggagactgccggtgataaaccggaggaaggtggggacgacgtcaagtcatcatggcccttacgagtagggctacacacgtgctacaatggcgcatacagagggcagccaaccagcgatggtgagcgaatcccaaaaagtgcgtcgtagtccggattggagtctgcaactcgactccatgaagtcggaatcgctagtaatcgtagatcagaatgctacggtgaatacgttcccgggccttgtacacaccgcccgtcacaccatgggagtgggctgcaaaagaagtgggtagtttaaccttcgggaggacgctcaccactttgtggttcatgactggggtg

SEQ ID NO: 3511 - DNA, 1475 bp, Vibrio hangzhouensis
attgaacgctggcggcaggcctaacacatgcaagtcgagcggaaacgagttaactgacccttcgggtgacgttaacggcgtcgagcggcggacgggtgagtaatgcctgggaatatgccttgatgtgggggataaccattggaaacgatggctaataccgcataatctctacggagcaaagagggggaccttcgggcctctcgcgtcaagattagcccaggtgggattagctagttggtgaggtaaaggctcaccaaggcgacgatccctagctggtctgagaggatgatcagccacactggaactgagacacggtccagactcctacgggaggcagcagtggggaatattgcacaatgggcgcaagcctgatgcagccatgccgcgtgtgtgaagaaggccttcgggttgtaaagcactttcagtcgtgaggaaggtggtgtagttaatagctgcattatttgacgttagcgacagaagaagcaccggctaactccgtgccagcagccgcggtaatacggagggtgcgagcgttaatcggaattactgggcgtaaagcgcatgcaggtggttagttaagtcagatgtgaaagcccggggctcaacctcggaactgcatttgaaactggctgactagagtactgtagaggggggtagaatttcaggtgtagcggtgaaatgcgtagagatctgaaggaataccggtggcgaaggcggccccctggacagatactgacactcagatgcgaaagcgtggggagcaaacaggattagataccctggtagtccacgccgtaaacgatgtctacttggaggttgtggccttgagccgtggctttcggagctaacgcgttaagtagaccgcctggggagtacggtcgcaagattaaaactcaaatgaattgacgggggcccgcacaagcggtggagcatgtggtttaattcgatgcaacgcgaagaaccttacctactcttgacatccagagaacttagcagagatgctttggtgccttcgggaactctgagacaggtgctgcatggctgtcgtcagctcgtgttgtgaaatgttgggttaagtcccgcaacgagcgcaacccttatccttgtttgccagcgagtaatgtcgggaactccagggagactgccggtgataaaccggaggaaggtggggacgacgtcaagtcatcatggcccttacgagtagggctacacacgtgctacaatggcgcatacagagggctgccaacttgcgaaagtgagcgaatcccaaaaagtgcgtcgtagtccggattggagtctgcaactcgactccatgaagtcggaatcgctagtaatcgtggatcagaatgccacggtgaatacgttcccgggccttgtacacaccgcccgtcacaccatgggagtgggctgcaaaagaagtgggtagtttaaccttcgggaggacgctcaccactttgtggttcatgactggggtg

SEQ ID NO: 3512 - DNA, 1474 bp, Vibrio harveyi
attgaacgctggcggcaggcctaacacatgcaagtcgagcggaaacgagttatctgaaccttcggggaacgataacggcgtcgagcggcggacgggtgagtaatgcctaggaaattgccctgatgtgggggataaccattggaaacgatggctaataccgcataataccttcgggtcaaagagggggaccttcgggcctctcgcgtcaggatatgcctaggtgggattagctagttggtgaggtaatggctcaccaaggcgacgatccctagctggtctgagaggatgatcagccacactggaactgagacacggtccagactcctacgggaggcagcagtggggaatattgcacaatgggcgcaagcctgatgcagccatgccgcgtgtgtgaagaaggccttcgggttgtaaagcactttcagtcgtgaggaaggtagtgtagttaatagctgcattatttgacgttagcgacagaagaagcaccggctaactccgtgccagcagccgcggtaatacggagggtgcgagcgttaatcggaattactgggcgtaaagcgcatgcaggtggtttgttaagtcagatgtgaaagcccggggctcaacctcggaatagcatttgaaactggcagactagagtactgtagaggggggtagaatttcaggtgtagcggtgaaatgcgtagagatctgaaggaataccggtggcgaaggcggccccctggacagatactgacactcagatgcgaaagcgtggggagcaaacaggattagataccctggtagtccacgccgtaaacgatgtctacttggaggttgtggccttgagccgtggctttcggagctaacgcgttaagtagaccgcctggggagtacggtcgcaagattaaaactcaaatgaattgacgggggcccgcacaagcggtggagcatgtggtttaattcgatgcaacgcgaagaaccttacctactcttgacatccagagaactttccagagatggattggtgccttcgggaactctgagacaggtgctgcatggctgtcgtcagctcgtgttgtgaaatgttgggttaagtcccgcaacgagcgcaacccttatccttgtttgccagcacttcgggtgggaactccagggagactgccggtgataaaccggaggaaggtggggacgacgtcaagtcatcatggcccttacgagtagggctacacacgtgctacaatggcgcatacagagggcggccaacttgcgagagtgagcgaatcccaaaaagtgcgtcgtagtccggatcggagtctgcaactcgactccgtgaagtcggaatcgctagtaatcgtggatcagaatgccacggtgaatacgttcccgggccttgtacacaccgcccgtcacaccatgggagtgggctgcaaaagaagtaggtagtttaaccttcgggaggacgcttaccactttgtggttcatgactggggtg

SEQ ID NO: 3513 - DNA, 1468 bp, Vibrio hepatarius
  misc_feature (439)..(440): n is a, c, g, or t
attgaacgctggcggcaggcctaacacatgcaagtcgagcggaaacgacttaactgaaccttcggggaacgttaagggcgtcgagcggcggacgggtgagtaatgcctgggaaattgccctgatgtgggggataaccattggaaacgatggctaataccgcataatagcttcggctcaaagagggggaccttcgggcctctcgcgtcaggatatgcccaggtgggattagctagttggtgaggtaagggctcaccaaggcgacgatccctagctggtctgagaggatgatcagccacactggaactgagacacggtccagactcctacgggaggcagcagtggggaatattgcacaatgggcgcaagcctgatgcagccatgccgcgtgtatgaagaaggccttcgggttgtaaagtactttcagcagtgaggaaggtnnatgcgttaatagcgtattcatttgacgttagctgcagaagaagcaccggctaactccgtgccagcagccgcggtaatacggagggtgcgagcgttaatcggaattactgggcgtaaagcgcatgcaggtggtttgttaagtcagatgtgaaagcccggggctcaacctcggaattgcatttgaaactggcagactagagtactgtagaggggggtagaatttcaggtgtagcggtgaaatgcgtagagatctgaaggaataccggtggcgaaggcggccccctggacagatactgacactcagatgcgaaagcgtggggagcaaacaggattagataccctggtagtccacgccgtaaacgatgtctacttggaggttgtggccttgagccgtggctttcggagctaacgcgttaagtagaccgcctggggagtacggtcgcaagattaaaactcaaatgaattgacgggggcccgcacaagcggtggagcatgtggtttaattcgatgcaacgcgaagaaccttacctactcttgacatccagagaactttccagagatggattggtgccttcgggaactctgagacaggtgctgcatggctgtcgtcagctcgtgttgtgaaatgttgggttaagtcccgcaacgagcgcaacccttatccttgtttgccagcgagtaatgtcgggaactccagggagactgccggtgataaaccggaggaaggtggggacgacgtcaagtcatcatggcccttacgagtagggctacacacgtgctacaatggcgcatacagagggcggccaacttgcgaaagtgagcgaatcccaaaaagtgcgtcgtagtccggattggagtctgcaactcgactccatgaagtcggaatcgctagtaatcgtggatcagaatgccacggtgaatacgttcccgggccttgtacacaccgcccgtcacaccatgggagtgggctgcaaaagaagtaggtagtttaaccttcgggagaacgcttaccactttgtggttcatgac

SEQ ID NO: 3514 - DNA, 1365 bp, Vibrio ichthyoenteri
attgaacgctggcggcaggcctaacacatgcaagtcgagcggtaacatttcaaaagcttgcttttgaagatgacgagcggcggacgggtgagtaatgcctgggaatatgccttgatgtgggggataaccattggaaacgatggctaataccgcataatgcctacgggccaaagagggggatcttcggacctctcgcgtcaagattagcccaggtgggattagctagttggtgaggtaatggctcaccaaggcgacgatccctagctggtctgagaggatgatcagccacactggaactgagacacggtccagactcctacgggaggcagcagtggggaatattgcacaatgggcgcaagcctgatgcagccatgccgcgtgtgtgaagaaggccttcgggttgtaaagcactttcagtcgtgaggaaggtattagcgttaatagcgttattgtttgacgttagcgacagaagaagcaccggctaactccgtgccagcagccgcggtaatacggagggtgcgagcgttaatcggaattactgggcgtaaagcgcatgcaggtggtttgttaagtcagatgtgaaagcccggggctcaacctcggaattgcatttgaaactggcagactagagtactgtagaggggggtagaatttcaggtgtagcggtgaaatgcgtagagatctgaaggaataccggtggcgaaggcggccccctggacagatactgacactcagatgcgaaagcgtggggagcaaacaggattagataccctggtagtccacgccgtaaacgatgtctacttggaggttgtggccttgagccgtggctttcggagctaacgcgttaagtagaccgcctggggagtacggtcgcaagattaaaactcaaatgaattgacgggggcccgcacaagcggtggagcatgtggtttaattcgatgcaacgcgaagaaccttacctactcttgacatccagagaagccagcggagacgcaggtgtgccttcgggaactctgagacaggtgctgcatggctgtcgtcagctcgtgttgtgaaatgttgggttaagtcccgcaacgagcgcaacccttatccttgtttgccagcgagtaatgtcgggaactccagggagactgccggtgataaaccggaggaaggtggggacgacgtcaagtcatcatggcccttacgagtagggctacacacgtgctacaatggcgcatacagagggctgccaaccagcgatggtgagcgaatcccaaaaagtgcgtcgtagtccggattggagtctgcaactcgactccatgaagtcggaatcgctagtaatcgtggatcagaatgccacggtgaatacgttcccgggcc

SEQ ID NO: 3515 - DNA, 1433 bp, Vibrio inusitatus
  misc_feature (4)..(4): n is a, c, g, or t
  misc_feature (972)..(972): n is a, c, g, or t
  misc_feature (983)..(983): n is a, c, g, or t
  misc_feature (1221)..(1221): n is a, c, g, or t
ctancacatgcaagtcgagcggaaacgacaacattgacccttcgggtgatttattgggcgtcgagcggcggacgggtgagtaatgcctgggaaattgccctgatgtgggggataactattggaaacgatagctaataccgcataacgtctacggaccaaagagggggaccttcgggcctctcgcttcaggatatgcccaggtgggattagctagttggtgaggtaatggctcaccaaggcgacgatccctagctggtctgagaggatgatcagccacactggaactgagacacggtccagactcctacgggaggcagcagtggggaatattgcacaatgggcgaaagcctgatgcagccatgccgcgtgtatgaagaaggccttcgggttgtaaagtactttcagtcgtgaggaagatatataagttaatagcttatgtgtttgacgttagcgacagaagaagcaccggctaactccgtgccagcagccgcggtaatacggagggtgcgagcgttaatcggaattactgggcgtaaagcgcatgcaggtggtttgttaagtcagatgtgaaagcccggggctcaacctcggaaccgcatttgaaactggcaggctagagtactgtagaggggggtagaatttcaggtgtagcggtgaaatgcgtagagatctgaaggaataccagtggcgaaggcggccccctggacagatactgacactcagatgcgaaagcgtggggagcaaacaggattagataccctggtagtccacgccgtaaacgatgtctacttggaggttgtggccttgagccgtggctttcggagctaacgcgttaagtagaccgcctggggagtacggtcgcaagattaaaactcaaatgaattgacgggggcccgcacaagcggtggagcatgtggtttaattcgatgcaacgcgaagaaccttacctactcttgacatccagagaacttnccagagatggnttggtgccttcgggaactctgagacaggtgctgcatggctgtcgtcagctcgtgttgtgaaatgttgggttaagtcccgcaacgagcgcaacccttatccttgtttgccagcacgtaatggtgggaactccagggagactgccggtgataaaccggaggaaggtggggacgacgtcaagtcatcatggcccttacgagtagggctacacacgtgctacaatggcgcatacagagggcngccaaccagcgatggtgagcgaatcccaaaaagtgcgtcgtagtccggattggagtctgcaactcgactccatgaagtcggaatcgctagtaatcgtgaatcagaatgtcacggtgaatacgttcccgggccttgtacacaccgcccgtcacaccatgggagtgggctgcaaaagaagtgggtagtttaaccttcgggaggacgctcaccac

SEQ ID NO: 3516 - DNA, 1471 bp, Vibrio ishigakensis
attgaacgctggcggcaggcctaacacatgcaagtcgagcggaaacgacttaactgaaccttcggggaacgttaagggcgtcgagcggcggacgggtgagtaatgcctgggaatatgccttgatgtgggggataaccattggaaacgatggctaataccgcataatctcttcggagcaaagagggggaccttcgggcctctcgcgtcaagattagcccaggtgggattagctagttggtgaggtaatggctcaccaagcgacgatccctagctggtctgagaggatgatcagcacactggaactgagacacggtccagactcctacgggaggcagcagtggggaatattgcacaatgggcgcaagcctgatgcagccatgccgcgtgtgtgaagaaggccttcgggttgtaaagcactttcagtcgtgaggaaggtagtgtagttaatagctgcattatttgacgttagcgacagaagaagcaccggctaactccgtgccagcagccgcggtaatacggagggtgcgagcgttaatcggaattactgggcgtaaagcgcatgcaggtggtttgttaagtcagatgtgaaagcccggggctcaacctcggaaccgcatttgaaactggcaggctagagtactgtagagggggtagaatttcaggtgtagcggtgaaatgcgtagagatctgaaggaataccggtggcgaaggcggccccctggacagatactgacactcagatgcgaaagcgtggggagcaaacaggattagataccctggtagtccacgccgtaaacgatgtctacttggaggttgtggccttgagccgtggctttcggagctaacgcgttaagtagaccgcctggggagtacggtcgcaagattaaaactcaaatgaattgacgggggcccgcacaagcggtggagcatgtggtttaattcgatgcaacgcgaagaaccttacctactcttgacatccagagaacttttcagagatggattggtgccttcgggaactctgagacaggtgctgcatggctgtcgtcagctcgtgttgtgaaatgttgggttaagtcccgcaacgagcgcaacccttatccttgtttgccagcacgtaatggtgggaactccagggagactgccggtgataaaccggaggaaggtggggacgacgtcaagtcatcatggcccttacgagtagggctacacacgtgctacaatggcgcatacagagggcggccaactcgcgagagtgagcgaatcccaaaaagtgcgtcgtagtccggattggagtctgcaactcgactccatgaagtcggaatcgctagtaatcgtagatcagaatgctacggtgaatacgttccgggccttgtacacaccgcccgtcacaccatgggagtgggctgcaaaagaagtgggtagtttaaccttcgggaggacgctcaccactttgtggttcatgactggggtg

SEQ ID NO: 3517 - DNA, 1400 bp, Vibrio jasicida
tgcaagtcgagcggaaacgacttatctgaaccttcggggaacgttaagggcgtcgagcggcggacgggtgagtaatgcctaggaaattgccctgatgtgggggataaccattggaaacgatggctaataccgcatgatgcctacgggccaaagagggggaccttcgggcctctcgcgtcaggatatgcctaggtgggattagctagttggtgaggtaatggctcaccaaggcgacgatccctagctggtctgagaggatgatcagccacactggaactgagacacggtccagactcctacgggaggcagcagtggggaatattgcacaatgggcgcaagcctgatgcagccatgccgcgtgtgtgaagaaggccttcgggttgtaaagcactttcagtcgtgaggaaggtggtgtagttaatagctgcattacttgacgttagcgacagaagaagcaccggctaactccgtgccagcagccgcggtaatacggagggtgcgagcgttaatcggaattactgggcgtaaagcgcatgcaggtggtttgttaagtcagatgtgaaagcccggggctcaacctcggaatagcatttgaaactggcagactagagtactgtagaggggggtagaatttcaggtgtagcggtgaaatgcgtagagatctgaaggaataccggtggcgaaggcggccccctggacagatactgacactcagatgcgaaagcgtggggagcaaacaggattagataccctggtagtccacgccgtaaacgatgtctacttggaggttgtggccttgagccgtggctttcggagctaacgcgttaagtagaccgcctggggagtacggtcgcaagattaaaactcaaatgaattgacgggggcccgcacaagcggtggagcatgtggtttaattcgatgcaacgcgaagaaccttacctactcttgacatccagagaactttccagagatggattggtgccttcgggaactctgagacaggtgctgcatggctgtcgtcagctcgtgttgtgaaatgttgggttaagtcccgcaacgagcgcaacccttatccttgtttgccagcgagtaatgtcgggaactccagggagactgccggtgataaaccggaggaaggtggggacgacgtcaagtcatcatggcccttacgagtagggctacacacgtgctacaatggcgcatacagagggcagcaagctagcgatagtgagcgaatcccaaaaagtgcgtcgtagtccggattggagtctgcaactcgactccatgaagtcggaatcgctagtaatcgtggatcagaatgccacggtgaatacgttcccgggccttgtacacaccgcccgtcacaccatgggagtgggctgcaaaagaagtaggtagtt

SEQ ID NO: 3518 - DNA, 1464 bp, Vibrio kanaloae
  misc_feature (153)..(153): n is a, c, g, or t
  misc_feature (443)..(444): n is a, c, g, or t
  misc_feature (448)..(448): n is a, c, g, or t
  misc_feature (630)..(630): n is a, c, g, or t
gcggcaggcctaacacatgcaagtcgagcggaaacgacactaacaatccttcgggtgcgttaatgggcgtcgagcggcggacgggtgagtaatgcctaggaaattgccttgatgtgggggataaccattggaaacgatggctaataccgcatnatgcctacgggccaaagagggggaccttcgggcctctcgcgtcaagatatgcctaggtgggattagctagttggtgaggtaatggctcaccaaggcgacgatccctagctggtctgagaggatgatcagccacactggaactgagacacggtccagactcctacgggaggcagcagtggggaatattgcacaatgggcgcaagcctgatgcagccatgccgcgtgtatgaagaaggccttcgggttgtaaagtactttcagttgtgaggaagggggtgttgttaatagcnncatntcttgacgttagcaacagaagaagcaccggctaactccgtgccagcagccgcggtaatacggagggtgcgagcgttaatcggaattactgggcgtaaagcgcatgcaggtggttcattaagtcagatgtgaaagcccggggctcaacctcggaactgcatttgaaactggtgaactagagtnctgtagaggggggtagaatttcaggtgtagcggtgaaatgcgtagagatctgaaggaataccagtggcgaaggcggccccctggacagatactgacactcagatgcgaaagcgtggggagcaaacaggattagataccctggtagtccacgccgtaaacgatgtctacttggaggttgtggccttgagccgtggctttcggagctaacgcgttaagtagaccgcctggggagtacggtcgcaagattaaaactcaaatgaattgacgggggcccgcacaagcggtggagcatgtggtttaattcgatgcaacgcgaagaaccttacctactcttgacatccagagaatccagcggagacgcaggagtgccttcgggagctctgagacaggtgctgcatggctgtcgtcagctcgtgttgtgaaatgttgggttaagtcccgcaacgagcgcaacccttatccttgtttgccagcgagtcatgtcgggaactccagggagactgccggtgataaaccggaggaaggtggggacgacgtcaagtcatcatggcccttacgagtagggctacacacgtgctacaatggcgcatacagagggcagcgagccagcgatggtaagcgaatcccaaaaagtgcgtcgtagtccggattggagtctgcaactcgactccatgaagtcggaatcgctagtaatcgtgaatcagaatgtcacggtgaatacgttcccgggccttgtacacaccgcccgtcacaccatgggagtgggctgcaaaagaagtaggtagtctaaccttcgggaggacgcttaccactttgtggttcatgactggggtg

SEQ ID NO: 3519 - DNA, 1477 bp, Vibrio lentus
attgaacgctggcggcaggcctaacacatgcaagtcgagcggaaacgacactatctgaatcttcggatgctttagatgggcgtcgagcggcggacgggtgagtaatgcctaggaaattgccttgatgtgggggataaccattggaaacgatggctaataccgcataatgcctacgggccaaagagggggatcttcggacctctcgcgtcaagatatgcctaggtgggattagctagttggtgaggtaatggctcaccaaggcgacgatccctagctggtctgagaggatgatcagccacactggaactgagacacggtccagactcctacgggaggcagcagtggggaatattgcacaatgggcgaaagcctgatgcagccatgccgcgtgtatgaagaaggccttcgggttgtaaagtactttcagttgtgaggaagggtgtgtagttaatatctgcgcatcttgacgttagcaacagaagaagcaccggctaactccgtgccagcagccgcggtaatacggagggtgcgagcgttaatcggaattactgggcgtaaagcgcatgcaggtggttcattaagtcagatgtgaaagcccggggctcaacctcggaactgcatttgaaactggtgaactagagtgctgtagaggggggtagaatttcaggtgtagcggtgaaatgcgtagagatctgaaggaataccagtggcgaaggcggccccctggacagacactgacactcagatgcgaaagcgtggggagcaaacaggattagataccctggtagtccacgccgtaaacgatgtctacttggaggttgtggccttgagccgtggctttcggagctaacgcgttaagtagaccgcctggggagtacggtcgcaagattaaaactcaaatgaattgacgggggcccgcacaagcggtggagcatgtggtttaattcgatgcaacgcgaagaaccttacctactcttgacatccagagaagccagcggagacgcaggtgtgccttcgggagctctgagacaggtgctgcatggctgtcgtcagctcgtgttgtgaaatgttgggttaagtcccgcaacgagcgcaacccttatccttgtttgccagcgagtaatgtcgggaactccagggagactgccggtgataaaccggaggaaggtggggacgacgtcaagtcatcatggcccttacgagtagggctacacacgtgctacaatggcgcatacagagggcagcaagctagcgatagtgagcgaatcccaaaaagtgcgtcgtagtccggattggagtctgcaactcgactccatgaagtcggaatcgctagtaatcgtgaatcagaatgtcacggtgaatacgttcccgggccttgtacacaccgcccgtcacaccatgggagtgggctgcaaaagaagtgggtagtttaaccttcgggaggacgctcaccactttgtggttcatgactggggtg

SEQ ID NO: 3520 - DNA, 1464 bp, Vibrio mangrovi
attgaacgctggcggcaggcctaacacatgcaagtcgagcggaaacgagagaaagcttgctttctcggcgtcgagcggcggacgggtgagtaaagcctgggaaattgccctgatgtgggggataaccattggaaacgatggctaataccgcataatgtctacggaccaaagagggggaccttcgggcctctcgcgtcaggatatgcccaggtgggattagctagttggtgaggtaaaggctcaccaaggcgacgatccctagctggtctgagaggatgatcagccacactggaactgagacacggtccagactcctacgggaggcagcagtggggaatattgcacaatgggcgcaagcctgatgcagccatgccgcgtgtatgaagaaggccttcgggttgtaaagtactttcagcagtgaggaaggggatagttttaatagagctgttctttgacgttagctgcagaagaagcaccggctaactccgtgccagcagccgcggtaatacggagggtgcgagcgttaatcggaattactgggcgtaaagcgcatgcaggtggtctgttaagtcagatgtgaaagcccggggcttaacctcggagttgcatttgaaactggcaggctagagtactgtagaggggggtagaatttcaggtgtagcggtgaaatgcgtagagatctgaaggaataccggtggcgaaggcggccccctggacagatactgacactcagatgcgaaagcgtggggagcaaacaggattagataccctggtagtccacgccgtaaacgatgtctacttggaggttgtgacccagagtcgtggctttcggagctaacgcgttaagtagaccgcctggggagtacggtcgcaagattaaaactcaaatgaattgacgggggcccgcacaagcggtggagcatgtggtttaattcgatgcaacgcgaagaaccttacctactcttgacatccagagaagccggaagagattctggtgtgccttcgggagctctgagacaggtgctgcatggctgtcgtcagctcgtgttgtgaaatgttgggttaagtcccgcaacgagcgcaacccttatccttgattgccagcggttaggccgggaacttcagggagactgccggtgataaaccggaggaaggtggggacgacgtcaagtcatcatggcccttacgagtagggctacacacgtgctacaatggcgtatacagagggcagctaactcgcgagagcatgcgaatcccaaaaagtacgtcgtagtccggattggagtctgcaactcgactccatgaagtcggaatcgctagtaatcgtagatcagaatgctacggtgaatacgttcccgggccttgtacacaccgcccgtcacaccatgggagtgggctgcaaaagaagcaggtagtttaaccttcgggaggacgcttgccactttgtggttcatgactggggtg

SEQ ID NO: 3521 - DNA, 1474 bp, Vibrio maritimus
  misc_feature (167)..(168): n is a, c, g, or t
  misc_feature (175)..(176): n is a, c, g, or t
  misc_feature (426)..(427): n is a, c, g, or t
  misc_feature (439)..(439): n is a, c, g, or t
  misc_feature (444)..(444): n is a, c, g, or t
  misc_feature (454)..(454): n is a, c, g, or t
  misc_feature (459)..(459): n is a, c, g, or t
  misc_feature (473)..(474): n is a, c, g, or t
  misc_feature (1240)..(1240): n is a, c, g, or t
attgaacgctggcggcaggcctaacacatgcaagtcgagcggaaacgagttaactgaaccttcggggaacgttaacggcgtcgagcggcggacgggtgagtaatgcctgggaaattgccctgatgtgggggataaccattggaaacgatggctaataccgcataatnncttcggnncaaagagggggaccttcgggcctctcgcgtcaggatatgcccaggtgggattagctagttggtgaggtaatggctcaccaaggcgacgatccctagctggtctgagaggatgatcagccacactggaactgagacacggtccagactcctacgggaggcagcagtggggaatattgcacaatgggcgcaagcctgatgcagccatgccgcgtgtgtgaagaaggccttcgggttgtaaagcactttcagnngtgaggaaggtngtgtngttaatagcngcatnatttgacgttagcnncagaagaagcaccggctaactccgtgccagcagccgcggtaatacggagggtgcgagcgttaatcggaattactgggcgtaaagcgcatgcaggtggttagttaagtcagatgtgaaagcccggggctcaacctcggaactgcatttgaaactggctgactagagtactgtagaggggggtagaatttcaggtgtagcggtgaaatgcgtagagatctgaaggaataccggtggcgaaggcggccccctggacagatactgacactcagatgcgaaagcgtggggagcaaacaggattagataccctggtagtccacgccgtaaacgatgtctacttggaggttgtggccttgagccgtggctttcggagctaacgcgttaagtagaccgcctggggagtacggtcgcaagattaaaactcaaatgaattgacgggggcccgcacaagcggtggagcatgtggtttaattcgatgcaacgcgaagaaccttacctactcttgacatccagagaacttagcagagatgctttggtgccttcgggaactctgagacaggtgctgcatggctgtcgtcagctcgtgttgtgaaatgttgggttaagtcccgcaacgagcgcaacccttatccttgtttgccagcacttcgggtgggaactccagggagactgccggtgataaaccggaggaaggtggggacgacgtcaagtcatcatggcccttacgagtagggctacacacgtgctacaatggcgcatacagagggcngccaacttgcgaaagtgagcgaatcccaaaaagtgcgtcgtagtccggattggagtctgcaactcgactccatgaagtcggaatcgctagtaatcgtggatcagaatgccacggtgaatacgttcccgggccttgtacacaccgcccgtcacaccatgggagtgggctgcaaaagaagtgggtagtttaaccttcgggaggacgctcaccactttgtggttcatgactggggtg

SEQ ID NO: 3522 - DNA, 1443 bp, Vibrio mediterranei
  misc_feature (460)..(460): n is a, c, g, or t
  misc_feature (913)..(913): n is a, c, g, or t
  misc_feature (1431)..(1431): n is a, c, g, or t
attgaacgctggcggcaggcctaacacatgcaagtcgagcggaaacgagttaactgacccttcgggtaacgttaacggcgtcgagcggcggacgggtgagtaatgcctgggaaattgccctgatgtgggggataaccattggaaacgatggctaataccgcataatgccttcgggccaaagagggggaccttcgggcctctcgcgtcaggatatgcccaggtgggattagctagttggtgaggtaatggctcaccaaggcgacgatccctagctggtctgagaggatgatcagccacactggaactgagacacggtccagactcctacgggaggcagcagtggggaatattgcacaatgggcgcgagcctgatgcagccatgccgcgtgtgtgaagaaggccttcgggttgtaaagcactttcagcagtgaggaaggcgggtacgttaatagcgtgctcntttgacgttagctgcagaagaagcaccggctaactccgtgccagcagccgcggtaatacggagggtgcgagcgttaatcggaattactgggcgtaaagcgcatgcaggtggttcgttaagtcagatgtgaaagcccggggctcaacctcggaactgcatttgaaactggcggactagagtactgtagaggggggtagaatttcaggtgtagcggtgaaatgcgtagagatctgaaggaataccggtggcgaaggcggccccctggacagatactgacactcagatgcgaaagcgtggggagcaaacaggattagataccctggtagtccacgccgtaaacgatgtctacttggaggttgtggccttgagccgtggctttcggagctaacgcgttaagtagaccgcctggggagtacggtcgcaagattaaaactcaaatgaattgacgggggnccgcacaagcggtggagcatgtggtttaattcgatgcaacgcgaagaaccttacctactcttgacatccagagaagccagcggagacgcaggtgtgccttcgggagctctgagacaggtgctgcatggctgtcgtcagctcgtgttgtgaaatgttgggttaagtcccgcaacgagcgcaacccttatccttgtttgccagcgagtaatgtcgggaactccagggagactgccggtgataaaccggaggaaggtggggacgacgtcaagtcatcatggcccttacgagtagggctacacacgtgctacaatggcgcatacagagggcagccaacttgcgaaagtgagcgaatcccaaaaagtgcgtcgtagtccggattggagtctgcaactcgactccatgaagtcggaatcgctagtaatcgtagatcagaatgctacggtgaatacgttcccgggccttgtacacaccgcccgtcacaccatgggagtgggctgcaaaagaagtgggtagtttanccttcgggagga

SEQ ID NO: 3523 - DNA, 1391 bp, Vibrio metoecus
attgaacgctggcggcaggcctaacacatgcaagtcgagcggcagcacagaggaacttgttccttgggtggcgagcggcggacgggtgagtaatgcctgggaaattgcccggtagagggggataaccattggaaacgatggctaataccgcataacctcgtaaagagcaaagcagggggacctttcgggccttgcgctaccgggatatgcccaggtagggattagctagttggtgaggtaagggctcaccaaggcgacgatccctagctggtctgagaggatgatcagccacactggaactgagacacggtccagactcctacgggaggcagcagtggggaatattgctcaatgggcgcaagcctgatgcagccatgccgcgtgtatgaagaaggccttcgggttgtaaagtactttcagtagggaggaaggtggttaagctaatatcttaatcatttgacgttacctacagaagaagcaccggctaactccgtgccagcagccgcggtaatacggagggtgcaagcgttaatcggaattactgggcgtaaagcgcatgcaggtggtttgttaagtcagatgtgaaagccctgggctcaacctaggaatcgcatttgaaactgacaagctagagtactgtagaggggggtaggaatttcaggtgtagcggtgaaatagcgtagagatctgaaggaataccggtggcgaaggcggccccctggacagatactgacactcagatgcgaaagcgtggggagcaaacaggattagataccctggtagtccacgccgtaaacgatgtctacttggaggttgtgacctagagtcgtggctttcggagctaacgcgttaagtagaccgcctggggagtacggtcgcaagaattaaaactcaaatgaattggaccgggggcccgcacaagcggtggagcatgtggtttaattcgatgcaacgcgaagaaccttacctactcttgacatccagagaatctagcggagacgctggagtgccttcgggaactctgagacaggtgctgcatggctgtcgtcagctcgtgttgtgaaatgttgggttaagtcccgcaacgagcgcaacccttatccttgtttgccagcacgtaatggtgggaactccagggagactgccggtgataaaccggaggaaggtggggacgacgtcaagtcatcatggcccttacgagtagggctacacacgtgctacaatggcgtatacagagggcagcgataccgcgaggtggagcgaatctcacaaagtacgtcgtagtccggattggagtctgcaactcgactccatgaagtcggaatcgctagtaatcgcaaatcagaatgttgcggtgaatacgttcccgggccttgtacacaccgcccgtc

SEQ ID NO: 3524 - DNA, 1482 bp, Vibrio metschnikovii
attgaacgctggcggcaggcctaacacatgcaagtcgagcggtaacaggaaggaagcttgctttctttgctgacgagcggcggacgggtgagtaatgcctgggaaattgccctgatgtgggggataaccattggaaacgatggctaataccgcatgatgcccttgtttataatgaacagggaccaaagagggggaccttcgggcctctcgcgtcaggatatgcccaggtgggattagctagttggtgaggtaatggctcaccaaggcgacgatccctagctggtctgagaggatgatcagccacactggaactgagacacggtccagactcctacgggaggcagcagtggggaatattgcacaatgggcgcaagcctgatgcagccatgccgcgtgtatgaagaaggccttcgggttgtaaagtactttcagtcgtgaggaagggggtatcgttaatagcggtattctttgacgttagcgacagaagaagcaccggctaactccgtgccagcagccgcggtaatacggagggtgcgagcgttaatcggaattactgggcgtaaagcgcatgcaggtggtttgttaagtcagatgtgaaagcccggggctcaacctcggagttgcatttgaaactggcaggctagagtactgtagaggggggtagaatttcaggtgtagcggtgaaatgcgtagagatctgaaggaataccggtggcgaaggcggccccctggacagatactgacactcagatgcgaaagcgtggggagcaaacaggattagataccctggtagtccacgctgtaaacgatgtctacttggaggttgtggccttgagccgtggctttcggagctaacgcgttaagtagaccgcctggggagtacggtcgcaagattaaaactcaaatgaattgacgggggcccgcacaagcggtggagcatgtggtttaattcgatgcaacgcgaagaaccttacctactcttgacatctacaggatcctgcggagacgcgggagtgccttcgggaactgtaagacaggtgctgcatggctgtcgtcagctcgtgttgtgaaatgttgggttaagtcccgcaacgagcgcaacccttatccttgtttgccagcgagtaatgtcgggaactccagggagactgccggtgataaaccggaggaaggtggggacgacgtcaagtcatcatggcccttacgagtagggctacacacgtgctacaatggcgcatacagagggcggcgagctagcgatagtgagcgaatcccaaaaagtgcgtcgtagtccggattggagtctgcaactcgactccatgaagtcggaatcgctagtaatcgtggatcagaatgccacggtgaatacgttcccgggccttgtacacaccgcccgtcacaccatgggagtgggctgcaaaagaagcaggtagtttaaccttcgggaggacgcttgccactttgtggttcatgactggggtg

SEQ ID NO: 3525 - DNA, 1465 bp, Vibrio mimicus
attgaacgctggcggcaggcctaacacatgcaagtcgagcggcagcacagaggaacttgttccttgggtggcgagcggcggacgggtgagtaatgcctgggaaattgcccggtagagggggataaccattggaaacgatggctaataccgcataacctcgtaagagcaaagcaggggaccttcgggccttgtgctaccggatatgcccaggtgggattagctagttggtgaggtaagggctcaccaaggcgacgatccctagctggtctgagaggatgatcagccacactggaactgagacacggtccagactcctacgggaggcagcagtggggaatattgcacaatgggcgcaagcctgatgcagccatgccgcgtgtatgaagaaggccttcgggttgtaaagtactttcagtagggaggaaggtggttaagttaataccttaatcatttgacgttacctacagaagaagcaccggctaactccgtgccagcagccgcggtaatacggagggtgcaagcgttaatcggaattactgggcgtaaagcgcatgcaggtggtttgttaagtcagatgtgaaagccctgggctcaacctaggaattgcatttgaaactgacaagctagagtactgtagaggggggtagaatttcaggtgtagcggtgaaatgcgtagagatctgaaggaataccggtggcgaaggcggccccctggacagatactgacactcagatgcgaaagcgtggggagcaaacaggattagataccctggtagtccacgccgtaaacgatgtctacttggaggttgtgacctagagtcgtggctttcggagctaacgcgttaagtagaccgcctggggagtacggtcgcaagattaaaactcaaatgaattgacgggggcccgcacaagcggtggagcatgtggtttaattcgatgcaacgcgaagaaccttacctactcttgacatccagagaatctagcggagacgctggagtgccttcgggaactctgagacaggtgctgcatggctgtcgtcagctcgtgttgtgaaatgttgggttaagtcccgcaacgagcgcaacccttatccttgtttgccagcacgtaatggtgggaactccagggagactgccggtgataaaccggaggaaggtggggacgacgtcaagtcatcatggcccttacgagtagggctacacacgtgctacaatggcgtatacagagggcagcgataccgcgaggtggagcgaatctcacaaagtacgtcgtagtccggattggagtctgcaactcgactccatgaagtcggaatcgctagtaatcgcaaatcagaatgttgcggtgaatacgttcccgggccttgtacacaccgcccgtcacaccatgggagtgggctgcaaaagaagcaggtagtttaaccttcgggaggacgcttgccactttgtggttcatgactggggtg

SEQ ID NO: 3526 - DNA, 1475 bp, Vibrio natriegens
attgaacgctggcggcaggcctaacacatgcaagtcgagcggaaacgagttaactgaaccttcgggggacgttaacggcgtcgagcggcggacgggtgagtaatgcctaggaaattgccctgatgtgggggataaccattggaaacgatggctaataccgcatgatgcctacgggccaaagagggggaccttcgggcctctcgcgtcaggatatgcctaggtgggattagctagttggtgaggtaagggctcaccaaggcgacgatccctagctggtctgagaggatgatcagccacactggaactgagacacggtccagactcctacgggaggcagcagtggggaatattgcacaatgggcgcaagcctgatgcagccatgccgcgtgtgtgaagaaggccttcgggttgtaaagcactttcagtcgtgaggaaggtagtgtagttaatagctgcattatttgacgttagcgacagaagaagcaccggctaactccgtgccagcagccgcggtaatacggagggtgcgagcgttaatcggaattactgggcgtaaagcgcatgcaggtggtttgttaagtcagatgtgaaagcccggggctcaacctcggaatagcatttgaaactggcagactagagtactgtagaggggggtagaatttcaggtgtagcggtgaaatgcgtagagatctgaaggaataccggtggcgaaggcggccccctggacagatactgacactcagatgcgaaagcgtggggagcaaacaggattagataccctggtagtccacgccgtaaacgatgtctacttggaggttgtggccttgagccgtggctttcggagctaacgcgttaagtagaccgcctggggagtacggtcgcaagattaaaactcaaatgaattgacgggggcccgcacaagcggtggagcatgtggtttaattcgatgcaacgcgaagaaccttacctactcttgacatccagagaacttttcagagatgaattggtgccttcgggaactctgagacaggtgctgcatggctgtcgtcagctcgtgttgtgaaatgttgggttaagtcccgcaacgagcgcaacccttatccttgtttgccagcgagtaatgtcgggaactccagggagactgccggtgataaaccggaggaaggtggggacgacgtcaagtcatcatggcccttacgagtagggctacacacgtgctacaatggcgcatacagagggcggccaacttgcgaaagtgagcgaatcccaaaaagtgcgtcgtagtccggattggagtctgcaactcgactccatgaagtcggaatcgctagtaatcgtggatcagaatgccacggtgaatacgttcccgggccttgtacacaccgcccgtcacaccatgggagtgggctgcaaaagaagtaggtagtttaaccttcggggggacgcttaccactttgtggttcatgactggggtg

SEQ ID NO: 3527 - DNA, 1491 bp, Vibrio navarrensis
attgaacgctggcggcaggcctaacacatgcaagtcgagcggcagcgacaacattgaaccttcgggggatttgttgggcggcgagcggcggacgggtgagtaatgcctgggaaattgccctgatgtgggggataaccattggaaacgatggctaataccgcatgatagcttcggctcaaagagggggaccttcgggcctctcgcgtcaggatatgcccaggtgggattagctagttggtgaggtaagggctcaccaaggcgacgatccctagctggtctgagaggatgatcagccacactggaactgagacacggtccagactcctacgggaggcagcagtggggaatattgcacaatgggcgcaagcctgatgcagccatgccgcgtgtgtgaagaaggccttcgggttgtaaagcactttcagttgtgaggaaggtggtgttgtgaatagcagcatcatttgacgttagcaacagaagaagcaccggctaactccgtgccagcagccgcggtaatacggagggtgcgagcgttaatcggaattactgggcgtaaagcgcatgcaggtggtttgttaagtcagatgtgaaagccccgggctcaacctgggaattgcatttgaaactggcaaactagagtactgtagaggggggtagaatttcaggtgtagcggtgaaatgcgtagagatctgaaggaataccggtggcgaaggcggccccctggacagatactgacactcagatgcgaaagcgtggggagcaaacaggattagataccctggtagtccacgccgtaaacgatgtctacttggaggttgtggccttgagccgtggctttcggagctaacgcgttaagtagaccgcctggggagtacggtcgcaagattaaaactcaaatgaattgacgggggcccgcacaagcggtggagcatgtggtttaattcgatgcaacgcgaagaaccttacctactcttgacatccagagaagccagcggagacgcaggtgtgccttcgggagctctgagacaggtgctgcatggctgtcgtcagctcgtgttgtgaaatgttgggttaagtcccgcaacgagcgcaacccttatccttagttgccagcgagtaatgtcgggaactccagggagactgccggtgataaaccggaggaaggtggggacgacgtcaagtcatcatggcccttacgagtagggctacacacgtgctacaatggcgcatacagagggcggccaacttgcgaaagtgagcgaatcccaaaaagtgcgtcgtagtccggattggagtctgcaactcgactccatgaagtcggaatcgctagtaatcgtggatcagaatgccacggtgaatacgttcccgggccttgtacacaccgcccgtcacaccatgggagtgggctgcaccagaagtggttagtttaaccccttttctttcgagattaggggaggacgatcaccacggtgtggttcatgactggggtg

SEQ ID NO: 3528 - DNA, 1416 bp, Vibrio neocaledonicus
  misc_feature (913)..(913): n is a, c, g, or t
atgcaagtcgagcggaaacgagttatctgaaccttcggggaacgataacggcgtcgagcggcggacgggtgagtaatgcctaggaaattgccctgatgtgggggataaccattggaaacgatggctaataccgcatgatgcctacgggccaaagagggggaccttcgggcctctcgcgtcaggatatgcctaggtgggattagctagttggtgaggtaagggctcaccaaggcgacgatccctagctggtctgagaggatgatcagccacactggaactgagacacggtccagactcctacgggaggcagcagtggggaatattgcacaatgggcgcaagcctgatgcagccatgccgcgtgtgtgaagaaggcccttcgggttgtaaagcactttcagtcgtgaggaaggtggtgtagttaatagctgcattatttgacgttagcgacagaagaagcaccggctaacctccgtgccagcagccgcggtaatacggagggtgcgagcgttaatcggaattactgggcgtaaagcgcatgcaggtggtttgttaagtcagatgtgaaagcccggggctcaacctcggaatagcatttgaaactggcagactagagtactgtagaggggggtagaatttcaggtgtagcggtgaaatgcgtagagatctgaaggaataccggtggcgaaggcggccccctggacagatactgacactcagatgcgaaagcgtggggagcaaacaggattagataccctggtagtccacgccgtaaacgatgtctacttggaggttgtggcttgagccgtggctttcggagctaacgcgttaagtagaccgcctggggagtacggtcgcaagattaaaactcaaatgaattgacgggggcccgcacaagcggtggagcatgtggtntaattcgatgcaacgcgaagaaccttacctactcttgacatccagagaactttccagagatggattggtgccttcgggaactctgagacaggtgctgcatggctgtcgtcagctcgtgttgtgaaatgttgggttaagtcccgcaacgagcgcaacccttatccttgtttgccagcgagtaatgtcgggaactccagggagactgccggtgataaaccggaggaaggtggggacgacgtcaagtcatcatggcccttacgagtagggctacacacgtgctacaatggcgcatacagagggcggccaacttgcgaaagtgagcgaatcccaaaaagtgcgtcgtagtccggattggagtctgcaactcgactccatgaagtcggaatcgctagtaatcgtggatcagaatgccacggtgaatacgttcccgggccttgtacacaccgcccgtcacaccatgggagtgggctgcaaaagaagtaggtagttaacttcgggggacg

SEQ ID NO: 3529 - DNA, 1468 bp, Vibrio neptunius
  misc_feature (1241)..(1241): n is a, c, g, or t
  misc_feature (1351)..(1351): n is a, c, g, or t
attgaacgctggcggcaggcctaacacatgcaagtcgagcggaaacgagttatcaaagccttcgggtggagataacggcgtcgagcggcggacgggtgagtaatgcctgggaaattgccctgatgtgggggataaccattggaaacgatggctaataccgcataatagcttcggctcaaagagggggaccttcgggcctctcgcgtcaggatatgcccaggtgggattagctagttggtgaggtaatggctcaccaaggcgacgatccctagctggtctgagaggatgatcagccacactggaactgagacacggtccagactcctacgggaggcagcagtggggaatattgcacaatgggcgcaagcctgatgcagccatgccgcgtgtatgaagaaggccttcgggttgtaaagtactttcagcagtgaggaaggtggtgtcgttaatagcggcatcatttgacgttagctgcagaagaagcaccggctaactccgtgccagcagccgcggtaatacggagggtgcgagcgttaatcggaattactgggcgtaaagcgcatgcaggtggtttgttaagtcagatgtgaaagcccggggctcaacctcggaattgcatttgaaactggcagactagagtactgtagaggggggtagaatttcaggtgtagcggtgaaatgcgtagagatctgaaggaataccggtggcgaaggcggccccctggacagatactgacactcagatgcgaaagcgtggggagcaaacaggattagataccctggtagtccacgccgtaaacgatgtctacttggaggttgtggccttgagccgtggctttcggagctaacgcgttaagtagaccgcctggggagtacggtcgcaagattaaaactcaaatgaattgacgggggcccgcacaagcggtggagcatgtggtttaattcgatgcaacgcgaagaaccttacctactcttgacatcctcagaagagactggagacagtcttgtgccttcgggaactgagagacaggtgctgcatggctgtcgtcagctcgtgttgtgaaatgttgggttaagtcccgcaacgagcgcaacccttatccttgtttgccagcgagtaatgtcgggaactccagggagactgccggtgataaaccggaggaaggtggggacgacgtcaagtcatcatggcccttacgagtagggctacacacgtgctacaatggcgcatacagagggcngccaacttgcgaaagtgagcgaatcccaaaaagtgcgtcgtagtccggattggagtctgcaactcgactccatgaagtcggaatcgctagtaatcgtggatcagaatgcnacggtgaatacgttcccgggccttgtacacaccgcccgtcacaccatgggagtgggctgcaaaagaagtgggtagtttaaccttcggggggacgctcaccactttgtggttcatgac

SEQ ID NO: 3530 - DNA, 1475 bp, Vibrio nereis
attgaacgctggcggcaggcctaacacatgcaagtcgagcggaaacgagttatctgaaccttcggggaacgataacggcgtcgagcggcggacgggtgagtaatgcctgggaaattgccctgatgtgggggataaccattggaaacgatggctaataccgcataatagcttcggctcaaagagggggaccttcgggcctctcgcgtcaggatatgcccaggtgggattagctagttggtgaggtaaaggctcaccaaggcaacgatccctagctggtctgagaggatgatcagccacactggaactgagacacggtccagactcctacgggaggcagcagtggggaatattgcacaatgggcgcaagcctgatgcagccatgccgcgtgtatgaagaaggccttcgggttgtaaagtactttcagcagtgaggaagggggatgcgttaatagcgtattcgtttgacgttagctgcagaagaagcaccggctaactccgtgccagcagccgcggtaatacggagggtgcgagcgttaatcggaattactgggcgtaaagcgcatgcaggtggtgtgttaagtcagatgtgaaagcccggggctcaacctcggaatagcatttgaaactggcacactagagtactgtagaggggggtagaatttcaggtgtagcggtgaaatgcgtagagatctgaaggaataccagtggcgaaggcggccccctggacagatactgacactcagatgcgaaagcgtggggagcaaacaggattagataccctggtagtccacgccgtaaacgatgtctacttggaggttgtggccttgagccgtggctttcggagctaacgcgttaagtagaccgcctggggagtacggtcgcaagattaaaactcaaatgaattgacgggggcccgcacaagcggtggagcatgtggtttaattcgatgcaacgcgaagaaccttacctactcttgacatccagagaactttccagagatggattggtgccttcgggaactctgagacaggtgctgcatggctgtcgtcagctcgtgttgtgaaatgttgggttaagtcccgcaacgagcgcaacccttatccttgtttgccagcgagtaatgtcgggaactccagggagactgccggtgataaaccggaggaaggtggggacgacgtcaagtcatcatggcccttacgagtagggctacacacgtgctacaatggcgcatacagagggcggccaacttgcgaaagtgagcgaatcccaaaaagtgcgtcgtagtccggattggagtctgcaactcgactccatgaagtcggaatcgctagtaatcgtggatcagaatgccacggtgaatacgttcccgggccttgtacacaccgcccgtcacaccatgggagtgggctgcaaaagaagtaggtagtttaaccttcggggggacgcttaccactttgtggttcatgactggggtg

SEQ ID NO: 3531 - DNA, 1474 bp, Vibrio nigripulchritudo
attgaacgctggcggcaggcctaacacatgcaagtcgagcggaaacgagttgtctgaaccttcggggaacgacaacggcgtcgagcggcggacgggtgagtaatgcctgggaaattgccctgatgtgggggataaccattggaaacgatggctaataccgcataatagcttcggctcaaagagggggaccttcgggcctctcgcgtcaggatatgcccaggtgggattagctagttggtgaggtaaaggctcaccaaggcgacgatccctagctggtctgagaggatgatcagccacactggaactgagacacggtccagactcctacgggaggcagcagtggggaatattgcacaatgggcgcaagcctgatgcagccatgccgcgtgtgtgaagaaggccttcgggttgtaaagcactttcagcagtgaggaagggtgtgtatttaatagatgcacattttgacgttagctgcagaagaagcaccggctaactccgtgccagcagccgcggtaatacggagggtgcgagcgttaatcggaattactgggcgtaaagcgcatgcaggtggtttgttaagtcagatgtgaaagcccggggctcaacctcggaactgcatttgaaactggcaggctagagtactgtagaggggggtagaatttcaggtgtagcggtgaaatgcgtagagatctgaaggaataccggtggcgaaggcggccccctggacagatactgacactcagatgcgaaagcgtggggagcaaacaggattagataccctggtagtccacgccgtaaacgatgtctacttggaggttgtggccttgagccgtggctttcggagctaacgcgttaagtagaccgcctggggagtacggtcgcaagattaaaactcaaatgaattgacgggggcccgcacaagcggtggagcatgtggtttaattcgatgcaacgcgaagaaccttacctactcttgacatccatagaacttagcagagatgctttggtgccttcgggaactatgagacaggtgctgcatggctgtcgtcagctcgtgttgtgaaatgttgggttaagtcccgcaacgagcgcaacccttatccttgtttgccagcacttcgggtgggaactccagggagactgccggtgataaaccggaggaaggtggggacgacgtcaagtcatcatggcccttacgagtagggctacacacgtgctacaatggcgcatacagagggcggccaacttgcgagagtgagcgaatcccaaaaagtgcgtcgtagtccggattggagtctgcaactcgactccatgaagtcggaatcgctagtaatcgtggatcagaatgccacggtgaatacgttcccgggccttgtacacaccgcccgtcacaccatgggagtgggctgcaaaagaagcaggtagtttaaccttcgggaggacgcttgccactttgtggttcatgactggggtg

SEQ ID NO: 3532 - DNA, 1481 bp, Vibrio ordalii
attgaacgctggcggcaggcctaacacatgcaagtcgagcggcagcacagaggaacttgttccttgggtggcgagcggcggacgggtgagtaatgcctaggaaattgccctgatgtgggggataaccattggaaacgatggctaataccgcatgatgcctacgggccaaagagggggaccttcgggcctctcgcgtcaggatatgcctaggtgggattagctagttggtgaggtaatggctcaccaaggcgacgatccctagctggtctgagaggatgatcagccacactggaactgagacacggtccagactcctacgggaggcagcagtggggaatattgcacaatgggcgcaagcctgatgcagccatgccgcgtgtatgaagaaggccttcgggttgtaaagtactttcagtcgtgaggaaggtggtgttgttaatagcagcatcatttgacgttagcgacagaagaagcaccggctaactccgtgccagcagccgcggtaatacggagggtgcgagcgttaatcggaattactgggcgtaaagcgcatgcaggtggtggattaagtcagatgtgaaagcccggggctcaacctcggaaccgcatttgaaactggttcactagagtactgtagaggggggtagaatttcaggtgtagcggtgaaatgcgtagagatctgaaggaataccggtggcgaaggcggccccctggacagatactgacactcagatgcgaaagcgtggggagcaaacaggattagataccctggtagtccacgccgtaaacgatgtctacttggaggttgtggccttgagccgtggctttcggagctaacgcgttaagtagaccgcctggggagtacggtcgcaagattaaaactcaaatgaattgacgggggcccgcacaagcggtggagcatgtggtttaattcgatgcaacgcgaagaaccttacctactcttgacatctacagaatcctgcggagacgcgggagtgccttcgggaactgtaagacaggtgctgcatggctgtcgtcagctcgtgttgtgaaatgttgggttaagtcccgcaacgagcgcaacccttatccttgtttgccagcgagtaatgtcgggaactccagggagactgccggtgataaaccggaggaaggtggggacgacgtcaagtcatcatggcccttacgagtagggctacacacgtgctacaatggcgcatacagagggcagcaagctagcgatagtgagcgaatcccaaaaagtgcgtcgtagtccggattggagtctgcaactcgactccatgaagtcggaatcgctagtaatcgtagatcagaatgctacggtgaatacgttcccgggccttgtacacaccgcccgtcacaccatgggagtgggctgcaccagaagtggttagtttaaccgcactttcttcggagagagtggaggacgatcaccacggtgtggttcatgactggggtg

SEQ ID NO: 3533 - DNA, 1475 bp, Vibrio orientalis
attgaacgctggcggcaggcctaacacatgcaagtcgagcggaaacgacttaactgaaccttcgggggacgttaagggcgtcgagcggcggacgggtgagtaatgcctgggaaattgccctgatgtgggggataaccattggaaacgatggctaataccgcataatgccttcgggccaaagagggggaccttcgggcctctcgcgtcaggatatgcccaggtgggattagctagttggtgaggtaagggctcaccaaggcgacgatccctagctggtctgagaggatgatcagccacactggaactgagacacggtccagactcctacgggaggcagcagtggggaatattgcacaatgggcgcaagcctgatgcagccatgccgcgtgtatgaagaaggccttcgggttgtaaagtactttcagcagtgaggaaggtggagtcgttaatagcggcctcacttgacgttagctgcagaagaagcaccggctaactccgtgccagcagccgcggtaatacggagggtgcgagcgttaatcggaattactgggcgtaaagcgcatgcaggtggttcattaagtcagatgtgaaagcccggggctcaacctcggaattgcatttgaaactggtggactagagtactgtagaggggggtagaatttcaggtgtagcggtgaaatgcgtagagatctgaaggaataccggtggcgaaggcggccccctggacagatactgacactcagatgcgaaagcgtggggagcaaacaggattagataccctggtagtccacgccgtaaacgatgtctacttggaggttgtggccttgagccgtggctttcggagctaacgcgttaagtagaccgcctggggagtacggtcgcaagattaaaactcaaatgaattgacgggggcccgcacaagcggtggagcatgtggtttaattcgatgcaacgcgaagaaccttacctactcttgacatccagagaagccggaagagattctggtgtgccttcgggaactctgagacaggtgctgcatggctgtcgtcagctcgtgttgtgaaatgttgggttaagtcccgcaacgagcgcaacccttatccttgtttgccagcgagtaatgtcgggaactccagggagactgccggtgataaaccggaggaaggtggggacgacgtcaagtcatcatggcccttacgagtagggctacacacgtgctacaatggcgcatacagagggcagccaacttgcgaaagtgagcgaatcccaaaaagtgcgtcgtagtccggattggagtctgcaactcgactccatgaagtcggaatcgctagtaatcgtggatcagaatgccacggtgaatacgttcccgggccttgtacacaccgcccgtcacaccatgggagtgggctgcaaaagaagtaggtagtttaaccttcgggagaacgcttaccactttgtggttcatgactggggtg

SEQ ID NO: 3534 - DNA, 1475 bp, Vibrio owensii
attgaacgctggcggcaggcctaacacatgcaagtcgagcggaaacgagttatctgaaccttcggggaacgataacggcgtcgagcggcggacgggtgagtaatgcctaggaaattgccctgatgtgggggataaccattggaaacgatggctaataccgcataatgcctacgggccaaagagggggaccttcgggcctctcgcgtcaggatatgcctaggtgggattagctagttggtgaggtaatggctcaccaaggcgacgatccctagctggtctgagaggatgatcagccacactggaactgagacacggtccagactcctacgggaggcagcagtggggaatattgcacaatgggcgcaagcctgatgcagccatgccgcgtgtgtgaagaaggccttcgggttgtaaagcactttcagtcgtgaggaaggtagtgtagttaatagctgcattatttgacgttagcgacagaagaagcaccggctaactccgtgccagcagccgcggtaatacggagggtgcgagcgttaatcggaattactgggcgtaaagcgcatgcaggtggtttgttaagtcagatgtgaaagcccggggctcaacctcggaatagcatttgaaactggcagactagagtactgtagaggggggtagaatttcaggtgtagcggtgaaatgcgtagagatctgaaggaataccggtggcgaaggcggccccctggacagatactgacactcagatgcgaaagcgtggggagcaaacaggattagataccctggtagtccacgccgtaaacgatgtctacttggaggttgtggccttgagccgtggctttcggagctaacgcgttaagtagaccgcctggggagtacggtcgcaagattaaaactcaaatgaattgacgggggcccgcacaagcggtggagcatgtggtttaattcgatgcaacgcgaagaaccttacctactcttgacatccagagaactttccagagatggattggtgccttcgggaactctgagacaggtgctgcatggctgtcgtcagctcgtgttgtgaaatgttgggttaagtcccgcaacgagcgcaacccttatccttgtttgccagcgagtaatgtcgggaactccagggagactgccggtgataaaccggaggaaggtggggacgacgtcaagtcatcatggcccttacgagtagggctacacacgtgctacaatggcgcatacagagggcagcaagctagcgatagtgagcgaatcccaaaaagtgcgtcgtagtccggattggagtctgcaactcgactccatgaagtcggaatcgctagtaatcgtggatcagaatgccacggtgaatacgttcccgggccttgtacacaccgcccgtcacaccatgggagtgggctgcaaaagaagtaggtagtttaaccttcgggaggacgcttaccactttgtggttcatgactggggtg

SEQ ID NO: 3535 - DNA, 1410 bp, Vibrio palustris
tgcaagtcgagcggtaacatttctagcttgctagaagatgacgagcggcggacgggtgagtaatgcctgggaaattgccttgatgtgggggataaccattggaaacgatggctaataccgcataatgccttcgggccaaagagggggaccttcgggcctctcgcgtcaagatatgcccaggtgagattagcttgttggtgaggtaagagctcaccaaggcgacgatctctagctggtctgagaggatgatcagccacattgggactgagacacggcccaaactcctacgggaggcagcagtggggaatattgcacaatgggcgcaagcctgatgcagccatgccgcgtgtatgaagaaggccttcgggttgtaaagtactttcagcagtgaggaaggggtaacgttgaatagacgttattcttgacgttagctgcagaagaagcaccggctaactccgtgccagcagccgcggtaatacggagggtgcgagcgttaatcggaattactgggcgtaaagcgcatgcaggtggtctgttaagtcagatgtgaaagcccgaggcttaacctcggaattgcatttgaaactggcaggctagagtactgtagaggggggtagaatttcaggtgtagcggtgaaatgcggagagatctgaaggaataccagtggcgaaggcggccccctggacagatactgacactcagatgcgaaagcgtggggagcaaacaggattagataccctggtagtccacgccgtaaacgatgtctacttgaaggttgtggccttgagccgtggctttcggagctaacgcgttaagtagaccgcctggggagtacggtcgcaagattaaaactcaaatgaattgacgggggcccgcacaagcggtggagcatgtggtttaattcgatgcaacgcgaagaaccttacctactcttgacatccagagaactttccaaagatggattagtgccttccggaactctgagacaggggctgcatggctgtcgtcacttcgtgttgggaaatgttgggtttagttcccctaccgagcccaccccttatccttgattgccagcacctaatggggggaacttccgggagaattgcccgtggtaaacccgaaggaaaggtggggacgacgtcaagtcatcatggcccttacgagtagggctacacacgtgctacaatggcgcatacagagggttgccaacttgcgaaagtgagcgaatcccaaaaagtgcgtcgtagtccggattggagtctgcaactcgactccatgaagtcggaatcgctagtaatcgtgaatcagaatgtcacggtgaatacgttcccgggccttgtacacaccgcccgtcacaccatgggagtgggctgcaaaagaagcaggtagtttaaccttcggggggacgc

SEQ ID NO: 3536 - DNA, 1422 bp, Vibrio panuliri
caagtcgagcggcagcgacataaacaatccttcgggtgcgtttatgggcggcgagcggcggacgggtgagtaatgcctaggaaattgccctgatgtgggggataaccattggaaacgatggctaataccgcataatgcctacgggccaaagagggggaccttcgggcctctcgcgtcaggatatgcctaggtgggattagctagttggtgaggtaagggctcaccaaggcgacgatccctagctggtctgagaggatgatcagccacactggaactgagacacggtccagactcctacgggaggcagcagtggggaatattgcacaatgggcgcaagcctgatgcagccatgccgcgtgtatgaagaaggccttcgggttgtaaagtactttcagtcgtgaggaaggttcatgcgttaatagcgtatggatttgacgttagcgacagaagaagcaccggctaactccgtgccagcagccgcggtaatacggagggtgcgagcgttaatcggaattactgggcgtaaagcgcatgcaggtggttagttaagtcagatgtgaaagcccggggctcaacctcggaattgcatttgaaactggctgactagagtactgtagaggggggtagaatttcaggtgtagcggtgaaatgcgtagagatctgaaggaataccggtggcgaaggcggccccctggacagatactgacactcagatgcgaaagcgtggggagcaaacaggattagataccctggtagtccacgccgtaaacgatgtctacttggaggttgtggccttgagccgtggctttcggagctaacgcgttaagtagaccgcctggggagtacggtcgcaagattaaaactcaaatgaattgacgggggcccgcacaagcggtggagcatgtggtttaattcgatgcaacgcgaagaaccttacctactcttgacatccatagaacttagcagagatgctttggtgccttcgggaactatgagacaggtgctgcatggctgtcgtcagctcgtgttgtgaaatgttgggttaagtcccgcaacgagcgcaacccttatccttgtttgccagcgagtaatgtcgggaactccagggagactgccggtgataaaccggaggaaggtggggacgacgtcaagtcatcatggcccttacgagtagggctacacacgtgctacaatggcgtatacagagggcagccaacttgcgaaagtgagcgaatcccaaaaagtacgtcgtagtccggattggagtctgcaactcgactccatgaagtcggaatcgctagtaatcgtggatcagaatgccacggtgaatacgttcccgggccttgtacacaccgcccgtcacaccatgggagtgggctgcaaaagaagtgggtagtttaaccttcgggaggacgctcacca

SEQ ID NO: 3537 - DNA, 1475 bp, Vibrio parahaemolyticus
attgaacgctggcggcaggcctaacacatgcaagtcgagcggaaacgagttatctgaaccttcgggggacgataacggcgtcgagcggcggacgggtgagtaatgcctaggaaattgccctgatgtgggggataaccattggaaacgatggctaataccgcatgatgcctacgggccaaagagggggaccttcgggcctctcgcgtcaggatatgcctaggtgggattagctagttggtgaggtaagggctcaccaaggcgacgatccctagctggtctgagaggatgatcagccacactggaactgagacacggtccagactcctacgggaggcagcagtggggaatattgcacaatgggcgcaagcctgatgcagccatgccgcgtgtgtgaagaaggccttcgggttgtaaagcactttcagtcgtgaggaaggtggtagtgttaatagcactatcatttgacgttagcgacagaagaagcaccggctaactccgtgccagcagccgcggtaatacggagggtgcgagcgttaatcggaattactgggcgtaaagcgcatgcaggtggtttgttaagtcagatgtgaaagcccggggctcaacctcggaattgcatttgaaactggcagactagagtactgtagaggggggtagaatttcaggtgtagcggtgaaatgcgtagagatctgaaggaataccggtggcgaaggcggccccctggacagatactgacactcagatgcgaaagcgtggggagcaaacaggattagataccctggtagtccacgccgtaaacgatgtctacttggaggttgtggccttgagccgtggctttcggagctaacgcgttaagtagaccgcctggggagtacggtcgcaagattaaaactcaaatgaattgacgggggcccgcacaagcggtggagcatgtggtttaattcgatgcaacgcgaagaaccttacctactcttgacatccagagaactttccagagatggattggtgccttcgggaactctgagacaggtgctgcatggctgtcgtcagctcgtgttgtgaaatgttgggttaagtcccgcaacgagcgcaacccttatccttgtttgccagcgagtaatgtcgggaactccagggagactgccggtgataaaccggaggaaggtggggacgacgtcaagtcatcatggcccttacgagtagggctacacacgtgctacaatggcgcatacagagggcagccaacttgcgaaagtgagcgaatcccaaaaagtgcgtcgtagtccggattggagtctgcaactcgactccatgaagtcggaatcgctagtaatcgtggatcagaatgccacggtgaatacgttcccgggccttgtacacaccgcccgtcacaccatgggagtgggctgcaaaagaagtaggtagtttaaccttcggggggacgcttaccactttgtggttcatgactggggtg

SEQ ID NO: 3538 - DNA, 1452 bp, Vibrio pectenicida
  misc_feature (178)..(178): n is a, c, g, or t
  misc_feature (918)..(918): n is a, c, g, or t
attgaacgctggcggcaggcctaacacatgcaagtcgagcggaaacgagaagtagcttgctacttcggcgtcgagcggcggacgggtgagtaatgcctgggaaattgccttgatgtgggggataaccattggaaacgatggctaataccgcataatgcttttgtttgtaatgaacggnagccaaagagggggaccttcgggcctctcgcgtcaagatatgcccaggtgggattagctagttggtgaggtaatggctcaccaaggcgacgatccctagctggtctgagaggatgatcagccacactggaactgagacacggtccagactcctacgggaggcagcagtggggaatattgcacaatgggcgcaagcctgatgcagccatgccacgtgtatgaagaaggccttcgggttgtaaagtactttcagcagtgaggaaggtggatgtgttaatagcgcattcatttgacgttagctgcagaagaagcaccggctaactccgtgccagcagccgcggtaatacggagggtgcgagcgttaatcggaattactgggcgtaaagcgcatgcaggtggatgattaagtcagatgtgaaagcccggggctcaacctcggaatagcatttgaaactggtcatctagagtactgtagaggggggtagaatttcaggtgtagcggtgaaatgcgtagagatctgaaggaataccagtggcgaaggcggccccctggacagatactgacactcagatgcgaaagcgtggggagcaaacaggattagataccctggtagtccacgccgtaaacgatgtctacttggaggttgtggccttgagccgtggctttcggagctaacgcgttaagtagaccgcctggggagtacggtcgcaagattaaaactcaaatgaattgacgggggnccgcacaagcggtggagcatgtggtttaattcgatgcaacgcgaagaaccttacctactcttgacatccagagaagccagcggagacgcaggtgtgccttcgggagctctgagacaggtgctgcatggctgtcgtcagctcgtgttgtgaaatgttgggttaagtcccgcaacgagcgcaacccttatccttgtttgccagcgagtaatgtcgggaactccagggagactgccggtgataaaccggaggaaggtggggacgacgtcaagtcatcatggcccttacgagtagggctacacacgtgctacaatggcgcatacagagggcggccaacttgcaaaagtgagcgaatcccaaaaagtgcgtcgtagtccggattggagtctgcaactcgactccatgaagtcggaatcgctagtaatcgtggatcagaatgccacggtgaatacgttcccgggccttgtacacaccgcccgtcacaccatgggagtgggctgcaaaagaagtaggtagtttaacttcgggagaacgctt

SEQ ID NO: 3539 - DNA, 1462 bp, Vibrio penaeicida
attgaacgctggcggcaggcctaacacatgcaagtcgagcggaaacgagaatagcttgctattcggcgtcgagcggcggacgggtgagtaatgcctgggaaattgccctgatgtgggggataaccattggaaacgatggctaataccgcataacgccttcgggccaaagagggggaccttcgggcctctcgcgtcaggatatgcccaggtgggattagctagttggtgaggtaaaggctcaccaaggcgacgatccctagctggtctgagaggatgatcagccacactggaactgagacacggtccagactcctacgggaggcagcagtggggaatattgcacaatgggcgcaagcctgatgcagccatgccgcgtgtatgaagaaggccttcgggttgtaaagtactttcagcagtgaggaagggtgtgaagttaatagcttcatatcttgacgttagctgcagaagaagcaccggctaactccgtgccagcagccgcggtaatacggagggtgcgagcgttaatcggaattactgggcgtaaagcgcatgcaggtggtttgttaagtcagatgtgaaagcccggggctcaacctcggaaccgcatttgaaactggcaggctagagtactgtagaggggggtagaatttcaggtgtagcggtgaaatgcgtagagatctgaaggaataccagtggcgaaggcggccccctggacagatactgacactcagatgcgaaagcgtggggagcaaacaggattagataccctggtagtccacgccgtaaacgatgtctacttggaggttgtggccttgagccgtggctttcggagctaacgcgttaagtagaccgcctggggagtacggtcgcaagattaaaactcaaatgaattgacgggggcccgcacaagcggtggagcatgtggtttaattcgatgcaacgcgaagaaccttacctactcttgacatccacagaacttagcagagatgctttggtgccttcgggaactctgagacaggtgctgcatggctgtcgtcagctcgtgttgtgaaatgttgggttaagtcccgcaacgagcgcaacccttatccttgtttgccagcacgtaatggtgggaactccagggagactgccggtgataaaccggaggaaggtggggacgacgtcaagtcatcatggcccttacgagtagggctacacacgtgctacaatggcgcatacagagggcggccaaccagcgatggtgagcgaatcccaaaaagtgcgtcgtagtccggattggagtctgcaactcgactccatgaagtcggaatcgctagtaatcgtggatcagaatgccacggtgaatacgttcccgggccttgtacacaccgcccgtcacaccatgggagtgggctgcaaaagaagtaggtagtttaaccttcgggggacgcttaccactttgtggttcatgactggggtg

SEQ ID NO: 3540 - DNA, 1477 bp, Vibrio ponticus
attgaacgctggcggcaggcctaacacatgcaagtcgagcggcagcgacaacattgaaccttcgggggatttgttgggcggcgagcggcggacgggtgagtaatgcctaggaaattgccctgatgtgggggataaccattggaaacgatggctaataccgcatgatgcctacgggccaaagagggggaccttcgggcctctcgcgtcaggatatgcctaggtgggattagctagttggtgaggtaagggctcaccaaggcgacgatccctagctggtctgagaggatgatcagccacactggaactgagacacggtccagactcctacgggaggcagcagtggggaatattgcacaatgggcgcaagcctgatgcagccatgccgcgtgtatgaagaaggccttcgggttgtaaagtactttcagtagggaggaaggttcatgcgttaatagcgtatggatttgacgttacctacagaagaagcaccggctaactccgtgccagcagccgcggtaatacggagggtgcgagcgttaatcggaattactgggcgtaaagcgcatgcaggtggttagttaagtcagatgtgaaagcccggggctcaacctcggaattgcatttgaaactggctgactagagtactgtagaggggggtagaatttcaggtgtagcggtgaaatgcgtagagatctgaaggaataccggtggcgaaggcggccccctggacagatactgacactcagatgcgaaagcgtggggagcaaacaggattagataccctggtagtccacgccgtaaacgatgtctacttggaggttgtggccttgagccgtggctttcggagctaacgcgttaagtagaccgcctggggagtacggtcgcaagattaaaactcaaatgaattgacgggggcccgcacaagcggtggagcatgtggtttaattcgatgcaacgcgaagaaccttacctactcttgacatccatagaacttagcagagatgctttggtgccttcgggaactatgagacaggtgctgcatggctgtcgtcagctcgtgttgtgaaatgttgggttaagtcccgcaacgagcgcaacccttatccttgtttgccagcgagtaatgtcgggaactccagggagactgccggtgataaaccggaggaaggtggggacgacgtcaagtcatcatggcccttacgagtagggctacacacgtgctacaatggcgtatacagagggctgccaaccagcgatggtgagcgaatcccaaaaagtgcgtcgtagtccggattggagtctgcaactcgactccatgaagtcggaatcgctagtaatcgtggatcagaatgccacggtgaatacgttcccgggccttgtacacaccgcccgtcacaccatgggagtgggctgcaaaagaagtgggtagtttaacctttcggggaggacgctcaccactttgtggttcatgactggggtg

SEQ ID NO: 3541 - DNA, 1475 bp, Vibrio proteolyticus
attgaacgctggcggcaggcctaacacatgcaagtcgagcggaaacgagatatctgaaccttcggggaacgatatcggcgtcgagcggcggacgggtgagtaatgcctgggaaattgccctgatgtgggggataaccattggaaacgatggctaataccgcataatagcttcggctcaaagagggggaccttcgggcctctcgcatcaggatatgcccaggtgggattagctagttggtgaggtaagggctcaccaaggcgacgatccctagctggtctgagaggatgatcagccacactggaactgagacacggtccagactcctacgggaggcagcagtggggaatattgcacaatgggcgcaagcctgatgcagccatgccgcgtgtgtgaagaaggccttcgggttgtaaagcactttcagtcgtgaggaaggtagtgtagttaatagctgcattatttgacgttagcgacagaagaagcaccggctaactccgtgccagcagccgcggtaatacggagggtgcgagcgttaatcggaattactgggcgtaaagcgcatgcaggtggtgtgttaagtcagatgtgaaagcccggggctcaacctcggaatagcatttgaaactggcagactagagtactgtagaggggggtagaatttcaggtgtagcggtgaaatgcgtagagatctgaaggaataccggtggcgaaggcggccccctggacagatactgacactcagatgcgaaagcgtggggagcaaacaggattagataccctggtagtccacgccgtaaacgatgtctacttggaggttgtggccttgagccgtggctttcggagctaacgcgttaagtagaccgcctggggagtacggtcgcaagattaaaactcaaatgaattgacgggggcccgcacaagcggtggagcatgtggtttaattcgatgcaacgcgaagaaccttacctactcttgacatccagagaactttccagagatggattggtgccttcgggaactctgagacaggtgctgcatggctgtcgtcagctcgtgttgtgaaatgttgggttaagtcccgcaacgagcgcaacccttatccttgtttgccagcacgtaatggtgggaactccagggagactgccggtgataaaccggaggaaggtggggacgacgtcaagtcatcatggcccttacgagtagggctacacacgtgctacaatggcgcatacagagggcggccaacttgcgaaagtgagcgaatcccaaaaagtgcgtcgtagtccggattggagtctgcaactcgactccatgaagtcggaatcgctagtaatcgtggatcagaatgccacggtgaatacgttcccgggccttgtacacaccgcccgtcacaccatgggagtgggctgcaaaagaagtgggtagtttaaccttcgggaggacgctcaccactttgtggttcatgactggggtg

SEQ ID NO: 3542 - DNA, 1464 bp, Vibrio quintilis
attgaacgctggcggcaggcttaacacatgcaagtcgggcggaaacgaaagaaagcttgctttcttggcgtcgagcggcggacgggtgagtaatgcctgggaaattgccctgatgtgggggataaccattggaaacgatggctaataccgcataatgtctacggactaaagagggggaccttcgggcctctcgcgtcgggatatgcccaggtgggattagcttgttggtgaggtaagagctcaccaaggcgacgatccctagctggtctgagaggatgatcagccacactggaactgagacacggtccagactcctacgggaggcagcagtggggaatattgcacaatgggcgcaagcctgatgcagccatgccgcgtgtatgaagaaggccttcgggttgtaaagtactttcagtggtgaggaaggggcagagtttaatacgctttgcttttgacgttagccacagaagaagcaccggctaactccgtgccagcagccgcggtaatacggagggtgcgagcgttaatcggaattactgggcgtaaagcgcatgcaggtggatgattaagtcagatgtgaaagcccggggcttaaccccggaacagcatttgaaactggtcatctagagtactgtagaggggggtagaatttcaggtgtagcggtgaaatgcgtagagatctgaaggaataccggtggcgaaggcggccccctggacagatactgacactcagatgcgaaagcgtggggagcaaacaggattagataccctggtagtccacgccgtaaacgatgtctacttggaggttgtggccttgagccgtggctttcggagctaacgcgttaagtagaccgcctggggagtacggtcgcaagattaaaactcaaatgaattgacgggggcccgcacaagcggtggagcatgtggtttaattcgatgcaacgcgaagaaccttacctactcttgacatccatagaagcttgaagagattcgagtgtgccttcgggaactatgagacaggtgctgcatggctgtcgtcagctcgtgttgtgaaatgttgggttaagtcccgcaacgagcgcaacccttatccttgattgccagcacttcgggtgggaacttcagggagactgccggtgataaaccggaggaaggtggggacgacgtcaagtcatcatggcccttacgagtagggctacacacgtgctacaatggcggatacagagggcagctaacttgcgagagtgtgcgaatcccaaaaagtccgtcgtagtccggattggagtctgcaactcgactccatgaagtcggaatcgctagtaatcgtagatcagaatgctacggtgaatacgttcccgggccttgtacacaccgcccgtcacaccatgggagtgggctgcaaaagaagcaggtagtttaaccttcgggaggacgcttgccactttgtggttcatgactggggtg

SEQ ID NO: 3543 - DNA, 1469 bp, Vibrio renipiscarius
attgaacgctggcggcaggcctaacacatgcaagtcgagcggtaacaggaagaaagcttgctttctttgctgacgagcggcggacgggtgagtaatgcctgggaatatgccttaacgtgggggataactattggaaacgatagctaataccgcatgatgcctacgggccaaagagggggaccttcgggcctctcgcgttaagattagcccaggtgggattagctagttggtgaggtaatggctcaccaaggcgacgatccctagctggtctgagaggatgatcagccacactggaactgagacacggtccagactcctacgggaggcagcagtggggaatattgcacaatgggcgcaagcctgatgcagccatgccgcgtgtatgaagaaggccttcgggttgtaaagtactttcagtcgtgaggaaggcatttgcgttaatagcgtaggtgtttgacgttagcgacagaagaagcaccggctaactccgtgccagcagccgcggtaatacggagggtgcgagcgttaatcggaattactgggcgtaaagcgcatgcaggtggttcgttaagtcagatgtgaaagcccggggctcaacctcggaattgcatttgaaactggcggactagagtgctgtagaggggggtagaatttcaggtgtagcggtgaaatgcgtagagatctgaaggaataccggtggcgaaggcggccccctggacagacactgacactcagatgcgaaagcgtggggagcaaacaggattagataccctggtagtccacgccgtaaacgatgtctacttggaggttgtggccttgagccgtggctttcggagctaacgcgttaagtagaccgcctggggagtacggtcgcaagattaaaactcaaatgaattgacgggggcccgcacaagcggtggagcatgtggtttaattcgatgcaacgcgaagaaccttacctactcttgacatctagagaagccagcggagacgcaggtgtgccttcgggaactctaagacaggtgctgcatggctgtcgtcagctcgtgttgtgaaatgttgggttaagtcccgcaacgagcgcaacccttatccttgtttgccagcgagtaatgtcgggaactccagggagactgccggtgataaaccggaggaaggtggggacgacgtcaagtcatcatggcccttacgagtagggctacacacgtgctacaatggcgcatacagagggctgccaaccagcgatggtgagcgaatcccaaaaagtgcgtcgtagtccggattggagtctgcaactcgactccatgaagtcggaatcgctagtaatcgtgaatcagaatgtcacggtgaatacgttcccgggccttgtacacaccgcccgtcacaccatgggagtgggctgcaaaagaagtgggtagtttaacctttcgaggaggacgctcaccactttgtggttcatgactggggtg

SEQ ID NO: 3544 - DNA, 1468 bp, Vibrio rotiferianus
attgaacgctggcggcaggcctaacacatgcaagtcgagcggaaacgagttatctgaaccttcggggaacgataacggcgtcgagcggcggacgggtgagtaatgcctaggaaattgccctgatgtgggggataaccattggaaacgatggctaataccgcataatgcctacgggccaaagagggggaccttcgggcctctcgcgtcaggatatgcctaggtgggattagctagttggtgaggtaatggctcaccaaggcgacgatccctagctggtctgagaggatgatcagccacactggaactgagacacggtccagactcctacgggaggcagcagtggggaatattgcacaatgggcgcaagcctgatgcagccatgccgcgtgtgtgaagaaggccttcgggttgtaaagcactttcagtcgtgaggaaggtagtgtagttaatagctgcattatttgacgttagcgacagaagaagcaccggctaactccgtgccagcagccgcggtaatacggagggtgcgagcgttaatcggaattactgggcgtaaagcgcatgcaggtggtttgttaagtcagatgtgaaagcccggggctcaacctcggaattgcatttgaaactggcagactagagtactgtagaggggggtagaatttcaggtgtagcggtgaaatgcgtagagatctgaaggaataccggtggcgaaggcggccccctggacagatactgacactcagatgcgaaagcgtggggagcaaacaggattagataccctggtagtccacgccgtaaacgatgtctacttggaggttgtggccttgagccgtggctttcggagctaacgcgttaagtagaccgcctggggagtacggtcgcaagattaaaactcaaatgaattgacgggggcccgcacaagcggtggagcatgtggtttaattcgatgcaacgcgaagaaccttacctactcttgacatccagagaactttccagagatggattggtgccttcgggaactctgagacaggtgctgcatggctgtcgtcagctcgtgttgtgaaatgttgggttaagtcccgcaacgagcgcaacccttatccttgtttgccagcgagtaatgtcgggaactccagggagactgccggtgataaaccggaggaaggtggggacgacgtcaagtcatcatggcccttacgagtagggctacacacgtgctacaatggcgcatacagagggcagccaacttgcgagagtgagcgaatcccaaaaagtgcgtcgtagtccggatcggagtctgcaactcgactccgtgaagtcggaatcgctagtaatcgtggatcagaatgccacggtgaatacgttcccgggccttgtacacaccgcccgtcacaccatgggagtgggctgcaaaagaagtaggtagtttaaccttcgggaggacgcttaccactttgtggttcatgac

SEQ ID NO: 3545 - DNA, 1456 bp, Vibrio ruber
acgctggcggcaggcctaacacatgcaagtcgagcggaaacgagagaaagcttgctttctcggcgtcgagcggcggacgggtgagtaaagtctgggaaattgccctgatgtgggggataaccattggaaacgatggctaataccgcatgatgtctacggaccaaagagggggaccttcgggcctctcgcgtcaggatatgcccagatgggattagctagttggtgaggtaatggctcaccaaggcgacgatccctagctggtctgagaggatgatcagccacactggaactgagacacggtccagactcctacgggaggcagcagtggggaatattgcacaatgggcgcaagcctgatgcagccatgccgcgtgtatgaagaaggccttcgggttgtaaagtactttcagcagtgaggaagggagtagttttaacagagctgctttttgacgttagctgcagaagaagcaccggctaactccgtgccagcagccgcggtaatacggagggtgcgagcgttaatcggaattactgggcgtaaagcgcatgcaggtggtctgttaagtcagatgtgaaagcccggggcttaaccccggagttgcatttgaaactggcaggctagagtactgtagaggggggtagaatttcaggtgtagcggtgaaatgcgtagagatctgaaggaataccggtggcgaaggcggccccctggacagatactgacactcaaatccgaaagcgtggggagcaaacaggattagataccctggtagtccacgccgtaaacgatgtctacttggaggttgtgacctagagtcgtggctttgggagctaacgcgttaagtagaccgcctggggagtacggtcgcaagattaaaactcaaatgaattgacgggggcccgcacaagcggtggagcatgtggtttaattcgatgcaacgcgaagaaccttacctactcttgacatccagagaagccggaagagattctggtgtgccttcgggagctctgagacaggtgctgcatggctgtcgtcagctcgtgttgtgaaatgttgggttaagtcccgcaacgagcgcaacccttatccttgattgccagcacttcgggtgggaacttcagggagactgccggtgataaaccggaggaaggtggggacgacgtcaagtcatcatggcccttacgagtagggctacacacgtgctacaatggcgtatacagagggcagctaacttgcgagagtgtgcgaatcccaaaaagtacgtcgtagtccggattggagtctgcaactcgactccatgaagtcggaatcgctagtaatcgtagatcagaatgctacggtgaatacgttcccgggccttgtacacaccgcccgtcacaccatgggagtgggctgcaaaagaagcaggtagtttaacggtcgggaggacgcttgccacttggggttcatgacgaggt

SEQ ID NO: 3546 - DNA, 1464 bp, Vibrio rumoiensis
ttgaacgctggcggcaggcctaacacatgcaagtcgagcggaaacgagaagtagcttgctacttcggcgtcgagcggcggacgggtgagtaatgcataggaagttgcccagtagagggggataaccattggaaacgatggctaataccgcataacctcttcggagcaaagcgggggaccttcgggcctcgcgctactggatacgcctatgtgggattagctagttggtgaggtaatggctcaccaaggcgacgatccctagctggtctgagaggatgatcagccacactgggactgagacacggcccagactcctacgggaggcagcagtggggaatattgcacaatgggcgaaagcctgatgcagccatgccgcgtgtatgaagaaggccttcgggttgtaaagtactttcagttgtgaggaaggtttcgtagttaataactgcgttgcttgacgttagcaacagaagaagcaccggctaactccgtgccagcagccgcggtaatacggagggtgcgagcgttaatcggaattactgggcgtaaagcgcatgcaggtggtttgttaagtcagatgtgaaagcccggggctcaacctcggaaggtcatttgaaactggcaaactagagtactgtagaggggggtagaatttcaggtgtagcggtgaaatgcgtagagatctgaaggaataccagtggcgaaggcggccccctggacagatactgacactcagatgcgaaagcgtggggagcaaacaggattagataccctggtagtccacgccgtaaacgatgtctacttggaggttgtggccttgagccgtggctttcggagctaacgcgttaagtagaccgcctggggagtacggtcgcaagattaaaactcaaatgaattgacgggggcccgcacaagcggtggagcatgtggtttaattcgatgcaacgcgaagaaccttacctactcttgacatccagagaactttccagagatggattggtgccttcgggaactctgagacaggtgctgcatggctgtcgtcagctcgtgttgtgaaatgttgggttaagtcccgcaacgagcgcaacccttatccttgtttgccagcgagtaatgtcgggaactccagggagactgccggtgataaaccggaggaaggtggggacgacgtcaagtcatcatggcccttacgagtagggctacacacgtgctacaatggcgcatacagagggcagcaagctagcgatagtgagcgaatcccaaaaagtgcgtcgtagtccggattggagtctgcaactcgactccatgaagtcggaatcgctagtaatcgtggatcagaatgccacggtgaatacgttcccgggccttgtacacaccgcccgtcacaccatgggagtgggctgcaaaagaagtaggtagtttaaccttcgggaggacgcttaccactttgtggttcatgactggggtg

SEQ ID NO: 3547 - DNA, 1298 bp, Vibrio sagamiensis
gcgtcgagcggcggacgggtgagtaatgcctaggaaattgccctgatgtgggggataaccattggaaacgatggctaataccgcataatgccttcgggccaaagagggggaccttcgggcctctcgcgtcaggatatgcctaggtgggattagctagttggtgaggtaagggctcaccaaggcgacgatccctagctggtctgagaggatgatcagccacactggaactgagacacggtccagactcctacgggaggcagcagtggggaatattgcacaatgggcgcaagcctgatgcagccatgccgcgtgtgtgaagaaggccttcgggttgtaaagcactttcagtcgtgaggaaggcggtaatgttaatagcattatcgtttgacgttagcgacagaagaagcaccggctaactccgtgccagcagccgcggtaatacggagggtgcgagcgttaatcggaattactgggcgtaaagcgcatgcaggtggtttgttaagtcagatgtgaaagcccggggctcaacctcggaattgcatttgaaactggcagactagagtactgtagaggggggtagaatttcaggtgtagcggtgaaatgcgtagagatctgaaggaataccggtggcgaaggcggccccctggacagatactgacactcagatgcgaaagcgtggggagcaaacaggattagataccctggtagtccacgccgtaaacgatgtctacttggaggttgtggccttgagccgtggctttcggagctaacgcgttaagtagaccgcctggggagtacggtcgcaagattaaaactcaaatgaattgacgggggcccgcacaagcggtggagcatgtggtttaattcgatgcaacgcgaagaaccttacctactcttgacatccagagaacttttcagagatggattggtgccttcgggaactctgagacaggtgctgcatggctgtcgtcagctcgtgttgtgaaatgttgggttaagtcccgcaacgagcgcaacccttatccttgtttgccagcgagtaatgtcgggaactccagggagactgccggtgataaaccggaggaaggtggggacgacgtcaagtcatcatggcccttacgagtagggctacacacgtgctacaatggcgcatacagagggcagccaacttgcgaaagtgagcgaatcccaaaaagtgcgtcgtagtccggattggagtctgcaactcgactccatgaagtcggaatcgctagtaatcgtggatcagaatgccacggtgaatacgttcccgggcctt

SEQ ID NO: 3548 - DNA, 1398 bp, Vibrio scophthalmi
gacgagcggcggacgggtgagtaatgcctgggaatatgccttgatgtgggggataaccattggaaacgatggctaataccgcataatgcctacgggccaaagagggggatcttcggacctctcgcgtcaagattagcccaggtgggattagctagttggtgaggtaatggctcaccaaggcgacgatccctagctggtctgagaggatgatcagccacactggaactgagacacggtccagactcctacgggaggcagcagtggggaatattgcacaatgggcgcaagcctgatgcagccatgccgcgtgtgtgaagaaggccttcgggttgtaaagcactttcagtcgtgaggaaggtagttgcgttaatagcgtaattatttgacgttagcgacagaagaagcaccggctaactccgtgccagcagccgcggtaatacggagggtgcgagcgttaatcggaattactgggcgtaaagcgcatgcaggtggtttgttaagtcagatgtgaaagcccggggctcaacctcggaattgcatttgaaactggcagactagagtactgtagaggggggtagaatttcaggtgtagcggtgaaatgcgtagagatctgaaggaataccggtggcgaaggcggccccctggacagatactgacactcagatgcgaaagcgtggggagcaaacaggattagataccctggtagtccacgccgtaaacgatgtctacttggaggttgtggccttgagccgtggctttcggagctaacgcgttaagtagaccgcctggggagtacggtcgcaagattaaaactcaaatgaattgacgggggcccgcacaagcggtggagcatgtggtttaattcgatgcaacgcgaagaaccttacctactcttgacatccagagaagccagcggagacgcaggtgtgccttcgggagctctgagacaggtgctgcatggctgtcgtcagctcgtgttgtgaaatgttgggttaagtcccgcaacgagcgcaacccttatccttgtttgccagcgagtaatgtcgggaactccagggagactgccggtgataaaccggaggaaggtggggacgacgtcaagtcatcatggcccttacgagtagggctacacacgtgctacaatggcgcatacagagggctgccaaccagcgatggtgagcgaatcccaaaaagtgcgtcgtagtccggattggagtctgcaactcgactccatgaagtcggaatcgctagtaatcgtggatcagaatgccacggtgaatacgttcccgggccttgtacacaccgcccgtcacaccatgggagtgggctgcaaaagaagtgggtagtttaacctttcgaggaggacgctcaccactttgtggttcatgactggggtg

SEQ ID NO: 3549 - DNA, 1475 bp, Vibrio shilonii
attgaacgctggcggcaggcctaacacatgcaagtcgagcggaaacgagttaactgacccttcgggtgacgttaacggcgtcgagcggcggacgggtgagtaatgcctgggaaattgccctgatgtgggggataaccattggaaacgatggctaataccgcataatgccttcggcccaaagagggggaccttcgggcctctcgcgtcaggatatgcccaggtgggattagctagttggtgaggtaatggctcaccaaggcgacgatccctagctggtctgagaggatgatcagccacactggaactgagacacggtccagactcctacgggaggcagcagtggggaatattgcacaatgggcgcaagcctgatgcagccatgccgcgtgtgtgaagaaggccttcgggttgtaaagcactttcagcagtgaggaaggcgggtacgttaatagcgtgctcgtttgacgttagctgcagaagaagcaccggctaactccgtgccagcagccgcggtaatacggagggtgcgagcgttaatcggaattactgggcgtaaagcgcatgcaggtggttcgttaagtcagatgtgaaagcccggggctcaacctcggaactgcatttgaaactggcggactagagtactgtagaggggggtagaatttcaggtgtagcggtgaaatgcgtagagatctgaaggaataccggtggcgaaggcggccccctggacagatactgacactcagatgcgaaagcgtggggagcaaacaggattagataccctggtagtccacgccgtaaacgatgtctacttggaggttgtggccttgagccgtggctttcggagctaacgcgttaagtagaccgcctggggagtacggtcgcaagattaaaactcaaatgaattgacgggggcccgcacaagcggtggagcatgtggtttaattcgatgcaacgcgaagaaccttacctactcttgacatccagagaagccagcggagacgcaggtgtgccttcgggaactctgagacaggtgctgcatggctgtcgtcagctcgtgttgtgaaatgttgggttaagtcccgcaacgagcgcaacccttatccttgtttgccagcgagtaatgtcgggaactccagggagactgccggtgataaaccggaggaaggtggggacgacgtcaagtcatcatggcccttacgagtagggctacacacgtgctacaatggcgcatacagagggcagccaacttgcgaaagtgagcgaatcccaaaaagtgcgtcgtagtccggattggagtctgcaactcgactccatgaagtcggaatcgctagtaatcgtagatcagaatgctacggtgaatacgttcccgggccttgtacacaccgcccgtcacaccatgggagtgggctgcaaaagaagtgggtagtttaaccttcgggaggacgctcaccactttgtggttcatgactggggtg

SEQ ID NO: 3550 - DNA, 1467 bp, Vibrio sinaloensis
  misc_feature (443)..(443): n is a, c, g, or t
  misc_feature (457)..(457): n is a, c, g, or t
attgaacgctggcggcaggcctaacacatgcaagtcgagcggaaacgagttatctgaaccttcggggaacgataacggcgtcgagcggcggacgggtgagtaatgcctgggaaattgccctgatgtgggggataaccattggaaacgatggctaataccgcataatagcttcggctcaaagagggggaccttcgggcctctcgcgtcaggatatgcccaggtgggattagctagttggtgaggtaagggctcaccaaggcgacgatccctagctggtctgagaggatgatcagccacactggaactgagacacggtccagactcctacgggaggcagcagtggggaatattgcacaatgggcgcaagcctgatgcagccatgccgcgtgtatgaagaaggccttcgggttgtaaagtactttcagcagtgaggaaggtgggtncgttaatagcgtgntcatttgacgttagctgcagaagaagcaccggctaactccgtgccagcagccgcggtaatacggagggtgcgagcgttaatcggaattactgggcgtaaagcgcatgcaggtggtttgttaagtcagatgtgaaagcccggggctcaacctcggaattgcatttgaaactggcagactagagtactgtagaggggggtagaatttcaggtgtagcggtgaaatgcgtagagatctgaaggaataccggtggcgaaggcggccccctggacagatactgacactcagatgcgaaagcgtggggagcaaacaggattagataccctggtagtccacgccgtaaacgatgtctacttggaggttgtggccttgagccgtggctttcggagctaacgcgttaagtagaccgcctggggagtacggtcgcaagattaaaactcaaatgaattgacgggggcccgcacaagcggtggagcatgtggtttaattcgatgcaacgcgaagaaccttacctactcttgacatccagagaagccagcagagatgcaggtgtgccttcgggagctctgagacaggtgctgcatggctgtcgtcagctcgtgttgtgaaatgttgggttaagtcccgcaacgagcgcaacccttatccttgtttgccagcacttcgggtgggaactccagggagactgccggtgataaaccggaggaaggtggggacgacgtcaagtcatcatggcccttacgagtagggctacacacgtgctacaatggcgcatacagagggcggccaacttgcgaaagtgagcgaatcccaaaaagtgcgtcgtagtccggattggagtctgcaactcgactccatgaagtcggaatcgctagtaatcgtggatcagaatgccacggtgaatacgttcccgggccttgtacacaccgcccgtcacaccatgggagtgggctgcaaaagaagtgggtagtttaaccttcgggggacgctcaccactttgtggttcatgact

SEQ ID NO: 3551 - DNA, 1458 bp, Vibrio spartinae
cccgggggggggggactaacacatgcagtcgagcggtaacaggaaagagcttgctcttttgctgacgagcggcggacgggtgagtaaagcctgggaaattgccctgatgtgggggataaccattggaaacgatggctaataccgcatgacgtctacggaccaaagagggggaccttcgggcctctcgcgtcaggatatgcccaggtgggattagctagttggtggggtaagggctcaccaaggcgacgatctctagctggtctgagaggatgatcagccacactggaactgagacacggtccagactcctacgggaggcagcagtggggaatattgcacaatgggcgcaagcctgatgcagccatgccgcgtgtatgaagaaggccttcgggttgtaaagtactttcagcagtgaggaagggggtagttttaatagagctgccttttgacgttagctgcagaagaagcaccggctaactccgtgccagcagccgcggtaatacggagggtgcgagcgttaatcggaattactgggcgtaaagcgcatgcaggtggtcttttaagtcagatgtgaaagcccggggcttaaccccggagttgcatttgaaactgggaggctagagtactgtagaggggggtagaatttcaggtgtagcggtgaaatgcgtagagatctgaaggaataccggtggcgaaggcggccccctggacagatactgacactcagatgcgaaagcgtggggagcaaacaggattagataccctggtagtccacgccgtaaacgatgtctacttggaggttgttcccttgaggagtggctttcggagctaacgcgttaagtagaccgcctggggagtacggtcgcaagattaaaactcaaatgaattgacgggggcccgcacaagcggtggagcatgtggtttaattcgatgcaacgcgaagaaccttacctactcttgacatccagagaagccggaagagattctggtgtgccttcgggagctctgagacaggtgctgcatggctgtcgtcagctcgtgttgtgaaatgttgggttaagtcccgcaacgagcgcaacccttatccttgattgccagcacttcgggtgggaacttcagggagactgccggtgataaaccggaggaaggtggggacgacgtcaagtcatcatggcccttacgagtagggctacacacgtgctacaatggcgtatacagagggcagccaacttgcgaaagtgagcgaatcccaaaaagtacgtcgtagtccggattggagtctgcaactcgactccatgaagtcggaatcgctagtaatcgtgaatcagaatgtcacggtgaatacgttcccgggccttgtacacaccgcccgtcacaccatgggagtgggctgcaaaagaagcaggtagtttaaccttcgggaggacgcttgccactttgtggttcatgactgggggg

SEQ ID NO: 3552 - DNA, 1410 bp, Vibrio splendidus
  misc_feature (69)..(70): n is a, c, g, or t
  misc_feature (443)..(443): n is a, c, g, or t
  misc_feature (455)..(456): n is a, c, g, or t
  misc_feature (575)..(575): n is a, c, g, or t
  misc_feature (913)..(913): n is a, c, g, or t
  misc_feature (1344)..(1344): n is a, c, g, or t
  misc_feature (1361)..(1361): n is a, c, g, or t
attgaacgctggcggcaggcctaacacatgcaagtcgagcggaaacgacactaacaatccttcgggtgnnttaatgggcgtcgagcggcggacgggtgagtaatgcctaggaaattgccttgatgtgggggataaccattggaaacgatggctaataccgcataatgcctacgggccaaagagggggatcttcgggcctctcgcgtcaagatatgcctaggtgggattagctagttggtgaggtaatggctcaccaaggcgacgatccctagctggtctgagaggatgatcagccacactggaactgagacacggtccagactcctacgggaggcagcagtggggaatattgcacaatgggcgaaagcctgatgcagccatgccgcgtgtatgaagaaggccttcgggttgtaaagtactttcagttgtgaggaagggggtancgttaatagcgnnatctcttgacgttagcaacagaagaagcaccggctaactccgtgccagcagccgcggtaatacggagggtgcgagcgttaatcggaattactgggcgtaaagcgcatgcaggtggttcnttaagtcagatgtgaaagcccggggctcaacctcggaactgcatttgaaactggtgaactagagtgctgtagaggggggtagaatttcaggtgtagcggtgaaatgcgtagagatctgaaggaataccagtggcgaaggcggccccctggacagacactgacactcagatgcgaaagcgtggggagcaaacaggattagataccctggtagtccacgccgtaaacgatgtctacttggaggttgtggccttgagccgtggctttcggagctaacgcgttaagtagaccgcctggggagtacggtcgcaagattaaaactcaaatgaattgacgggggnccgcacaagcggtggagcatgtggtttaattcgatgcaacgcgaagaaccttacctactcttgacatccagagaagccagcggagacgcaggtgtgccttcgggaactctgagacaggtgctgcatggctgtcgtcagctcgtgttgtgaaatgttgggttaagtcccgcaacgagcgcaacccttatccttgtttgccagcgagtaatgtcgggaactccagggagactgccggtgataaaccggaggaaggtggggacgacgtcaagtcatcatggcccttacgagtagggctacacacgtgctacaatggcgcatacagagggcagcaagctagcgatagtgagcgaatcccaaaaagtgcgtcgtagtccggattggagtctgcaactcgactccatgaagtcggaatcgctagtaatcgtaaatcngaatgtcacggtgaatncgttcccgggccttgtacacaccgctcgtcacaccatgggagtgggctg

SEQ ID NO: 3553 - DNA, 1468 bp, Vibrio superstes
tggcggcaggcctaacacatgcaagtcgagcggaaacgatgattctgaaccttcggggaacgaattaggcgtcgagcggcggacgggtgagtaatgcctgggaaattgccctgatgtgggggataaccattggaaacgatggctaataccgcataacgtctacggaccaaagagggggaccttcgggcctctcgcttcaggatatgcccaggtgggattagctagttggtgaggtaatggctcaccaaggcgacgatccctagctggtctgagaggatgatcagccacactggaactgagacacggtccagactcctacgggaggcagcagtggggaatattgcacaatgggcgcaagcctgatgcagccatgccgcgtgtatgaagaaggccttcgggttgtaaagtactttcagtcgtgaggaaggcgttgaagttaatagcttcagcgtttgacgttagcgacagaagaagcaccggctaactccgtgccagcagccgcggtaatacggagggtgcgagcgttaatcggaattactgggcgtaaagcgcatgcaggtggtttgttaagtcagatgtgaaagcccggggctcaacctcggaaccgcatttgaaactggcaggctagagtactgtagaggggggtagaatttcaggtgtagcggtgaaatgcgtagagatctgaaggaataccagtggcgaaggcggccccctggacagatactgacactcagatgcgaaagcgtggggagcaaacaggattagataccctggtagtccacgccgtaaacgatgtctacttggaggttgtggccttgagccgtggctttcggagctaacgcgttaagtagaccgcctggggagtacggtcgcaagattaaaactcaaatgaattgacgggggcccgcacaagcggtggagcatgtggtttaattcgatgcaacgcgaagaaccttacctactcttgacatccagagaattcgctagagatagcttagtgccttcgggaactctgagacaggtgctgcatggctgtcgtcagctcgtgttgtgaaatgttgggttaagtcccgcaacgagcgcaacccttatccttgtttgccagcacgtaatggtgggaactccagggagactgccggtgataaaccggaggaaggtggggacgacgtcaagtcatcatggcccttacgagtagggctacacacgtgctacaatggcgcatacagagggcggccaaccagcgatggtgagcgaatcccaaaaagtgcgtcgtagtccggattggagtctgcaactcgactccatgaagtcggaatcgctagtaatcgtgaatcagaatgtcacggtgaatacgttcccgggccttgtacacaccgcccgtcacaccatgggagtgggctgcaaaagaagtgggtagtttaacctttcggggaggacgctcgccactttgtggttcatgactggggtg

SEQ ID NO: 3554 - DNA, 1467 bp, Vibrio tapetis
attgaacgctggcggcaggcctaacacatgcaagtcgagcggaaacgagaagtagcttgctacttcggcgtcgagcggcggacgggtgagtaatgcctaggaaattgccctgatgtgggggataaccattggaaacgatggctaataccgcataatgccttcgggccaaagagggggaccttcgggcctctcgcgtcaggatatgcctaggtgggattagctagttggtgaggtaatggctcaccaaggcgacgatccctagctggtctgagaggatgatcagccacactggaactgagacacggtccagactcctacgggaggcagcagtggggaatattgcacaatgggcgcaagcctgatgcagccatgccgcgtgtatgaagaaggccttcgggttgtaaagtactttcagcagtgaggaaggggtgtacgttaatagcgtgcatccttgacgttagctgcagaagaagcaccggctaactccgtgccagcagccgcggtaatacggagggtgcgagcgttaatcggaattactgggcgtaaagcgcatgcaggtggttcgttaagtcagatgtgaaagcccggggctcaacctcggaactgcatttgaaactggcgggctagagtactgtagaggggggtagaatttcaggtgtagcggtgaaatgcgtagagatctgaaggaataccagtggcgaaggcggccccctggacagatactgacactcagatgcgaaagcgtggggagcaaacaggattagataccctggtagtccacgccgtaaacgatgtctacttggaggttgtggccttgagccgtggctttcggagctaacgcgttaagtagaccgcctggggagtacggtcgcaagattaaaactcaaatgaattgacgggggcccgcacaagcggtggagcatgtggtttaattcgatgcaacgcgaagaaccttacctactcttgacatccagagaagccagcggagacgcaggtgtgccttcgggaactctgagacaggtgctgcatggctgtcgtcagctcgtgttgtgaaatgttgggttaagtcccgcaacgagcgcaacccttatccttgtttgccagcgagtaatgtcgggaactccagggagactgccggtgataaaccggaggaaggtggggacgacgtcaagtcatcatggcccttacgagtagggctacacacgtgctacaatggcgcatacagagggcagccaaccagcgatggtgagcgaatcccaaaaagtgcgtcgtagtccggattggagtctgcaactcgactccatgaagtcggaatcgctagtaatcgtgaatcagaatgtcacggtgaatacgttcccgggccttgtacacaccgcccgtcacaccatgggagtgggctgcaaaagaagtaggtagtttaacctttcggggaggacgcttaccactttgtggttcatgactggggtg

SEQ ID NO: 3555 - DNA, 1477 bp, Vibrio tasmaniensis
  misc_feature (457)..(457): n is a, c, g, or t
  misc_feature (1019)..(1019): n is a, c, g, or t
attgaacgctggcggcaggcctaacacatgcaagtcgagcggaaacgacactaacaatccttcgggtgcgttaatgggcgtcgagcggcggacgggtgagtaatgcctaggaaattgccttgatgtgggggataaccattggaaacgatggctaataccgcataatgcctacgggccaaagagggggaccttcgggcctctcgcgtcaagatatgcctaggtgggattagctagttggtgaggtaatggctcaccaaggcgacgatccctagctggtctgagaggatgatcagccacactggaactgagacacggtccagactcctacgggaggcagcagtggggaatattgcacaatgggcgcaagcctgatgcagccatgccgcgtgtatgaagaaggccttcgggttgtaaagtactttcagttgtgaggaagggtgtgtagttaatagctgcncatcttgacgttagcaacagaagaagcaccggctaactccgtgccagcagccgcggtaatacggagggtgcgagcgttaatcggaattactgggcgtaaagcgcatgcaggtggttcattaagtcagatgtgaaagcccggggctcaacctcggaactgcatttgaaactggtgaactagagtgctgtagaggggggtagaatttcaggtgtagcggtgaaatgcgtagagatctgaaggaataccagtggcgaaggcggccccctggacagacactgacactcagatgcgaaagcgtggggagcaaacaggattagataccctggtagtccacgccgtaaacgatgtctacttggaggttgtggccttgagccgtggctttcggagctaacgcgttaagtagaccgcctggggagtacggtcgcaagattaaaactcaaatgaattgacgggggcccgcacaagcggtggagcatgtggtttaattcgatgcaacgcgaagaaccttacctactcttgacatccagagaagccagcggagacgcaggtgtgccttcggganctctgagacaggtgctgcatggctgtcgtcagctcgtgttgtgaaatgttgggttaagtcccgcaacgagcgcaacccttatccttgtttgccagcgagtaatgtcgggaactccagggagactgccggtgataaaccggaggaaggtggggacgacgtcaagtcatcatggcccttacgagtagggctacacacgtgctacaatggcgcatacagagggcagcaagctagcgatagtgagcgaatcccaaaaagtgcgtcgtagtccggattggagtctgcaactcgactccatgaagtcggaatcgctagtaatcgtgaatcagaatgtcacggtgaatacgttcccgggccttgtacacaccgcccgtcacaccatgggagtgggctgcaaaagaagtgggtagtttaacctttcggggaggacgctcaccactttgtggttcatgactggggtg

SEQ ID NO: 3556 - DNA, 1449 bp, Vibrio thalassae
catgcaagtcgagcggaaacgagttaactgacccttcgggtgacgttaacggcgtcgagcggcggacgggtgagtaatgcctgggaaattgccctgatgtgggggataaccattggaaacgatggctaataccgcataacgccttcgggccaaagagggggaccttcgggcctctcgcgtcaggatatgcccaggtgggattagctagttggtgaggtaatggctcaccaaggcgacgatccctagctggtctgagaggatgatcagccacactggaactgagacacggtccagactcctacgggaggcagcagtggggaatattgcacaatgggcgcaagcctgatgcagccatgccgcgtgtgtgaagaaggccttcgggttgtaaagcactttcagtcgtgaggaaggcgggtacgttaatagcgtatttgtttgacgttagcgacagaagaagcaccggctaactccgtgccagcagccgcggtaatacggagggtgcgagcgttaatcggaattactgggcgtaaagcgcatgcaggtggttcgttaagtcagatgtgaaagcccggggctcaacctcggaacagcatttgaaactggcggactagagtactgtagaggggggtagaatttcaggtgtagcggtgaaatgcgtagagatctgaaggaataccggtggcgaaggcggccccctggacagatactgacactcagatgcgaaagcgtggggagcaaacaggattagataccctggtagtccacgccgtaaacgatgtctacttggaggttgtggccttgagccgtggctttcggagctaacgcgttaagtagaccgcctggggagtacggtcgcaagattaaaactcaaatgaattgacgggggcccgcacaagcggtggagcatgtggtttaattcgatgcaacgcgaagaaccttacctactcttgacatccagagaagccagcggagacgcaggtgtgccttcgggagctctgagacaggtgctgcatggctgtcgtcagctcgtgttgtgaaatgttgggttaagtcccgcaacgagcgcaacccttatccttgtttgccagcgagtaatgtcgggaactccagggagactgccggtgataaaccggaggaaggtggggacgacgtcaagtcatcatggcccttacgagtagggctacacacgtgctacaatggcgcatacagagggcagccaacttgcgaaagtgagcgaatcccaaaaagtgcgtcgtagtccggattggagtctgcaactcgactccatgaagtcggaatcgctagtaatcgtggatcagaatgccacggtgaatacgttcccgggccttgtacacaccgcccgtcacaccatgggagtgggctgcaaaagaagtgggtagtttaaccttcgggaggacgctcaccactttgtggttcatgactggagtg

SEQ ID NO: 3557 - DNA, 1455 bp, Vibrio toranzoniae
ctaacacatgcaagtcgagcggtaacgacactaacaatccttcgggtgcgttaatgggcgtcgagcggcggacgggtgagtaatgcctaggaaattgccttgatgtgggggataaccattggaaacgatggctaataccgcatgatgcctacgggccaaagagggggaccttcgggcctctcgcgtcaagatatgcctaggtgggattagctagttggtgaggtaatggctcaccaaggcgacgatccctagctggtctgagaggatgatcagccacactggaactgagacacggtccagactcctacgggaggcagcagtggggaatattgcacaatgggcgcaagcctgatgcagccatgccgcgtgtatgaagaaggccttcgggttgtaaagtactttcagttgtgaggaagggggtaacgttaatagcgctatctcttgacgttagcaacagaagaagcaccggctaactccgtgccagcagccgcggtaatacggagggtgcgagcgttaatcggaattactgggcgtaaagcgcatgcaggtggttcattaagtcagatgtgaaagcccggggctcaacctcggaactgcatttgaaactggtgaactagagtactgtagaggggggtagaatttcaggtgtagcggtgaaatgcgtagagatctgaaggaataccagtggcgaaggcggccccctggacagatactgacactcagatgcgaaagcgtggggagcaaacaggattagataccctggtagtccacgccgtaaacgatgtctacttggaggttgtggccttgagccgtggctttcggagctaacgcgttaagtagaccgcctggggagtacggtcgcaagattaaaactcaaatgaattgacgggggcccgcacaagcggtggagcatgtggtttaattcgatgcaacgcgaagaaccttacctactcttgacatccagagaatccagcggagacgcaggagtgccttcgggagctctgagacaggtgctgcatggctgtcgtcagctcgtgttgtgaaatgttgggttaagtcccgcaacgagcgcaacccttatccttgtttgccagcgagtcatgtcgggaactccagggagactgccggtgataaaccggaggaaggtggggacgacgtcaagtcatcatggcccttacgagtagggctacacacgtgctacaatggcgcatacagagggcagcgagccagcgatggtaagcgaatcccaaaaagtgcgtcgtagtccggattggagtctgcaactcgactccatgaagtcggaatcgctagtaatcgtgaatcagaatgtcacggtgaatacgttcccgggccttgtacacaccgcccgtcacaccatgggagtgggctgcaaaagaagtaggtagtctaaccttcgggaggacgcttaccactttgtggttcatgactggggtg

SEQ ID NO: 3558 - DNA, 1475 bp, Vibrio tubiashii
attgaacgctggcggcaggcctaacacatgcaagtcgagcggaaacgagttaactgaaccttcggggaacgttaacggcgtcgagcggcggacgggtgagtaatgcctgggaaattgccctgatgtgggggataaccattggaaacgatggctaataccgcataatagcttcggctcaaagagggggaccttcgggcctctcgcgtcaggatatgcccaggtgggattagctagttggtgaggtaagggctcaccaaggcgacgatccctagctggtctgagaggatgatcagccacactggaactgagacacggtccagactcctacgggaggcagcagtggggaatattgcacaatgggcgcaagcctgatgcagccatgccgcgtgtatgaagaaggccttcgggttgtaaagtactttcagcagtgaggaaggtggtagtgttaatagcactatcatttgacgttagctgcagaagaagcaccggctaactccgtgccagcagccgcggtaatacggagggtgcgagcgttaatcggaattactgggcgtaaagcgcatgcaggtggtttgttaagtcagatgtgaaagcccggggctcaacctcggaattgcatttgaaactggcaggctagagtactgtagaggggggtagaatttcaggtgtagcggtgaaatgcgtagagatctgaaggaataccggtggcgaaggcggccccctggacagatactgacactcagatgcgaaagcgtggggagcaaacaggattagataccctggtagtccacgccgtaaacgatgtctacttggaggttgtggccttgagccgtggctttcggagctaacgcgttaagtagaccgcctggggagtacggtcgcaagattaaaactcaaatgaattgacgggggcccgcacaagcggtggagcatgtggtttaattcgatgcaacgcgaagaaccttacctactcttgacatccagagaactttccagagatggattggtgccttcgggaactctgagacaggtgctgcatggctgtcgtcagctcgtgttgtgaaatgttgggttaagtcccgcaacgagcgcaacccttatccttgtttgccagcgagtaatgtcgggaactccagggagactgccggtgataaaccggaggaaggtggggacgacgtcaagtcatcatggcccttacgagtagggctacacacgtgctacaatggcgcatacagagggcggccaacttgcgaaagtgagcgaatcccaaaaagtgcgtcgtagtccggatcggagtctgcaactcgactccgtgaagtcggaatcgctagtaatcgtggatcagaatgccacggtgaatacgttcccgggccttgtacacaccgcccgtcacaccatgggagtgggctgcaaaagaagtgggtagtttaaccttcggggggacgctcaccactttgtggttcatgactggggtg

SEQ ID NO: 3559 - DNA, 1296 bp, Vibrio variabilis
  misc_feature (281)..(281): n is a, c, g, or t
  misc_feature (811)..(813): n is a, c, g, or t
  misc_feature (816)..(817): n is a, c, g, or t
  misc_feature (822)..(824): n is a, c, g, or t
  misc_feature (826)..(826): n is a, c, g, or t
  misc_feature (828)..(828): n is a, c, g, or t
  misc_feature (844)..(845): n is a, c, g, or t
  misc_feature (1062)..(1062): n is a, c, g, or t
aagagggggaccttcgggcctctcgcgtcaggatatgcccaggtgggattagctagttggtgaggtaatggctcaccaaggcgacgatccctagctggtctgagaggatgatcagccacactggaactgagacacggtccagactcctacgggaggcagcagtggggaatattgcacaatgggcgcaagcctgatgcagccatgccgcgtgtgtgaagaaggccttcgggttgtaaagcactttcagcagtgaggaaggtggtgtcgttaatagcggcatnatttgacgttagctgcagaagaagcaccggctaactccgtgccagcagccgcggtaatacggagggtgcgagcgttaatcggaattactgggcgtaaagcgcatgcaggtggttagttaagtcagatgtgaaagcccggggctcaacctcggaactgcatttgaaactggctgactagagtactgtagaggggggtagaatttcaggtgtagcggtgaaatgcgtagagatctgaaggaataccggtggcgaaggcggccccctggacagatactgacactcagatgcgaaagcgtggggagcaaacaggattagataccctggtagtccacgccgtaaacgatgtctacttggaggttgtggccttgagccgtggctttcggagctaacgcgttaagtagaccgcctggggagtacggtcgcaagattaaaactcaaatgaattgacgggggcccgcacaagcggtggagcatgtggtttaattcgatgcaacgcgaagaaccttacctactcttgacatcctcagaannnacnngagannntntngtgccttcgggaactnngagacaggtgctgcatggctgtcgtcagctcgtgttgtgaaatgttgggttaagtcccgcaacgagcgcaacccttatccttgtttgccagcacttcgggtgggaactccagggagactgccggtgataaaccggaggaaggtggggacgacgtcaagtcatcatggcccttacgagtagggctacacacgtgctacaatggcgcatacagagggcngccaacttgcgaaagtgagcgaatcccaaaaagtgcgtcgtagtccggattggagtctgcaactcgactccatgaagtcggaatcgctagtaatcgtggatcagaatgccacggtgaatacgttcccgggccttgtacacaccgcccgtcacaccatgggagtgggctgcaaaagaagtgggtagtttaaccttcgggaggacgctcaccactttgtggttcatgactggggtg

SEQ ID NO: 3560 - DNA, 1465 bp, Vibrio vulnificus
attgaacgctggcggcaggcctaacacatgcaagtcgagcggcagcacagagaaacttgtttctcgggtggcgagcggcggacgggtgagtaatgcctgggaaattgccctgatgtgggggataaccattggaaacgatggctaataccgcatgatagcttcggctcaaagagggggaccttcgggcctctcgcgtcaggatatgcccaggtgggattagctagttggtgaggtaagggctcaccaaggcgacgatccctagctggtctgagaggatgatcagccacactggaactgagacacggtccagactcctacgggaggcagcagtggggaatattgcacaatgggcgcaagcctgatgcagccatgccgcgtgtgtgaagaaggccttcgggttgtaaagcactttcagtcgtgaggaaggtggtagtgttaatagcactatcatttgacgttagcgacagaagaagcaccggctaactccgtgccagcagccgcggtaatacggagggtgcgagcgttaatcggaattactgggcgtaaagcgcatgcaggtggtttgttaagtcagatgtgaaagcccggggctcaacctcggaactgcatttgaaactggcagactagagtactgtagaggggggtagaatttcaggtgtagcggtgaaatgcgtagagatctgaaggaataccggtggcgaaggcggccccctggacagatactgacactcagatgcgaaagcgtggggagcaaacaggattagataccctggtagtccacgctgtaaacgatgtctacttggaggttgtggccttgagccgtggctttcggagctaacgcgttaagtagaccgcctggggagtacggtcgcaagattaaaactcaaatgaattgacgggggcccgcacaagcggtggagcatgtggtttaattcgatgcaacgcgaagaaccttacctactcttgacatccagagaatctagcggagacgctggagtgccttcgggaactctgagacaggtgctgcatggctgtcgtcagctcgtgttgtgaaatgttgggttaagtcccgcaacgagcgcaacccttatccttgtttgccagcgagtaatgtcgggaactccagggagactgccggtgataaaccggaggaaggtggggacgacgtcaagtcatcatggcccttacgagtagggctacacacgtgctacaatggcgcatacagagggcggccaacttgcgaaagtgagcgaatcccaaaaagtgcgtcgtagtccggattggagtctgcaactcgactccatgaagtcggaatcgctagtaatcgtggatcagaatgccacggtgaatacgttcccgggccttgtacacaccgcccgtcacaccatgggagtgggctgcaaaagaagtgggtagtttaaccttcgggaggacgctcaccactttgtggttcatgactggggtg

SEQ ID NO: 3561 - DNA, 1475 bp, Vibrio xiamenensis
attgaacgctggcggcaggcctaacacatgcaagtcgagcggcagcgacataaacaaaccttcgggggcgcttatgggcggcgagcggcggacgggtgagtaatgcctgggaaattgccctgatgtgggggataaccattggaaacgatggctaataccgcatgatagcttcggctcaaagagggggaccttttggcctctcgcgtcaggatatgcccaggtgggattagctagttggtgaggtaagggctcaccaaggcgacgatccctagctggtctgagaggatgatcagccacactggaactgagacacggtccagactcctacgggaggcagcagtggggaatattgcacaatgggcgcaagcctgatgcagccatgccgcgtgtgtgaagaaggccttcgggttgtaaagcactttcagcagtgaggaaggtagtgtatttaatagatacattatttgacgttagctgcagaagaagcaccggctaactccgtgccagcagccgcggtaatacggagggtgcgagcgttaatcggaattactgggcgtaaagcgcatgcaggtggttggttaagtcagatgtgaaagcccagggctcaaccttggaatcgcatttgaaactggctgactagagtactgtagaggggggtagaatttcaggtgtagcggtgaaatgcgtagagatctgaaggaataccggtggcgaaggcggccccctggacagatactgacactcagatgcgaaagcgtggggagcaaacaggattagataccctggtagtccacgccgtaaacgatgtctacttggaggttgtggccttgagccgtggctttcggagctaacgcgttaagtagaccgcctggggagtacggtcgcaagattaaaactcaaatgaattgacgggggcccgcacaagcggtggagcatgtggtttaattcgatgcaacgcgaagaaccttacctactcttgacatccagagaactttccagagatggattggtgccttcgggaactctgagacaggtgctgcatggctgtcgtcagctcgtgttgtgaaatgttgggttaagtcccgcaacgagcgcaacccttatccttgtttgccagcgagtaatgtcgggaactccagggagactgccggtgataaaccggaggaaggtggggacgacgtcaagtcatcatggcccttacgagtagggctacacacgtgctacaatggcgcatacagagggcagccaacttgcgagagtgagcgaatcccaaaaagtgcgtcgtagtccggattggagtctgcaactcgactccatgaagtcggaatcgctagtaatcgtggatcagaatgccacggtgaatacgttcccgggccttgtacacaccgcccgtcacaccatgggagtgggctgcaaaagaagtgggtagtttaaccttcggggggacgctcaccactttgtggttcatgactggggtg

SEQ ID NO: 3562 - DNA, 1488 bp, Virgibacillus necropolis
gacgaacgctggcggcgtgcctaatacatgcaagtcgagcgcgggaagcaagcaatcacccttcggggtgtgagcttgtggaacgagcggcggacgggtgagtaacacgtgggcaacctacctgtaagattgggataaccccgggaaaccggagctaataccgaataatactttttatcacatggtagaaagttgaaaggcggcttttgctgtcacttacagatgggcccgcgtcgcattagctagttggtggggtaatggcctaccaaggcgacgatgcgtagccgacctgagagggtgatcggccacactgggactgagacacggcccagactcctacgggaggcagcagtagggaatcttccgcaatggacgaaagtctgacggagcaacgccgcgtgagtgatgaaggttttcggatcgtaaaactctgttgttagggaagaacaagtatcgttcgaatagggcggtaccatgacggtacctaaccagaaagccccggctaactacgtgccagcagccgcggtaatacgtagggggcaagcgttgtccggaattattgggcgtaaagcgctcgcaggcggtcttttaagtctgatgtgaaagcccacggcttaaccgtggagggtcattggaaactggaggacttgagtacagaagaggagagtggaattccacgtgtagcggtgaaatgcgtagagatgtggaggaacaccagtggcgaaggcgactctctggtctgtaactgacgctgaggagcgaaagcgtggggagcgaacaggattagataccctggtagtccacgccgtaaacgatgagtgctaggtgttagggggtttccgccccttagtgctgaagttaacgcattaagcactccgcctggggagtacggccgcaaggctgaaactcaaaagaattgacgggggcccgcacaagcggtggagcatgtggtttaattcgaagcaacgcgaagaaccttaccaggtcttgacatcctctgatagcgatagagatatcgtgttcccttcggggacagagtgacaggtggtgcatggttgtcgtcagctcgtgtcgtgagatgttgggttaagtcccgcaacgagcgcaacccttgatcttagttgccagcattcagttgggcactctaaggtgactgccggtgacaaaccggaggaaggtggggatgacgtcaaatcatcatgccccttatgacctgggctacacacgtgctacaatggatggaacaaagggacgcgaagccgcgaggtgtagcaaatcccataaaaccattctcagttcggattgtaggctgcaactcgcctacatgaagccggaatcgctagtaatcgcggatcagcatgccgcggtgaatacgttcccgggccttgtacacaccgcccgtcacaccacgagagttggcaacacccgaagtcggtgaggtaacctttatggagccagccgccgaaggtggggccaatgattggggtg

SEQ ID NO: 3563 - DNA, 1453 bp, Virgibacillus phasianinus
gacgaacgctggcggcgtgcctaatacatgcaagtcgagcgcgggaagcaagcaatcgcccttcggggcgtgagcttgtggaacgagcggcggacgggtgagtaacacgtgggcaacctgcctgtaagattgggataaccccgggaaaccggagctaataccgaataatactttttatcacatggtagaaagttgaaaggcggcttttgctgtcacttacagatgggcccgcggcgcattagctagttggtggggtaatggcctaccaaggcgacgatgcgtagccgacctgagagggtgatcggccacactgggactgagacacggcccagactcctacgggaggcagcagtagggaatcttccgcaatggacgaaagtctgacggagcaacgccgcgtgagtgatgaaggttttcggatcgtaaaactctgttgttagggaagaacacgtatcgttcgaataggacggtgctttgacggtacctaaccagaaagccccggctaactacgtgccagcagccgcggtaatacgtagggggcaagcgttgtccggaattattgggcgtaaagcgctcgcaggcggtcttttaagtctgatgtgaaagcccacggcttaaccgtggagggtcattggaaactggaggacttgagtacagaagaggagagtggaattccacgtgtagcggtgaaatgcgtagagatgtggaggaacaccagtggcgaaggcgactctctggtctgtaactgacgctgaggagcgaaagcgtggggagcgaacaggattagataccctggtagtccacgccgtaaacgatgagtgctaggtgttagggggtttccgccccttagtgctgaagttaacgcattaagcactccgcctggggagtacggccgcaaggctgaaactcaaaagaattgacgggggcccgcacaagcggtggagcatgtggtttaattcgaagcaacgcgaagaaccttaccaggtcttgacatcctctgccagcgatagagatatcgtgttcccttcggggacagagtgacaggtggtgcatggttgtcgtcagctcgtgtcgtgagatgttgggttaagtcccgcaacgagcgcaacccttgatcttagttgccagcatttagttgggcactctaaggtgactgccggtgacaaaccggaggaaggtggggatgacgtcaaatcatcatgccccttatgacctgggctacacacgtgctacaatggatggaacaaagggaagcgaagccgcgaggtgtagcaaatcccataaaaccattctcagttcggattgcaggctgcaactcgcctgcatgaagccggaatcgctagtaatcgcggatcagcatgccgcggtgaatacgttcccgggccttgtacacaccgcccgtcacaccacgagagttggcaacacccgaagtcggtgaggtaacctttatgga

SEQ ID NO: 3564 - DNA, 1485 bp, Virgibacillus soli
gacgaacgctggcggcgtgcctaatacatgcaagtcgagcgcgggaagcaagctgatcccttcggggtgacgcttgtggaacgagcggcggacgggtgagtaacacgtgggcaacctacctgtaagactgggataactccgggaaaccggggctaataccggatgatactttttaccacatggtgagaagatgaaagatggcttcggctatcacttacagatgggcccgcggcgcattagctagttggtgggataacggcctaccaaggcaacgatgcgtagccgacctgagagggtgatcggccacactgggactgagacacggcccagactcctacgggaggcagcagtagggaatcttccgcaatggacgaaagtctgacggagcaacgccgcgtgagtgatgaaggttttcggatcgtaaaactctgttgttagggaagaacaagtaccgtttaaataaggcggtaccttgacggtacctaaccagaaagccccggctaactacgtgccagcagccgcggtaatacgtagggggcaagcgttgtccggaattattgggcgtaaagcgcgcgcaggcggccttttaagtctgatgtgaaagtctacggcttaaccgtagaaggccattggaaactggagggcttgagtgcagaagaggagagtggaattccatgtgtagcggtgaaatgcgtagagatatggaggaacaccagtggcgaaggcgactctctggtctgcaactgacgctgaggcgcgaaagcgtgggtagcgaacaggattagataccctggtagtccacgccgtaaacgatgagtgctaggtgttagggggtttccgccccttagtgctgaagttaacgcattaagcactccgcctggggagtacggccgcaaggctgaaactcaaaagaattgacgggggcccgcacaagcggtggagcatgtggtttaattcgaagcaacgcgaagaaccttaccaggtcttgacatcctctgacaactctagagatagagctttcccttcggggacagagtgacaggtggtgcatggttgtcgtcagctcgtgtcgtgagatgttgggttaagtcccgcaacgagcgcaacccttgatcttagttgccagcattaagttgggcactctaaggtgactgccggtgacaaaccggaggaaggtggggatgacgtcaaatcatcatgccccttatgacctgggctacacacgtgctacaatggatggtacagagggcagcgaagccgcgaggtgaagcaaatcccacaaaaccattctcagttcggattgcaggctgcaactcgcctgcatgaagccggaatcgctagtaatcgtggatcagcatgccacggtgaatacgttcccgggccttgtacacaccgcccgtcacaccacgagagttgacaacacccgaagtcggtgaggtaaccgtaaggagccagccgccgaaggtggggccaatgattggggtg

SEQ ID NO: 3565 - DNA, 1443 bp, Vitreoscilla filiformis
gctggcggcatgccttacacatgcaagtcgacggtagagggggcaaccccttgagagtggcgaacgggtgagtaatgcatcggaacgtgcccagttgtgggggataacacttcgaaagaagtgctaataccgcatacgacctgagggtgaaagcgggggactcgcaagagcctcgcgcaattggagcggccgatgtcagattaggtagttggtggggtaaaggcctaccaagccgacgatctgtagctggtctgagaggacgaccagccacactgggactgagacacggcccagactcctacgggaggcagcagtggggaattttggacaatggacgcaagtctgatccagccatgccgcgtgcaggaagaaggccttcgggttgtaaactgcttttgtcagggaagaaatcccttgggttaatacctcggggggatgacggtacctgaagaataagcaccggctaactacgtgccagcagccgcggtaatacgtagggtgcaagcgttaatcggaattactgggcgtaaagcgtgcgcaggcggttttgtaagacagaggtgaaatccccgggctcaacctgggaactgcctttgtgactgcaaagcttgagtgcggcagagggggatggaattccgcgtgtagcagtgaaatgcgtagatatgcggaggaacaccgatggcgaaggcaatcccctgggcctgcactgacgctcatgcacgaaagcgtggggagcaaacaggattagataccctggtagtccacgccctaaacgatgtcaactggttgttgggagggtttcttctcagtaacgaagctaacgcgtgaagttgaccgcctggggagtacggccgcaaggttgaaactcaaaggaattgacggggacccgcacaagcggtggatgatgtggtttaattcgatgcaacgcgaaaaaccttacctacccttgacatggcaggaatcttgcagagatgtgagagtgctcgaaagagaacctgcacacaggtgctgcatggccgtcgtcagctcgtgtcgtgagatgttgggttaagtcccgcaacgagcgcaacccttgtcattagttgctacgaaagggcactctaatgagactgccggtgacaaaccggaggaaggtggggatgacgtcaggtcctcatggcccttatgggtagggctacacacgtcatacaatggccgggacagagggctgccaaagcgcgagctggagccaatcccagaaacccggtcgtagtccggatcgcagtctgcaactcgactgcgtgaagtcggaatcgctagtaatcgcggatcagcatgtcgcggtgaatacgttcccgggtcttgtacacaccgcccgtcacaccatgggagcgggttctgccagaagtagttagcctaaccgcaaggagggcgattaccacggcaggtttcgtgactggggtg

SEQ ID NO: 3566 - DNA, 1456 bp, Vogesella indigofera
  misc_feature (55)..(55): n is a, c, g, or t
  misc_feature (133)..(133): n is a, c, g, or t
  misc_feature (825)..(826): n is a, c, g, or t
ttgaacgctggcggcatgctttacacatgcaagtcgaacggtaacagggagcttntccgctgacgagtggcgaacgggtgagtaatgcgtcggaacgtgccgagtagtgggggataacgcatcgaaaggtgtnctaataccgcatacgaactgaggttgaaagtgggggaccttcgggcctcacgctattcgagcggccgacgtctgattagctagttggtgaggtaaaggctcaccaaggcgacgatcagtagcgggtctgagaggatgatccgccacactgggactgagacacggcccagactcctacgggaggcagcagtggggaattttggacaatgggcgcaagcctgatccagccatgccgcgtgtctgaagaaggccttcgggttgtaaaggacttttgtccgggagcaaatgcctggtgttaatagcactgggagctgagagtaccggaagaataagcaccggctaactacgtgccagcagccgcggtaatacgtagggtgcaagcgttaatcggaattactgggcgtaaagcgtgcgcaggcggttttgtaagccagatgtgaaagccccgggctcaacctgggaactgcgtttggaactacaagactagagtgtgtcagaggggggtggaattccgcgtgtagcagtgaaatgcgtagagatgcggaggaacaccgatggcgaaggcagccccctgggataacactgacgctcatgcacgaaagcgtggggagcaaacaggattagataccctggtagtccacgccctaaacgatgtcaattagctgttgggggttagaatccttggtagcgtanntaacgcgtgaaattgaccgcctggggagtacggccgcaaggttaaaactcaaaggaattgacgggggcccgcacaagcggtggatgatgtggattaattcgatgcaacgcgaaaaaccttacctgctcttgacatgtacggaacttgccagagatggcttggtgcccgaaagggagccgtaacacaggtgctgcatggctgtcgtcagctcgtgtcgtgagatgttgggttaagtcccgcaacgagcgcaacccttgtcattagttgccatcattcagttgggcactctaatgagactgccggtgacaaaccggaggaaggtggggatgacgtcaagtcctcatggcccttatgagcagggcttcacacgtcatacaatggtcggtacagagggttgccaagccgcgaggtggagctaatctcttaaagccgatcgtagtccggattggagtctgcaactcgactccatgaagtcggaatcgctagtaatcgcaggtcagcatactgcggtgaatacgttcccgggccttgtacacaccgcccgtcacaccatgggagtggaatccgccagaagtgggtagggtaaccttagggagcccgcttaccacggtaggtttcatgactggggtg

SEQ ID NO: 3567 - DNA, 1434 bp, Volucribacter psittacicida
aagtcgaacggtaacgggaaagaaacttgtttcttttgctgacgagtggcggacgggtgagtaaggcttgggaatttggcttatggagggggataaccacgggaaactgtggctaataccgcgtaatatcgagagattaaagtagtgggactttttgccactagccataagataagcccaagtgagattagctagttggtggggtaaaggcctaccaaggcgacgatctctagctggtctgagaggatgaccagccacactgggactgagacacggcccagactcctacgggaggcagcagtggggaatattgcgcaatggagggaactctgacgcagccatgccgcgtgaatgaagaaggccttcgggttgtaaagttctttcggtggtgaggaaggttgttgctttaatagagtaacaaattgacgttagccacagaagaagcaccggctaactccgtgccagcagccgcggtaatacggagggtgcgagcgttaatcggaataactgggcgtaaagggcacgcaggcggtcacttaagtgaggtgtgaaatccctgggcttaacctaggaattgcatttcatactgggtgactagagtcctctagggaggggtagaattccacgtgtagcggtgaaatgcgtagagatgtggaggaataccgaaggcgaaggcagccccttggggagagactgacgctcatgtgcgaaagcgtggggagcaaacaggattagataccctggtagtccacgctgtaaacgctgtcgatttggggattgggcttaaatgcttggtgctcgtagttaacgtgataaatcgaccgcctggggagtacggccgcaaggttaaaactcaaatgaattgacgggggcccgcacaagcggtggagcatgtggtttaattcgatgcaacgcgaagaaccttacctactcttgacatcctaggaagcctttagagatagaggcgtgccgtaaggagcttagagacaggtgctgcatggctgtcgtcagctcgtgttgtgaaatgttgggttaagtcccgcaacgagcgcaacccttatcctttgttgccagcatttgaggtgggaactcaaaggagactgccagtgataaactggaggaaggtggggatgacgtcaagtcatcatggcccttacgagtagggctacacacgtgctacaatggtgcatacagagggcagcgagagtgcgagcttgagcgaatctcagaaagtgcatctaagtccggattggagtctgcaactcgactccatgaagtcggaatcgctagtaatcgcaaatcagaatgttgcggtgaatacgttcccgggccttgtacacaccgcccgtcacaccatgggagcgggttgtaccagaagtggatagcttaaccgcaagaggggcgttcaccacggtatgattcgtgactggggtg

SEQ ID NO: 3568 - DNA, 1477 bp, Vulcanibacillus modesticaldus
gacgaacgctggcggcgtgcctaatacatgcaagtcgagcgaagtttatgggagcttgctcctaataaacttagcggcggacgggtgagtaacacgtgggcaacctgcctgtaagactgggataaccccgggaaaccggagctaataccagataagctgttagtacgcatgtaataacagggaaagatggcgcaagctatcacttacagatgggcccgcggcgcattagctagttggtagggtaacggcctaccaaggcgacgatgcgtagccgacctgagagggtgatcggccacactgggactgagacacggcccagactcctacgggaggcagcagtagggaatcttccgcaatggacgaaagtctgacggagcaacgccgcgtgagtgatgaaggtcttcggattgtaaaactctgtcattagggaagaacagttatagtttgaataaggctataacgtgacggtacctaaagaggaagccccggctaactacgtgccagcagccgcggtaatacgtagggggcaagcgttgtccggaattattgggcgtaaagcgcgcgcaggcggctctttaagtctgatgtgaaagcccacggctcaaccgtggagggtcattggaaactggggagcttgagtgcaggagaggaaagtggaattccatgtgtagcggtgaaatgcgtagatatatggaggaacaccagtggcgaaggcggctttctggcctgtaactgacgctgaggcgcgaaagcgtggggagcaaacaggattagataccctggtagtccacgccgtaaacgatgagtgctaggtgttaggggtttcgacgcccttagtgccgcagttaacacattaagcactccgcctggggagtacggccgcaaggttgaaactcaaaggaattgacgggggcccgcacaagcagtggagcatgtggtttaattcgaagcaacgcgaagaaccttaccagggcttgacatcccgttgaccggtgtagagatacatctttttcttcggaaacaacggtgacaggtggtgcatggttgtcgtcagctcgtgtcgtgagatgttgggttaagtcccgcaacgagcgcaacccttgatcttagttgccagcattaagttgggcactctaaggtgactgccggtgacaaaccggaggaaggtggggatgacgtcaaatcatcatgccccttatgtcctgggctacacacgtgctacaatggctggtacaaagggtagcgaagccgcgaggccaagccaatcccaaaaagccagtctcagttcggattgtaggctgcaactcgcctacatgaagccggaattgctagtaatcgcggatcagcatgccgcggtgaatacgttcccgggccttgtacacaccgcccgtcacaccacgagagtttgcaacacccaaagtcggtgaggtaaccaatatggagccagccgcctaaggtggggcagatgattggggtg

SEQ ID NO: 3569 - DNA, 1476 bp, Vulgatibacter incomptus
aacgaacgctggcggcgtgcttaacacatgcaagtcgtgcgcgattgggtttcggcccagttgagcggcgaacgggtgcgtaacacgtggataatctgccttcaggcttggaataaccttccgaaaggagggctaatgccgaatgagctcacggggacttcggtccctgcgggaaaaggtggcctctatttataagctatcacctgaagatgagtccgcggcccatcagctagttggcggggtaatggcccaccaaggctacgacgggtagctggtctgagaggacgatcagccacactgggactgagacacggcccagactcctacgggaggcagcagtggggaatcttgcgcaatgggcgaaagcctgacgcagcaacgccgcgtgagtgatgaaggtctttggatcgtaaagctctttcggctgggaagaaacgcctcgtggctaatatccacggggtttgacggtaccagcagaagaagcaccggctaactctgtgccagcagccgcggtaatacagagggtgcaagcgttgttcggaattattgggcgtaaagcgcgcgcaggcgggattgcaagtcggatgtgaaagccctcggctcaaccggggaagtgcgttcgaaactgcagttcttgagtgtcggagagggtggcggaattcccggtgtagaggtgaaattcgtagatatcgggaggaacaccagaggcgaaggcggccacctggacgaacactgacgctgaggcgcgaaagcgtggggagcaaacaggattagataccctggtagtccacgccataaacgatgagagctagctgttgcgggtgttgacccctgcagtggcgaagccaacgcattaagctctccgcctgggaagtacggccgcaaggctaaaactcaaaggaattgacgggggcccgcacaagcggtggagcatgtggtttaattcgacgcaacgcgcagaaccttacctggtcttgacatccacggaacccgccagagatggtggggtgcccgcaagggaaccgtgagacaggtgctgcatggctgtcgtcagctcgtgtcgtgagatgttgggttaagtcccgcaacgagcgcaacccctgcctttagttgccatcattcagttgggcactctagagggactgccggtgtcaaaccggaggaaggtggggatgacgtcaagtcctcatggcctttatgaccagggctacacacgtgctacaatggccggtacaaagggttgccaaaccgcgaggtggagccaatctcaaaaaaccggtctcagttcggattggagtctgcaactcgactccatgaagtcggaatcgctagtaatcgcggatcagaacgccgcggtgaatacgttcccgggccttgtacacaccgcccgtcacaccatgggagtcgattgctccagaaatcggtgagccaaccgcaaggaggcagccgctcaaggagtggtcggtaactggggtg

SEQ ID NO: 3570 - DNA, 1475 bp, Waddlia chondrophila
attgaatgctgacggcgtggatgaggcatgcaagtcgaacgaagtgtgctcttgagtgcacttagtggcggaagggttagtaatacatgggtaatctacctttaactctgggataacggttggaaacgaccgctaataccggatatggtgctagagaggatctttttagcattaaagtgggggattgggcgaccgaccttacggttaaagaggggcccatgggatatcagctagttggtgaggtaaaggctcaccaaggctaagacgtctaggcgagttgagagattgaccgccaacactgggactgagacactgcccagactcctacgggaggctgcagtcgagaatctttcgcaatgggcgaaagcctgacgaagcgacgccgtgtgaatgaagaaggcccttgggtcgtaaagttctttcgcatgggaacaagagaaggatgctaatatcatctggatttgagcgtaccttgtaaagaagcaccggctaactccgtgccagcagctgcggtaatacggagggtgcgagcattaatcggatttattgggcgtaaagggggcgtaggctggaatataagtcagccgtgaaatcccggggctcaaccccggaactgcgtttgaaactatatttctagaggcaaggcggagaaaacggaattccacatgtagcggtgaaatgcgtagatatgtggaagaacaccagtggcgaaggcggttttctagctttgacctgacgctgatgcccgaaagctaggggagcgaacaggattagataccctggtagtcctagccgtaaacgatgcatacttggtgtagccggactcaaccctggctgtgccgtagctaacgcgttaagtatgccgcctggggagtacgcccgcaagggtaaaactcaaaagaattgacggggacccgcacaagcagtggagcatgtggtttaattcgatgcaacgcgaagaaccttacctgggcttgacatatatatgacggctctagagatagagtattccttcgggacatatatacaggtgctgcatggctgtcgtcagctcgtgccgtgaggtgttgggttaagtcccgcaacgagcgcaacccttatcgttagttgccagcatttaggatgggaactctaacgagactgcctgggttaaccaggaggaaggtgaggatgacgtcaagtccgcatggcccttatgtccagggctacacacgtgctacaatggcaggtacagaaggcagcgaaaccgcgaggtcaagcaaatcctacaaagcctgtcccagttcggattggagtctgcaactcggctccatgaagttggaattgctagtaatggcgtgtcagcaataacgccgtgaatacgttcccgggtcttgtacacaccgcccgtcacatcatgggagttggtttcacccgaagtcgctgacttaaccgcaagggaagaggtgccgaaggtgaggctgatgactgggatg

SEQ ID NO: 3571 - DNA, 1470 bp, Wenzhouxiangella marina
attgaacgctggcggcatgcttaacacatgcaagtcgaacggtaacaggaactagcttgctagtttgctgacgagtggcggacgggtgagtaatacgtaggaatctgccttgcagcgggggatagcccgaggaaactcggattaataccgcatacgctctacggaggaaagtgggcctcttcttgaaagctcacactgcaagatgagcctacgtccgattagcttgttggtggggtaaaggcctaccaaggcgacgatcggtagctggtctgagaggatgatcagccacactgggactgagacacggcccagactcctacgggaggcagcagtggggaatattggacaatgggcgcaagcctgatccagcaatgccgcgtgtgtgaagaaggcctgcgggttgtaaagcacttttattaggaaagaaacggcctaggttaataccctatggcaattgacggtacctaatgaataagcaccggctaactccgtgccagcagccgcggtaatacggagggtgcaagcgttaatcggaattactgggcgtaaagcgtgcgtaggcggctacgtaagtcggatgtgaaagccccgggcttaacctgggaattgcattcgatactgtgtggctagagtttggtagaggtaagtggaattccaggtgtagcggtgaaatgcgtagatatctggaggaacaccagtggcgaaggcggcttactggaccaaaactgacgctgaggtacgaaagcgtgggtagcaaacaggattagataccctggtagtccacgccctaaacgatgtcaactagttgttgggagccttaatagctcttagtgacgaagctaacgcgttaagttgaccgcctggggagtacggccgcaaggttgaaactcaaaggaattgacgggggcccgcacaagcggtggagcatgtggtttaattcgatgcaacgcgaagaaccttaccagcccttgacatcctcggaacttactagagatagtttggtgccttcgggaaccgagtgacaggtgctgcatggctgtcgtcagctcgtgtcgtgagatgttgggttaagtcccgcaacgagcgcaacccttatccttagttgccagcacttcgggtgggaactctaaggagactgccggtgataaaccggaggaaggtggggatgacgtcaagtcatcatggcccttacgggctgggctacacacgtgctacaatggtcggtacagagggaagcaaactcgcgagagccagcaaatcccagaaagccgatcttagtccggatcgcagtctgcaactcgactgcgtgaagtcggaatcgctagtaatcgcggatcagcattgccgcggtgaatacgttcccgggccttgtacacaccgcccgtcacaccatgggagttggctgcaccagaagcaggtagtctaaccttcgggaggacgcttgccacggtgtggtcaatgactggggtg

SEQ ID NO: 3572 - DNA, 1470 bp, Wenzhouxiangella sediminis
attgaacgctggcggcatgcctaacacatgcaagtcgaacggtaacaggagctagcttgctagcttgctgacgagtggcggacgggtgagtaacacgtaggaatctgcctagcagcgggggatagcccggggaaactcggattaataccgcatacgctctacggaggaaagtgggcctcttcttgaaagctcacactgctagatgagcctacgtccgattagctagttggtggggtaaaggcctaccaaggcgacgatcggtagctggtctgagaggatgatcagccacaccgggactgagacacggcccggactcctacgggaggcagcagtggggaatattggacaatgggcgaaagcctgatccagcaatgccgcgtgtgtgaagaaggcctgcgggttgtaaagcacttttattagagaagaaatggcctgggctaataacccatggcagctgacggtatctaatgaataagcaccggctaactccgtgccagcagccgcggtaatacggagggtgcaagcgttaatcggaattactgggcgtaaagcgtgcgtaggcggctacgtaagtcggatgtgaaagccccgggcttaacctgggaattgcattcgatactgcgtggctagagtttggtagaggtaagtggaattccaggtgtagcggtgaaatgcgtagatatctggaggaacaccagtggcgaaggcggcttactggaccaaaactgacgctgaggtacgaaagcgtgggtagcaaacaggattagataccctggtagtccacgccctaaacgatgtcaactagttgttgggagccttaatagctcttggtgacgaagctaacgcgttaagttgaccgcctggggagtacggccgcaaggttgaaactcaaaggaattgacgggggcccgcacaagcggtggagcatgtggtttaattcgatgcaacgcgaagaaccttaccagcccttgacatcctcggaatttggcagagatgccttagtgccttcgggaaccgagtgacaggtgctgcatggctgtcgtcagctcgtgtcgtgagatgttgggttaagtcccgcaacgagcgcaacccttgtccttagttgccagcgattcggtcgggaactctaaggagactgccggtgataaaccggaggaaggtggggatgacgtcaagtcatcatggcccttacgggctgggctacacacgtgctacaatggacggtacagagggccgcgaactcgcgagagtaagcaaatcccacaaagccgttcttagtccggatcgtagtctgcaactcgactgcgtgaagtcggaatcgctagtaatcgtagatcagcattgctacggtgaatacgttcccgggccttgtacacaccgcccgtcacaccatgggagttggctgcaccagaagcaggtagtctaaccttcgggaggacgcttgccacggtgtggtcaatgactggggtg

SEQ ID NO: 3573 - DNA, 1338 bp, Westiellopsis prolifica
gatgaacgctggcggtatgcttaacacatgcaagtcgaacggtctcttcggagatagtggcggacgggtgagtaacgcgtgagaatctggctcgaggtctgggacaaccactggaaacggtggctaataccggatgtgcctatgggtgaaagggaaactgcctggagatgagctcgcgtctgattagctagttgggggtgtaagagaccaccaaggcgacgatcagtagctggtctgagaggatgatcagccacactggaactgagacacggtccagactcctacgggaggcagcagtggggaattttccgcaatgggcgaaagcctgacggagcaataccgcgtgagggaggaaggctcttgggttgtaaacctcttttctcaaggaagaaagatgacggtacttgaggaatcagcatcggctaactccgtgccagcagccgcggtaatacggaggatgcaagcgttatccggaatgattgggcgtaaagcgtccgtaggtggctgtgtgtgtctattgttaaagagtttggctcaaccaaataagggcggtagaaactacacagctagagtgcgttcggggcagagggaattcctggtgtagcggtgaaatgcgtagagatcaggaagaacaccggtggcgaaagcgctctgctaggccgcaactgacactgagggacgaaagctaggggagcgaatgggattagataccccagtagtcctagccgtaaacgatggatactaggcgttgagagtatcgaccctctcagtgccgtagctaacgcgttaagtatcccgcctggggagtacgcacgcaagtgtgaaactcaaaggaattgacgggggcccgcacaagcggtggagtatgtggtttaattcgatgcaacgcgaagaaccttaccagggcttgacatgtctggaatcttggggaaactcaagagtgccttcgggagccagaacacaggtggtgcatggctgtcgtcagctcgtgtcgtgagatgttgggttaagtcccgcaacgagcgcaaccctcgtacttagttgccagcatttaggatgggcactctaaggagactgccggtgacaaaccggaggaaggtggggatgacgtcaagtcagcatgccccttacgtcctgggctacacacgtactacaatgctacggacaaagggcagcgagactgcgaagttaagcaaatctcagaaaccgtagctcagttcagatcgcaggctgcaactcgcctgcgtgaaggaggaatcgctagtaattgcaggtcagcatactgcagtgaattcgttcccgggccttgtacacaccgcccgtcacaccatggaagct

SEQ ID NO: 3574 - DNA, 1462 bp, Woeseia oceani
attgaacgctggcggcatgcctaacacatgcaagtcgaacggaaacgatggaagcttgcttccaggcgtcgagtggcggacgggtgagtaatgcttaggaatctgcccattagtgggggacaactcggggaaactcgagctaataccgcatacgccctacgggggaaagcgggggatcttcggacctcgcgctaatggatgagcctaagtcggattagcttgttggtggggtaaaagcctaccaaggcgacgatccgtagctggtctgagaggacgatcagccacactgggactgagacacggcccagactcctacgggaggcagcagtggggaatattggacaatgggggaaaccctgatccagcaatgccgcgtgtgtgaagaaggcctgcgggttgtaaagcactttcagtagagaagaaaagcctacggttaataaccgtgagtcttgacgttacctacagaagaagcaccggctaactccgtgccagcagccgcggtaatacggagggtgcaagcgttaatcggaattactgggcgtaaagcgcgcgtaggtggttctgtaagtcggatgtgaaagcccagggcttaaccttggaattgcattcgatactgcatgactagagtatggtagagggaagtggaatttccggtgtagcggtgaaatgcgtagatatcggaaggaacaccagtggcgaaggcgacttcctgggccaatactgacactgaggtgcgaaagcgtggggagcaaacaggattagataccctggtagtccacgccgtaaacgatgagaactagatgttgggagggttgcctctcggtgtcgaagctaacgcgttaagttctccgcctggggagtacgccggcaacggtaaaactcaaaggaattgacggggacccgcacaagcggtggagcatgtggtttaattcgatgcaacgcgaagaaccttacctgcccttgacatactcggaactttccagagatggattggtgccttcgggaaccgagatacaggtgctgcatggctgtcgtcagctcgtgtcgtgagatgttgggttaagtcccgcaacgagcgcaacccttgcccctagttgccagcacgtaatggtgggaactctagggggactgccggtgacaaaccggaggaaggtggggacgacgtcaagtcatcatggcccttatgggcagggctacacacgtgctacaatggcgtatacagagggccgcaaacctgcgaaggctagctaatcccttaaagtgcgtcgtagtccggatcggagtctgcaactcgactccgtgaagtcggaatcgctagtaatcgcgaatcagaatgtcgcggtgaatacgttcccgggtcttgtacacaccgcccgtcacaccatggaagttggttgcaccagaagtaggtagcttaaccctcgggagggcgcttaccacggtgtggctaatgactggggtg

SEQ ID NO: 3575 - DNA, 1412 bp, Wohlfahrtiimonas chitiniclastica
cctgcagtcgacggaacgatggagaagtttcttcttcaggcgtcgagtggcggacgggtgagtaatgcataggaatctgccctatagtttgggataactactcgaaagagtagctaataccggatgtggactacggtttaaagcaggggaccttcgggccttgcgctataggatgagcctatgtgggattagctagttggtgaggtaaaggctcaccaaggcgacgatctctagctggtctgagaggatgatcagccacactgggactgagacacggcccagactcctacgggaggcagcagtggggaatattggacaatgggcggaagcctgatccagcaataccgcgtgtgtgaagaaggccttcgggttgtaaagcacttttgtcagggagaatggcagttgaggttaatacccttagctgttgatgttacctgaagaataagcaccggctaactccgtgccagcagccgcggtaatacggggggtgcaagcgttaatcggaattactgggcgtaaagggcgcgtaggcggttacttaagttagatgtgaaagccccgggcttaacctgcgaattgcatttaatactgggtaactacagtgtggtagagagtagcggaatttctggtgtagcggtgaaatgcgtagatatcagaaggaacaccaatggcgaaggcagctgcttgggccaacactgacgctgaggcgcgaaagcgtggggagcaaacaggattagataccctggtagtccacgctgtaaacgatgacaacttattgatgggagggttacctttcgttgatgtagctaacgtgttaagttgtccgcctggggagtacggtcgcaaggctgaaactcaaaggaattgacggggacccgcacaagcggtggagcatgtggtttaattcgatgcaacgcgaagaaccttacctggtcttgacatctacagaactttccagagatggattggtgccttcgggaactgtaagacaggtgctgcatggctgtcgtcagctcgtgtcgtgagatgttgggttaagtcccgcaacgagcgcaacccttgtccttatttgccagcacgtaatggtgggaactttaaggagactgccgatgataaatcggaggaaggtggggatgacgtcaagtcatcatggcccttatgaccagggctacacacgtgctacaatggtcggtacaaagggaagccaagccgcgaggtggagcaaatccaataaaaccgatcgtagtccggattggagtctgcaactcgactccatgaagtcggaatcgctagtaatcgtagaacagaatgctacggtgaatacgttcccggggcttgtacacaccgcccgtcacaccatgggagttgattgctccagaagtaggtagctttaaaaatggcgctaccacgag

SEQ ID NO: 3576 - DNA, 1422 bp, Wolinella succinogenes
agtgaacgctggcggcgtgcctaatacatgcaagtcgaacggtaacagggtgtagcttgctatactgctgacgagtggcgcacgggtgagtaatgcataggttatgtgccccatagtctggaatagccactggaaacggtgattaataccggatattcccgagaggggaaagtttttcgctatgggatcagcctatgtcctatcagcttgttggtgaggtaatggctcaccaaggctatgacgggtatccggcctgagagggtgatcggacacactggaactgagacacggtccagactcctacgggaggcagcagtagggaatattgctcaatgggcgaaagcctgaagcagcaacgccgcgtggaggatgaaggtcttcggattgtaaactccttttctaagagaagattatgacggtatcttaggaataagcaccggctaactccgtgccagcagccgcggtaatacggagggtgcaagcgttactcggaatcactgggcgtaaagagcacgtaggcggccttgcaagtcagatgtgaaatccaacggcttaaccgttgaactgcatttgaaactgcaaggctagagtatgggagaggtaggtggaattctcggtgtaggggtaaaatccgtagagatcgagaggaatactcattgcgaaggcgacctgctggaacattactgacgctgaggtgcgaaagcgtggggagcaaacaggattagataccctggtagtccacgccctaaacgatgaatgctagttgttgccctgcttgtcagggcagtaatgcagttaacacattaagcattccgcctggggagtacggtcgcaagattaaaactcaaaggaatagacggggacccgcacaagcggtggagcatgtggtttaattcgaagatacgcgaagaaccttacctgggcttgacattgatagaatcctatagagatatgggagtgccagtttactggagcttgaaaacaggtgctgcacggctgtcgtcagctcgtgtcgtgagatgttgggttaagtcccgcaacgagcgcaaccctcgtcactagttgctaacggttcggccgagcactctagtgagactgccttcgcaaggaggaggaaggtgaggacgacgtcaagtcatcatggcccttacgcccagggctacacacgtgctacaatggtgtgtacaaagagaagcaataccgcgaggtggagcaaatctttaaaacacatctcagttcggattgtagtctgcaactcgactacatgaagctggaatcgctagtaatcgtagatcagcaatgctacggtgaatacgttcccgggtcttgtactcaccgcccgtcacaccatgggagttgtattcgccttaagccgggacgctaaactggctaccgtccacggcggatgcagcgactggggtg

SEQ ID NO: 3577 - DNA, 1407 bp, Xanthobacter autotrophicus
agcgaacgctggcggcaggcctaacacatgcaagtcgagcgcccagcaatgggagcggcagacgggtgagtaacacgtggggatctacccaatggtacggaataacccagggaaacttggactaataccgtatgtgcccttcgggggaaagatttatcgccattggatgaacccgcgtcggattagctagttggtgaggtaaaggctcaccaaggcgacgatccgtagctggtctgagaggatgatcagccacactgggactgagacacggcccagactcctacgggaggcagcagtggggaatattggacaatgggcgcaagcctgatccagccatgccgcgtgtgtgatgaaggccttagggttgtaaagcactttcgccggtgaagataatgacggtaaccggagaagaagccccggctaacttcgtgccagcagccgcggtaatacgaagggggcaagcgttgctcggaatcactgggcgtaaagcgcacgtaggcgggttgttaagtcagaggtgaaatcctggagctcaactccagaactgcctttgatactggcgaccttgagttcgagagaggttggtggaactgcgagtgtagaggtgaaattcgtagatattcgcaagaacaccagtggcgaaggcggccaactggctcgatactgacgctgaggtgcgaaagcgtggggagcaaacaggattagataccctggtagtccacgccgtaaacgatggatgctagccgttaggcagcttgctgcttagtggcgcagctaacgcattaagcatcccgcctggggagtacggtcgcaagattaaaactcaaaggaattgacgggggcccgcacaagcggtggagcatgtggtttaattcgaagcaacgcgcagaaccttaccagcctttgacatggcaggacgatttccagagatggatctcttccagcaatggacctgcacacaggtgctgcatggctgtcgtcagctcgtgtcgtgagatgttgggttaagtcccgcaacgagcgcaaccctcgcctctagttgccagcattcagttgggcactctagagggactgccggtgataagccgcgaggaaggtggggatgacgtcaagtcctcatggcccttacgggctgggctacacacgtgctacaatggcggtgacagtgggatgcaaaggggcgacccctagcaaatctccaaaagccgtctcagttcggattgcactctgcaactcgagtgcatgaagttggaatcgctagtaatcgtggatcagcatgccacggtgaatacgttcccgggccttgtacacaccgcccgtcacaccatgggagttggctttacccgaaggcgctgcgctaacccgcaagggaggcaggcgaccacggtagggtcagcgactggggtg

SEQ ID NO: 3578 - DNA, 1400 bp, Xanthobacter tagetidis
gctggcggcaggcctaacacatgcaagtcgagcgcccagcaatgggagcggcagacgggtgagtaacgcgtggggatctgccctttggtacggaataacccagggaaacttggactaataccgtatgtgcccttcgggggaaagatttatcgccaaaggatgaacccgcgtctgattagctagttggtggggtaatggcccaccaaggcgacgatcagtagctggtctgagaggatgatcagccacactgggactgagacacggcccagactcctacgggaggcagcagtggggaatattggacaatgggcgaaagcctgatccagccatgccgcgtgagtgatgaaggccttagggttgtaaagctctttcgccggtgaagataatgacggtaaccggagaagaagccccggctaacttcgtgccagcagccgcggtaatacgaagggggctagcgttgctcggaatcactgggcgtaaagcgcacgtaggcggatcgttaagtcaggggtgaaatcctggagctcaactccagaactgcccttgatactggcgatctcgagttcgagagaggttggtggaactccgagtgtagaggtgaaattcgtagatattcggaagaacaccagtggcgaaggcggccaactggctcgatactgacgctgaggtgcgaaagcgtggggagcaaacaggattagataccctggtagtccacgccgtaaacgatggatgctagccgttggggggtttacctttcagtggcgcagctaacgccttaagcatcccgcctggggagtacggtcgcaagattaaaactcaaaggaattgacgggggcccgcacaagcggtggagcatgtggtttaattcgaagcaacgcgcagaaccttaccagcctttgacatggcaggacgacttccggagacggatttcttccagcaatggacctgcacacaggtgctgcatggctgtcgtcagctcgtgtcgtgagatgttgggttaagtcccgcaacgagcgcaaccctcgcctctagttgccagcattaagttgggcactctagagggactgccggtgataagccgagaggaaggtggggatgacgtcaagtcctcatggcccttacgggctgggctacacacgtgctacaatggtggtgacagtgggatgcaaaagggcgacctctagcaaatctccaaaagccatctcagttcggattgcactctgcaactcgagtgcatgaagttggaatcgctagtaatcgtggatcagcatgccacggtgaatacgttcccgggccttgtacacaccgcccgtcacaccatgggagttggctttacccgaaggcgctgcgctaacccgcaagggaggcaggcgaccacggtagggtcagcgactggggtg

SEQ ID NO: 3579 - DNA, 1467 bp, Xanthomonas albilineans
  misc_feature (610)..(610): n is a, c, g, or t
  misc_feature (635)..(635): n is a, c, g, or t
agtgaacgctggcggcaggcctaacacatgcaagtcgaacggcagcacagtggtagcaataccatgggtggcgagtggcggacgggtgaggaatacatcggaatctaccttttcgtgggggataacgtagggaaacttacgctaataccgcatacgaccttagggtgaaagcggaggaccttcgggcttcgcgcggatagatgagccgatgtcggattagctagttggtggggtaaaggcccaccaaggcgacgatccgtagctggtctgagaggatgatcagccacactggaactgagacacggtccagactcctacgggaggcagcagtggggaatattggacaatgggcgcaagcctgatccagccatgccgcgtgggtgaagaaggccttcgggttgtaaagcccttttgttggggaagaaaagcagtcggttaatacccgattgttctgacggtacccaaagaataagcaccggctaacttcgtgccagcagccgcggtaatacgaagggtgcaagcgttactcggaattactgggcgtaaagcgtgcgtaggtggttgtttaagtccgttgtgaaagccctgggctcaacctgggaattgcagnggatactgggcaactagagtgtggnagaggatggcggaattcccggtgtagcagtgaaatgcgtagagatcgggaggaacatctgtggcgaaggcggccatctggaccaacactgacactgaggcacgaaagcgtggggagcaaacaggattagataccctggtagtccacgccctaaacgatgcgaactggatgttgggtgcaacttggcacgcagtatcgaagctaacgcgttaagttcgccgcctggggagtacggtcgcaagactgaaactcaaaggaattgacgggggcccgcacaagcggtggagtatgtggtttaattcgatgcaacgcgaagaaccttacctggtcttgacatccacggaactttccagagatggattggtgccttcgggaaccgtgagacaggtgctgcatggctgtcgtcagctcgtgtcgtgagatgttgggttaagtcccgcaacgagcgcaacccttgtccttagttgccagcacgtaatggtgggaactctaaggagaccgccggtgacaaaccggaggaaggtggggatgacgtcaagtcatcatggcccttacgaccagggctacacacgtactacaatggtaaggacagagggctgcaaactcgcgagagtgagccaatcccagaaaccttatctcagtccggattggagtctgcaactcgactccatgaagtcggaatcgctagtaatcgcagatcagcattgctgcggtgaatacgttcccgggccttgtacacaccgcccgtcacaccatgggagtttgttgcaccagaagcaggtagcttaaccttcgggagggcgcttgccacggtgtggccgatgactggggtg

SEQ ID NO: 3580 - DNA, 1469 bp, Xanthomonas alfalfae
agtgaacgctggcggcaggcctaacacatgcaagtcgaacggcagcacagtaagagcttgctcttatgggtggcgagtggcggacgggtgaggaatacatcggaatctactctttcgtgggggataacgtagggaaacttacgctaataccgcatacgacctacgggtgaaagcggaggaccttcgggcttcgcgcggttgaatgagccgatgtcggattagctagttggcggggtaaaggcccaccaaggcgacgatccgtagctggtctgagaggatgatcagccacactggaactgagacacggtccagactcctacgggaggcagcagtggggaatattggacaatgggcgcaagcctgatccagccatgccgcgtgggtgaagaaggccttcgggttgtaaagcccttttgttgggaaagaaaagcagtcggttaatacccgattgttctgacggtacccaaagaataagcaccggctaacttcgtgccagcagccgcggtaatacgaagggtgcaagcgttactcggaattactgggcgtaaagcgtgcgtaggtggtggtttaagtctgttgtgaaagccctgggctcaacctgggaattgcagtggatactggatcactagagtgtggtagagggtagcggaattcccggtgtagcagtgaaatgcgtagagatcgggaggaacatccgtggcgaaggcggctacctggaccaacactgacactgaggcacgaaagcgtggggagcaaacaggattagataccctggtagtccacgccctaaacgatgcgaactggatgttgggtgcaatttggcacgcagtatcgaagctaacgcgttaagttcgccgcctggggagtacggtcgcaagactgaaactcaaaggaattgacgggggcccgcacaagcggtggagtatgtggtttaattcgatgcaacgcgaagaaccttacctggtcttgacatccacggaactttccagagatggattggtgccttcgggaaccgtgagacaggtgctgcatggctgtcgtcagctcgtgtcgtgagatgttgggttaagtcccgcaacgagcgcaacccttgtccttagttgccagcacgtaatggtgggaactctaaggagaccgccggtgacaaaccggaggaaggtggggatgacgtcaagtcatcatggcccttacgaccagggctacacacgtactacaatggtagggacagagggctgcaaacccgcgagggcaagccaatcccagaaaccctatctcagtccggattggagtctgcaactcgactccatgaagtcggaatcgctagtaatcgcagatcagcattgctgcggtgaatacgttcccgggccttgtacacaccgcccgtcacaccatgggagtttgttgcaccagaagcaggtagcttaaccttcgggagggcgcttgccacggtgtggccgatgactggggtg

SEQ ID NO: 3581 - DNA, 1469 bp, Xanthomonas arboricola
agtgaacgctggcggcaggcctaacacatgcaagtcgaacggcagcacagtaagagcttgctcttatgggtggcgagtggcggacgggtgaggaatacatcggaatctactctttcgtgggggataacgtagggaaacttacgctaataccgcatacgacctacgggtgaaagcggaggaccttcgggcttcgcgcgattgaatgagccgatgtcggattagctagttggcggggtaaaggcccaccaaggcgacgatccgtagctggtctgagaggatgatcagccacactggaactgagacacggtccagactcctacgggaggcagcagtggggaatattggacaatgggcgcaagcctgatccagccatgccgcgtgggtgaagaaggccttcgggttgtaaagcccttttgttgggaaagaaaagcagtcggttaatacccgattgttctgacggtacccaaagaataagcaccggctaacttcgtgccagcagccgcggtaatacgaagggtgcaagcgttactcggaattactgggcgtaaagcgtgcgtaggtggtggtttaagtctgttgtgaaagccctgggctcaacctgggaattgcagtggatactgggtcactagagtgtggtagagggtagcggaattcccggtgtagcagtgaaatgcgtagagatcgggaggaacatccgtggcgaaggcggctacctggaccaacactgacactgaggcacgaaagcgtggggagcaaacaggattagataccctggtagtccacgccctaaacgatgcgaactggatgttgggtgcaatttggcacgcagtatcgaagctaacgcgttaagttcgccgcctggggagtacggtcgcaagactgaaactcaaaggaattgacgggggcccgcacaagcggtggagtatgtggtttaattcgatgcaacgcgaagaaccttacctggtcttgacatccacggaactttccagagatggattggtgccttcgggaaccgtgagacaggtgctgcatggctgtcgtcagctcgtgtcgtgagatgttgggttaagtcccgcaacgagcgcaacccttgtccttagttgccagcacgtcatggtgggaactctaaggagaccgccggtgacaaaccggaggaaggtggggatgacgtcaagtcatcatggcccttacgaccagggctacacacgtactacaatggtagggacagagggctgcaaacccgcgagggcaagccaatcccagaaaccctatctcagtccggattggagtctgcaactcgactccatgaagtcggaatcgctagtaatcgcagatcagcattgctgcggtgaatacgttcccgggccttgtacacaccgcccgtcacaccatgggagtttgttgcaccagaagcaggtagcttaaccttcgggagggcgcttgccacggtgtggccgatgactggggtg

SEQ ID NO: 3582 - DNA, 1469 bp, Xanthomonas axonopodis
agtgaacgctggcggcaggcctaacacatgcaagtcgaacggcagcacagtaagagcttgctcttatgggtggcgagtggcggacgggtgaggaatacatcggaatctactctttcgtgggggataacgtagggaaacttacgctaataccgcatacgacctacgggtgaaagcggaggaccttcgggcttcgcgcggttgaatgagccgatgtcggattagctagttggcggggtaaaggcccaccaaggcgacgatccgtagctggtctgagaggatgatcagccacactggaactgagacacggtccagactcctacgggaggcagcagtggggaatattggacaatgggcgcaagcctgatccagccatgccgcgtgggtgaagaaggccttcgggttgtaaagcccttttgttgggaaagaaaagcagtcggttaatacccgattgttctgacggtacccaaagaataagcaccggctaacttcgtgccagcagccgcggtaatacgaagggtgcaagcgttactcggaattactgggcgtaaagcgtgcgtaggtggtggtttaagtctgttgtgaaagccctgggctcaacctgggaattgcagtggatactggatcactagagtgtggtagagggtagcggaattcccggtgtagcagtgaaatgcgtagagatcgggaggaacatccgtggcgaaggcggctacctggaccaacactgacactgaggcacgaaagcgtggggagcaaacaggattagataccctggtagtccacgccctaaacgatgcgaactggatgttgggtgcaatttggcacacagtatcgaagctaacgcgttaagttcgccgcctggggagtacggtcgcaagactgaaactcaaaggaattgacgggggcccgcacaagcggtggagtatgtggtttaattcgatgcaacgcgaagaaccttacctggtcttgacatccacggaactttccagagatggattggtgccttcgggaaccgtgagacaggtgctgcatggctgtcgtcagctcgtgtcgtgagatgttgggttaagtcccgcaacgagcgcaacccttgtccttagttgccagcacgtcatggtgggaactctaaggagaccgccggtgacaaaccggaggaaggtggggatgacgtcaagtcatcatggcccttacgaccagggctacacacgtactacaatggtaaggacagagggctgcaaactcgcgagagtgagccaatcccagaaaccttatctcagtccggattggagtctgcaactcgactccatgaagtcggaatcgctagtaatcgcagatcagcattgctgcggtgaatacgttcccgggccttgtacacaccgcccgtcacaccatgggagtttgttgcaccagaagcaggtagcttaaccttcgggagggcgcttgccacggtgtggccgatgactggggtg

SEQ ID NO: 3583 - DNA, 1469 bp, Xanthomonas bromi
  misc_feature (38)..(39): n is a, c, g, or t
  misc_feature (56)..(56): n is a, c, g, or t
  misc_feature (60)..(60): n is a, c, g, or t
  misc_feature (1003)..(1003): n is a, c, g, or t
agtgaacgctggcggcaggcctaacacatgcaagtcgnncggcagcacagtaagancttnctcttatgggtggcgagtggcggacgggtgaggaatacatcggaatctactctttcgtgggggataacgtagggaaacttacgctaataccgcatacgacctacgggtgaaagcggaggaccttcgggcttcgcgcgattgaatgagccgatgtcggattagctagttggcggggtaaaggcccaccaaggcgacgatccgtagctggtctgagaggatgatcagccacactggaactgagacacggtccagactcctacgggaggcagcagtggggaatattggacaatgggcgcaagcctgatccagccatgccgcgtgggtgaagaaggccttcgggttgtaaagcccttttgttgggaaagaaaagcagtcggttaatacccgattgttctgacggtacccaaagaataagcaccggctaacttcgtgccagcagccgcggtaatacgaagggtgcaagcgttactcggaattactgggcgtaaagcgtgcgtaggtggtggtttaagtctgttgtgaaagccctgggctcaacctgggaattgcagtggatactgggtcactagagtgtggtagagggtagcggaattcccggtgtagcagtgaaatgcgtagagatcgggaggaacatccgtggcgaaggcggctacctggaccaacactgacactgaggcacgaaagcgtggggagcaaacaggattagataccctggtagtccacgccctaaacgatgcgaactggatgttgggtgcaatttggcacgcagtatcgaagctaacgcgttaagttcgccgcctggggagtacggtcgcaagactgaaactcaaaggaattgacgggggcccgcacaagcggtggagtatgtggtttaattcgatgcaacgcgaagaaccttacctggtcttgacatccacggaactttccagagatggattggtgncttcgggaaccgtgagacaggtgctgcatggctgtcgtcagctcgtgtcgtgagatgttgggttaagtcccgcaacgagcgcaacccttgtccttagttgccagcacgtaatggtgggaactctaaggagaccgccggtgacaaaccggaggaaggtggggatgacgtcaagtcatcatggcccttacgaccagggctacacacgtactacaatggtagggacagagggctgcaaacccgcgagggcaagccaatcccagaaaccctatctcagtccggattggagtctgcaactcgactccatgaagtcggaatcgctagtaatcgcagatcagcattgctgcggtgaatacgttcccgggccttgtacacaccgcccgtcacaccatgggagtttgttgcaccagaagcaggtagcttaaccttcgggagggcgcttgccacggtgtggccgatgactggggtg

SEQ ID NO: 3584 - DNA, 1469 bp, Xanthomonas campestris
agtgaacgctggcggcaggcctaacacatgcaagtcgaacggcagcacagtaagagcttgctcttatgggtggcgagtggcggacgggtgaggaatacatcggaatctactctttcgtgggggataacgtagggaaacttacgctaataccgcatacgacctacgggtgaaagcggaggaccttcgggcttcgcgcgattgaatgagccgatgtcggattagctagttggcggggtaaaggcccaccaaggcgacgatccgtagctggtctgagaggatgatcagccacactggaactgagacacggtccagactcctacgggaggcagcagtggggaatattggacaatgggcgcaagcctgatccagccatgccgcgtgggtgaagaaggccttcgggttgtaaagcccttttgttgggaaagaaaagcagtcggttaatacccgattgttctgacggtacccaaagaataagcaccggctaacttcgtgccagcagccgcggtaatacgaagggtgcaagcgttactcggaattactgggcgtaaagcgtgcgtaggtggtggtttaagtctgttgtgaaagccctgggctcaacctgggaattgcagtggatactgggtcactagagtgtggtagagggtagcggaattcccggtgtagcagtgaaatgcgtagagatcgggaggaacatccgtggcgaaggcggctacctggaccaacactgacactgaggcacgaaagcgtggggagcaaacaggattagataccctggtagtccacgccctaaacgatgcgaactggatgttgggtgcaatttggcacgcagtatcgaagctaacgcgttaagttcgccgcctggggagtacggtcgcaagactgaaactcaaaggaattgacgggggcccgcacaagcggtggagtatgtggtttaattcgatgcaacgcgaagaaccttacctggtcttgacatccacggaactttccagagatggattggtgccttcgggaaccgtgagacaggtgctgcatggctgtcgtcagctcgtgtcgtgagatgttgggttaagtcccgcaacgagcgcaacccttgtccttagttgccagcacgtaatggtgggaactctaaggagaccgccggtgacaaaccggaggaaggtggggatgacgtcaagtcatcatggcccttacgaccagggctacacacgtactacaatggtagggacagagggctgcaaacccgcgagggtaagccaatcccagaaaccctatctcagtccggattggagtctgcaactcgactccatgaagtcggaatcgctagtaatcgcagatcagcattgctgcggtgaatacgttcccgggccttgtacacaccgcccgtcacaccatgggagtttgttgcaccagaagcaggtagcttaaccttcgggagggcgcttgccacggtgtggccgatgactggggtg

SEQ ID NO: 3585 - DNA, 1469 bp, Xanthomonas citri
agtgaacgctggcggcaggcctaacacatgcaagtcgaacggcagcacagtaagagtttgctcttatgggtggcgagtggcggacgggtgaggaatacatcggaatctactctttcgtgggggataacgtagggaaacttacgctaataccgcatacgacctacgggtgaaagcggaggaccttcgggcttcgcgcggttgaatgagccgatgtcggattagctagttggcggggtaaaggcccaccaaggcgacgatccgtagctggtctgagaggatgatcagccacactggaactgagacacggtccagactcctacgggaggcagcagtggggaatattggacaatgggcgcaagcctgatccagccatgccgcgtgggtgaagaaggccttcgggttgtaaagcccttttgttgggaaagaaaagcagtcggttaatacccgattgttctgacggtacccaaagaataagcaccggctaacttcgtgccagcagccgcggtaatacgaagggtgcaagcgttactcggaattactgggcgtaaagcgtgcgtaggtggtggtttaagtctgttgtgaaagccctgggctcaacctgggaattgcagtggatactgggtcactagagtgtggtagagggtagcggaattcccggtgtagcagtgaaatgcgtagagatcgggaggaacatccgtggcgaaggcggctacctggaccaacactgacactgaggcacgaaagcgtggggagcaaacaggattagataccctggtagtccacgccctaaacgatgcgaactggatgttgggtgcaatttggcacgcagtatcgaagctaacgcgttaagttcgccgcctggggagtacggtcgcaagactgaaactcaaaggaattgacgggggcccgcacaagcggtggagtatgtggtttaattcgatgcaacgcgaagaaccttacctggtcttgacatccacggaactttccagagatggattggtgccttcgggaaccgtgagacaggtgctgcatggctgtcgtcagctcgtgtcgtgagatgttgggttaagtcccgcaacgagcgcaacccttgtccttagttgccagcacgtaatggtgggaactctaaggagaccgccggtgacaaaccggaggaaggtggggatgacgtcaagtcatcatggcccttacgaccagggctacacacgtactacaatggtagggacagagggctgcaaacccgcgagggcaagccaatcccagaaaccctatctcagtccggattggagtctgcaactcgactccatgaagtcggaatcgctagtaatcgcagatcagcattgctgcggtgaatacgttcccgggccttgtacacaccgcccgtcacaccatgggagtttgttgcaccagaagcaggtagcttaaccttcgggagggcgcttgccacggtgtggccgatgactggggtg

SEQ ID NO: 3586 - DNA, 1469 bp, Xanthomonas codiaei
  misc_feature (38)..(39): n is a, c, g, or t
  misc_feature (73)..(73): n is a, c, g, or t
agtgaacgctggcggcaggcctaacacatgcaagtcgnncggcagcacagtaagagcttgctcttatgggtgncgagtggcggacgggtgaggaatacatcggaatctactctttcgtgggggataacgtagggaaacttacgctaataccgcatacgacctacgggtgaaagcggaggaccttcgggcttcgcgcggttgaatgagccgatgtcggattagctagttggcggggtaaaggcccaccaaggcgacgatccgtagctggtctgagaggatgatcagccacactggaactgagacacggtccagactcctacgggaggcagcagtggggaatattggacaatgggcgcaagcctgatccagccatgccgcgtgggtgaagaaggccttcgggttgtaaagcccttttgttgggaaagaaaagcaatcggttaatacccggttgttctgacggtacccaaagaataagcaccggctaacttcgtgccagcagccgcggtaatacgaagggtgcaagcgttactcggaattactgggcgtaaagcgtgcgtaggtggtgatttaagtctgttgtgaaagccctgggctcaacctgggaattgcagtggatactgggtcactagagtgtggtagagggtagcggaattcccggtgtagcagtgaaatgcgtagagatcgggaggaacatccgtggcgaaggcggctacctggaccaacactgacactgaggcacgaaagcgtggggagcaaacaggattagataccctggtagtccacgccctaaacgatgcgaactggatgttgggtgcaatttggcacgcagtatcgaagctaacgcgttaagttcgccgcctggggagtacggtcgcaagactgaaactcaaaggaattgacgggggcccgcacaagcggtggagtatgtggtttaattcgatgcaacgcgaagaaccttacctggtcttgacatccacggaactttccagagatggattggtgccttcgggaaccgtgagacaggtgctgcatggctgtcgtcagctcgtgtcgtgagatgttgggttaagtcccgcaacgagcgcaacccttgtccttagttgccagcacgtaatggtgggaactctaaggagaccgccggtgacaaaccggaggaaggtggggatgacgtcaagtcatcatggcccttacgaccagggctacacacgtactacaatggtagggacagagggctgcaaacccgcgagggcaagccaatcccagaaaccctatctcagtccggattggagtctgcaactcgactccatgaagtcggaatcgctagtaatcgcagatcagcattgctgcggtgaatacgttcccgggccttgtacacaccgcccgtcacaccatgggagtttgttgcaccagaagcaggtagcttaaccttcgggagggcgcttgccacggtgtggccgatgactggggtg

SEQ ID NO: 3587 - DNA, 1469 bp, Xanthomonas cucurbitae
  misc_feature (285)..(285): n is a, c, g, or t
  misc_feature (622)..(622): n is a, c, g, or t
  misc_feature (647)..(647): n is a, c, g, or t
  misc_feature (677)..(677): n is a, c, g, or t
agtgaacgctggcggcaggcctaacacatgcaagtcgaacggcagcacagtaagagcttgctcttatgggtggcgagtggcggacgggtgaggaatacatcggaatctactctttcgtgggggataacgtagggaaacttacgctaataccgcatacgacctacgggtgaaagcggaggaccttcgggcttcgcgcgattgaatgagccgatgtcggattagctagttggcggggtaaaggcccaccaaggcgacgatccgtagctggtctgagaggatgatcanccacactggaactgagacacggtccagactcctacgggaggcagcagtggggaatattggacaatgggcgcaagcctgatccagccatgccgcgtgggtgaagaaggccttcgggttgtaaagcccttttgttgggaaagaaaagcagtcggttaatacccgattgttctgacggtacccaaagaataagcaccggctaacttcgtgccagcagccgcggtaatacgaagggtgcaagcgttactcggaattactgggcgtaaagcgtgcgtaggtggtggtttaagtctgttgtgaaagccctgggctcaacctgggaattgcagtggatactggntcactagagtgtggtagagggtagnggaattcccggtgtagcagtgaaatgcgtngagatcgggaggaacatccgtggcgaaggcggctacctggaccaacactgacactgaggcacgaaagcgtggggagcaaacaggattagataccctggtagtccacgccctaaacgatgcgaactggatgttgggtgcaatttggcacgcagtatcgaagctaacgcgttaagttcgccgcctggggagtacggtcgcaagactgaaactcaaaggaattgacgggggcccgcacaagcggtggagtatgtggtttaattcgatgcaacgcgaagaaccttacctggtcttgacatccacggaactttccagagatggattggtgccttcgggaaccgtgagacaggtgctgcatggctgtcgtcagctcgtgtcgtgagatgttgggttaagtcccgcaacgagcgcaacccttgtccttagttgccagcacgtaatggtgggaactctaaggagaccgccggtgacaaaccggaggaaggtggggatgacgtcaagtcatcatggcccttacgaccagggctacacacgtactacaatggtagggacagagggctgcaaacccgcgagggtaagccaatcccagaaaccctatctcagtccggattggagtctgcaactcgactccatgaagtcggaatcgctagtaatcgcagatcagcattgctgcggtgaatacgttcccgggccttgtacacaccgcccgtcacaccatgggagtttgttgcaccagaagcaggtagcttaaccttcgggagggcgcttgccacggtgtggccgatgactggggtg

SEQ ID NO: 3588 - DNA, 1469 bp, Xanthomonas cynarae; identical to SEQ ID NO: 3584

SEQ ID NO: 3589 - DNA, 1452 bp, Xanthomonas dyei
ggcctaacacatgcaagtcgaacggcagcacagtaagagcttgctcttatgggtggcgagtggcggacgggtgaggaatacatcggaatctactctttcgtgggggataacgtagggaaacttacgctaataccgcatacgacctacgggtgaaagcggaggaccttcgggcttcgcgcgattgaatgagccgatgtcggattagctagttggcggggtaaaggcccaccaaggcgacgatccgtagctggtctgagaggatgatcagccacactggaactgagacacggtccagactcctacgggaggcagcagtggggaatattggacaatgggcgcaagcctgatccagccatgccgcgtgggtgaagaaggccttcgggttgtaaagcccttttgttgggaaagaaaagcagtcggttaatacccgattgttctgacggtacccaaagaataagcaccggctaacttcgtgccagcagccgcggtaatacgaagggtgcaagcgttactcggaattactgggcgtaaagcgtgcgtaggtggtggtttaagtctgttgtgaaagccctgggctcaacctgggaattgcagtggatactgggtcactagagtgtggtagagggtagcggaattcccggtgtagcagtgaaatgcgtagagatcgggaggaacatccgtggcgaaggcggctacctggaccaacactgacactgaggcacgaaagcgtggggagcaaacaggattagataccctggtagtccacgccctaaacgatgcgaactggatgttgggtgcaatttggcacgcagtatcgaagctaacgcgttaagttcgccgcctggggagtacggtcgcaagactgaaactcaaaggaattgacgggggcccgcacaagcggtggagtatgtggtttaattcgatgcaacgcgaagaaccttacctggtcttgacatccacggaactttccagagatggattggtgccttcgggaaccgtgagacaggtgctgcatggctgtcgtcagctcgtgtcgtgagatgttgggttaagtcccgcaacgagcgcaacccttgtccttagttgccagcacgtaatggtgggaactctaaggagaccgccggtgacaaaccggaggaaggtggggatgacgtcaagtcatcatggcccttacgaccagggctacacacgtactacaatggtagggacagagggctgcaaacccgcgagggcaagccaatcccagaaaccctatctcagtccggattggagtctgcaactcgactccatgaagtcggaatcgctagtaatcgcagatcagcattgctgcggtgaatacgttcccgggccttgtacacaccgcccgtcacaccatgggagtttgttgcaccagaagcaggtagcttaaccttcgggagggcgcttgccacggtgtggccgatgactggggtg

SEQ ID NO: 3590 - DNA, 1469 bp, Xanthomonas euvesicatoria; identical to SEQ ID NO: 3580

SEQ ID NO: 3591 - DNA, 1469 bp, Xanthomonas floridensis
agtgaacgctggcggcaggcctaacacatgcaagtcgaacggcagcacagtaagagcttgctcttatgggtggcgagtggcggacgggtgaggaatacatcggaatctactctttcgtgggggataacgtagggaaacttacgctaataccgcatacgacctacgggtgaaagcggaggaccttcgggcttcgcgcggttgaatgagccgatgtcggattagctagttggcggggtaaaggcccaccaaggcgacgatccgtagctggtctgagaggatgatcagccacactggaactgagacacggtccagactcctacgggaggcagcagtggggaatattggacaatgggcgcaagcctgatccagccatgccgcgtgggtgaagaaggccttcgggttgtaaagcccttttgttgggaaagaaaagcagtcggttaatacccgattgttctgacggtacccaaagaataagcaccggctaacttcgtgccagcagccgcggtaatacgaagggtgcaagcgttactcggaattactgggcgtaaagcgtgcgtaggtggtggtttaagtctgttgtgaaagccctgggctcaacctgggaattgcagtggatactgggtcactagagtgtggtagagggtagcggaattcccggtgtagcagtgaaatgcgtagagatcgggaggaacatccgtggcgaaggcggctacctggaccaacactgacactgaggcacgaaagcgtggggagcaaacaggattagataccctggtagtccacgccctaaacgatgcgaactggatgttgggtgcaatttggcacgcagtatcgaagctaacgcgttaagttcgccgcctggggagtacggtcgcaagactgaaactcaaaggaattgacgggggcccgcacaagcggtggagtatgtggtttaattcgatgcaacgcgaagaaccttacctggtcttgacatccacggaactttccagagatggattggtgccttcgggaaccgtgagacaggtgctgcatggctgtcgtcagctcgtgtcgtgagatgttgggttaagtcccgcaacgagcgcaacccttgtccttagttgccagcacgtaatggtgggaactctaaggagaccgccggtgacaaaccggaggaaggtggggatgacgtcaagtcatcatggcccttacgaccagggctacacacgtactacaatggtagggacagagggctgcaaacccgcgagggcaagccaatcccagaaaccctatctcagtccggattggagtctgcaactcgactccatgaagtcggaatcgctagtaatcgcagatcagcattgctgcggtgaatacgttcccgggccttgtacacaccgcccgtcacaccatgggagtttgttgcaccagaagcaggtagcttaaccttcgggagggcgcttgccacggtgtggccgatgactggggtg

SEQ ID NO: 3592 - DNA, 1469 bp, Xanthomonas fragariae
  misc_feature (571)..(571): n is a, c, g, or t
  misc_feature (612)..(612): n is a, c, g, or t
  misc_feature (677)..(677): n is a, c, g, or t
agtgaacgctggcggcaggcctaacacatgcaagtcgaacggcagcacggtaagagcttgctcttatgggtggcgagtggcggacgggtgaggaatacatcggaatctactctttcgtgggggataacgtagggaaacttacgctaataccgcatacgacccacgggtgaaagcggaggaccttcgggcttcgcgcgattgaatgagccgatgtcggattagctagttggcggggtaaaggcccaccaaggcgacgatccgtagctggtctgagaggatgatcagccacactggaactgagacacggtccagactcctacgggaggcagcagtggggaatattggacaatgggcgcaagcctgatccagccatgccgcgtgggtgaagaaggccttcgggttgtaaagcccttttgttgggaaagaaaagcagtcggttaatacccgattgttctgacggtacccaaagaataagcaccggctaacttcgtgccagcagccgcggtaatacgaagggtgcaagcgttactcggaattactgggcgtaaagcgtgcgtaggtggtggtttangtctgttgtgaaagccctgggctcaacctgggaattgcagnggatactggatcactagagtgtggtagagggtagcggaattcccggtgtagcagttaaatccgtngagatcgggaggaacatccgtggcgaaggcggctacctggaccaacactgacactgaggcacgaaagcgtggggagcaaacaggattagataccctggtagtccacgccctaaacgatgcgaactggatgttgggtgcaatttggcacgcagtatcgaagctaacgcgttaagttcgccgcctggggagtacggtcgcaagactgaaactcaaaggaattgacgggggcccgcacaagcggtggagtatgtggtttaattcgatgcaacgcgaagaaccttacctggtcttgacatccacggaactttccagagatggattggtgccttcgggaaccgtgagacaggtgctgcatggctgtcgtcagctcgtgtcgtgagatgttgggttaagtcccgcaacgagcgcaacccttgtccttagttgccagcacgtaatggtgggaactctaaggagaccgccggtgacaaaccggaggaaggtggggatgacgtcaagtcatcatggcccttacgaccagggctacacacgtactacaatggtagggacagagggctgcaaacccgcgagggcaagccaatcccagaaaccctatctcagtccggattggagtctgcaactcgactccatgaagtcggaatcgctagtaatcgcagatcagcattgctgcggtgaatacgttcccgggccttgtacacaccgcccgtcacaccatgggagtttgttgcaccagaagcaggtagcttaaccttcgggagggcgcttgccacggtgtggccgatgactggggtg

SEQ ID NO: 3593 - DNA, 1469 bp, Xanthomonas fuscans
agtgaacgctggcggcaggcctaacacatgcaagtcgaacggcagcacagtaagagcttgctcttataggtggcgagtggcggacgggtgaggaatacatcggaatctactctttcgtgggggataacgtagggaaacttacgctaataccgcatacgacctacgggtgaaagcggaggaccttcgggcttcgcgcggttgaatgagccgatgtcggattagctagttggcggggtaaaggcccaccaaggcgacgatccgtagctggtctgagaggatgatcagccacactggaactgagacacggtccagactcctacgggaggcagcagtggggaatattggacaatgggcgcaagcctgatccagccatgccgcgtgggtgaagaaggccttcgggttgtaaagcccttttgttgggaaagaaaagcagtcggttaatacccgattgttctgacggtacccaaagaataagcaccggctaacttcgtgccagcagccgcggtaatacgaagggtgcaagcgttactcggaattactgggcgtaaagcgtgcgtaggtggtggtttaagtctgttgtgaaagccctgggctcaacctgggaattgcagtggatactggatcactagagtgtggtagagggtagcggaattcccggtgtagcagtgaaatgcgtagagatcgggaggaacatccgtggcgaaggcggctacctggaccaacactgacactgaggcacgaaagcgtggggagcaaacaggattagataccctggtagtccacgccctaaacgatgcgaactggatgttgggtgcaatttggcacgcagtatcgaagctaacgcgttaagttcgccgcctggggagtacggtcgcaagactgaaactcaaaggaattgacgggggcccgcacaagcggtggagtatgtggtttaattcgatgcaacgcgaagaaccttacctggtcttgacatccacggaactttccagagatggattggtgccttcgggaaccgtgagacaggtgctgcatggctgtcgtcagctcgtgtcgtgagatgttgggttaagtcccgcaacgagcgcaacccttgtccttagttgccagcacgtaatggtgggaactctaaggagaccgccggtgacaaaccggaggaaggtggggatgacgtcaagtcatcatggcccttacgaccagggctacacacgtactacaatggtagggacagagggctgcaaacccgcgagggcaagccaatcccagaaaccctatctcagtccggattggagtctgcaactcgactccatgaagtcggaatcgctagtaatcgcagatcagcattgctgcggtgaatacgttcccgggccttgtacacaccgcccgtcacaccatgggagtttgttgcaccagaagcaggtagcttaaccttcgggagggcgcttgccacggtgtggccgatgactggggtg

SEQ ID NO: 3594 - DNA, 1469 bp, Xanthomonas gardneri; identical to SEQ ID NO: 3584

SEQ ID NO: 3595 - DNA, 1469 bp, Xanthomonas hortorum; identical to SEQ ID NO: 3581

SEQ ID NO: 3596 - DNA, 1467 bp, Xanthomonas hyacinthi
  misc_feature (283)..(283): n is a, c, g, or t
agtgaacgctggcggcaggcctaacacatgcaagtcgaacggcagcacagtggtagcaatgccatgggtggcgagtggcggacgggtgaggaatacatcggaatctaccttttcgtgggggataacgtagggaaacttacgctaataccgcatacgaccttagggtgaaagcggaggaccttcgggcttcgcgcggatagatgagccgatgtcggattagctagttggcggggtaaaggcccaccaaggcgacgatccgtagctggtctgagaggatgatcanccacactggaactgagacacggtccagactcctacgggaggcagcagtggggaatattggacaatgggcgcaagcctgatccagccatgccgcgtgggtgaagaaggccttcgggttgtaaagcccttttgttgggaaagaaaagcagtcggttaatacccgattgttctgacggtacccaaagaataagcaccggctaacttcgtgccagcagccgcggtaatacgaagggtgcaagcgttactcggaattactgggcgtaaagcgtgcgtaggtggttgtttaagtccgttgtgaaagccctgggctcaacctgggaattgcagtggatactgggcaactagagtgtggtagaggatggcggaattcccggtgtagcagtgaaatgcgtagagatcgggaggaacatctgtggcgaaggcggccatctggaccaacactgacactgaggcacgaaagcgtggggagcaaacaggattagataccctggtagtccacgccctaaacgatgcgaactggatgttgggtgcaacttggcacgcagtatcgaagctaacgcgttaagttcgccgcctggggagtacggtcgcaagactgaaactcaaaggaattgacgggggcccgcacaagcggtggagtatgtggtttaattcgatgcaacgcgaagaaccttacctggtcttgacatccacggaactttccagagatggataggtgccttcgggaaccgtgagacaggtgctgcatggctgtcgtcagctcgtgtcgtgagatgttgggttaagtcccgcaacgagcgcaacccttgtccttagttgccagcacgtcatggtgggaactctaaggagaccgccggtgacaaaccggaggaaggtggggatgacgtcaagtcatcatggcccttacgaccagggctacacacgtactacaatggtgaggacagagggctgcaaactcgcgagagtgagccaatcccagaaacctcatctcagtccggattggagtctgcaactcgactccatgaagtcggaatcgctagtaatcgcagatcagcattgctgcggtgaatacgttcccgggccttgtacacaccgcccgtcacaccatgggagtttgttgcaccagaagcaggtagcttaaccttcgggagggcgcttgccacggtgtggccgatgactggggtg

SEQ ID NO: 3597 - DNA, 1467 bp, Xanthomonas melonis
agtgaacgctggcggcaggcctaacacatgcaagtcgaacggcagcacagtggtagcaataccatgggtggcgagtggcggacgggtgaggaatacatcggaatctaccttttcgtgggggataacgtagggaaacttacgctaataccgcatacgaccttagggtgaaagcggaggaccttcgggcttcgcgcggatagatgagccgatgtcggattagctagttggcggggtaaaggcccaccaaggcgacgatccgtagctggtctgagaggatgatcagccacactggaactgagacacggtccagactcctacgggaggcagcagtggggaatattggacaatgggcgcaagcctgatccagccatgccgcgtgggtgaagaaggccttcgggttgtaaagcccttttgttgggaaagaaaagcagtcggttaatacccgattgttctgacggtacccaaagaataagcaccggctaacttcgtgccagcagccgcggtaatacgaagggtgcaagcgttactcggaattactgggcgtaaagcgtgcgtaggtggttgtttaagtccgttgtgaaagccctgggctcaacctgggaattgcagtggatactgggcaactagagtgtggtagaggatggcggaattcccggtgtagcagtgaaatgcgtagagatcgggaggaacatctgtggcgaaggcggccatctggaccaacactgacactgaggcacgaaagcgtggggagcaaacaggattagataccctggtagtccacgccctaaacgatgcgaactggatgttgggtgcaacttggcacgcagtatcgaagctaacgcgttaagttcgccgcctggggagtacggtcgcaagactgaaactcaaaggaattgacgggggcccgcacaagcggtggagtatgtggtttaattcgatgcaacgcgaagaaccttacctggtcttgacatccacggaactttccagagatggattggtgccttcgggaaccgtgagacaggtgctgcatggctgtcgtcagctcgtgtcgtgagatgttgggttaagtcccgcaacgagcgcaacccttgtccttagttgccagcacgtcatggtgggaactttaaggagaccgccggtgacaaaccggaggaaggtggggatgacgtcaagtcatcatggcccttacgaccagggctacacacgtactacaatggtgaggacagagggctgcaaactcgcgagagtgagccaatcccagaaacctcatctcagtccggattggagtctgcaactcgactccatgaagtcggaatcgctagtaatcgcagatcagcattgctgcggtgaatacgttcccgggccttgtacacaccgcccgtcacaccatgggagtttgttgcaccagaagcaggtagcttaaccttcgggagggcgcttgccacggtgtggccgatgactggggtg

SEQ ID NO: 3598 - DNA, 1469 bp, Xanthomonas nasturtii
agtgaacgctggcggcaggcctaacacatgcaagtcgaacggcagcacagtaagagcttgctcttatgggtggcgagtggcggacgggtgaggaatacatcggaatctactctttcgtgggggataacgtagggaaacttacgctaataccgcatacgacctacgggtgaaagcggaggaccttcgggcttcgcgcgattgaatgagccgatgtcggattagctagttggcggggtaaaggcccaccaaggcgacgatccgtagctggtctgagaggatgatcagccacactggaactgagacacggtccagactcctacgggaggcagcagtggggaatattggacaatgggcgcaagcctgatccagccatgccgcgtgggtgaagaaggccttcgggttgtaaagcccttttgttgggaaagaaaagcagtcggttaatacccgattgttctgacggtacccaaagaataagcaccggctaacttcgtgccagcagccgcggtaatacgaagggtgcaagcgttactcggaattactgggcgtaaagcgtgcgtaggtggtggtttaagtctgttgtgaaagccctgggctcaacctgggaattgcagtggatactgggtcactagagtgtggtagagggtagcggaattcccggtgtagcagtgaaatgcgtagagatcgggaggaacatccgtggcgaaggcggctacctggaccaacactgacactgaggcacgaaagcgtggggagcaaacaggattagataccctggtagtccacgccctaaacgatgcgaactggatgttgggtgcaatttggcacgcagtatcgaagctaacgcgttaagttcgccgcctggggagtacggtcgcaagactgaaactcaaaggaattgacgggggcccgcacaagcggtggagtatgtggtttaattcgatgcaacgcgaagaaccttacctggtcttgacatccacggaactttccagagatggattggtgccttcgggaaccgtgagacaggtgctgcatggctgtcgtcagctcgtgtcgtgagatgttgggttaagtcccgcaacgagcgcaacccttgtccttagttgccagcacgtaatggtgggaactctaaggagaccgccggtgacaaaccggaggaaggtggggatgacgtcaagtcatcatggcccttacgaccagggctacacacgtactacaatggtagggacagagggctgcaaacccgcgagggcaagccaatcccagaaaccctatctcagtccggattggagtctgcaactcgactccatgaagtcggaatcgctagtaatcgcagatcagcattgctgcggtgaatacgttcccgggccttgtacacaccgcccgtcacaccatgggagtttgttgcaccagaagcaggtagcttaaccttcgggagggcgcttgccacggtgtggccgatgactggggtg

SEQ ID NO: 3599 - DNA, 1469 bp, Xanthomonas oryzae
agtgaacgctggcggcaggcctaacacatgcaagtcgaacggcagcacagtaagagcttgctcttatgggtggcgagtggcggacgggtgaggaatacatcggaatctactctttcgtgggggataacgtagggaaacttacgctaataccgcatacgacctacgggtgaaagcggaggaccttcgggcttcgcgcgattgaatgagccgatgtcggattagctagttggcggggtaaaggcccaccaaggcgacgatccgtagctggtctgagaggatgatcagccacactggaactgagacacggtccagactcctacgggaggcagcagtggggaatattggacaatgggcgcaagcctgatccagccatgccgcgtgggtgaagaaggccttcgggttgtaaagcccttttgttgggaaagaaaagcagtcggttaatacccgattgttctgacggtacccaaagaataagcaccggctaacttcgtgccagcagccgcggtaatacgaagggtgcaagcgttactcggaattactgggcgtaaagcgtgcgtaggtggtggtttaagtctgttgtgaaagccctgggctcaacctgggaattgcagtggatactgggtcactagagtgtggtagagggtagcggaattcccggtgtagcagtgaaatgcgtagagatcgggaggaacatcagtggcgaaggcggctacctggaccaacactgacactgaggcacgaaagcgtggggagcaaacaggattagataccctggtagtccacgccctaaacgatgcgaactggatgttgggtgcaatttggcacgcagtatcgaagctaacgcgttaagttcgccgcctggggagtacggtcgcaagactgaaactcaaaggaattgacgggggcccgcacaagcggtggagtatgtggtttaattcgatgcaacgcgaagaaccttacctggtcttgacatccacggaactttccagagatggattggtgccttcgggaaccgtgagacaggtgctgcatggctgtcgtcagctcgtgtcgtgagatgttgggttaagtcccgcaacgagcgcaacccttgtccttagttgccagcacgtaatggtgggaactctaaggagaccgccggtgacaaaccggaggaaggtggggatgacgtcaagtcatcatggcccttacgaccagggctacacacgtactacaatggtagggacagagggctgcaaacccgcgagggcaagccaatcccagaaaccctatctcagtccggattggagtctgcaactcgactccatgaagtcggaatcgctagtaatcgcagatcagcattgctgcggtgaatacgttcccgggccttgtacacaccgcccgtcacaccatgggagtttgttgcaccagaagcaggtagcttaaccttcgggagggcgcttgccacggtgtggccgatgactggggtg

SEQ ID NO: 3600 - DNA, 1469 bp, Xanthomonas perforans
agtgaacgctggcggcaggcctaacacatgcaagtcgaacggcagcacagtaagagcttgctcttatgggtggcgagtggcggacgggtgaggaatacatcggaatctactctttcgtgggggataacgtagggaaacttacgctaataccgcatacgacctacgggtgaaagcggaggaccttcgggcttcgcgcggttgaatgagccgatgtcggattagctagttggcggggtaaaggcccaccaaggcgacgatccgtagctggtctgagaggatgatcagccacactggaactgagacacggtccagactcctacgggaggcagcagtggggaatattggacaatgggcgcaagcctgatccagccatgccgcgtgggtgaagaaggccttcgggttgtaaagcccttttgttgggaaagaaaagcagtcggttaatacccgattgttctgacggtacccaaagaataagcaccggctaacttcgtgccagcagccgcggtaatacgaagggtgcaagcgttactcggaattactgggcgtaaagcgtgcgtaggtggtggtttaagtctgttgtgaaagccctgggctcaacctgggaattgcagtggatactggatcactagagtgtggtagagggtagcggaattcccggtgtagcagtgaaatgcgtagagatcgggaggaacatccgtggcgaaggcggctacctggaccaacactgacactgaggcacgaaagcgtggggagcaaacaggattagataccctggtagtccacgccctaaacgatgcgaactggatgttgggtgcaatttggcacgcagtatcgaagctaacgcgttaagttcgccgcctggggagtacggtcgcaagactgaaactcaaaggaattgacgggggcccgcacaagcggtggagtatgtggtttaattcgatgcaacgcgaagaaccttacctggtcttgacatccacggaactttccagagatggattggtgccttcgggaaccgtgagacaggtgctgcatggctgtcgtcagctcgtgtcgtgagatgttgggttaagtcccgcaacgagcgcaacccttgtccttagttgccagcacgtaatggtgggaactctaaggagaccgccggtgacaaaccggaggaaggtggggatgacgtcaagtcatcatggcccttacgaccagggctacacacgtactacaatggtagggacagagggctgcaaacccgcgagggcaagccaatcccagaaaccctatctcagtccggattggagtctgcaactcgactccatgaagtcggaatcgctagtaatcgcagatcagcattgctgcggtgaatacgttccggggccttgtacacaccgcccgtcacaccatgggagtttgttgcaccagaagcaggtagcttaaccttcgggagggcgcttgccacggtgtggccgatgactggggtg

SEQ ID NO: 3601 - DNA, 1450 bp, Xanthomonas phaseoli
  misc_feature (8)..(8): n is a, c, g, or t
gcctaacncatgcaagttcgacggcagcacagtaagagcttgctcttatgggtggcgagtggcggacgggtgaggaatacatcggaatctactctttcgtgggggataacgtagggaaacttacgctaataccgcatacgacctacgggtgaaagcggaggaccttcgggcttcgcgcggttgaatgagccgatgtcggattagctagttggcggggtaaaggcccaccaaggcgacgatccgtagctggtctgagaggatgatcagccacactggaactgagacacggtccagactcctacgggaggcagcagtggggaatattggacaatgggcgcaagcctgatccagccatgccgcgtgggtgaagaaggccttcgggttgtaaagcccttttgttgggaaagaaaagcagtcggttaatacccgattgttctgacggtacccaaagaataagcaccggctaacttcgtgccagcagccgcggtaatacgaagggtgcaagcgttactcggaattactgggcgtaaagcgtgcgtaggtggtggtttaagtctgttgtgaaagccctgggctcaacctgggaattgcagtggatactgggtcactagagtgtggtagagggtagcggaattcccggtgtagcagtgaaatgcgtagagatcgggaggaacatccgtggcgaaggggctacctggaccaacactgacactgaggcacgaaagcgtggggagcaaacaggattagataccctggtagtccacgccctaaacgatgcgaactggatgttgggtgcaatttggcacgcagtatcgaagctaacgcgttaagttcgccgcctggggagtacggtcgcaagactgaaactcaaaggaattgacgggggcccgcacaagcggtggagtatgtggtttaattcgatgcaacgcgaagaaccttacctggtcttgacatccacggaactttccagagatggattggtgccttcgggaaccgtgagacaggtgctgcatggctgtcgtcagctcgtgtcgtgagatgttgggttaagtcccgcaacgagcgcaacccttgtccttagttgccagcacgtaatggtgggaactctaaggagaccgccggtgacaaaccggaggaaggtggggatgacgtcaagtcatcatggcccttacgaccagggctacacacgtactacaatggtagggacagagggctgcaaacccgcgagggcaagccaatcccagaaaccctatctcagtccggattggagtctgcaactcgactccatgaagtcggaatcgctagtaatcgcagatcagcattgctgcggtgaatacgttcccgggccttgtacacaccgcccgtcacaccatgggagtttgttgcaccagaagcaggtagcttaaccttcgggagggcgcttgccacggtgtggccgatgactggggtg

SEQ ID NO: 3602 - DNA, 1469 bp, Xanthomonas pisi; identical to SEQ ID NO: 3598

SEQ ID NO: 3603 - DNA, 1469 bp, Xanthomonas populi
  misc_feature (608)..(608): n is a, c, g, or t
agtgaacgctggcggcaggcctaacacatgcaagtcgaacggcagcacagtaagagcttgctcttataggtggcgagtggcggacgggtgaggaatacatcggaatctactctttcgtgggggataacgtagggaaacttacgctaataccgcatacgacctacgggtgaaagcggaggaccttcgggcttcgcgtgattgaatgagccgatgtcggattagctagttggcggggtaaaggcccaccaaggcgacgatccgtagctggtctgagaggatgatcagccacactggaactgagacacggtccagactcctacgggaggcagcagtggggaatattggacaatgggcgcaagcctgatccagccatgccgcgtgggtgaagaaggccttcgggttgtaaagcccttttgttgggaaagaaaagcagtcggttaatacccgattgttctgacggtacccaaagaataagcaccggctaacttcgtgccagcagccgcggtaatacgaagggtgcaagcgttactcggaattactgggcgtaaagcgtgcgtaggtggtggtttaagtctgttgtgaaagccctgggctcaacctgggaattncagtggatactgggtcactagagtgtggtagagggtagcggaattcccggtgtagcagtgaaatgcgtagagatcgggaggaacatccgtggcgaaggcggctacctggaccaacactgacactgaggcacgaaagcgtggggagcaaacaggattagataccctggtagtccacgccctaaacgatgcgaactggatgttgggtgcaatttggcacgcagtatcgaagctaacgcgttaagttcgccgcctggggagtacggtcgcaagactgaaactcaaaggaattgacgggggcccgcacaagcggtggagtatgtggtttaattcgatgcaacgcgaagaaccttacctggtcttgacatccacggaactttccagagatggattggtgccttcgggaaccgtgagacaggtgctgcatggctgtcgtcagctcgtgtcgtgagatgttgggttaagtcccgcaacgagcgcaacccttgtccttagttgccagcacgtaatggtgggaactctaaggagaccgccggtgacaaaccggaggaaggtggggatgacgtcaagtcatcatggcccttacgaccagggctacacacgtactacaatggtagggacagagggctgcaaacccgcgagggtaagccaatcccagaaaccctatctcagtccggattggagtctgcaactcgactccatgaagtcggaatcgctagtaatcgcagatcagcattgctgcggtgaatacgttcccgggccttgtacacaccgcccgtcacaccatgggagtttgttgcaccagaagcaggtagcttaaccttcgggagggcgcttgccacggtgtggccgatgactggggtg

SEQ ID NO: 3604 - DNA, 1467 bp, Xanthomonas sacchari
  misc_feature (39)..(39): n is a, c, g, or t
  misc_feature (563)..(563): n is a, c, g, or t
agtgaacgctggcggcaggcctaacacatgcaagtcgancggcagcacaggagagcttgctctctgggtggcgagtggcggacgggtgaggaatacatcggaatctaccttttcgtgggggataacgtagggaaacttacgctaataccgcatacgaccttagggtgaaagcggaggaccttcgggcttcgcgcggatagatgagccgatgtcggattagctagttggcggggtaaaggcccaccaaggcgacgatccgtagctggtctgagaggatgatcagccacactggaactgagacacggtccagactcctacgggaggcagcagtggggaatattggacaatgggcgcaagcctgatccagccatgccgcgtgggtgaagaaggccttcgggttgtaaagcccttttgttgggaaagaaaagcagtcggttaatacccgattgttctgacggtacccaaagaataagcaccggctaacttcgtgccagcagccgcggtaatacgaagggtgcaagcgttactcggaattactgggcgtaaagcgtgcgtaggtggtngtttaagtccgttgtgaaagccctgggctcaacctgggaattgcagtggatactgggtcactagagtgtggtagagggtagcggaattcccggtgtagcagtgaaatgcgtagagatcgggaggaacatctgtggcgaaggcggccatctggaccaacactgacactgaggcacgaaagcgtggggagcaaacaggattagataccctggtagtccacgccctaaacgatgcgaactggatgttgggtgcaacttggcacgcagtatcgaagctaacgcgttaagttcgccgcctggggagtacggtcgcaagactgaaactcaaaggaattgacgggggcccgcacaagcggtggagtatgtggtttaattcgatgcaacgcgaagaaccttacctggtcttgacatccacggaactttccagagatggattggtgccttcgggaaccgtgagacaggtgctgcatggctgtcgtcagctcgtgtcgtgagatgttgggttaagtcccgcaacgagcgcaacccttgtccttagttgccagcacgtaatggtgggaactttaaggagaccgccggtgacaaaccggaggaaggtggggatgacgtcaagtcatcatggcccttacgaccagggctacacacgtactacaatggtagggacagagggctgcaagccggcgacggtgagccaatcccagaaaccctatctcagtccggattggagtctgcaactcgactccatgaagtcggaatcgctagtaatcgcagatcagcattgctgcggtgaatacgttcccgggccttgtacacaccgcccgtcacaccatgggagtttgttgcaccagaagcaggtagcttaaccttcgggagggcgcttgccacggtgtggccgatgactggggtg

SEQ ID NO: 3605 - DNA, 1469 bp, Xanthomonas theicola
  misc_feature (944)..(944): n is a, c, g, or t
  misc_feature (1122)..(1122): n is a, c, g, or t
agtgaacgctggcggcaggcctaacacatgcaagtcgaacggcagcacagtaagagcttgctcttatgggtggcgagtggcggacgggtgaggaatacatcggaatctactctttcgtgggggataacgtagggaaacttacgctaataccgcatacgacctacgggtgaaagcggaggaccttcgggcttcgcgcgattgaatgagccgatgtcggattagctagttggcggggtaaaggcccaccaaggcgacgatccgtagctggtctgagaggatgatcagccacactggaactgagacacggtccagactcctacgggaggcagcagtggggaatattggacaatgggcgcaagcctgatccagccatgccgcgtgggtgaagaaggccttcgggttgtaaagcccttttgttgggaaagaaaagcagtcggttaatacccgattgttctgacggtacccaaagaataagcaccggctaacttcgtgccagcagccgcggtaatacgaagggtgcaagcgttactcggaattactgggcgtaaagcgtgcgtaggtggtggtttaagtctgttgtgaaagccctgggctcaacctgggaattgcagtggatactgggtcactagagtgtggtagagggtagcggaattcccggtgtagcagtgaaatgcgtagagatcgggaggaacatccgtggcgaaggcggctacctggaccaacactgacactgaggcacgaaagcgtggggagcaaacaggattagataccctggtagtccacgccctaaacgatgcgaactggatgttgggtgcaatttggcacgcagtatcgaagctaacgcgttaagttcgccgcctggggagtacggtcgcaagactgaaactcaaaggaattgacgggggcccgcacaagcggtggagtatgtggtttaattcgatgcnacgcgaagaaccttacctggtcttgacatccacggaactttccagagatggattggtgccttcgggaaccgtgagacaggtgctgcatggctgtcgtcagctcgtgtcgtgagatgttgggttaagtcccgcaacgagcgcaacccttgtccttagttgccagcacgtaatggtgggnactctaaggagaccgccggtgacaaaccggaggaaggtggggatgacgtcaattcatcatggcccttacgaccagggctacacacgtactacaatggtagggacagagggctgcaaacccgcgagggtaagccaatcccagaaaccctatctcagtccggattggagtctgcaactcgactccatgaagtcggaatcgctagtaatcgcagatcagcattgctgcggtgaatacgttcccgggccttgtacacaccgcccgtcacaccatgggagtttgttgcaccagaagcaggtagcttaaccttcgggagggcgcttgccacggtgtggccgatgactggggtg

SEQ ID NO: 3606 - DNA, 1467 bp, Xanthomonas translucens
agtgaacgctggcggcaggcctaacacatgcaagtcgaacggcagcacagtggtagcaataccatgggtggcgagtggcggacgggtgaggaatacatcggaatctaccttttcgtgggggataacgtagggaaacttacgctaataccgcatacgaccttagggtgaaagcggaggaccttcgggcttcgcgcggatagatgagccgatgtcggattagctagttggcggggtaaaggcccaccaaggcgacgatccgtagctggtctgagaggatgatcagccacactggaactgagacacggtccagactcctacgggaggcagcagtggggaatattggacaatgggcgcaagcctgatccagccatgccgcgtgggtgaagaaggccttcgggttgtaaagcccttttgttgggaaagaaaagcagtcggttaatacccgattgttctgacggtacccaaagaataagcaccggctaacttcgtgccagcagccgcggtaatacgaagggtgcaagcgttactcggaattactgggcgtaaagcgtgcgtaggtggttgtttaagtccgttgtgaaagccctgggctcaacctgggaattgcagtggatactgggcaactagagtgtggtagaggatggcggaattcccggtgtagcagtgaaatgcgtagagatcgggaggaacatctgtggcgaaggcggccatctggaccaacactgacactgaggcacgaaagcgtggggagcaaacaggattagataccctggtagtccacgccctaaacgatgcgaactggatgttgggtgcaacttggcacgcagtatcgaagctaacgcgttaagttcgccgcctggggagtacggtcgcaagactgaaactcaaaggaattgacgggggcccgcacaagcggtggagtatgtggtttaattcgatgcaacgcgaagaaccttacctggtcttgacatccacggaactttccagagatggattggtgccttcgggaaccgtgagacaggtgctgcatggctgtcgtcagctcgtgtcgtgagatgttgggttaagtcccgcaacgagcgcaacccttgtccttagttgccagcacgtcatggtgggaactctaaggagaccgccggtgacaaaccggaggaaggtggggatgacgtcaagtcatcatggcccttacgaccagggctacacacgtactacaatggtgaggacagagggctgcaagctcgcgagagtaagccaatcccagaaacctcatctcagtccggattggagtctgcaactcgactccatgaagtcggaatcgctagtaatcgcagatcagcattgctgcggtgaatacgttcccgggccttgtacacaccgcccgtcacaccatgggagtttgttgcaccagaagcaggtagcttaaccttcgggagggcgcttgccacggtgtggccgatgactggggtg

SEQ ID NO: 3607 - DNA, 1469 bp, Xanthomonas vasicola; identical to SEQ ID NO: 3581

SEQ ID NO: 3608 - DNA, 1469 bp, Xanthomonas vesicatoria; identical to SEQ ID NO: 3598

SEQ ID NO: 3609 - DNA, 1465 bp, Xenorhabdus beddingii
attgaacgctggcggcaggcctaacacatgcaagtcgggcggtaacaggaaagtgcttgcacttttgctgacgagcggcggacgggtgagtaatgtctggggatctgcccgagagcgggggataaccactggaaacggtggctaataccgcataatgtcttcggaccaaagtgggggaccttcgggcctcacgctatcggatgaacccagatgggattagctagtaggtagggtaatggcctacctaggcgacgatccctagctggtctgagaggatgaccagccacactgggactgagacacggcccagactcctacgggaggcagcagtggggaatattgcacaatgggcgcaagcctgatgcagccatgccgcgtgtatgaagaaggccttcgggttgtaaagtactttcagcggggaggaaggcgtggacctgaatacggttcacgattgacgttacccgcagaagaagcaccggctaactccgtgccagcagccgcggtaatacggagggtgcaagcgttaatcggaattactgggcgtaaagcgcacgcaggcggtcaattaagttagatgtgaaatccccgggcttaacccgggaacggcacctaagactggttggctagagtctcgtagaggggggtagaattccacgtgtagcggtgaaatgcgtagagatgtggaggaataccggtggcgaaggcggccccctggacgaagactgacgctcaggtgcgaaagcgtggggagcaaacaggattagataccctggtagtccacgctgtaaacgatgtcgatttggaggttgtgcccttgaggcgtggcttccggagctaacgcgttaaatcgaccgcctggggagtacggccgcaaggttaaaactcaaatgaattgacgggggcccgcacaagcggtggagcatgtggtttaattcgatgcaacgcgaagaaccttacctactcttgacatccacggaattttgcagagatgcgaaagtgccttcgggaaccgtgagacaggtgctgcatggctgtcgtcagctcgtgttgtgaaatgttgggttaagtcccgcaacgagcgcaacccttatcctttgttgccagcacgtaatggtgggaactcaagggagactgccggtgataaaccggaggaaggtggggatgacgtcaagtcatcatggcccttacgagtagggctacacacgtgctacaatggcagatacaaagagaagcgacctcgcgagggcaagcggaactcataaagtctgtcgtagtccggattggagtctgcaactcgactccatgaagtcggaatcgctagtaatcgcagatcagaatgctgcggtgaatacgttcccgggccttgtacacaccgcccgtcacaccatgggagtgggttgcaaaagaagtcggtagcttaaccttcgggagggcgctgaccactttgtgattcatgactggggtg

SEQ ID NO: 3610 - DNA, 1465 bp, Xenorhabdus bovienii
  misc_feature (107)..(107): n is a, c, g, or t
  misc_feature (1430)..(1430): n is a, c, g, or t
attgaacgctggcggcaggcctaacacatgcaagtcgagcggcagcggggggaagcttgcttccccgccggcgagcggcggacgggtgagtaatgtctggggatctncccgatggagggggataaccactggaaacggtggctaataccgcataacctctgtggagtaaagtgggggaccttcgggcctcacgccatcggatgaacccagatgggattagctagtaggtggggtaatggctcacctaggcgacgatccctagctggtctgagaggatgaccagccacactgggactgagacacggcccagactcctacgggaggcagcagtggggaatattgcacaatgggcgcaagcctgatgcagccatgccgcgtgtatgaagaaggccttcgggttgtaaagtactttcagcggggaggaaggcaacagcgtaaatagcgctgttgattgacgttacccgcagaagaagcaccggctaactccgtgccagcagccgcggtaatacggagggtgcaagcgttaatcggaattactgggcgtaaagcgcacgcaggcggtcaattaagttagatgtgaaatccccgggctcaacctgggaacggcatctaaaactggttgactagagtctcgtagaggggggtagaattccacgtgtagcggtgaaatgcgtagagatgtggaggaataccggtggcgaaggcggccccctggacgaagactgacgctcaggtgcgaaagcgtggggagcaaacaggattagataccctggtagtccacgctgtaaacgatgtcgatttggaggttgtgcccttgaggcgtggcttccggagctaacgcgttaaatcgaccgcctggggagtacggccgcaaggttaaaactcaaatgaattgacgggggcccgcacaagcggtggagcatgtggtttaattcgatgcaacgcgaagaaccttacctactcttgacatcctcagaatttgctggagacagcgaagtgccttcgggaactgagagacaggtgctgcatggctgtcgtcagctcgtgttgtgaaatgttgggttaagtcccgcaacgagcgcaacccttatcctttgttgccagcacgtgatggtgggaactcaagggagactgccggtgataaaccggaggaaggtggggatgacgtcaagtcatcatggcccttacgagtagggctacacacgtgctacaatggcagatacaaagagaagcgacctcgcgagagcaagcggaactcataaagtctgtcgtagtccggattggagtctgcaactcgactccatgaagtcggaatcgctagtaatcgtagatcagaatgctacggtgaatacgttcccgggccttgtacacaccgcccgtcacaccatgggagtgggttgcaaaagaagtaggtagcttaaccttcgggngggcgcttaccactttgtgattcatgactggggtg

SEQ ID NO: 3611 - DNA, 1465 bp, Xenorhabdus budapestensis
attgaacgctggcggcaggcctaacacatgcaagtcgggcggcagcgggaggaagcgtgcttccttgccggcgagcggcggacgggtgagtaatgtctggggatctgcccgatggagggggataaccactggaaacggtggctaataccgcataacctcctgggagcaaagtgggggaccttcgggcctcacgccatcggatgaacccagatgggattagctagtaggtggggtaagggctcacctaggcgacgatccctagctggtctgagaggatgaccagccacactgggactgagacacggcccagactcctacgggaggcagcagtggggaatattgcacaatgggcggcagcctgatgcagccatgccgcgtgtatgaagaaggccttcgggttgtaaagtactttcagcggggaggaaggcataaaacttaataggttttatgattgacgttacccgcagaagaagcaccggctaactccgtgccagcagccgcggtaatacggagggtgcaagcgttaatcggaattactgggcgtaaagcgcacgcaggcggtcaattaagttagatgtgaaatccccgggcttaacccgggaacggcatctaagactggttgactagagtctcgtagaggggggtagaattccacgtgtagcggtgaaatgcgtagagatgtggaggaataccggtggcgaaggcggccccctggacgaagactgacgctcaggtgcgaaagcgtggggagcaaacaggattagataccctggtagtccacgccgtaaacgatgtcgatttggaggttgtggccttgagctgtggcttccggagctaacgcgttaaatcgaccgcctggggagtacggtcgcaagattaaaactcaaatgaattgacgggggcccgcacaagcggtggagcatgtggtttaattcgatgcaacgcgaagaaccttacctactcttgacatccagcgaagcctttggagacagaggcgtgccttcgggaacgctgagacaggtgctgcatggctgtcgtcagctcgtgttgtgaaatgttgggttaagtcccgcaacgagcgcaacccttatcctttgttgccagcacgtcatggtgggaactcaagggagactgccggtgataaaccggaggaaggtggggatgacgtcaagtcatcatggcccttacgagtagggctacacacgtgctacaatggcagatacaaagagaagcgacctcgcgagagcaagcggaactcataaagtctgtcgtagtccggattggagtctgcaactcgactccatgaagtcggaatcgctagtaatcgcagatcagcatgctgcggtgaatacgttcccgggccttgtacacaccgcccgtcacaccatgggagtgggtggcaaaagaagtcggtagcttaacctgctggagggcgctgaccactttgtgatccatgactggggtg

SEQ ID NO: 3612 - DNA, 1465 bp, Xenorhabdus cabanillasii
tgaacgctggcggcaggcctaacacatgcaagtcgggcggtaacaggaaagggcttttgcacttttgctgacgagcggcggacgggtgagtaatgtctggggatctgcccggtagagggggataaccactggaaacggtggctaataccgcataacctctttggagcaaagtgggggaccttcgggcctcacgctatcggatgaacccagatgggattagctagtaggtggggtaagggctcacctaggcgacgatccctagctggtctgagaggatgaccagccacactgggactgagacacggcccagactcctacgggaggcagcagtggggaatattgcacaatgggcgcaagcctgatgcagccatgccgcgtgtatgaagaaggccttcgggttgtaaagtactttcagcggggaggaaggcgtgagtctgaacagggctcacgattgacgttacccgcagaagaagcaccggctaactccgtgccagcagccgcggtaatacggagggtgcaagcgttaatcggaattactgggcgtaaagcgcacgcaggcggccaattaagttagatgtgaaatccccgggcttaacccgggaacggcatctaagactggttggctggagtctcgtagaggggggtagaattccacgtgtagcggtgaaatgcgtagagatgtggaggaataccggtggcgaaggcggccccctggacgaagactgacgctcaggtgcgaaagcgtggggagcaaacaggattagataccctggtagtccacgccgtaaacgatgtcgatttggaggttgtgcccttgaggtgtggcttccggagctaacgcgttaaatcgaccgcctggggagtacggtcgcaagattaaaactcaaatgaattgacgggggcccgcacaagcggtggagcatgtggtttaattcgatgcaacgcgaagaaccttacctactcttgacatccacggaatttggcagagatgctgaagtgccttcgggaaccgtgagacaggtgctgcatggctgtcgtcagctcgtgttgtgaaatgttgggttaagtcccgcaacgagcgcaacccttatcctttgttgccagcacgtgatggtgggaactcaagggagactgccggtgataaaccggaggaaggtggggatgacgtcaagtcatcatggcccagcggggtagggctacacacgtgctacaatggcggatacaaagagaagcgacctcgcgagagcaagcggaactcataaagtctgtcgtagtccggattggagtctgcaactcgactccatgaagtcggaatcgctagtaatcgtagatcagcatgctacggtgaatacgttcccgggccttggacacaccgcccgtcacaccatgggagtgggtggcaaaagaagtcggtagcttaacctgcgggagggcgctgaccactttgtacttcatgaatggggtg

SEQ ID NO: 3613 - DNA, 1465 bp, Xenorhabdus doucetiae
attgaacgctggcggcaggcctaacacatgcaagtcggacggtaacaggaaacagcttgctgttttgctgacgagtggcggacgggtgagtaatgtctggggatctgcccgatggagggggataaccactggaaacggtggctaataccgcataatctctgtggagcaaggtgggggaccttcgggcctcacgccatcggatgaacccagatgggattagctagtaggcggggtaatggcccacctaggcgacgatccctagctggtctgagaggatgaccagccacactgggactgagacacggcccagactcctacgggaggcagcagtggggaatattgcacaatgggcgcaagcctgatgcagccatgccgcgtgtatgaagaaggccttcgggttgtaaagtactttcagcggggaggaaggcgtaggctttaatacagcttacgattgacgttacccgcagaagaagcaccggctaactccgtgccagcagccgcggtaatacggagggtgcaagcgttaatcggaattactgggcgtaaagcgcacgcaggcggtcaattaagttggatgtgaaatccccgggcttaacctgggaacggcatccaagactggttggctagagtctcgtagaggggggtagaattccacgtgtagcggtgaaatgcgtagagatgtggaggaataccggtggcgaaggcggccccctggacgaagactgacgctcaggtgcgaaagcgtggggagcaaacaggattagataccctggtagtccacgctgtaaacgatgtcgatttggaggttgtgcccttgaggcgtggcttccggagctaacgcgttaaatcgaccgcctggggagtacggtcgcaagattaaaactcaaatgaattgacgggggcccgcacaagcggtggagcatgtggtttaattcgatgcaacgcgaagaaccttacctactcttgacatccagcgaagcctttagagatagaggcgtgccttcgggaacgctgagacaggtgctgcatggctgtcgtcagctcgtgttgtgaaatgttgggttaagtcccgcaacgagcgcaacccttatcctttgttgccagcacgtcatggtgggaactcaagggagactgccggtgataaaccggaggaaggtggggatgacgtcaagtcatcatggcccttacgagtagggctacacacgtgctacaatggcggatacaaagagaagcgaccccgcgagggcaagcggaactcataaagtctgtcgtagtccggattggagtctgcaactcgactccatgaagtcggaatcgctagtaatcgcagatcagaatgctgcggtgaatacgttcccgggccttgtacacaccgcccgtcacaccatgggagtgggtggcaaaagaagtcggtagcttaaccttcgggagggcgctgaccactttgtgattcatgactggggtg

SEQ ID NO: 3614 - DNA, 1464 bp, Xenorhabdus eapokensis
attgaacgctggcggcaggcctaacacatgcaagtcgagcggcagcgggggaaagcgtgctttcctgccggcgagcggcggacgggtgagtaatgtctggggatctgcccgatggcgggggataaccactggaaacggtggctaataccgcataatctctgtggagcaaagtgggggaccttcgggcctcacgccatcggatgaacccagatgggattagctagtaggtggggtaaaggctcacctaggcgacgatccctagctggtctgagaggatgaccagccacactgggactgagacacggcccagactcctacgggaggcagcagtggggaatattgcacaatgggcgcaagcctgatgcagccatgccgcgtgtatgaagaaggccttcgggttgtaaagtactttcagcggggaggaaggcgtggagttgaatagacttcacgattgacgttacccgcagaagaagcaccggctaactccgtgccagcagccgcggtaatacggagggtgcaagcgttaatcggaattactgggcgtaaagcgcacgcaggcggtcaattaagttagatgtgaaatccccgggcttaacctgggaatggcatctaagactggttggctagagtctcgtagaggggggtagaattccacgtgtagcggtgaaatgcgtagagatgtggaggaataccggtggcgaaggcggccccctggacgaagactgacgctcaggtgcgaaagcgtggggagcaaacaggattagataccctggtagtccacgctgtaaacgatgtcgatttggaggttgtggccttgagctgtggcttccggagctaacgcgttaaatcgaccgcctggggagtacggtcgcaagattaaaactcaaatgaattgacgggggcccgcacaagcggtggagcatgtggtttaattcgatgcaacgcgaagaaccttacctactcttgacatccacggaattctgcagagatgcggaagtgccttcgggacccgtgagacaggtgctgcatggctgtcgtcagctcgtgttgtgaaatgttgggttaagtcccgcaacgagcgcaacccttatcctttgttgccagcacttcgggtgggaactcaagggagactgccggtgataaaccggaggaaggtggggatgacgtcaagtcatcatggcccttacgagtagggctacacacgtgctacaatggcagatacaaagagaagcgacctcgcgagagcaagcggacctcataaagtctgtcgtagtccggattggagtctgcaactcgactccatgaagtcggaatcgctagtaatcgtagatcagaatgctacggtgaatacgttcccgggccttgtacacaccgcccgtcacaccatgggagtgggttgcaaaagaagtcggtagcttaacctttaggagggcgctgaccactttgtgattcatgactggggtg

SEQ ID NO: 3615 - DNA, 1465 bp, Xenorhabdus ehlersii
attgaacgctggcggcaggcctaacacatgcaagtcgagcggcagcgggggaaagcgtgctttcctgccggcgagcggcggacgggtgagtaatgtctggggatctgcctgatggagggggataaccactggaaacggtggctaataccgcataacctctgaggagcaaagtgggggaccttcgggcctcacgccatcggatgaacccagatgggattagctagtaggtggggtaaaggctcacctaggcgacgatccctagctggtctgagaggatgaccagccacactgggactgagacacggcccagactcctacgggaggcagcagtggggaatattgcacaatgggcgcaagcctgatgcagccatgccgcgtgtatgaagaaggccttcgggttgtaaagtactttcagcggggaggaaggcatagagccgaatacgctttatgattgacgttacccgcagaagaagcaccggctaactccgtgccagcagccgcggtaatacggagggtgcaagcgttaatcggaattactgggcgtaaagcgcacgcaggcggtcaattaagttagatgtgaaatccccgggcttaacctgggaatggcatctaagactggttgactagagtctcgtagaggggggtagaattccacgtgtagcggtgaaatgcgtagagatgtggaggaataccggtggcgaaggcggccccctggacgaagactgacgctcaggtgcgaaagcgtggggagcaaacaggattagataccctggtagtccacgctgtaaacgatgtcgatttggaggttgtggccttgagctgtggcttccggagctaacgcgttaaatcgaccgcctggggagtacggtcgcaagattaaaactcaaatgaattgacgggggcccgcacaagcggtggagcatgtggtttaattcgatgcaacgcgaagaaccttacctactcttgacatccagcgaagcctttagagatagaggcgtgccttcgggaacgctgagacaggtgctgcatggctgtcgtcagctcgtgttgtgaaatgttgggttaagtcccgcaacgagcgcaacccttatcctttgttgccagcacgttatggtgggaactcaagggagactgccggtgataaaccggaggaaggtggggatgacgtcaagtcatcatggcccttacgagtagggctacacacgtgctacaatggcggatacaaagagaagcgacctcgcgagagcaagcggacctcataaagtctgtcgtagtccggattggagtctgcaactcgactccatgaagtcggaatcgctagtaatcgcagatcagaatgctgcggtgaatacgttcccgggccttgtacacaccgcccgtcacaccatgggagtgggttgcaaaagaagtcggtagcttaacctgtaggagggcgctgaccactttgtgattcatgactggggtg

SEQ ID NO: 3616 - DNA, 1460 bp, Xenorhabdus hominickii
gaacgctggcggcaggcctaacacatgcaagtcgagcggcaacggcaggaagcttgcttcctggccggcgagcggcggacgggtgagtaatgtctggggatctgcccgatggagggggataaccactggaaacggtggctaataccgcatgacctctgaggagcaaagtgggggaccttcgggcctcacgccatcggatgaacccagatgggattagctagtaggtgaggtaacggctcacctaggcgacgatccctagctggtctgagaggatgaccagccacactgggactgagacacggcccagactcctacgggaggcagcagtggggaatattgcacaatgggcgcaagcctgatgcagccatgccgcgtgtatgaagaaggccttcgggttgtaaagtactttcagcggggaggaaggcgtgaagtttaatagactttacgattgacgttacccgcagaagaagcaccggctaactccgtgccagcagccgcggtaatacggagggtgcaagcgttaatcggaattactgggcgtaaagcgcacgcaggcggtcaattaagttagatgtgaaatccccgggcttaacctgggaactgcatctaaaactgattggctagagtctcgtagaggggggtagaattccacgtgtagcggtgaaatgcgtagagatgtggaggaataccggtggcgaaggcggccccctggacgaagactgacgctcaggtgcgaaagcgtggggagcaaacaggattagataccctggtagtccacgctgtaaacgatgtcgatttggaggttgtgcccttgaggcgtggcttccggagctaacgcgttaaatcgaccgcctggggagtacggccgcaaggttaaaactcaaatgaattgacgggggcccgcacaagcggtggagcatgtggtttaattcgatgcaacgcgaagaaccttacctactcttgacatccagcgaatcctttagatagaggagtgccttcgggaacgctgagacaggtgctgcatggctgtcgtcagctcgtgttgtgaaatgttgggttaagtcccgcaacgagcgcaacccttatcctttgttgccagcacgtaatggtgggaactcaagggagactgccggtgataaaccggaggaaggtggggatgacgtcaagtcatcatggcccttacgagtagggctacacacgtgctacaatggcagatacaaagagaagcgacctcgcgagagcaagcggaactcataaagtctgtcgtagtccggattggagtctgcaactcgactccatgaagtcggaatcgctagtaatcgtagatcagaatgctacggtgaatacgttcccgggccttgtacacaccgcccgtcacaccatgggagtgggttgcaaaagaagtaggtagcttaaccttcgggagggcgcttaccactttgtgattcatgactggggtg

SEQ ID NO: 3617 - DNA, 1465 bp, Xenorhabdus innexi
attgaacgctggcggcaggcctaacacatgcaagtcgagcggcagcggggggaagcttgcttccctgccggcgagcggcggacgggtgagtaatgtctggggatctgcccggtagagggggataaccactggaaacggtggctaataccgcataacctcttaggagcaaagtgggggaccttcgggcctcacgctatcggatgaacccagatgggattagctagtaggtggggtaatggctcacctaggcgacgatccctagctggtctgagaggatgaccagccacactgggactgagacacggcccagactcctacgggaggcagcagtggggaatattgcacaatgggcgcaagcctgatgcagccatgccgcgtgtatgaagaaggccttcgggttgtaaagtactttcagcggggaggaaggcgtagaaccgaatacgttttacgattgacgttacccgcagaagaagcaccggctaactccgtgccagcagccgcggtaatacggagggtgcaagcgttaatcggaattactgggcgtaaagcgcacgcaggcggccaattaagttagatgtgaaagccccgggcttaacctgggaacggcatctaagactggttggctagagtctcgtagaggggggtagaattccacgtgtagcggtgaaatgcgtagagatgtggaggaataccggtggcgaaggcggccccctggacgaagactgacgctcaggtgcgaaagcgtggggagcaaacaggattagataccctggtagtccacgccgtaaacgatgtcaacttggaggttgtggccttgagccgtggcttccggagctaacgcgttaagttgaccgcctggggagtacggtcgcaagattaaaactcaaatgaattgacgggggcccgcacaagcggtggagcatgtggtttaattcgatgcaacgcgaagaaccttacctactcttgacatccagcgaaacctttagagatagaggtgtgccttcgggaacgctgagacaggtgctgcatggctgtcgtcagctcgtgttgtgaaatgttgggttaagtcccgcaacgagcgcaacccttatcctttgttgccagcacgttatggtgggaactcaggggagactgccggtgataaaccggaggaaggtggggatgacgtcaagtcatcatggcccttacgagtagggctacacacgtgctacaatggcagatacaaagagaagcgacctcgcgagagcaagcggaactcataaagtctgtcgtagtccggattggagtctgcaactcgactccatgaagtcggaatcgctagtaatcgtagatcagaatgctacggtgaatacgttcccgggccttgtacacaccgcccgtcacaccatgggagtgggttgcaaaagaagtaggtagcttaaccttcgggagggcgcttaccactttgtgattcatgactggggtg

SEQ ID NO: 3618 - DNA, 1452 bp, Xenorhabdus ishibashii
ggcaggcctaacacatgcaagtcgagcggcagcgggggaaagcttgctttcctgccggcgagcggcggacgggtgagtaatgtctggggatctgcccgatggagggggataaccactggaaacggtggctaataccgcataacctctttggagcaaagtgggggaccttcgggcctcacgccatcggatgaacccagatgggattagctagtaggtggggtaaaggctcacctaggcgacgatccctagctggtctgagaggatgaccagccacactgggactgagacacggcccagactcctacgggaggcagcagtggggaatattgcacaatgggcgcaagcctgatgcagccatgccgcgtgtatgaagaaggccttcgggttgtaaagtactttcagcggggaggaaggcgcaaggttgaatacactttgcgattgacgttacccgcagaagaagcaccggctaactccgtgccagcagccgcggtaatacggagggtgcaagcgttaatcggaattactgggcgtaaagcgcacgcaggcggtcaattaagttagatgtgaaatccccgggcttaacctgggaatggcatctaagactggttggctagagtctcgtagaggggggtagaattccacgtgtagcggtgaaatgcgtagagatgtggaggaacaccggtggcgaaggcggccccctggacgaagactgacgctcaggtgcgaaagcgtggggagcaaacaggattagataccctggtagtccacgctgtaaacgatgtcgatttggaggttgtggccttgagctgtggcttccggagctaacgcgttaaatcgaccgcctggggagtacggtcgcaagattaaaactcaaatgaattgacgggggcccgcacaagcggtggagcatgtggtttaattcgatgcaacgcgaagaaccttacctactcttgacatccacggaattctgcagagatgcggaagtgccttcgggaaccgtgagacaggtgctgcatggctgtcgtcagctcgtgttgtgaaatgttgggttaagtcccgcaacgagcgcaacccttatcctttgttgccagcacgttatggtgggaactcaagggagactgccggtgataaaccggaggaaggtggggatgacgtcaagtcatcatggcccttacgagtagggctacacacgtgctacaatggcggatacaaagagaagcgacctcgcgagagcaagcggacctcataaagtctgtcgtagtccggattggagtctgcaactcgactccatgaagtcggaatcgctagtaatcgtagaccagaatgctacggtgaatacgttcccgggccttgtacacaccgcccgtcacaccatgggagtgggttgcaaaagaagtcggtagcttaaccttttggagggcgctgaccactttgtgattcatgactggggtg

SEQ ID NO: 3619 - DNA, 1465 bp, Xenorhabdus japonica
attgaacgctggcggcaggcctaacacatgcaagtcgggcggcagcggggggaagcgtgcttccctgccggcgagcggcggacgggtgagtaatgtctggggatctgcccgatggagggggataaccactggaaacggtggctaataccgcataacctctgcggagcaaggtgggggaccttcgggcctcacgccatcggatgaacccagatgggattagctagtaggcggggtaatggcccacctaggcgacgatccctagctggtctgagaggatgaccagccacactgggactgagacacggcccagactcctacgggaggcagcagtggggaatattgcacaatgggcgcaagcctgatgcagccatgccgcgtgtatgaagaaggccttcgggttgtaaagtactttcagcggggaggaaggcgtgggtccgaatacggctcacgattgacgttacccgcagaagaagcaccggctaactccgtgccagcagccgcggtaatacggagggtgcaagcgttaatcggaattactgggcgtaaagcgcacgcaggcggccaattaagttggatgtgaaatccccgggcttaacccgggaacggcatccaagactggttggctggagtctcgtagaggggggtagaattccacgtgtagcggtgaaatgcgtagagatgtggaggaataccggtggcgaaggcggccccctggacgaagactgacgctcaggtgcgaaagcgtggggagcaaacaggattagataccctggtagtccacgctgtaaacgatgtcgatttggaggttgtgccctagaggcgtggcttccggagctaacgcgttaaatcgaccgcctggggagtacggccgcaaggttaaaactcaaatgaattgacgggggcccgcacaagcggtggagcatgtggtttaattcgatgcaacgcgaagaaccttacctactcttgacatccagcgaagcctttggagacagaggcgtgccttcgggaacgctgagacaggtgctgcatggctgtcgtcagctcgtgttgtgaaatgttgggttaagtcccgcaacgagcgcaacccttatcctttgttgccagcacgtgatggtgggaactcaagggagactgccggtgataaaccggaggaaggtggggatgacgtcaagtcatcatggcccttacgagtagggctacacacgtgctacaatggcagatacaaagagaagcgacctcgcgagagcaagcggaactcataaagtctgtcgtagtccggattggagtctgcaactcggctccatgaagtcggaatcgctagtaatcgcagatcagaatgctgcggtgaatacgttcccgggccttgtacacaccgcccgtcacaccatgggagtgggttgcaaaagaagtaggtagcttaaccttcgggggggcgcttaccactttgtgattcatgactggggtg

SEQ ID NO: 3620 - DNA, 1424 bp, Xenorhabdus khoisanae
catgcaagtcgagcggcagcgggaagaagcgtgcttctttgccggcgagcggcggacgggtgagtaatgtctggggatctgcccgatggagggggataaccactggaaacggtggctaataccgcatgacctcttgggagcaaagtgggggaccttcgggcctcacgccatcggatgaacccagatgggattagctagtaggcggggtaacggcccacctaggcgacgatccctagctggtctgagaggatgaccagccacactgggactgagacacggcccagactcctacgggaggcagcagtggggaatattgcacaatgggcgcaagcctgatgcagccatgccgcgtgtatgaagaaggccttcgggttgtaaagtactttcagtggggaggaaggcgtgaagttgaatagacttgacgattgacgttacccacagaagaagcaccggctaactccgtgccagcagccgcggtaatacggagggtgcaagcgttaatcggaattactgggcgtaaagcgcacgcaggcggtcaattaagttagatgtgaaatccccgggcttaacctgggaacggcatctaagactggttggctagagtctcgtagaggggggtagaattccacgtgtagcggtgaaatgcgtagagatgtggaggaataccggtggcgaaggcggccccctggacgaagactgacgctcaggtgcgaaagcgtggggagcaaacaggattagataccctggtagtccacgctgtaaacgatgtcgatttggaggttgtgcccttgaggcgtggcttccggagctaacgcgttaaatcgaccgcctggggagtacggccgcaaggttaaaactcaaatgaattgacgggggcccgcacaagcggtggagcatgtggtttaattcgatgcaacgcgaagaaccttacctactcttgacatccagcgaatcctttagagatagaggagtgccttcgggaacgctgagacaggtgctgcatggctgtcgtcagctcgtgttgtgaaatgttgggttaagtcccgcaacgagcgcaacccttatcctttgttgccagcacgtcatggtgggaactcaagggagactgccggtgataaaccggaggaaggtggggatgacgtcaagtcatcatggcccttacgagtagggctacacacgtgctacaatggcagatacaaagagaagcgacctcgcgagagccagcggaactcataaagtctgtcgtagtccggattggagtctgcaactcgactccatgaagtcggaatcgctagtaatcgcagatcagaatgctgcggtgaatacgttcccgggccttgtacacaccgcccgtcacaccatgggagtgggttgcaaaagaagtaggtagcttaaccttcgggggggcgcttaccactttgtga

SEQ ID NO: 3621 - DNA, 1465 bp, Xenorhabdus koppenhoeferi
attgaacgctggcggcaggcctaacacatgcaagtcgggcggcagcgggaggaagcgtgcttccttgccggcgagcggcggacgggtgagtaatgtctggggatctgcccgatggagggggataaccactggaaacggtggctaataccgcatgacctctggggagcaaagtgggggaccttcgggcctcacgccatcggatgaacccagatgggattagctagtaggcggggtaacggcccccctaggcgacgatccctagctggtctgagaggatgaccagccacactgggactgagacacggcccagactcctacgggaggcagcagtggggaatattgcacaatgggcgcaagcctgatgcagccatgccgcgtgtatgaagaaggccttcgggttgtaaagtactttcagcggggaggaaggcgtaagcgttaatacggctgacgattgacgttacccgcagaagaagcaccggctaactccgtgccagcagccgcggtaatacggagggtgcaagcgttaatcggaattactgggcgtaaagcgcacgcaggcggtcaattaagttagatgtgaaatccccgggcttaacccgggaacggcatctaagactggttggctggagtctcgtagaggggggtagaattccacgtgtagcggtgaaatgcgtagagatgtggaggaataccggtggcgaaggcggccccctggacgaagactgacgctcaggtgcgaaagcgtggggagcaaacaggattagataccctggtagtccacgcggtaaacgatgtcgatttggaggttgtgcccctgaggcgtggcttccggagctaacgcgttaaatcgaccgcctggggagtacggccgcaaggttaaaactcaaatgaattgacgggggcccgcacaagcggtggagcatgtggtttaattcgatgcaacgcgaagaaccttacctactcttgacatccggcgaatcctttagagatagaggagtgccttcgggaacgctgagacaggtgctgcatggctgtcgtcagctcgtgttgtgaaatgttgggttaagtcccgcaacgagcgcaacccttatcctttgttgccagcacgtgatggtgggaactcaagggagactgccggtgataaaccggaggaaggtggggatgacgtcaagtcatcatggccctgacgagtagggctacacacgtgctacaatggcagatacaaagagaagcgacctcgcgagagcaagcggaactcataaagtctgtcgtagtccggattggagtctgcaactcgactccatgaagtcggaatcgctagtaatcgtagatcagcatgctacggtgaatacgttcccgggccttgtacacaccgcccgtcacaccatgggagtgggttgcaaaagaagccggccgcttaaccttcgggagggcgctgaccactttgtgattcatgactggggtg

SEQ ID NO: 3622 - DNA, 1456 bp, Xenorhabdus kozodoii
cgctggcggcaggcctaacacatgcaagtcgagcggcagcggggggaagcttgcttccccgccggcgagcggcggacgggtgagtaatgtctggggatctgcccgatggagggggataaccactggaaacggtggctaataccgcatgacctctgaggagcaaagtgggggaccttcgggcctcacgccatcggatgaacccagatgggattagctagtaggtggggtaaggccacctaggcgacgatccctagctggtctgagaggatgaccagccacactgggactgagacacggcccagactcctacgggaggcagcagtggggaatattgcacaatgggcgcaagcctgatgcagccatgccgcgtgtatgaagaaggccttcgggttgtaaagtactttcagtggggaggaaggcgccggaacgaatactttcggcgattgacgttacccacagaagaagcaccggctaactccgtgccagcagccgcggtaatacggagggtgcaagcgttaatcggaattactgggcgtaaagcgcacgcaggcggtccattaagttagatgtgaaatccccgggcttaacctgggaatggcatctaagactggtggactagagtctcgtagaggggggtagaattccacgtgtagcggtgaaatgcgtagagatgtggaggaataccggtggcgaaggcggccccctggacgaagactgacgctcaggtgcgaaagcgtggggagcaaacaggattagataccctggtagtccacgctgtaaacgatgtcgatttggaggttgtggcctgagccgtggcttccggagctaacgcgttaaatcgaccgcctggggagtacggccgcaaggttaaaactcaaatgaattgacgggggcccgcacaagcggtggagcatgtggtttaattcgatgcaacgcgaagaaccttacctactcttgacatccagcgaatccttcagagatgagggagtgccttcgggaacgctgagacaggtgctgcatggctgtcgtcagctcgtgttgtgaaatgttgggttaagtcccgcaacgagcgcaacccttatcctttgttgccagcacgtaatggtgggaactcaagggagactgccggtgataaaccggaggaaggtggggatgacgtcaagtcatcatggcccttacgagtagggctacacacgtgctacaatggcagatacaaagagaagcgacctcgcgagagtcagcggaactcataaagtctgtcgtagtccggattggagtctgcaactcgactccatgaagtcggaatcgctagtaatcgcggatcagaatgccgcggtgaatacgttcccgggccttgtacacaccgcccgtcacaccatgggagtgggttgcaaaagaagtcggtagcttaaccttcgggggggcgctgaccactttgtgattcatgactggggtg

SEQ ID NO: 3623 - DNA, 1464 bp, Xenorhabdus mauleonii
attgaacgctggcggcaggcctaacacatgcaagtcgagcggcagcgggaagaagcttgcttctttgccggcgagcggcggacgggtgagtaatgtctggggatctgcccgatggagggggataaccactggaaacggtggctaataccgcataacctctgaggagcaaagtgggggaccttcgggcctcacgccatcggatgaacccagatgggattagctagtaggcggggtaatggcccacctaggcgacgatccctagctggtctgagaggatgaccagccacactgggactgagacacggcccagactcctacgggaggcagcagtggggaatattgcacaatgggcgcaagcctgatgcagccatgccgcgtgtatgaagaaggccttcgggttgtaaagtactttcagcggggaggaaggcgtaggtcttaatacggcttacgattgacgttacccgcagaagaagcaccggctaactccgtgccagcagccgcggtaatacggagggtgcaagcgttaatcggaattactgggcgtaaagcgcacgcaggcggtcaattaagttagatgtgaaatccccgggcttaacctgggaactgcatctaagactggttggctagagtctcgtagaggggggtagaattccacgtgtagcggtgaaatgcgtagagatgtggaggaataccggtggcgaaggcggccccctggacgaagactgacgctcaggtgcgaaagcgtggggagcaaacaggattagataccctggtagtccacgctgtaaacgatgtcgatttggaggttgtgcccttgaggcgtggcttccggagctaacgcgttaaatcgaccgcctggggagtacggtcgcaagattaaaactcaaatgaattgacgggggcccgcacaagcggtggagcatgtggtttaattcgatgcaacgcgaagaaccttacctactcttgacatccacggaatttggcagagatgccgaagtgccttcgggaaccgtgagacaggtgctgcatggctgtcgtcagctcgtgttgtgaaatgttgggttaagtcccgcaacgagcgcaacccttatcctttgttgccagcacttcgggtgggaactcaagggagactgccggtgataaaccggaggaaggtggggatgacgtcaagtcatcatggcccttacgagtagggctacacacgtgctacaatggcagatacaaagagaagcgacctcgcgagagcaagcggaactcataaagtctgtcgtagtccggattggagtctgcaactcgactccatgaagtcggaatcgctagtaatcgtagatcagaatgctacggtgaatacgttcccgggccttgtacacaccgcccgtcacaccatgggagtgggttgcaaaagaagtaggtagcttaaccttcgggagggcgcttaccactttgtgattcatgactggggtg

SEQ ID NO: 3624 - DNA, 1465 bp, Xenorhabdus miraniensis
  misc_feature (429)..(429): n is a, c, g, or t
  misc_feature (442)..(443): n is a, c, g, or t
  misc_feature (449)..(449): n is a, c, g, or t
  misc_feature (821)..(821): n is a, c, g, or t
attgaacgctggcggcaggcctaacacatgcaagtcgagcggcagcgggaagaagcttgcttctttgccggcgagcggcggacgggtgagtaatgtctggggatctgcccgatggagggggataaccactggaaacggtggctaataccgcataacctcttaggagcaaagtgggggaccttcgggcctcacgccatcggatgaacccagatgggattagctagtaggcggggtaagggcccacctaggcgacgatccctagctggtctgagaggatgaccagccacactgggactgagacacggcccagactcctacgggaggcagcagtggggaatattgcacaatgggcgcaagcctgatgcagccatgccgcgtgtatgaagaaggccttcgggttgtaaagtactttcagcggggaggaaggcntgaagctgaatanncttcangattgacgttacccgcagaagaagcaccggctaactccgtgccagcagccgcggtaatacggagggtgcaagcgttaatcggaattactgggcgtaaagcgcacgcaggcggtcaattaagttagatgtgaaatccccgggcttaacctgggaacggcatctaagactggttggctagagtctcgtagaggggggtagaattccacgtgtagcggtgaaatgcgtagagatgtggaggaataccggtggcgaaggcggccccctggacgaagactgacgctcaggtgcgaaagcgtggggagcaaacaggattagataccctggtagtccacgctgtaaacgatgtcgatttggaggttgtgcccttgaggngtggcttccggagctaacgcgttaaatcgaccgcctggggagtacggtcgcaagattaaaactcaaatgaattgacgggggcccgcacaagcggtggagcatgtggtttaattcgatgcaacgcgaagaaccttacctactcttgacatccacggaatttggcagagatgctgaagtgccttcgggacccgtgagacaggtgctgcatggctgtcgtcagctcgtgttgtgaaatgttgggttaagtcccgcaacgagcgcaacccttatcctttgttgccagcacgtgatggtgggaactcaagggagactgccggtgataaaccggaggaaggtggggatgacgtcaagtcatcatggcccttacgagtagggctacacacgtgctacaatggcagatacaaagagaagcgacctcgcgagagcaagcggaactcataaagtctgtcgtagtccggattggagtctgcaactcgactccatgaagtcggaatcgctagtaatcgcagatcagaatgctgcggtgaatacgttcccgggccttgtacacaccgcccgtcacaccatgggagtgggttgcaaaagaagtcggtagcttaacctgcgggagggcgctgaccactttgtgattcatgactggggtg

SEQ ID NO: 3625 - DNA, 1465 bp, Xenorhabdus nematophila
attgaacgctggcggcaggcctaacacatgcaagtcggacggtaacaggaaacagcttgctgttttgctgacgagtggcggacgggtgagtaatgtctggggatctgcccgatggagggggataaccactggaaacggtggctaataccgcatgacctcttgggagtaaagtgggggaccttcgggcctcacgccatcggatgaacccagatgggattagctggtaggcggggtaatggcccacctaggcgacgatccctagctggtctgagaggatgaccagccacactgggactgagacacggcccagactcctacgggaggcagcagtggggaatattgcacaatgggcgcaagcctgatgcagccatgccgcgtgtatgaagaaggccttcgggttgtaaagtactttcagcggggaggaaggcgtaagtctgaacagggcttacgattgacgttacccgcagaagaagcaccggctaactccgtgccagcagccgcggtaatacggagggtgcaagcgttaatcggaattactgggcgtaaagcgcacgcaggcggtcaattaagttggatgtgaaatccccgggcttaacccgggaacggcatccaagactggttggctagagtctcgtagaggggggtagaattccacgtgtagcggtgaaatgcgtagagatgtggaggaataccggtggcgaaggcggccccctggacgaagactgacgctcaggtgcgaaagcgtggggagcaaacaggattagataccctggtagtccacgctgtaaacgatgtcgatttggaggctgtgcccttgaggcgtggcttccggagctaacgcgttaaatcgaccgcctggggagtacggccgcaaggttaaaactcaaatgaattgacgggggcccgcacaagcggtggagcatgtggtttaattcgatgcaacgcgaagaaccttacctactcttgacatccacgggatcaggcagagatgccggagtgccttcgggaaccgtgagacaggtgctgcatggctgtcgtcagctcgtgttgtgaaatgttgggttaagtcccgcaacgagcgcaacccttatcctttgttgccagcacgtgatggtgggaactcaagggagactgccggtgataaaccggaggaaggtggggatgacgtcaagtcatcatggcccttacgagtagggctacacacgtgctacaatggcagatacaaagagaagcgacctcgcgagagcaagcggaactcataaagtctgtcgtagtccggattggagtctgcaactcgactccatgaagtcggaatcgctagtaatcgtagatcagaatgctacggtgaatacgttcccgggccttgtacacaccgcccgtcacaccatgggagtgggttgcaaaagaagtaggtagcttaaccttcgggggggcgcttaccactttgtgattcatgactggggtg

SEQ ID NO: 3626 - DNA, 1466 bp, Xenorhabdus poinarii
  misc_feature (432)..(432): n is a, c, g, or t
  misc_feature (434)..(434): n is a, c, g, or t
  misc_feature (933)..(933): n is a, c, g, or t
  misc_feature (1111)..(1111): n is a, c, g, or t
  misc_feature (1431)..(1431): n is a, c, g, or t
attgaacgctggcggcaggcctaacacatgcaagtcgagcggcagcgggaggaaagcgtgctttcttgccggcgagcggcggacgggtgagtaatgtctggggatctgcccgatggcgggggataaccactggaaacggtggctaataccgcataatctctgtggagcaaagtgggggaccttcgggcctcacgccatcggatgaacccagatgggattagctagtaggtggggtaaaggctcacctaggcgacgatccctagctggtctgagaggatgaccagccacactgggactgagacacggcccagactcctacgggaggcagcagtggggaatattgcacaatgggcgcaagcctgatgcagccatgccgcgtgtatgaagaaggccttcgggttgtaaagtactttcagcggggaggaaggcgtnancctgaataaggttggcgtttgacgttacccgcagaagaagcaccggctaactccgtgccagcagccgcggtaatacggagggtgcaagcgttaatcggaattactgggcgtaaagcgcacgcaggcggtcaattaagttagatgtgaaatccccgggcttaacctgggaacggcatctaagactggttggctagagtctcgtagaggggggtagaattccacgtgtagcggtgaaatgcgtagagatgtggaggaataccggtggcgaaggcggccccctggacgaagactgacgctcaggtgcgaaagcgtggggagcaaacaggattagataccctggtagtccacgctgtaaacgatgtcgatttggaggttgtggcctagagctgtggcttccggagctaacgcgttaaatcgaccgcctggggagtacggccgcaaggttaaaactcaaatgaattgacgggggcccgcacaagcggtggagcatgtggtttanttcgatgcaacgcgaagaaccttacctactcttgacatccacggaattttgcagagatgcgaaagtgccttcgggaaccgtgagacaggtgctgcatggctgtcgtcagctcgtgttgtgaaatgttgggttaagtcccgcaacgagcgcaacccttatcctttgttgccagcacgtnatggtgggaactcaagggagactgccggtgataaaccggaggaaggtggggatgacgtcaagtcatcatggcccttacgagtagggctacacacgtgctacaatggcagatacaaagagaagcgacctcgcgagagcaagcggacctcataaagtctgtcgtagtccggattggagtctgcaactcgactccatgaagtcggaatcgctagtaatcgtagatcagaatgctacggtgaatacgttcccgggccttgtacacaccgcccgtcacaccatgggagtgggttgcaaaagaagtaggtagcttaaccttcgggngggcgcttaccactttgtgattcatgactggggtg

SEQ ID NO: 3627 - DNA, 1464 bp, Xenorhabdus stockiae
attgacgctggcggcaggcctaacacatgcaagtcgagcggtaacaggaagcagcttgctgctttgctgacgagcggcggacgggtgagtaatgtctggggatctgcccgatggagggggataaccactggaaacggtggctaataccgcatgacctctgaggagcaaagtgggggaccttcgggcctcacgccatcggatgaacccagatgggattagctagtaggtggggtaacggctcacctaggcgacgatccctagctggtctgagaggatgaccagccacactgggactgagacacggcccagactcctacgggaggcagcagtggggaatattgcacaatgggcgcaagcctgatgcagccatgccgcgtgtatgaagaaggccttcgggttgtaaagtactttcagcggggaggaaggcgtgaaaccgaatacgtttcacgattgacgttacccgcagaagaagcaccggctaactccgtgccagcagccgcggtaatacggagggtgcaagcgttaatcggaattactgggcgtaaagcgcacgcaggcggtcaattaagttagatgtgaaatccccgggcttaacctgggaactgcatctaagactggttgactagagtctcgtagaggggggtagaattccacgtgtagcggtgaaatgcgtagagatgtggaggaataccggtggcgaaggcggccccctggacgaagactgacgctcaggtgcgaaagcgtggggagcaaacaggattagataccctggtagtccacgccgtaaacgatgtcgacttggaggttgtggccttgagccgtggcttccggagctaacgcgttaagtcgaccgcctggggagtacggtcgcaagattaaaactcaaatgaattgacgggggcccgcacaagcggtggagcatgtggtttaattcgatgcaacgcgaagaaccttacctactcttgacatccagcgaacctttcagagatgaaggggtgccttcgggaacgctgagacaggtgctgcatggctgtcgtcagctcgtgttgtgaaatgttgggttaagtcccgcaacgagcgcaacccttatcctttgttgccagcacatcatggtgggaactcaagggagactgccggtgataaaccggaggaaggtggggatgacgtcaagtcatcatggcccttacgagtagggctacacacgtgctacaatggcagatacaaagagaagcgacctcgcgagagcaagcggaactcataaagtctgtcgtagtccggattggagtctgcaactcgactccatgaagtcggaatcgctagtaatcgtagatcagaatgctacggtgaatacgttcccgggccttgtacacaccgcccgtcacaccatgggagtgggttgcaaaagaagtaggtagcttaaccttcgggagggcgcttaccactttgtgattcatgactggggtg

SEQ ID NO: 3628 - DNA, 1465 bp, Xenorhabdus szentirmaii
attgaacgctggcggcaggcctaacacatgcaagtcgagcggcagcgggaagaagcgtgcttctttgccggcgagcggcggacgggtgagtaatgtctggggatctgcccgatggagggggataaccactggaaacggtggctaataccgcatgacctcttgggagcaaagtgggggaccttcgggcctcacgccatcggatgaacccagatgggattagctagtaggcggggtaacggcccacctaggcgacgatccctagctggtctgagaggatgaccagccacactgggactgagacacggcccagactcctacgggaggcagcagtggggaatattgcacaatgggcgcaagcctgatgcagccatgccgcgtgtatgaagaaggccttcgggttgtaaagtactttcagcggggaggaaggcgtgagtctgaatacggcttacgattgacgttacccgcagaagaagcaccggctaactccgtgccagcagccgcggtaatacggagggtgcaagcgttaatcggaattactgggcgtaaagcgcacgcaggcggtcaattaagttagatgtgaaatccccgggcttaacccgggaacggcatctaagactggttggctagagtctcgtagaggggggtagaattccacgtgtagcggtgaaatgcgtagagatgtggaggaataccggtggcgaaggcggccccctggacgaagactgacgctcaggtgcgaaagcgtggggagcaaacaggattagataccctggtagtccacgctgtaaacgatgtcgatttggaggttgtgcccctgaggcgtggcttccggagctaacgcgttaaatcgaccgcctggggagtacggtcgcaagattaaaactcaaatgaattgacgggggcccgcacaagcggtggagcatgtggtttaattcgatgcaacgcgaagaaccttacctactcttgacatccacggaatttggcagagatgctgaagtgccttcgggaaccgtgagacaggtgctgcatggctgtcgtcagctcgtgttgtgaaatgttgggttaagtcccgcaacgagcgcaacccttatcctttgttgccagcacgtgatggtgggaactcaagggagactgccggtgataaaccggaggaaggtggggatgacgtcaagtcatcatggcccttacgagtagggctacacacgtgctacaatggcagatacaaagagaagcgacctcgcgagagcaagcggaactcataaagtctgtcgtagtccggattggagtctgcaactcgactccatgaagtcggaatcgctagtaatcgtagatcagaatgctacggtgaatacgttcccgggccttgtacacaccgcccgtcacaccatgggagtgggttgcaaaagaagtaggtagcttaaccttcgggagggcgcttaccactttgtgattcatgactggggtg

SEQ ID NO: 3629 - DNA, 1465 bp, Xenorhabdus thuongxuanensis
attgaacgctggcggcaggcctaacacatgcaagtcgggcggcagcgggggaaagcgtgctttcctgccggcgagcggcggacgggtgagtaatgtctggggatctgcccgatggagggggataaccactggaaacggtggctaataccgcatgacctcttttgagcaaagtgggggaccttcgggcctcacgccatcggatgaacccagatgggattagctagtaggtggggtaaaggctcacctaggcgacgatccctagctggtctgagaggatgaccagccacactgggactgagacacggcccagactcctacgggaggcagcagtggggaatattgcacaatgggcgcaagcctgatgcagccatgccgcgtgtatgaagaaggccttcgggttgtaaagtactttcagcggggaggaaggcgtggagttgaataggcttcacgattgacgttacccgcagaagaagcaccggctaactccgtgccagcagccgcggtaatacggagggtgcaagcgttaatcggaattactgggcgtaaagcgcacgcaggcggtcaattaagttagatgtgaaatccccgggcttaacctgggaatggcatctaagactggttggctagagtctcgtagaggggggtagaattccacgtgtagcggtgaaatgcgtagagatgtggaggaataccggtggcgaaggcggccccctggacgaagactgacgctcaggtgcgaaagcgtggggagcaaacaggattagataccctggtagtccacgctgtaaacgatgtcgatttggaggttgtggccttgagccgtggcttccggagctaacgcgttaaatcgaccgcctggggagtacggtcgcaagattaaaactcaaatgaattgacgggggcccgcacaagcggtggagcatgtggtttaattcgatgcaacgcgaagaaccttacctactcttgacatccagcgaagcctttagagatagaggcgtgccttcgggagcgctgagacaggtgctgcatggctgtcgtcagctcgtgttgtgaaatgttgggttaagtcccgcaacgagcgcaacccttatcctttgttgccagcacgttatggtgggaactcaagggagactgccggtgataaaccggaggaaggtggggatgacgtcaagtcatcatggcccttacgagtagggctacacacgtgctacaatggcggatacaaagagaagcgacctcgcgagagcaagcggacctcataaagtctgtcgtagtccggattggagtctgcaactcgactccatgaagtcggaatcgctagtaatcgcagatcagcatgctgcggtgaatacgttcccgggccttgtacacaccgcccgtcacaccatgggagtgggttgcaaaagaagtcggtagcttaaccttcgggagggcgctgaccactttgtgattcatgactggggtg

SEQ ID NO: 3630 - DNA, 1465 bp, Xenorhabdus vietnamensis
attgaacgctggcggcaggcctaacacatgcaagtcgggcggcagcggggggaagcttgcttccctgccggcgagcggcggacgggtgagtaatgtctggggatctgcccgatggagggggataaccactggaaacggtggctaataccgcataacctctgaggagcaaggtgggggaccttcgggcctcacgccatcggatgaacccagatgggattagctagtaggcggggtaatggcccacctaggcgacgatccctagctggtctgagaggatgaccagccacactgggactgagacacggcccagactcctacgggaggcagcagtggggaatattgcacaatgggcgcaagcctgatgcagccatgccgcgtgtatgaagaaggccttcgggttgtaaagtactttcagcggggaggaaggcaggcgtccgaatacggcgcctgattgacgttacccgcagaagaagcaccggctaactccgtgccagcagccgcggtaatacggagggtgcaagcgttaatcggaattactgggcgtaaagcgcacgcaggcggtcaattaagttggatgtgaaatccccgggcttaacctgggaactgcatccaagactggttggctagagtctcgtagaggggggtagaattccacgtgtagcggtgaaatgcgtagagatgtggaggaataccggtggcgaaggcggccccctggacgaagactgacgctcaggtgcgaaagcgtggggagcaaacaggattagataccctggtagtccacgctgtaaacgatgtcgatttggaggttgtgcccttgaggcgtggcttccggagctaacgcgttaaatcgaccgcctggggagtacggccgcaaggttaaaactcaaatgaattgacgggggcccgcacaagcggtggagcatgtggtttaattcgatgcaacgcgaagaaccttacctactcttgacatccagcgaagcctttagagatagaggcgtgccttcgggaacgctgagacaggtgctgcatggctgtcgtcagctcgtgttgtgaaatgttgggttaagtcccgcaacgagcgcaacccttatcctttgttgccagcacgtgatggtgggaactcaagggagactgccggtgataaaccggaggaaggtggggatgacgtcaagtcatcatggcccttacgagtagggctacacacgtgctacaatggcagatacaaagagaagcgacctcgcgagagcaagcggaactcataaagtctgtcgtagtccggattggagtctgcaactcgactccatgaagtcggaatcgctagtaatcgcagatcagaatgctgcggtgaatacgttcccgggccttgtacacaccgcccgtcacaccatgggagtgggttgcaaaagaagtaggtagcttaaccttcgggagggcgcttaccactttgtgattcatgactggggtg

SEQ ID NO: 3631 - DNA, 1467 bp, Xylella fastidiosa
agtgaacgctggcggcaggcctaacacatgcaagtcggacggcagcacattggtagtaataccatgggtggcgagtggcggacgggtgaggaatacatcggaatctaccttatcgtgggggacaacgtagggaaacttacgctaataccgcatacgacctacgggtgaaagcaggggaccttagggccttgtgcgattggatgagccgatgtccgattagctagttggtgaggtaaaggctcaccaaggcgacgatcggtagctggtctgagaggatgatcagccacactggaactgagacacggtccagactcctacgggaggcagcagtggggaatattggacaatgggcgcaagcctgatccagctatgccgcgtgggtgaagaatgccttcgggttgtaaagcccttttgttggggaagaaaggcaattggttaatacctagttgttatgacggtacccaaagaataagcaccggctaacttcgtgccagcagccgcggtaatacgaagggtgcaagcgttactcggaattactgggcgtaaagggtgcgtaggtggttatttaagtctgttgtgaaagccctgggcttaacctgggaatggcagtggatactggatagctagagtgtggtagagggtagcggaattcctggtgtagcagtgaaatgcgtagagatcaggaggaacatccgtggcgaaggcggctacctgggccaacactgacactgaggcacgaaagcgtggggagcaaacaggattagataccctggtagtccacgccctaaacgatgcgaactggatgttgagtgcaaattggcactcagtatcgaagctaacgcgttaagttcgccgcctggggagtacggtcgcaagactgaaactcaaaggaattgacgggggcccgcacaagcggtggagtatgtggtttaattcgatgcaacgcgaagaaccttacctggtcttgacatctgcggaactttccagagatggattggtgccttcgggagccgtgagacaggtgctgcatggctgtcgtcagctcgtgtcgtgagatgttgggttaagtcccgcaacgagcgcaacccttgtccttagttgccagcacgtaatggtgggaactttaaggagactgccggtgacaaatcggaggaaggtggggatgacgtcaagtcatcatggcccttacgaccagggctacacacgtactacaatggtagggacagagggctgcaatctcgcgagggtgagctaatcccagaaaccctatctcagtccggattggagtctgcaactcgactccatgaagtcggaatcgctagtaatcgcagatcagcattgctgcggtgaatacgttcccgggccttgtacacaccgcccgtcacaccatgggagtttgttgcaccagaagcaggtagcttaaccgcgaggagggcgcttgccacggtgtggccgatgactggggtg

SEQ ID NO: 3632 - DNA, 1467 bp, Xylella taiwanensis
agtgaacgctggcggcaggcctaacacatgcaagtcgaacggcagcacagtggtagcgatatcatgggtggcgagtggcggacgggtgaggaatacatcggaatctaccttgtcgtgggggataacgtagggaaacttacgctaataccgcatacgacctacgggtgaaagcaggggacctttgggccttgtgcgattggatgagccgatgtccgattagctagttggtggggtaaaggcccaccaaggcgacgatcggtagctggtctgagaggatgatcagccacactggaactgagacacggtccagactcctacgggaggcagcagtggggaatattggacaatgggcgcaagcctgatccagctatgccgcgtgggtgaagaatgccttcgggttgtaaagcccttttgttggggaagaaaagcaattggttaatacccggttgttctgacggtacccaaagaataagcaccggctaacttcgtgccagcagccgcggtaatacgaagggtgcaagcgttactcggaattactgggcgtaaagggtgcgtaggtggttgtttaagtccgttgtgaaagccctgggcttaacctgggaatggcagtggatactggatagctagagtgtggtagagggtagcggaattcctggtgtagcagtgaaatgcgtagagatcaggaggaacatccgtggcgaaggcggctacctgggccaacactgacactgaggcacgaaagcgtggggagcaaacaggattagataccctggtagtccacgccctaaacgatgcgaactggatgttgagtgcaaattggcactcagtatcgaagctaacgcgttaagttcgccgcctggggagtacggtcgcaagactgaaactcaaaggaattgacgggggcccgcacaagcggtggagtatgtggtttaattcgatgcaacgcgaagaaccttacctggtcttgacatccacgggactttccagagatggattggtgccttcgggagccgtgagacaggtgctgcatggctgtcgtcagctcgtgtcgtgagatgttgggttaagtcccgcaacgagcgcaacccttgtccttagttgccagcacgttatggtgggaactttaaggagactgccggtgacaaatcggaggaaggtggggatgacgtcaagtcatcatggcccatacgaccagggctacacacgtactacaatggtagggacagagggctgcaatctcgcgagggtgagccaatcccagaaaccctatctcagtccggattggagtctgcaactcgactccatgaagtcggaatcgctagtaatcgcagatcagcattgctgcggtgaatacgttcccgggccttgtacacaccgcccgtcacaccatgggagtttgttgcaccagaagcaggtagcttaaccgcgaggagggcgcttgccacggtgtggccgatgactggggtg

SEQ ID NO: 3633 - DNA, 1455 bp, Xylophilus ampelinus
attgaacgctggcggcatgccttacacatgcaagtcgaacggtaacaggtcttcggatgctgacgagtggcgaacgggtgagtaatacatcggaacgtgcccgatcgtgggggataacgcagcgaaagctgtgctaataccgcatacgatctacggatgaaagcgggggatcgcaagacctcgcgcggacggagcggccgatggcagattaggtagttggtgaggtaaaggctcaccaagccgtcgatctgtagctggtctgagaggacgaccagccacactgggactgagacacggcccagactcctacgggaggcagcagtggggaattttggacaatgggcgcaagcctgatccagccatgccgcgtgcaggatgaaggccttcgggttgtaaactgcttttgtacggaacgaaaaggctttttttaataaaaagagctcatgacggtaccgtaagaataagcaccggctaactacgtgccagcagccgcggtaatacgtagggtgcgagcgttaatcggaattactgggcgtaaagcgtgcgcaggcggtgatgtaagacagatgtgaaatccctgggctcaacctgggaactgcatttgtgactgcatcgctggagtgcggcagagggggatggaattccgcgtgtagcagtgaaatgcgtagatatgcggaggaacaccgatggcgaaggcaatcccctgggcctgcactgacgctcatgcacgaaagcgtggggagcaaacaggattagataccctggtagtccacgccctaaacgatgtcaactggttgttgggtcttcactgactcagtaacgaagctaacgcgtgaagttgaccgcctggggagtacggccgcaaggttgaaactcaaaggaattgacggggacccgcacaagcggtggatgatgtggtttaattcgatgcaacgcgaaaaaccttacccacctttgacatgtacggaatttgccagagatggcttagtgctcgaaagagagccgtaacacaggtgctgcatggctgtcgtcagctcgtgtcgtgagatgttgggttaagtcccgcaacgagcgcaacccttgtcattagttgctacatttagttgggcactctaatgagactgccggtgacaaaccggaggaaggtggggatgacgtcaagtcctcatggcccttataggtggggctacacacgtcatacaatggctggtacagagggttgccaacccgcgagggggagctaatcccataaaaccagtcgtagtccggatcgcagtctgcaactcgactgcgtgaagtcggaatcgctagtaatcgcggatcagaatgtcgcggtgaatacgttcccgggtcttgtacacaccgcccgtcacaccatgggagcgggttctgccagaagtagttagcctaaccgcaaggagggcgattaccacggcagggttcgtgactggggtg

SEQ ID NO: 3634 - DNA, 1384 bp, Yangia pacifica
aacgaacgctggcggcaggcctaacacatgcaagtcgagcgagaccttcgggtctagcggcggacgggtgagtaacgcgtgggaacgtgcccttctctacggaatagtcccgggaaactgggtttaataccgtatacgcccttcgggggaaagatttatcggagaaggatcggcccgcgttagattaggtagttggtggggtaatggcctaccaagcctacgatctatagctggtttgagaggatgatcagccacactgggactgagacacggcccagactcctacgggaggcagcagtggggaatcttagacaatgggggcaaccctgatctagccatgccgcgtgagtgatgaaggccttagggtcgtaaagctctttcgctggggaagataatgactgtacccagtaaagaaaccccggctaactccgtgccagcagccgcggtaatacggagggggttagcgttgttcggaattactgggcgtaaagcgcgcgtaggcggatcagaaagttgggggtgaaatcccggggctcaacctcggaactgcctccaaaactcctggtcttgagttcgagagaggtgagtggaactccgagtgtagaggtgaaattcgtagatattcggaagaacaccagtggcgaaggcggctcactggctcgatactgacgctgaggtgcgaaagtgtggggagcaaacaggattagataccctggtagtccacaccgtaaacgatgaatgccagtcgtcggcaagcatgcttgtcggtgacacacctaacggattaagcattccgcctggggagtacggtcgcaagattaaaactcaaaggaattgacgggggcccgcacaagcggtggagcatgtggtttaattcgaagcaacgcgcagaaccttaccaacccttgacatcctcggaccgccagagagatctggttttcacttcggtgaccgagtgacaggtgctgcatggctgtcgtcagctcgtgtcgtgagatgttcggttaagtccggcaacgagcgcaacccacatcttcagttgccagcagttcggctgggcactctggagaaactgcccgtgataagcgggaggaaggtgtggatgacgtcaagtcctcatggcccttacgggttgggctacacacgtgctacaatggcagtgacaatgggttaatcccaaaaaactgtctcagttcggattggggtctgcaactcgaccccatgaagtcggaatcgctagtaatcgcgtaacagcatgacgcggtgaatacgttcccgggccttgtacacaccgcccgtcacaccatgggagttggttctacccgacgacgctgcgctaaccttcgggaggcaggcggccacggtaggatcagcgactggggtg

SEQ ID NO: 3635 - DNA, 1461 bp, Yersinia aldovae
attgaacgctggcggcaggcctaacacatgcaagtcgagcggcagcgggaagtagtttactactttgccggcgagcggcggacgggtgagtaatgtctgggaaactgcctgatggagggggataactactggaaacggtagctaataccgcatgacctcgcaagagcaaagtgggggaccttcgggcctcacgccatcggatgtgcccagatgggattagctagtaggtggggtaatggctcacctaggcgacgatccctagctggtctgagaggatgaccagccacactggaactgagacacggtccagactcctacgggaggcagcagtggggaatattgcacaatgggcgcaagcctgatgcagccatgccgcgtgtgtgaagaaggccttcgggttgtaaagcactttcagcgaggaggaaggcagtcgtgttaatagcacggttgattgacgttactcgcagaagaagcaccggctaactccgtgccagcagccgcggtaatacggagggtgcaagcgttaatcggaattactgggcgtaaagcgcacgcaggcggtttgttaagtcagatgtgaaatccccgcgcttaacgtgggaactgcatttgaaactggcaagctagagtcttgtagaggggggtagaattccaggtgtagcggtgaaatgcgtagagatctggaggaataccggtggcgaaggcggccccctggacaaagactgacgctcaggtgcgaaagcgtggggagcaaacaggattagataccctggtagtccacgctgtaaacgatgtcgacttggaggttgtgcccttgaggcgtggcttccggagctaacgcgttaagtcgaccgcctggggagtacggccgcaaggttaaaactcaaatgaattgacgggggcccgcacaagcggtggagcatgtggtttaattcgatgcaacgcgaagaaccttacctactcttgacatccacagaacgtagcagagatgcttcggtgccttcgggaactgtgagacaggtgctgcatggctgtcgtcagctcgtgttgtgaaatgttgggttaagtcccgcaacgagcgcaacccttatcctttgttgccagcacgtaatggtgggaactcaagggagactgccggtgacaaaccggaggaaggtggggatgacgtcaagtcatcatggcccttacgagtagggctacacacgtgctacaatggcagatacaaagtgaagcgaactcgcgagagccagcggaccacataaagtctgtcgtagtccggattggagtctgcaactcgactccatgaagtcggaatcgctagtaatcgtagatcagaatgctacggtgaatacgttcccgggccttgtacacaccgcccgtcacaccatgggagtgggttgcaaaagaagtaggtagcttaaccttcgggagggcgcttaccactttgtgattcatgactgg

SEQ ID NO: 3636 - DNA, 1465 bp, Yersinia entomophaga
  misc_feature (724)..(724): n is a, c, g, or t
attgaacgctggcggcaggcctaacacatgcaagtcgagcggcagcgggaagtagcttgctactttgccggcgagcggcggacgggtgagtaatgtctgggaaactgcctgatggagggggataactactggaaacggtagctaataccgcataacctcgcaagagcaaagtgggggaccttagggcctcacgccatcggatgtgcccagatgggattagctagtaggtggggtaatggctcacctaggcgacgatccctagctggtctgagaggatgaccagccacactggaactgagacacggtccagactcctacgggaggcagcagtggggaatattgcacaatgggcgcaagcctgatgcagccatgccgcgtgtgtgaagaaggccttcgggttgtaaagcactttcagcgaggaggaaggcatttcacctaatacgtgaagtgattgacgttactcgcagaagaagcaccggctaactccgtgccagcagccgcggtaatacggagggtgcaagcgttaatcggaattactgggcgtaaagcgcacgcaggcggtttgttaagtcagatgtgaaatccccgagcttaacttgggaactgcatttgaaactggcaagctagagtcttgtagaggggggtagaattccaggtgtagcggtgaaatgcgtagagatctggaggaataccggtggcgaaggcggccccctggacaaagacngacgctcaggtgcgaaagcgtggggagcaaacaggattagataccctggtagtccacgctgtaaacgatgtcgacttggaggttgtgcccttgaggcgtggcttccggagctaacgcgttaagtcgaccgcctggggagtacggccgcaaggttaaaactcaaatgaattgacgggggcccgcacaagcggtggagcatgtggtttaattcgatgcaacgcgaagaaccttacctactcttgacatccacagaacgtagcagagatgcttcggtgccttcgggaactgtgagacaggtgctgcatggctgtcgtcagctcgtgttgtgaaatgttgggttaagtcccgcaacgagcgcaacccttatcctttgttgccagcacgtcatggtgggaactcaagggagactgccggtgataaaccggaggaaggtggggatgacgtcaagtcatcatggcccttacgagtagggctacacacgtgctacaatggcagatacaaagtgaagcgaactcgcgagagcaagcggaccacataaagtctgtcgtagtccggattggagtctgcaactcgactccatgaagtcggaatcgctagtaatcgtagatcagaatgctacggtgaatacgttcccgggccttgtacacaccgcccgtcacaccatgggagtgggttgcaaaagaagtaggtagcttaaccttcgggagggcgcttaccactttgtgattcatgactggggtg

SEQ ID NO: 3637 - DNA, 1465 bp, Yersinia frederiksenii
attgaacgctggcggcaggcctaacacatgcaagtcgagcggcagcgggaagtagtttactactttgccggcgagcggcggacgggtgagtaatgtctgggaaactgcctgatggagggggataactactggaaacggtagctaataccgcatgacctcgcaagagcaaagtgggggaccttcgggcctcacgccatcggatgtgcccagatgggattagctagtaggtggggtaatggctcacctaggcgacgatccctagctggtctgagaggatgaccagccacactggaactgagacacggtccagactcctacgggaggcagcagtggggaatattgcacaatgggcgcaagcctgatgcagccatgccgcgtgtgtgaagaaggccttcgggttgtaaagcactttcagcgaggaggaaggggttgagtttaatacgctcaatcattgacgttactcgcagaagaagcaccggctaactccgtgccagcagccgcggtaatacggagggtgcaagcgttaatcggaattactgggcgtaaagcgcacgcaggcggtttgttaagtcagatgtgaaatccccgcgcttaacgtgggaactgcatttgaaactggcaagctagagtcttgtagaggggggtagaattccaggtgtagcggtgaaatgcgtagagatctggaggaataccggtggcgaaggcggccccctggacaaagactgacgctcaggtgcgaaagcgtggggagcaaacaggattagataccctggtagtccacgctgtaaacgatgtcgacttggaggttgtgcccttgaggcgtggcttccggagctaacgcgttaagtcgaccgcctggggagtacggccgcaaggttaaaactcaaatgaattgacgggggcccgcacaagcggtggagcatgtggtttaattcgatgcaacgcgaagaaccttacctactcttgacatccacagaacttagcagagatgcttcggtgccttcgggaactgtgagacaggtgctgcatggctgtcgtcagctcgtgttgtgaaatgttgggttaagtcccgcaacgagcgcaacccttatcctttgttgccagcacgtaatggtgggaactcaaaggagactgccggtgacaaaccggaggaaggtggggatgacgtcaagtcatcatggcccttacgagtagggctacacacgtgctacaatggcagatacaaagtgaagcgaactcgcgagagcaagcggaccacataaagtctgtcgtagtccggattggagtctgcaactcgactccatgaagtcggaatcgctagtaatcgtagatcagaatgctacggtgaatacgttcccgggccttgtacacaccgcccgtcacaccatgggagtgggttgcaaaagaagtaggtagcttaaccttcgggagggcgcttaccactttgtgattcatgactggggtg

SEQ ID NO: 3638 - DNA, 1465 bp, Yersinia massiliensis
attgaacgctggcggcaggcctaacacatgcaagtcgagcggcagcggaaagtagcttgctactttgccggcgagcggcggacgggtgagtaatgtctggggatctgcctgatggagggggataactactggaaacggtagctaataccgcatgacctcgaaagagcaaagtgggggaccttcgggcctcacgccatcggatgaacccagatgggattagctagtaggtggggtaatggctcacctaggcgacgatccctagctggtctgagaggatgaccagccacactggaactgagacacggtccagactcctacgggaggcagcagtggggaatattgcacaatgggcgcaagcctgatgcagccatgccgcgtgtgtgaagaaggccttcgggttgtaaagcactttcagcgaggaggaaggcattgtggttaataaccgcagtgattgacgttactcgcagaagaagcaccggctaactccgtgccagcagccgcggtaatacggagggtgcaagcgttaatcggaattactgggcgtaaagcgcacgcaggcggtttgttaagtcagatgtgaaatccccgcgcttaacgtgggaactgcatttgaaactggcaagctagagtcttgtagaggggggtagaattccaggtgtagcggtgaaatgcgtagagatctggaggaataccggtggcgaaggcggccccctggacaaagactgacgctcaggtgcgaaagcgtggggagcaaacaggattagataccctggtagtccacgctgtaaacgatgtcgacttggaggttgtgcccttgaggcgtggcttccggagctaacgcgttaagtcgaccgcctggggagtacggccgcaaggttaaaactcaaatgaattgacgggggcccgcacaagcggtggagcatgtggtttaattcgatgcaacgcgaagaaccttacctactcttgacatccacggaatttagcagagatgctttagtgccttcgggaaccgtgagacaggtgctgcatggctgtcgtcagctcgtgttgtgaaatgttgggttaagtcccgcaacgagcgcaacccttatcctttgttgccagcacgtaatggtgggaactcaagggagactgccggtgacaaaccggaggaaggtggggatgacgtcaagtcatcatggcccttacgagtagggctacacacgtgctacaatggcagatacaaagtgaagcgaactcgcgagagcaagcggaccacataaagtctgtcgtagtccggattggagtctgcaactcgactccatgaagtcggaatcgctagtaatcgtagatcagaatgctacggtgaatacgttcccgggccttgtacacaccgcccgtcacaccatgggagtgggttgcaaaagaagtaggtagcttaaccttcgggagggcgcttaccactttgtgattcatgactggggtg

SEQ ID NO: 3639 - DNA, 1465 bp, Yersinia nurmii
attgaacgctggcggcaggcctaacacatgcaagtcgagcggcagcggaaagtagcttgctactttgccggcgagcggcggacgggtgagtaatgtctgggaaactgcctgatggagggggataactactggaaacggtagctaataccgcataacctcgcaagagcaaagtgggggaccttagggcctcacgccatcggatgtgcccagatgggattagctagtaggtggggtaatggctcacctaggcgacgatccctagctggtctgagaggatgaccagccacactggaactgagacacggtccagactcctacgggaggcagcagtggggaatattgcacaatgggcgcaagcctgatgcagccatgccgcgtgtgtgaagaaggccttcgggttgtaaagcactttcagcgaggaggaaggcatttcacttaatacgtgaagtgattgacgttactcgcagaagaagcaccggctaactccgtgccagcagccgcggtaatacggagggtgcaagcgttaatcggaattactgggcgtaaagcgcacgcaggcggtttgttaagtcagatgtgaaatccccgagcttaacttgggaactgcatttgaaactggcaagctagagtcttgtagaggggggtagaattccaggtgtagcggtgaaatgcgtagagatctggaggaataccggtggcgaaggcggccccctggacaaagactgacgctcaggtgcgaaagcgtggggagcaaacaggattagataccctggtagtccacgctgtaaacgatgtcgacttggaggttgtgcccttgaggcgtggcttccggagctaacgcgttaagtcgaccgcctggggagtacggccgcaaggttaaaactcaaatgaattgacgggggcccgcacaagcggtggagcatgtggtttaattcgatgcaacgcgaagaaccttacctactcttgacatccacagaacttagcagagatgcttcggtgccttcgggaactgtgagacaggtgctgcatggctgtcgtcagctcgtgttgtgaaatgttgggttaagtcccgcaacgagcgcaacccttatcctttgttgccagcacgtcatggtgggaactcaagggagactgccggtgataaaccggaggaaggtggggatgacgtcaagtcatcatggcccttacgagtagggctacacacgtgctacaatggcagatacaaagtgaagcgaactcgcgagagcaagcggaccacataaagtctgtcgtagtccggattggagtctgcaactcgactccatgaagtcggaatcgctagtaatcgtagatcagaatgctacggtgaatacgttcccgggccttgtacacaccgcccgtcacaccatgggagtgggttgcaaaagaagtaggtagcttaaccttcgggagggcgcttaccactttgtgattcatgactggggtg

SEQ ID NO: 3640 - DNA, 1465 bp, Yersinia pekkanenii
attgaacgctggcggcaggcctaacacatgcaagtcgagcggcagcgggaagtagtttactactttgccggcgagcggcggacgggtgagtaatgtctgggaaactgcctgatggagggggataactactggaaacggtagctaataccgcatgacctcgcaagagcaaagtgggggaccttcgggcctcacgccatcggatgtgcccagatgggattagctagtaggtggggtaatggctcacctaggcgacgatccctagctggtctgagaggatgaccagccacactggaactgagacacggtccagactcctacgggaggcagcagtggggaatattgcacaatgggcgcaagcctgatgcagccatgccgcgtgtgtgaagaaggccttcgggttgtaaagcactttcagcgaggaggaaggcaatcgtgttaatagcacggttgattgacgttactcgcagaagaagcaccggctaactccgtgccagcagccgcggtaatacggagggtgcaagcgttaatcggaattactgggcgtaaagcgcacgcaggcggtttgttaagtcagatgtgaaatccccgcgcttaacgtgggaactgcatttgaaactggcaagctagagtcttgtagaggggggtagaattccaggtgtagcggtgaaatgcgtagagatctggaggaataccggtggcgaaggcggccccctggacaaagactgacgctcaggtgcgaaagcgtggggagcaaacaggattagataccctggtagtccacgctgtaaacgatgtcgacttggaggttgtgcccttgaggcgtggcttccggagctaacgcgttaagtcgaccgcctggggagtacggccgcaaggttaaaactcaaatgaattgacgggggcccgcacaagcggtggagcatgtggtttaattcgatgcaacgcgaagaaccttacctactcttgacatccacagaacttagcagagatgcttcggtgccttcgggaactgtgagacaggtgctgcatggctgtcgtcagctcgtgttgtgaaatgttgggttaagtcccgcaacgagcgcaacccttatcctttgttgccagcacgtaatggtgggaactcaagggagactgccggtgacaaaccggaggaaggtggggatgacgtcaagtcatcatggcccttacgagtagggctacacacgtgctacaatggcagatacaaagtgaagcgaactcgcgagagccagcggaccacataaagtctgtcgtagtccggattggagtctgcaactcgactccatgaagtcggaatcgctagtaatcgtagatcagaatgctacggtgaatacgttcccgggccttgtacacaccgcccgtcacaccatgggagtgggttgcaaaagaagtaggtagcttaaccttcgggagggcgcttaccactttgtgattcatgactggggtg

SEQ ID NO: 3641 - DNA, 1461 bp, Yersinia pestis
attgaacgctggcggcaggcctaacacatgcaagtcgagcggcagcgggaagtagtttactactttgccggcgagcggcggacgggtgagtaatgtctggggatctgcctgatggagggggataactactggaaacggtagctaataccgcatgacctcgcaagagcaaagtgggggaccttagggcctcacgccatcggatgaacccagatgggattagctagtaggtggggtaatggctcacctaggcgacgatccctagctggtctgagaggatgaccagccacactggaactgagacacggtccagactcctacgggaggcagcagtggggaatattgcacaatgggcgcaagcctgatgcagccatgccgcgtgtgtgaagaaggccttcgggttgtaaagcactttcagcgaggaggaaggggttgagtttaatacgctcaatcattgacgttactcgcagaagaagcaccggctaactccgtgccagcagccgcggtaatacggagggtgcaagcgttaatcggaattactgggcgtaaagcgcacgcaggcggtttgttaagtcagatgtgaaatccccgcgcttaacgtgggaactgcatttgaaactggcaagctagagtcttgtagaggggggtagaattccaggtgtagcggtgaaatgcgtagagatctggaggaataccggtggcgaaggcggccccctggacaaagactgacgctcaggtgcgaaagcgtggggagcaaacaggattagataccctggtagtccacgctgtaaacgatgtcgacttggaggttgtgcccttgaggcgtggcttccggagctaacgcgttaagtcgaccgcctggggagtacggccgcaaggttaaaactcaaatgaattgacgggggcccgcacaagcggtggagcatgtggtttaattcgatgcaacgcgaagaaccttacctactcttgacatccacagaatttggcagagatgctaaagtgccttcgggaactgtgagacaggtgctgcatggctgtcgtcagctcgtgttgtgaaatgttgggttaagtcccgcaacgagcgcaacccttatcctttgttgccagcacgtaatggtgggaactcaagggagactgccggtgacaaaccggaggaaggtggggatgacgtcaagtcatcatggcccttacgagtagggctacacacgtgctacaatggcagatacaaagtgaagcgaactcgcgagagccagcggaccacataaagtctgtcgtagtccggattggagtctgcaactcgactccatgaagtcggaatcgctagtaatcgtagatcagaatgctacggtgaatacgttcccgggccttgtacacaccgcccgtcacaccatgggagtgggttgcaaaagaagtaggtagcttaaccttcgggagggcgcttaccactttgtgattcatgactgg

SEQ ID NO: 3642 - DNA, 1465 bp, Yersinia pseudotuberculosis
attgaacgctggcggcaggcctaacacatgcaagtcgagcggcagcgggaagtagtttactactttgccggcgagcggcggacgggtgagtaatgtctggggatctgcctgatggagggggataactactggaaacggtggctaataccgcatgacctcgcaagagcaaagtgggggaccttagggcctcacgccatcggatgaacccagatgggattagctagtaggtggggtaatggctcacctaggcgacgatccctagctggtctgagaggatgaccagccacactggaactgagacacggtccagactcctacgggaggcagcagtggggaatattgcacaatgggcgcaagcctgatgcagccatgccgcgtgtgtgaagaaggccttcgggttgtaaagcactttcagcgaggaggaaggggttgagtttaatacgctcaatcattgacgttactcgcagaagaagcaccggctaactccgtgccagcagccgcggtaatacggagggtgcaagcgttaatcggaattactgggcgtaaagcgcacgcaggcggtttgttaagtcagatgtgaaatccccgcgcttaacgtgggaactgcatttgaaactggcaagctagagtcttgtagaggggggtagaattccaggtgtagcggtgaaatgcgtagagatctggaggaataccggtggcgaaggcggccccctggacaaagactgacgctcaggtgcgaaagcgtggggagcaaacaggattagataccctggtagtccacgctgtaaacgatgtcgacttggaggttgtgcccttgaggcgtggcttccggagctaacgcgttaagtcgaccgcctggggagtacggccgcaaggttaaaactcaaatgaattgacgggggcccgcacaagcggtggagcatgtggtttaattcgatgcaacgcgaagaaccttacctactcttgacatccacagaatttggcagagatgctaaagtgccttcgggaactgtgagacaggtgctgcatggctgtcgtcagctcgtgttgtgaaatgttgggttaagtcccgcaacgagcgcaacccttatcctttgttgccagcacgtaatggtgggaactcaagggagactgccggtgacaaaccggaggaaggtggggatgacgtcaagtcatcatggcccttacgagtagggctacacacgtgctacaatggcagatacaaagtgaagcgaactcgcgagagccagcggaccacataaagtctgtcgtagtccggattggagtctgcaactcgactccatgaagtcggaatcgctagtaatcgtagatcagaatgctacggtgaatacgttcccgggccttgtacacaccgcccgtcacaccatgggagtgggttgcaaaagaagtaggtagcttaaccttcgggagggcgcttaccactttgtgattcatgactggggtg

SEQ ID NO: 3643 - DNA, 1465 bp, Yersinia rohdei
attgaacgctggcggcaggcctaacacatgcaagtcgagcggcagcgggaagtagtttactactttgccggcgagcggcggacgggtgagtaatgtctgggaaactgcctgatggagggggataactactggaaacggtagctaataccgcatgacctcgcaagagcaaagtgggggaccttcgggcctcacgccatcggatgtgcccagatgggattagctagtaggtggggtaatggctcacctaggcgacgatccctagctggtctgagaggatgaccagccacactggaactgagacacggtccagactcctacgggaggcagcagtggggaatattgcacaatgggcgcaagcctgatgcagccatgccgcgtgtgtgaagaaggccttcgggttgtaaagcactttcagcgaggaggaaggccaatagcttaatacgctgttggattgacgttactcgcagaagaagcaccggctaactccgtgccagcagccgcggtaatacggagggtgcaagcgttaatcggaattactgggcgtaaagcgcacgcaggcggtttgttaagtcagatgtgaaatccccgcgcttaacgtgggaactgcatttgaaactggcaagctagagtcttgtagaggggggtagaattccaggtgtagcggtgaaatgcgtagagatctggaggaataccggtggcgaaggcggccccctggacaaagactgacgctcaggtgcgaaagcgtggggagcaaacaggattagataccctggtagtccacgctgtaaacgatgtcgacttggaggttgtgcccttgaggcgtggcttccggagctaacgcgttaagtcgaccgcctggggagtacggccgcaaggttaaaactcaaatgaattgacgggggcccgcacaagcggtggagcatgtggtttaattcgatgcaacgcgaagaaccttacctactcttgacatccacagaacttagcagagatgcttcggtgccttcgggaactgtgagacaggtgctgcatggctgtcgtcagctcgtgttgtgaaatgttgggttaagtcccgcaacgagcgcaacccttatcctttgttgccagcacgtaatggtgggaactcaagggagactgccggtgacaaaccggaggaaggtggggatgacgtcaagtcatcatggcccttacgagtagggctacacacgtgctacaatggcagatacaaagtgaagcgaactcgcgagagcaagcggaccacataaagtctgtcgtagtccggattggagtctgcaactcgactccatgaagtcggaatcgctagtaatcgtagatcagaatgctacggtgaatacgttcccgggccttgtacacaccgcccgtcacaccatgggagtgggttgcaaaagaagtaggtagcttaaccttcgggagggcgcttaccactttgtgattcatgactggggtg

SEQ ID NO: 3644 - DNA, 1465 bp, Yersinia ruckeri
attgaacgctggcggcaggcctaacacatgcaagtcgagcggcagcggaaagtagcttgctactttgccggcgagcggcggacgggtgagtaatgtctggggatctgcctgatggagggggataactactggaaacggtagctaataccgcataacctcgcaagagcaaagtgggggaccttcgggcctcacgccatcggatgaacccagatgggattagctagtaggtggggtaatggctcacctaggcgacgatccctagctggtctgagaggatgaccagccacactggaactgagacacggtccagactcctacgggaggcagcagtggggaatattgcacaatgggcgcaagcctgatgcagccatgccgcgtgtgtgaagaaggccttcgggttgtaaagcactttcagcgaggaggaagggttaagtgttaatagcactgaacattgacgttactcgcagaagaagcaccggctaactccgtgccagcagccgcggtaatacggagggtgcaagcgttaatcggaattactgggcgtaaagcgcacgcaggcggtttgttaagtcagatgtgaaatccccgagcttaacttgggaactgcatttgaaactggcaagctagagtcttgtagaggggggtagaattccaggtgtagcggtgaaatgcgtagagatctggaggaataccggtggcgaaggcggccccctggacaaagactgacgctcaggtgcgaaagcgtggggagcaaacaggattagataccctggtagtccacgctgtaaacgatgtcgacttggaggttgtgcccttgaggcgtggcttccggagctaacgcgttaagtcgaccgcctggggagtacggccgcaaggttaaaactcaaatgaattgacgggggcccgcacaagcggtggagcatgtggtttaattcgatgcaacgcgaagaaccttacctactcttgacatccacagaacttggcagagatgccttggtgccttcgggaactgtgagacaggtgctgcatggctgtcgtcagctcgtgttgtgaaatgttgggttaagtcccgcaacgagcgcaacccttatcctttgttgccagcacgtaatggtgggaactcaagggagactgccggtgacaaaccggaggaaggtggggatgacgtcaagtcatcatggcccttacgagtagggctacacacgtgctacaatggcagatacaaagtgaagcgaactcgcgagagcaagcggaccacataaagtctgtcgtagtccggattggagtctgcaactcgactccatgaagtcggaatcgctagtaatcgtagatcagaatgctacggtgaatacgttcccgggccttgtacacaccgcccgtcacaccatgggagtgggttgcaaaagaagtaggtagcttaaccttcgggagggcgcttaccactttgtgattcatgactggggtg

SEQ ID NO: 3645 - DNA, 1465 bp, Yersinia similis
attgaacgctggcggcaggcctaacacatgcaagtcgagcggcagcgggaagtagtttactactttgccggcgagcggcggacgggtgagtaatgtctggggatctgcctgatggagggggataactactggaaacggtagctaataccgcatgacctcgcaagagcaaagtgggggaccttagggcctcacgccatcggatgaacccagatgggattagctagtaggtggggtaatggctcacctaggcgacgatccctagctggtctgagaggatgaccagccacactggaactgagacacggtccagactcctacgggaggcagcagtggggaatattgcacaatgggcgcaagcctgatgcagccatgccgcgtgtgtgaagaaggccttcgggttgtaaagcactttcagcgaggaggaaggggttgagtttaatacgcttaatcattgacgttactcgcagaagaagcaccggctaactccgtgccagcagccgcggtaatacggagggtgcaagcgttaatcggaattactgggcgtaaagcgcacgcaggcggtttgttaagtcagatgtgaaatccccgcgcttaacgtgggaactgcatttgaaactggcaagctagagtcttgtagaggggggtagaattccaggtgtagcggtgaaatgcgtagagatctggaggaataccggtggcgaaggcggccccctggacaaagactgacgctcaggtgcgaaagcgtggggagcaaacaggattagataccctggtagtccacgctgtaaacgatgtcgacttggaggttgtgcccttgaggcgtggcttccggagctaacgcgttaagtcgaccgcctggggagtacggccgcaaggttaaaactcaaatgaattgacgggggcccgcacaagcggtggagcatgtggtttaattcgatgcaacgcgaagaaccttacctactcttgacatccacaggatttggcagagatgccttagtgccttcgggaactgtgagacaggtgctgcatggctgtcgtcagctcgtgttgtgaaatgttgggttaagtcccgcaacgagcgcaacccttatcctttgttgccagcacgtaatggtgggaactcaagggagactgccggtgacaaaccggaggaaggtggggatgacgtcaagtcatcatggcccttacgagtagggctacacacgtgctacaatggcagatacaaagtgaagcgaactcgcgagagccagcggaccacataaagtctgtcgtagtccggattggagtctgcaactcgactccatgaagtcggaatcgctagtaatcgtagatcagaatgctacggtgaatacgttcccgggccttgtacacaccgcccgtcacaccatgggagtgggttgcaaaagaagtaggtagcttaaccttcgggagggcgcttaccactttgtgattcatgactggggtg

SEQ ID NO: 3646 - DNA, 1465 bp, Yersinia wautersii
  misc_feature (994)..(994): n is a, c, g, or t
attgaacgctggcggcaggcctaacacatgcaagtcgagcggcagcgggaagtagtttactactttgccggcgagcggcggacgggtgagtaatgtctggggatctgcctgatggagggggataactactggaaacggtggctaataccgcatgacctcgcaagagcaaagtgggggaccttcgggcctcacgccatcggatgaacccagatgggattagctagtaggtggggtaatggctcacctaggcgacgatccctagctggtctgagaggatgaccagccacactggaactgagacacggtccagactcctacgggaggcagcagtggggaatattgcacaatgggcgcaagcctgatgcagccatgccgcgtgtgtgaagaaggccttcgggttgtaaagcactttcagcgaggaggaaggggttgagtttaatacgctcaatcattgacgttactcgcagaagaagcaccggctaactccgtgccagcagccgcggtaatacggagggtgcaagcgttaatcggaattactgggcgtaaagcgcacgcaggcggtttgttaagtcagatgtgaaatccccgcgcttaacgtgggaactgcatttgaaactggcaagctagagtcttgtagaggggggtagaattccaggtgtagcggtgaaatgcgtagagatctggaggaataccggtggcgaaggcggccccctggacaaagactgacgctcaggtgcgaaagcgtggggagcaaacaggattagataccctggtagtccacgctgtaaacgatgtcgacttggaggttgtgcccttgaggcgtggcttccggagctaacgcgttaagtcgaccgcctggggagtacggccgcaaggttaaaactcaaatgaattgacgggggcccgcacaagcggtggagcatgtggtttaattcgatgcaacgcgaagaaccttacctactcttgacatccacaggatttggcagagatgctnaagtgccttcgggaactgtgagacaggtgctgcatggctgtcgtcagctcgtgttgtgaaatgttgggttaagtcccgcaacgagcgcaacccttatcctttgttgccagcacgtaatggtgggaactcaagggagactgccggtgacaaaccggaggaaggtggggatgacgtcaagtcatcatggcccttacgagtagggctacacacgtgctacaatggcagatacaaagtgaagcgaactcgcgagagccagcggaccacataaagtctgtcgtagtccggattggagtctgcaactcgactccatgaagtcggaatcgctagtaatcgtagatcagaatgctacggtgaatacgttcccgggccttgtacacaccgcccgtcacaccatgggagtgggttgcaaaagaagtaggtagcttaaccttcgggagggcgcttaccactttgtgattcatgactggggtg

SEQ ID NO: 3647 - DNA, 1462 bp, Yokenella regensburgei
attgaacgctggcggcaggcctaacacatgcaagtcgaacggtagcacagagagcttgctctcgggtgacgagtggcggacgggtgagtaatgtctgggaaactgcctgatggagggggataactactggaaacggtagctaataccgcataacgtcgcaagaccaaagagggggaccttcgggcctcttgccatcagatgtgcccagatgggattagctagtaggtggggtaacggctcacctaggcgacgatccctagctggtctgagaggatgaccagccacactggaactgagacacggtccagactcctacgggaggcagcagtggggaatattgcacaatgggcgcaagcctgatgcagccatgccgcgtgtatgaagaaggccttcgggttgtaaagtactttcagcgaggaggaaggcgatacggttaataaccgtgtcgattgacgttactcgcagaagaagcaccggctaactccgtgccagcagccgcggtaatacggagggtgcaagcgttaatcggaattactgggcgtaaagcgcacgcaggcggtctgtcaagtcggatgtgaaatccccgggctcaacctgggaactgcattcgaaactggcaggcttgagtcttgtagaggggggtagaattccaggtgtagcggtgaaatgcgtagagatctggaggaataccggtggcgaaggcggccccctggacaaagactgacgctcaggtgcgaaagcgtggggagcaaacaggattagataccctggtagtccacgccgtaaacgatgtcgacttggaggttgtgcccttgaggcgtggcttccggagctaacgcgttaagtcgaccgcctggggagtacggccgcaaggttaaaactcaaatgaattgacgggggcccgcacaagcggtggagcatgtggtttaattcgatgcaacgcgaagaaccttacctactcttgacatccacggaacttagcagagatgctttggtgccttcgggaaccgtgagacaggtgctgcatggctgtcgtcagctcgtgttgtgaaatgttgggttaagtcccgcaacgagcgcaacccttatcctttgttgccagcggttcggccgggaactcaaaggagactgccagtgataaactggaggaaggtggggatgacgtcaagtcatcatggcccttacgagtagggctacacacgtgctacaatggcatatacaaagagaagcgacctcgcgagagcaagcggacctcataaagtatgtcgtagtccggattggagtctgcaactcgactccatgaagtcggaatcgctagtaatcgtggatcagaatgccacggtgaatacgttcccgggccttgtacacaccgcccgtcacaccatgggagtgggttgcaaaagaagtaggtagcttaaccttcgggagggcgcttaccactttgtgattcatgactggggtg

SEQ ID NO: 3648 - DNA, 1447 bp, Yoonia maritima
  misc_feature (736)..(736): n is a, c, g, or t
ggctcagaacgaacgctggcggcaggcctaacacatgcaagtcgagcgcactcttcggagtgagcggcggacgggttagtaacgcgtgggaatatacccttcactacggaatagcctcgggaaactgagagtaataccgtatacgcccttcgggggaaagatttatcggtgaaggattagcccgcgtaagattagatagttggtggggtaatggcctaccaagtctacgatctttagctggtttgagaggatgatcagcaacactgggactgagacacggcccagactcctacgggaggcagcagtggggaatcttagacaatgggcgcaagcctgatctagccatgccgcgtgagtgacgaaggccttagggtcgtaaagctctttcgccagagatgataatgacagtatctggtaaagaaaccccggctaactccgtgccagcagccgcggtaatacggagggggttagcgttgttcggaattactgggcgtaaagcgtacgtaggcggattggaaagttagaggtgaaatcccagggctcaaccctggaactgcctttaaaactatcagtctagagttcgagagaggtgagtggaattccaagtgtagaggtgaaattcgtagatatttggaggaacaccagtggcgaaggcggctcactggctcgatactgacgctgaggtacgaaagtgtggggagcaaacaggattagataccctggtagtccacaccgnaaacgatgaatgccagacgtcagggggcttgccctttggtgtcacacctaacggattaagcattccgcctggggagtacggtcgcaagattaaaactcaaaggaattgacgggggcccgcacaagcggtggagcatgtggtttaattcgaagcaacgcgcagaaccttaccaacccttgacatccttggaccgccagagagatctggttttctcgtaagagaccaagtgacaggtgctgcatggctgtcgtcagctcgtgtcgtgagatgttcggttaagtccggcaacgagcgcaacccacatccttagttgccagcagttcggctgggcactctagggaaactgcccgtgataagcgggaggaaggtgtggatgacgtcaagtcctcatggcccttacgggttgggctacacacgtgctacaatggcatctacagtgagttaatctccaaaagatgtctcagttcggattggggtctgcaactcgaccccatgaagtcggaatcgctagtaatcgcgtaacagcatgacgcggtgaatacgttcccgggccttgtacacaccgcccgtcacaccatgggagttggttctacccgacgacgctgcgctaacccttcggggaggcaggcggccacggtaggatcagcgactggggtgaagtcgtaacaaggtagcccgtaggggaacctgcggctggatcacccttcctta

SEQ ID NO: 3649 - DNA, 1384 bp, Yoonia sediminilitoris
aacgaacgctggcggcaggcctaacacatgcaagtcgagcgcactcttcggagtgagcggcggacgggttagtaacgcgtgggaacatacccttttctacggaatagcctcgggaaactgagagtaataccgtatacgcccttcgggggaaagatttatcggagaaggattggcccgcgttagattagatagttggtggggtaacggcctaccaagtctacgatctatagctggtttgagaggatgatcagcaacactgggactgagacacggcccagactcctacgggaggcagcagtggggaatcttagacaatgggcgcaagcctgatctagccatgccgcgtgagtgacgaaggccttagggtcgtaaagctctttcgccagagatgataatgacagtatctggtaaagaaaccccggctaactccgtgccagcagccgcggtaatacggagggggttagcgttgttcggaattactgggcgtaaagcgtacgtaggcggattggaaagtagggggtgaaatcccggggctcaaccccggaactgcctcctaaactatcagtctagagttcgagagaggtgagtggaattccaagtgtagaggtgaaattcgtagatatttggaggaacaccagtggcgaaggcggctcactggctcgatactgacgctgaggtacgaaagtgtggggagcaaacaggattagataccctggtagtccacaccgtaaacgatgaatgccagacgtcagggggcttgccctttggtgtcacacctaacggattaagcattccgcctggggagtacggtcgcaagattaaaactcaaaggaattgacgggggcccgcacaagcggtggagcatgtggtttaattcgaagcaacgcgcagaaccttaccaacccttgacatccttggaccgccagagagatctggttttctcgtaagagaccaagtgacaggtgctgcatggctgtcgtcagctcgtgtcgtgagatgttcggttaagtccggcaacgagcgcaacccacatctttagttgccagcagttcggctgggcactctagagaaactgcccgtgataagcgggaggaaggtgtggatgacgtcaagtcctcatggcccttacgggttgggctacacacgtgctacaatggcatctacagtgagttaatctccaaaagatgtctcagttcggattggggtctgcaactcgaccccatgaagtcggaatcgctagtaatcgcgtaacagcatgacgcggtgaatacgttcccgggccttgtacacaccgcccgtcacaccatgggagttggttctacccgacgacgctgcgctaaccttcggggggcaggcggccacggtaggatcagcgactggggtg

SEQ ID NO: 3650 - DNA, 1306 bp, Yoonia vestfoldensis
tgcaagtcgagcgagaccttcgggtctagcggcggacgggttagtaacgcgtgggaatatgcccttcactacggaatagcctcgggaaactgggagtaataccgtatacgccctttgggggaaagatttatcggtgaaggattagcccgcgtctgattagatagttggtggggtaatggcctaccaagtctacgatcagtagctggtttgagaggatgatcagcaacactgggactgagacacggcccagactcctacgggaggcagcagtggggaatcttagacaatgggcgcaagcctgatctagccatgccgcgtgagtgacgaaggccttagggtcgtaaagctctttcgccagagatgataatgacagtatctggtaaagaaaccccggctaactccgtgccagcagccgcggtaatacggagggggttagcgttgttcggaattactgggcgtaaagcgcacgtaggcggattggaaagtatggggtgaaatcccagggctcaaccctggaactgccttgtaaactcccagtctagagttcgagagaggtgagtggaattccaagtgtagaggtgaaattcgtagatatttggaggaacaccagtggcgaaggcggctcactggctcgatactgacgctgaggtgcgaaagtgtggggagcaaacaggattagataccctggtagtccacaccgtaaacgatgaatgccagacgtcggggggcttgcccttcggtgtcacacctaacggattaagcattccgcctggggagtacggtcgcaagattaaaactcaaaggaattgacgggggcccgcacaagcggtggagcatgtggtttaattcgaagcaacgcgcagaaccttaccaacccttgacatcctctgaccgcctgggagaccaggttttctcgtaagagacagagtgacaggtgctgcatggctgtcgtcagctcgtgtcgtgagatgttcggttaagtccggcaacgagcgcaacccacatctttagttgccatcattcagttgggcactctagagaaactgcccgtgataagcgggaggaaggtgtggatgacgtcaagtcctcatggcccttacgggttgggctacacacgtgctacaatggcatctacaatgggttaatctccaaaagatgtctcagttcggattggggtctgcaactcgaccccatgaagtcggaatcgctagtaatcgcgtaacagcatgacgcggtgaatacgttcccgggccttgtacacaccgcccgtcacaccatgggagttgggtttacccgaaggccgtgc

SEQ ID NO: 3651 - DNA, 1411 bp, Zavarzinella formosa
aacgaacgttggcggcatggattaggcatgcaagtcgaacgaatgccagtagcaatactggcggaagtggcgaaaggggcagtaatgcatgggtacctacccggtggttgaggatagccgtcctaacggacgggtaatactcgatgacatcgcaagatcaaagctccggcgccgtcggaggggcccatgtcggattagctagttgggggggtaacggcccaccaaggcaaagatctgtagcgggtgtgagagcacgacccgcgccactggcactgagacactggccagacacctacgggtggctgcagtcgaggatcttcgtcaatgggcgaaagcctgaacgagcgatgccgcgtgtgcgatgaaggccttcgggttgtaaagcacaaaagagatgagaaagggcaactttgatcgaatctcagtaagctcgggctaagttcgtgccagcagccgcggtaagacgaaccgagcgaacgttgttcggaatcactgggcttaaagggcgcgtaggcgggcggctaagtctgtggtgaaatcctccagctcaactggagaactgccatggatactggtcgtctcgaggaaggtaggggtatgcggaactatcggtggagcggtgaaatgcgttgatatcgataggaactccggtggcgaaggcggcatactggaccttttctgacgctgaggcgcgaaagccaggggagcaaacgggattagataccccggtagtcctggccctaaacgatgggtactagctagtagggttcacatggctttactggcgaagcaaaagtgctaagtaccccgcctggggagtatggtcgcaaggctgaaactcaaaggaattgacgggggctcacacaagcggtggagcatgtggcttaattcgaggctacgcgaagaaccttatcctagacttgacatgtgcgatagcgttgagcggtacgtctccgaaaggaaggccgattcccagcaatgggaggactcaacacaggtgctgcatggctgtcgtcagctcgtgtcgtgagatgtcgggttaagtcccataacgagcgaaacccttacctccagttactacgggtcatgccgaggactctggagggactgccggtgtcaaaccggaggaaggcggggatgacgtcaagtcctcatggcctttacgtctagggctgcacacgtgctacaatggtgtgaacaaatggaagccaaggcgcgagccggagcaaatcccaaaaagcacaccccagttcagatcgaaggctgcaactcgccttcgtgaagttggaatcgctagtaatcgcgggtcagcaacaccgcggtgaatgtgttcctgagccttgtacacaccgcccgtcaagccacgaaagaggggagtgcccgaagtcgcctagcgccgaaggcaaaacct

SEQ ID NO: 3652 - DNA, 1453 bp, Zhizhongheella caldifontis
attgaacgctggcggcatgctttacacatgcaagtcgaacggcagcacgggggcaaccctggtggcgagtggcgaacgggtgagtaatgcatcggaacgtgcccagtagtgggggatagcccggcgaaagccggattaataccgcatacgacctgagggtgaaagcgggggaccgcaaggcctcgcgctattggagcggccgatgtcagattagctagttggtggggtaaaggcctaccaaggcgacgatctgtagctggtctgagaggacgaccagccacactgggactgagacacggcccagactcctacgggaggcagcagtggggaattttggacaatgggcgcaagcctgatccagccatgccgcgtgcgggaagaaggccttcgggttgtaaaccgcttttgtcagggaagaaaaactctgggctaatacctcggagtgatgacggtacctgaagaataagcaccggctaactacgtgccagcagccgcggtaatacgtagggtgcaagcgttaatcggaattactgggcgtaaagcgtgcgcaggcggttgtgcaagacagatgtgaaatccccgggcttaacctgggaactgcatttgtgactgcacggctggagtgcggcagagggggatggaattccgcgtgtagcagtgaaatgcgtagatatgcggaggaacaccgatggcgaaggcaatcccctgggcctgcactgacgctcatgcacgaaagcgtggggagcaaacaggattagataccctggtagtccacgccctaaacgatgtcaactggttgttggggattcatttcctcagtaacgaagctaacgcgtgaagttgaccgcctggggagtacggccgcaaggttgaaactcaaaggaattgacggggacccgcacaagcggtggatgatgtggtttaattcgatgcaacgcgaaaaaccttacctacccttgacatgccaggaacttgccagagatggcttggtgctcgaaagagagcctggacacaggtgctgcatggccgtcgtcagctcgtgtcgtgagatgttgggttaagtcccgcaacgagcgcaacccttgccattagttgctacgaaagggcactctaatgggactgccggtgacaaaccggaggaaggtggggctgacgtcaggtcctcatggcccttatgggtagggctacacacgtcatacaatggccggtacagagggctgccaacccgcgagggggagccaatcccagaaaaccggtcgtagtccggatcgcagtctgcaactcgactgcgtgaagtcggaatcgctagtaatcgcggatcagcatgtcgcggtgaatacgttcccgggtcttgtacacaccgcccgtcacaccatgggagcgggttctgccagaagtgggtagcctagccgcaaggagggcgcttaccacggcagggttcgtgactggggtg

SEQ ID NO: 3653 - DNA, 1403 bp, Zhongshania aliphaticivorans
gtaaaggatagcttgctatccaaagcagcggcggacgggtgagtaacgcgtgggaatctacctagtagagggggacaactcggggaaactcgagctaataccgcatacgccctacgggggaaaggaggggatcttcggaccttccgctattagatgagcccgcgttagattagctagttggtagggtaaaggcctaccaaggcgacgatctatagctgatctgagaggatgatcagccacactgggactgagacacggcccagactcctacgggaggcagcagtggggaatattgcgcaatggacgaaagtctgacgcagccatgccgcgtgtgtgaagaaggccttagggttgtaaagcactttcaatggggaggaaaggttgcaggctaataccttgtaactgtgacgttacccatacaagaagcaccggctaactccgtgccagcagccgcggtaatacggagggtgcaagcgttaatcggaattactgggcgtaaagcgcgcgtaggcggatttgtcagtcagatgtgaaagccctgggctcaacctaggaattgcatttgatactgcaggtctagagtatggtagaggtgagtggaattccaggtgtagcggtgaaatgcgtagatatctggaggaacatcagtggcgaaggcgactcactggatcaatactgacgctgaggtgcgaaagcgtggggagcaaacaggattagataccctggtagtccacgccgtaaacgatgtctactagccgttggggaacttgattccttagtggcgcagctaacgcactaagtagaccgcctggggagtacggccgcaaggttaaaactcaaatgaattgacgggggcccgcacaagcggtggagcatgtggtttaattcgatgcaacgcgaagaaccttaccaggtcttgacatcccgagaagtcgctagagatagcttcgtgccttcgggaactcggtgacaggtgctgcatggctgtcgtcagctcgtgtcgtgagatgttgggttaagtcccgtaacgagcgcaacccttgtcctttgttgccagcacgtaatggtgggaactcaaaggagactgccggtgacaaaccggaggaaggtggggacgacgtcaagtcatcatggcccttacgacctgggctacacacgcgctacaatgggcagtacagagggtcgcgaagccgcgaggtggagccaatcccttaaaactgttcgtagtccggattggagtctgcaactcgactccatgaagtcggaatcgctagtaatcgcgaatcagaatgtcgcggtgaatacgttcccgggccttgtacacaccgcccgtcacaccatgggagtggattgcaccagaagtggttagcctaaccgtaaggggggcgatcaccacggtgtgg

SEQ ID NO: 3654 - DNA, 1464 bp, Zobellella denitrificans
attgaacgctggcggcaggcctaacacatgcaagtcgagcggtaacagagggtagcttgctactttgctgacgagcggcggacgggtgagtaaggcttgggtatctgcccagtcgagggggataaccgttggaaacgacggctaataccgcatacgccctacgggggaaagcaggggaccttcgggccttgcgcgattggatgagcccaagtgagattagctagttggtagggtaatggcctaccaaggcgacgatctctagctggtctgagaggatgaccagccacactgggactgagacacggcccagactcctacgggaggcagcagtggggaatattgcacaatgggggaaaccctgatgcagccatgccgcgtgtgtgaagaaggccttcgggttgtaaagcactttcagtggggaggaaaggcgtaccgcgaataccggtgcgctgtgacgttacccacagaagaagcaccggctaactccgtgccagcagccgcggtaatacggagggtgcaagcgttaatcggaatgactgggcgtaaagcgcacgcaggcggtctgctaagccagatgtgaaagccccgggctcaacctgggaactgcatttggaactggcaggctagagtcttggagaggggggtagaatttccggtgtagcggtgaaatgcgtagagatcggaaggaataccagtggcgaaggcggccccctggccaaagactgacgctcaggtgcgaaagcgtggggagcaaacaggattagataccctggtagtccacgctgtaaacgatgtcaacttggagtctgtgccatttgagcgcgggttccggagctaacgcgttaagttgaccgcctggggagtacggccgcaaggttaaaactcaaatgaattgacgggggcccgcacaagcggtggagcatgtggtttaattcgatgcaacgcgaagaaccttacctacccttgacatagtaagaacttggcagagatgccttggtgccttcgggaacttacatacaggtgctgcatggctgtcgtcagctcgtgtcgtgagatgttgggttaagtcccgcaacgagcgcaacccttgtcctttgttgccagcgattcggtcgggaactcaaaggagactgccggtgataaaccggaggaaggtggggacgacgtcaagtcatcatggcccttacgggtagggctacacacgtgctacaatggcgcgtacagagggcggcgaaccagcgatggtaagcgaatcccaaaaagcgcgtcgtagtccggatcggagtctgcaactcgactccgtgaagtcggaatcgctagtaatcgcaaatcagaatgttgcggtgaatacgttcccgggccttgtacacaccgcccgtcacaccatgggagtgggttgctccagaagtagatagcttaaccttcgggagggcgtttaccacggagtgattcatgactggggtg

SEQ ID NO: 3655 - DNA, 1464 bp, Zobellella taiwanensis
attgaacgctggcggcaggcctaacacatgcaagtcgagcggcagcggagagtagcttgctactttgccggcgagcggcggacgggtgagtaatgcttggggatctgcccattcgagggggataaccgttggaaacgacggctaataccgcatacgccctacgggggaaagcaggggaccttttggccttgcgcgaatggatgaacccaagtgagattagctggttggtgaggtaacggctcaccaaggcgacgatctctaactggtctgagaggatgaccagtcacactgggactgagacacggcccagactcctacgggaggcagcagtggggaatattgcacaatgggggaaaccctgatgcagccatgccgcgtgtgtgaagaaggccttcgggttgtaaagcactttcagtggggaggaaaggtgtgtggcgaatacccgcgcactgtgacgttacccacagaagaagcaccggctaactccgtgccagcagccgcggtaatacggagggtgcaagcgttaatcggaatgactgggcgtaaagcgcacgcaggcggtctgttaagccagatgtgaaagccccgggctcaacctgggaactgcatttggaactggcaggctagagtcttggagaggggggtagaatttccggtgtagcggtgaaatgcgtagagatcggaaggaataccagtggcgaaggcggccccctggccaaagactgacgctcaggtgcgaaagcgtggggagcaaacaggattagataccctggtagtccacgctgtaaacgatgtcaacttggagtctgtgccatttgagcgcgggttccggagctaacgcgttaagttgaccgcctggggagtacggccgcaaggttaaaactcaaatgaattgacgggggcccgcacaagcggtggagcatgtggtttaattcgatgcaacgcgaagaaccttacctacccttgacatagcaagaagttttcagagatgaattcgtgccttcgggaacttgcatacaggtgctgcatggctgtcgtcagctcgtgtcgtgagatgttgggttaagtcccgcaacgagcgcaacccttgtcctttgttgccagcgattcggtcgggaactcaaaggagactgccggtgataaaccggaggaaggtggggacgacgtcaagtcatcatggcccttacgggtagggctacacacgtgctacaatggcgcgtacagagggcggcgaacctgcgaaggtaagcgaatcccaaaaagcgcgtcgtagtccggattggagtctgcaactcgactccatgaagtcggaatcgctagtaatcgtggatcagaatgccacggtgaatacgttcccgggccttgtacacaccgcccgtcacaccatgggagtgggttgctccagaagtagatagcttaaccttcgggagggcgtttaccacggagtgattcatgactggggtg

SEQ ID NO: 3656 - DNA, 1460 bp, Zoogloea ramigera
  misc_feature (1195)..(1195): n is a, c, g, or t
attgaacgctggcggcatgctttacacatgcaagtcgaacggtaacagggagcttgctccgctgacgagtggcgaacgggtgagtaatgcatcggaacgtgccgtgtaatgggggataacgtagcgaaagttacgctaataccgcatacgccctgagggggaaagtgggggaccgcaaggcctcacgttatacgagcggccgatgtcggattagctagttggtggggtaaaggcctaccaaggcgacgatccgtagcgggtctgagaggatgacccgccacactgggactcagacacgccccagactcctacgggaggcagcagtggggaattttggacaatgggggcaaccctgatccagccatgccgcgtgagtgaagaaggccttcgggttgtaaagctctttcaggtggaaagaaatcgcatcttttaatacagggtgtggatgacggtaccatcagaagaagcaccggctaactacgtgccagcagccgcggtaatacgtagggtgcgagcgttaatcggaattactgggcgtaaagcgtgcgcaggcggttatgtaagacagatgtgaaatccccgggctcaacctgggaactgcgtttgtgactgcataactagagtacggcagagggaggtggaattccgcgtgtagcagtgaaatgcgtagagatgcggaggaacaccgatggcgaaggcagcctcctgggccagtactgacgctcatgcacgaaagcgtggggagcaaacaggattagataccctggtagtccacgccctaaacgatgtcaactagttgttcggtgaggagactcattgagtaacgcagctaacgcgtgaagttgaccgcctggggagtacggccgcaaggttaaaactcaaaggaattgacggggacccgcacaagcggtggatgatgtggattaattcgatgcaacgcgaaaaaccttacctacccttgacatgccaggaacttgccagagatggcttggtgcccgaaagggaacctggacacaggtgctgcatggctgtcgtcagctcgtgtcgtgagatgttgggttaagtcccgcaacgagcgcaacccttgtcattagttgccagcattaagttgggcactctaatgagactgccggtgacaaaccggaggaaggtggggatgacgtcaagtcctcatggcccttatgggtagggcttnacacgtcatacaatggtcggtacagagggttgccaagccgcgaggtggagccaatcccagaaagccgatcgtagtccggattggagtctgcaactcgactccatgaagtcggaatcgctagtaatcgcagatcagcatgctgcggtgaatacgttcccgggtcttgtacacaccgcccgtcacaccatgggagtggggtttaccagaagtaggtagcttaaccttcgggagggcgcttaccacggtgagcttcatgactggggtg

SEQ ID NO: 3657 - DNA, 1462 bp, Zooshikella ganghwensis
attgaacgctggcggcaggcctaacacatgcaagtcgggcggtaacaggagagcttgctcttgctgacgagcggcggacgggtgagtaatgcataggaatctgcccatgggtgggggatagcccggagaaatccggattaataccgcatatgccctgaggggtaaagcaggggatcttaggaccttgcgccgatggatgagcctatgtcggattagctagttggtagggtaaaggcctaccaaggcgacgatccgtagctggtctgagaggatgatcagccacactgggactgagacacggcccagactcctacgggaggcagcagtggggaatattggacaatgggggcaaccctgatccagccatgccgcgtgtgtgaagaaggctttcgggttgtaaagcactttcagcagggaggaaaggttgcgggttaatacctcgtagctgtgacgttacctgcagaagaagcaccggctaactccgtgccagcagccgcggtaatacggagggtgcaagcgttaatcggaattactgggcgtaaagcgtgcgtaggcggtttactaagctggatgtgaaatccccgggcttaacctgggaactgcattcataactggtaggctagagtatggcagaggcgagtggaatttcctgtgtagcggtgaaatgcgtagatataggaaggaacaccagtggcgaaggcgactcgctgggtcaatactgacgctgaggtacgaaagcgtgggtagcaaacaggattagataccctggtagtccacgccgtaaacgatgagaactagccgttgggatccatgtaggtcttggtggcgcagctaacgcactaagttctccgcctggggagtacggccgcaaggttaaaactcaaatgaattgacgggggcccgcacaagcggtggagcatgtggtttaattcgaagcaacgcgaagaaccttacctggccttgacatcctgcgaacactttagagatagagtggtgccttcgggagcgcagagacaggtgctgcatggctgtcgtcagctcgtgtcgtgagatgttgggttaagtcccgtaacgagcgcaacccttgtccttagttaccagcatgtaatggtggggactctaaggagactgccggtgacaaaccggaggaaggtggggacgacgtcaagtcatcatggcccttacggccagggctacacacgtgctacaatggggcgaacagagggttgccaagctgcgaagtggagctaatctcttaaaacgtctcgtagtccggattggagtctgcaactcgactccatgaagtcggaatcgctagtaatcgcgaatcagaatgtcgcggtgaatacgttcccgggccttgtacacaccgcccgtcacaccatgggagtgggttgcaccagaagtagctagtctaaccttcgggaggacggttaccacggtgtgattcatgactggggtg

SEQ ID NO: 3658 - DNA, 1458 bp, Zymobacter palmae
aacgctggcggcaggcctaacacatgcaagtcgagcggcagcacgggaagcttgcttcctggtggcgagcggcggacgggtgagtaatgcatgggaatctgcccgatagtgggggataacgtgtggaaacgcacgctaataccgcatacgtcctacgggagaaaggaggggatcttcggacctttcgctatcggatgagcccatgttggattagctagttggtgaggtaatggctcaccaaggcaacgatccatagctggtctgagaggatgatcagccacactgggactgagacacggcccagactcctacgggaggcagcagtggggaatattggacaatgggcgaaagcctgatccagccatgccgcgtgtgtgaagaaggccttagggttgtaaagcactttcagtggggaagaaagcctgagacctaatacgtttcaggaaggacatcacccacagaagaagcaccggctaactccgtgccagcagccgcggtaatacggagggtgcgagcgttaatcggaattactgggcgtaaagggcgcgtaggcggtctgttaagccagatgtgaaagccccgggcttaacctgggaacagcatttggaactggcagacttgagtgcaggagaggaaggtagaattccaggtgtagcggtgaaatgcgtagagatctggaggaataccagtggcgaaggcggccttctggactgacactgacgctgaggcgcgaaagcgtgggtagcaaacaggattagataccctggtagtccacgccgtaaacgatgtcaactagccgttggatcccttgaggatttagtggcgcagctaacgcactaagttgaccgcctggggagtacggtcgcaagactaaaactcaaatgaattgacgggggcccgcacaagcggtggagcatgtggtttaattcgatgcaacgcgaagaaccttacctactcttgacatccagagaactttccagagatggatgggtgccttcgggaactctgagacaggtgctgcatggctgtcgtcagctcgtgttgtgaaatgttgggttaagtcccgtaacgagcgcaacccctatccttatttgccagcgattcggtcgggaactctaaggagactgccggtgacaaaccggaggaaggtggggacgacgtcaagtcatcatggcccttacgagtagggctacacacgtgctacaatggcgagtacagagggttgcgaagcggcgacgtgaagctaatcccagaaagctcgcctcagtccggatcggagtctgcaactcgactccgtgaagtcggaatcgctagtaatcgcgaatcagaatgtcgcggtgaatacgttcccgggccttgtacacaccgcccgtcacaccatgggagtggattgcaccagaagtggctagtttaaccttcgggaaaacggttaccacggtgtggttcatgactggggtg

SEQ ID NO: 3659 - DNA, 1411 bp, Zymomonas mobilis
aacgaacgctggcggcatgcttaacacatgcaagtcgaacgaaggcttcggccttagtggcgcacgggtgcgtaacgcgtgggaatttgccttcaggtacggaataactaggggaaactcgagctaataccgtatgatatcgagagatcaaagatttatcgcctgaagataagcccgcgttggattagctagttggtagggtaaaggcctaccaaggcgacgatccatagctggtctgagaggatgatcagccacactgggactgagacacggcccagactcctacgggaggcagcagtggggaatattggacaatgggggaaaccctgatccagcaatgccgcgtgagtgaagaaggccttagggttgtaaagctcttttacccgggatgataatgacagtaccgggagaataagctccggctaactccgtgccagcagccgcggtaatacggagggagctagcgttgttcggaattactgggcgtaaagcgtacgtaggcggtttgataagtcaggggtgaaagcccagagctcaactctggaactgcctttgagactgtcagactagaacatagaagaggtaagtggaattccgagtgtagaggtgaaattcgtagatattcggaagaacaccagtggcgaaggcgacttactggtctatagttgacgctgaggtacgaaagcgtgggtagcaaacaggattagataccctggtagtccacgccgtaaacgatgataactagctgtccgggtacatggtatctgggtggcggagctaacgcattaagttatccgcctggggagtacggtcgcaagattaaaactcaaagaaattgacgggggcctgcacaagcggtggagcatgtggtttaattcgaagcaacgcgcagaaccttaccagcgtttgacatcctaatcgcgggagatggagacatttcccttcagtccggctggattagagacaggtgctgcatggctgtcgtcagctcgtgtcgtgagatgttgggttaagtcccgcaacgagcgcaaccctcacctctagttgccatcattaagttgggcactttagaggaactgccggtgataagccggaggaaggtggggatgacgtcaagtcctcatggcccttacgcgctgggctacacacgtgctacaatggcggtgacagagggccgcaagcctgcaaaggttagctaatctcaaaaagccgtctcagttcggattgttctctgcaactcgagagcatgaaggcggaatcgctagtaatcgcggatcagcatgccgcggtgaatacgttcccaggccttgtacacaccgcccgtcacaccatgggagttggattcacccgaaggcgctgcgctaacccgtaagggaggcaggcgaccacggtgggtttagcgactggggtg

SEQ ID NO: 3660 - protein, 212 aa, Abyssibacter profundi
  misc_feature (1)..(212): tr|A0A363UPK5|A0A363UPK5_9GAMM GTP cyclohydrolase 1 OS= Abyssibacter profundi OX=2182787 GN=folE PE=3 SV=1
MDTSVTTAKAAVDTSSDAVTRPTREEAEAAVRTLIAWTGDNPNREGLLDTPGRVVRAYEEFYAGYKEDPREILSRTFEEVDGYDDMVMLRDIRLESHCEHHMVPIIGRVHIAYLPVSRVVGISKLARVIEIYARRLQTQETMTAQIANVLEEVLKPAGVAVLVDAAHQCMTTRGIRKPGVFTITSRFTGRFKEDMRLHDRFMQMIRPTPNDM

SEQ ID NO: 3661 - protein, 294 aa, Abyssicoccus albus
  misc_feature (1)..(294): tr|A0A3N5BBR0|A0A3N5BBR0_9STAP GTP cyclohydrolase FolE2 OS=Abyssicoccus albus OX=1817405 GN=folE2 PE=3 SV=1
MTEEKYDLTTRVGRFKHFGSVDPIEGTKPTQKEDMKDLQQTKKDFLFAIDHVGINQVKYPVIIDHMQSVGNFSLSTSLTRDEKGINMSRLIESLELHYHNGIELSFESLSSLTESIRTKMKQNSAQVEVKSTWFYDKASPVTQLTGRAHAQIGYTINKDENNEDRKFYMQSDVTTLCPCSKEISEYSAHNQRGTVTVSLDLYDHKDIPKNHKEIVLEIMEANASSQLYPILKRTDEKKVTERAYENPRFVEDILRLIAYDLVELDWVKGFTLICENKESIHQHDAYSQLTYNKE

SEQ ID NO: 3662 - protein, 211 aa, Acaryochloris marina
  misc_feature (1)..(211): tr|B0CDI3|B0CDI3_ACAM1 GTP cyclohydrolase 1 OS=Acaryoch loris marina (strain MBIC 11017) OX=329726 GN=folE PE=3 SV=1
MTVPSIPSFVPETLTTEAQPIVSEAEMEAAVRTLLLGMGEDPDREGLRDTPKRVVKSLKFLSSGYQQSLDELLNGAVFSEDLDEMVLVRDIDLFSSCEHHILPIIGKAHVAYIPNGKVIGLSKIARICEMYARRLQVQERLTAQIADALQGLLKPQGVAVVVEASHMCMVMRGVQKPGSWTSTSAMRGVFSSDARTRQEFFNLVAHAPAIR

SEQ ID NO: 3663 - protein, 210 aa, Acaryochloris marina
  misc_feature (1)..(210): tr|A8ZL68|A8ZL68_ACAM1 GTP cyclohydrolase 1 OS=Acaryoch loris marina (strain MBIC 11017) OX=329726 GN=folE PE=3 SV=1
MTVPSIPTFVPALTTEAQPIVSEAEMQAAVRTLLLGLGEDPDREGLRDTPKRMVKALKFLTSGYQQSLDELLNGAIFPEDLDEMVLVRDIDLFSSCEHHIWPIIGKVHVAYIPNGKVIGLSKIARICEMYARRLQVQERLTAQIADALQGLLNPQGVAVVVEASHMCMVMRGVQKPGSWTSTSAMRGVFSSDSRTRQEFFNLISHSPASR

SEQ ID NO: 3664 - protein, 211 aa, Acaryochloris sp.
  misc_feature (1)..(211): tr|A0A2W1JBR2|A0A2W1JBR2_9CYAN GTP cyclohydrolase 1 OS= Acaryochloris sp. RCC1774 OX=1764569 GN=folE_1 PE=3 SV= 1
MTLSSMPSFVPDTIATEAKPIVSEAQMQDAVRTLLLGMGEDPDREGLRDTPKRVVKSLKFLSSGYQMSLDELLNGAVFSENLDEMVLVRDIDLFSSCEHHILPILGKAHVAYIPNGKVIGLSKIARICEMYARRLQVQERLTAQIADALQGLLKPQGVAVVVEATHMCMVMRGVQKPGSWTSTSAMRGAFAGDARTRQEFFNLVAHSAAIR

SEQ ID NO: 3665 - protein, 231 aa, Acaryochloris sp.
  misc_feature (1)..(231): tr|A0A2W1JQW6|A0A2W1JQW6_9CYAN GTP cyclohydrolase 1 OS= Acaryochloris sp. RCC1774 OX=1764569 GN=folE_3 PE=3 SV= 1
MTTASSEFSNSPTQSENGNSSSVTPRPDRSLSQKVKENGHTDVSDEEMRQAVDTILRGVGEDPEREGLLKTPKRVSKAMQFLTSGYNQSLEQLVNGAIFDEGHDEMVLVRDIDAFSLCEHHMLPFIGKAHVAYIPNQKVIGLSKLARVVEMYSRRLQVQERLTRQIAEAVQMVLEPQGVAVVMEASHMCMVMRGVQKPGSWTVTSSMLGVFKDDQKTREEFLNLIRHRQNF

SEQ ID NO: 3666 - protein, 266 aa, Accumulibacter phosphatis
  misc_feature (1)..(266): tr|C7RMC8|C7RMC8_ACCPU GTP cyclohydrolase FolE2 OS=Accu mulibacter phosphatis (strain UW-1) OX=522306 GN=folE2 PE=3 SV=1
MNAPDRFFLADVQASADQRQLAIHKVGVKGLRYPLALLDAEGKVQHTVAQVAMSVGLPPEVKGTHMSRFVEILEQQRAPLNVNRLLRMFEDMLLRLDASSGEIELAFPYFISKAAPVSTVESLLDYDVRMIVAKRAGQAAELTLEVVAPVTSLCPCSKEISEYGAHNQRSHITIIARLRSGMTPDELVRLAEEEASCEVFGLLKRPDEKWVTERAYDNPKFVEDLVRDIALRLMSEPRIAQWTVKSENFESIHNHSAYAEISGDNA

SEQ ID NO: 3667 - protein, 272 aa, Accumulibacter phosphatis
  misc_feature (1)..(272): tr|C7RNG2|C7RNG2_ACCPU GTP cyclohydrolase FolE2 OS=Accu mulibacter phosphatis (strain UW-1) OX=522306 GN=folE2 PE=3 SV=1
MNAPETPRSPAVMADVQGSADTRRLAINKVGIKAIRHPVKVLDKSGGVQHTIAMFNMYVSLPHNFKGTHMSRFVEILNSHEREISVENFPAMLREMVDRLEAETGHIEMSFPYFINKAAPVSGVQSLMDYDVTLIGEIAHGRIESTIKVAIPVTSLCPCSKEISERGAHNQRSQVTVTVLINDHLWIEELVQFVEGEASCELYGLLKRPDEKYVTERAYDNPKFVEDMVRDVAARLNAERRIDAYVVESENFESIHNHSAYALIENDKRLAA

SEQ ID NO: 3668 - protein, 185 aa, Acetatifactor muris
  misc_feature (1)..(185): tr|A0A2K4ZFV6|A0A2K4ZFV6_9FIRM GTP cyclohydrolase 1 OS= Acetatifactor muris OX=879566 GN=folE PE=3 SV=1
MIDQEKIRKAVALLLEGIGEDPGREGLAETPDRVARMYGEIFSGMDADAAEPLAKVFAVGDSEMVLEKDIVFYSMCEHHMMPFYGKAHIAYIPDGKVLGLSKLARTVEIYARRLQLQERMTGQIADAVMEHLSPRGVMVVLEAEHMCMTMRGVKKPGSRTVSMAVRGAFEGDSGLQERFFRMLQM

SEQ ID NO: 3669 - protein, 184 aa, Acetitomaculum ruminis
  misc_feature (1)..(184): tr|A0A1I0XSQ1|A0A1I0XSQ1_9FIRM GTP cyclohydrolase 1 OS= Acetitomaculum ruminis DSM 5522 OX=1120918 GN=folE PE=3 SV=1
MVNEEKIKQGVKLILEGIGEDINREGLRETPDRIARMYGEIMGGMEMDPAKPLSKVFEAENNEMVVEKDITFYSMCEHHMLPFFGKAHIAYIPNGKVVGLSKLARTVDIYAKRLQLQEQMTAQIADALEKYLQPKGVMVMVEGEHLCMTMRGIKKPGSQTVSTVCRGEFVNNTDLKNQFFMMVK

SEQ ID NO: 3670 - protein, 185 aa, Acetivibrio ethanolgignens
  misc_feature (1)..(185): tr|A0A0V8QDK1|A0A0V8QDK1_9FIRM GTP cyclohydrolase 1 OS= Acetivibrio ethanolgignens OX=290052 GN=folE PE=3 SV=1
MIDEKKIEEAVRLFLEGIGENPEREGLKETPGRISAMCHELFEGIRQDASEHLSKTFTAENNEMVLEKDITFYSVCEHHFLPFYGKVHIAYVPDGKVVGLSKLARTVEVYARRAQLQEQMTAQIAEDIMKNLMPKGVMVYTEAEHMCMTMRGIKKPGSRTVSFVAKGAFETDRELRDSFFQLIRD

SEQ ID NO: 3671 - protein, 197 aa, Acetoanaerobium noterae
  misc_feature (1)..(197): tr|A0A1T4ZXB8|A0A1T4ZXB8_9FIRM GTP cyclohydrolase 1 OS= Acetoanaerobium noterae OX=745369 GN=folE PE=3 SV=1
MSNEIKAVEKMDKDKIKKAVRDILEAIGEDPDREGLVDTPKRIANMFEEIFAGLHQDPREHLQIFFQEENHEEMVIVKDISFYSVCEHHLVPFFGKAHVAYIPRGGKLTGLSKLARVVETAARRPQLQERIAKTIADSIVEVLDPYGVVVILEAEHMCMTMRGIKKPGSKTITSAVRGIFEKDVAARAEAMSLINIK

SEQ ID NO: 3672 - protein, 197 aa, Acetoanaerobium sticklandii
  misc_feature (1)..(197): tr|E3PSM7|E3PSM7_ACESD GTP cyclohydrolase 1 OS=Acetoana erobium sticklandii (strain ATCC 12662 / DSM 519 / JCM 1433 / NCIMB 10654) OX=499177 GN=mtrA PE=3 SV=1
MSNEIKAVEKMDKDKIKRAVRDILEAIGEDPDREGLVDTPKRIANMFEEIFAGLHQDPREHLQIFFQEENHEEMVIVKDISFYSVCEHHLVPFFGKAHVAYIPKGGKLTGLSKLARVVETAARRPQLQERIAKTVADSIVEVLDPYGVVVILEAEHMCMTMRGIKKPGSKTITSAVRGIFEKDVAARAEAMSLINIK

SEQ ID NO: 3673 - protein, 182 aa, Acetobacter aceti
  misc_feature (1)..(182): tr|A0A0D6MVU3|A0A0D6MVU3_ACEAC GTP cyclohydrolase 1 OS= Acetobacter aceti NBRC 14818 OX=887700 GN=folE PE=3 SV= 1
MLRWAGEDPAREGLLDTPSRVVRSYEEFFEGYAVNPEELLQRTFSEVDDYDEIVLLRDIRLESHCEHHMVPIIGRAHVAYLPRKRVVGISKLARVVEAYSRRFQIQERLTSQIANTIDSVLEPYGTAVIIEAGHQCMTTRGVHRPGVSMVTSRMLGVFRDNSDTRRELLSMLNRPGMNDFSA

SEQ ID NO: 3674 - protein, 203 aa, Acetobacter aceti
  misc_feature (1)..(203): tr|A0A1U9KGK1|A0A1U9KGK1_ACEAC GTP cyclohydrolase 1 OS= Acetobacter aceti OX=435 GN=folE PE=3 SV=1
MTNPPTPVRPSREEAEEAVRVMLRWAGEDPSREGLLDTPSRVARSYEEFFEGYAVNPEELLQRTFSEVDDYDEIVLLRDIRLESHCEHHMVPIIGRAHIAYLPRKRVVGISKLARVVEAYSRRFQIQERLTAQIANTIDSVLEPYGTAVIIEAGHQCMTTRGVHRPGVSMVTSRMLGVFRDNSDTRRELMAMLNRPGMSEFSA

SEQ ID NO: 3675 - protein, 201 aa, Acetobacter ascendens
  misc_feature (1)..(201): tr|A0A1D8QZR7|A0A1D8QZR7_9PROT GTP cyclohydrolase 1 OS= Acetobacter ascendens OX=481146 GN=folE PE=3 SV=1
MPPSDTSKRPTQAEAEQAVRTLLRWAGDNPDREGLHDTPARVARAYTDFFCGYEIDPAALLRRTFSEVEGYDEIVLLRDIRFESHCEHHLAPIIGRAHVAYLPRQRVVGISKLARVVDAYAKRLQIQERLTAQIANTINDELEPHGVAVIIESSHECMTTRGVHKPGVSMVTSTMLGVFRENSDTRRELMAMLNRPAACEF

SEQ ID NO: 3676 - protein, 203 aa, Acetobacter ascendens
  misc_feature (1)..(203): tr|A0A1Y0UZ11|A0A1Y0UZ11_9PROT GTP cyclohydrolase 1 OS= Acetobacter ascendens OX=481146 GN=gch1 PE=3 SV=1
MSVPPSDTSKRPTQAEAEQAVRTLLRWAGDNPDREGLHDTPARVARAYTDFFCGYEIDPAALLRRTFSEVEGYDEIVLLRDIRFESHCEHHLAPIIGRAHVAYLPRQRVVGISKLARVVDAYAKRLQIQERLTAQIANTINDELEPHGVAVIIESSHECMTTRGVHKPGVSMVTSTMLGVFRENSDTRRELMAMLNRPAACEF

SEQ ID NO: 3677 - protein, 202 aa, Acetobacter cerevisiae
  misc_feature (1)..(202): tr|A0A149QAZ3|A0A149QAZ3_9PROT GTP cyclohydrolase 1 OS= Acetobacter cerevisiae OX=178900 GN=folE PE=3 SV=1
MSDPLPKTDRPTREEAEDAIRTMLRWAGENPDREGLHDTPARVTRAYEEFFEGYAIDPKTLLERTFSEVEGYDEIVLLRDIRFESHCEHHLAPIIGRAHVAYLPRQRVVGISKLARVVDAYARRMQIQERLTAQIANTINDVLQPHGTAVIIESSHECMTTRGVHRPGVSMVTSQMLGVFRTNSDTRRELLAMLNRPGASEY

SEQ ID NO: 3678 - protein, 202 aa, Acetobacter cerevisiae
  misc_feature (1)..(202): tr|A0A149UWG0|A0A149UWG0_9PROT GTP cyclohydrolase 1 OS= Acetobacter cerevisiae OX=178900 GN=folE PE=3 SV=1
MSDPLPKTDRPTREEAEDAIRTMLRWAGENPDREGLHDTPARVARAYEEFFEGYEIDPKTLLERTFSEVEGYDEIVLLRDIRFESHCEHHLAPIIGRAHVAYLPRQRVVGISKLARVVDAYARRMQIQERLTAQIANTINDVLQPHGTAVIIESSHECMTTRGVHRPGVSMVTSQMLGVFRTNSDTRRELLAMLNRPGASEY

SEQ ID NO: 3679 - protein, 203 aa, Acetobacter cibinongensis
  misc_feature (1)..(203): tr|A0A0D6N7P6|A0A0D6N7P6_9PROT GTP cyclohydrolase 1 OS= Acetobacter cibinongensis 4H-1 OX=1231339 GN=folE PE=3 SV=1
MNTLTETPRKIRPRPTRAQAEEAVRTLLAWAGDDPDREGLVGTPDRVVRAYEEFFEGYQDDPVALLERTFAETGNYNEMVVLRDIRLESHCEHHVIPLIGKAHVAYLPDRRVVGISKLARLVDVFAHRLQIQEKLTAQIADTIQSVLQPRGVAVVIDAAHQCMTTRGVHKPGVSMVTSRLLGEFETSEPLRRQFFAMAGIGGV

SEQ ID NO: 3680 - protein, 204 aa, Acetobacter cibinongensis
  misc_feature (1)..(204): tr|A0A0D6N3H3|A0A0D6N3H3_9PROT GTP cyclohydrolase 1 OS= Acetobacter cibinongensis 4H-1 OX=1231339 GN=folE PE=3 SV=1
MSKDPLPDNTDRPSRQDAERAVRTLLRWAGDSPDREGLLDTPARVVRAYEEFFEGYNTDPHTLLERTFSEVEGYDEIVLLRDIRFESHCEHHLAPIIGRAHVAYLPNKRVVGISKLARVVDAYARRLQIQERLTAQIANTINDVLEPKGVAVLIESAHECMTTRGVHRPGVSMVTSTMLGVFRDNSDTRQELLALLNRPSACGV

SEQ ID NO: 3681 - protein, 202 aa, Acetobacter fabarum
  misc_feature (1)..(202): tr|A0A269XY37|A0A269XY37_9PROT GTP cyclohydrolase 1 OS= Acetobacter fabarum OX=483199 GN=folE PE=3 SV=1
MSVPEHNTDRPTQQEAEQAVRTLLRWAGDDPTREGLLDTPARVARAYTDFFSGYAIDPANLLRRTFSEVDGYDEIVLLRDIRFESHCEHHLAPIVGRAHVAYLPRQRVVGISKLARVVDAYARRLQIQERMTAQIANTINDVLEPQGVAVIIESAHECMTTRGVHKPGVSMVTSTMLGVFRDNSDTRRELMAILNRPAVNGY

SEQ ID NO: 3682 - protein, 202 aa, Acetobacter ghanensis
  misc_feature (1)..(202): tr|A0A0U5F8X6|A0A0U5F8X6_9PROT GTP cyclohydrolase 1 OS= Acetobacter ghanensis OX=431306 GN=folE PE=3 SV=1
MSVPEPNTDRPTQQEAEQAVRTLLRWAGDDPTREGLLDTPARVARAYTDFFSGYAIDPANLLRRTFSEVDGYDEIVLLRDIRFESHCEHHLAPIIGRAHVAYLPRQRVVGISKLARVVDAYARRLQIQERMTAQIANTINDELEPHGVAVIIESAHECMTTRGVHKPGVSMVTSTMLGVFRNNSDTRRELMAMLNRPAVSDY

SEQ ID NO: 3683 - protein, 204 aa, Acetobacter indonesiensis
  misc_feature (1)..(204): tr|A0A252AYU3|A0A252AYU3_9PROT GTP cyclohydrolase 1 OS= Acetobacter indonesiensis OX=104101 GN=folE PE=3 SV=1
MSSDSLPDNDHRPSREEAEKAVRTLLRWAGDNPDREGLHDTPSRVVRAYEEFFEGYETDPRTLLERTFSEVEGYDEIVLLRDIRFESHCEHHLAPIIGRAHVAYLPRNRVVGISKLARVVDAYARRLQIQERLTAQIANTINDVLEPQGVAVIIESSHECMTTRGVHRPGVSMVTSSMLGVFRTNSDTRRELMAMLNRPGASEY

SEQ ID NO: 3684 - protein, 204 aa, Acetobacter indonesiensis; identical to SEQ ID NO: 3683
  misc_feature (1)..(204): tr|A0A0D6N9F9|A0A0D6N9F9_9PROT GTP cyclohydrolase 1 OS= Acetobacter indonesiensis 5H-1 OX=1231340 GN=folE PE=3 SV=1

SEQ ID NO: 3685 - protein, 141 aa, Acetobacter malorum
  misc_feature (1)..(141): tr|A0A149V0M7|A0A149V0M7_9PROT GTP cyclohydrolase 1 (Fr agment) OS=Acetobacter malorum OX=178901 GN=AD953_15895 PE=3 SV=1
LERTFSEVEGYDEIVLLRDIRFESHCEHHLAPIIGRAHVAYLPRQRVVGISKLARVVDAYARRMQIQERLTAQIANTINDVLQPHGTAVIIESSHECMTTRGVHRPGVSMVTSQMLGVFRTNSDTRRELLAMLNRPGASEY

SEQ ID NO: 3686 - protein, 210 aa, Acetobacter malorum
  misc_feature (1)..(210): tr|A0A177G6Z2|A0A177G6Z2_9PROT GTP cyclohydrolase 1 OS= Acetobacter malorum OX=178901 GN=folE PE=3 SV=1
MDTTVETRPPAHAPTRVLRPRPTRAQAEEAVRTLLAWTGDDPDREGLRGTPDRVVRAYEEFFEGYEEDPVALLERTFEETENYNELVVLRDIRLESHCEHHIIPLIGKAHVAYLPDRRVVGISKLARLVDVFAHRLQIQEKLTAQIADTIHSVLKPRGVAVVVDAAHQCMTTRGVHKPGVSMVTSRMIGEFESSETLRRQFFAMAGMGGA

SEQ ID NO: 3687 - protein, 207 aa, Acetobacter nitrogenifigens
  misc_feature (1)..(207): tr|A0A511XAY9|A0A511XAY9_9PROT GTP cyclohydrolase 1 OS= Acetobacter nitrogenifigens DSM 23921 = LMG 23498 OX=11 20919 GN=folE PE=3 SV=1
MADTSSPAPNTRRPTREEAEQAVRVLLSWAGEDPEREGLLDTPSRVARAYEEFFQGYAVNPEELLQRTFSEVEDYDEIVLLRDIRFESHCEHHMAPIIGRAHVAYLPRRRVVGISKLARLVDAYARRFQIQERLTAQIANTIDSVLQPHGTAVIIEAGHQCMTTRGVHRPGVSMVTSRMLGVFRENSDTRKELMAMLNRPTIGELSA

SEQ ID NO: 3688 - protein, 210 aa, Acetobacter oeni
  misc_feature (1)..(210): tr|A0A511XGN9|A0A511XGN9_9PROT GTP cyclohydrolase 1 OS= Acetobacter oeni OX=304077 GN=folE PE=3 SV=1
MSNSSGPMDSLAPVSRPSREEAEEAVRVLLRWGGEDPAREGLLDTPSRVTRAYEEFFEGYSVNPEELLARTFSEVEDYDEIVLLRDIRFESHCEHHMAPIIGRAHVAYLPRRRVVGISKLARVVDAYARRFQIQERLTAQIANTIDSILEPYGTAVILEAGHQCMTTRGVHRPGVSMVTSRMLGVFRENSDTRRELMAMLNRPTIGELSA

SEQ ID NO: 3689 - protein, 202 aa, Acetobacter okinawensis
  misc_feature (1)..(202): tr|A0A252BT59|A0A252BT59_9PROT GTP cyclohydrolase 1 OS= Acetobacter okinawensis OX=1076594 GN=folE PE=3 SV=1
MSVPEHNTDRPTQKEAEQAVRTLLRWAGDDPTREGLLDTPARVARAYTDFFSGYEIDPANLLRRTFSEVDGYDEIVLLRDIRFESHCEHHLAPIIGRAHVAYLPRQRVVGISKLARVVDAYARRLQIQERMTAQIANTINDELEPHGVAVILESAHECMTTRGVHKPGVSMVTSTMLGVFRDNSDTRRELMAMLSRPAVSDY

SEQ ID NO: 3690 - protein, 203 aa, Acetobacter orientalis
  misc_feature (1)..(203): tr|A0A252BZJ2|A0A252BZJ2_9PROT GTP cyclohydrolase 1 OS= Acetobacter orientalis OX=146474 GN=folE PE=3 SV=1
MNTLTETSRKVRARPTRAQAEEAVRTLLAWTGDDPDREGLVGTPDRVVRAYEEFFEGYQDDPVALLERTFEETGNYNEMVVLRDIRLESHCEHHIIPLIGKAHVAYLPDRRVVGISKLARLVDVFAHRLQIQEKLTAQIADTIQSVLQPRGVAVVIDAAHQCMTTRGVHKPGVSMVTSRLLGEFETSESLRRQFFAMAGIGGV

SEQ ID NO: 3691 - protein, 204 aa, Acetobacter orientalis
  misc_feature (1)..(204): tr|A0A252A5H3|A0A252A5H3_9PROT GTP cyclohydrolase 1 OS= Acetobacter orientalis OX=146474 GN=folE PE=3 SV=1
MSSDSQPENTPRPSRTEAEQAVRTLLRWAGDNPAREGLHDTPSRVVRAYEEFFEGYNTNPHTLLERTFSEVEGYDEIVLLRDIRFESHCEHHLAPIIGRAHVAYLPKKRVVGISKLARVVDAYARRLQIQERLTAQIANTINDVLEPQGVAVIIESAHECMTTRGVHRPGVSMVTSTMLGVFRENTNTRQELLAMLNRPSACGV

SEQ ID NO: 3692 - protein, 202 aa, Acetobacter orleanensis
  misc_feature (1)..(202): tr|A0A4Y3TN74|A0A4Y3TN74_9PROT GTP cyclohydrolase 1 OS= Acetobacter orleanensis OX=104099 GN=folE PE=3 SV=1
MSDPLPKTDRPTREEAEAAVRTMLRWAGEDPDREGLHDTPARVTRAYEEFFQGYEIDPKTLLERTFSEVEGYDEIVLLRDIRFESHCEHHLAPIIGRAHVAYLPRQRVVGISKLARVVDAYARRMQIQERLTAQIANTINDVLQPHGTAVIIESSHECMTTRGVHRPGVSMVTSQMLGTFRTNSDTRRELMAMLNRPAASEY

SEQ ID NO: 3693 - protein, 203 aa, Acetobacter pasteurianus
  misc_feature (1)..(203): tr|A0A1A0CGA7|A0A1A0CGA7_ACEPA GTP cyclohydrolase 1 OS= Acetobacter pasteurianus OX=438 GN=gch1 PE=3 SV=1
MSVPPSDTSQRPTQAEAEQAVRTLLRWAGDNPDREGLHDTPARVARAYTEFFCGYEIDPAALLRRTFSEVEGYDEIVLLRDIRFESHCEHHLAPIIGRAHVAYLPRQRVVGISKLARVVDAYAKRLQIQERLTAQIANTINDELEPHGVAVIIESSHECMTTRGVHKPGVSMVTSTMLGVFRENSDTRRELMAMLNRPAACEF

SEQ ID NO: 3694 - protein, 203 aa, Acetobacter pasteurianus
  misc_feature (1)..(203): tr|S6D444|S6D444_ACEPA GTP cyclohydrolase 1 OS=Acetobac ter pasteurianus 386B OX=1266844 GN=folE PE=3 SV=1
MSVPPSDTSKRPTQAEAEQAVRTLLRWAGDNPDREGLHDTPARVARAYTEFFCGYEIDPAALLRRTFSEVEGYDEIVLLRDIRFESHCEHHLAPIIGRAHVAYLPRQRVVGISKLARVVDAYAKRLQIQERLTAQIANTINDELEPHGVAVIIESSHECMTTRGVHKPGVSMVTSTMLGVFRENSDTRRELMAMLNRPAACEF

SEQ ID NO: 3695 - protein, 206 aa, Acetobacter peroxydans
  misc_feature (1)..(206): tr|A0A4Y3TST3|A0A4Y3TST3_9PROT GTP cyclohydrolase 1 OS= Acetobacter peroxydans OX=104098 GN=folE PE=3 SV=1
MSAPPPNTDSQTGRPTQTEAEQAVRTLLRWAGDDPTREGLLDTPARVARAYTDFFSGYEIDPASLLRRTFSEVEGYDEIVLLRDIRFESHCEHHLAPIIGRAHVAYLPRQRVVGISKLARVVDAYARRLQIQERMTAQIANTINDVLEPHGVAVIIESAHECMTTRGVHKPGVSMVTSSMLGVFRDNSDTRRELMAMLNRPGTQDF

SEQ ID NO: 3696 - protein, 203 aa, Acetobacter persici
  misc_feature (1)..(203): tr|A0A1U9LBQ2|A0A1U9LBQ2_9PROT GTP cyclohydrolase 1 OS= Acetobacter persici OX=1076596 GN=folE PE=3 SV=1
MDTLIETPRKMRARPTRAQAEEAVRTLLAWTGDDPDREGLVGTPDRVVRAYEEFFEGYQDDPVALLARTFEEAGNYNEMVVLRDIRLESHCEHHIIPLIGKAHVAYLPDRRVVGISKLARLVDVFAHRLQIQEKLTAQIADTIQSVLQPRGVAVVIDAAHQCMTTRGVHKPGVSMVTSRLLGEFETSEPLRRQFFAMAGIGGV

SEQ ID NO: 3697 - protein, 202 aa, Acetobacter persici
  misc_feature (1)..(202): tr|A0A1U9LGM1|A0A1U9LGM1_9PROT GTP cyclohydrolase 1 OS= Acetobacter persici OX=1076596 GN=folE PE=3 SV=1
MSDPLPKTNRPTREEAEDAIRTMLRWAGEDPEREGLHDTPARVARAYEEFFQGYEIDPKTLLERTFSEVEGYDEIVLLRDIRFESHCEHHLAPIIGRAHVAYLPRQRVVGISKLARVVDAYARRMQIQERLTAQIANTINDVLQPHGTAVIIESSHECMTTRGVHRPGVSMVTSQMLGVFRTSSDTRRELMAMLNRPAASEY

SEQ ID NO: 3698 - protein, 203 aa, Acetobacter pomorum
  misc_feature (1)..(203): tr|F1YU21|F1YU21_9PROT GTP cyclohydrolase 1 OS=Acetobac ter pomorum DM001 OX=945681 GN=folE PE=3 SV=1
MSVPPSDTSKRPTQAEAEQAVRTLLRWAGDNPDREGLHDTPARVARAYTEFFCGYEIDPAALLRRTFSEVEGYDEIVLLRDIRFESHCEHHLAPIIGRAHVAYLPRQRVVGISKLARVVDAYAKRLQIQERLTAQIANTINDELEPHGVAVIIESAHECMTTRGVHKPGVSMVTSTMLGVFRENSDTRRELMAMLNRPAVCEY

SEQ ID NO: 3699 - protein, 203 aa, Acetobacter pomorum
  misc_feature (1)..(203): tr|A0A2G4RDN3|A0A2G4RDN3_9PROT GTP cyclohydrolase 1 OS= Acetobacter pomorum OX=65959 GN=folE PE=3 SV=1
MDTLIETPRKIRVRPTRAQAEEAVRTLLAWTGDDPDREGLVGTPGRVVRAYEEFFEGYQDDPVALLERTFEETGNYNEMVVLRDIRLESHCEHHIIPLIGKAHVAYLPDRRVVGISKLARLVDVFAHRLQIQEKLTAQVADTIQSVLQPRGVAVVIDAAHQCMTTRGVRKPGVSMVTSRLLGEFKTSEPLRRQFFAMVGIGGV

SEQ ID NO: 3700 - protein, 210 aa, Acetobacter senegalensis
  misc_feature (1)..(210): tr|A0A149U0A0|A0A149U0A0_9PROT GTP cyclohydrolase 1 OS= Acetobacter senegalensis OX=446692 GN=folE PE=3 SV=1
MDTTIETRPPAHAPTRVLRPRPTRAQAEEAVRTLLAWTGDDPDREGLRGTPDRVVRAYEEFFEGYEEDPVALLERTFEETENYNELVVLRDIRLESHCEHHIIPLIGKAHVAYLPDRRVVGISKLARLVDVFAHRLQIQEKLTAQIADTIHSVLKPRGVAVVVDAAHQCMTTRGVHKPGVSMVTSRMIGEFESSETLRRQFFAMAGMGGA

SEQ ID NO: 3701 - protein, 204 aa, Acetobacter senegalensis
  misc_feature (1)..(204): tr|A0A149U2R4|A0A149U2R4_9PROT GTP cyclohydrolase 1 OS= Acetobacter senegalensis OX=446692 GN=folE PE=3 SV=1
MSSDSLPENDNRPSRTEAEQAVRTLLRWAGDDPTREGLHDTPSRVVRAYEEFFEGYETDPRSLLERTFSEVEGYDEIVLLRDIRFESHCEHHLAPIIGRAHVAYLPRSRVVGISKLARVVDAFARRLQIQERLTAQIANTINDVLEPHGVAVIIESSHECMTTRGVHRPGVSMVTSSMLGVFRTNSDTRRELMAMLNRPSACEY

SEQ ID NO: 3702 - protein, 207 aa, Acetobacter sp.
  misc_feature (1)..(207): tr|A0A252BYW5|A0A252BYW5_9PROT GTP cyclohydrolase 1 OS= Acetobacter sp. DsW_063 OX=1514894 GN=folE PE=3 SV=1
MADTSSPAPNTRRPTREEAEQAVRVLLSWAGEDPEREGLLDTPSRVARAYEEFFQGYAVNPEDLLQRTFSEVEDYDEIVLLRDIRFESHCEHHMAPIIGRAHVAYLPRRRVVGISKLARLVDAYARRFQIQERLTAQIANTIDSVLQPHGTAVIIEAGHQCMTTRGVHRPGVSMVTSRMLGVFRENSDTRKELMAMLNRPTIGELSA

SEQ ID NO: 3703 - protein, 203 aa, Acetobacter sp.
  misc_feature (1)..(203): tr|A0A5C1YQW3|A0A5C1YQW3_9PROT GTP cyclohydrolase 1 OS= Acetobacter sp. KACC 21233 OX=2592655 GN=folE PE=3 SV=1
MDTLIETPRKMRARPTRAQAEEAVRTLLAWTGDDPDREGLVGTPDRVVRAYEEFFEGYQDDPVALLERTFAETGNYNEMVVLRDIRLESHCEHHIIPLIGKAHVAYLPDRRVVGISKLARLVDVFAHRLQIQEKLTAQIADTIQSVLQPRGVAVVIDAAHQCMTTRGVHKPGVSMVTSRLLGEFETSEPLRRQFFAMAGIGGV

SEQ ID NO: 3704 - protein, 202 aa, Acetobacter syzygii
  misc_feature (1)..(202): tr|A0A270BQ79|A0A270BQ79_9PROT GTP cyclohydrolase 1 OS= Acetobacter syzygii OX=146476 GN=folE PE=3 SV=1
MSVPEPNTDRPTQKEAEQAVRTLLRWAGDDPTREGLLDTPARVARAYTDFFSGYEIDPANLLRRTFSEVDGYDEIVLLRDIRFESHCEHHLAPIIGRAHVAYLPRQRVVGISKLARVVDAYARRLQIQERMTAQIANTINDELEPHGVAVIIESAHECMTTRGVHKPGVSMVTSTMLGVFRDNSDTRRELMAMLNRPAVSDY

SEQ ID NO: 3705 - protein, 209 aa, Acetobacter tropicalis
  misc_feature (1)..(209): tr|F7VHL2|F7VHL2_9PROT GTP cyclohydrolase 1 OS=Acetobac ter tropicalis NBRC 101654 OX=749388 GN=folE PE=3 SV=1
MLELGMSSDSLPENDNRPSRTEAEQAVRTLLRWAGDDPTREGLHDTPSRVVRAYEEFFEGYETDPRSLLERTFSEVEGYDEIVLLRDIRFESHCEHHLAPIIGRAHVAYLPRSRVVGISKLARVVDAFARRLQIQERLTAQIANTINDVLEPHGVAVIIESSHECMTTRGVHRPGVSMVTSSMLGVFRTNSDTRRELMAMLNRPSACEY

SEQ ID NO: 3706 - protein, 204 aa, Acetobacter tropicalis; identical to SEQ ID NO: 3701
  misc_feature (1)..(204): tr|A0A149TSH4|A0A149TSH4_9PROT GTP cyclohydrolase 1 OS= Acetobacter tropicalis OX=104102 GN=folE PE=3 SV=1

SEQ ID NO: 3707 - protein, 202 aa, Acetobacteraceae bacterium
  misc_feature (1)..(202): tr|A0A4P7WDP8|A0A4P7WDP8_9PROT GTP cyclohydrolase 1 OS= Acetobacteraceae bacterium OX=1909293 GN=folE PE=3 SV=1
MTENLNNALTLPDNAQKQMEKAVKEMLLALGENPNREGLQETPKRVAKAWLEFFSGLYENPGDHLKTRFSSENCKTPVIVRDIPFISFCEHHLLPVTGKVHLAYLPNGREVTGLSKLARMVNGYARRPQLQERLTRQICEALMTDLEAKAALVLIEAEHACMSLRGIRAQNSQTLTFEVAGEWEENLTKRQEIFSLLKQQPF

SEQ ID NO: 3708 - protein, 212 aa, Acetobacteraceae bacterium
  misc_feature (1)..(212): tr|A0A327M7H8|A0A327M7H8_9PROT GTP cyclohydrolase 1 OS= Acetobacteraceae bacterium DB1506 OX=2230885 GN=folE PE =3 SV=1
MHVPRPAGIAPAETSPEGRPSRAEAEAAVRTLLRWAGDDPGREGLADTPARVARAYGEFFAGYDLDPVEVLARSFEETEGYDEMVVLRDIRVESHCEHHLVPIIGRAHIAYLPAGRVVGISKLARVLEIYAKRLQIQEKLTAQVANCIDEVLRPRGVAVVIEASHQCMATRGVHQPGTTMVTSRMLGAFREDAATRREFLALVTARRAEAVG

SEQ ID NO: 3709 - protein, 186 aa, Acetobacterium bakii
  misc_feature (1)..(186): tr|A0A0L6U3K7|A0A0L6U3K7_9FIRM GTP cyclohydrolase 1 OS= Acetobacterium bakii OX=52689 GN=folE PE=3 SV=1
MIDQKKIREAVVMILEAIGEDPTREGLIETPDRVARMYEEIYCGIGQTAETHLSKTFAVKSDDIVIERDIPFYSVCEHHLMPFYGKVHIAYIPNGRVAGLSKLVRTVDVYTKKLQIQEALTTEIGEAIMEYLHARGVMVMIEAEHLCINMRGVKRCGTKTITAMQAGIFKNNKELKDEVHKLMSIR

SEQ ID NO: 3710 - protein, 156 aa, Acetobacterium sp.
  misc_feature (1)..(156): tr|A0A351HY98|A0A351HY98_9FIRM GTP cyclohydrolase 1 (Fr agment) OS=Acetobacterium sp. OX=1872094 GN=folE PE=3 S V=1
PARVARMYAEIFSGLGHTAEVHLAKTFAVKSDDIVIERDIPFYSMCEHHLLPFYGKVHIAYIPNGRVAGLSKLVRTVDVYAKKPQLQEVLTTEIGEAVMEYLQARGVMVIVEAEHLCMNMRGVKRPGTRTVTAMQAGIFEHNKELKDEVHKLLSIK

SEQ ID NO: 3711 - protein, 186 aa, Acetobacterium sp.
  misc_feature (1)..(186): tr|A0A231NUK2|A0A231NUK2_9FIRM GTP cyclohydrolase 1 OS= Acetobacterium sp. MES1 OX=1899015 GN=folE PE=3 SV=1
MIDQKKIQEAVTMILEAIGEDPTREGLVETPARVARMYAEIFSGLGHTAEVHLAKTFAVKSDDIVIERDIPFYSMCEHHLLPFYGKVHIAYIPNGRVAGLSKLVRTVDVYAKKPQLQEVLTTEIGEAVMEYLQARGVMVIVEAEHLCMNMRGVKRPGTRTVTAMQAGIFEHNKELKDEVHKLLSIK

SEQ ID NO: 3712 - protein, 186 aa, Acetobacterium wieringae; identical to SEQ ID NO: 3711
  misc_feature (1)..(186): tr|A0A1F2PDP8|A0A1F2PDP8_9FIRM GTP cyclohydrolase 1 OS= Acetobacterium wieringae OX=52694 GN=folE PE=3 SV=1

SEQ ID NO: 3713 - protein, 186 aa, Acetobacterium woodii
  misc_feature (1)..(186): tr|H6LD40|H6LD40_ACEWD GTP cyclohydrolase 1 OS=Acetobac terium woodii (strain ATCC 29683 / DSM 1030 / JCM 2381 / KCTC 1655 / WB1) OX=931626 GN=folE PE=3 SV=1
MIDQEKIQKAVTMILEAIGEDPTREGLVETPARVGRMYAEIFSGLGHTAEVHLAKTFAVKSDDIVIERDIPFYSMCEHHLLPFYGKVHIAYIPNGRVAGLSKLVRTVDLYSKRPQLQEVLTTDIGEAIMEYLHARGVMVIIEAEHLCMNMRGVKRPGTRTVTAMQAGIFVHNKELKDEVHKLLSIK

SEQ ID NO: 3714 - protein, 208 aa, Acetobacteroides hydrogenigenes
  misc_feature (1)..(208): tr|A0A4R2EYK4|A0A4R2EYK4_9BACT GTP cyclohydrolase 1 OS= Acetobacteroides hydrogenigenes OX=979970 GN=folE PE=3 SV=1
MNDFDNGTIRGYEKEEKYNSEVTLKLMEHYKAILSLLGEDVEREGLLKTPERVAKAMQFLTHGYHLDPKEILNSAKFKEDYQQMVLVKDIELYSMCEHHMIPFYGKAHVAYIPNGYITGLSKIARIVEAYARRLQVQERLTVQIRDCIQETLKPLGVAVVIEASHMCMQMRGVQKQNSVTTTSAFTGAFLSNNKTREEFIHLIGLKLH

SEQ ID NO: 3715 - protein, 186 aa, Acetohalobium arabaticum
  misc_feature (1)..(186): tr|D9QR91|D9QR91_ACEAZ GTP cyclohydrolase 1 OS=Acetohal obium arabaticum (strain ATCC 49924 / DSM 5501 / Z-7288 ) OX=574087 GN=folE PE=3 SV=1
MVDKEQIREAVGMILDAIGEDPDREGLLETPDRVARMYEEVFSGLHKDPADDLQIFFNQAHEELVLVKDISFYSMCEHHLLPFYGKAHVGYIPENGKVTGLSKLARVVDSFAKRPQLQERLTSQVADLIMKNVEARGVIVVVEAEHMCMTMRGIKKPGSLTTTSAVRGILQNDQAAREEALKLIKD

SEQ ID NO: 3716 - protein, 261 aa, Acetonema longum
  misc_feature (1)..(261): tr|F7NPS4|F7NPS4_9FIRM GTP cyclohydrolase FolE2 OS=Acet onema longum DSM 6540 OX=1009370 GN=folE2 PE=3 SV=1
MKDVQNTSDQRGIAIQKVGVNDVHLPLMIKTKYGSYQSVLAKIRLTVDLPQEYKGTHMSRFIEVLSEWRQKPISNKEMEQILIDILHRLQAQKAHIDIQFKYFIEKTAPVSGLPSMLDYDCIFSGDMVTGGRLNFVMGVSVPFTSLCPCSKEISCYGAHNQRGVMRVQVRHRPGSYLWIEDLVTLMEEQGSCPVYPLLKREDEKYVTEKAYENPKFVEDVLRDLVLVLRRTQGISWFKIECENFESIHNHSAYAYHMEQLD

SEQ ID NO: 3717 - protein, 180 aa, Acetothermus autotrophicum
  misc_feature (1)..(180): tr|H5SUA8|H5SUA8_ACEAU GTP cyclohydrolase 1 OS=Acetothe rmus autotrophicum OX=1446466 GN=folE PE=3 SV=1
MAELVRRVLVHIGEDPDREGLRETPRRFVEMLESLTAGYRQDPKELIAGAIFPVKHDQMIVVKDILFYSLCEHHILPFFGRAHVGYIPDGRVIGMSKIPQIVEHFSKKLQLQETLTDEIADFLMDALVPKGVGVVIEGFHLCMAMRELQKDAWLVTSAVKGIFRRDPRTRTEFMQLIGRR

SEQ ID NO: 3718 - protein, 271 aa, Achromatium sp.
  misc_feature (1)..(271): tr|A0A0M1JIL6|A0A0M1JIL6_9GAMM GTP cyclohydrolase FolE2 OS=Achromatium sp. WMS3 OX=1604836 GN=folE2 PE=3 SV=1
MSPTHSTLEGNPIADVQSTKDNRHIAIDKVGIKDIKHPIIVKDRSAGSQHTIANFNMYVNLPHNFKGTHMSRFVEILNRHEQAISVESFKDMLGEMAERLEAESGHIEMRFPYFVTKHAPISKVRSLMDYEVTLIGEIHRTVPIMHIKVNVPVTSLCPCSKEIANFGAHNQRSHVTVQVRTDEFVWIEELIDLVESQASCQLYGLLKRKDEKYVTEYAYNHPKFVEDMVRDVALCLNRDSRFNAYSVESENFESIHNHSAYAMISWDKFKS

SEQ ID NO: 3719 - protein, 271 aa, Achromatium sp.
  misc_feature (1)..(271): tr|A0A0M1JA62|A0A0M1JA62_9GAMM GTP cyclohydrolase FolE2 OS=Achromatium sp. WMS1 OX=1604834 GN=folE2 PE=3 SV=1
MTEETYITDVQNITDNRHIAIDKVGIKDVRYPIVVKDRSNGTQHTIASFNMYVNLPHNFKGTHMSRFVEILNSHEKAISVESFKEMLGKMVKRLEAESGHIEMRFPYFVAKQAPISKVRSLMDYEVTLIGEIHDTVPTMYIRVTVPVTSLCPCSKEIADYGAHNQRSHVTVQVRTDDFVWIEEIIDLIENEASCQLYGLLKRRDEKHVTEYAYNHPKFVEDMVRDVAIRLNQDLRFSAYSVESENFESIHNHSAYAMIEWDKFKTLTPETH

SEQ ID NO: 3720 - protein, 265 aa, Achromobacter agilis
  misc_feature (1)..(265): tr|A0A446CK37|A0A446CK37_9BURK GTP cyclohydrolase FolE2 OS=Achromobacter agilis OX=1353888 GN=folE2 PE=3 SV=1
MNSPIDPAIVMPDVQSSADTRHIPIQRVGIRGVRHPMLVESGDGSPQGTVANWTLTVALPPEEKGTHMSRFVALLEKYRSTPMTPALFRAMAADMLPLLHAERGDITASFPYFINKSAPISGVQSLLDYEVQWIARAQGEAVEFELIVQVPVTSLCPCSKAISEYGAHNQRSHVTVSAILNGDIGMDSVIRLIEEEGSCELWGLLKRPDEKYVTERAYDNPKFVEDLVRDVAARLNAHPGIARYRVEAENFESIHNHSAYAVVEG

SEQ ID NO: 3721 - protein, 181 aa, Achromobacter agilis
  misc_feature (1)..(181): tr|A0A446CTL7|A0A446CTL7_9BURK GTP cyclohydrolase 1 OS= Achromobacter agilis OX=1353888 GN=folE PE=3 SV=1
MSLEKHYTAILEQLGEDPSREGLADTPARAAKAMRHLCRGYAQNLEEIVNGALFTSDTREIVLVKNIELYSLCEHHMLPFIGKAHVAYLPNGKVLGLSKVARIVEMYARRLQIQENLSRQVAEAVQSVTGAAGVAVVIEAQHMCMMMRGVEKQNSSMVTSVMLGEFHDNPSTRSEFLSLIR

SEQ ID NO: 3722 - protein, 265 aa, Achromobacter aloeverae
  misc_feature (1)..(265): tr|A0A4Q1HDB7|A0A4Q1HDB7_9BURK GTP cyclohydrolase FolE2 OS=Achromobacter aloeverae OX=1750518 GN=folE2 PE=3 SV =1
MNSPIDPAIVMPDVQSSADTRHIPIQRVGIRGVRHPMLVQAGDGSAMATVANWTLTVALPAEEKGTHMSRFVALLEKYRSTPMTPTLFRAMAREMLPLLHAETGDITAAFPYFINKSAPVSGVQSLMDYEVQWIARASGDDVEFELVVQVPVTSLCPCSKAISEYGAHNQRSHVTVTAILGDDVGMEDVIRAVEEEGSCELWGLLKRPDEKYVTERAYDNPKFVEDLVRDVAARMAARQGIKRYRVEAENFESIHNHSAYAVVEG

SEQ ID NO: 3723 - protein, 181 aa, Achromobacter aloeverae
  misc_feature (1)..(181): tr|A0A4Q1HPM8|A0A4Q1HPM8_9BURK GTP cyclohydrolase 1 OS= Achromobacter aloeverae OX=1750518 GN=folE PE=3 SV=1
MSLESNYHAILQSLGEDPDREGLRDTPKRAAKAMHYLCQGYRQSLEEIVNGALFSSDTSEIVLVKNIELYSLCEHHMLPFIGKAHVAYLPKGKVLGLSKVARIVDMYARRLQIQENLSRQIAEAVQQVTGASGVAVVIEAQHMCMMMRGVEKQNSSMVTSVMLGEFHDNPATRAEFLNLIR

SEQ ID NO: 3724 - protein, 265 aa, Achromobacter arsenitoxydans
  misc_feature (1)..(265): tr|H0F930|H0F930_9BURK GTP cyclohydrolase FolE2 OS=Achr omobacter arsenitoxydans SY8 OX=477184 GN=folE2 PE=3 SV =1
MNSPIDPAIVMPDVQSSADTRHIPIQRVGIRGVRHPMLIESGDGSPQGTVANWTLTVALPPEEKGTHMSRFVALLEKYRSTPMTPTLFRAMAADMLPLLHAERGDITAAFPYFINKSAPISGVQSLLDYEVQWIARAQADSVEFELVVQVPVTSLCPCSKAISEYGAHNQRSHVTVSAILSDDIGMDGVIRLIEEEGSCELWGLLKRPDEKYVTERAYDNPKFVEDLVRDVAARLNAHPGIARYRVEAENFESIHNHSAYAVVEG

SEQ ID NO: 3725 - protein, 181 aa, Achromobacter arsenitoxydans
  misc_feature (1)..(181): tr|H0F6H0|H0F6H0_9BURK GTP cyclohydrolase 1 OS=Achromob acter arsenitoxydans SY8 OX=477184 GN=folE PE=3 SV=1
MSLEKHYTAILEALGEDPSREGLADTPARAAKAMRHLCRGYDQNLDEIVNGALFTSDTREIVLVKNIELYSLCEHHMLPFIGKAHVAYLPAGKVLGLSKVARIVEMYARRLQIQENLSRQVAEAVQSVTGAAGVAVVIEAQHMCMMMRGVEKQNSSMVTSVMLGEFHDNPSTRAEFLSLIR

SEQ ID NO: 3726 - protein, 265 aa, Achromobacter denitrificans
  misc_feature (1)..(265): tr|A0A3R9FIQ8|A0A3R9FIQ8_ACHDE GTP cyclohydrolase FolE2 OS=Achromobacter denitrificans OX=32002 GN=folE2 PE=3 SV=1
MNSPIDPAIVMPDVQSSADTRHIPIQRVGIRGVRHPMLVESGDGSPQGTVANWTLTVALPPEEKGTHMSRFVALLEKYRSTPMTPALFRAMASDMLPLLHAERGDITASFPYFINKSAPISGVQSLLDYEVQWIARAQGEAVEFELIVQVPVTSLCPCSKAISEYGAHNQRSHVTVSAILNGDIGMDSVIRLIEEEGSCELWGLLKRPDEKYVTERAYDNPKFVEDLVRDVAARLNAHPGIARYRVEAENFESIHNHSAYAVVEG

SEQ ID NO: 3727 - protein, 181 aa, Achromobacter denitrificans
  misc_feature (1)..(181): tr|A0A427WQG1|A0A427WQG1_ACHDE GTP cyclohydrolase 1 OS= Achromobacter denitrificans OX=32002 GN=folE PE=3 SV=1
MSLEKHYTAILEQLGEDPSREGLADTPARAAKAMRHLCRGYGQNLDEIVNGALFTSDTREIVLVKNIELYSLCEHHMLPFIGKAHVAYLPNGKVLGLSKVARIVEMYARRLQIQENLSRQVAEAVQSVTDAAGVAVVIEAQHMCMMMRGVEKQNSSMVTSVMLGEFHDNPSTRAEFLSLIR

SEQ ID NO: 3728 - protein, 265 aa, Achromobacter insolitus
  misc_feature (1)..(265): tr|A0A163ASL6|A0A163ASL6_9BURK GTP cyclohydrolase FolE2 OS=Achromobacter insolitus OX=217204 GN=folE2 PE=3 SV= 1
MNSPIDPAIVMPDVQSSADTRHIPIQRVGIRGVRHPMLIESGDGSPQGTVANWTLTVALPPEEKGTHMSRFVALLEKYRSIPMTPTLFRAMAADMLPLLHAERGDITAAFPYFINKSAPISGVQSLLDYEVQWIARAHGDEVEFELIVQVPVTSLCPCSKAISEYGAHNQRSHVTVSAILNADIGMDGVIRLIEEEGSCELWGLLKRPDEKYVTERAYDNPKFVEDLVRDVAARLNAHPGIARYRVEAENFESIHNHSAYAVVEG

SEQ ID NO: 3729 - protein, 181 aa, Achromobacter insolitus
  misc_feature (1)..(181): tr|A0A162SA77|A0A162SA77_9BURK GTP cyclohydrolase 1 OS= Achromobacter insolitus OX=217204 GN=folE PE=3 SV=1
MSLEKHYTAILEQLGEDPSREGLADTPARAAKAMRHLCRGYGQNLDEIVNGALFTSDTREIVLVKNIELYSLCEHHMLPFIGKAHVAYLPNGKVLGLSKVARIVEMYARRLQIQENLSRQVAEAVQSVTGAAGVAVVIEAQHMCMMMRGVEKQNSSMVTSVMLGEFHDNPSTRAEFLSLIR

SEQ ID NO: 3730 - protein, 181 aa, Achromobacter insuavis
  misc_feature (1)..(181): tr|F7T8M0|F7T8M0_9BURK GTP cyclohydrolase 1 OS=Achromob acter insuavis AXX-A OX=1003200 GN=folE PE=3 SV=1
MSLENHYTAILEALGEDPSREGLADTPARAAKAMRHLCRGYTQDLDEIVNGALFTSDTREIVLVKNIELYSLCEHHMLPFIGKAHVAYLPNGKVLGLSKVARIVEMYARRLQIQENLSRQVAEAVQSVTGAAGVAVVIEAQHMCMMMRGVEKQNSSMVTSVMLGEFHDNPSTRAEFLSLIR

SEQ ID NO: 3731 - protein, 265 aa, Achromobacter insuavis
  misc_feature (1)..(265): tr|F7T450|F7T450_9BURK GTP cyclohydrolase FolE2 OS=Achr omobacter insuavis AXX-A OX=1003200 GN=folE2 PE=3 SV=1
MNSPIDPAIVMPDVQSSADTRHIPIQRVGIRGVRHPMLIENADGSPQGTVANWTLTVALPPEEKGTHMSRFVALLEKYRSTPMTPTLFRAMAADMLPLLHAERGDITAAFPYFINKSAPISGVQSLLDYEVQWIARAQGDQVEFELVVQVPVTSLCPCSKAISEYGAHNQRSHVTVSAILESDISMDGVIRLIEDEGSCELWGLLKRPDEKYVTERAYDNPKFVEDLVRDVAARLNAHPGIARYRVEAENFESIHNHSAYAVVEG

SEQ ID NO: 3732 - protein, 265 aa, Achromobacter marplatensis
  misc_feature (1)..(265): tr|A0A366G9N3|A0A366G9N3_9BURK GTP cyclohydrolase FolE2 OS=Achromobacter marplatensis OX=470868 GN=folE2 PE=3 SV=1
MNSPIDPAIVMPDVQSSADTRHIPIQRVGIRGVRHPMLIESGDGSAQGTVANWTLTVALPPEEKGTHMSRFVALLEKYRSTPMTPTLFRAMAADMLPLLHAERGDITAAFPYFINKSAPISGVQSLLDYEVQWIARAEGDGVEFELVVQVPVTSLCPCSKAISEYGAHNQRSHVTVSAILSDDISMDGVIRLIEEEGSCELWGLLKRPDEKYVTERAYDNPKFVEDLVRDVAARLNAHPGIARYRVEAENFESIHNHSAYAVVEG

SEQ ID NO: 3733 - protein, 181 aa, Achromobacter marplatensis
  misc_feature (1)..(181): tr|J4YSB2|J4YSB2_9BURK GTP cyclohydrolase 1 OS=Achromob acter marplatensis OX=470868 GN=folE PE=3 SV=1
MSLEKNYTAILEALGEDPSREGLADTPARAAKAMRHLCRGYSQNLDEIVNGALFTSDTREIVLVKNIELYSLCEHHMLPFIGKAHVAYLPAGRVLGLSKVARIVEMYARRLQIQENLSRQIAEAVQTVTGAAGVGVVIEAQHMCMMMRGVEKQNSSMVTSVMLGEFHDNPSTRAEFLSLIR

SEQ ID NO: 3734 - protein, 181 aa, Achromobacter piechaudii
  misc_feature (1)..(181): tr|A0A0L6I9R5|A0A0L6I9R5_9BURK GTP cyclohydrolase 1 OS= Achromobacter piechaudii OX=72556 GN=folE PE=3 SV=1
MSLEKNYTAILEALGEDPSREGLADTPARAAKAMRHLCRGYAQNLDEIVNGALFTSDTREIVLVKNIELYSLCEHHMLPFIGKAHVAYLPAGKVLGLSKVARIVEMYARRLQIQENLSRQVAEAVQKVTGAAGVAVVIEAQHMCMMMRGVEKQNSSMVTSVMLGEFHDNPSTRAEFLSLIR

SEQ ID NO: 3735 - protein, 265 aa, Achromobacter piechaudii
  misc_feature (1)..(265): tr|A0A0L6IEU6|A0A0L6IEU6_9BURK GTP cyclohydrolase FolE2 OS=Achromobacter piechaudii OX=72556 GN=folE2 PE=3 SV= 1
MNSPIDPAIVMPDVQSSADTRHIPIQRVGIRGVRHPMLIESGDGSPQGTVANWTLTVALPPEEKGTHMSRFVALLEKYRSTPMTPALFRAMAADMLPLLHAERGDITAAFPYFINKSAPISGVQSLLDYEVQWIARAQGDGVEFELVVQVPVTSLCPCSKAISEYGAHNQRSHVTVSAILNGDVSMDGVIRLIEEEGSCELWGLLKRPDEKYVTERAYDNPKFVEDLVRDVAARLTAHPGIARYRVEAENFESIHNHSAYAVVEG

SEQ ID NO: 3736 - protein, 186 aa, Achromobacter pulmonis
  misc_feature (1)..(186): tr|A0A2N8KR07|A0A2N8KR07_9BURK GTP cyclohydrolase 1 OS= Achromobacter pulmonis OX=1389932 GN=folE PE=3 SV=1
MQESPMSLEQRYTAILEQLGEDPSREGLADTPARAAKAMRHLCRGYGQNLEEIVNGALFTSDTREIVLVKNIELYSLCEHHMLPFIGKAHVAYLPNGKVLGLSKVARIVEMYARRLQIQENLSRQVAEAVQSVTGAAGVAVVIEAQHMCMMMRGVEKQNSSMVTSVMLGEFHDNPSTRAEFLSLIR

SEQ ID NO: 3737 - protein, 265 aa, Achromobacter pulmonis
  misc_feature (1)..(265): tr|A0A2N8KE34|A0A2N8KE34_9BURK GTP cyclohydrolase FolE2 OS=Achromobacter pulmonis OX=1389932 GN=folE2 PE=3 SV= 1
MNSPIDPAIVMPDVQSSADTRHIPIQRVGIRGVRHPMLIQGGDGAPQGTVANWTLTVALPAEEKGTHMSRFVALLEKYRSTPMTPALFRAMAADMLPLLHAERGDITAAFPYFINKSAPISGVQSLLDYEVQWIARAQGAEVEFELVVQVPVTSLCPCSKAISEYGAHNQRSHVTVSAILDGDLSMDSVIRLIEEEGSCELWGLLKRPDEKFVTERAYDNPKFVEDLVRDVAARLNAHPGIARYRVEAENFESIHNHSAYAVVEG

SEQ ID NO: 3738 - protein, 265 aa, Achromobacter ruhlandii
  misc_feature (1)..(265): tr|A0A1D8I660|A0A1D8I660_9BURK GTP cyclohydrolase FolE2 OS=Achromobacter ruhlandii OX=72557 GN=folE2 PE=3 SV=1
MNSPIDPAIVMPDVQSSTDTRHIPIQRVGIRGVRHPMLIENADGSPQGTVANWTLTVALPPEEKGTHMSRFVALLEKYRSTPMTPTLFRAMAADMLPLLHAERGDITAAFPYFINKSAPISGVQSLLDYEVQWIARAQGDQVEFELVVQVPVTSLCPCSKAISEYGAHNQRSHVTVSAILESDISMDGVIRLIEDEGSCELWGLLKRPDEKYVTERAYDNPKFVEDLVRDVAARLNAHPGIARYRVEAENFESIHNHSAYAVVEG

SEQ ID NO: 3739 - protein, 195 aa, Achromobacter ruhlandii
  misc_feature (1)..(195): tr|A0A1D8IBZ7|A0A1D8IBZ7_9BURK GTP cyclohydrolase 1 OS= Achromobacter ruhlandii OX=72557 GN=folE2 PE=3 SV=1
MFIAIAGAQPPGVPMSLENHYTAILEALGEVPSREGLVDTPARAAKAMRHLCRGYNQNLEEIVNGALFTSDTREIVLVKNIELYSLCEHHMLPFIGKAHVAYLPNGKVLGLSKVARIVEMYARRLQIQENLSRQVAEAVQSVTGAAGVAVVIEAQHMCMMMRGVEKQNSSMVTSVMLGEFHDNPSTRAEFLSLIR

SEQ ID NO: 3740 - protein, 265 aa, Achromobacter sp.
  misc_feature (1)..(265): tr|A0A226Y4Q5|A0A226Y4Q5_9BURK GTP cyclohydrolase FolE2 OS=Achromobacter sp. KAs 3-5 OX=1915388 GN=folE2 PE=3 SV=1
MNSPIDPAIVMPDVQSATDTRHIPIQRVGIRGVRHPMLVQSGDGSAQGTVANWTLTVALPPEEKGTHMSRFVALLEKYRSTPMTPALFRTMAADMLPLLHAERGDITASFPYFINKSAPISGVQSLLDYEVQWIARAQADRVEFELVVQVPVTSLCPCSKAISEYGAHNQRSHVTVSVILNEDISMDGVIRLIEDEGSCELWGLLKRPDEKFVTERAYDNPKFVEDLVRDVAARLNAHPGIARYRVEAENFESIHNHSAYAVVEG

SEQ ID NO: 3741 - protein, 265 aa, Achromobacter sp.; identical to SEQ ID NO: 3738
  misc_feature (1)..(265): tr|A0A0M9JD18|A0A0M9JD18_9BURK GTP cyclohydrolase FolE2 OS=Achromobacter sp. OX=134375 GN=folE2 PE=3 SV=1

SEQ ID NO: 3742 - protein, 265 aa, Achromobacter spanius
  misc_feature (1)..(265): tr|A0A2S5GUU2|A0A2S5GUU2_9BURK GTP cyclohydrolase FolE2 OS=Achromobacter spanius OX=217203 GN=folE2 PE=3 SV=1
MNSPIDPALVMPDVQSSADTRHIPIQRVGIRGVRHPMLVEGGDGAPQGTVANWTLTVALPPEEKGTHMSRFVALLEKYRSTPMTPARFRAMAADMLPLLHAESGDITAAFPYFINKSAPISGVQSLLDYEVQWIARAKGNAVEFELVVQVPVTSLCPCSKAISEYGAHNQRSHVTVSAILSDDISMDGVIRLIEEEGSCELWGLLKRPDEKYVTERAYDNPKFVEDLVRDVAARLTAHPGIARYRVEAENFESIHNHSAYAVVEG

SEQ ID NO: 3743 - protein, 265 aa, Achromobacter spanius
  misc_feature (1)..(265): tr|A0A0L0RCG7|A0A0L0RCG7_9BURK GTP cyclohydrolase FolE2 OS=Achromobacter spanius OX=217203 GN=folE2 PE=3 SV=1
MNSPIDPAIVMPDVQSSADTRHIPIQRVGIRGVRHPMLIESGDGSPQGTVANWTLTVALPPEEKGTHMSRFVALLEKYRSTPMTPALFRAMAADMLPLLHAERGDITAAFPYFINKSAPISGVQSLLDYEVQWIARAQGDSVEFELVVQVPVTSLCPCSKAISEYGAHNQRSHVTVSAILNGDISMDGVIRLIEEEGSCELWGLLKRPDEKYVTERAYDNPKFVEDLVRDVAARLTAHPGIARYRVEAENFESIHNHSAYAVVEG

SEQ ID NO: 3744 - protein, 265 aa, Achromobacter xylosoxidans
  misc_feature (1)..(265): tr|E3HWX8|E3HWX8_ACHXA GTP cyclohydrolase FolE2 OS=Achr omobacter xylosoxidans (strain A8) OX=762376 GN=folE2 P E=3 SV=1
MNSPIDPAIVMPDVQSSADTRHIPIQRVGIRGVRHPMLIESGDGSPQGTVANWTLTVALPPEEKGTHMSRFVALLEKYRSTPMTPTLFRAMAADMLPLLHAERGDITAAFPYFINKSAPISGVQSLLDYEVQWIARAQGDEVEFELIVQVPVTSLCPCSKAISEYGAHNQRSHVTVSAILNADIGMDGVIRLIEEEGSCELWGLLKRPDEKYVTERAYDNPKFVEDLVRDVAARLNAHPGIARYRVEAENFESIHNHSAYAVVEG

SEQ ID NO: 3745 - protein, 181 aa, Achromobacter xylosoxidans
  misc_feature (1)..(181): tr|E3HUV0|E3HUV0_ACHXA GTP cyclohydrolase 1 OS=Achromob acter xylosoxidans (strain A8) OX=762376 GN=folE PE=3 S V=1
MSLEKHYTAILEQLGEDPSREGLADTPARAAKAMRHLCRGYDQNLDEIVNGALFTSDTREIVLVKNIELYSLCEHHMLPFIGKAHVAYLPNGKVLGLSKVARIVEMYARRLQIQENLSRQVAEAVQSVTDAAGVAVVIEAQHMCMMMRGVEKQNSSMVTSVMLGEFHDNPSTRAEFLSLIR

SEQ ID NO: 3746 - protein, 192 aa, Acidaminobacter hydrogenoformans
  misc_feature (1)..(192): tr|A0A1G5RWJ5|A0A1G5RWJ5_9FIRM GTP cyclohydrolase 1 OS= Acidaminobacter hydrogenoformans DSM 2784 OX=1120920 GN =folE PE=3 SV=1
MDNKRIEAAVREMLAAIGEDPDREGLKGTPDRIARMYEEIFGGLNEDPGKHLEVIFQEDEHEELVLVRDISFYSMCEHHLVPFFGKAHVAYIPRGGRLTGLSKLARVVETIAKRPQLQERITSLVADTIMEKLNPYGVIVVVEAEHMCMTMRGVKKPGSKTVTSAVRGIFKVDAKSRAEAMSLIGMGVGSRG

SEQ ID NO: 3747 - protein, 272 aa, Acidaminococcaceae bacterium
  misc_feature (1)..(272): tr|A0A359EU16|A0A359EU16_9FIRM GTP cyclohydrolase FolE2 OS=Acidaminococcaceae bacterium OX=2049052 GN=folE2 PE =3 SV=1
MLNESLEQKKRILKDVQSEQDSRNIPLKHVGISDLRWPLVLRDRQKGEQHTVAVVSVAVDLPKDLRGTHMSRFVQCLQKLDVVNLSALEEVLDDLKESLLADRAFLKLEFPYFIQKEAPVSGLSSVMDLNCVYTVEKGERFMQKVEVQVPIQTLCPCSKEISSYGAHNQRATASLEVKAREFVWIEELADIADVGASAPVYGLLKRPDEKFVTEEAYDNPRFVEDAVREIALRLEEDSRIIWYRVTVKSYESIHNHNAFACVEKGWNECCTK

SEQ ID NO: 3748 - protein, 258 aa, Acidaminococcaceae bacterium
  misc_feature (1)..(258): tr|A0A3D2QCB7|A0A3D2QCB7_9FIRM GTP cyclohydrolase FolE2 OS=Acidaminococcaceae bacterium OX=2049052 GN=folE2 PE =3 SV=1
MLKDVQSEQDTRNIPLKRVGIKDLRWPLTLRDRQNGKQHTVARVSLAVNLPRDLRGTHMSRFVQCLKKLDVVNLSALEEVLDDLKQSLEADSAYMRLTFPYFIEKKAPVSGLTSLMDLQCTFTMEKGEKFRQRVKVEVPVQTLCPCSKEISDYGAHNQRATASLEIEMAEFIWIEELAEMADAGASSPVYGLLKRPDEKFVTEHAYENPRFVEDAVREIALRLEKDRRVTWYRVTVESMESIHNHNAFATVEKGWMNE

SEQ ID NO: 3749 - protein, 255 aa, Acidaminococcus fermentans
  misc_feature (1)..(255): tr|A0A1I5HSS2|A0A1I5HSS2_ACIFE GTP cyclohydrolase FolE2 OS=Acidaminococcus fermentans OX=905 GN=folE2 PE=3 SV= 1
MLKDVQAQQDLRHIALKHVGIRNLRWPIVLADREKGTQHTVAEVALAVDLPQEQRGTHMSRFVECLKQVGPIRPHELEEVLDHLRQKLEARKALLEFSCPYFITKKAPVSGIESYLDVDCHFRAEKGETFSLEVGVDVPIHTLCPCSKEISKYGAHNQRAWAKIRIRSTQPVWIEELVEMAEKGASTPLYSLLKRPDEKCVTEMAYENPRFVEDAVREIALQLNGDPRIDWYTVTVESEESIHNHNAFATVEKEV

SEQ ID NO: 3750 - protein, 255 aa, Acidaminococcus fermentans
  misc_feature (1)..(255): tr|D2RKI5|D2RKI5_ACIFV GTP cyclohydrolase FolE2 OS=Acid aminococcus fermentans (strain ATCC 25085 / DSM 20731 / VR4) OX=591001 GN=folE2 PE=3 SV=1
MLKDVQAQQDLRHIALKHVGIRNLRWPIVLADREKGTQHTVAEVALAVDLPQEQRGTHMSRFVECLKQVGAIRPHELEEVLDHLRQKLEARKALLEFSCPYFITKKAPVSGIESYLDVDCHFRAEKGETFSLEVGVDVPIHTLCPCSKEISKYGAHNQRAWAKIRIRSTQPVWIEELVEMAEKGASTPLYSLLKRPDEKCVTEMAYENPRFVEDAVREIALQLNGDPRIDWYTVTVESEESIHNHNAFATVEKEV

SEQ ID NO: 3751 - protein, 255 aa, Acidaminococcus intestini
  misc_feature (1)..(255): tr|C0WER0|C0WER0_9FIRM GTP cyclohydrolase FolE2 OS=Acid aminococcus intestini OX=187327 GN=folE2 PE=3 SV=1
MLKDVQGQVDQRHIALKQVGIRDIRWPITLKDPHKGVQHSVAVISLGVNLPHEQRGTHMSRFVECLKEMGPIHPHDLEIVLDGLKEKLGAKKAMLDMRFPYFIEKKAPVSGKTGYLDISCHYHAEKGETFHLDVGVNVPIHTLCPCSKEISKYGAHNQRARAKITIRSTKPVWIEELVEMAEASASSPIFSLLKRPDEKFVTEEAYENPRFVEDAAREIALRLNQDERIDWYRVTVESEESIHNHNAFACVEKED

SEQ ID NO: 3752 - protein, 255 aa, Acidaminococcus intestini; identical to SEQ ID NO: 3751
  misc_feature (1)..(255): tr|G4Q2M2|G4Q2M2_ACIIR GTP cyclohydrolase FolE2 OS=Acid aminococcus intestini (strain RyC-MR95) OX=568816 GN=fo lE2 PE=3 SV=1

SEQ ID NO: 3753 - protein, 183 aa, Acidaminococcus sp.
  misc_feature (1)..(183): tr|R7K724|R7K724_9FIRM GTP cyclohydrolase 1 OS=Acidamin ococcus sp. CAG:917 OX=1262688 GN=folE PE=3 SV=1
MDKEKIEKAVKMILEAVGEDPEREGLKETPERVARMYEEILSGYNDDAAKHLSKVFSSPSGELVLERDISFASTCEHHLMPFFGKVSVAYIPGGKVVGLSKLARVVEVYAKRLQLQERMTDQICEAIYETLGAKAVMVVCEAEHTCMTARGVKKTGTKVTSYATRGSISDDLKYRILAMVTAK

SEQ ID NO: 3754 - protein, 256 aa, Acidaminococcus sp.
  misc_feature (1)..(256): tr|A0A415EMA6|A0A415EMA6_9FIRM GTP cyclohydrolase FolE2 OS=Acidaminococcus sp. AM05-11 OX=2291997 GN=folE2 PE= 3 SV=1
MLKDVQAQQDVRHIPLKHVGIKDLKWPLVLKDPKRGEQHSVAVVQLSVDLPKEQRGTHMSRFVECLKELGGVRPSDLEKFLDNLKEKLGARSAMVKLDFPYFVTKKAPVSGIESYLDVECHFRAEKGEKFVLDLGVDVPVHTLCPCSKEISKYGAHNQRAWARMTVRSQKPIWIEELVEMAEKGASSPLFSLLKRPDEKFVTEEAYENPRFVEDAVRDIALQLNADSRIDWYSVTVESQESIHNHNAFATVEKGEE

SEQ ID NO: 3755 - protein, 188 aa, Acidibacillus ferrooxidans
  misc_feature (1)..(188): tr|A0A1V4EUF5|A0A1V4EUF5_9BACL GTP cyclohydrolase 1 OS= Acidibacillus ferrooxidans OX=1765683 GN=folE PE=3 SV=1
MAHVDQEKIQAAVRMILEAVGENPDREGLLETPARVGRLYAEVFAGLHQDPREQLQTIFNEDHNELVLVKDITFYSMCEHHLVPFFGKAHVAYIPQGAKITGLSKLARLVESAARRPQLQERLTATVADSLVDQLDPLGVAVMVEAEHMCMAMRGVNKPGTKTLTTAVRGAFLEDSHRRAEVFQMMRQ

SEQ ID NO: 3756 - protein, 188 aa, Acidibacillus ferrooxidans
  misc_feature (1)..(188): tr|A0A117SYF9|A0A117SYF9_9BACL GTP cyclohydrolase 1 OS= Acidibacillus ferrooxidans OX=1765683 GN=folE PE=3 SV=1
MAHVDQEKIQTAVRMILEAVGEDPDREGLLETPARVGRLYAEVFAGLHQDPRDQLQTIFNEDHNELVLVKDITFYSMCEHHLVPFFGKAHVAYIPQGAKITGLSKLARLVESAARRPQLQERLTATVADSLVDQLEPLGVVVMVEAEHMCMAMRGVNKPGTKTLTTAVRGIFLEDAKQRAEVFQMMKY

SEQ ID NO: 3757 - protein, 94 aa, Acidibacillus sulfuroxidans
  misc_feature (1)..(94): tr|A0A2U3CNS0|A0A2U3CNS0_9BACL GTP cyclohydrolase 1 (Fr agment) OS=Acidibacillus sulfuroxidans OX=1765684 GN=BM 613_14470 PE=3 SV=1
MNEFTKMTNRAEISHSIEKILKLIEGGDDLREGLVETPERVAKAYATWFGGYDVDIASLFKTFEDGGECCNEMVIVRDIPVYSHCEHHMAPIIG

SEQ ID NO: 3758 - protein, 189 aa, Acidibacillus sulfuroxidans
  misc_feature (1)..(189): tr|A0A2U3DCN6|A0A2U3DCN6_9BACL GTP cyclohydrolase 1 OS= Acidibacillus sulfuroxidans OX=1765684 GN=folE PE=3 SV= 1
MSGFDQQKIETAVKMILEAIGEDPNREGLLETPARVARMYSEVFSGLHQDPREQLMTIFNEDHNEVVLVKDITFYSMCEHHLVPFFGHAHVAYIPQGARITGLSKLARLVETAARRPQLQERLTATIADALVDRLDPAGVAVMVEAEHLCMAMRGVNKPGTKTLTTAVRGILFTDPLKRKEVFDFMQQR

SEQ ID NO: 3759 - protein, 271 aa, Acidiferrobacter sp.
  misc_feature (1)..(271): tr|A0A2E8QPH3|A0A2E8QPH3_9GAMM GTP cyclohydrolase FolE2 OS=Acidiferrobacter sp. OX=1872107 GN=folE2 PE=3 SV=1
MLDTNDAHSSGAEIPDVQGSPDSRNITIDKVGVKDLRHPVRIQDRNGLDQHTVANFNMYVELPHNFKGTHMSRFVEILSRHEREISVDSFRSILQETRDHLDAGTSHIEMAFPFFLEKAAPVTGVKSLMDYQVTFIGEASDDLSSTEVRVVVPVTSLCPCSKKISDYGAHNQRSHVTVSVRSKSLIWIEEIIDIVEQEASCELYGLLKRPDEKFVTERAYENPKFVEDMVRDVASRLNDDERIERYVVEAENFESIHNHSAYAQITFNRDA

SEQ ID NO: 3760 - protein, 272 aa, Acidiferrobacter sp.
  misc_feature (1)..(272): tr|A0A2Z3QZ56|A0A2Z3QZ56_9GAMM GTP cyclohydrolase FolE2 OS=Acidiferrobacter sp. SPIII_3 OX=1281578 GN=folE2 PE =3 SV=1
MIAAPPGARTDDCIADVQSSVDSRQIAIDKVGIKDIRHPVRVKDRSQGEQHTIALFNMYVELPHNFKGTHMSRFVEILNRYETEISVESFQDMLVEMARRLEADAGHIEMTFPYFVTKTAPVSGVRSLMDYEVSFRGEIRNGHGVTTIGVVVPVTSLCPCSKEISERGAHNQRSHVTLSVRTNQFVWVEDLIDLVEKKASCELYGLLKRPDEKFVTERAYDNPRFVEDMVREVASALNADPRVDAYTVESENFESIHNHSAYALIKKDKTAI

SEQ ID NO: 3761 - protein, 271 aa, Acidiferrobacter thiooxydans
  misc_feature (1)..(271): tr|A0A1C2FXD8|A0A1C2FXD8_9GAMM GTP cyclohydrolase FolE2 OS=Acidiferrobacter thiooxydans OX=163359 GN=folE2 PE= 3 SV=1
MIAAPSGARADCIADVQSSVDSRQIAIDKVGIKDIRHPVRVKDRSQGEQHTIALFNMYVELPHNFKGTHMSRFVEILNRYETEISVESFQDMLVEMARRLEADAGHIEMTFPYFVTKTAPVSGVRSLMDYEVSFRGAIRDGHSVTTISVVVPVTSLCPCSKEISERGAHNQRSHVTLAVRTNQFVWVEDLIDLVEKKASCELYGLLKRPDEKFVTERAYDNPRFVEDMVREVASALNADPRVDAYTVESENFESIHNHSAYALIKKDKTAT

SEQ ID NO: 3762 - protein, 271 aa, Acidiferrobacteraceae bacterium
  misc_feature (1)..(271): tr|A0A2E8CI39|A0A2E8CI39_9GAMM GTP cyclohydrolase FolE2 OS=Acidiferrobacteraceae bacterium OX=2024893 GN=folE2 PE=3 SV=1
MAKAQTASTQSEQIADVQGTSDSRNITIDKVGVKDVRHPVRIQDRSGGDQHTVATFNMFVELPHNFKGTHMSRFVEILNNHEREISVRSFRAMLQETRDHLDAGTGHIEMTFPFFLEKTAPVTEVKSLMDYQVTLVGEIVGNTVSTEVRVLVPVTSLCPCSKQISDYGAHNQRSHVTVSVKASAFIWIEEIIDIVEKQASCELYGLLKRPDEKHVTERAYDNPKFVEDLVRDVAGQLNQDERIEGYVVEAENFESIHNHSAYAQITYNRSH

SEQ ID NO: 3763 - protein, 272 aa, Acidiferrobacteraceae bacterium
  misc_feature (1)..(272): tr|A0A2E7TBZ6|A0A2E7TBZ6_9GAMM GTP cyclohydrolase FolE2 OS=Acidiferrobacteraceae bacterium OX=2024893 GN=folE2 PE=3 SV=1
MNHPEPPKITPRQIADVQSAPDTRNLTIDKVGVKDLRHPIRVKDRSGYEQHTVAIFNMYVELPHNFKGTHMSRFVEILSQHERETSVQSFRAMLKEVTTHLDAEKCRIEMTFPFFLQKKAPVSGVESLMDYEVTLAGELVDNHVLSEIQVTTPVTSLCPCSKEISDYGAHNQRSHVKTNIHTSAFIWIEEIIEVVEKQASCELYGILKRPDEKHVTERAYDNPKFVEDLVRDIAMQFNGDERIQAYTVSAENFESIHNHSAYAEISRNKLES

SEQ ID NO: 3764 - protein, 271 aa, Acidihalobacter ferrooxidans
  misc_feature (1)..(271): tr|A0A1P8UJE0|A0A1P8UJE0_9GAMM GTP cyclohydrolase FolE2 OS=Acidihalobacter ferrooxidans OX=1765967 GN=folE2 PE =3 SV=1
MNQNRSAADFAADIPDVQSSPDERHVAINRVGIKSLRHPLRILSRDGSVQATVASADMYVNLPADRKGTHMSRFVALLNEIAHPLDIPAFETLLIDMNQRLGAEEGHIELRFPFFVRKTAPVSGVESLMDYDASLIGELRNGEVRISLHVVVPVTSLCPCSRDISEYGAHNQRSHITLRARINQPMWFEDLIDTAEEAGSCELFGLLKRPDEKFVTERAYENPKFVEDAVRDLAVRLNTESRIDAYVIECENFESIHNHSAYACIERDKTR

SEQ ID NO: 3765 - protein, 185 aa, Acidihalobacter ferrooxidans
  misc_feature (1)..(185): tr|A0A1P8UHG5|A0A1P8UHG5_9GAMM GTP cyclohydrolase 1 OS= Acidihalobacter ferrooxidans OX=1765967 GN=folE PE=3 SV =1
MELEQLETHYREIIRSTGEPLERDGLLDTPQRAAKAFQFLTRGYQQTLDEVVNGALFESDMDEMVLVRDIELYSMCEHHMLPFIGKAHVAYLPNGKVLGLSKIARIVDMYARRLQIQEGLTRQIADAVQTVTDAHGVGVVVQARHLCMMMRGVEKQNSSMTTSVMLGHFRSNTDTRAEFLRLIRP

SEQ ID NO: 3766 - protein, 271 aa, Acidihalobacter prosperus
  misc_feature (1)..(271): tr|A0A1A6C5S9|A0A1A6C5S9_9GAMM GTP cyclohydrolase FolE2 OS=Acidihalobacter prosperus OX=160660 GN=folE2 PE=3 S V=1
MSQPPARDARPMPDVQGAPDDRRLRIDQVGIRGLRHPVLIDHGASEPPQATVASVDMLVDLPAERKGTHMSRFVALLNEYTGALDTAAFEALLHEMSRRLDADSGRIEMRFPYFVRKSAPISGVASLMDYDVSLIGELEAGKTTVTLRVVVPVTSLCPCSRDISEYGAHNQRSHITLTARLAGSLSIRTLITIAEEEASCELFGLLKRPDEKFVTERAYDNPKFVEDAVRDVAARLDAEPAIAAYTAECENFESIHNHSAYARISRDKTTR

SEQ ID NO: 3767 - protein, 272 aa, Acidihalobacter prosperus
  misc_feature (1)..(272): tr|A0A1D8K9B1|A0A1D8K9B1_9GAMM GTP cyclohydrolase FolE2 OS=Acidihalobacter prosperus OX=160660 GN=folE2 PE=3 S V=1
MNHMSPPKARDNREMPDVQSAADDRRIRIDQVGIKGLRHPVRIALDDGEAPQATVATVDMLVDLPADRKGTHMSRFVALLNESEDALDIASFERLLKAMSERLDARSGRIELSFPYFVRKSAPVSGVPSLLDYDVAIIGDIDHERVALTLRIVVPVTSLCPCSRDISAYGAHNQRSHITLTVRLAGPVSVRRLIQIAEEEASCELFGLLKRPDEKFVTERAYDNPKFVEDAVRDVAARLDAEPGIAAYIAECENFESIHNHSAYARIERDKS

SEQ ID NO: 3768 - protein, 128 aa, Acidimicrobiaceae bacterium
  misc_feature (1)..(128): tr|A0A3C1CJY5|A0A3C1CJY5_9ACTN GTP cyclohydrolase 1 (Fr agment) OS=Acidimicrobiaceae bacterium OX=2024894 GN=DC Q30_10825 PE=3 SV=1
GYDELVVATAIPFTSLCEHHLLPFSGVAHVGYLPADLLVGLSKLARVVTHFSRRLQVQERLTTDVADWLCERLNPKGVGVVLDAEHSCMTLRGARATGARTVTSALRGTVREDERTRAEFLSLAGVRR

SEQ ID NO: 3769 - protein, 271 aa, Acidimicrobiaceae bacterium
  misc_feature (1)..(271): tr|A0A354B5V6|A0A354B5V6_9ACTN GTP cyclohydrolase FolE2 OS=Acidimicrobiaceae bacterium OX=2024894 GN=folE2 PE= 3 SV=1
MTITSLPDTASMTIEDVQGRADTRRIPINRVGIKDIRHPVRVSDRSGGQQHTIATASMYVNLPEDVKGTHMSRFVQLLNEHDRPIDATNFGAMVTAMVDRLDAEDGYIEMNFPYFVTKFAPVSGVPSTLDYEVTFVGKKVAGRIDTWVKVLVGATSLCPCSKAISEYGAHNQRSHITMNVKVDGGMWLEDLIEIAEQEASCELWGVLKREDEKYVTERAYENPKFVEDLVRDVAARLTADPRVRAYSVESENFESIHNHSAYARIDVDKDA

SEQ ID NO: 3770 - protein, 197 aa, Acidimicrobiales bacterium
  misc_feature (1)..(197): tr|A0A2W6CUQ6|A0A2W6CUQ6_9ACTN GTP cyclohydrolase 1 OS= Acidimicrobiales bacterium OX=2201156 GN=folE PE=3 SV=1
MDISRVAHSSLDLPRAAAAVRELLAALGEDPDRDGLRDTPARAAASYAQLLAGVTVDPKAQLSSFPEPHADSVVVLKDIAFASLCEHSLLPFTGVIGVGYAPGGSRQIASWGGVIRMINGYAHRPQVQERLTSQIADAVIARLDPAGVLVVVSATHQCVSAVGERQANSRAITTAARGCYAEDSGARAGLLSLLRSS

SEQ ID NO: 3771 - protein, 213 aa, Acidimicrobiales bacterium
  misc_feature (1)..(213): tr|A0A2W6D009|A0A2W6D009_9ACTN GTP cyclohydrolase 1 OS= Acidimicrobiales bacterium OX=2201156 GN=folE PE=3 SV=1
MCTSIAGPTRRARQCPSKALGVDRLRVQAAVHELLAAMGEDPHREGLLETPRRVAAMYAEVLAGLEDDPARHLTVTFAAEHDEMVMVKDMAFASLCEHHMVPFIGRAHVAYIPNQDGRITGLSKLARVVDGFAQRLQVQERLTTQVADTLEKVLEPRGVLVVVEAEHLCMSMRGVRKPGAITVTSAVRGLFRADLATRAEAMQFIHGGQGAGR

SEQ ID NO: 3772 - protein, 205 aa, Acidimicrobiia bacterium
  misc_feature (1)..(205): tr|A0A3S0BUU0|A0A3S0BUU0_9ACTN GTP cyclohydrolase 1 OS= Acidimicrobiia bacterium OX=2080302 GN=folE PE=3 SV=1
MNALDPEPETPLASAIDRDRIARAVREILEAIGEDPDREGLRDTPSRVARMYAETCSGLHEDATQHLKVTFDADHDEMVMVRDIPLYSMCEHHLVPFYGFAHVGYIPNTDGRVTGLSKLARLVDGFARRPQVQERLTTQVAEAIEATLQPRGVLVVVEAEHLCMAMRGVRKPGASTVTSAVRGVFRDDVSARMEAMQFVESGRRR

SEQ ID NO: 3773 - protein, 190 aa, Acidimicrobium ferrooxidans
  misc_feature (1)..(190): tr|C7M1S0|C7M1S0_ACIFD GTP cyclohydrolase 1 OS=Acidimic robium ferrooxidans (strain DSM 10331 / JCM 15462 / NBR C 103882 / ICP) OX=525909 GN=Afer_1912 PE=3 SV=1
MSAPTNDDARAAVDTLLAWAEATLGATLADDVRTRTPERVVEALAELLGGYRAEPDDPVRFAPEQRAPVVLDEIRFASLCEHHLLPFTGTVSVEYLPGAGVLGLSAVVREIERHARRLQLQERLTQEIADAIAKAARARLVRVTVRAEHACIAIRGVRREGVIVTTQALAGREVGSPNALAELERGRPPR

SEQ ID NO: 3774 - protein, 212 aa, Acidiphilium cryptum
  misc_feature (1)..(212): tr|A5G1W9|A5G1W9_ACICJ GTP cyclohydrolase 1 OS=Acidiphi lium cryptum (strain JF-5) OX=349163 GN=folE PE=3 SV=1
MDIRTPPDQLDTTLEDGRPSREDAEAAIRTLIRWAGDDADREGVRDTPARVARAYEDFFRGYGEDPEAILSRTFEETEGYDEMVLLRDIRVESHCEHHMVPIIGVAHVAYLPNRRVVGISKLARVVDAYARRLQIQEKLTAQIANTINEVLQPRGVAVVIEAGHECMSTRGVHKPGVSMVTSRMLGAFRDDPSTRREFLAMIQGRRCTGFET

SEQ ID NO: 3775 - protein, 212 aa, Acidiphilium multivorum; identical to SEQ ID NO: 3774
  misc_feature (1)..(212): tr|F0J4Y6|F0J4Y6_ACIMA GTP cyclohydrolase 1 OS=Acidiphi lium multivorum (strain DSM 11245 / JCM 8867 / NBRC 100 883 / AIU301) OX=926570 GN=folE PE=3 SV=1

SEQ ID NO: 3776 - protein, 212 aa, Acidiphilium rubrum
  misc_feature (1)..(212): tr|A0A1N6QIZ0|A0A1N6QIZ0_ACIRU GTP cyclohydrolase 1 OS= Acidiphilium rubrum OX=526 GN=folE PE=3 SV=1
MDIHTPLDHLDNAGHPDRPSRAEAEAAIRTLIQWAGDDPAREGLLDTPARVARSYEDFFRGYAEDPEAILTRTFEEIEGYDEMVILRDIRLESHCEHHMVPIIGVAHVAYLPNRRVVGISKLARVVDAYAKRLQIQEKLTAQIANTINEVLQPRGVAVVIEAGHECMSTRGVHKTGVAMVTSRMLGAFRDDPSTRREFLSMIQGRRCTGFES

SEQ ID NO: 3777 - protein, 212 aa, Acidiphilium sp.; identical to SEQ ID NO: 3776
  misc_feature (1)..(212): tr|A0A257UV46|A0A257UV46_9PROT GTP cyclohydrolase 1 OS= Acidiphilium sp. 37-64-53 OX=1970299 GN=folE PE=3 SV=1

SEQ ID NO: 3778 - protein, 212 aa, Acidiphilium sp.
  misc_feature (1)..(212): tr|A0A257S030|A0A257S030_9PROT GTP cyclohydrolase 1 OS= Acidiphilium sp. 21-66-27 OX=1970294 GN=folE PE=3 SV=1
MDIRTPPHQLDRTDHDDRPSREEAEAAIRTLIRWAGDDATREGVIDTPARVARAYEDFFRGYREDPEAILSRTFEETEGYDEMVLLRDIRVESHCEHHMVPIIGVAHVAYLPNRRVVGISKLARVVDAYARRLQIQEKLTAQIANTINEVLQPRGVAVVIEAGHECMSTRGVHKPGVSMVTSRMLGAFRDDASTRREFLAMIQGRRCTGFET

SEQ ID NO: 3779 - protein, 214 aa, Acidipila dinghuensis
  misc_feature (1)..(214): tr|A0A4Q1SEM1|A0A4Q1SEM1_9BACT GTP cyclohydrolase 1 OS= Acidipila dinghuensis OX=1560006 GN=folE PE=3 SV=1
MPTIKTAAKGAAKDLREEIAGQTGLEGISTQDIYRELLRRFDEDPTRDGLIRTPERVEKAMSFLTHGYHQDPTAILRGALFDVDYDEMVIVKDIEMFSLCEHHMLPFFGRVHVAYIPNGKVIGLSKIPRLVEVFARRLQVQERMTRQIAEAIDEAIKPQGVGVVIEARHLCMMMRGVEKQNSSTVTSAMLGVFQKQNTRNEFLSLVRERGQHSF

SEQ ID NO: 3780 - protein, 209 aa, Acidipila rosea
  misc_feature (1)..(209): tr|A0A4R1LFQ3|A0A4R1LFQ3_9BACT GTP cyclohydrolase 1 OS= Acidipila rosea OX=768535 GN=folE PE=3 SV=1
MKRAAMSEATALREHMITGLEDISTQDLYREIIRRFDEDPSRDGLERTPERVEKAMTFLTKGYHQDPTAILRGAMFDVDYDEMVLVKDIEMFSLCEHHMLPFFGKVHVAYIPNGKVIGLSKIPRLVEVFARRLQVQERMTRQIADAIQDAISPQGVGVVIEARHLCMMMRGVEKQNSSTVTSAMVGVFQKQNTRAEFLSLVRERRQDAF

SEQ ID NO: 3781 - protein, 202 aa, Acidipila sp.
  misc_feature (1)..(202): tr|A0A372IS22|A0A372IS22_9BACT GTP cyclohydrolase 1 OS= Acidipila sp. 4G-K13 OX=2303751 GN=folE PE=3 SV=1
MALVDRLVESTGLEDCSTQDIYRELIRRFDEDPTRDGLLRTPERMEKTIAFLTKGYHEDPTAILRGAMFDVDYDEMVIVKDIEMFSLCEHHMLPFFGKVHVAYIPNGKVIGLSKIPRLVEVFARRLQVQERLTRQIADAIHDAIAPQGVGVVIEARHLCMMMRGVEKQNSSTVTSAMVGVFQKQNTRAEFLSLVRERMQASV

SEQ ID NO: 3782 - protein, 211 aa, Acidipropionibacterium acidipropionici
  misc_feature (1)..(211): tr|K7SN29|K7SN29_ACIA4 GTP cyclohydrolase 1 OS=Acidipro pionibacterium acidipropionici (strain ATCC 4875 / DSM 20272 / JCM 6432 / NBRC 12425 / NCIMB 8070) OX=1171373 GN=folE PE=3 SV=1
MTTGDSQIPDQFDRRADGPAVEHPAVDEARAAAAVREFLVAIGEDPDREGLQETPARVARAAGELFAGMRADPAEVLSKTFDMSHDEMVLVRDIEVQSFCEHHLLPFTGVAHVGYIPAPNGRVTGLSKLARLVDAYAKRPQVQERLTTQVADALVEHIGARGVIVVVECEHMCMTMRGVRKPGSRTVTSAVRGILRDSATRAEAMSLILNH

SEQ ID NO: 3783 - protein, 204 aa, Acidipropionibacterium acidipropionici
  misc_feature (1)..(204): tr|A0A142KLU7|A0A142KLU7_9ACTN GTP cyclohydrolase 1 OS= Acidipropionibacterium acidipropionici OX=1748 GN=folE PE=3 SV=1
MPDQFDRRADGPAVEHPAVDEARAAAAVREFLVAIGEDPDREGLQETPARVARAAGELFAGMRADPAEVLSKTFDMSHDEMVLVRDIEVQSFCEHHLLPFTGVAHVGYIPAPNGRVTGLSKLARLVDAYAKRPQVQERLTTQVADALVEHIGARGVIVVVECEHMCMTMRGVRKPGSRTVTSAVRGILRDSATRAEAMSLILNH

SEQ ID NO: 3784 - protein, 202 aa, Acidipropionibacterium jensenii
  misc_feature (1)..(202): tr|A0A3Q9UQC5|A0A3Q9UQC5_9ACTN GTP cyclohydrolase 1 OS= Acidipropionibacterium jensenii OX=1749 GN=folE PE=3 SV =1
MVGQAIPHSGSSSTGFVDKPRAAAAVREFLAAIGEDPDREDLLETPMRVAKAAEELFAGMHTDPAEVLSKTFDISHDELVLVRDIEVQSFCEHHLLPFVGVAHVGYIPSKDGRVTGLSKLGRLVDCYAKRPQVQERLTTQVADALVRYIGARGVIVVVECEHVCMTMRGVRKPGSRTVTSAVRGILRDPATRAEAMGLITNG

SEQ ID NO: 3785 - protein, 202 aa, Acidipropionibacterium jensenii
  misc_feature (1)..(202): tr|A0A3T0S2M7|A0A3T0S2M7_9ACTN GTP cyclohydrolase 1 OS= Acidipropionibacterium jensenii OX=1749 GN=folE PE=3 SV =1
MVGQALPHSGPSSTGFVDKPRAAAAVREFLAAIGEDPDREDLLETPMRVAKAAEELFAGMRTDPAEVLSKTFDISHDELVLVRDIEVQSFCEHHLLPFVGVAHVGYIPSKDGRVTGLSKLGRLVDCYAKRPQVQERLTTQVADALVRYIGARGVIVVVECEHMCMTMRGVRKPGSRTVTSAVRGILRDPATRAEAMGLITNG

SEQ ID NO: 3786 - protein, 212 aa, Acidipropionibacterium virtanenii
  misc_feature (1)..(212): tr|A0A344URF0|A0A344URF0_9ACTN GTP cyclohydrolase 1 OS= Acidipropionibacterium virtanenii OX=2057246 GN=folE PE =3 SV=1
MTTGETQIPDQIDRRVDGPAAEYPAVDEARAAAAVREFLAAIGEDPDREGLRDTPGRVARAAEELFAGMRTDPAEVLAKTFDMDHDEMVLVRDIEVQSFCEHHLLPFTGVAHVGYIPATSGRVTGLSKLARLVDAYAKRPQVQERLTTQVADALVEHIGARGVIVVVECEHMCMTMRGVRKPGSRTVTSAVRGILRDPTTRAEAMGLILNHS

SEQ ID NO: 3787 - protein, 210 aa, Acidisarcina polymorpha
  misc_feature (1)..(210): tr|A0A2Z5G7C6|A0A2Z5G7C6_9BACT GTP cyclohydrolase 1 OS= Acidisarcina polymorpha OX=2211140 GN=folE PE=3 SV=1
MAQPAIVHKANIPKQEPKGGISEFSTQEIYAELLQRFDGDPTRDGLLKTPERVEKAMTFLTKGYQEDPTKILRGALFDVDYDEMVIVKDIEMFSLCEHHMLPFFGRVHVAYIPNAKVIGLSKIPRLIEVFARRLQVQERMTQQIADSIQEAIHPQGVGVVVEARHLCMMMRGVEKQNSSTVTSAMRGVFGKQSTRTEFLSLVRERGQGAF

SEQ ID NO: 3788 - protein, 219 aa, Acidisphaera rubrifaciens
  misc_feature (1)..(219): tr|A0A0D6P314|A0A0D6P314_9PROT GTP cyclohydrolase 1 OS= Acidisphaera rubrifaciens HS-AP3 OX=1231350 GN=folE PE= 3 SV=1
MVFEDTHVNIVTPAPHRLAEPTDGRPTREQAEEAVRTLLRWAGDDPSREGLLDTPARVVRSYDEFFAGYSVDPVRLLETTFEEVEGYDEIVLLRDIRLESHCEHHMVPIIGRAHVAYLPQSRVVGISKLARVVEAYAKRLQIQEKLTAQIANTINEVLQPRGTAVIIEGNHQCMSTRGVHKPGALLVTSRMLGAFRDNPDTRRELLSMVNKPMSGPRED

SEQ ID NO: 3789 - protein, 271 aa, Acidithiobacillales bacterium
  misc_feature (1)..(271): tr|A0A0S8L3D1|A0A0S8L3D1_9PROT GTP cyclohydrolase FolE2 OS=Acidithiobacillales bacterium SM1_46 OX=1703384 GN= folE2 PE=3 SV=1
MKKAKAETTQIADVQSSPDTRRLQIDKVGIKDIRHPILVKDRSQGVQHTIANFNMYVELPHNFKGTHMSRFVEILNAHDMEISVDSFRDMLAEMSKRLEADRGYIEMSFPYFINKAAPVSGVKSLLDYHVTFIGEVHNGTDITKIRVVVPVTSLCPCSKEISERGAHNQRSHVTVTVRTNTFVWIEDVIDLVEKQASCELYGLLKRPDEKFVTERAYDNPKFVEDMVRDIAAQLNKDERIEAYVVESENFESIHNHSAYAMIKKDKTEAAS

SEQ ID NO: 3790 - protein, 273 aa, Acidithiobacillales bacterium
  misc_feature (1)..(273): tr|A0A0S8BKG1|A0A0S8BKG1_9PROT GTP cyclohydrolase FolE2 OS=Acidithiobacillales bacterium SG8_45 OX=1703383 GN= folE2 PE=3 SV=1
MSSSSKAQTAACIADVQNAPDTRHIQIDKVGIKDIRHPVRVKDRSQGEQHTIARFNMYVELPHNFKGTHMSRFVDILNNHEYEISVESFTEMLMEMRERLEADRGHIEMHFPYFVNKSAPVSGVQSLMDYEVSLIGDVQGDETIVGIKVVVPVTSLCPCSKEISDYGAHNQRSHVTVEVRTNSFVWIEDVIDLVEKQASCELFGLLKRPDEKYVTERAYDNPKFVEDMVRDVAAVLNADDRIDSYIVESENFESIHNHSAYALIERDKKQKPD

SEQ ID NO: 3791 - protein, 264 aa, Acidithiobacillus caldus
  misc_feature (1)..(264): tr|A0A059ZSN2|A0A059ZSN2_ACICK GTP cyclohydrolase FolE2 OS=Acidithiobacillus caldus (strain ATCC 51756 / DSM 8 584 / KU) OX=637389 GN=folE2 PE=3 SV=1
MRDCAAETLEDVQGRADPRAIAIQRVGVKAVRHPLRISDRDDRVQHSIALCNMYVALPAHLKGTHMSRFLEILNRYPDPLGVRTIAGFLEEVRQRLEAQAARVELRFPYFVNKRAPVSGVESLLDYEVEILADRDASGLQLDLGVMVPVTSLCPCSKSISDYGAHNQRSHVWVRAQLAQTVWIEDLIDVVESVASCQLYGLLKRPDEKFVTEYAYDHPKFVEDMVRDVALRLHKDPRIRRFTVSSENFESIHNHSAYAEIHMDN

SEQ ID NO: 3792 - protein, 264 aa, Acidithiobacillus caldus; identical to SEQ ID NO: 3791
  misc_feature (1)..(264): tr|A0A1E7Z0W6|A0A1E7Z0W6_9PROT GTP cyclohydrolase FolE2 OS=Acidithiobacillus caldus OX=33059 GN=folE2 PE=3 SV= 1

SEQ ID NO: 3793 - protein, 264 aa, Acidithiobacillus ferridurans
  misc_feature (1)..(264): tr|A0A2Z6IM07|A0A2Z6IM07_9PROT GTP cyclohydrolase FolE2 OS=Acidithiobacillus ferridurans OX=1232575 GN=folE2 P E=3 SV=1
MRDCAVEILEDVQGRADPRAIAIQQVGIRAVRHPMQIQDRDGITQPTIARCNMYVSLPAHLKGTHMSRFIEILNAQEGSFSVEGFGAVVEEMRQRLEADSARLEMHFPFFIEKTAPVSGVRSMLDYEVKLAGEITPAGYRLTIGVMVPVTSLCPCSKSISEYGAHNQRAHVWVHVRTCETVWIRDIIDLIEAEASCELYGLLKRPDEKYVTEYAYDHPKFVEDMVRDVALRLQEDSRVQWFSVSSENFESIHNHSAYAMIEMEK

SEQ ID NO: 3794 - protein, 264 aa, Acidithiobacillus ferrivorans
  misc_feature (1)..(264): tr|A0A257TDQ1|A0A257TDQ1_9PROT GTP cyclohydrolase FolE2 OS=Acidithiobacillus ferrivorans OX=160808 GN=folE2 PE =3 SV=1
MRDCAVEVLEDVQGRTDPRAIAIQQVGIRDVRHPIQFQDRDGTVQPTVAQCNMYVSLPAHLKGTHMSRFIEILNAQESPLGVESFGTAVEQMRQRLEADSARLEMRLPFFVQKAAPVSGVRSMLDYEVELIGEVTPSGYHLTIGVMVPVTSLCPCSKSISEYGAHNQRAHVWVHVRARETIWIKDIIDLIEAEASCQLYGVLKRPDEKYVTEYAYDHPKFVEDMVRDVALRLREDPRVRWFSVSSENFESIHNHSAYAMIEMEK

SEQ ID NO: 3795 - protein, 277 aa, Acidithiobacillus ferrivorans
  misc_feature (1)..(277): tr|A0A060UPG7|A0A060UPG7_9PROT GTP cyclohydrolase FolE2 OS=Acidithiobacillus ferrivorans OX=160808 GN=folE2 PE =3 SV=1
MTNSVHYSQEGSAVRDCAVEILEDVQGRADPRAIAIQQVGIRAVRHPMQFQDRDGAVQPTIAQCNMYVSLPAHLKGTHMSRFIEVLNAHESPFSVESFGAAVEQMRQRLEADSARLEMRLPFFVQKAAPVSGVKSMLDYEVELIGEITPAGYLLTIGVMVPVTSLCPCSKSISEYGAHNQRAHVWVHVRAHETIWIKDIIDLIEAEASCQLYGVLKRPDEKYVTEYAYDHPKFVEDMVRDVALRLREDPRVRWFSVSSENFESIHNHSAYAMIEMEK

SEQ ID NO: 3796 - protein, 264 aa, Acidithiobacillus ferrooxidans
  misc_feature (1)..(264): tr|A0A2W1K056|A0A2W1K056_ACIFR GTP cyclohydrolase FolE2 OS=Acidithiobacillus ferrooxidans OX=920 GN=folE2 PE=3 SV=1
MRDCAVEILEDVQGRADPRAIAIQQVGIRAVRHPLQIQDRDGIVQPTIARCNMYVSLPAHLKGTHMSRFIEILNAHEGSFSVEGFGAVVEEMRQRLEADSARLEMRFPFFIEKTAPVSGVRSMLDYEVKLAGEITPAGYRLTMGVMVPVTSLCPCSKSISEYGAHNQRAHVWVHVRACETVWIRDIIDLIEAEASCELYGLLKRPDEKYVTEYAYDHPKFVEDLVRDVALRLQEDRRVQWFSVSSENFESIHNHSAYAMIEMEK

SEQ ID NO: 3797 - protein, 264 aa, Acidithiobacillus ferrooxidans; identical to SEQ ID NO: 3796
  misc_feature (1)..(264): tr|B7JC68|B7JC68_ACIF2 GTP cyclohydrolase FolE2 OS=Acid ithiobacillus ferrooxidans (strain ATCC 23270 / DSM 148 82 / CIP 104768 / NCIMB 8455) OX=243159 GN=folE2 PE=3 S V=1

SEQ ID NO: 3798 - protein, 264 aa, Acidithiobacillus sp.
  misc_feature (1)..(264): tr|A0A2I1DJ37|A0A2I1DJ37_9PROT GTP cyclohydrolase FolE2 OS=Acidithiobacillus sp. SH OX=187490 GN=folE2 PE=3 SV =1
MGICATEVLEDVQGRVDPRAIPIQQVGIRAVRHPLQFADRDGSVQPSVALCNMYVSLPAHLKGTHMSRFMEILNMHDAPISVEGFRAIVEEMCKRLEADSARLEMQLPFFVQKKAPVSGVKSMLDYEVELVGEVTPQGYQLTVGVMVPVTSLCPCSKSISEYGAHNQRAHVWVHVRSQESIWVRDLIDLVEGEASCELFGLLKRPDEKYVTEYAYDHPKFVEDMVRDVALRLQEDDRVQWFSVSSENFESIHNHSAYAKIEMEK

SEQ ID NO: 3799 - protein, 264 aa, Acidithiobacillus sp.
  misc_feature (1)..(264): tr|A0A3M8QPX0|A0A3M8QPX0_9PROT GTP cyclohydrolase FolE2 OS=Acidithiobacillus sp. CJ-2 OX=1867749 GN=folE2 PE=3 SV=1
MRDCAAEVMEDVQGRPDPRAIPINQVGIKAIRHPVRIRDRSEGEQHTIALCNMYVSLPQHFKGTHMSRFVEILNAHDREISVDSFQEIVRTMRERLDADAARLEMQFPYFINKAAPISGVKSLMDYEVSFVGESSHDQYRQTIGVQVPVTSLCPCSKSIADYGAHNQRSHVQVRVRANDWIWIEEIIDLVEEEASCQLYGLLKRPDEKFVTEYAYDHPKFVEDMVRDVAIRLKGDSRVDWFSVSSENFESIHNHSAYAMIEMDK

SEQ ID NO: 3800 - protein, 264 aa, Acidithiobacillus thiooxidans
  misc_feature (1)..(264): tr|A0A1C2JH53|A0A1C2JH53_ACITH GTP cyclohydrolase FolE2 OS=Acidithiobacillus thiooxidans OX=930 GN=folE2 PE=3 SV=1
MRNCATEILEDVQGRVDPRAIPIQQVGIRAVRHPLQIADRDAAVQPSVALCNMYVSLPAHLKGTHMSRFMEILNNQEAPISVEAFRGIVEQMCTRLEADSARLEMRLPFFVQKAAPVSGVKSMLDYEVELIGEITPKGYQLTLGVMVPVTSLCPCSKSISEYGAHNQRAHVWVHVRSQETIWVRDLIDLIEAEASCELYGLLKRPDEKHVTEYAYDHPKFVEDMVRDVALRLQEDPRVRWFSVSSENFESIHNHSAYAMIEMEK

SEQ ID NO: 3801 - protein, 264 aa, Acidithiobacillus thiooxidans
  misc_feature (1)..(264): tr|A0A543Q8B0|A0A543Q8B0_ACITH GTP cyclohydrolase FolE2 OS=Acidithiobacillus thiooxidans ATCC 19377 OX=637390 GN=folE2 PE=3 SV=1
MRNCATEILEDVQGRVDPRAIPIQQVGIRAVRYPLQIADREAVVQPSVALCNMYVSLPAHLKGTHMSRFMEILNNQEAPISVEAFRGIVEQMCTRLEADSARLEMRLPFFVQKAAPVSGVKSMLDYEVELVGEITPQGYQLTLGVMAPVTSLCPCSKSISEYGAHNQRAHVWVHVRSQDTIWVRDLIDLIEAEASCELYGLLKRPDEKFVTEYAYDHPKFVEDMVRDVALRLQEDPRVRWFSVSSENFESIHNHSAYAMIEMEK

SEQ ID NO: 3802 - protein, 271 aa, Acidithrix ferrooxidans
  misc_feature (1)..(271): tr|A0A0D8HCS6|A0A0D8HCS6_9ACTN GTP cyclohydrolase FolE2 OS=Acidithrix ferrooxidans OX=1280514 GN=folE2 PE=4 SV =1
MRDIQAENDLRGIALEEVGINNLTLPVSVSAESGTLISTVAKVSIGVSVAENLRGTHMSRLVESAIIHLSDLSPCSIEECHKEIASKLDAVDTTVRIEFDYFINKESPISKKRSPMRYKVNLNSFKRDCTFITTVGVTVRITSLCPCSKEISDYGAHNQRGTVEIAIQYQGPPGAKLDQDFGIMESINIAEDCGSAPLYTLVKRSDERFITMLAFDNPAFVEDIVRNATLRLRQNNSSAFMVSAVNDESIHDHNAFASFASSDWNWKYGRM

SEQ ID NO: 3803 - protein, 195 aa, Acidithrix ferrooxidans
  misc_feature (1)..(195): tr|A0A0D8HJD9|A0A0D8HJD9_9ACTN GTP cyclohydrolase 1 OS= Acidithrix ferrooxidans OX=1280514 GN=folE PE=3 SV=1
MDVKRVVQAADAFLDALGVPLDDEARTATARRVGELWCDLLSGESDDPSRYLNGGFGGEFHEMIAVNDITFHSVCEHHLLPFYGKVSLCYLPGEAGLIAGASNLTRVVEVVSKRLQIQERLSSQIAQAIEDGIGAAGVLVVVRGTHFCMTMRETKDTGSCLVTVASRGVLTSNSDLRREARSLIMDDFRSDSDDL

SEQ ID NO: 3804 - protein, 204 aa, Acidobacteria bacterium
  misc_feature (1)..(204): tr|A0A1F2RIC2|A0A1F2RIC2_9BACT GTP cyclohydrolase 1 OS= Acidobacteria bacterium RIFCSPLOWO2_02_FULL_60_20 OX=17 97179 GN=folE PE=3 SV=1
MATSKAQRVAPGSEQGTVDRVPQILRELLANLDEEPGREGLRDTPRRAAKALRYLTGGYQMRVDDILNGALYSVTYDEMVIVKDIELFSLCEHHLLPFFGKCHVAYVPDKKVVGLSKIPRLVDMFARRLQIQERLTQQIAETLQERIGPQGVGVVVEARHLCMMMRGVEKQHSQTVTSAMLGVFRDQQQTREEFLSLVLGASRT

SEQ ID NO: 3805 - protein, 199 aa, Acidobacteria bacterium
  misc_feature (1)..(199): tr|A0A1Q7LBP0|A0A1Q7LBP0_9BACT GTP cyclohydrolase 1 OS= Acidobacteria bacterium 13_1_40CM_4_58_4 OX=1803453 GN= folE PE=3 SV=1
MSPSVETTTLTSASFEELVREMLVRLGEDPAREGLVRTPSRVHRAFEFLTKGYKEDPDALLKKALFTVTYDEMVIVKDVEMFSLCEHHLLPFFGKVHVAYIPNGKVIGLSKIPRLIEIFSRRLQIQERLTTQIAETIQKAIEPQGVGVVIEARHLCMMMRGVEKQHSSAVTSSMLGCFRDEQETRTEFLSLIRNRSNGV

SEQ ID NO: 3806 - protein, 198 aa, Acidobacteriales bacterium
  misc_feature (1)..(198): tr|A0A1Q6X7Y2|A0A1Q6X7Y2_9BACT GTP cyclohydrolase 1 OS= Acidobacteriales bacterium 13_2_20CM_55_8 OX=1803470 GN =folE PE=3 SV=1
MTPTVETTTLTSATFENLVREILVRLGEDPAREGLLRTPERVHHAFEFLTKGYQQDPDTMLKNALFTVSYDEMVIVKDVEVFSLCEHHMLPFFGKVHVAYIPNGKVIGLSKIPRLIEIFSRRLQIQERLTTQIAETIQKAIQPQGVGVVIEARHLCMMMRGVEKQHSSAVTSSMLGCFRDEQETRTEFLSLINHRNGS

SEQ ID NO: 3807 - protein, 198 aa, Acidobacteriales bacterium
  misc_feature (1)..(198): tr|A0A1Q7MU73|A0A1Q7MU73_9BACT GTP cyclohydrolase 1 OS= Acidobacteriales bacterium 13_1_40CM_3_55_5 OX=1803468 GN=folE PE=3 SV=1
MTPTVETTTLTSATFENLVREILVRLGEDPAREGLLRTPERVHHAFQFLTKGYQQDPDTMLKNALFTVSYDEMVIVKDVEVFSLCEHHMLPFFGKVHVAYIPNGKVIGLSKIPRLIEIFSRRLQIQERLTTQIAETIQKAIQPQGVGVVIEARHLCMMMRGVEKQHSSAVTSSMLGCFRDEQETRTEFLSLINHRNGG

SEQ ID NO: 3808 - protein, 191 aa, Acidobacteriia bacterium
  misc_feature (1)..(191): tr|A0A321LAI8|A0A321LAI8_9BACT GTP cyclohydrolase 1 OS= Acidobacteriia bacterium AA117 OX=2169412 GN=folE PE=3 SV=1
MAASTTELLRELLVRLGEDATRDGLLKTPERMEKALKYLTQGHKQNPDEILKGALFEVTYDEMVIVKDIEMFSLCEHHILPFFGKVHVAYIPNGRVIGLSKIPRIVDVFARRLQIQERLTVEIAETIQRAIEPQGVGVVIEARHLCVMMRGVEKQHSSAVTSHMLGSFRTAEKTREEFLSLIRNGKNGYSF

SEQ ID NO: 3809 - protein, 204 aa, Acidobacteriia bacterium
  misc_feature (1)..(204): tr|A0A317J8N8|A0A317J8N8_9BACT GTP cyclohydrolase 1 OS= Acidobacteriia bacterium OX=2081523 GN=folE PE=3 SV=1
MRSNKAIVKVLPAQQKENSIAPLVEEILAKLGEDPRREGLARTPQRVDQALKFLTSGYEMDVRKIVNDALYEVKYDEMVVVKDIEFFSLCEHHLLPFFGKVHVAYLPRNRVIGLSKIPRIVDVFARRLQIQERLTQQVAQTIQEAIDPVGVGVICEARHFCMMMRGVEKQHSGAMTSAMLGAFRDKKKTRDEFLSLVNHRGNGF

SEQ ID NO: 3810 - protein, 215 aa, Acidobacterium capsulatum
  misc_feature (1)..(215): tr|C1F2Z7|C1F2Z7_ACIC5 GTP cyclohydrolase 1 OS=Acidobac terium capsulatum (strain ATCC 51196 / DSM 11244 / JCM 7670 / NBRC 15755 / NCIMB 13165 / 161) OX=240015 GN=fol E PE=3 SV=1
MKRGPMATISLQDKLSRNSGSVPPALEKYSTQEIYAELLRRYDEDPTRDGLLRTPERVEKAMKYLTQGYHQEPAGILQGALFDVDYDEMVLVKDIEMFSLCEHHMLPFFGRVHVAYIPNGKVVGLSKIPRLVEVFARRLQVQERMTRQIAEAIQDAINPQGVGVVIEARHLCMMMRGVEKQNSSTVTSAMLGVFQQQNTRGEFLSLVRDRSYQQL

SEQ ID NO: 3811 - protein, 210 aa, Acidobacterium sp.
  misc_feature (1)..(210): tr|A0A3D4VG68|A0A3D4VG68_9BACT GTP cyclohydrolase 1 OS= Acidobacterium sp. OX=1872119 GN=folE PE=3 SV=1
MATISLQDKLSRNSGSVPPALEKYSTQEIYAELLRRYDEDPTRDGLLRTPERVEKAMKYLTQGYHQEPAGILQGALFDVDYDEMVLVKDIEMFSLCEHHMLPFFGRVHVAYIPNGKVVGLSKIPRLVEVFARRLQVQERMTRQIAEAIQDAINPQGVGVVIEARHLCMMMRGVEKQNSSTVTSAMLGVFQQQNTRGEFLSLVRDRSYQQL

SEQ ID NO: 3812 - protein, 220 aa, Acidobacterium sp.
  misc_feature (1)..(220): tr|A0A2G4JIR2|A0A2G4JIR2_9BACT GTP cyclohydrolase 1 OS= Acidobacterium sp. OX=1872119 GN=folE PE=3 SV=1
MAAPTATAEMPVTEIYNEPMQDLIQRLLIELGEDPTREGLVKTPRRVDKALRFLTSGYQADIDAMLNGALFSVDYSEMVIVRDIDFYSMCEHHLLPFFGKCHVAYIPNGKVIGLSKIPRVVDIFARRLQLQERMTNQIAEIINEKIKPLGVAVVCEGTHLCMAMRGVEKQNSYTITSAMLGAFRDQSRTRMEFLELLKLRGGNLSVTGLPVPGHTHDHDE

SEQ ID NO: 3813 - protein, 211 aa, Acidocella aminolytica
  misc_feature (1)..(211): tr|A0A0D6PL28|A0A0D6PL28_9PROT GTP cyclohydrolase 1 OS= Acidocella aminolytica 101 = DSM 11237 OX=1120923 GN=fo lE PE=3 SV=1
MNIQTKSATPVKHKQTQARPSRAEAEEAVRILLRWAGDDPTREGLLDTPKRVAKSYEEFFKGYEEDPVAILSRTFEETEGYDEMILLRDIRLESHCEHHMVPITGKAHVAYLPSTRVVGISKLARVVDAYAKRFQIQEKLTAQIANTIQDVLKPRGVAVVIEANHQCISTRGVHKPGVSMVTSHMIGEFRDNPSTRREFLAMIQGRTCTAE

SEQ ID NO: 3814 - protein, 212 aa, Acidocella sp.
  misc_feature (1)..(212): tr|A0A257QRM3|A0A257QRM3_9PROT GTP cyclohydrolase 1 OS= Acidocella sp. 20-58-15 OX=1970302 GN=folE PE=3 SV=1
MNIHTPASKLIKNDAATRPSRAEAEAAVRTMLRWAGEDPEREGLLDTPARVVRSYEEFFKGYGEDPVAVLARTFEEIEGYDEMVVLRDIRVESHCEHHMVPIIGRAHVAYLPNTRVVGISKLARVVDAYAHRFQIQEKLTAQIANTINEVLQPRGVAVMIEANHQCMSTRGVHKPGASMITSRMLGAFRDDPSTRKEFLSIVSQRVCTSVEA

SEQ ID NO: 3815 - protein, 212 aa, Acidocella sp.
  misc_feature (1)..(212): tr|A0A257Q3S5|A0A257Q3S5_9PROT GTP cyclohydrolase 1 OS= Acidocella sp. 20-57-95 OX=1970301 GN=folE PE=3 SV=1
MNIHTPAAQIVKTDALVKPSRAEAEAAIRVMLRWAGEDPNREGLLDTPARVVRAYEEFFKGYDEDPVAILARTFEEIEGYDEMVVLRDIRLESHCEHHMVPIIGRAHVAYLPNTRVVGISKLARVVDAYAHRFQIQEKLTAQIANTINDVLQPRGVAVVIEANHQCMSTRGVHKPGASMITSRMLGAFRDNLATRKEFLSIINQRSCTSVEA

SEQ ID NO: 3816 - protein, 218 aa, Acidomonas methanolica
  misc_feature (1)..(218): tr|A0A023D723|A0A023D723_ACIMT GTP cyclohydrolase 1 OS= Acidomonas methanolica NBRC 104435 OX=1231351 GN=folE P E=3 SV=1
MSKLTADLVPLETIRGKAIEESCPIGPHSCPEDAAGRIARAVRDILVALGENPDREGLLETPDRVARMYLDVLGGLHEDPRIHLRKQFSADRHEGAVIVRDIRFHSMCEHHLLPFFGRAHVAYLPDGGRLTGLSKLARTVGVLARRPQLQERLTDQIADAIAEVLDPKAVMVLVEAEHMCMAMRGVRSPGSTTVTTVTRGLWQRDSAARAEILALLRG

SEQ ID NO: 3817 - protein, 200 aa, Acidothermus cellulolyticus
  misc_feature (1)..(200): tr|A0LRB9|A0LRB9_ACIC1 GTP cyclohydrolase 1 OS=Acidothe rmus cellulolyticus (strain ATCC 43068 / 11B) OX=351607 GN=folE PE=3 SV=1
MTDIDLRTGERAPGVDLARIEDAVREILLAIGEDPDRDGLRDTPARVARAYAEQFAGLRQRPEDVLSVVFDANHDEMVLVRDIEVYSTCEHHLTPFHGVAHVGYIPNARGQITGLSKIARLVDIFARRPQVQERLTVQIAEAMERILQPRGVIVVVDCEHLCMSMRGVRKPGARTVTSAVRGVFRSDERTRAEALRLITG

SEQ ID NO: 3818 - protein, 212 aa, Acidothermus cellulolyticus
  misc_feature (1)..(212): tr|A0LVH7|A0LVH7_ACIC1 GTP cyclohydrolase 1 OS=Acidothe rmus cellulolyticus (strain ATCC 43068 / 11B) OX=351607 GN=folE PE=3 SV=1
MRSQETISDVVPDTPLPDGRHPVLRVIPQPSIDLAAAERAAAAFLHALGIDLDSEVMAQTPKRMARGFAELLEPREFTLTTFPNTERYDEMVAARHIPFVSLCEHHMFPFVGFATVGYLPGDRILGLSKLARVVEHFARRPQVQERFTAQIARWLDEHLGPRGVGVIVDAEHLCMTIRGVRATGARTTTSALLGAFRDDPRVRAEFLDLAGD

SEQ ID NO: 3819 - protein, 241 aa, Acidovorax avenae
  misc_feature (1)..(241): tr|F0QCG4|F0QCG4_ACIAP GTP cyclohydrolase I OS=Acidovor ax avenae (strain ATCC 19860 / DSM 7227 / JCM 20985 / N CPPB 1011) OX=643561 GN=Acav_3548 PE=4 SV=1
MFTHLADDPDSAPPPEGAPVSAKIRERLLAARKRFHANDNIADFLEPGELEQLLDEVEAKMQGVLDSMVIDTAGDHNTQDTARRVAKMYLGEVFRGRYVKQPAITEFPNAEHLNELMIVGPITVRSACSHHFCPVIGKLWIGVLPNEHTNVIGLSKYARLVDWVMGRPQIQEEAVVQLADLIMEKTQPDGLAIVMEASHFCMSWRGVREMDSKMLNSVMRGVFLKDAALRREFLSLIPGRT

SEQ ID NO: 3820 - protein, 267 aa, Acidovorax citrulli
  misc_feature (1)..(267): tr|A1TT93|A1TT93_ACIAC GTP cyclohydrolase I OS=Acidovor ax citrulli (strain AAC00-1) OX=397945 GN=Aave_3631 PE= 4 SV=1
MWPVGAARARETLVEPGWRIADTIACMFTHLADDPNSAPPHEGAPVSAKIRERLLAARKRFHANDNIADFLEPGELEQLLDEVEAKMQGVLDSMVIDTAGDHNTQDTARRVAKMYLGEVFRGRYVKQPAITEFPNAEHLNELMIVGPITVRSACSHHFCPVIGKLWIGVLPNEHTNVIGLSKYARLVDWVMGRPQIQEEAVVQLADLIMEKTQPDGLAIVMEASHFCMSWRGVREMDSKMLNSVMRGVFLKDAALRREFLSLIPGRT

SEQ ID NO: 3821 - protein, 241 aa, Acidovorax delafieldii
  misc_feature (1)..(241): tr|C5TAV8|C5TAV8_ACIDE GTP cyclohydrolase I OS=Acidovor ax delafieldii 2AN OX=573060 GN=AcdelDRAFT_4038 PE=4 SV =1
MSSQPVADMTPIPPDEGTPVSVKIRERIAAARKRFNANDNIAEFIEPGELEQLLDEVEVKMQGVLDSMVINTAGDHNTHNTARRVAKMYLNEVFKGRYVQAPPITEFPNAEHLNELMIVGPLTVRSACSHHFCPVIGKIWIGIMPNEHTNVIGLSKYARIVDWIMGRPQIQEEAVVQLADLIMEKTQPDGLAIVMEASHFCMSWRGVRDMDSKMINSVMRGVFLKDSALRREFLSLIPGKN

SEQ ID NO: 3822 - protein, 241 aa, Acidovorax ebreus
  misc_feature (1)..(241): tr|B9ME33|B9ME33_ACIET GTP cyclohydrolase I OS=Acidovor ax ebreus (strain TPSY) OX=535289 GN=Dtpsy_0808 PE=4 SV =1
MSSEPPAPLSGAAPDEGTPVSVKIRERLNAARRRFHANDNIAEFIQPGELERLLDEVEAKMQGVLDSMVIDTAGDHNTQATARRVAKMYLNEVFKGRYVQPPAITEFPNAEHLNELMIVGPVTVRSACSHHFCPVIGKIWIGVLPNEHTNVIGLSKYARLVDWVMGRPQIQEEAVVQLADLIMEKTQPDGLAIVMEASHFCMSWRGVREMDSKMINSVMRGVFLTNPTLRREFLALIPRRS

SEQ ID NO: 3823 - protein, 241 aa, Acidovorax sp.; identical to SEQ ID NO: 3822
  misc_feature (1)..(241): tr|A1W4E6|A1W4E6_ACISJ GTP cyclohydrolase I OS=Acidovor ax sp. (strain JS42) OX=232721 GN=Ajs_0879 PE=4 SV=1

SEQ ID NO: 3824 - protein, 237 aa, Acidovorax sp.
  misc_feature (1)..(237): tr|A0A542J678|A0A542J678_9MICO GTP cyclohydrolase 1 OS= Acidovorax sp. SLBN-42 OX=2572897 GN=folE PE=3 SV=1
MTSIELADPGAGRPRLHAVAADEVADPADLADRADLADSLVLPEAAEPGGRVDRARATAAVADLLTALGRDIRSPHLAETPRRVADSFIELLTPRPFEATTFPNDEGYDELVVVAGIPFDSLCEHHMLPFSGTAHVGYVPGARLLGLSKFARVVERFARDLQVQERLTRRVAGWIEAELAPAGVGVVLEAEHLCMSVRGVQVRGSRTVTSSFTGVVRDDERTRREFLARCGLRGMME

SEQ ID NO: 3825 - protein, 305 aa, Acidovorax wautersii
  misc_feature (1)..(305): tr|A0A1I2BLL5|A0A1I2BLL5_9BURK GTP cyclohydrolase FolE2 OS=Acidovorax wautersii OX=1177982 GN=folE2 PE=3 SV=1
MNDALPDVSLTDTAPRLSPLEWVGMQGIDLPLTLAEPGYRRELHARADVAVDLPAPQVKGIHMSRLYRLLDGLSQGEALSPAGLHGVLQAMIASHHDCDSRSARLGLALDLLVRRPALVTQGLSGWKSYPVRLEASLVAGVFRCRLEVRVGYSSTCPCSAALARQLIEHAFSEAFGQQEAVPSQDVAGWLRRHASLATPHSQRSEACVSVDVAADAPTLGLLALIDGIEQAVGTPVQTAVKRADEQAFAALNGQNLMFVEDAARRIETALGGYGRPRVFVRHMESLHPHDAVAWASPHREGMVAA

SEQ ID NO: 3826 - protein, 184 aa, Acinetobacter albensis
  misc_feature (1)..(184): tr|A0A1C4GT40|A0A1C4GT40_9GAMM GTP cyclohydrolase 1 OS= Acinetobacter albensis OX=1673609 GN=folE PE=3 SV=1
MSMQQSYTNILTAVGEDLNRPGLKDTPMRAAKAFSYLTSGYSKTLEEVTNNAVFPSDNREMVLVKNIEFYSLCEHHLLPFYGRVHIAYLPEGNVLGLSKFARITEMFARRLQIQENLTQQIAEAVAEVTQARGVAVMIDSAHMCMMMRGVGKQESTTRTVSFIGDFKTNKEERREFLSALPENF

SEQ ID NO: 3827 - protein, 184 aa, Acinetobacter apis
  misc_feature (1)..(184): tr|A0A217EEZ0|A0A217EEZ0_9GAMM GTP cyclohydrolase 1 OS= Acinetobacter apis OX=1229165 GN=folE PE=3 SV=1
MSMQQSYEKILEAVGEDLERPGLKDTPIRAARAFSYLTSGYAKSLEEVTNDAVFPSDNREMVLVKNIEFYSLCEHHLLPFYGRVHIGYLPEGKVLGLSKFARITEMFARRLQIQENLTQEIALAVEQVTGARGVAVVIDSAHMCMMMRGVGKQNSTTRTVSFVGEFKAHTEARREFLSAVPESY

SEQ ID NO: 3828 - protein, 182 aa, Acinetobacter baumannii
  misc_feature (1)..(182): tr|A0A158LW24|A0A158LW24_ACIBA GTP cyclohydrolase 1 OS= Acinetobacter baumannii NIPH 190 OX=1217640 GN=folE PE= 3 SV=1
MQQSYANILTAVGEDLNRPGLKDTPVRAAKAFSYLTSGYSKTLEEVTNNAVFPSDNHEMVLVKNIEFYSLCEHHLLPFYGRVHVAYLPEGKVLGLSKFARITEMFARRLQIQENLTQQIAEAVAEVTGARGVAVVIDSAHMCMMMRGVGKQESTTRTVSFVGDFKTDKEARREFLSAVPESY

SEQ ID NO: 3829 - protein, 184 aa, Acinetobacter baumannii
  misc_feature (1)..(184): tr|A0A062FAY5|A0A062FAY5_ACIBA GTP cyclohydrolase 1 OS= Acinetobacter baumannii 754286 OX=1310668 GN=folE PE=3 SV=1
MSMQQSYANILTAVGEDLNRPGLKDTPVRAAKAFSYLTSGYSKTLEEVTNNAVFPSDNHEMVLVKNIEFYSLCEHHLLPFYGRVHVAYLPEGKVLGLSKFARITEMFARRLQIQENLTQQIAEAVAEVTGARGVAVVIDSAHMCMMMRGVGKQESTTRTVSFIGDFKTDKEARREFLSAVPESY

SEQ ID NO: 3830 - protein, 294 aa, Acinetobacter baylyi
  misc_feature (1)..(294): sp|Q6FBI2|GCH4_ACIAD GTP cyclohydrolase FolE2 OS=Acinet obacter baylyi (strain ATCC 33305 / BD413 / ADP1) OX=62 977 GN=folE2 PE=3 SV=1
MNAQLPDVSVSQLPCNLSPLNWVGMQHIDLPTVIDTANQTVNTKVDVYVNLPKSSVKGIHMSRLYHLINHLSVLNTMSIKSVLKQMIDSHQDCGTTAAKIVFKFDLLLKRDAIVSTALSGWKSYPVIIEASIINELFNIEYKLDISYSSTCPCSAALSRQIIKNGFKADFSSQNLIPSADIEAWLEQYATLATPHSQRSIATVVVQPFDYAHDINFVDLIDSIENTLKTPTQTAVKRADEQAFAKLNGENLMFVEDAARRLKMLLDQKYKFWSAQVVHQESLHPHDAIAVAISS

SEQ ID NO: 3831 - protein, 197 aa, Acinetobacter baylyi
  misc_feature (1)..(197): tr|Q6F9M5|Q6F9M5_ACIAD GTP cyclohydrolase 1 OS=Acinetob acter baylyi (strain ATCC 33305 / BD413 / ADP1) OX=6297 7 GN=folE PE=3 SV=1
MPTLFNRVKSKRLMSMQQSYANILTAVGEDLNRPGLKDTPIRAAKAFSFLTSGYGKSLEEVTNNAVFPSDNHEMVLVKNIEFYSLCEHHLLPFYGRVHIAYLPEGQVLGLSKFARITEMFARRLQIQENLTQQIAQAVEEVTKARGVAVMIDSAHMCMMMRGVGKQESTTRTVSFIGDFKTDKEARREFLSAVPESY

SEQ ID NO: 3832 - protein, 300 aa, Acinetobacter beijerinckii
  misc_feature (1)..(300): tr|N9FF93|N9FF93_9GAMM GTP cyclohydrolase FolE2 OS=Acin etobacter beijerinckii CIP 110307 OX=1217648 GN=folE2 P E=3 SV=1
MNLALPDISANSILPKAYSHCLDWVGMEKIALPVRVENTLCQSQVNAYVSLDDPLAKGIHMSRLYTRLLELSSIGNLNLMDLRSLLQDFLVSHHDLSKHAKIEIHSELYIERPALISKLSGWKSYPFVLSCQLLDEQFLAELKVEIPYSSTCPCSAALSRNIIQQRFESALNNQDIRLDQQEILDWLSSTDAIAATPHSQRSFAILNFRLDQNIQHIPLILFINQAEQALMTPVQTAVKRIDEQAFAIANGQNLMFCEDALRRLYGTFLNHKSINGFNFKVIHAESLHAHDAVAQGSWQW

SEQ ID NO: 3833 - protein, 184 aa, Acinetobacter beijerinckii
  misc_feature (1)..(184): tr|N9E5B7|N9E5B7_9GAMM GTP cyclohydrolase 1 OS=Acinetob acter beijerinckii ANC 3835 OX=1217649 GN=folE PE=3 SV= 1
MSMQQSYANILTAVGEDLNRPGLKDTPMRAAKAFSFLTSGYSKTLEEVTNSAVFPSDNHEMVLVKNIEFYSLCEHHLLPFYGRVHIAYLPEGQVLGLSKFARITEMFARRLQIQENLTQQIAEAVAEVTQARGVAVVIDSAHMCMMMRGVGKQESTTRTVSFVGDFKTDKEARREFLSAVPESY

SEQ ID NO: 3834 - protein, 184 aa, Acinetobacter bereziniae
  misc_feature (1)..(184): tr|N8XFM5|N8XFM5_ACIBZ GTP cyclohydrolase 1 OS=Acinetob acter bereziniae NIPH 3 OX=1217651 GN=folE PE=3 SV=1
MSMQQSYANILTAVGEDLDRPGLKDTPMRAAKAFSYLTSGYSKTLEEVTNNAVFPSDNDEMVLVKNIEFYSLCEHHLLPFHGRVHIAYLPSGNVLGLSKFARITEMFARRLQIQEQLTKQIADAVAEVTQARGVAVVIDSAHMCMMMRGVSKQESTTRTVSFVGDFKTDKEARREFLSAVPEAH

SEQ ID NO: 3835 - protein, 184 aa, Acinetobacter bereziniae; identical to SEQ ID NO: 3834
  misc_feature (1)..(184): tr|A0A0A8TK31|A0A0A8TK31_ACIBZ GTP cyclohydrolase 1 OS= Acinetobacter bereziniae OX=106648 GN=folE PE=3 SV=1

SEQ ID NO: 3836 - protein, 184 aa, Acinetobacter bohemicus
  misc_feature (1)..(184): tr|A0A1I6NV33|A0A1I6NV33_9GAMM GTP cyclohydrolase 1 OS= Acinetobacter bohemicus OX=1435036 GN=folE PE=3 SV=1
MSMQQSYANILTAVGEDLNRPGLKDTPMRAAKAFSYLTSGYSKTLEEVTNNAVFPSDNHEMVLVKNIEFYSLCEHHLLPFYGRVHIAYLPEGNVLGLSKFARITEMFARRLQIQEQLTQQIAEAVAEVTKARGVAVVIDSAHMCMMMRGVGKQESTTRTVSFVGDFKTNKEERREFLSAVPENY

SEQ ID NO: 3837 - protein, 184 aa, Acinetobacter bohemicus; identical to SEQ ID NO: 3836
  misc_feature (1)..(184): tr|N8QAA7|N8QAA7_9GAMM GTP cyclohydrolase 1 OS=Acinetob acter bohemicus ANC 3994 OX=1217715 GN=folE PE=3 SV=1

SEQ ID NO: 3838 - protein, 184 aa, Acinetobacter boissieri
  misc_feature (1)..(184): tr|A0A1G6IIM6|A0A1G6IIM6_9GAMM GTP cyclohydrolase 1 OS= Acinetobacter boissieri OX=1219383 GN=folE PE=3 SV=1
MSMQQSYQHILQTIGEDLERPGLKDTPIRAARAFSYLTSGYEKSLEEVTNNAVFPSDNREMVLVKNIEFYSLCEHHLLPFYGRVHIAYLPEGNVLGLSKFARITEMFARRLQIQENLTQQIAEAVESVTGARGVAVVIDSAHMCMMMRGVGKQSSTTRTVSFVGDFKENTEARREFLSAVPESY

SEQ ID NO: 3839 - protein, 289 aa, Acinetobacter boissieri
  misc_feature (1)..(289): tr|A0A1G6IBD5|A0A1G6IBD5_9GAMM GTP cyclohydrolase FolE2 OS=Acinetobacter boissieri OX=1219383 GN=folE2 PE=3 SV =1
MPLPDISTQHLPQHFSPLNWVGMEKIALPLLFNNQPILSHADIHINVPKENVKGIHMSRIFLQLQQLKNITASTIKEQLEQIITTHQNDNTNQARLILHFKLPIQQYALKTPEISGWKYYPVMVEAQLTSTQFNLDYTVEIEYSSTCPCSAALSRQIITDQFTHDFETSNQINKSDVVNWITQHGSLATPHSQRSTAAITIRQSTDLNFYQMIESIEHTLQTATQTAVKRADEQAFAQHNGQNLMFVEDAARRIGHTLNQSYSKWQVKVTHYESLHSHNAVAYLDHTIT

SEQ ID NO: 3840 - protein, 301 aa, Acinetobacter bouvetii
  misc_feature (1)..(301): tr|A0A4Q7AWS0|A0A4Q7AWS0_9GAMM GTP cyclohydrolase FolE2 OS=Acinetobacter bouvetii OX=202951 GN=folE2 PE=3 SV=1
MNALQLPDVSSEPFLNMHAYPLDWVGMENIALPIQIQNTLCASKVNAYVSLDDPQAKGIHMSRLYTRLLELHALPDLTLSKIYQALQDFLASHTELSQQARLDIQAEFNLEQPALVSALSGWKSYPFNLSCKLSEHTFEAELAIEITYSSTCPCSAALVRDLIQKSFQDAIDTKKINPQNTDEVMAWLGTTDAIVATPHSQRSFAQLRFKLAPCLQSIPIRQFISHAEQALTTPVQTAVKRVDEQAFALANGQNLMFCEDALRRLYHAFVNYSGISGFNFKVIHAESLHAHDAVAQGSWQW

SEQ ID NO: 3841 - protein, 184 aa, Acinetobacter bouvetii
  misc_feature (1)..(184): tr|N9C9L9|N9C9L9_9GAMM GTP cyclohydrolase 1 OS=Acinetob acter bouvetii DSM 14964 = CIP 107468 OX=1120925 GN=fol E PE=3 SV=1
MSMQQSYANILTAVGEDLNRPGLKDTPMRAAKAFSYLTSGYSQTLEEVTNKAVFPSDNREMVLVKNIEFYSLCEHHLLPFHGRVHIAYLPEGNVLGLSKFARITEMFARRLQIQENLTQQIAEAVAEVTGARGVAVMIDSAHMCMMMRGVGKQESTTRTVSFVGDFKTNKEERREFLSAVPESY

SEQ ID NO: 3842 - protein, 184 aa, Acinetobacter brisouii
  misc_feature (1)..(184): tr|V2UVB9|V2UVB9_9GAMM GTP cyclohydrolase 1 OS=Acinetob acter brisouii CIP 110357 OX=1341683 GN=folE PE=3 SV=1
MSMQQSYEKILTAVGEDLQRPGLKDTPVRAARAFSYLTSGYNQTLEEVTNNAVFPSENREMVLVKNIEFYSLCEHHLLPFYGRVHIAYLPEGQVLGLSKFARITEMFARRLQIQENLTQQIAEAVASVTHARGVAVVIDSAHMCMMMRGVGKQNSTTRTVSFVGQFKTDEEVRREFLRVVPESY

SEQ ID NO: 3843 - protein, 302 aa, Acinetobacter brisouii
  misc_feature (1)..(302): tr|V2UVQ3|V2UVQ3_9GAMM GTP cyclohydrolase FolE2 OS=Acin etobacter brisouii CIP 110357 OX=1341683 GN=folE2 PE=3 SV=1
MNQILPDISQTQQPNYSSPLAWVGMQGIDLPLQLEQSTGIYPILCKVNATVNLPRADIKGIHMSRLYQHCNQLQQLNILEIYQLLQKMITSHQDCGSSAAQFDCQFELLLQRHALSSPELCGWKAYPVKLHTKLENGKFRFEFGVEVSYSSTCPCSAALSRQVIHDTFVDDFQNDTELKTHQIAKWLLQNASLATPHSQRSLAQVTIRQHSITQDLKIIELIDLIEETLQTATQTAVKRIDEQTFAKRNGENLMFVEDAARRLSYALAQPYIDWSLKVDHQESLHPHNAVAYQHSEHWLTDI

SEQ ID NO: 3844 - protein, 184 aa, Acinetobacter calcoaceticus
  misc_feature (1)..(184): tr|A0A380VKA6|A0A380VKA6_ACICA GTP cyclohydrolase 1 OS= Acinetobacter calcoaceticus OX=471 GN=folE2 PE=3 SV=1
MSMQQSYANILTAVGEDLNRPGLKDTPVRAAKAFSYLTSGYSKTLEEVTNNAVFPSDNHEMVLVKNIEFYSLCEHHLLPFYGRVHVAYLPEGKVLGLSKFARITEMFARRLQIQENLTQQIAEAVAEVTGARGVAVVIDSAHMCMMMRGVGKQESTTRTVSFVGDFKTDKEARREFLSAVPESY

SEQ ID NO: 3845 - protein, 182 aa, Acinetobacter calcoaceticus
  misc_feature (1)..(182): tr|N9EHP1|N9EHP1_ACICA GTP cyclohydrolase 1 OS=Acinetob acter calcoaceticus ANC 3680 OX=1217653 GN=folE PE=3 SV =1
MQQSYANILTAVGEDLNRPGLKDTPVRAAKAFSYLTSGYSKTLEEVTNNAVFPSDNHEMVLVKNIEFYSLCEHHLLPFYGRVHIAYLPEGKVLGLSKFARITEMFARRLQIQENLTQQIAEAVAEVTGARGVAVVIDSAHMCMMMRGVGKQESTTRTVSFIGDFKTDKESRREFLSAVPESY

SEQ ID NO: 3846 - protein, 184 aa, Acinetobacter calcoaceticus; identical to SEQ ID NO: 3844
  misc_feature (1)..(184): tr|A0A2S4T164|A0A2S4T164_9GAMM GTP cyclohydrolase 1 OS= Acinetobacter calcoaceticus/baumannii complex sp. ABNIH 27 OX=2080673 GN=folE PE=3 SV=1

SEQ ID NO: 3847 - protein, 184 aa, Acinetobacter celticus
  misc_feature (1)..(184): tr|A0A1C3CWU5|A0A1C3CWU5_9GAMM GTP cyclohydrolase 1 OS= Acinetobacter celticus OX=1891224 GN=folE PE=3 SV=1
MSMQQSYANILTAVGEDLNRPGLKDTPMRAAKAFSYLTSGYSQTLEEVTNNAVFPSDNREMVLVKNIEFYSLCEHHLLPFYGRVHIAYLPEGNVLGLSKFARITEMFARRLQIQENLTQQIAEAVAEITQARGVAVMIDSAHMCMMMRGVGKQESTTRTVSFIGDFKTNKEDRREFLGALPENY

SEQ ID NO: 3848 - protein, 300 aa, Acinetobacter colistiniresistens
  misc_feature (1)..(300): tr|N9R914|N9R914_9GAMM GTP cyclohydrolase FolE2 OS=Acin etobacter colistiniresistens OX=280145 GN=folE2 PE=3 SV =1
MNLALPDISAETKLSKAYQYALDWVGMEKIALPLKIENTLCQSQVNAYVSLDDPSAKGIHMSRLYTRLLELTSIHNLNLPDLKLALMDFLKSHYGLSTHAKIEIHSELYLQRSALISQLSGWKSYPFVLSCQLLADQFEAELKVEVPYSSTCPCSAALSRNIIQQRFETALEKQEISLDHHDILNWLGGTDAIAATPHSQRSVAILHFKLNQNIKHIPLILFINQAEQSLMTPVQTAVKRINEQAFAIANGQNLMFCEDALRRLYSTFLHHQNITGFNFKVIHAESLHAHDAVAQGAWQW

SEQ ID NO: 3849 - protein, 184 aa, Acinetobacter colistiniresistens
  misc_feature (1)..(184): tr|N9R8J0|N9R8J0_9GAMM GTP cyclohydrolase 1 OS=Acinetob acter colistiniresistens OX=280145 GN=folE PE=3 SV=1
MSMQQSYANILTAVGEDLNRPGLQDTPMRAAKAFSFLTSGYSKTLEEVTNSALFPSDNHEMVLVKNIEFYSLCEHHLLPFYGRVHIAYLPEGQVLGLSKFARITEMFARRLQVQENLTQQIAEAVAKVTQARGVAVVIDSAHMCMMMRGVGKQESTTRTVSFVGDFKTDKDVRREFLSAVPENY

SEQ ID NO: 3850 - protein, 184 aa, Acinetobacter cumulans
  misc_feature (1)..(184): tr|A0A3A8GCI0|A0A3A8GCI0_9GAMM GTP cyclohydrolase 1 OS= Acinetobacter cumulans OX=2136182 GN=folE PE=3 SV=1
MSMQQSYANILTAVGEDLNRPGLKDTPMRAAKAFSYLTSGYNQTLEEVTNNAVFPSDNREMVLVKNIEFYSLCEHHLLPFYGRVHIAYLPEGNVLGLSKFARITEMFARRLQIQENLTQQIAEAVAEVTGARGVAVVIDSAHMCMMMRGVGKQESTTRTVSFVGDFKTNKEERREFLSAVPESY

SEQ ID NO: 3851 - protein, 184 aa, Acinetobacter defluvii
  misc_feature (1)..(184): tr|A0A2S2FCL7|A0A2S2FCL7_9GAMM GTP cyclohydrolase 1 OS= Acinetobacter defluvii OX=1871111 GN=folE PE=3 SV=1
MSMQQSYANILTAVGEDLNRPGLKDTPMRAAKAFSYLTSGYSKSLAEVTNNAVFPSDNDEMVLVKNIEFYSLCEHHLLPFYGRVHIAYLPSGNVLGLSKFARITEMFARRLQIQEQLTKQIADAVAEVTDARGVAVVIDSAHMCMMMRGVSKQESTTRTVSFVGDFKTDKEARREFLLAVPEAH

SEQ ID NO: 3852 - protein, 184 aa, Acinetobacter equi
  misc_feature (1)..(184): tr|A0A0N9W1U8|A0A0N9W1U8_9GAMM GTP cyclohydrolase 1 OS= Acinetobacter equi OX=1324350 GN=folE PE=3 SV=1
MSMQQSYANILTAVGEDLNRPGLKDTPMRAAKAFSYLTSGYNQSLAEVTNNAVFPSDNREMVLVKNIEFYSLCEHHLLPFYGRVHIAYLPEGNVLGLSKFARITEMFARRLQIQENLTQQIAEAVAEVTGARGVAVVIDSAHMCMMMRGVGKQESTTRTVSFIGDFKTNKEERREFLSAVPESY

SEQ ID NO: 3853 - protein, 184 aa, Acinetobacter gandensis
  misc_feature (1)..(184): tr|A0A1A7R8Y6|A0A1A7R8Y6_9GAMM GTP cyclohydrolase 1 OS= Acinetobacter gandensis OX=1443941 GN=folE PE=3 SV=1
MSMQQSYANILTAVGEDLNRPGLKDTPMRAAKAFSYLTSGYTQTLEEVTNNAVFPSDNREMVLVKNIEFYSLCEHHLLPFYGRVHIAYLPEGNVLGLSKFARITEMFARRLQIQENLTQQIAEAVSEVTGARGVAVVIDSAHMCMMMRGVGKQESTTRTVSFVGDFKTNKEERREFLSAVPESY

SEQ ID NO: 3854 - protein, 184 aa, Acinetobacter genomosp.; identical to SEQ ID NO: 3844
  misc_feature (1)..(184): tr|A0A1V2UUS5|A0A1V2UUS5_9GAMM GTP cyclohydrolase 1 OS= Acinetobacter genomosp. 33YU OX=1675530 GN=folE PE=3 SV =1

SEQ ID NO: 3855 - protein, 182 aa, Acinetobacter gerneri
  misc_feature (1)..(182): tr|N8YCL5|N8YCL5_9GAMM GTP cyclohydrolase 1 OS=Acinetob acter gerneri DSM 14967 = CIP 107464 OX=1120926 GN=folE PE=3 SV=1
MQQSYANILTAVGEDLERPGLKDTPMRAAKAFSYLTSGYSKTLEEVTNNAVFPSDNHEMVLVKNIEFYSLCEHHLLPFYGRVHIAYLPEGNVLGLSKFARITEMFARRLQIQEQLTKQIAEAVAEVTQARGVAVVIDSAHMCMMMRGVSKQESTTRTVSFIGDFKTDKDARREFLLAVPEAH

SEQ ID NO: 3856 - protein, 300 aa, Acinetobacter guillouiae
  misc_feature (1)..(300): tr|A0A077L1G8|A0A077L1G8_ACIGI GTP cyclohydrolase FolE2 OS=Acinetobacter guillouiae OX=106649 GN=folE2 PE=3 SV =1
MNLVLPDVSAESSLTRNYYYPLDWVGMEKIALPLYLENSLCQSQVNAYVSLDDVFAKGIHMSRLYTRLLKLSTIKNLALLDIKDALLDFLASHKDLSAHAKIEIHSELYIERPALVSQLSGWKSYPFVLSCQLLKDDFYAELNVEIPYSSTCPCSAALARNIIQQRFASALENQEIQLDPQEILSWLNSTDAIAATPHSQRSFAQLNFKLDQNIQYIPLILFINQAEQALMTPVQTAVKRIDEQAFAVANGQNLMFCEDALRRLYATFIHHPSILGFNFKVIHAESLHAHDAVAQGAWQW

SEQ ID NO: 3857 - protein, 184 aa, Acinetobacter guillouiae; identical to SEQ ID NO: 3834
  misc_feature (1)..(184): tr|N8WSM9|N8WSM9_ACIGI GTP cyclohydrolase 1 OS=Acinetob acter guillouiae NIPH 991 OX=1217656 GN=folE PE=3 SV=1

SEQ ID NO: 3858 - protein, 300 aa, Acinetobacter gyllenbergii
  misc_feature (1)..(300): tr|A0A1B8UFK2|A0A1B8UFK2_9GAMM GTP cyclohydrolase FolE2 OS=Acinetobacter gyllenbergii OX=134534 GN=folE2 PE=3 SV=1
MNLALPDISAESHLPKAYSYALDWVGMENIALPVRLENTLCQSQVNAYVSLDDPLAKGIHMSRLYTRLLELSSIQNINLADLELTLMDFLESHHDLSKHAKIEIHSELYIERSALISNLSGWKSYPFMLSCQLLNDRFEAELRVEIPYSSTCPCSAALARHIIQQRFESALQKQEIGLDQHEILNWLSRTDAIAATPHSQRSFAILHFKLDRNIKHIPLILFINQAEQALMTPVQTAVKRIDEQAFAIANGQNLMFCEDALRRLYGTFIHHNNIKGFNFKVIHAESLHAHDAVAQGSWQW

SEQ ID NO: 3859 - protein, 182 aa, Acinetobacter gyllenbergii
  misc_feature (1)..(182): tr|V2UX26|V2UX26_9GAMM GTP cyclohydrolase 1 OS=Acinetob acter gyllenbergii NIPH 230 OX=1217658 GN=folE PE=3 SV= 1
MQQSYANILTAVGEDLNRPGLKDTPMRAAKAFSFLTSGYSKTLEEVTNSALFPSDNHEMVLVKNIEFYSLCEHHLLPFYGRVHIAYLPEGQVLGLSKFARITEMFARRLQVQENLTQQIAEAVAQVTQARGVAVVIDSAHMCMMMRGVGKQESTTRTVSFIGDFKTDKDTRREFLSAVPESY

SEQ ID NO: 3860 - protein, 184 aa, Acinetobacter haemolyticus
  misc_feature (1)..(184): tr|D4XP56|D4XP56_ACIHA GTP cyclohydrolase 1 OS=Acinetob acter haemolyticus ATCC 19194 OX=707232 GN=folE PE=3 SV =1
MSMQQSYANILTAVGEDLTRPGLQDTPMRAAKAFSFLTSGYSKTLAEVTNSAVFPSDNHEMVLVKNIEFYSLCEHHLLPFYGRVHIAYLPEGQVLGLSKFARITEMFARRLQIQENLTQQIAEAVAEVTQARGVAVVIDSAHMCMMMRGVGKQESTTRTVSFVGDFKTDKDARREFLSAVPESY

SEQ ID NO: 3861 - protein, 184 aa, Acinetobacter haemolyticus; identical to SEQ ID NO: 3860
  misc_feature (1)..(184): tr|N9F807|N9F807_ACIHA GTP cyclohydrolase 1 OS=Acinetob acter haemolyticus NIPH 261 OX=1217986 GN=folE PE=3 SV= 1

SEQ ID NO: 3862 - protein, 300 aa, Acinetobacter halotolerans
  misc_feature (1)..(300): tr|A0A4Q6XEJ5|A0A4Q6XEJ5_9GAMM GTP cyclohydrolase FolE2 OS=Acinetobacter halotolerans OX=1752076 GN=folE2 PE=3 SV=1
MNLVLPDISAESTLPKAYSHSLDWVGMENIALPVHIENTRCPSQINAFVSLDDPFAKGIHMSRLYTRLLELTKISNLSLFDIKHVLKDFLESHKGLSEHAKIEIHSELYIERPALISNLSGWKSYPFVLSCQLLKDQFEARLKVEIPYSSTCPCSAALARNIIQQRFQTALANQEISLDQQQIVDWLNTTDAIAATPHSQRSFAILNFKLDQNIKHIPLILFINQAEQSLMTAVQTAVKRIDEQAFAVANGQNLMFCEDALRRLYSTFLNHQNIKGFNFKVIHAESLHAHDAVARGSWQW

SEQ ID NO: 3863 - protein, 184 aa, Acinetobacter halotolerans
  misc_feature (1)..(184): tr|A0A4Q6X9N9|A0A4Q6X9N9_9GAMM GTP cyclohydrolase 1 OS= Acinetobacter halotolerans OX=1752076 GN=folE PE=3 SV=1
MSMQQSYANILTAVGEDLTRPGLQDTPMRAAKAFSFLTSGYSKTLEEVTNNAVFPSDNHEMVLVKNIEFYSLCEHHLLPFYGRVHIAYLPEGQVLGLSKFARITEMFARRLQIQENLTQQIAEAVAEVTQARGVAVVIDSAHMCMMMRGVGKQESTTRTVSFVGEFKTDKDARREFLSAVPESY

SEQ ID NO: 3864 - protein, 184 aa, Acinetobacter idrijaensis
  misc_feature (1)..(184): tr|A0A098YIW9|A0A098YIW9_9GAMM GTP cyclohydrolase 1 OS= Acinetobacter idrijaensis OX=1507807 GN=folE PE=3 SV=1
MTMQQSYANILTAVGEDLNRPGLKDTPVRAAKAFSYLTSGYSQTLEEVTNQAVFPSDNREMVLVKNIEFYSLCEHHLLPFYGRVHIAYLPEGHVLGLSKFARITEMFARRLQIQENLTQQIAEAVAEVTKARGVAVMIDSAHMCMMMRGVGKQESTTRTVSFIGDFKTDKETRREFLSAVPESY

SEQ ID NO: 3865 - protein, 184 aa, Acinetobacter indicus
  misc_feature (1)..(184): tr|V2ULC5|V2ULC5_9GAMM GTP cyclohydrolase 1 OS=Acinetob acter indicus CIP 110367 OX=1341679 GN=folE PE=3 SV=1
MSMQQSYANILTAVGEDLNRPGLKDTPMRAAKAFSYLTSGYSQTLAEVTNNAVFPSDNREMVLVKNIEFYSLCEHHLLPFYGRVHIAYLPEGNVLGLSKFARITEMFARRLQIQENLTQQIAEAVAEVTKARGVAVVIDSAHMCMMMRGVGKQESTTRTVSFIGDFKTDKDARREFLSAVPESY

SEQ ID NO: 3866 - protein, 184 aa, Acinetobacter indicus; identical to SEQ ID NO: 3865
  misc_feature (1)..(184): tr|A0A0F3LTZ0|A0A0F3LTZ0_9GAMM GTP cyclohydrolase 1 OS= Acinetobacter indicus OX=756892 GN=folE PE=3 SV=1

SEQ ID NO: 3867 - protein, 184 aa, Acinetobacter johnsonii
  misc_feature (1)..(184): tr|A0A0W8GZ42|A0A0W8GZ42_ACIJO GTP cyclohydrolase 1 OS= Acinetobacter johnsonii OX=40214 GN=folE PE=3 SV=1
MSMQQSYANILTAVGEDLTRPGLLDTPMRAAKAFSYLTSGYSKSLEEVTNNAVFPSDNREMVLVKNIEFYSLCEHHLLPFYGRVHIAYLPEGNVLGLSKFARITEMFARRLQIQENLTQQIAEAVAEVTGARGVAVMIDSAHMCMMMRGVGKQESTTRTVSFIGDFKTNKEERREFLSAVPESY

SEQ ID NO: 3868 - protein, 184 aa, Acinetobacter johnsonii; identical to SEQ ID NO: 3867
  misc_feature (1)..(184): tr|N9CR06|N9CR06_ACIJO GTP cyclohydrolase 1 OS=Acinetob acter johnsonii ANC 3681 OX=1217662 GN=folE PE=3 SV=1

SEQ ID NO: 3869 - protein, 184 aa, Acinetobacter junii
  misc_feature (1)..(184): tr|D0SMH7|D0SMH7_ACIJU GTP cyclohydrolase 1 OS=Acinetob acter junii SH205 OX=575587 GN=folE PE=3 SV=1
MSMQQSYANILTAVGEDLNRPGLKDTPMRAAKAFSFLTSGYSKTLEEVTNSAVFPSDNHEMVLVKNIEFYSLCEHHLLPFYGRVHIAYLPEGQVLGLSKFARITEMFARRLQIQENLTQQIAEAVAEVTQARGVAVVIDSAHMCMMMRGVGKQESTTRTVSFVGDFKTDKDARREFLSAVPESY

SEQ ID NO: 3870 - protein, 300 aa, Acinetobacter junii
  misc_feature (1)..(300): tr|A0A4Q7AMQ7|A0A4Q7AMQ7_ACIJU GTP cyclohydrolase FolE2 OS=Acinetobacter junii OX=40215 GN=folE2 PE=3 SV=1
MNLVLPDISADSTLPKAYSHCLDWVGMEKIALPVRIENTLCQSQVNAYVSLDDPLAKGIHMSRLYTRLLELSSVGNLNLMVLKSLLQDFLESHRDLSKHAKIEIQSELYIERPALISKLSGWKSYPFVLSCQLLDGQFLAELNVEIPYSSTCPCSAALSRNIIQQRFESALNNQEIRLDQQEILDWLSSTNAIAATPHSQRSFAILNFRLDQNIQHIPLILFINQAEQALMTPVQTAVKRIDEQAFAIANGQNLMFCEDALRRLYGTFLNHKSIRGFNFKVIHAESLHAHDAVAQGSWQW

SEQ ID NO: 3871 - protein, 184 aa, Acinetobacter kookii
  misc_feature (1)..(184): tr|A0A1G6L8F2|A0A1G6L8F2_9GAMM GTP cyclohydrolase 1 OS= Acinetobacter kookii OX=1226327 GN=folE PE=3 SV=1
MSMQQSYANILTAVGEDLNRPGLKDTPMRAAKAFSYLTSGYSKTLEEVTNSAVFPSDNREMVLVKNIEFYSLCEHHLLPFYGRVHIAYLPEGQVLGLSKFARITEMFARRLQIQENLTQQIAEAVAEVTKARGVAVMIDSAHMCMMMRGVGKQESTTRTVSFVGDFKTNKEERREFLAAVPESY

SEQ ID NO: 3872 - protein, 184 aa, Acinetobacter kyonggiensis; identical to SEQ ID NO: 3836
  misc_feature (1)..(184): tr|A0A1H3G7T9|A0A1H3G7T9_9GAMM GTP cyclohydrolase 1 OS= Acinetobacter kyonggiensis OX=595670 GN=folE PE=3 SV=1

SEQ ID NO: 3873 - protein, 184 aa, Acinetobacter lactucae
  misc_feature (1)..(184): tr|A0A151YMH0|A0A151YMH0_9GAMM GTP cyclohydrolase 1 OS= Acinetobacter lactucae OX=1785128 GN=folE PE=3 SV=1
MSMQQSYANILTAVGEDLDRPGLKDTPVRAAKAFSYLTSGYSKTLEEVTNNAVFPSDNHEMVLVKNIEFYSLCEHHLLPFYGRVHVAYLPEGKVLGLSKFARITEMFARRLQIQENLTKQIAEAVAEVTEARGVAVVIDSAHMCMMMRGVGKQESTTRTVSFIGDFKTDKEARREFLSAVPESY

SEQ ID NO: 3874 - protein, 184 aa, Acinetobacter larvae
  misc_feature (1)..(184): tr|A0A1B2M0U6|A0A1B2M0U6_9GAMM GTP cyclohydrolase 1 OS= Acinetobacter larvae OX=1789224 GN=folE PE=3 SV=1
MSMQQSYANILTAVGEDLNRPGLKDTPLRAAKAFSYLTSGYTQSLAEVTNNAVFPSDNHEMVLVKNIEFYSLCEHHLLPFSGRVHIAYLPEGHVLGLSKFARITEMFARRLQIQETLTQQIAEAIAEVTQARGVAVMIDSAHMCMMMRGVSKQASTTRTVAYVGDFKTDKDVRQEFLQALPEVY

SEQ ID NO: 3875 - protein, 184 aa, Acinetobacter lwoffii
  misc_feature (1)..(184): tr|N9HE35|N9HE35_ACILW GTP cyclohydrolase 1 OS=Acinetob acter lwoffii ATCC 9957 = CIP 70.31 OX=1311804 GN=folE PE=3 SV=1
MTMQQSYANILTAVGEDLNRPGLKDTPVRAAKAFSYLTSGYSQTLEEVTNKAVFPSDNREMVLVKNIEFYSLCEHHLLPFYGRVHIAYLPEGHVLGLSKFARITEMFARRLQIQENLTQQIAEAVAEVTKARGVAVMIDSAHMCMMMRGVGKQESTTRTVSFIGDFKTDKETRREFLSAVPESY

SEQ ID NO: 3876 - protein, 184 aa, Acinetobacter lwoffii; identical to SEQ ID NO: 3875
  misc_feature (1)..(184): tr|D0SV03|D0SV03_ACILW GTP cyclohydrolase 1 OS=Acinetob acter lwoffii SH145 OX=575588 GN=folE PE=3 SV=1

SEQ ID NO: 3877 - protein, 184 aa, Acinetobacter marinus
  misc_feature (1)..(184): tr|A0A1G6IPQ4|A0A1G6IPQ4_9GAMM GTP cyclohydrolase 1 OS= Acinetobacter marinus OX=281375 GN=folE PE=3 SV=1
MSMQQYYAKILTEIGEDLARPGLQDTPIRAAKAFSFLTSGYQQKLEDVINKAVFPADNREMVLVKNIEFYSLCEHHLLPFYGRVHIAYLPEGQVLGLSKFARITEMFARRLQIQENLTKQIAEAVQEATGARGVAVMIDSAHMCMVMRGVGKQHSTTRTVSYLGEMKDNQQARQEFLSAVPEVF

SEQ ID NO: 3878 - protein, 290 aa, Acinetobacter nectaris
  misc_feature (1)..(290): tr|V2TGG0|V2TGG0_9GAMM GTP cyclohydrolase FolE2 OS=Acin etobacter nectaris CIP 110549 OX=1392540 GN=folE2 PE=3 SV=1
MPLPDISKDNHAQHTLPLTWVGMEKIALPLTYKSYPVECFADIHINLPKADAKGIHMSRLFLELQELKEIQHTKIQTILEKILKTHEDCHATQVHLKLTFNLPIQRNALITRNISGWKYYKVEMDIQLNKDQISFNSTIDIDYSSTCPCSAALSRQLITDQFHQDFIGHPQVSLDQVAIWLQKNASVATPHSQRSIASITVSHQDIDFLAFINLIENTLQTATQTAVKRADEQAFSKRNGGNLMFVEDAARRIGNVLMQNHYKTWHIKVTHQESLHSHNAVAYLDHATVT

SEQ ID NO: 3879 - protein, 184 aa, Acinetobacter nectaris
  misc_feature (1)..(184): tr|V2TU23|V2TU23_9GAMM GTP cyclohydrolase 1 OS=Acinetob acter nectaris CIP 110549 OX=1392540 GN=folE PE=3 SV=1
MSMQQSYENILEAVGEDLERPGLKDTPLRAAKAFSYLTSGYNKTLEEVTNDAVFPSDNREMVLVKNIEFYSLCEHHLLPFYGRVHIAYLPEGHVLGLSKFARITEMFARRLQIQENLTQQIAEAIENITGARGVAVVIDSAHMCMMMRGVGKQSSTTRTVSFVGEFKTNTETRREFLSAVPESY

SEQ ID NO: 3880 - protein, 184 aa, Acinetobacter nosocomialis; identical to SEQ ID NO: 3844
  misc_feature (1)..(184): tr|A0A1Y5NK56|A0A1Y5NK56_ACINO GTP cyclohydrolase 1 OS= Acinetobacter nosocomialis P020 OX=1285584 GN=folE PE=3 SV=1

SEQ ID NO: 3881 - protein, 182 aa, Acinetobacter nosocomialis; identical to SEQ ID NO: 3828
  misc_feature (1)..(182): tr|A0A0E2GC59|A0A0E2GC59_ACINO GTP cyclohydrolase 1 OS= Acinetobacter nosocomialis NIPH 386 OX=1217985 GN=folE PE=3 SV=1

SEQ ID NO: 3882 - protein, 184 aa, Acinetobacter oleivorans; identical to SEQ ID NO: 3844
  misc_feature (1)..(184): tr|A0A2T5Q7N8|A0A2T5Q7N8_9GAMM GTP cyclohydrolase 1 OS= Acinetobacter oleivorans OX=1148157 GN=folE PE=3 SV=1

SEQ ID NO: 3883 - protein, 300 aa, Acinetobacter oleivorans
  misc_feature (1)..(300): tr|D8JM39|D8JM39_ACISD GTP cyclohydrolase FolE2 OS=Acin etobacter oleivorans (strain JCM 16667 / KCTC 23045 / D R1) OX=436717 GN=folE2 PE=3 SV=1
MNLVLPDISAEPTLPNAYSHRLDWVGMENIALPVRIENTLCPSHINAYVSLDDPLAKGIHMSRLYTRLLELTSLENINMPDLKLVLEDFLDSHQNLSQHAKIEIHSKLYIERPALVSKLSGWKSYPFVLSGQLSNDQFEAELKVEIPYSSTCPCSAALSRNIIQQRFESALQNQAIRLDQQDIMNWLNTTDAIAATPHSQRSFALLQFKLDQNLQDIPLIEFINQAELALMTPVQTAVKRIDEQAFAVANGQNLMFCEDALRRLYGSFIHHKNIHGFKFKVTHAESLHAHDAVAQGTWQW

SEQ ID NO: 3884 - protein, 184 aa, Acinetobacter parvus
  misc_feature (1)..(184): tr|N8RKR0|N8RKR0_9GAMM GTP cyclohydrolase 1 OS=Acinetob acter parvus NIPH 1103 OX=1217671 GN=folE PE=3 SV=1
MSMQQSYANILTAVGEDLNRPGLKDTPMRAAKAFSFLTSGYSKTLEEVTNSAVFPSDNHEMVLVKNIEFYSLCEHHLLPFYGRVHIAYLPEGQVLGLSKFARITEMFARRLQIQENLTQQIAEAVAEVTQARGVAVMIDSAHMCMMMRGVGKQESTTRTVSFTGDFKTDKEARREFLSAVPESY

SEQ ID NO: 3885 - protein, 184 aa, Acinetobacter parvus
  misc_feature (1)..(184): tr|N8QDU8|N8QDU8_9GAMM GTP cyclohydrolase 1 OS=Acinetob acter parvus DSM 16617 = CIP 108168 OX=981333 GN=folE P E=3 SV=1
MSMQQSYANILTAVGEDLNRPGLKDTPMRAAKAFSFLTSGYSKTLEEVTNSAVFPSDNHEMVLVKNIEFYSLCEHHLLPFYGRVHIAYLPEGQVLGLSKFARITEMFARRLQIQENLTQQIAEAVAEVTQARGVAVVIDSAHMCMMMRGVGKQESTTRTVSFIGDFKTDKETRREFLSAVPESY

SEQ ID NO: 3886 - protein, 184 aa, Acinetobacter piscicola
  misc_feature (1)..(184): tr|A0A4Q4H3C8|A0A4Q4H3C8_9GAMM GTP cyclohydrolase 1 OS= Acinetobacter piscicola OX=2006115 GN=folE PE=3 SV=1
MSMQQSYANILTAVGEDLDRPGLKDTPMRAAKAFSYLTSGYSKTLEEVTNNAVFPSDNDEMVLVKNIEFYSLCEHHLLPFHGRVHIAYLPSGNVLGLSKFARITEMFARRLQIQEQLTKQIADAVAEVTNARGVAVVIDSAHMCMMMRGVSKQESTTRTVSFVGDFKTDKEARREFLLAVPEAH

SEQ ID NO: 3887 - protein, 301 aa, Acinetobacter piscicola
  misc_feature (1)..(301): tr|A0A4Q4GT87|A0A4Q4GT87_9GAMM GTP cyclohydrolase FolE2 OS=Acinetobacter piscicola OX=2006115 GN=folE2 PE=3 SV =1
MNALQLPDVSSEPFLNMHAYPLDWVGMENIALPIHIQNTLCASKVNAYVSLDDPQAKGIHMSRLYTRLLELHALPDLTLSKIYQVLQDFLASHTELSQQARLDIQAEFNLEQPALVSALSGWKSYPFSLSCKLSEHTFEAELAIEITYSSTCPCSAALARDLIQKSFQDAIDTKKINPQNTDEIMAWLGTTDAIVATPHSQRSFAQLRFNLDPCLQSIPIRQFISHAEKALTTPVQTAVKRVDEQAFALANGQNLMFCEDALRRLYHAFVNYSGISGFNFKVIHAESLHAHDAVAQGSWQW

SEQ ID NO: 3888 - protein, 184 aa, Acinetobacter pittii
  misc_feature (1)..(184): tr|R8YP88|R8YP88_ACIPI GTP cyclohydrolase 1 OS=Acinetob acter pittii ANC 4050 OX=1217691 GN=folE PE=3 SV=1
MSMQQSYANILTAVGEDLDRPGLKDTPVRAAKAFSYLTSGYSKTLEEVTNNAVFPSDNHEMVLVKNIEFYSLCEHHLLPFYGRVHVAYLPEGKVLGLSKFARITEMFARRLQIQENLTQQIAEAVAEVTGARGVAVVIDSAHMCMMMRGVGKQESTTRTVSFIGDFKTDKEARREFLSAVPESY

SEQ ID NO: 3889 - protein, 184 aa, Acinetobacter pittii
  misc_feature (1)..(184): tr|C0LMI8|C0LMI8_ACIPI GTP cyclohydrolase 1 OS=Acinetob acter pittii OX=48296 GN=folE PE=3 SV=1
MSMQQSYANILTAVGEDLDRPGLKDTPVRAAKAFSYLTSGYSKTLEEVTNNAVFPSDNHEMVLVKNIEFYSLCEHHLLPFYGRVHVAYLPEGKVLGLSKFARITEMFARRLQIQENLTQQIAEAVAEVTGARGVAVVIDSAHMCMMMRGVGKQESTTRTVSFVGDFKTDKEARREFLSAVPESY

SEQ ID NO: 3890 - protein, 184 aa, Acinetobacter populi
  misc_feature (1)..(184): tr|A0A1Z9YUN3|A0A1Z9YUN3_9GAMM GTP cyclohydrolase 1 OS= Acinetobacter populi OX=1582270 GN=folE PE=3 SV=1
MSMQQSYSDILTAIGEDLDRPGLKDTPIRAAKAFAFLTSGYQKDLKEVTNDAVFPSENREMVLVKNIEFYSLCEHHLLPFYGRVHIGYLPEGRVLGLSKFARITEMFARRLQIQENLTQQIAEAIVEVTGARGVAVVIDSAHMCMMMRGVGKQQSTTRTVCFLGELKSNEQARREFLNAVPESY

SEQ ID NO: 3891 - protein, 184 aa, Acinetobacter pragensis
  misc_feature (1)..(184): tr|A0A151Y3Q3|A0A151Y3Q3_9GAMM GTP cyclohydrolase 1 OS= Acinetobacter pragensis OX=1806892 GN=folE PE=3 SV=1
MSMQQSYANILTAVGEDLNRPGLKDTPMRAAKAFSYLTSGYSQTLEEVTNKAVFPSDNREMVLVKNIEFYSLCEHHLLPFHGRVHIAYLPEGNVLGLSKFARITEMFARRLQIQENLTQQIAEAVAEVTGARGVAVMIDSAHMCMMMRGVGKQESTTRTVSFVGDFKTNKEERREFLSAAPESY

SEQ ID NO: 3892 - protein, 301 aa, Acinetobacter pragensis
  misc_feature (1)..(301): tr|A0A151Y089|A0A151Y089_9GAMM GTP cyclohydrolase FolE2 OS=Acinetobacter pragensis OX=1806892 GN=folE2 PE=3 SV =1
MNALQLPDVSSEPFLNMHAYPLDWVGMENIALPIQIQNTLCASKVNAYVSLDDPQAKGIHMSRLYTRLLELHALPDLTLSKIYQALQDFLASHTELSQQARLDIQAEFNLEQPALVSALSGWKSYPFNLSCKLSEHTFEAELAIEITYSSTCPCSAALARDLIQKSFQDAIDTKKINPQNTDEVMAWLGTTDAIVATPHSQRSFAQLRFKLAPCLQSIPIRQFISHAEQALTTPVQTAVKRVDEQAFALANGQNLMFCEDALRRLYHAFVNYSGISGFNFKVIHAESLHAHDAVAQGSWQW

SEQ ID NO: 3893 - protein, 300 aa, Acinetobacter proteolyticus
  misc_feature (1)..(300): tr|A0A2N0W983|A0A2N0W983_9GAMM GTP cyclohydrolase FolE2 OS=Acinetobacter proteolyticus OX=1776741 GN=folE2 PE= 3 SV=1
MNSALPDISAESKLAKAFGHSLDWVGMEKIALPVTIENTRCQSQVNAYVSLDDPLAKGIHMSRLYTRLLELTTIKNINLADLKLTLMDFLTSHHDLSKHARIEIHSELYIERPALISKLSGWKSYPFVLSCQLLNDQFDAELKVEIPYSSTCPCSAALSRNIIQQRFESALQKQEIRLDQHDIMNWLSGTDAIAATPHSQRSFAILHFKLDQNIKHIPLILFINQAEQALMTPVQTAVKRIDEQAFAIANGQNLMFCEDALRRLYSTFIHHNSIKAFNFKVIHAESLHAHDAVAQGSWQW

SEQ ID NO: 3894 - protein, 184 aa, Acinetobacter proteolyticus
  misc_feature (1)..(184): tr|A0A1E7R9Z2|A0A1E7R9Z2_9GAMM GTP cyclohydrolase 1 OS= Acinetobacter proteolyticus OX=1776741 GN=folE PE=3 SV= 1
MSMQQSYANILTAVGEDLNRPGLQDTPMRAAKAFSFLTSGYSKTLEEVTNSALFPSDNHEMVLVKNIEFYSLCEHHLLPFYGRVHIAYLPEGQVLGLSKFARITEMFARRLQVQENLTQQIAEAVAQVTQARGVAVVIDSAHMCMMMRGVGKQESTTRTVSFIGDFKTDKDTRREFLSAVPESY

SEQ ID NO: 3895 - protein, 184 aa, Acinetobacter puyangensis
  misc_feature (1)..(184): tr|A0A240EC24|A0A240EC24_9GAMM GTP cyclohydrolase 1 OS= Acinetobacter puyangensis OX=1096779 GN=folE PE=3 SV=1
MSMQQSYSDILTAIGEDLDRPGLKDTPIRAAKAFTFLTSGYQKDLKEVTNDAVFPSENREMVLVKNIEFYSLCEHHLLPFYGRVHIGYLPEGQVLGLSKFARITEMFARRLQIQENLTQQIAEAIVEVTGARGAAVVIDSAHMCMMMRGVGKQQSTTRTVCFLGELKNNEQARREFLSAVPESY

SEQ ID NO: 3896 - protein, 184 aa, Acinetobacter qingfengensis
  misc_feature (1)..(184): tr|A0A1E7RCG4|A0A1E7RCG4_9GAMM GTP cyclohydrolase 1 OS= Acinetobacter qingfengensis OX=1262585 GN=folE PE=3 SV= 1
MSMQQSYSDILTAIGEDLERPGLKDTPIRAAKAMAYLTSGYQKSLIEVTNDAVFPSDNREMVLVKNIEFYSLCEHHLLPFYGRVHIAYLPEGNVLGLSKFARITEMFARRLQIQENLTQQIAEAIVEVTGARGAAVVIDSAHMCMMMRGVGKQHSTTRTVCFLGEMKDNEQARREFLNAVPENY

SEQ ID NO: 3897 - protein, 184 aa, Acinetobacter radioresistens
  misc_feature (1)..(184): tr|A0A3F3H2I1|A0A3F3H2I1_ACIRA GTP cyclohydrolase 1 OS= Acinetobacter radioresistens NIPH 2130 OX=1217674 GN=fo lE PE=3 SV=1
MSMQQSYANILTAVGEDLNRPGLKDTPMRAAKAFSYLTSGYSKTLEEVTNNAVFPSDNREMVLVKNIEFYSLCEHHLLPFYGRVHIAYLPEGNVLGLSKFARITEMFARRLQIQENLTQQIAEAVAEVTQARGVAVMIDSAHMCMMMRGVGKQESTTRTVSFIGDFKTDKEARREFLSAVPESY

SEQ ID NO: 3898 - protein, 184 aa, Acinetobacter radioresistens; identical to SEQ ID NO: 3897
  misc_feature (1)..(184): tr|A0A2T1J3K1|A0A2T1J3K1_ACIRA GTP cyclohydrolase 1 OS= Acinetobacter radioresistens OX=40216 GN=folE PE=3 SV=1

SEQ ID NO: 3899 - protein, 295 aa, Acinetobacter rudis
  misc_feature (1)..(295): tr|S3NWN3|S3NWN3_9GAMM GTP cyclohydrolase 1 OS=Acinetob acter rudis CIP 110305 OX=421052 GN=folE PE=3 SV=1
MIEQSEFNLVLEKLADNLKATWSNKTISLYPAHFRLAAVINMLSLLGCKVKVATDINDADLILSFEDSDLGHLSLATKLATIHDLPVAVLPIQEECTLPWEVASDSFVELVSPVISNLLEVIADDPEREGLIETPLRVAKAWKTWVSGYEQDPAEILKVFEDGAEGCDEMVIVKDIPIYSKCEHHLADIFGTATIAYIPNGKVVGLSKLSRLAELYARRLQVQERMTNQIADALETHLGAKGVAVLIRARHMCMESRGLCQQGHHTITMAVRGLLLTDLKARGEFMHLANSLATA

SEQ ID NO: 3900 - protein, 301 aa, Acinetobacter rudis
  misc_feature (1)..(301): tr|S3N633|S3N633_9GAMM GTP cyclohydrolase FolE2 OS=Acin etobacter rudis CIP 110305 OX=421052 GN=folE2 PE=3 SV=1
MTHTLLPDISTQSSSLTPPYPLNWVGMENITLPIYIQNIRYISQANAYVSLDDPQAKGIHMSRLYTRLLDICKIEDLTLDHIQQVLQDFLTSHQGLSSHAKIELQGNFHLEQPALISDLSGWKSYPFHLSAELKAQQFKASFAIEIGYSSTCPCSAALARDLIQKRFEDAVSLGKLKLNDVNQISTWLGTTDAIVATPHSQRSTAQLKFNLSPSMKSIPIQQFIQHAERALATPVQTAVKRVDEQAFALANGQNLMFCEDALRRLYHAFIDYPEITAFDFKVIHAESLHAHDAVAQGSWPC

SEQ ID NO: 3901 - protein, 184 aa, Acinetobacter schindleri
  misc_feature (1)..(184): tr|N8XWZ2|N8XWZ2_9GAMM GTP cyclohydrolase 1 OS=Acinetob acter schindleri NIPH 900 OX=1217675 GN=folE PE=3 SV=1
MTMQQSYANILTAVGEDLNRPGLKDTPVRAAKAFSYLTSGYSQTLEEVTNNAVFPSDNHEMVLVKNIEFYSLCEHHLLPFYGRVHIAYLPEGRVLGLSKFARITEMFARRLQIQENLTQQIAEAVAEVTSARGVAVVIDSAHMCMMMRGVGKQESTTRTVSFVGDFKTNKEERREFLSAVPEAY

SEQ ID NO: 3902 - protein, 184 aa, Acinetobacter schindleri
  misc_feature (1)..(184): tr|A0A1P8PIN2|A0A1P8PIN2_9GAMM GTP cyclohydrolase 1 OS= Acinetobacter schindleri OX=108981 GN=folE PE=3 SV=1
MTMQQSYANILTAVGEDLNRPGLKDTPVRAAKAFSYLTSGYSQTLEEVTNNAVFPSDNHEMVLVKNIEFYSLCEHHLLPFYGRVHIAYLPEGRVLGLSKFARITEMFARRLQIQENLTQQIAEAVAEVTGARGVAVVIDSAHMCMMMRGVGKQESTTRTVSFVGDFKTNKEERREFLSAVPEAY

SEQ ID NO: 3903 - protein, 184 aa, Acinetobacter seifertii; identical to SEQ ID NO: 3844
  misc_feature (1)..(184): tr|A0A1C2YLJ1|A0A1C2YLJ1_9GAMM GTP cyclohydrolase 1 OS= Acinetobacter seifertii OX=1530123 GN=folE PE=3 SV=1

SEQ ID NO: 3904 - protein, 300 aa, Acinetobacter seifertii
  misc_feature (1)..(300): tr|A0A2M8MFD4|A0A2M8MFD4_9GAMM GTP cyclohydrolase FolE2 OS=Acinetobacter seifertii OX=1530123 GN=folE2 PE=3 SV =1
MNLDLPDISAEPNLPNAYSHRLDWVGMENIALPIRIENTLCSSHVNAYVSLDDPLAKGIHMSRLYTRLLELTSLENINMLDLKLVLEDFLESHQDLSQHAKIEIHSSLYIERPALVSKLSGWKSYPFVLSCQLSHDQFEAELKVEIPYSSTCPCSAALSRNIIQQRFESALQNQEIRLNPQDIIEWLNTTDAIAATPHSQRSFALLQFKLNQDFHEIPLIEFINQAELALMTPVQTAVKRVDEQAFAVANGQNLMFCEDALRRLYGSFIHHKYIHGFKFKVTHAESLHAHDAVAQGSWQW

SEQ ID NO: 3905 - protein, 294 aa, Acinetobacter soli
  misc_feature (1)..(294): tr|A0A1P8EGQ2|A0A1P8EGQ2_9GAMM GTP cyclohydrolase FolE2 OS=Acinetobacter soli OX=487316 GN=folE2 PE=3 SV=1
MNSTLPDVCVSQLPNDLIALKWVGMEGIDLPLSIQQFYYPLSAKVDIYVNLPKSDIKGIHMSRLYRLLNELHDLDASVIHSLLQDIISSHQDCGSDAAKIVLKFDLMLSRSALVSADLNGWKSYPVCIEAELINHKFQINYAVDVSYSSTCPCSAALSRQLIAQTFELQFKDTHTLPKSDVKQWLEEHATYATPHSQRSIAQIKIETDDAKQLINLTELIDKVEQALKTPTQTAVKRADEQAFAQLNGQNLMFVEDAARRLSSELDKTSLKWSIKVIHQESLHAHDAVAISMSS

SEQ ID NO: 3906 - protein, 197 aa, Acinetobacter soli
  misc_feature (1)..(197): tr|A0A1P8EFC7|A0A1P8EFC7_9GAMM GTP cyclohydrolase 1 OS= Acinetobacter soli OX=487316 GN=folE PE=3 SV=1
MPSLFSKVKSKRLMSMQQSYANILTAVGEDLNRPGLKDTPIRAAKAFSFLTSGYGKSLEEVTNNAVFPSDNHEMVLVKNIEFYSLCEHHLLPFYGRVHIAYLPEGQVLGLSKFARITEMFARRLQIQENLTQQIAQAVEEVTKARGVAVMIDSAHMCMMMRGVGKQESTTRTVSFIGDFKTDKEARREFLSAVPESY

SEQ ID NO: 3907 - protein, 184 aa, Acinetobacter sp.
  misc_feature (1)..(184): tr|A0A2H9UNY0|A0A2H9UNY0_9GAMM GTP cyclohydrolase 1 OS= Acinetobacter sp. ANC 5347 OX=2053290 GN=folE PE=3 SV=1
MTMQQSYANILTAVGEDLNRPGLKDTPVRAAKAFSYLTSGYSQTLEEVTNKAVFPSDNREMVLVKNIEFYSLCEHHLLPFYGRVHIAYLPEGHVLGLSKFARITEMFARRLQIQENLTQQIAEAVAEITKARGVAVMIDSAHMCMMMRGVGKQESTTRTVSFIGDFKTDKETRREFLSAVPESY

SEQ ID NO: 3908 - protein, 300 aa, Acinetobacter sp.; identical to SEQ ID NO: 3862
  misc_feature (1)..(300): tr|A0A3L9M543|A0A3L9M543_9GAMM GTP cyclohydrolase FolE2 OS=Acinetobacter sp. 2JN-4 OX=2479844 GN=folE2 PE=3 SV =1

SEQ ID NO: 3909 - protein, 184 aa, Acinetobacter tandoii
  misc_feature (1)..(184): tr|A0A515BDE1|A0A515BDE1_9GAMM GTP cyclohydrolase 1 OS= Acinetobacter tandoii OX=202954 GN=folE PE=3 SV=1
MSMQQSYANILTAVGEDLNRPGLVDTPVRAAKAFSYLTSGYSKTLEEVTNKAVFPSDNREMVLVKNIEFYSLCEHHLLPFYGRVHIAYLPEGHVLGLSKFARITEMFARRLQIQENLTQQIAEAVAEVTQARGVAVVIDSAHMCMMMRGVGKQESTTRTVSFVGEFKTDKESRREFLSAVPESY

SEQ ID NO: 3910 - protein, 184 aa, Acinetobacter tandoii
  misc_feature (1)..(184): tr|R9AXR2|R9AXR2_9GAMM GTP cyclohydrolase 1 OS=Acinetob acter tandoii DSM 14970 = CIP 107469 OX=1120927 GN=folE PE=3 SV=1
MSMQQSYANILTAVGEDLNRPGLVDTPVRAAKAFSYLTSGYSKTLEEVTNKAVFPSDNREMVLVKNIEFYSLCEHHLLPFYGRVHIAYLPEGHVLGLSKFARITEMFARRLQIQENLTQQIAEAVAEVTQARGVAVVIDSAHMCMMMRGVGKQESTTRTVSFIGEFKTDKESRREFLSAVPESY

SEQ ID NO: 3911 - protein, 184 aa, Acinetobacter tjernbergiae; identical to SEQ ID NO: 3869
  misc_feature (1)..(184): tr|V2W2G2|V2W2G2_9GAMM GTP cyclohydrolase 1 OS=Acinetob acter tjernbergiae DSM 14971 = CIP 107465 OX=1120928 GN =folE PE=3 SV=1

SEQ ID NO: 3912 - protein, 184 aa, Acinetobacter towneri
  misc_feature (1)..(184): tr|N9BAL1|N9BAL1_9GAMM GTP cyclohydrolase 1 OS=Acinetob acter towneri DSM 14962 = CIP 107472 OX=1120929 GN=folE PE=3 SV=1
MSMQQSYANILTAVGEDLNRPGLKDTPMRAAKAFSYLTSGYSQTLAEVTNNAVFPSDNREMVLVKNIEFYSLCEHHLLPFYGRVHIAYLPEGNVLGLSKFARITEMFARRLQIQENLTQQIAEAVAEVTKARGVAVVIDSAHMCMMMRGVGKQESTTRTVSFVGDFKTDKEARREFLSAVPESF

SEQ ID NO: 3913 - protein, 184 aa, Acinetobacter towneri; identical to SEQ ID NO: 3912
  misc_feature (1)..(184): tr|A0A1E8E1W5|A0A1E8E1W5_9GAMM GTP cyclohydrolase 1 OS= Acinetobacter towneri OX=202956 GN=folE PE=3 SV=1

SEQ ID NO: 3914 - protein, 184 aa, Acinetobacter ursingii
  misc_feature (1)..(184): tr|N9DAE7|N9DAE7_9GAMM GTP cyclohydrolase 1 OS=Acinetob acter ursingii ANC 3649 OX=1257043 GN=folE PE=3 SV=1
MSMQQSYANILTAVGEDLNRPGLKDTPIRAAKAFSFLTSGYGKTLEEVTNSAVFPSDNHEMVLVKNIEFYSLCEHHLLPFYGRVHIAYLPEGKVLGLSKFARITEMFARRLQIQENLTQQIAEAVLEVTQARGVAVMIDSAHMCMMMRGVGKQESTTRTVSFLGDFKTDKEVRREFLSAVPESY

SEQ ID NO: 3915 - protein, 184 aa, Acinetobacter ursingii; identical to SEQ ID NO: 3914
  misc_feature (1)..(184): tr|N9S9Y8|N9S9Y8_9GAMM GTP cyclohydrolase 1 OS=Acinetob acter ursingii NIPH 706 OX=1217716 GN=folE PE=3 SV=1

SEQ ID NO: 3916 - protein, 184 aa, Acinetobacter variabilis
  misc_feature (1)..(184): tr|N9MLR6|N9MLR6_9GAMM GTP cyclohydrolase 1 OS=Acinetob acter variabilis OX=70346 GN=folE PE=3 SV=1
MTMQQSYANILTAVGEDLNRPGLKDTPVRAAKAFSYLTSGYSQTLEEVTNSAVFPSDNREMVLVKNIEFYSLCEHHLLPFYGRVHIAYLPEGKVLGLSKFARITEMFARRLQIQENLTQQIAEAVAEVTNARGVAVMIDSAHMCMMMRGVGKQESTTRTVSFIGDFKTDKEVRREFLGAVPESY

SEQ ID NO: 3917 - protein, 184 aa, Acinetobacter venetianus
  misc_feature (1)..(184): tr|N8YIX1|N8YIX1_ACIVR GTP cyclohydrolase 1 OS=Acinetob acter venetianus (strain ATCC 31012 / CIP 110063 / RAG- 1) OX=1191460 GN=folE PE=3 SV=1
MSMQQSYANILTAVGEDLNRPGLKDTPMRAAKAFSFLTSGYSKTLEEVTNSAVFPSDNHEMVLVKNIEFYSLCEHHLLPFYGRVHIAYLPEGQVLGLSKFARITEMFARRLQIQENLTQQIAEAVADVTKARGVAVVIDSAHMCMMMRGVGKQESTTRTVSFVGDFKTDKDARREFLSAVPESY

SEQ ID NO: 3918 - protein, 252 aa, Acinetobacter venetianus
  misc_feature (1)..(252): tr|A0A150HZE4|A0A150HZE4_9GAMM Putative GTP cyclohydrol ase 1 type 2 OS=Acinetobacter venetianus OX=52133 GN=AV ENLUH13518_00326 PE=4 SV=1
MANLHDIVQWCNQTLKANEFKDYAPNGLQIEGKAEVNKIVCAVTASEDAIDAAIAEKADALLVHHGYFWKGEAYPITGMRGNRIKKLIQNNISLIAYHLPLDAHPSLGNNVAIADLIGLQNLEALDPSEKHPIGNIAYLDQPLSPEQFKAKLQNIFDFGIIHLPCNKTLIQKVGFCTGGAQDFIAKAASENCDAYISGEVSERTFYEAKELGVHYFACGHHATERYGVQRLADALANQFMIEAVYLELNNPI

SEQ ID NO: 3919 - protein, 184 aa, Acinetobacter wuhouensis
  misc_feature (1)..(184): tr|A0A3G2T5G5|A0A3G2T5G5_9GAMM GTP cyclohydrolase 1 OS= Acinetobacter wuhouensis OX=1879050 GN=folE PE=3 SV=1
MSMQQSYANILTAVGEDLDRPGLKDTPMRAAKAFSYLTSGYSKTLEEVTNNAVFPSDNDEMVLVKNIEFYSLCEHHLLPFHGRVHIAYLPSGNVLGLSKFARITEMFARRLQIQEQLTKQIADAVAEVTDARGVAVVIDSAHMCMMMRGVSKQESTTRTVSFVGDFKTDKEARREFLSAVPEAH

SEQ ID NO: 3920 - protein, 184 aa, Acinetobacter wuhouensis
  misc_feature (1)..(184): tr|A0A385C361|A0A385C361_9GAMM GTP cyclohydrolase 1 OS= Acinetobacter wuhouensis OX=1879050 GN=folE PE=3 SV=1
MSMQQSYANILTAVGEDLDRPGLKDTPMRAAKAFSYLTSGYSKTLEEVTNNAVFPSDNDEMVLVKNIEFYSLCEHHLLPFHGRVHIAYLPSGNVLGLSKFARITEMFARRLQIQEQLTKQIADAVAEVTNARGVAVVIDSAHMCMMMRGVSKQESTTRTVSFVGDFKTDKEARREFLSAVPEAH

SEQ ID NO: 3921 - protein, 195 aa, Actibacterium atlanticum
  misc_feature (1)..(195): tr|A0A058ZI19|A0A058ZI19_9RHOB GTP cyclohydrolase 1 OS= Actibacterium atlanticum OX=1461693 GN=folE PE=3 SV=1
MNALESKVLSSQDEIEAAIETLLKALGEDPAREGLRDTPARVARMYREVFRGLHEDPLKHLETQFSADGHEELVIVKDITFFSMCEHHLLPFFGKAHIAYLPDGGRLAGLSKLARVTQTIAARPQLQERMSAQIADALEQALGARGVMVKLEAEHMCMAMRGARADGSKTVTLVTRGELSDNPERRAETLKLLQD

SEQ ID NO: 3922 - protein, 366 aa, Actibacterium mucosum
  misc_feature (1)..(366): tr|A0A037ZDI8|A0A037ZDI8_9RHOB GTP cyclohydrolase FolE2 OS=Actibacterium mucosum KCTC 23349 OX=1454373 GN=folE 2 PE=3 SV=1
MTVQKPAKGKEDLDDMRAALARLRDWAAHASPEELAAVDPAVSRLVPGNALDNRPPMRRDYPQDFQADAAYRATLPDLQNGPESLIRGARKALQHVGISNFRLPIRYHTRDNGDLTLETSVTGTVSLDADRKGINMSRIMRSFYAHSERAFSFEVISTALDDYQRDLDSFDARIMMRFSFPVRRPSLRSGLSGFQYYDIALELSEHAGQRRKIMHLDYVYSSTCPCSLELSEHARAERGQLATPHSQRSVARISVAMKDDACRMWFEDLIDICRAAVPTETQVMVKREDEQAFAELNAANPIFVEDAVRLFAEGLAADDRIGDFRVVASHQESLHSHDAVSVVVEGDTFAQQSLDPQLFASLIHHG

SEQ ID NO: 3923 - protein, 200 aa, Actinoallomurus bryophytorum
  misc_feature (1)..(200): tr|A0A543BTF9|A0A543BTF9_9ACTN GTP cyclohydrolase 1 OS= Actinoallomurus bryophytorum OX=1490222 GN=folE PE=3 SV =1
MPVRSTPALRVVGTDGGIDLVEAERAAGEFLRALGVSTESESVRGTPGRMARAYAELFSPRAFDLTTFPNDEGYDELVLARDIPLRSVCEHHLLPFVGTIHIGYLPAERILGLSKLARVAEHFSYRPQVQERLTKQIADWLAEQLAPRGVGVVVEAEHTCMTLRGVQATGSRTVTSTLLGTLREDPRSRAEFFALTGVGP

SEQ ID NO: 3924 - protein, 198 aa, Actinoallomurus bryophytorum
  misc_feature (1)..(198): tr|A0A543CIK4|A0A543CIK4_9ACTN GTP cyclohydrolase 1 OS= Actinoallomurus bryophytorum OX=1490222 GN=folE PE=3 SV =1
MNPAPESHGPPIDQARVEKAVREILIAVGEDPDRDGLVDTPARVARAYAEQLAGMRQRPEDVLNTVFDAGHDEMVIVKDIEVYSLCEHHLVPFHGVAHVGYTPNAKGQITGLSKLARLVDVYARRPQVQERMTSQIADALVDVLQPRGVIVVVEAEHLCMTMRGVRKPGAKTLTSAVRGDFRDEPSTRAEAMSLILGR

SEQ ID NO: 3925 - protein, 285 aa, Actinoalloteichus hoggarensis
  misc_feature (1)..(285): tr|A0A221W9B4|A0A221W9B4_9PSEU Putative GTP cyclohydrol ase 1 type 2 OS=Actinoalloteichus hoggarensis OX=147017 6 GN=AHOG_23210 PE=4 SV=1
MSATVADVVTALERAYPPEYAEDWDAIGLVCGDPASPVDRVLVCVDPTEDTVSEALELGAGLIVAHHPLLLRGVHGVPADQPKGRLIHRMLLGGVALYCAHTNADSAVPGVSDALAEAIGLRVTGALRPHRGATAETPLLGLGRVGELARPEPFSRFVRRVADALPTTSWGVRASGDPERPIRRVAVSGGAGDGFLSTAAALGVDAYVTSDLRHHPASEHAALSTVPGGRAPALVDVAHWAGEWPWCGQAAEVVRTATQSTVEVHVSQRRTDPWNLHEPGDRSRT

SEQ ID NO: 3926 - protein, 209 aa, Actinoalloteichus hoggarensis
  misc_feature (1)..(209): tr|A0A221VWU3|A0A221VWU3_9PSEU GTP cyclohydrolase 1 OS= Actinoalloteichus hoggarensis OX=1470176 GN=folE PE=3 S V=1
MTDLISRPERGESESGSPARPVFDRARAEAAVRELLLACGEDPDREGLQETPARVARAYQEMFAGLFTDPDAVLDKTFDEGHDELVLVSDIPVYSYCEHHLLPFHGSAHVGYIPNKEGRVTGLSKLARVVDLYARRPQVQERLTSQVADALVRKLNPRGVIVVMEAEHLCMSMRGVRKPGARTTTSAVRGLLRSSPSSRAEALDLIRRQ

SEQ ID NO: 3927 - protein, 209 aa, Actinoalloteichus hymeniacidonis
  misc_feature (1)..(209): tr|A0A1D8BQW0|A0A1D8BQW0_9PSEU GTP cyclohydrolase 1 OS= Actinoalloteichus hymeniacidonis OX=340345 GN=folE PE=3 SV=1
MTDLINENGQAEAGARPSSRPAFDQPRAEAAVRELLLACGEDPDREGLRDTPARVGRAYQEMFAGLFTDPDEVLDKTFDEGHDEMVLVTDIPIYSYCEHHLLPFHGSAHVGYIPNQQGRVTGLSKLARVVDLYARRPQVQERLTSQVADALVRKLDPRGVIVVIEAEHLCMSMRGVRKPGARTTTSAVRGLFRSSPSSRAEALDLIRGH

SEQ ID NO: 3928 - protein, 209 aa, Actinoalloteichus sp.
  misc_feature (1)..(209): tr|A0A1L7F0H8|A0A1L7F0H8_9PSEU GTP cyclohydrolase 1 OS= Actinoalloteichus sp. GBA129-24 OX=1612551 GN=folE PE=3 SV=1
MTDLISEYDTVGQASDSSARPAFDRTRAEAAVRELLLACGEDPDREGLQETPARVARAYQEMFAGLFTDPDAVLDKTFDEGHDELVLVTDIPVYSYCEHHLLPFHGSAHVGYIPNTEGRVTGLSKLARVVDLYARRPQVQERLTSQVADALVRKLNPRGVIVVMEAEHLCMSMRGVRKPGARTTTSAVRGLLRSSPSSRAEALDLIRRH

SEQ ID NO: 3929 - protein, 219 aa, Actinobacillus delphinicola
  misc_feature (1)..(219): tr|A0A448TRM1|A0A448TRM1_9PAST GTP cyclohydrolase 1 OS= Actinobacillus delphinicola OX=51161 GN=folE PE=3 SV=1
MQDISVEAAQVKRALAEQGLETPMLPQDKTKNERRNEIQQKMQEVLTLIGLDLSDDSLQETPKRLAKMYIDEIFSGLDYQNFPKITKIKNAMKVSERVQVNDITLTTTCEHHFVTIDGTVAIAYYPAKWVIGLSKLNRIVDFFAKRPQVQERFTEQLLVALQTILETQDVAIYVNAAHYCVKGRGIQDSNSYTITSAYGGVFLNDREERKEFLACVRHK

SEQ ID NO: 3930 - protein, 87 aa, Actinobacillus equuli
  misc_feature (1)..(87): tr|A0A448QPA8|A0A448QPA8_ACTEU GTP cyclohydrolase I OS= Actinobacillus equuli OX=718 GN=folE_1 PE=4 SV=1
MSIISAEAQKVREALIAKGIETPTIQLTKDKDSRRAEIQQHMRSVMELLGLDLQDDSLEETPHRLAKMYVDEILAAWIMRLSQNYQY

SEQ ID NO: 3931 - protein, 218 aa, Actinobacillus equuli
  misc_feature (1)..(218): tr|A0A0A7MDS9|A0A0A7MDS9_ACTEU GTP cyclohydrolase 1 OS= Actinobacillus equuli subsp. equuli OX=202947 GN=folE P E=3 SV=1
MSIISAEAQKVREALIAKGIETPTIQLTKDKDSRRAEIQQHMRSVMELLGLDLQDDSLEETPHRLAKMYVDEIFSGLDYATFPKITNIENRMKVSEMVLVDDITLTSTCEHHFVTIDGKVAVAYYPKKWVIGLSKINRVVQFFAQRPQVQERFTEQILTAFQTILETEDVAVYVKATHFCVKCRGVKDTNSYTVTSAFGGAFLEDRETRKEFLGLINK

SEQ ID NO: 3932 - protein, 218 aa, Actinobacillus indolicus
  misc_feature (1)..(218): tr|A0A4V1AXT9|A0A4V1AXT9_9PAST GTP cyclohydrolase 1 OS= Actinobacillus indolicus OX=51049 GN=folE PE=3 SV=1
MSNISPEAQSVRDALLAKGIETPTVAHQKDKDSRRSEIQQHMRSVLELLGLDLRDDSLEETPHRLAKMYVDEIFSGLDYETFPKITKIKNQMKVSEMVLVDDITLTSTCEHHFVTIDGKVAVAYYPKDWVIGLSKINRVVQFFAQRPQVQERFTEQILTAFQTILETEDVAVYVKATHFCVKCRGVKDTHSQTMTSAFGGVFLQDRETRKEFLSLISK

SEQ ID NO: 3933 - protein, 218 aa, Actinobacillus indolicus
  misc_feature (1)..(218): tr|A0A4V0IF43|A0A4V0IF43_9PAST GTP cyclohydrolase 1 OS= Actinobacillus indolicus OX=51049 GN=folE PE=3 SV=1
MSKISPEAQSVRDALLAKGIETPTVAHQKDKDSRRSEIQQHMRAVLELLGLDLRDDSLEETPHRLAKMYVDEIFSGLDYETFPKITKIKNQMKVSEMVLVDDITLTSTCEHHFVTIDGKVAVAYYPKDWVIGLSKINRVVQFFAQRPQVQERFTEQILTAFQTILETEDVAVYVKATHFCVKCRGVKDTHSQTMTSAFGGVFLQDRETRKEFLSLINK

SEQ ID NO: 3934 - protein, 218 aa, Actinobacillus lignieresii
  misc_feature (1)..(218): tr|A0A380TS51|A0A380TS51_ACTLI GTP cyclohydrolase 1 OS= Actinobacillus lignieresii OX=720 GN=folE PE=3 SV=1
MSIISAEAQKVREALIAKGIETPTVQLTKDKDSRRAEIQQHMRSVLELLGLDLQDDSLEETPHRLAKMYVDEIFSGLDYATFPKITNIENRMKVSEMVLVDDITLTSTCEHHFVTIDGKVAVAYYPKKWVIGLSKINRVVQFFAQRPQVQERFTEQILTAFQTILETDDVAVFVKATHFCVKCRGVKDTNSYTVTSAFGGVFLEDRETRKEFLGLINK

SEQ ID NO: 3935 - protein, 221 aa, Actinobacillus minor
  misc_feature (1)..(221): tr|C5S0U7|C5S0U7_9PAST GTP cyclohydrolase 1 OS=Actinoba cillus minor NM305 OX=637911 GN=folE PE=3 SV=1
MTTISPISEEAQKVRKALIAKGIETPTIALTKDKSTRRAEIQAHFRSVMELLGLDLSDDSLEETPQRLAKMYVDEIFSGLDYATFPKITNIENRMKVSEMVLVDDITLTSTCEHHFVTIDGKVAVAYYPKKWVIGLSKINRVVQFFAQRPQVQERFTEQILTAFQTILETEDVAVYVKATHFCVKCRGVKDTNSYTVTSAFGGVFLEDRETRKEFLSLINK

SEQ ID NO: 3936 - protein, 218 aa, Actinobacillus pleuropneumoniae; identical to SEQ ID NO: 3934
  misc_feature (1)..(218): sp|B3GXP9|GCH1_ACTP7 GTP cyclohydrolase 1 OS=Actinobaci llus pleuropneumoniae serotype 7 (strain AP76) OX=53745 7 GN=folE PE=3 SV=1

SEQ ID NO: 3937 - protein, 218 aa, Actinobacillus pleuropneumoniae; identical to SEQ ID NO: 3934
  misc_feature (1)..(218): tr|A0A223MH42|A0A223MH42_ACTPL GTP cyclohydrolase 1 OS= Actinobacillus pleuropneumoniae OX=715 GN=folE PE=3 SV= 1

SEQ ID NO: 3938 - protein, 217 aa, Actinobacillus porcinus
  misc_feature (1)..(217): tr|A0A4V0IE75|A0A4V0IE75_9PAST GTP cyclohydrolase 1 OS= Actinobacillus porcinus OX=51048 GN=folE PE=3 SV=1
MAISAEAEKVRAALIEKGIETPMKTLRMAKDERRTEIQQKMREVMELIGLDLTDDSLEETPTRLAKMYVDEIFSGLDYANFPKITNIENRMKVSEMVLVNDVTLTSTCEHHFVTIDGLVSVAYYPKKWVIGLSKINRVVQFFAQRPQVQERLTEQILLAFQTILETEDVAVYMKATHFCVKCRGIKDTNSYTVTSAFGGVFLDDRETRKEFLSLINK

SEQ ID NO: 3939 - protein, 221 aa, Actinobacillus porcitonsillarum; identical to SEQ ID NO: 3935
  misc_feature (1)..(221): tr|A0A2U8FKX6|A0A2U8FKX6_9PAST GTP cyclohydrolase 1 OS= Actinobacillus porcitonsillarum OX=189834 GN=folE PE=3 SV=1

SEQ ID NO: 3940 - protein, 217 aa, [Actinobacillus] rossii
  misc_feature (1)..(217): tr|A0A380TVW8|A0A380TVW8_9PAST GTP cyclohydrolase 1 OS= [Actinobacillus] rossii OX=123820 GN=folE PE=3 SV=1
MTISAEANKVRAALVEKGIETPMMKLRAPKDERRTAIQQKMREVMELIGLDLTDDSLEETPVRLAKMYVDEIFSGLDYENFPKITNIENRMKVSEMVLINDVTLTSTCEHHFVTIDGLVSVAYYPKKWVIGLSKINRVVQFFAQRPQVQERLTEQILLAFQTILETDDVAVYMKATHFCVKCRGIKDSNSYTVTSAFGGVFLEDRETRKEFLSLINK

SEQ ID NO: 3941 - protein, 217 aa, Actinobacillus seminis
  misc_feature (1)..(217): tr|A0A263HB77|A0A263HB77_9PAST GTP cyclohydrolase 1 OS= Actinobacillus seminis OX=722 GN=folE PE=3 SV=1
MDSILPEAKKVREALIAKGIETPMIAPQQSKDERRVGIEQHMREVMKLIGLDLRDDSLEETPARLAKMFIDEIFSGLDYANFPKITNIENRMKVSEMVLVNDVTLTSTCEHHFVTIDGMVSVAYYPKKWVIGLSKINRVISFFAQRPQVQERLTEQILLAFQTILETEDVAVYVKATHFCVKCRGIKDTNSYTVTSAFGGVFLDDRETRKEFLTLIR

SEQ ID NO: 3942 - protein, 217 aa, Actinobacillus succinogenes
  misc_feature (1)..(217): tr|A6VNV8|A6VNV8_ACTSZ GTP cyclohydrolase 1 OS=Actinoba cillus succinogenes (strain ATCC 55618 / DSM 22257 / 13 0Z) OX=339671 GN=folE PE=3 SV=1
MTISAEAKKVRNALIEKGIETPMVEFQQNKNERRTAIQQKMREVMELIGLDLRDDSLEETPVRLAKMYVDEIFSGLDYANFPKITNIENRMKVSEMVLVNDVTLTSTCEHHFVTIDGLVSVAYYPKKWVIGLSKINRVVQFFAQRPQVQERLTEQVLLAFQTILETDDVAVYMKATHFCVKCRGIKDSNSYTVTSAFGGVFLEDRETRKEFLSLVNK

SEQ ID NO: 3943 - protein, 218 aa, Actinobacillus suis; identical to SEQ ID NO: 3931
  misc_feature (1)..(218): tr|K0G2X7|K0G2X7_ACTSU GTP cyclohydrolase 1 OS=Actinoba cillus suis H91-0380 OX=696748 GN=folE PE=3 SV=1

SEQ ID NO: 3944 - protein, 218 aa, Actinobacillus ureae
  misc_feature (1)..(218): tr|E8KHW2|E8KHW2_9PAST GTP cyclohydrolase 1 OS=Actinoba cillus ureae ATCC 25976 OX=887324 GN=folE PE=3 SV=1
MSIISEEAQKVREALIAKGIETPTIQLTKDKDSRRAEIQQHMRSVMELLGLDLQDDSLEETPHRLAKMYVDEIFSGLDYATFPKITNIENRMKVSEMVLVDDITLTSTCEHHFVTIDGKVAVAYYPKKWVIGLSKINRVVQFFAQRPQVQERFTEQILTAFQTILETEDVAVYVKATHFCVKCRGVKDTNSYTVTSAFGGAFLEDRETRREFLGLINK

SEQ ID NO: 3945 - protein, 201 aa, Actinobacteria bacterium
  misc_feature (1)..(201): tr|A0A0N1NPU4|A0A0N1NPU4_9ACTN GTP cyclohydrolase 1 OS= Actinobacteria bacterium OV320 OX=1592329 GN=folE PE=3 SV=1
MTDPVTLDGEGAIGEFDEKRAENAVRELLIAVGEDPDREGLRETPARVARAYKEIFAGLWQQPEDVLTTTFDLGHDEMVLVKDIEVFSTCEHHLVPFRGVAHVGYIPSTTGKITGLSKLARLVDVYARRPQVQERLTTQIADSLMEILEPRGVIVVIECEHMCMSMRGIRKPGAKTITSAVRGQLRDAATRNEAMSLIMAR

SEQ ID NO: 3946 - protein, 207 aa, Actinobacteria bacterium
  misc_feature (1)..(207): tr|A0A2N3G2J8|A0A2N3G2J8_9ACTN GTP cyclohydrolase 1 OS= Actinobacteria bacterium HGW-Actinobacteria-4 OX=201364 9 GN=folE PE=3 SV=1
MTDSTLPNAVAGAQDTPPATAVDRPRIEAAVREILAAVGENPDRDGLRDTPARVARAYEEFFAGLSQDPADVLSAVFELGHEEMILVKDIELYSTCEHHLVPFHGVAHVGYIPGEDGRITGLSKLARLVDVFAKRPQVQERLTTQVADALVKHLGARGVIVVIEAEHLCMSMRGVRKPGSRTVTSAVRGVMRDGATRAEAMSLILGK

SEQ ID NO: 3947 - protein, 213 aa, Unknown
  misc_feature (1)..(213): tr|A0A094Q967|A0A094Q967_9ACTN GTP cyclohydrolase 1 OS= actinobacterium acAMD-2 OX=1504318 GN=folE PE=3 SV=1
MTDRLVEQAASIDPVTDLVSDFRDVPAFDQERAEKAVRELLLAVGEDPDRDGLLDTPARVARAYQELFAGMHQKPEDVLATTFDLGHHELVIVKDIELYSTCEHHLVPFFGRAHVGYLPNAEGRITGLSKLARLVDVFAKRPQVQERLTSQVADSLMRVLAPEGVIVVVECEHLCMSMRGIRKPGATTITSAVRGVFADPALRSEAMTLIRGH

SEQ ID NO: 3948 - protein, 208 aa, Unknown
  misc_feature (1)..(208): tr|A0A094PD44|A0A094PD44_9ACTN GTP cyclohydrolase 1 OS= actinobacterium acAMD-5 OX=1504319 GN=folE PE=3 SV=1
MAEDISPIDKVSLNSDDLDIKNFDAARIEAAVRELLLGIGEDPDRDGLKNTPSRVARSYAEIFGGLHREPAEVLTTTFDLGHEELVLVRDIEVYSVCEHHLLPFFGVAHVGYLPGFAGKITGLSKIARVVDLFAKRPQVQERLTTQIADALESMLDPAGVIVILECEHLCMSMRGIKKTNAKTITSTARGALKEEPARAEALRLIRNF

SEQ ID NO: 3949 - protein, 102 aa, Unknown
  misc_feature (1)..(102): tr|A0A094Q5H7|A0A094Q5H7_9ACTN GTP cyclohydrolase 1 (Fr agment) OS=actinobacterium acIB-AMD-7 OX=1504322 GN=GM4 8_1870 PE=3 SV=1
AHIGYIPGESGRITGISKLARVVDLYARRPQVQERLTSQIADALVEILQPGGVIVIIDCEHLCMSMRGVRKSQARTTTSAVRGQLLNPATRAEAISLINQSR

SEQ ID NO: 3950 - protein, 206 aa, Unknown
  misc_feature (1)..(206): tr|A0A094Q2C3|A0A094Q2C3_9ACTN GTP cyclohydrolase 1 OS= actinobacterium acIB-AMD-7 OX=1504322 GN=folE PE=3 SV=1
MSEINSVSMGPHDGGAKKEFDQARAEKAVTELLHAIGEDPDREGLKDTPKRVAKALAENFAGLWQKPEDVLTTTFDIGHQELVIVREIEVFSHCEHHLTPFHGVAHIGYIPGESGRITGISKLARVVDLYARRPQVQERLTSQIADALVEILQPGGVIVIIDCEHLCMSMRGVRKSQARTTTSAVRGQLLNPTTRAEAISLINQSR

SEQ ID NO: 3951 - protein, 198 aa, Unknown
  misc_feature (1)..(198): tr|A0A094PRV6|A0A094PRV6_9ACTN GTP cyclohydrolase 1 OS= actinobacterium acMicro-4 OX=1504317 GN=GM43_4295 PE=3 SV=1
MTPPTVIVDSEALTRAVHDILVAVGEDPRREGLVNTPERVAELFTELYSGVGVDPVGVLVDARPVATEDNERGELVAMRDISFHSLCEHHLLPFDGVVSVVYAPGDRIVGLGTLVTLVEVISRRPQLQERVGEMIVHSLVSSGVAVGALALISAVHGCVAYRGPQQKLTTITVAAEGTLAKGTARHEALMLAGGEDWA

SEQ ID NO: 3952 - protein, 206 aa, Unknown
  misc_feature (1)..(206): tr|J9DTQ6|J9DTQ6_9ACTN GTP cyclohydrolase 1 OS=actinoba cterium SCGC AAA027-L06 OX=913338 GN=folE PE=3 SV=1
MSEVNSVSMGPHDGGAAKEFDQARAEKAVTELLHALGEDPNRDGLKDTPKRVAKALAENFAGLWQKPEDVLTTTFDIGHKELVIVREIEVFSHCEHHLTPFHGVAHIGYIPGESGRITGISKLARVVDLYARRPQVQERLTSQIADALVEILQPGGVIVIIDCEHLCMSMRGVRKSQARTTTSAVRGQLLNPATRAEAISLINQSR

SEQ ID NO: 3953 - protein, 208 aa, Actinobaculum massiliense
  misc_feature (1)..(208): tr|K9EII2|K9EII2_9ACTO GTP cyclohydrolase 1 OS=Actinoba culum massiliense ACS-171-V-Col2 OX=883066 GN=folE PE=3 SV=1
MNKADVASDAAGVAAPGAVPTAAREAKIAAAVREILVAIGEDPERDGLRETPARIARAMSEVFAGIGHDPDAVLDAQFDVGFHEMVIVRDIGFYSVCEHHLLPFFGTASVAYIPGKEGKVTGLSKLARLVKGYAARPQVQERLTTQIAEALMSRLSAAGALVVIKAEHMCMTMRGVKSPGAQTVTSAVRGQLRNSSTRAEAMSLIEGS

SEQ ID NO: 3954 - protein, 277 aa, Actinobaculum sp.
  misc_feature (1)..(277): tr|U1RGG0|U1RGG0_9ACTO GTP cyclohydrolase 1 OS=Actinoba culum sp. oral taxon 183 str. F0552 OX=1227261 GN=folE PE=3 SV=1
MCPTDRTPRTAPPELPDGPGKARRGPIVGEAPGRPSDSPGLDSCEHGFPESGESDSPRQARSACDAGEPELREPRGGGRVPAESAGGSGVRSYDEAGVVEAVRALLLAVGEDPAREGLAGTPERLARAYREMFAGLHEDPAEALDAQFDIGHQEMVLVRDIPMYSTCEHHLLPFHGVAHVAYIPGAEGRVTGLSKLARLVEGYARRPQIQERLTSQVADALAKRLEARGVMVVVEAEHLCMSMRGVRKPGSRTVTSAVRGVLRNQATRAEALSLMRA

SEQ ID NO: 3955 - protein, 197 aa, Actinobaculum sp.
  misc_feature (1)..(197): tr|A0A430JLX4|A0A430JLX4_9ACTO GTP cyclohydrolase 1 OS= Actinobaculum sp. 352 OX=2490946 GN=folE PE=3 SV=1
MTDTPAGAVRAYDEERVRRAVRDLLFAIGENPERDGLRDTPERIARAWREMLSGLHSDPDEVLEAQFDIGHQEMVLVKDIPLYSLCEHHLLPFHGVAHVAYIPGVDGKVTGLSKLARLVEGYARRPQVQERLTSQVADALVRKLGARGVIVVVEAEHLCMSMRGVRKPGARTITSAVRGIMRNSATRAEAMSLINSQ

SEQ ID NO: 3956 - protein, 228 aa, Actinobaculum suis
  misc_feature (1)..(228): tr|A0A1G7CA90|A0A1G7CA90_9ACTO GTP cyclohydrolase 1 OS= Actinobaculum suis OX=1657 GN=folE PE=3 SV=1
MPKKNQQEPGPKTHGAARQGEPAPAAAAKPGAPQNAYTGTRPVDGPRIEAAVREILRGIGEDPDREGLRDTPGRIARAMAEVFAGIGHDPDVVLDAQFDVGFHEMVIVRDIEFQSVCEHHMLPFYGTAAVVYIPGPAGKVTGLSKLARLVQGYARRLQVQERLTTQIADALMHRLGAAGALVIIKAEHMCMTMRGVRSQGATTVTSAVRGQLRKASTRAEAMSLIEGT

SEQ ID NO: 3957 - protein, 181 aa, Actinobaculum suis
  misc_feature (1)..(181): tr|A0A0K9ERW0|A0A0K9ERW0_9ACTO GTP cyclohydrolase 1 OS= Actinobaculum suis OX=1657 GN=folE PE=3 SV=1
MEAAVREILRGIGEDPDREGLRDTPGRIARAMAEVFAGIGHDPDVVLDAQFDVGFHEMVIVRDIEFQSVCEHHMLPFYGTAAVAYIPGPAGKVTGLSKLARLVQGYARRLQVQERLTTQIADALMHRLGAAGALVIIKAEHMCMTMRGVRSQGATTVTSAVRGQLRKASTRAEAMSLIEGT

SEQ ID NO: 3958 - protein, 194 aa, Actinocorallia herbida
  misc_feature (1)..(194): tr|A0A3N1DA45|A0A3N1DA45_9ACTN GTP cyclohydrolase 1 OS= Actinocorallia herbida OX=58109 GN=folE PE=3 SV=1
MTAAPGFDHARIEKAVREILYAIGEDPDRDGLRATPARVARAYAEHFAGLAMGPEDALTTSFEADHDEMVLVKDIELYSTCEHHLVPFHGVAHVGYTPGEKGQITGLSKLARLVDVYARRPQVQERLTSQVADALMEHLQPRGVIVVVEAEHLCMTMRGVRKPGAKTITSAVRGDFRNSAETRAEAMSLILGRS

SEQ ID NO: 3959 - protein, 201 aa, Actinocrispum wychmicini
  misc_feature (1)..(201): tr|A0A4R2JMV6|A0A4R2JMV6_9PSEU GTP cyclohydrolase 1 OS= Actinocrispum wychmicini OX=1213861 GN=folE PE=3 SV=1
MAATTGSHSVRRVFDQERAEKAVRELLLACGENPDREGLADTPSRVARAYREMFAGLYMDPDSVLAKTFDESHEELVLVTDIPIYSFCEHHLLPFHGVAHVGYIPNEHGKVTGLSKVARLVDAYAKRPQVQERLTSQIADSLVRTLQPRGVIVVIEAEHLCMAMRGVRKPGSRTTTSAVRGQFKTSASSRAEALDLIKARR

SEQ ID NO: 3960 - protein, 201 aa, Actinocrispum wychmicini
  misc_feature (1)..(201): tr|A0A4R2IWP5|A0A4R2IWP5_9PSEU GTP cyclohydrolase 1 OS= Actinocrispum wychmicini OX=1213861 GN=folE PE=3 SV=1
MIASNTDTTAPQGFADACVAVRTLLRFAGYDPDQPVIRDTPDRVARALADMTAGYREDPRVYLERVFPEQGADGMVVVSGIRFASLCEHHMLPFSGTATVGYVPRDGRLLGLSKLPRLVGVFARRLQVQERLTAQIARTIHEDLPAEGAACVVSATHTCVSVRGVTQPHAVTMTRAWAGSFRDDPEARLEFLGRAESTPDW

SEQ ID NO: 3961 - protein, 204 aa, Actinokineospora auranticolor
  misc_feature (1)..(204): tr|A0A2S6GDY4|A0A2S6GDY4_9PSEU GTP cyclohydrolase 1 OS= Actinokineospora auranticolor OX=155976 GN=folE PE=3 SV =1
MTDVLDSTVLNGSQAPPGRVDSDRVADLVGQLLVVIGEDPAREGLADTPARVAAWWGEFFSADAAVPTCFTEQYLSDQLVVVGGVSVWSLCEHHLLPMNLNVTAGYVPDGQVIGLSKFGRVAQRYAGRLQVQERFTRQVADEIALAIGGSNVAVAVHGTHLCMSARGVRMEAARTTTVDTRGRFGADPVLSQQFLAIATDRRNL

SEQ ID NO: 3962 - protein, 206 aa, Actinokineospora auranticolor
  misc_feature (1)..(206): tr|A0A2S6GE98|A0A2S6GE98_9PSEU GTP cyclohydrolase 1 OS= Actinokineospora auranticolor OX=155976 GN=folE PE=3 SV =1
MMTSRNGAGTDTVPASAFDRDRAERAVRELLLACGEDPDREGLLETPARVARAYAELFAGLYTEPDAVLDKTFDESHGELVLVTDIPMYSTCEHHLVPFHGVAHVGYIPNEQGRVTGLSKLARLVDLYAKRPQVQERLTSQIADALVRKLEPRGVVVVIEAEHLCMSMRGIRKPGARTTTSALRGLHKTSPSTRAEALQLINGRRR

SEQ ID NO: 3963 - protein, 207 aa, Actinokineospora bangkokensis
  misc_feature (1)..(207): tr|A0A1Q9LCJ5|A0A1Q9LCJ5_9PSEU GTP cyclohydrolase 1 OS= Actinokineospora bangkokensis OX=1193682 GN=folE PE=3 S V=1
MTTTTDGLGADATAPSPAFDQDRAERAVRELLLACGEDPDREGLLETPARVARAYAELFAGLYTDPEQVLDKTFDVSHEELVLVTDIPMYSTCEHHLVPFHGVAHVGYIPALTGRVTGLSKLARLVDLYAKRPQVQERLTSQVADAVVRKLDARGAIVVIEAEHLCMAMRGIRKPGARTTTSALRGIFQTSASSRAEAMQLINGRTR

SEQ ID NO: 3964 - protein, 374 aa, Actinokineospora cianjurensis
  misc_feature (1)..(374): tr|A0A421B618|A0A421B618_9PSEU GTP cyclohydrolase 1 OS= Actinokineospora cianjurensis OX=585224 GN=folE PE=3 SV =1
MTTSRDRVGTFSTREDVPTPAFDQDRAEKAIRELLLACGEDPDREGLLETPARVARAYAELFAGLYTEPDSVLDKTFDESHDELILVTDIPMYSTCVPHGQPVDAVGGPRAAQDIRVGDPLWTLVDGRRVETSVIGVTAKRSRDLVEVSTGAGVFTVTGDHPLATPHGWAEAKDVAGSHVEWTGIAAPARELVTAGAPGQDAEWLLRHGFARDGHTTTLGQSQWVRVESVRAVAAEATVYSLTCDPHPTFLIGGHLTHNCEHHLVPFHGHAHVGYIPNEKGNVTGLSKLARLVDLYAKRPQVQERLTSQVADALVRKLQPRGVIVVIEAEHLCMAMRGIRKPGARTTTSALRGLLKSSPSTRAEAIQLINGRSR

SEQ ID NO: 3965 - protein, 206 aa, Actinokineospora mzabensis
  misc_feature (1)..(206): tr|A0A317S9Z6|A0A317S9Z6_9PSEU GTP cyclohydrolase 1 OS= Actinokineospora mzabensis OX=1470177 GN=folE PE=3 SV=1
MTTTNNGAGTAAVPAPAFDPARAENAVRELLLACGEDPDREGLRETPARVARAYAELFAGLYTEPDAVLDKTFDVSHEELVLVTDIPMYSTCEHHLVPFHGVAHVGYIPALTGRVTGLSKLARLVDLYAKRPQVQERLTSQVADAVMRKLDARGAIVVIEAEHLCMAMRGVRKPGARTVTSALRGQFKTSASSRAEAMQLINGRSR

SEQ ID NO: 3966 - protein, 206 aa, Actinokineospora spheciospongiae; identical to SEQ ID NO: 3965
  misc_feature (1)..(206): tr|W7IS27|W7IS27_9PSEU GTP cyclohydrolase 1 OS=Actinoki neospora spheciospongiae OX=909613 GN=folE PE=3 SV=1

SEQ ID NO: 3967 - protein, 259 aa, Actinokineospora spheciospongiae
  misc_feature (1)..(259): tr|W7IJZ9|W7IJZ9_9PSEU GTP cyclohydrolase I type 2 OS=A ctinokineospora spheciospongiae OX=909613 GN=UO65_3541 PE=4 SV=1
MQNEFDRRGISVDQVGITGLRYPVAFDDGEVQQSAIADFTVTVRLQPERRGTHMSRMVALVHEHLQVLDPRRLPQVLKIGMDELEAPSIEITAGFSLTRTVTAPASHRESITVHDVAIIASLDDASCAVTSAVRSEVTSLCPCSKTISDYGAHNQRSQITLAVQGTADDPYPLPARTALDLLDGTGSAPVIPLVKRSDERVLTMQAYDHPAFVEDMAREVAGACRSRGLAHEVRVRNFESIHSHDAVATINGGASRGWL

SEQ ID NO: 3968 - protein, 374 aa, Actinokineospora terrae
  misc_feature (1)..(374): tr|A0A1H9U9Q8|A0A1H9U9Q8_9PSEU GTP cyclohydrolase 1 OS= Actinokineospora terrae OX=155974 GN=folE PE=3 SV=1
MTTSRDRVGTFSTREDVPTPAFDQDRAEKAIRELLLACGEDPDREGLLETPARVARAYAELFAGLYTEPDSVLDKTFDESHDELILVTDIPMYSTCVPHGQPVDAVGGPRAAQDIRVGDPLWTLVDGRRVRTSVIGVTAKRSRELVEVSTSAGVFTVTGDHPLATPHGWAEAKDVAGSHVEWTGIAAPARELVTAGAPGHDADWLLRHGFARDEHTTTLGQSQWVRVESVRAVAGEATVYSLTCDPHPTFLIGGHLTHNCEHHLVPFHGHAHVGYIPNEKGNVTGLSKLARLVDLYAKRPQVQERLTSQVADALVRKLQPRGVIVVIEAEHLCMAMRGIRKPGARTTTSALRGLLKSSPSTRAEAIQLINGRSR

SEQ ID NO: 3969 - protein, 205 aa, Actinomadura bangladeshensis
  misc_feature (1)..(205): tr|A0A4R4NDA2|A0A4R4NDA2_9ACTN GTP cyclohydrolase 1 OS= Actinomadura bangladeshensis OX=453573 GN=folE PE=3 SV= 1
MDVAALAVSPITPVRVTGRPGEMDLAAAELAAGEFLRALGVGTDSESLRGTPGRMARAYAELFTSRSFDLTTFPNDDGYDELVLARDIPLRSVCEHHLLPFVGTAHIGYLPGRRILGLSKLARVLEHFARRPQVQERLTKQVADWLQAHLDPAGVGVVIEAEHTCMTLRGVQATGARTVTSTLLGTLRDAPASRQEFLALTGVGR

SEQ ID NO: 3970 - protein, 202 aa, Actinomadura bangladeshensis
  misc_feature (1)..(202): tr|A0A4R4NQI6|A0A4R4NQI6_9ACTN GTP cyclohydrolase 1 OS= Actinomadura bangladeshensis OX=453573 GN=folE PE=3 SV= 1
MENDPPGETLHGGHFDHARIEKAVREILIGIGEDPDRDGLRDTPARVARAYAEQFAGLRQTPEDALTTVFDADHEEMVLVKDIEVYSVCEHHLVPFHGVAHVGYTPNKKGQITGLSKLARLVDVYARRPQVQERLTSQVADALMSVLEPRGAIVVIEAEHLCMTMRGVRKPGAKTVTSAVRGDFRDHAETRSEAMSLILGRY

SEQ ID NO: 3971 - protein, 195 aa, Actinomadura chibensis
  misc_feature (1)..(195): tr|A0A5D0P0K3|A0A5D0P0K3_9ACTN GTP cyclohydrolase 1 OS= Actinomadura chibensis OX=392828 GN=folE PE=3 SV=1
MLEEPPGFDHARIEKAVREILIGIGEDPDRDGLRDTPARVARAYAEQFAGLRQRPEDALTTVFDADHEEMVLVKDIEVYSVCEHHLVPFHGVAHVGYTPNKKGQITGLSKLARLVDVYARRPQVQERLTSQVADAMMSVLEPRGAIVVIEAEHLCMTMRGVRKPGAKTVTSAVRGDFRDHAETRSEAMSLILGRY

SEQ ID NO: 3972 - protein, 202 aa, Actinomadura darangshiensis
  misc_feature (1)..(202): tr|A0A4R5B2Q2|A0A4R5B2Q2_9ACTN GTP cyclohydrolase 1 OS= Actinomadura darangshiensis OX=705336 GN=folE PE=3 SV=1
MEEDPPGATVHGGHFDHARIARAVREILIGIGEDPDRDGLRDTPARVARAYAEQFAGLRQTPEDALTTVFDADHEEMVLVKDIEVYSVCEHHLVPFHGVAHVGYTPNKKGQITGLSKLARLVDVYARRPQVQERLTSQVADALMSVLEPRGAIVVIEAEHLCMTMRGVRKPGAKTVTSAVRGDFRDHAETRSEAMSLILGRY

SEQ ID NO: 3973 - protein, 206 aa, Actinomadura echinospora
  misc_feature (1)..(206): tr|A0A1H5YUH1|A0A1H5YUH1_9ACTN GTP cyclohydrolase 1 OS= Actinomadura echinospora OX=1992 GN=folE PE=3 SV=1
MALPYDEDGAPLRAELPDFDHARLERAVREILIAIGEDPDRDGLRETPARVARAYAEQFAGLRQHPEDVLNKVFEADHDEMVLVKDIEVYSSCEHHLVPFHGVAHVGYTPNKKGQITGLSKLARLVDVYARRPQVQERLTSQVADALMEILEPRGVIVVIEAEHLCMTMRGVRKPGAKTVTSAVRGDFRDHPETRAEAMSLILGGS

SEQ ID NO: 3974 - protein, 201 aa, Actinomadura hallensis
  misc_feature (1)..(201): tr|A0A543IMP2|A0A543IMP2_9ACTN GTP cyclohydrolase 1 OS= Actinomadura hallensis OX=337895 GN=folE PE=3 SV=1
MEGEAKLLEEPPGFDHARIEKAVREILIGIGEDPDRDGLRETPARVARAYAEQFAGLRQTPEDALTTVFDADHEEMVLVKDIEVYSVCEHHLVPFHGVAHVGYTPNKKGQITGLSKLARLVDVYARRPQVQERLTSQVADALMSVLEPRGAIVVIEAEHLCMTMRGVRKPGAKTVTSAVRGDFRDHAETRAEAMSLILGRY

SEQ ID NO: 3975 - protein, 211 aa, Actinomadura madurae
  misc_feature (1)..(211): tr|A0A1I5EQI0|A0A1I5EQI0_9ACTN GTP cyclohydrolase 1 OS= Actinomadura madurae OX=1993 GN=folE PE=3 SV=1
MAIPYDEAPIEIDPPGETVRGGHFDHARIEKAVREILIGIGEDPDRDGLRETPARVARAYAEQFAGLRQTPEDALTTVFDADHEEMVLVKDIEVYSVCEHHLVPFHGVAHVGYTPNKKGQITGLSKLARLVDVYARRPQVQERLTSQVADALMTVLEPRGAIVVIEAEHLCMTMRGVRKPGAKTVTSAVRGDFRDHAETRSEAMSLILGRY

SEQ ID NO: 3976 - protein, 210 aa, Actinomadura mexicana
  misc_feature (1)..(210): tr|A0A239H7I3|A0A239H7I3_9ACTN GTP cyclohydrolase 1 OS= Actinomadura mexicana OX=134959 GN=folE PE=3 SV=1
MAIPYDEAPIENDPPGETLHGGRFDHARIEKAVREILIGIGEDPERDGLRDTPARVARAYAEQFAGLRQQPEDALTTVFDADHEEMVLVKDIEVYSVCEHHLVPFHGVAHVGYTPNKKGQITGLSKLARLVDVYARRPQVQERLTSQVADAMMRVLEPRGAIVVIEAEHLCMTMRGVRKPGAKTVTSAVRGDFRDHAETRSEAMSLILGR

SEQ ID NO: 3977 - protein, 202 aa, Actinomadura meyerae
  misc_feature (1)..(202): tr|A0A239MV45|A0A239MV45_9ACTN GTP cyclohydrolase 1 OS= Actinomadura meyerae OX=240840 GN=folE PE=3 SV=1
MENDPPGETVRGGHFDHARIEKAVREILIGIGEDPDRDGLRDTPARVARAYAEQFAGLRQTPEDVLTTVFDADHEEMVLVKDIEVYSVCEHHLVPFHGVAHVGYTPNKKGQITGLSKLARLVDVYARRPQVQERLTSQVADALMRVLEPRGAIVVIEAEHLCMTMRGVRKPGAKTVTSAVRGDFRDHAETRSEAMSLILGRH

SEQ ID NO: 3978 - protein, 192 aa, Actinomadura parvosata
  misc_feature (1)..(192): tr|A0A2P9IG59|A0A2P9IG59_9ACTN GTP cyclohydrolase 1 OS= Actinomadura parvosata subsp. kistnae OX=1955414 GN=fol E PE=3 SV=1
MTQHDVDLGRIEKAVREILYAIGEDPDRDGLVETPSRVARAMAEQYSGLGQTPEDVLNKVFDVDHDEMVLVRDIEVYSTCEHHLVPFHGLAHVGYIPNERGQVTGLSKLARLVDVFARRPQVQERMTSQIADALMRVLEPRGVIVVVECEHLCMTMRGVRKPGAKTVTSAVRGDFRTSDKTRSEAMALILGR

SEQ ID NO: 3979 - protein, 179 aa, Actinomadura parvosata
  misc_feature (1)..(179): tr|A0A2P9I1M5|A0A2P9I1M5_9ACTN GTP cyclohydrolase I typ e 1 OS=Actinomadura parvosata subsp. kistnae OX=1955414 GN=KIS93_01226 PE=4 SV=1
MTLEDAAAMAVAVPEEAGAADEYEACEHARRMMAALGFPLHEPGMVGTPARLVNALRELTGGLREDPGRHLEVTFPPESNDPGLIAVTNVPFISLCEHHLLPFTGAMTVAYVPAPGAPIVGLSKLARMAQGFAAMPQVQEHLGEQIAETLHTKLESLKGVFRTEPAMRENFFRLHSSGV

SEQ ID NO: 3980 - protein, 224 aa, Actinomadura pelletieri
  misc_feature (1)..(224): tr|A0A495QG84|A0A495QG84_9ACTN GTP cyclohydrolase 1 OS= Actinomadura pelletieri DSM 43383 OX=1120940 GN=folE PE =3 SV=1
MADSQHEADRWSAEEAALDAGRAFVEGEEPILQEPPGFDHARIEKAVREILFAIGEDPDRDGLRDTPARVARAYAEQFAGLRQAPEDALTTVFDADHEEMVLVKDIEVYSVCEHHLVPFHGVAHVGYTPNKKGQITGLSKLARLVDVYARRPQVQERMTSQVADALMKVLEPRGVIVVIEAEHLCMTMRGVRKPGAKTVTSAVRGDFRDHAETRAEAMSLILGR

SEQ ID NO: 3981 - protein, 201 aa, Actinomadura sp.
  misc_feature (1)..(201): tr|A0A4R4MI65|A0A4R4MI65_9ACTN GTP cyclohydrolase 1 OS= Actinomadura sp. 7K534 OX=2530366 GN=folE PE=3 SV=1
MEGEASILEEPPGFDHARIEKAVREILIGIGEDPDRDGLRETPARVARAYAEQFAGLRQTPEDALTTVFDADHEEMVLVKDIEVYSVCEHHLVPFHGVAHVGYTPNKKGQITGLSKLARLVDVYARRPQVQERLTSQVADALMRVLEPRGAIVVIEAEHLCMTMRGVRKPGAKTVTSAVRGDFRDHAETRSEAMSLILGRY

SEQ ID NO: 3982 - protein, 195 aa, Actinomadura sp.
  misc_feature (1)..(195): tr|A0A4R4XR09|A0A4R4XR09_9ACTN GTP cyclohydrolase 1 OS= Actinomadura sp. KC06 OX=2530369 GN=folE PE=3 SV=1
MLEEPPGFDHARIEKAVREILIGIGEDPERDGLRETPARVARAYAEQFAGLRQQPEDALTTVFDADHEEMVLVKDIEVYSVCEHHLVPFHGVAHVGYTPNKKGQITGLSKLARLVDVYARRPQVQERLTSQVADALMSVLEPRGAIVVIEAEHLCMTMRGVRKPGAKTVTSAVRGDFRDHAETRSEAMSLILGRY

SEQ ID NO: 3983 - protein, 195 aa, Actinomadura syzygii
  misc_feature (1)..(195): tr|A0A5D0UCB1|A0A5D0UCB1_9ACTN GTP cyclohydrolase 1 OS= Actinomadura syzygii OX=1427538 GN=folE PE=3 SV=1
MLEEPPGFDHARIEKAVREILIGIGEDPDRNGLRDTPARVARAYAEQFAGLRQTPEDALTTVFDADHEEMVLVKDIEVYSVCEHHLVPFHGVAHVGYTPNKKGQITGLSKLARLVDVYARRPQVQERLTSQVADAMMSVLEPRGAIVVIEAEHLCMTMRGVRKPGAKTVTSAVRGDFRDHAETRSEAMSLILGRY

SEQ ID NO: 3984 - protein, 195 aa, Actinomadura umbrina
  misc_feature (1)..(195): tr|A0A3D9SY64|A0A3D9SY64_9ACTN GTP cyclohydrolase 1 OS= Actinomadura umbrina OX=111806 GN=folE PE=3 SV=1
MEENPPGFDHERLERAVREILYAIGEDPDRDGLRETPARVARAYAEQFAGLRQAPEDVLNKVFEADHDEMVLVKDIEVYSSCEHHLTPFHGVAHVGYTPNKKGQITGLSKLARLVDVYARRPQVQERLTSQVADALMRILEPRGVIVVIEAEHLCMTMRGVRKPGAKTLTSAVRGDFRDCAETRAEAMSLILGRP

SEQ ID NO: 3985 - protein, 213 aa, Actinomadura umbrina
  misc_feature (1)..(213): tr|A0A3D9SUB1|A0A3D9SUB1_9ACTN GTP cyclohydrolase 1 OS= Actinomadura umbrina OX=111806 GN=folE PE=3 SV=1
MSVTEPDALTESPTPSLRYRRLAVAGRGPDVDAQAAQRAVADLLVALGRDPHGEHLADTPRRVAAAYTELLTPREFDLTTFPNEEGYDELVLAKRIPMQSLCEHHLLPFQGVAHVGYLPGERILGLSKLARVVELFARDLQVQERLTKQVADWLQEHLEPKGVGVVIEAEHLCMSLRGVRATGSATVTSALHGVLRHDARSRQEFLALTGIID

SEQ ID NO: 3986 - protein, 237 aa, Actinomadura viridilutea
  misc_feature (1)..(237): tr|A0A2P6UAX8|A0A2P6UAX8_9ACTN GTP cyclohydrolase 1 OS= Actinomadura viridilutea OX=58112 GN=folE PE=3 SV=1
MAEPYDESRDPAVELAAGSAGVAGEPDARPEAPASASSGGLAVPNGRKRVFDYARIERAVREILIGIGEDPDRDGLRETPARVARAYAEQFAGLRQDPEDALTKVFEADHDEMVLVKDIEVYSTCEHHLVPFHGLAHVGYTPNEKGQITGLSKLARLVDVYARRPQVQERLTSQIADALMRILEPRGVIVVIEAEHLCMTMRGVRKPGARTVTSAVRGAFRDRPETRAEAMGLILGR

SEQ ID NO: 3987 - protein, 215 aa, Actinomyces bovis
  misc_feature (1)..(215): tr|A0A2X0TV53|A0A2X0TV53_9ACTO GTP cyclohydrolase 1 OS= Actinomyces bovis OX=1658 GN=folE PE=3 SV=1
MSDGVAGQEPEGSRPVTAAVPTCPPRPYDAEGVRRAVRDLLVAVGEDPDRDGLRETPDRMARAYAEMFSGLAEDPGEHLERVFDVGHEEMILVRDIPLYSVCEHHLLPFHGVAHVAYIPNEEGRVTGLSKIARMVDGYARRPQVQERLTAQVADAVVEHLGARGVLAVVEAEHLCMSMRGVRKPGSNTVTSAVRGQMRKAATRSEAMSLILGRRS

SEQ ID NO: 3988 - protein, 190 aa, Actinomyces bowdenii
  misc_feature (1)..(190): tr|A0A3P1V9G0|A0A3P1V9G0_9ACTO GTP cyclohydrolase 1 OS= Actinomyces bowdenii OX=131109 GN=folE PE=3 SV=1
MGYDAEGVRRAVRDLLIAIGEDPERDGLRETPERMARAYAEMFAGLGEDPAAHLDRVFDVGHEEMVLVRDIPLYSVCEHHLLPFHGVAHVGYIPGEDGRVTGLSKLARLVEGYARRPQVQERLTAQIADAMVDRLGCRGVLAVVEAEHLCMSMRGVRKPGSNTITSAVRGIMRAAATRSEAMSLILGGRH

SEQ ID NO: 3989 - protein, 189 aa, Actinomyces coleocanis
  misc_feature (1)..(189): tr|C0VYV9|C0VYV9_9ACTO GTP cyclohydrolase 1 OS=Actinomy ces coleocanis DSM 15436 OX=525245 GN=folE PE=3 SV=1
MSFNQRAAEAAVRDLLIAVGEDPEREGLLETPARVARAWKELLSGLDEDPAKHLEKHFTVETDEMVLVRDIEFHSVCEHHLLPFHGRAHVAYIPRDNKVTGLSKLARVVEGYARRPQVQERLTTQIAQALVEKLNPQGVCVIMEAEHLCMTMRGIRKTGATTVTSKLCGVMNNSATRQEMMTLVMGGNR

SEQ ID NO: 3990 - protein, 190 aa, Actinomyces denticolens
  misc_feature (1)..(190): tr|A0A1M6BR67|A0A1M6BR67_9ACTO GTP cyclohydrolase 1 OS= Actinomyces denticolens OX=52767 GN=folE PE=3 SV=1
MTYDAEGVRRAVRDLLTAVGEDPDREGLRDTPERMARAYAELFAGLDEDPGKHVERVFEVGHHEMVLVRDIPMYSVCEHHLLPFHGVAHVAYLPGERGRVTGLSKLARLVEGYARRPQVQERLTAQIADALVERLECSGVLVVVEAEHLCMSMRGVRKPGSNTVTSAVRGQLRNAATRAEAMSLIQGGRH

SEQ ID NO: 3991 - protein, 189 aa, Actinomyces europaeus
  misc_feature (1)..(189): tr|S2WER3|S2WER3_9ACTO GTP cyclohydrolase 1 OS=Actinomy ces europaeus ACS-120-V-Col10b OX=883069 GN=folE PE=3 S V=1
MAYDAAGVERAVRDLLVAIGEDPSREGLVDTPARMSRAWAEIVGGLEEDPSVHLQTHFRVEHEEMVLVRDIDFYSVCEHHLLPFYGKAHVAYIPANSTVTGLSKLARLVEGYARRPQVQERLTSQIADALVTKLKPQGACVIIEAEHMCMTMRGVRKPGSWTVTSALRGVMNSPATRQEIMTLVMEGRK

SEQ ID NO: 3992 - protein, 189 aa, Actinomyces europaeus
  misc_feature (1)..(189): tr|A0A2N6UVI6|A0A2N6UVI6_9ACTO GTP cyclohydrolase 1 OS= Actinomyces europaeus OX=66228 GN=folE PE=3 SV=1
MTYDAAGVERAVRDLLVAIGEDPSREGLIDTPARMSRAWAEIVGGLEEDPSVHLETHFQVEHEEMVLVRDIDFYSVCEHHLLPFYGKAHVAYIPANNTVTGLSKLARLVEGYARRPQVQERLTSQIADALVNKLKPQGACVIIEAEHMCMTMRGVRKPGSWTVTSALRGVMNSPATRQEIMTLVMEGRK

SEQ ID NO: 3993 - protein, 190 aa, Actinomyces gaoshouyii
  misc_feature (1)..(190): tr|A0A1V0KHK4|A0A1V0KHK4_9ACTO GTP cyclohydrolase 1 OS= Actinomyces gaoshouyii OX=1960083 GN=folE PE=3 SV=1
MTYDAEGVRRAVRDLLTAVGEDPDREGLRETPERMARAYAELFAGLDEDPGKHVERVFEVGHHEMVLVRDIPMYSVCEHHLLPFHGVAHVAYLPGGRGRVTGLSKLARLVEGYARRPQVQERLTAQIADALVERLECSGVLVVVEAEHLCMSMRGVRKPGANTVTSAVRGQLRNAATRAEAMSLIQGGRH

SEQ ID NO: 3994 - protein, 190 aa, Actinomyces glycerinitolerans
  misc_feature (1)..(190): tr|A0A1M4RZM1|A0A1M4RZM1_9ACTO GTP cyclohydrolase 1 OS= Actinomyces glycerinitolerans OX=1892869 GN=folE PE=3 S V=1
MSYDADGVRHAIRELLVAVGEDPDREGLRGTPDRIARALAEMFSGLEDDPARHLETVFDADHQEMVLVRDIPLYSVCEHHLLPFHGVAHVGYIPGEDGRVTGLSKLARLVEGYARRPQVQERLTSQIADAMVERLGVRGVIVVIEAEHLCMSMRGVHKPGANTVTSAVRGVMHNAATRSEAMSLVLGRRA

SEQ ID NO: 3995 - protein, 225 aa, Actinomyces graevenitzii
  misc_feature (1)..(225): tr|U1PNI8|U1PNI8_9ACTO GTP cyclohydrolase 1 OS=Actinomy ces graevenitzii F0530 OX=1321817 GN=folE PE=3 SV=1
MTSEVTGAETGQTQAAPEGQAVPEAQATPSALAQTRPYDAEGVRKAVYDLLVAIGEDPERDGLRETPQRMARAYAELFAGLSEDPAHHLDKVFDVGHEEMVLVRDIPMYSVCEHHLLPFHGVAHVGYIPGTDGHVTGLSKLARLVEGYARRPQVQERLTAQVADAMVERLHCRGVLVVVEAEHLCMSMRGVRKPGSNTVTSAVRGIMRNPATRAEAMSLILGRRG

SEQ ID NO: 3996 - protein, 194 aa, Actinomyces graevenitzii
  misc_feature (1)..(194): tr|A0A2N6V1L3|A0A2N6V1L3_9ACTO GTP cyclohydrolase 1 OS= Actinomyces graevenitzii OX=55565 GN=folE PE=3 SV=1
MAQTRPYDAEGVRKAVYDLLVAIGEDPERDGLRETPQRMARAYAELFAGLSEDPAHHLDKVFDVGHDEMVLVRDIPMYSVCEHHLLPFHGVAHVGYIPGTDGHVTGLSKLARLVEGYARRPQVQERLTAQVADAMVERLHCRGVLVVVEAEHLCMSMRGVRKPGSNTVTSAVRGIMRNPATRAEAMSLILGRRG

SEQ ID NO: 3997 - protein, 188 aa, Actinomyces hominis
  misc_feature (1)..(188): tr|A0A2N6UQW7|A0A2N6UQW7_9ACTO GTP cyclohydrolase 1 OS= Actinomyces hominis OX=595468 GN=folE PE=3 SV=1
MYDEAGVRTAVTDLLRALGEDPTREGLRETPARMARAWKEMVSGLGQDPSKHLDKLFDVQTEEMVLVRDIKFYSVCEHHLLPFFGRAHVAYIPANNRVTGLSKLARVVEGFARRPQVQERLTTQIADALVEKLEPQGATVIIEAEHLCMTMRGVRKPGASTVTSALRGVMNNAATRQEMMTLVMGGRR

SEQ ID NO: 3998 - protein, 189 aa, Actinomyces hongkongensis
  misc_feature (1)..(189): tr|A0A1D8B3W3|A0A1D8B3W3_9ACTO GTP cyclohydrolase 1 OS= Actinomyces hongkongensis OX=178339 GN=folE PE=3 SV=1
MTFDADAVERACRDLLVAVGEDPGREGLAGTPGRMARAWRELLAGVDLDPRDYLRTQFHAGTDELVLVRDIVFHSVCEHHLLPFSGRAHVGYIPRGGVVTGLSKLARLVEGYARRPQVQERLTAQIADALNEVLRPQGVIVVIEAEHMCMSMRGVRKPGSSTVTSALRGIMNDGTTRAEMMALVLGGRR

SEQ ID NO: 3999 - protein, 189 aa, Actinomyces hordeovulneris
  misc_feature (1)..(189): tr|A0A1Q5PYE8|A0A1Q5PYE8_9ACTO GTP cyclohydrolase 1 OS= Actinomyces hordeovulneris OX=52770 GN=folE PE=3 SV=1
MSPYDAVAVERAVRDLLRAVGEDPDRDGLRETPARMARAYQELFSGLGQDPAAHLEAVFDIGHEEMILVRDIPFYSVCEHHLLPFHGVAHVGYIPGADGRVTGLSKLARLVEGFARRPQVQERITSQVADALVERLAPRGAITVLSAEHLCMSMRGVAKPGSRTITSAVRGIMRNPATRAEAMGLILGQ

SEQ ID NO: 4000 - protein, 215 aa, Actinomyces israelii; identical to SEQ ID NO: 3987
  misc_feature (1)..(215): tr|A0A3S4VNI7|A0A3S4VNI7_9ACTO GTP cyclohydrolase 1 OS= Actinomyces israelii OX=1659 GN=folE PE=3 SV=1

SEQ ID NO: 4001 - protein, 190 aa, Actinomyces johnsonii
  misc_feature (1)..(190): tr|A0A507ZZM9|A0A507ZZM9_9ACTO GTP cyclohydrolase 1 OS= Actinomyces johnsonii OX=544581 GN=folE PE=3 SV=1
MSYDAEGVRRAVRELLVAIGEDPDRDGLRDTPERMARAYAEMFSGLGQDPAEHVERVFDVGHEEMVLVRDIPMYSVCEHHLLPFHGAAHVGYIPSADGRVTGLSKVARLVDGYARRPQVQERLTRQIADALVERLECRGVLVVVEAEHLCMSMRGVRKPGSNTVTSAVRGIMRNAATRSEAMSLVLGRRS

SEQ ID NO: 4002 - protein, 190 aa, Actinomyces johnsonii; identical to SEQ ID NO: 4001
  misc_feature (1)..(190): tr|U1S2B1|U1S2B1_9ACTO GTP cyclohydrolase 1 OS=Actinomy ces johnsonii F0542 OX=1321818 GN=folE PE=3 SV=1

SEQ ID NO: 4003 - protein, 194 aa, Actinomyces liubingyangii
  misc_feature (1)..(194): tr|A0A1Q5PLN5|A0A1Q5PLN5_9ACTO GTP cyclohydrolase 1 OS= Actinomyces liubingyangii OX=1921764 GN=folE PE=3 SV=1
MTKQPVDLEAAAQAVRQLLVAIGEDPDREGLADTPMRVAKSFEEMTSGLHIDPAKHLETRFNIGHDEVVLVRDITFHSLCEHHLLPFFGKAHVAYLPADGQVTGLSKLARVVDGYARRPQVQERLTMQIADAIEEKLSPRGCAVVIEAEHLCMTVRGVAKPGASTVTSALRGAMRNNPATRAEVLALIAPAGGR

SEQ ID NO: 4004 - protein, 197 aa, Actinomyces marimammalium
  misc_feature (1)..(197): tr|A0A1Q5PME4|A0A1Q5PME4_9ACTO GTP cyclohydrolase 1 OS= Actinomyces marimammalium OX=156892 GN=folE PE=3 SV=1
MSEAIDLKSVEQAVTDLLKALGEDPTRPGLVDTPKRVAKAWQEMLNGQAAEPVQQLETVFESHHSDLVIVRDIGFESVCEHHLLPFKGVAHIGYIPRDGKVVGLSKLARLVDGYAHRLQLQEKLTNQIADALQEALDPIGVGVVMEAEHTCMSVRGVRQRLADTVTIAGRGECAPGGSHRADFLALLGNPHVDGDHE
